United States Patent Application Publication US 2023/0272434 A1 - sequence listing, part 14

SEQ ID NO: 23141 - protein, 1259 aa, Hemaris fuciformis
MNRFIWRTYLIITRCETVQMNNYLEPLHLQFIEKYPEMQVTRQRIGDQRRAIIRKNLLPQNILEEIRHEVGKTIEPVINRADHATLTGRPNIELHFSQSQSSNTRMKWSAEINDEIILCYFEVTDLEKNKTAYRKKLYDLFIEKHPHLSHLSEQRIADQRRLIFNNKKLECRIKELKTQMEFKLNRRINLIQSREDQDVNNLEITPIISPIVRDPENSIEIVPMQSFSHIDTSTHLPIPTQSNINNDNNTAIEIHKNEIDFNLIETEFNRAVSLFKCIDPEERPYIPKQHTSRKFSQIVQYINKTVVPKHLNENLDFCTLHTIIYSAAYAAASCNGTKFNLNVTCNNMNRKPHWQIRIERRIEKYRLEIGRLTQYILGNRTHKILKTVEEIKTKYKTHSQHEEPNREPQHFLDTIKQKLNAAATRLKRYVTCTKRKQQNKTFWKNEKLFYRSLGKQDNTSHSSKLPSPQHLQQFWADIWENPVQHNINAVWLQDVTDTRHIDQMNSDSISVDRLQNIINRTHNWKAPGTDKIHNYWYKKLTCTHPFLHKFITQFIQSPHTLPTFVTHGITYMLSKGSDHENPANYRPITCLQTIYKIITGCISEVIYQHLDDHNVVSEQQKGCKKNSQGCKEQLTIDAVIMKQAQTRNRNLHTMFIDYKKAFDSVPHSWLIYVLELYKIHPQIITFLKQTMSNWQTSLRLNLENKTISTNTIKIQRGIFQGDALSPLWFCIALNPLSKLLNNTNSGFKLKYNDTHHSISHLMFMDDIKIYATNIVELTKLADITELFSTDIQMQFGVDKCKIQSINRGKIEKNTYTLETGEVIEPMDEHSTYKYLGFHQAKIILQKQAKLEITQKFKLRLNQILRTQLNSRNTIKAINSYAVPILTYSFGIIKWSQTDLSKLQRTINTLMTKHRKHHPKSCTQRLTISRRNGGRGLIDIGNLHANLITKLREYFYVKAENTELHRYIVNIDTKMTPLNLHDRTTQPNQNIVTVQNKLDLWSQKSLHGRHIADLSQTHVDKEASNEWLRRGQLFPETEAFIAAIQDQVINTRNYQKYIIHTHNLPTDLCRRCHSNSETIQHIIGACKSIAQTDYRHRHDQVASIIHQHLALKYSLITKKVPFYKYAPATILESDNYKLYWDRTIITDKTIHFNRPDILLHDKNNSTIYLIDIAIPNTHNLVSTCSEKIAKYVDLSIELKNQWRAQSVKTIPIVLSSTGVIPHTLHISLQTLGIPKSSYILLQKATILNTCRIVRKFLSLD

SEQ ID NO: 23142 - protein, 1388 aa, Hemaris fuciformis
MESQTKRYSLRPLPGGRRGASGANAGCHSLRTVGDGGLNRRVPLEKYTTAEPSFSPSSSPSPSSDRSLFSNIPSPSSTNSLYRSANSSPSSSTYSSITTRSTTVVQEAYATKPASSAVPCRVRKKWTESMNRFIWRTYLIITRCETVQMNNYLEPLHLQFIEKYPEMQVTRQRIGDQRRAIIRKNLLPQNILEEIRHEVGKTIEPVINRADHATLTGRPNIELHFSQSQSSNTRMKWSAEINDEIILCYFEVTDLEKNKTAYRKKLYDLFIEKHPHLSHLSEQRIADQRRLIFNNKKLECRITELKTQMEFKLNRRINLIQSREDQDVNNLEITPIISPIVRDPENSIEIVPMQSFSHIDTSTHLPIPTQSNINNDNNTAIEIHKNEIDFNLIETEFNRAVSLFKCIDPEERPYIPKQHTSRKFSQIVQYINKTLVPKHLNENLDFCTLHTIIYSAAYAAASCNGTKFNLNITCNNMNRKPHWQIRIERRIEKYRLEIGRLTQYILGNRTHKILKTVEEIKTKYKTHSQHEEPNREPQHFLDTIKQKLNAAATRLKRYVTCTKRKQQNKTFWKNEKLFYRSLGKQDNTSHSSKLPSPQHLQQFWADIWENPVQHNINAVWLQDVTDTRHIDQMNSDSISVDRLQNIINRTHNWKAPGTDKIHNYWYKKLTCTHPFLHKFITQFIQSPHTLPTFVTHGITYMLSKGSDHENPANYRPITCLQTIYKIITGCISEVIYQHLDDHNVVSEQQKGCKKNSQGCKEQLTIDAVIMKQAQTRNRNLHTMFIDYKKAFDSVPHSWLIYVLELYKIHPQIITFLKQTMSNWQTSLRLNLENKTISTNTIKIQRGIFQGDALSPLWFCIALNPLSKLLNNTNSGFKLKYNDTHHSISHLMFMDDIKIYATNIVELTKLADITELFSTDIQMQFGVDKCKIQSINRGKIEKNTYTLETGEVIEPMDEHSTYKYLGFHQAKIILQKQAKLEITQKFKLRLNQILRTQLNSRNTIKAINSYAVPILTYSFGIIKWSQTDLSKLQRTINTLMTKHRKHHPKSCTQRLTISRRNGGRGLIDIGNLHANLITKLREYFYVKAENTELHRYIVNIDTKMTPLNLHDRTTQPNQNIVTVQNKLDLWSQKSLHGRHIADLSQTHVDKEASNEWLRRGQLFPETEAFIAAIQDQVINTRNYQKYIIHTHNLPTDLCRRCHSNSETIQHIIGACKSIAQTDYRHRHDQVASIIHQHLALKYSLITKKVPFYKYAPATILESDNYKLYWDRTIITDKTIHFNRPDILLHDKNNSTIYLIDIAIPNTHNLVSTCSEKIAKYVDLSIELKNQWRAQSVKTIPIVLSSTGVIPHTLHTSLQTLGIPKSSYILLQKATILNTCRIVRKFLSLD

SEQ ID NO: 23143 - protein, 1362 aa, Hemaris fuciformis
MESQTKRYSLRPLPGGRRGASGANAGCHSLRTVGDGGLNRRVPLEKYTTAEPSFSPSSSPSPSSDRSLFSNIPSPSSTNSLYRSANSSPSSSTYSSITTRSTTVVQEAYATKPASSAVPCRVRKKWTESMNRFIWRTYLIITRCETVQMNNYLEPLHLQFIEKYPEMQVTRQRIGDQRRAIIRKNLLPQNILEEIRHEVGKTIEPVINRADHATLTGRPNIELHFSQSQSSNTRMKWSAEINDEIILCYFEVTDLEKNKTAYRKKLYDLFIEKHPHLSHLSEQRIADQRRLIFNNKKLECRIKELKTQMEFKLNRRINLIQSREDQDVNNLEITPIISPIVRDPENSIEIVPMQSFSHIDTSTHLPIPTQSNINNDNNTAIEIHKNEIDFNLIETEFNRAVSLFKCIDPEERPYIPKQHTSRKFSQIVQYINKTLVPKHLNENLDFCTLHTIIYSAAYAAASCNGTKFNLNVTCNNMNRKPHWQIRIERRIEKYRLEIGRLTQYILGNRTHKILKTVEEIKTKYKTHSQHEEPNREPQHFLDTIKQKLNAAATRLKRYVTCTKRKQQNKTFWKNEKLFYRSLGKQDNTSHSSKLPSPQHLQQFWADIWENPVQHNINAVWLQDVTDTRHIDQMNSDSISVDRLQNIINRTHNWKAPGTDKIHNYWYKKLTCTHPFLHKFITQFIQSPHTLPTFVTHGITYMLSKGSDHENPANYRPITCLQTIYKIITGCISEVIYQHLDDHNVVSEQQKGCKKNSQGCKEQLTIDAVIMKQAQTRNRNLHTMFIDYKKAFDSVPHSWLIYVLELYKIHPQIITFLKQTMSNWQTSLRLNLENKTISTNTIKIQRGIFQGDALSPLWFCIALNPLSKLLNNTNSGFKLKYNDTHHSISHLMFMDDIKIYATNIVELTKLADITELFSTDIQMQFGVDKCKIQSINRGKIEKNTYTLETGEVIEPMDEHSTYKYLGFHQAKIILQKQAKLEITQKFKLRLNQILRTQLNSRNTIKAINSYAVPILTYSFGIIKWSQTDLSKLQRTINTLMTKHRKHHPKSCTQRLTISRRNGGRGLIDIGNLHANLITKLREYFYVKAENTELHRYIVNIDTKMTPLNLHDRTTQPNQNIVTVQNKLDLWSQKSLHGRHIADLSQTHVDKEASNEWLRRGQLFPETEAFIAAIQDQVINTRNYQKYIIHTHNLPTDLCRRCHSNSETIQHIIGACKSIAQTDYRHRHDQVASIIHQHLALKYSLITKKVPFYKYAPATILESDNYKLYWDRTIITDKTIHFNRPDILLHDKNNSTIYLIDIAIPNTHNLVSTCSEKIAKYVDLSIELKNQWRAQSVKTIPIVLSSTGVIPTHTTHQPPDSWYS

SEQ ID NO: 23144 - protein, 1261 aa, Hemaris fuciformis
MNRFIWRTYLIITRCETVQMNNYLEPLHLQFIEKYPEMQVTRQRIGDQRRAIIRKNLLPQNILEEIRHEVGKTIEPVINRADHATLTGRPNIELHFSQSQSSNTRMKWSAELTINDEIILCYFEVTDLEKNKTAYRKKLYDLFIEKHPHLSHLSEQRIADQRRLIFNNKKLECRIKELKTQMEFKLNRRINLIQSREDQDVNNLEITPIISPIVRDPENSIEIVPMQSFSHIDTSTHLPIPTQSNINNDNNTAIEIHKNEIDFNLIETEFNRAVSLFKCIDPEERPYIPKQHTSRKFSQIVQYINKTLVPKHLNENLDFCTLHTIIYSAAYAAASCNGTKFNLNVTCNNMNRKPHWQIRIERRIEKYRLEIGRLTQYILGNRTHKILKTVEEIKTKYKTHSQHEEPNREPQHFLDTIKQKLNAAATRLKRYVTCTKRKQQNKTFWKNEKLFYRSLGKQDNTSHSSKLPSPQHLQQFWADIWENPVQHNINAVWLQDVTDTRHIDQMNSDSISVDRLQNIINRTHNWKAPGTDKIHNYWYKKLTCTHPFLHKFITQFIQSPHTLPTFVTHGITYMLSKGSDHENPANYRPITCLQTIYKIITGCISEVIYQHLDDHNVVSEQQKGCKKNSQGCKEQLTIDAVIMKQAQTRNRNLHTMFIDYKKAFDSVPHSWLIYVLELYKIHPQIITFLKQTMSNWQTSLRLNLENKTISTNTIKIQRGIFQGDALSPLWFCIALNPLSKLINNTNSGFKLKYNDTHHSISHLMFMDDIKIYATNIVELTKLADITELFSTDIQMQFGVDKCKIQSINRGKIEKNTYTLETGEVIEPMDEHSTYKYLGFHQAKIILQKQAKLEITQKFKLRLNQILRTQLNSRNTIKAINSYAVPILTYSFGIIKWSQTDLSKLQRTINTLMTKHRKHHPKSCTQRLTISRRNGGRGLIDIRNLHANLITKLREYFYVKAENTELHRYIVDIDNKMTPLNLHDRTTQPNQNIITIQNKLDLWSQKSLHGRHIADLSQTHVDKEASNEWLRRGQLFPETEAFIAAIQDQVMNTRNYQKHIIHTHNLPTDLCRRCHSNSETIQHIIGACKSIAQTDYRHRHDQVASIIHQHLAFKYSLIANKIPFYKYTPATILESDSYKLYWDRTIITDKTIHFNRPDILLHDKNNSTIFLIDIAIPNTHNLVSTYSDKISKYVDLSIELKNQWRVQSVKTIPIVLSSTGVIPHTLHTSLQSLGIPKASYILLQKATILNTCRIVRNFLSID

SEQ ID NO: 23145 - protein, 1388 aa, Hemaris fuciformis
MESQNKRYSLRPLPGGRRGASGANAGCHSLRTVGDGGLNRRVPLEKYTTAEPSFSPSSSPSPSSDRSLFSNIPSPSSTNSLYRSANSSPSSSTYSSITTRSTTVVQEAYDTKPASSAVPCRVRKKWTESMNRFIWRTYLIITRCETVQMNNYLEPLHLQFIEKYPEMQVTRQRIGDQRRAIIRKNLLPQNILEEIRYEVGNTIEPVINRADHPTLTGRPNIELHFPQSQSSNTRMKWSAEINDEIILCYFEVTDLEKNKTAYRKKLYDRFIEKHPHLSHLSEQRIADQRRLIFNNKKLECRIKELKTQMEFKLNRRINLIQSREDQDVNNLEITPIISPIVRDPENSIEIVPMQSFSHIDTLTHLSMPTQSNINEENNTTIEIHKNEIDFNLIETEFNRAVSLFKCIDPEERPYIPKQHTSRKFSQIVQYMNKTLVPKHLNEDLDFCTLHTIIYSAAYAAASCNGTKFNLNVTCNNMNRKPHWQIRIERRIEKYRLEIGRLTQYILGNRTHKILKTVEEIKTKYKTHSQHEEPNREPQHFLDTIKQKLNAAATRLKRYVTCTKRKQQNKTFWKNEKLFYRSLGKQDNTSHSSKLPSPQHLQQFWADIWENPVQHNINAVWLQDVTDTRHIDQMTSDSISADRLQNIINRTHNWKAPGTDKIHNYWYKKLTCTHPFLHKFITQFIQSPHTLPTFVTHGITYMLSKGSDHENPANYRPITCLQTIYKIITGCISEVIYQHLDDHNVVSEQQKGCKKNSQGCKEQLTIDAVIMKQAQTRNRNLHTMFIDYKKAFDSVPHSWLIYVLELYKIHPQIITFLKQTMSNWQTSLRLNLENKTISTNTIKIQRGIFQGDALSPLWFCIALNPLSKLLNNTNSGFKLKYNDTHHSISHLMFMDDIKIYATNIVELTKLADITELFSTDIQMQFGVDKCKIQSINRGKIEKNTYTLETGEVIEPMDEHSTYIYLGFHQAKIILQKQAKLEITQKFKLRLNQILRTQLNSRNTIKAINSYAVPILTYSFGIIKWSQTDLSKLQRTINTLMTKHRKHHPKSCTQRLTISRRNGGRGLIDIGNLHANLITKLREYFYVKAENTELHRYIVNIDTKMTPLNLHDRTTQPNQNIVTVQNKLDLWSQKSLHGRHIADLSQTHVDKEASNEWLRRGQLFPETEAFIAAIQDQVINTRNYQKYIIHTHNLPTDLCRRCHSNSETIQHIIGACKSIAQTDYRHRHDQVASIIHQHLALKYSLITKKVPFYKYTPATILESDNYKLYWDRTIITDKTIHFNRPDILLHDKNNSTIYLIDIAIPNTHNLVSTCSEKIAKYVDLSIELKNQWRAQSVKTIPIVLSSTGVIPHTLHTSLQTLGIPKSSYILLQKATILNTCRIVRKFLSLD

SEQ ID NO: 23146 - protein, 1387 aa, Hemaris fuciformis
MESQTKRYSLRPLPGGRRGASGANAGCHSIRTVGDGGLNRRVPLEKCTTAEPTSFSPSSSPPSDRSLFSNIPSPSSTNSLYRSPNSSPSSSTYSSRTTRSATVVQEAHATKPAPSAVPSRVRKKWTDAMNRFIWRTYLIITRCETVQMNNYLEPLHLHFIEKYPEMQVTRQRIGDQRRAIIRNSLLPENILEEIRHEVGNTIEPVINRADHPTLTDRLNIELHLPQSQSSNTRMKWSAEINDEIILCYFEVTDLEKNKTAYRKKLHDLFVKKHPDLSHLSEQRIADQRRLLFNNKKLECRIRELKTQMELKLNRQTNLLQSRENQYVNNLEITPIISSVVRDPENLIETVPLQSFSHIDSPIHQPIPTHSNMNDENNATIERHKNEIDFNLIETEFNRALSLFKCIDPEERPYIPKQHTSRRFSQIVQYLNKTLVPKHLNEDLDFCTLHTIIYSAAYAAASCNGTKFNLNVTVNNLNRKPHWQIRIERRIEKYRLEIGRLTQYILGNRTHKILKTVEEIKVKYKTHSQHEEPNREPQHFLDTIKQKLNAAATRLKRYVTCTKRKQQNKTFWKNEKLFYRSLGKQDNTSHSSKLPSPQHLQQFWADIWENPVQHNINAVWLQDVTDTRHIDQMNSDSITADRLQNIINRTHNWKAPGTDKIHNYWYKKLTCTHSSLHKFITQFIQSPHTLPTFVTHGITYMLSKGSDHKNPANYRPITCLQTIYKIITGCISEVIYQHLDNHNVVSEEQKGCKKNSQGCKEQLTIDAVIMKQAQTRNRNLHTMFIDYKKAFDSVPHSWLIYVLELYKIHPQIITFLKLTMSNWQTSLRLNLENKTISTNPIKIQRGIFQGDALSPLWFCIALNPLSKLLNNTYSGFKLKYNDTHHSISHLMFMDDIKIYATNIEELTKLADITELFSIDIQMQFGVDKCKIQSINRGKIENNSYTLETGEVIEPMDEHSTYKYLGFHQAKIILQKQAKSEITQKFKLRLNQILRTQLNSRNTIKAINSYAVPILTYSFGIIKWSQTDLSKLQRTINTLMTKHRKHHPKSCTQRLTISRRNGGRGLIDIRNLHANLITKLREYFYVKAENTELHRYIVDIDNKMTPLNLHDRTTQPNQNIITIQNKLDLWSQKSLHGRHIADLSQTHVDKEASNEWLRRGQLFPETEAFIAAIQDQVMNTRNYQKHIIHTHNLPTDLCRRCHSNSETIQHIIGACKSIAQTDYRHRHDQVASIIHQHLAFKYSLIANKIPFYKYTPATILESDSYKLYWDRTIITDKTIHFNRPDILLHDKNNSTIFLIDIAIPNTHNLVSTYSDKISKYVDLSIELKNQWRVQSVKTIPIVLSSTGVIPHTLHTSLQSLGIPKASYILLQKATILNTCRIVRKFLSID

SEQ ID NO: 23147 - protein, 1378 aa, Deilephila porcellus
MESQTKRYSLRSLPGGRRGASGADAGCHSMRTVGDGGLNRRVPLDKYTTAEPPSSSSSPRSSTSPSNRSLFSNIPSPTSSNSLFRSPNSSPSSTSSSRTTRPTNAVQEALAICPAPIAGPSRARKKWTYDMNRFIWRTYLIITKCETTQLNNYLEPLHLQFINKYPEMQVSRQRIGDQRRAILRSKLLSQDILDAIRCEVEEQIQTDTHTIDNSLHIHNLNPPARSPPMPRTSTRMKWSKEINEDIVLCYFEVTEIERDLTAYRKKLYELFVEKHPHLSHLTEQRIADQRRLLFNKKNFENRIKELKIQVELKLAGRKNTLLETTPQSLSTDTAHVTAIDTLPVQPDLQTDTQLLIPSEIHLVNNNSNVIVRNEIDVSMIEREFDNAILRFHNTDPEERPYIPKQHSSRKFSQIVQYINSTLLPKHLNNDLDFTSLHAIIYSAAYAAATCNGTKFNLNRTSIGERKPYWQTRIERRIEKYRLEIGRLTQYTLGNRTQKILKTVEEIKTKYKIHSRHEEPNTEPQHFLDTLKQKLNVASNRLKRYVTWSKRKQQNKIFSNNEKLFYRTLGKNHQNNPHNSSKIPSSQDLRQFWANIWENPAQHNINADWLQGINDTTHINQMDFDSISVDRLTSIINRTHNWKAPGTDKIHNYWYKKLTCTHPLIQYHIMQFIQFPHTIPSFITNGVTYMLSKGPDQENPANYRPITCLQTIYKIITGCISEIIYEHIEDENILAEQQKGCRKNSQGCKEQLTIDAVVMKQAHAKNRNIHTAYIDYKKAFDSVPHSWLIYALEHYKVHPKVIAFLKAAMAQWKTKLKLKQHDSTITTDMIKIQRGIFQGDALSPLWFCIALNPLSELLNNTKSGFKLNDNNSQYTISHLMYMDDIKIYATNNKELNKLVDITHSFSTDIQMQFGVDKCRIQSIIRGKTQNNSYPLNTGELIESMDENTTYKYLGFHQSKVILQKQAKLEMTQKFKLRLNQILRSQLNSRNTIKAINTYAVPILTYSFGIINWSKSDLNKLQRIINTLLTKHRKHHPKSCTQRLTLSRRNGGRGLIHISNLHNNLITKLRHYFHSKAESVELHKYIAEIDKKLTPLNLHDRTIQPNQHIITIQNKLDTWSQKSLHGRHFADLSQIHVDKEASNEWLRRGELFPETEAFMAAIQDQVINTRNYQKHIIRRHTLPTDICRRCYSSSETIQHITGACKSIAQTDYKHRHDQVASIIHQSLAFKYSLITHKVPYYKYKPASILESPQFKLYWDRTVITDKTIHFNRPDILLHDKSNSIVYLIDITIPNTHNLASTHSEKIAKYTDLSIELKSQWRVQTVKTIPIVLSSTGVIPHTLHTSLKSLGMHKLSFILLQKATILNTCRIVRKFLSIDQS

SEQ ID NO: 23148 - protein, 1387 aa, Hemaris fuciformis
MESQTKRYSLRPLPGGRRGASGANAGCHSIRTVGDGGLNRRVPLEKCTTAEPTSFSPSSSPPSDRSLFSNIPSPSSTNSLYRSPNSSPSSSTYSSRTTRSATVVQEAHATKPAPSAVPSRVRKKWTDAMNRFIWRTYLIITRCETVQMNNYLEPLHLHFIEKYPEMQVTRQRIGDQRRAIIRNSLLPENILEEIRHEVGNTIEPVINRADHPTLTDRLNIELHLPQSQSSNTRMKWSAEINDEIILCYFEVTDLEKNKTAYRKKLHDLFVKKHPDLSHLSEQRIADQRRLLFNNKKLECRIRELKTQMELKLNRQTNLLQSRENQYVNNLEITPIISSVVRDPENLIETVPLQSFSHIDSPIHQPIPTHSNMNDENNATIERHKNEIDFNLIETEFNRALSLFKCIDPEERPYIPKQHTSRRFSQIVQYLNKTLVPKHLNEDLDFCTLHTIIYSAAYAAASCNGTKFNLNVTVNNLNRKPHWQIRIERRIEKYRLEIGRLTQYILGNRTHKILKTVEEIKVKYKTHSQHEEPNREPQHFLDTIKQKLNAAATRLKRYVTCTKRKQQNKTFWKNEKLFYRSLGKQDNTSHSSKLPSPQHLQQFWADIWENPVQHNINAVWLQDVTDTRHIDQMNSDSITADRLQNIINRTHNWKAPGTDKIHNYWYKKLTCTHSSLHKFITQFIQSPHTLPTFVTHGITYMLSKGSDHKNPANYRPITCLQTIYKIITGCISEVIYQHLDNHNVVSEEQKGCKKNSQGCKEQLTIDAVIMKQAQTRNRNLHTMFIDYKKAFDSVPHSWLIYVLELYKIHPQIITFLKLTMSNWQTSLRLNLENKTISTNPIKIQRGIFQGDALSPLWFCIALNPLSKLLNNTYSGFKLKYNDTHHSISHLMFMDDIKIYATNIEELTKLADITELFSIDIQMQFGVDKCKIQSINRGKIENNSYTLETGEVIEPMDEHSTYKYLGFHQAKIILQKQAKSEITQKFKLRLNQILRTQLNSRNTIKAINSYAVPILTYSFGIIKWSQTDLSKLQRTINTLMTKHRKHHPKSCTQRLTISRRNGGRGLIDIRNLHANLITKLREYFYVKAENTELHRYIVDIDNKMTPLNLHDRTTQPNQNIITIQNKLDLWSQKSLHGRHIADLSQTHVDKEASNEWLRRGQLFPETEAFTAAIQDQVMNTRNYQKHIIHTHNLPTDLCRRCHSNSETIQHIIGACKSIAQTDYRHRHDQVASIIHQHLAFKYSLIANKIPFYKYTPATILESDSYKLYWDRTIITDKTIHFNRPDILLHDKNNSTIFLIDIAIPNTHNLVSTYSDKISKYVDLSIELKNQWRVQSVKTIPIVLSSTGVIPHTLHTSLQSLGIPKASYILLQKATILNTCRIVRKFLSID

SEQ ID NO: 23149 - protein, 1378 aa, Mimas tiliae
MERQSKRYSLRPLPGGRRGASGADAGCHSMRTVGDGGLSRRVPLEKYTTADPSTSSPSTSPSHRSLFSNIPSPSSTHSLFRSPHSSPSSNYSPKSTRSTSVVQEAFATNPTPTAGPSGARKKWSEDMNRFIWRTYLTITKCETTQLQNYLESLHHQFNIHYPEMQATRQRIGDQRRAILRRKLLSQDILDQIRIEVKQQIQTPVRSEDNYSPPNIQIHSAPSLHTPLTNTRMKWTNDINDEIILCYFKVTDLEMNKTAYRTKLHELFIEKHPHLSHLTEQRIADQRRLIFNNKSLQGRIRQLKRRVELELNSTSIDNLTQTCTEQIFPTTESPQEPPFEVITITTDSILTQSHLQTNTVSTNTLPRIQGNKIDFNKIETEFNRAIHQFTDIDPEKRPYIPKQKSSRKFSQIVHYLNATILPKHLNDDLDFISLHTLIYAAAFTAAVCNGTRFNLDRNIHNGGKKMPNWQRRISDRIKQYRLEIGRLSQYISGNRTQRIIKTVEEIKIKYKSHSQYEESNTEPQHFLDTIKQKLNATATRLKRYLTCTKRKQQNSTFENNEKLFYRDLGKSKEHNTADSSQFPSPEHLHQFWANLWENSTQHNVNADWLNKVPDTTHIEHMGFENLSLDTLRKIINRTHNWKAPGTDNIHNYWLKKLTCTHPLIHNHITQFIQSPHTVPAFITHGITYMLSKGSDPKDPANYRPITCLQTMYKIITGCISEVIYQHLDEQNILAEQQKGCKRNSQGCKEQLIIDSVIMKQAQTKNRNIHTMYVDYKKAFDSVPHSWLIHVLVHYKIHPKIIAFLKTTMAQWTTKLRLNQNNTSITTDPIKIKRGIFQGDALSPLWFCVALNPLSELLNNTYAGFKLKHNNTQHVISHLMYMDDIKIFATNNTELNKLADIMQSFSTDIQMQFGVDKCKIHSINRGKTQINTYTLETGEQIEPMNELATYKYLGFHQSKYILQKQAKIEMTKKFKLRLNQILRSTLNSRNTTKAINTYAIPILTYSFGIISWTQTDLIKLQRMINTHMTSHRKHHPKSCMQRLTLSRRIGGRGLIDIRNLHNNIITKLRHYFHSKSEHTQLHKYIVNIDKKFTPLNLHDINPQTNQHIATVQQKVDLWSQKSLHGRHLADLSQTHVDKEASNEWLRRGELFPETEAFMSAIQDQVINTRNYQKHITRIPNLPTDQCRRCYSSSETIQHITGACKSITQTDYKHRHDQVAAIIHQHLAFKYSLITQKSPYYKYKPTTILESAHYKLYWDRTIITDKTIHYNRPDILFYDKSNSTVYLIDIAIPNTNNLASSYTEKIAKYMDLSIELKNQWRVNTVKTIPVILSSTGVIPHTLHTSLQSLDMHKLSYTLLQKATILNTCRIVRKFLSIDLTY

SEQ ID NO: 23150 - protein, 717 aa, Nymphalis urticae
MNFKDIPIETFTQIIKRTHNWKAPGTDNIHNFWLKKLTCIHPYIHNHICQFIKSPETTPKFLTTGITYMLPKESDLKNPANYRPITCLQTIYKIITGSISEIIYQHLEEYNILAEQQKGCRKNSQGCKEQLVIDTIVMKQALTSKRNIYTMYVDYKKAFDSVPHSWLLHVLQLYKIDPVLIFFFSCIMPQWQTTLKVYQNNASITTDPIKIQRGIFQGDALSPLWFCMALNPLSDLLNNTNAGFKLKHNGTHCLFSHLMYMDDIKIYGTTKAELIKLTDVTQSFSTDIQMHFGVDKCKTHSINRGKTETNTYMLETGEQIEAMDEMSTYKYLGFHQSKQIKHKQIKKELIQKFKIRLNQILKTHLNSRNSTKAINTYAIPLLTYSFGIINWSKTDLQKLQRIINTHMTTHRKHHSKSCTQRLTLPRGEGGRGFIDIHNLHNSLIAKLRKFFHDKAESTPIHKYITEIDKKFTPLNLHNRNKQLSEQIISKEQKISMWSQKSLHGRHRADLSQAHVDMEASNEWLRRGELFPETEAFMIAIQDQVIDTRNYQKHIIRTANLPTDLCRRCQSSSETIQHITGACKSIVQTDYKHRHDQVAAIIHQNLAHQYKFITKKVAYYKYQPCKVLENNYYKIYWDRTIITDQTIHYNRPDITVVDKNNKIVYIIDIAVCNTHNLLSTHNEKVIKYIELTTEIKKQWSINKVKILPIILSTTGVIP

SEQ ID NO: 23151 - protein, 1390 aa, Laothoe populi
MEEKLKRYSLRPLPGGRRGASGADAGCHSMRTVGDGGLNRRVPLDKNTTADPSTSPSSTTLSDRSLFSNIPSSSSTHSLYRSRTSSLSSTYSTTSKSSTAVVQEAHATNPTPTVGRSNCARKKWTEEMNRFIWHTYLIITKCETVKMNNYLESLHCQFDAKYPDMQTTRQRLGDQRRAILRRKLLSQDILDEIWGEVKEHIQADVHPKHKQSLTHNSNNPTALSHTQPKSIRMKWTNEINDEIILCYFEVTDLEKNKTAYRKKLYDLFIQRHPHLSHLTEQRIADQRRLIFNNKRWVSRVHELKRQVELKVPGVVPSSTLPRISSEHTSITVENSQQSLTTVIELENTIDSTLTQTDLQTTGIQAFMHINTDSETILNRTQSNDIDFNAIETEFANAIIRFGEIDPELRPYIPKQKTSRKFSQIVQYLNNTIIPKHLNNDLDFIPLHTIIYAAAFTAASFNGTRFHIDTNISNRATRKPYWQIRIERRVDKYRLEIGRLTQYISGNRNPKIMRTVEEITTKYKNHSQHEEPNTEPQLFLDTIKQKLNAASTRLKRYLACTKRKKQNSIFNNNEKIFYRTLGKSQQNNTSDSSQIPSPEHLEQFWANIWQNPVEHNADADWLHKIPDTTHINQMSFENITVDTLTKVINRTHNWKAPGVDNIHNYWYKKLTCTHPFIHKHITQYIQTPHTVPIFITHGITYMLPKGADSKNPANYRPITCLPTIYKIITGCISDSIYQHLDEQNILAEQQKGCKKNSQGCKEQLTIDSVIMKQAQTKNRNIHTMYIDYQKAFDSVPHSWLISVLEYYKIHPKIIEFLKATMAQWATKLKLNKNNTTIITNTIKIQRGIFQGDALSPLWFCVALNPLSELLNNTNAGFKLNDSDSYHTISHLMYMDDIKLYASNNIELKNLADITQSFSTDIRMQFGVDKCKMHSVSRGKTQLNTYTLETGETIEPMDEHATYKYLGFHQSKHILQKRAKLEITQKFKLRLNQILRTQLNSRNIIKAINTYAVPTLTYSFGIINWSQSDLIKLQRIINTHLTTHRKHHPKSCIQRLVLPRTMGGRGLIDIRNLHNNLITKLRHYFHTKAEHTQLHKYITCLDKKLTPLNLHDRSTQSLYQITTVQHKISLWSQKSLHGRHLADLSQTHVDKEASNEWLRRGELFPETEAFMTAIQDQIINTRNYQKHIIRIPNLPTDQCRRCYSGSETIQHITSACKSIAQTDYKHRHDQVAAIIHQYLAFKHSLITHKTPYYKYKPTTILESSHYKLYWDRTIITDKTIHHNRPDILLYDKNNKIIFLIDIAIPNTNNLTSTFNEKIAKYTDLSIELKNQWHVHTVKTIPIIISSTGVIPYTLHTSLQSLGMHKLSYILLQKATILNTCRIVRKFLSTDLT

SEQ ID NO: 23152 - protein, 1379 aa, Laothoe populi
MEEKLNRYSLRPLPGGRRGASGADAGCHSMRTVGDGGLNRRVPLDKYTTADSSSSPSSISLSDHSLFSNIPSSSSTHSLFRSPHLSPSSNSSSSARSATVVQEAFAADPAPTAGPSSARKKWSEEMNRFIWRTYLIITKCETTELNNYLQPLQQQFNIIYPEMQATRQRIGDQRRAILGRKLLSQDVLDEIRSEVRQHIQTHTHSKDNQSFLNSHHSALSSHIPSTNTRMKWSNDINDEIVICYFEATELETNKTAYRKKLHKLFIDKHPNFSHLTEQRIADQRRLIFHNKLLANRINELKKQVELKLNKSKISAQTYTEHTPPTVNTLHEPLLTSTRVSIDLTPTQNDLQTDTLSFTQINAETTNRLSYLQSNKIDFEKIETDFNDTINRFIDTDPEERPYIPKQKSSRKFSQIIQYFNNIILPKHLRDNIDFMSLHTIIYAAAFTAAASNGTRFNFEKNALNRGNKKPKWQIRIEYRVQKYRLEIGRLTQYIAGNRTQRITKTVEEIKIKYKNHSQHEEPNTEPEQFLDTLKQKLNAASTRLQRYLTCTKRKKQNSTFENNEKLFYRTLGKNNTSDSLQYPSPQHLHKFWANIWENPVQHNVNADWLNKVPATTHIEEMTFENFSLETLIKVINRTHNWKAPGTDNIQNYWLKKFTCTHPFIHNHITQFIQSPHTVPAFITNGITYMLSKGSDQTNPANYRPITCLQTIYKIITGCISEVIYQHFDKQSILVEQQKGCKRNSQGCKEQLTIDSVIMKQAQTKNRNIHTLYVDYKKAFDSVPHSWLIHVLSHYKIHPKIISFLEATITQWTTKLKLNQHNTSITTDQIKIKRGIFQGDGLSPLWFCIALNPLSELLNNTGIGFKLKHNSTHHIISHLMYMDDIKIFATNNTELTKLADITQSFSTDIHMQFGVDKCKIQSFNRGKIQENTYTLDTGEQIEPMNELSTYKYLGFHQSKQILQKQAKLEITQKFKLRLNQILRSHLNSRNTVKAINTYAVPTLTYSFGIISWSQSDLMKLQRTINTHLTSYRKHHPKSCTQRLTLSRKIGGRGLIDIRNLHNNLITKLRHYFHSKSEHTQLHNYIVNIDNKLTPLNLHDRNPQRYQHITTIQQKIDLWSQKSLHGRHLADLSQTHVDKEASNEWLRRGELFPETEAFMSAIQDQVINTRNYQKHIIRISNLPTDQCRRCFSGSETIQHITGACKSIAQTDYKHRHDQVASIIHQHLAFKHSLITQKSPYYKYKPTTVLESAHYKLYWDRTIITDKTIHYNRPDILLYDKNNSTIYLIDIAIPNTHNLASTYTEKIAKYTDLSIELKNQWRVHTVKTIPIILSSTGVIPHTLHTSLQSLGMHRLSYTLLQKATILNTCRIVRKFLSTDLTS

SEQ ID NO: 23153 - protein, 1370 aa, Nymphalis urticae
MERSNKRYSLRSLPGGRRGASGADAGCHSMRSVGDGGLNRRVPLEEYVTADQSPSPSSTSLSNHSLSSNFPSPSSTATIFELPSSSPPSRCSSHISMPTAVAQEACAINAAPSAGTSRVRNKWSQDMNRFIWHTYLLITKCETTQMNNYLQLLHEQFNQKFPNMQVSRQRVGDQRRAILRRKLLPQNVLDEIRNEVADKIQAEGEIADIPLRQSSQSEHLASQINSNSNKRMKWSNVINEDIVRCYFESTNLETNKTAYRKKLFELVVDKHPHLSHLSEHRIADQRRVIFFNNLVNKDKIEEIKIEINKKLQNAINQSKQNIPIESNIASTDSNHSQPETILGTGISLTENESDSIFLENSKLTPNFIEIEFNNAINRFKDMHPEERPYIPKQKTSRKFATITRTLNNEILPKHLNSNIDFKYLHALIYSAAYTAAVCNGTIFRVNNDTVQNKYLKKPTWQRRIEKRIEKYRLEIGRLTQYIAGNRNQKVIKTVEDIKVKYKTHSQYEEPNIELEHFLDTLKQKLNTASKRLKRYLTCTNRKQQNFTFTNNERTFYRNLGTHNQNTLTQNTEYTTPQNLHEFWAGIWSNPVEHNANANWLQKIGDSTHIEQMNFKDIPIETFTQIIKRTHNWKAPGTDNIHNFWLKKLTCIHPYIHNHICQFIKSPETTPKFLTTGITYMLPKESDLKNPANYRPITCLQTIYKIITGCISEIIYQHLETYNILAEQQKGCRKNSQGCKEQLVIDTIVMKQALTSKRNIYTMYVDYKKAFDSVPHSWLLHVLQLYKIDPVLINFFSCIMPQWQTTLKVYQNNTSITTDPIKIQRGIFQGDALSPLWFCMALNPLSDLLNNTNAGFKLKHNGTHCLISHLMYMDDIKIYGTTKAELIKLTDVTQSFSTDIQMHFGVDKCKTHSINRGKTETNTYMLETGEQIEAMDEMSTYKYLGFHQSKQIKHKQIKKELIQKFKIRLNQILKTHLNSRNSTKAINTYAIPLLTYSFGIINWSKTDLQKLQRIINTHMTTHRKHHPKSCTQRLTLPRGEGGRGLIDIHNLHNSLIAKLRKFFHDKAESTSIHKYITEIDKKFTPLNLHNRNKQSSEQIISKEQKISMWSQKSLHGRHRADLSQAHVDMEASNEWLRRGELFPETEAFMIAIQDQVIDTRNYQKHIIRTANFPTDLCRRCQSSSETIQHITGACKSIVQTDYKHRHDQVAAIIHQNLAHKYKFITKKVAYYKYQPRKVLENNNYKIYWDRTIITDQTIHYNRPDITVVDKNNKIVYIVDIAVCNTHNLLSTHNEKVIKYIELATEIKKQWSINTVKILPIILSTTGVIPKTLKTNLNILQMSKSTLALLQKAVILNTTRLTRKFLTSPLSI

SEQ ID NO: 23154 - protein, 1370 aa, Nymphalis urticae
MERSNKRYSLRSLPGGRRGASGADAGCHSMRSVGDGGLNRRVPLEEYVTADQSPSPSSTSLSNHSLSSNFPSPSSTATLFESPSSSPPSRCSSHISMPTAVAQEACAINAAPSAGTSRVRNKWSQDMNRFIWHTYLLITNCETTQMNNYLQLLHEQFNQKFPNMQVSRQRVGDQRRAILRRKLLPQNVLDEIRNEVADKIQAEGEIADIPLRQSSQSEHLASQINSNSNKRMKWSNVINEDIVRCYFESTNLERNKTAYRKKLFELVVDKHPHLSHLSEQRIADQRRVIFFNNLVNKDKIEEIKIEINKKLQNAINQSKHNIPIESNIASTDSNHSQPETILGTGISLTENESDSIFLENSKLTPNFIEIEFNNAINRFKDMHPEERPYIPKQKTSRKFATITRTLNNEILPKHLNSNIDFKYLHALIYSAAYTTAVCNGTIFRVNNDTVQNKYLKKPTWQRRIEKRIEKYRLEIGRLTQYIAGNRNQKVIKTVEDIKVKYKTHSQYEEPNIELEHFLDTLKQKLNTASKRLKRYLTCTNRKQQNFTFTNNERTFYRNLGTHNQNTLTQNTEYTTPQKLHEFWAGIWSNPVQHNANANWLQKIGDSTHIEQMNFKDIPIETFTQIIKRTHNWKAPGTDNIHNFWLKKLTCIHPYIHNHICQFIKSPETTPKFLTTGITYMLPKESDLKNPANYRPITCLQTIYKIITGCISEIIYQHLEAYNILAEQQKGCRKNSQGCKEQLVIDTIVMKQALTSKRNIYTMYVDYKKAFDSVPHSWLLHVLQLYKIDPVLINFFSCIMPQWQTTLKVYQNNTSITTDPIKIQRGIFQGDALSPLWFCMALNPLSDLLNNTNAGFKLKHNGTHCLISHLMYMDDIKIYGTTKAELIKLTDVTQSFSTDIQMHFGVDKCKTHSINRGKTETNTYMLETGELIEAMDEMSTYKYLGFHQSKQIKHKQIKKELIQKFKIRLNQILKTHLNSRNSTKAINTYAIPLLTYSFGIINWSKTDLQKLQRIINTHMTTHRKHHPKSCTQRLTLPRGEGGRGLIDIHNLHNSLIAKLRKFFHDKAESTSIHKYITEIDKKFTPLNLHNRNKQSSEQIISKEQKISMWSQKSLHGRHRADLSQAHVDMEASNEWLRRGELFPETEAFMIAIQDQVINTRNYQKHIIRTANFPTDLCRRCQSSSETIQHITGACKSIVQTDYKHRHDQVAAIIHQNLAHQYKFITKKVAYYKYQPRKVLENNNYKIYWDRTIITDQTIHYNRPDITVVDKNNKIVYIVDIAVCNTHNLLSTHNEKVIKYIELATEIKKQWSINTVKILPIILSTTGVIPKTLKTNLNILQMSKSTLALLQKAVILNTTRLTRKFLTSPLSI

SEQ ID NO: 23155 - protein, 1370 aa, Nymphalis urticae
MERSNKRYSLRSLPGGRRGASGADAGCHSMRSVGDGGLNRRVPLEEYVTADQSPSPSSTSLSNHSLSSNFPSPSSTATLFESPSSSPPSRCSSHISMPTAVAQEACAINAAPSAGTSRVRNKWSQDMNRFIWHTYLLITKCETTQMNNYLQLLHEQFNQKFPNMQVSRQRVGDQRRAILRRKLLPQNVLDEIRNEVADKIQAEGEIADIPLRQSSQSEHLASQINSNSNKRMKWSNVINEDIVRCYFESTNLETNKTAYRKKLFELVVDKHPHLSHLSEQRIADQRRVIFFNNLVNKDKIEEIKIEINKKLQNAINQSKHNIPIESNIASTDSNHSQPETILGTGISLTENESDSIFLENSKLTPNFIEIEFNNAINRFKDMHPEERPYIPKQKTSRKFATITRTLNNEILPKHLNSNIDFKYLHALIYSAAYTAAVCNGTIFRVNNDTVQNKYLKKPTWQRRIEKRIEKYRLEIGRLTQYIAGNRNQKVIKTVEDIKVKYKTHSQYEEPNIELEHFLDTLKQKLNTASKRLKRYLTCTNRKQQNFTFTNNERTFYRNLGTHNQNTLTQNTEYTTPQKLHEFWAGIWSNPVQHNANANWLQKIGDSTHIEQMNFKDIPIETFTQIIKRTHNWKAPGTDNIHNFWLKKLTCIHPYIHNHICQFIKSPETTPKFLTTGITYMLPKESDLNNPANYRPITCLQTIYKIITGCISEIIYQHLEAYDILAEQQKGCRKNSQGCKEQLVIDTIVMKQALTSKRNIYTMYVDYKKAFDSVPHSWLLHVLQLYKIDPVLINFFSCIMPQWQTTLKVYQNNTSITTDPIKIQRGIFQGDALSPLWFCMALNPLSDLLNNTNAGFKLKHNGTHCLISHLMYMDDIKIYGTTKAELIKLTDVTQSFSTDIQMHFGVDKCKTHSINRGKTETNTYMLETGEKIEAMDEMSTYKYLGFHQSKQIKHKQIKKELIQKFKIRLNQILKTHLNSRNSTKAINTYAIPLLTYSFGIINWSKTDLQKLQRIINIHMTTHRKHHPKSCTQRLTLPRGEGGRGLIDIHNLHNSLIAKLRKFFHDKAESTSIHKYITEIDKKFTPLNLHNRNKQSSEQIISKEQKISMWSQKSLHGRHRADLSQAHVDMEASNEWLRRGELFPETEAFMIAIQDQVIDTRNYQKHIIRTANFPTDLCRRCQSSSETIQHITGACKSIVQTDYKHRHDQVAAIIHQNLAHQYKFITKKVAYYKYQPRKVLENNNYKIYWDRTIITDQTIHYNRPDITVVDKNNKIVYIVDIAVCNTHNLLSTHNEKVIKYIELATEIKKQWSINTVKILPIILSTTGVIPKTLKTNLNILQMSKSTLALLQKAVILNTTRLTRKFLTSPLSI

SEQ ID NO: 23156 - protein, 1263 aa, Nymphalis urticae
MRSVGDGGLNRRVPLEEYVTADQSPSPSSTSLSNHSLSSNFPSPSSTATLFESPSSSPPSRCSFHISMPTAVAQEACAINTAPSAGTSRVRNKWSQDMNRFIWHTYLLITKCETTQMNNYLQLLHEQFNQKFPNMQVSRQRVGDQRRAILRRKLLPQNVLDEIRNEVADKIQADGEIGDIPLRQSSQSEHLASQISSNSNKRMKWSNVINEDIVRCYFESTNLETNKTAYRKKLFELVVDKHPHLSHLSEQRIADQRRVIFFNNLVNKDKIEEIKIEINKKLQNAINQSKYNIPIESNIASTDSNHSQPETNLGTGISLTENESDSIFLANNKLTPNFIEIEFNNAINRFKDMHPEERPYIPKQKTSRKFATITRTLNNEILPKHLNSNIDFKYLHALIYSAAYTAAVCNGTIFRVNNDTVQNKYLKKPTWQRRIEKRIEKYRLEIGRLTQYIAGNRNRKVIKTVEDIKVKYKTHSQYEEPNIELEHFLDTLKQKLNTASKRLKRYLTCTNRKQQNFTFTNNERTFYRNLGTHNQNTLTQNTEYTTPQKLHEFWAGIWSNPVQHNANVNWLQKIGDSTHIEQMNFKDIPIETFTQIIKRTHNWKAPGTDNIHNFWLKKLTCIHPYIHNHICQFIKSPETTPKFLTTGITYMLPKESDLKNPANYRPITCLQTIYKIITGCISEIIYQHLEAYNILAEQQKGCRKNSQGCKEQLVIDTIVMKQALTSKRNIYTMYVDYKKAFDSVPHSWLLHVLQLYKIDPVLINFFSCIMPQWQTTLKVYQNNTSITTDPIKIQRGIFQGDALSPLWFCMALNPLSDLLNNTNAGFKLKHNGTHCLISHLMYMDDIKIYGTTKAELIKLTDVTQSFSTDIQMHFGVDKCKTHSINRGKTETNTYMLETGEQIEAMDEMSTYKYLGFHQSKQIKHKQIKKELIQKFKIRLNQILKTHLNSRNSTKAINTYAIPLLTYSFGIINWSKNDLQKLQRIINTHMTTHRKHHPKSCTQRLTLPRGEGGRGFIDIHNLHNSLIAKLRKFFHDKAESTPIHKYITEIDKKFTPLNLHNRNKQSSEQIISKEQKISMWSQKSLHGRHRADLSQAHVDMEASNEWLRRGELFPETEAFMIAIQDQVIDTRNYQKHIIRTANLPTDLCRRCQSSSETIQHITGACKSIVQTDYKHRHDQVAAIIHQNLAHQYKFITKKVAYYKYQPCKVLENNNYKIYWDRTIITDQTIHYNRPDITVVDKNNKIVYIVDIAVCNTRGVVGSLV

SEQ ID NO: 23157 - protein, 1267 aa, Laothoe populi
MEEKLKRYSLRPLPGGRRGASGADAGCHSMRTVGDGGLNRRVPLDKNTTADPSSSPSSTTLSDRSLFSNIPSSSSTHSLYRSRTSSLSSTYSATSKSSTAVVQEAHATNPTPTVGRSNCARKKWTEEMNRFIWHTYLIITKCETVQMNNYLESLHCQFDAKYPDMQTTRQRLGDQRRAILRRKLLSQDILDEIWGEVKEHIQADVHPKHKQSLTHNSKNPTALSHTQPKSSRMKWTNEINDEIILCYFEVTDLEKNNTAYRKKLYDLFIQRHPHLSHLTEQRIADQRRLIFNNKRWVSRVHELKRQVELKVPGVVPSSTSPRISSEHTSITVENSQQSLITVIELENTIDSTLTQTDLQTTGIQASMHINTDSETILNRTQSNDIDFNAIETEFANAIIRFGEIDPELRPYIPKQKTSRKFSQIVQYLNNTIIPKHLNNDLDFIPLHTIIYAAAFTAAAFNGTRFHIDTNISNRATRKPYWQIRIERRVDKYRLEIGRLTQYISGNRNPKIMRTVEEITTKYKNHSQHEEPNTEPQLFLDTIKQKLNAASTRLKRYLACTKRKKQNSIFNNNEKIFYRTLGKSQQNNTSDSSQIPSPEHLEQFWGNIWQNPVEHNADADWLHKIPDTTHINQMSFENITVDTLTKVINRTHNWKAPGVDNIHNYWYKKLTCTHPFIHKHITQYIQTPHTVPIFITHGITYMLPKGADSKNPANYRPITCLPTIYKIITGCISDSIYQHLDEQNILAEQQKGCKKNSQGCKEQLTIDSVIMKQAQTKNRNIHTMYIDYQKAFDSVPHSWLINVLEYYKIHPKIIEFLKATMAQWATKLKLNKNNTTITTNTIKIQRGIFQGDALSPLWFCVALNPLSELLNNTNAGFKLNDSDSYHTISHLMYMDDIKLYASNNIELKKLADITQSFSTDIRMQFGVDKCKMHSVSRGKTQLNTYTLETGETIEPMDEHATYKYLGFHQSKHILQKRAKLEITQKFKLRLNQILRTQLNSRNIIKAINTYAVPTLTYSFGIINWSQSDLIKLQRIINTHLTTHRKHHPKSCIQRLVLPRTMGGRGLIDIRNLHNNLITKLRHYFHTKAEHTQLHKYITCLDKKLTPLNLHDRSTQSLYQITTVQHKISLWSQKSLHGRHLADLSQTHVDKEASNEWLRRGELFPETEASMTAIQDQIINTRNYQKHIIRIPNLPTDQCRRCYSGSETIQHITSACKSIAQTDYKHRHDQVAAIIHQYLAFKYSLITHKTPYYKYKPATILESSHYKLY

SEQ ID NO: 23158 - protein, 1380 aa, Mimas tiliae
MERQSKRYSLRPLPGGRRGASGADAGCHSMRTVGDGGLSRRVPLEKYTTADPSTSSPSTSPSHRSLFSNIPSPSSTHSLFRSPHSSPSSNYSPKSTRSTSVVQEAFATNPTPTAGPSGARKKWSEDMNRFIWRTYLTITKCETTQLQNYLESLHHQFNIHYPEMQATRQRIGDQRRAILRRKLLSQDILDQIRIEVKQQIQTPVRSEDNYSPPNIQIHSAPSLHTPLTNTRMKWTNDINDEIILCYFKVTDLEMNKTAYRTKLHELFIEKHPHLSHLTEQRIADQRRLIFNNKSLQGRIRQLKRRVELELNSTSIDNLTQTCTEQIFPTTESPQEPPFEVITITTDSILTQSHLQTNTVSTNTLPRIQGNKIDFNKIETEFNRAIHQFTDIDPEKRPYIPKQKSSRKFSQIVHYLNATILPKHLNDDLDFISLHTLIYAAAFTAAVCNGTRFNLDRNIHNGGKKMPNWQRRISDRIKQYRLEIGRLSQYISGNRTQRIIKTVEEIKIKYKSHSQYEESNTEPQHFLDTIKQKLNATATRLKRYLTCTKRKQQNSTFENNEKLFYRDLGKSKEHNTADSSQFPSPEHLHQFWANLWENSTQHNVNADWLNKVPDTTHIHIQHMGFENLSLDTLRKIINRTHNWKAPGTDNIHNYWLKKLTCTHPLIHNHITQFIQSPHTVPAFITHGITYMLSKGSDPKDPANYRPITCLQTMYKIITGCISEVIYQHLDEQNILAEQQKGCKRNSQGCKEQLIIDSVIMKQAQTKNRNIHTMYVDYKKAFDSVPHSWLIHVLVHYKIHPKIIAFLKTTMAQWTTKLRLNQNNTSITTDPIKIKRGIFQGDALSPLWFCVALNPLSELLNNTYAGFKLKHNNTQHVISHLMYMDDIKIFATNNTELNKLADIMQSFSTDIQMQFGVDKCKIHSINRGKTQINTYTLETGEQIEPMNELATYKYLGFHQSKYILQKQAKIEMTKKFKLRLNQILRSTLNSRNTTKAINTYAIPILTYSFGIISWTQTDLIKLQRMINTHMTSHRKHHPKSCMQRLTLSRRIGGRGLIDIRNLHNNIITKLRHYFHSKSEHTQLHKYIVNIDKKFTPLNLHDINPQTNQHIATVQQKVDLWSQKSLHGRHLADLSQTHVDKEASNEWLRRGELFPETEAFMSAIQDQVINTRNYQKHITRIPNLPTDQCRRCYSSSETIQHITGACKSITQTDYKHRHDQVAAIIHQHLAFKYSLITQKSPYYKYKPTTILESAHYKLYWDRTIITDKTIHYNRPDILFYDKSNSTVYLIDIAIPNTNNLASSYTEKIAKYMDLSIELKNQWRVNTVKTIPVILSSTGVIPHTLHTSLQSLDMHKLSYTLLQKATILNTCRIVRKFLSIDLTY

SEQ ID NO: 23159 - protein, 1379 aa, Laothoe populi
MEEKLNRYSLRPLPGGRRGASGADAGCHSMRTVGDGGLNRRVPLDKYTTADSSSSPSSISLSDHSLFSNIPSSSSTHSLFRSPHLSPSSNSSSSARSATVVQEAFAADPAPTAGPSSARKKWSEEMNRFIWRTYLIITKCETTELNNYLQPLQQQFNIIYPEMQATRQRIGDQRRAILERKLLSQDVLDEIRSEVRQHIQTHTHSKDNQSFLNSHHSALSSHIPSTNTRMKWSNDINDEIVICYFEATELETNKTAYRKKLHKLFIDKHPNFSHLTEQRIADQRRLIFHNKLLANRISELKKQVELKLNKSKISAQTYTEHTPPTVNTLHEPLLTSTRVSIDLTPTQNDLQTDTLSFIQINAETTNRLSYLQSNKIDFEKIETDFNDTINRFIDTDPEERPYIPKQKSSRKFSQIIQYFNNIILPKHLRDNIDFMSLHTIIYAAAFTAAASNGTRFNFEKNALNRGNKKPNWQRRIEYRVQKYRLEIGRLTQYIAGNRTQRIMKTVEEIKIKYKNHSQHEEPNTEPEQFLDTLKQKLNAASTRLQRYLTCTKRKKQNSTFENNEKLFYRTLGKNNTSDSLQYPSPQHLHKFWANIWENPVQHNVNADWLNKVPATTHIEEMTFENFSLETLIKVINRTHNWKAPGTDNIQNYWLKKFTCTHPFIHNHITQFIQSPHTVPAFITNGITYMLSKGSDQTNPANYRPITCLQTIYKIITGCITEVIYQHFDKQSILVEQQKGCKRNSQGCKEQLTIDSVIMKQAQTKNRNIHTMYVDYKKAFDSVPHSWLIHVLAHYKIHPKIITFLEATISQWTTKLKLNQHNKSTITDPIKIKRGIFQGDALSPLWFCIALNPLSELLNNTGIGFKLKHNSTHHVISHLMYMDDIKIYGTNSTELSKLADITQSFSTDIHMQFGVDKCKIQSFNRGKIQENTYTLDTGEQIEPMNELSTYKYLGFHQSKQILQKRAKLEITQKFKLRLNQILRSQLNSRNTVKAINTYAVPTLTYSFGIISWSQSDLMKLQRTINTHLTSYRKHHPKSCTQRLTLSRKIGGRGLINIRNLHNNLITKLRHYFHSKSEHTQLHNYIVNIDNKLTPLNLHDRNPQRYQHITTIQQKIDLWSQKSLHGRHLADLSQTHVDKEASNEWLRRGELFPETEAFMSAIQDQVINTRNYQKHIIRISNLPTDQCRRCYSGSETIQHITGPCKSIAQTDYKHRHDQVASIIHQHLAFKHSLITQKSPYYKYKPTTVLESAHYKLYWDRTIITDKTIHYNRPDILLYDKNNSTIYLIDIAIPNTHNLASTYTEKIAKYTDLLIELKNQWRVHSVKTIPIILSSTGVIPHTLHTSLQSLGMHRLSYTLLQKATILNTCRIVRKFLSTDLTS

SEQ ID NO: 23160 - protein, 1370 aa, Nymphalis urticae
MERSNKRYSLRSLPGGRRGASGADAGCHSMRSVGDGGLNRRVPLEEYVTADQSPSPSSTSLSNHSLSSNFPSPSSTATLFESPSSSPPSRCSSHISMPTAVAQEACAINAAPSAGTSRVRNKWSQDMNRFIWHTYLLITKCETTQMNNYLQLLHEQFNQKFPNMQVSRQRVGDQRRAILRRKLLPQNVLDEIRNEVADKIQAEGEIADIPLRQSSQSEHLASQINSNSNKRMKWSNVINEDIVRCYFESTNLETNKTAYRKKLFELVVDKHPHLSHLSEQRIADQRRVIFFNNLVNKDKIEEIKIEINKKLQNAINQSKHNIPIESNIASTDSNHSHPETILGTGISLTENESDSIFLENSKLTPNFIEIEFNNAINRFKDMHPEERPYIPKQKTSRKFATITRTLNNEILPKHLNSNIDFKYLHALIYSAAYTAAVSNGTIFRVNNDTVQNKYLKKPTWQRRIEKRIEKYRLEIGRLTQYIAGNRNQKVIKTVEDIKVKYKTHSQYEEPNIELEHFLDTLKQKLNTASKRLKRYLTCTNRKQQNFTFTNNERTFYRNLGTHNQNTLTQNTEYTTPQKLHEFWAGIWSNPVLHNANANWLQKIGDSTHIEQMNFKDIPIETFTQIIKRTHNWKAPGTDNIHNFWLKKLTCIHPYIHNHICQFIKSPETTPKFLTTGITYMLPKESDLKNPANYRPITCLQTIYKIITGCISEIIYQHLEAYNILAEQQKGCRKNSQGCKEQLVIDTIVMKQALTSKRNIYTMYVDYKKAFDSVPHSWLLHVLQLYKIDPVLINFFSCIMPQWQTTLKVYQNNTSITTDPIKIQRGIFQGDALSPLWFCMALNPLSDLLNNTNAGFKLKHNGTHCLISHLMYMDDIKIYGTTKAELIKLTDVTQSFSTDIQMHFGVDKCKTHSINRGKTETNTYMLETGEKIEAMDEMSTYKYLGFHQSKQIKHKQIKKELIQKFKIRLNQILKTHLNSRNSTKAINTYAIPLLTYSFGIINWSKTDLQKLQRIINTHMTTHRKHHPKSCTQRLTLPRGEGGRGLIDIHNLHNSLIAKLRKFFHDKAESTSIHKYITEIDKKFTPLNLHNRNKQSSEQIISKEQKISMWSQKSLHGRHRADLSQAHVDMEASNEWLRRGELFPETEAFMIAIQDQVIDTRNYQKHIIRTANFPTDLCRRCQSSSETIQHITGACKSIVQTDYKHRHDQVAAIIHQNLAHQYKFITKKVAYYKYQPRKVLENNNYKIYWDRTIITDQTIHYNRPDITVVDKNNKIVYIVDIAVCNTHNLLSTHNEKVIKYIELATEIKKQWSINTVKILPIILSTTGVIPKTLKTNLNILQMSKSTLALLQKAVILNTTRLTRKFLTSPLSI

SEQ ID NO: 23161 - protein, 880 aa, Laothoe populi
MKTVEEIKIKYKNHSQHEELNTQPEQFLDTLKQKLNAASTRLKRYLTCTKRKKQNSTFENNEKLFYTTLGKNVEHNTPDSLKYPSPQHLHKFWANIWENPVQHNINADWLNKVPATRHIEEMTFENFSLDTLIKVINRTHNWKAPGTDNIQNYWLKKFTCTHPFIHNHITQFIQSPHTVPAFITNGITYMLPKGSDQTNPANYRPITCLQTIYKIITGCISEVIYQHFDKQNILAEQQKGCKRNSQGCKEQLTIDSVIMKQAQTKNRNIHTMYVDYKKAFDSVPHSWLIHVLAHYKIHPKIITFLEATISQWTTKLKLNQHNKSTITDPIKIKRGIFQGDALSPLWFCIALNPLSELLNNTGIGFKLKHNSTHHIISHLMYMDDIKIYGTNNTELSKLADITQSFSTDIHMQFGVDKCKIQSFNRGKIQENTYTLDTGEQIEPMNELSTYKYLGFHQSKQILQKRAKLEITQKFKLRLNQILRSQLNSRNTVKAINTYAVPTLTYSFGIISWSQSDLMKLQRTINTHLTSYRKHHPKSCTQRLTLSRKIGGRGLIDIRNLHNNLITKLRHYFHSKSEHTQLHNYIVNIDNKLTPLNLHDRNPQRYQHITTIQQKIDLWSQKSLHGRHLADLSQTHVDKEASNEWLRRGELFPETEAFMSAIQDQVINTRNYQKHIIRISNLPTDQCRRCYSGSETIQHITGACKSIAQTDYKHRHDQVASIIHQHLAFKHSLITQKSPYYKYKPTTVLESAHYKLYWDRTIITDKTIHYNRPDILLYDKNNSTIYLIDIAIPNTHNLASTYTEKIAKYTDLSIELKNQWRVHSVKTIPIILSSTGVIPHTLHTSLQCLGMHRLSYTLLQKATILNTCRIVRKFLSTDLTS

SEQ ID NO: 23162 - protein, 1370 aa, Nymphalis urticae
MERSNKRYSLRPLPGGRRGASGADAGCHSMRSVGDGGLNRRVPLEEYVTADQSPSPSSTSLSNHSLSSNFPSPSSTATLFESPSSSPPSRCSSHISMPTAVAQEACAINAAPSAGTSRVRNKWSQDMNRFIWHTYLLITKCETTQMNNYLQLLHEQFNQKFPNMQVSRQRVGDQRRAILRRKLLPQNVLDEIRNEVADKIQAEGEKADIPLRQSSQSEHLASQISSNSNKRMKWSNVINEDIVRCYFESTNLETDKTAYRKKLFELVVDKHPHLSHLSEQRIADQRRVIFFNNLVNKDKIEVIKIEINKKLQNAINQSKYNIPIESNIASTDSNHSQPETNLGTGISLTENESDSIFLANNKLTPNFIEIEFNNAINRFKDMHPEERPYIPKQKTSRKFATIIRTLNNEILPKHLNSNIDFKYLHALIYSAAYTAAVCNGTIFRVNNDTVQNKYLKKPTWQRRIEKRIEKYRLEIGRLTQYIAGNRNQKVIKTVEDIKVKYKTHSQYEEPNIELEHFLDTLKQKLNTASKRLKRYLTCTNRKQQNFTFTNNERTFYRNLGTHNQNTLTQNTEYTTPQKLHEFWAGIWSNPVQHNANANWLQKIGDSTHIEQMNFKDIPIETFTQIIKRTHNWKAPGTDNIHNFWLKKLTCIHPYIHNHICQFIKSPETTPKFLTTGITYMLPKESDLKNPANYRPITCLQTIYKIITGCISEIIYQHLKAYNILAEQQKGCRKNSQGCKEQLVIDTIVMKQALTSKRNIYTMYVDYKKAFDSVPHSWLLHVLQLYKIDPVLINFFSCIMPQWQTTLKVYQNNTSITTDPIKIQRGIFQGDALSPLWFCMALNPLSDLLNNTNAGFKLKHNGTHCLISHLMYMDDIKIYGTTKAELIKLTDVTQSFSTDIQMHFGVDKCKTHSINRGKTETNTYMLETGEQIEAMDEMSTYKYLGFHQSKQIKHKQIKKELIQKFKIRLNQILKTHLNSRNSTKAINTYAIPLLTYSFGIINWSKTDLQKLQRIINTHMTTHRKHHPKSCTQRLTLPRGEGGRGFIDIHNLHNSLIAKLRKFFHDKAESTPIHKYITEIDKKFTPLNLHNRNKQSSEQIINKEQKISMWSQKSLHGRHRADLSQALVDMEASNEWLRRGELFPETEAFMIAIQDQVIDTRNYQKHIIRTANLPTDLCRRCQNSSETIQHITGACKSIVQTDYKHRHDQVAAIIHQNLAHQYKFITKKVAYYKYQPCKVLENNNYKIYWDRTIITDQTIHYNRPDITVVDKNNKIVYIVDIAVCNTHNLLSTHNEKVIKYIELATEIKKQWSINTVKILPIILSTTGVVPKTLKTNLNILQMSKSTLALLQKAVILNTTRLTRKFLTSPFSI

SEQ ID NO: 23163 - protein, 845 aa, Laothoe populi
MRTVEEITTKYKNHSQHEEPNTEPQLFLDTIKQKLNAASTRLKRYLACTKRKKQNSIFNNNEKIFYRTLGKSQQNNTSDSSQIPSPEHLEQFWANIWQNPVKHNAVADWLHKIPDTTHINQMSFENITVDTLTKVINRTHNWKAPGVDNIHNYWYKKLTCTHPFIHKHITQYIQTPHTVPIFITHGITYMLPKGAADSKNPANYRPITCLPTIYKIITGCISDSIYQHLDEQNILAEQQKGCKKNSQGCKEQLTIDSVIMKQAQTKNRNIHTMYIDYQKAFDSVPHSWLINVLEYYKIHPKIIEFLKATMAQWATKLKLNKNNTTITTNTIKIQRGIFQGDALSPLWFCVALNPLSELLNNTNAGFKLNDSDSYHTISHLMYMDDIKLYASNNIELKKLADITQSFSTDIRMQFGVDKCKMHSVSRGKTQLNTYTLETGETIEPMDEHDTYKYLGFHQSKHILQKRAKLEITQKFKLRLNQILRTQLNSRYIIKAINTYAVPTLTYSFGIINWSQSDLIKLQRIINTHLTTHRKHHPKSCIQRLVLPRTMGGRGLIDIRNLHNNLITKLRHYFHTKAEHTQLHKYITCLDKKLTPLNLHDRSTQSLYQITTVQHKISLWSQKSLHGRHLADLSQTHVDKEASNEWLRRGELFPETEAFMTAIQDQIINTRNYQKHIIRIPNLPTDQCRRCYSGSETIQHITSACKSIAQTDYKHRHDQVAAIIHQYLAFKYSLITHKTPYYKYKPTTILESSHYKLYWDRIIITDKTIHYNRPDILLYDKNNKIIFLIDIAIPNTNNLTSTFNEKIAKYTDLSIELKNQWQVHTVKTIPIIISSTGVIGTLYPSH

SEQ ID NO: 23164 - protein, 986 aa, Trichoplusia ni
MHPESRPFIPKQKSSRKFAQIVNYLNNVILPRYLSHGLDFNSLHTYIYSAAYAAATCNGTRFKTQENTNRSSDSRKPTWQRRIESRIKKYRLELGRLTQYIAGRRNRKIVKTVEEIMIKYSSHSKHEEPNTEPQHFLDTIKQKLNAISSRLRRYLACTQRKKQNATFVNNEKQFYRTLGNFSQINTEVASETPSSQILQQFWSGIWENPVQHNADTDWLNKTAKNVLINEMEFENIPIDTFTRVINSTHNWKAPGTDHIHNYWYKKLTSTHPFIHKHICHFIQSPDIMPSFITHGITYMLPKSSDPTDPANYRPITCLQTIYKIITGCISQLIYKHLENHNILAEQQKGCKQNSQGCKEQLTIDAIVMKQAQTKNRNIHTMFIDYKKAFDSVPHSWLIYILKHYKIHPNIISFLNTSMLQWETKLKLIKNNPITTGPIKIQRGIFQGDALSPLWFCMALNPLSELLNGTNIGFELKYNNSVHAISHLLYMDDIKLFAASNTDLTKLADITQLFSTDIKMEFGVNKCKIFSVNKGKIQANSYILDTGEQVEPMDENDTYKYLGFHQSKQIHQKFAKSELTNKFKRRLNQILKTHLNSKNTIKAINTFAIPVLTYSFGIIKWSQSDLIKLQRIINTRMTANRKHHPRSCIQRLTLPRQDGGRGLIDIHNLHHNIIEKLRKYFYTKAEESQLHKHVVGIDKKLTPLNLCNSTWQIKLVNKEQKMDMWSQKSLHGRHFADLRQEHVDKDASNEWLRRGELFPETEAFVIAIQDQVIDTRNYQKFITRIPNLPTDLCRRCHSSSETIQHITGACKSIVQTDYKHRHDQVASIIHQNLAHKHSFITQKIAYYKYKPSTVLENNRFKIYWDRTIITDKTVHFNRPDITVLDKSEKTVFVIDVAVCNTHNLLTTYTEKMSKYVDLATEIKRQWQVETVKIVPIIISTTGVVPKSLQPNLNLLDMPKSTLTLLQKATLLNTCRLTRKFLASSSSS

SEQ ID NO: 23165 - protein, 1240 aa, Junonia grisea
MNRFIWRTYLLITKCETTQMNNYLEFLHREFHNRYPEMQATRQRLGDQKRAILRRKLLPQNILDEIALQVKEHIQTENVNHSSTHNHTDVIISSQTNITSNKRMKWTDEINEDIIRFYFEVTELEINKTAYRKKLYELFIEKYPHLSNLTEQRIADQRRLIFNNKMYTNRIHDLKKEVELKLMNINNQSQLERELNYNATITQQTHHENIIDNTLTLTDIITLNNPENENNLNPDRIETNNIETEFNNALTRFNTTDLEERPFIPKQKSSRKFAQIVNYLNDKILPKHLNHELDFISLNTLIYSAAFTAATCNGTRFKTDENLNTNKQNRKPSWQKRIEKRIKKYRLEIGRLTQYIQGNRSQRIVKTVDEIQNKYKTHSQHEEPNTEPQHFLDTLKQKLNAISTRLKRYLTCTKRKKQNTIFLNNEKHFYRTLNFNHQTNSSQPNESPSPQHLRQFWAGIWENPVQHNSQAGWLQKIADTSNINQMDFENIPADIMLQVIKRTHNWKAPGTDNIHNYWYKKLTCTHPFIHKHICTFIQSPKTMPKFITHGITYMLPKGSDTKNPANYRPITCLQTIYKIITGCISEIIYTHLDQYNILAEQQKGCRKSSQGCKEQLTIDAIVMRQAHTRNRNIHTMYVDYKKAFDSVPHSWLIYILQHYKIHPNIVSFLGEAMLQWKTKLKLMNNISLTTEFIKIQRGIFQGDALSPLWFCMALNPLSKLLNNTNIGFKLKHNNTFHILSHLLYMDDIKIYATNNTELFKLADITQTFSTDIHMQFGVDKCKIHSINRGKIENNSYLLDTGEQIEPMDEHSTYKYLGFHQSKQIHQKATKLELTKKFKARINQILRTQLNSRNTVKAINTYAIPVLIYSFGIINWSQSDLLKLQRIINTHMTAHRKHHPRSCTQRLTLPRQDGGRGLIDIQNLHNNLIDKLRKYFYLKSEQSKLHKFLVESDQNLTPLKLCHRNIQPKVINKQQKIDMWSQKSLHGRHLADLSQAHVDKETSNEWLRRGELFPETEAFVIAIQDQVIDTRNYQKFITHVPNLPTDLCRRCHSSSETIQHITGSCKSIVQTDYKHRHDQVAAIIHQNLAYRHLFIPKKIAYYKYKPSTVLENNLFKIYWDRTIITDKTIHYNRPDITILDKVKKTVFIIDIAVCNTHNLLTTHTEKMAKYTDLSTEIKKQWQVNAVKIVPIIISTTGVVPKTLQNNLSILEMPKSTTILIQKAVLLNTCRLTRKFLASSSS

SEQ ID NO: 23166 - protein, 1372 aa, Junonia pacoma
MEKIMESQTKRYSLRPLPGGRRGASGADAGCHSMRSVGDGGLSRRVPLEQNTTAERSSSPSSTASSERSLFSNIPSPSSTQSLFRSPNSSPSSSSTYSSRTTRSTAVVQEASAINPAPTVGLNRARKKWTEDMNRFIWRTYLLITKCETTQMNNYLEFLHREFHNRYPEMQATRQRLGDQKRAILRRKLLPQNILDEIALQVKEHIQTENVNHSSTHNHTDVIISSQTNITSNKRMKWTDEINEDIIRFYFEVTELEINKTAYRKKLYELFIEKYPHLSNLTEQRIADQRRLIFNNKMYTNRIHDLKKEVELKLMNINNQSQLERELNYNATITQQTHHENIIDNTLTLTDIITLNNPENENNLNPDRIETNNIETEFNNALTRFNTTDLEERPFIPKQKSSRKFAQIVNYLNDKILPKHLNHELDFISLNTLIYSAAFTAATCNGTRFKTDENLNTNKQNRKPSWQKRIEKRIKKYRLEIGRLTQYIQGNRSQRIVKTVDEIQNKYKTHSQHEEPNTEPQHFLDTLKQKLNAISTRLKRYLTCTKRKKQNTIFLNNEKHFYRTLNFNHQTNSSQPNESPSPQHLRQFWAGIWENPVQHNSQAGWLQKIADTSNINQMDFENIPADIMLQVIKRTHNWKAPGTDNIHNYWYKKLTCTHPFIHKHICTFIQSPKTMPKFITHGITYMLPKGSDTKNPANYRPITCLQTIYKIITGCISEIIYTHLDQYNILAEQQKGCRKSSQGCKEQLTIDAIVMRQAHTRNRNIHTMYVDYKKAFDSVPHSWLIYILQHYKIHPNIVSFLGEAMLQWKTKLKLMNNISLTTEFIKIQRGIFQGDALSPLWFCMALNPLSELLNNTNIGFKLKHNNAFHILSHLLYMDDIKIYATNNTELFKLADITQTFSTDIHMQFGVDKCKIHSINRGKIENNSYLLDTGEQIEPMDEHSTYKYLGFHQSKQIHQKATKLELTKKFKARINQILRTQLNSRNTVKAINTYAIPVLIYSFGIINWSQSDLLKLQRIINTHMTAHRKHHPRSCTQRLTLPRQDGGRGLIDIQNLHNNLIDKLRKYFYFKAEQSKLHKFLVESDQNLTPLKLCHRNIQPKVINKQQKIDMWSQKSLHGRHLADLSQAHVDKETSNEWLRRGELFPETEAFVIAIQDQVIDTRNYQKFITRVPNLPTDLCRRCHSSSETIQHITGSCKSIVQTDYKHRHDQVAAIIHQNLAYRHLFIPKKIAYYKYKPSTVLENNLFKIYWDRTIITDKTIHYNRPDITILDKIKKTVFIIDIAVCNTHNLLTTHTEKMAKYIDLSTEIKKQWQVNAVKIVPIIISTTGVVPKTLQNNLSILEMPKSTTILIQKAVLLNTCRLTRKFLASSSS

SEQ ID NO: 23167 - protein, 1368 aa, Junonia neildi
MESQTKIYSLRPLPGGRRGASGADAGCHSMRSVGDGGLSRRVPLEQNTTAERSSSPSSTASSERSLFSNIPSPSSTQSLFRSPNSSPSSSSTYSSRTTRSTAVVQEASAINPAPTVGLNRARKKWTEDMNRFIWRTYLLITKCETTQMNNYLEFLHREFHNRYPEMQATRQRLGDQKRAILRRKLLPQNILDEIALQVKEHIQTENVNHSSTHNHTDVIISSQTNITSNKRMKWTDEINEDIIRFYFEVTELEINKTAYRKKLYELFIEKYPHLSNLTEQRIADQRRLIFNNKMYTNRIHDLKKEVELKLMNINNQSQLERELNYNATITQQTHHENIIDNTLTLTDIITLNNPENENNLNPDRIETNNIETEFNNALTRFNTTDLEERPFIPKQKSSRKFAQIVNYLNDKILPKHLNHELDFISLNTLIYSAAFTAATCNGTRFKTDENLNTNKQNRKPSWQKRIEKRIKKYRLEIGRLTQYIQGNRSQRIVKTVDEIQNKYKTHSQHEEPNTEPQHFLDTLKQKLNAISTRLKRYLTCTKRKKQNTIFLNNEKHFYRTLNFNHQTNSSQPNESPSPQHLRQFWAGIWENPVQHNSQAGWLQKIADTSNINQMDFENIPADIMLQVIKRTHNWKAPGTDNIHNYWYKKLTCTHPFIHKHICTFIQSPKTMPKFITHGITYMLPKGSDTKNPANYRPITCLQTIYKIITGCISEIIYTHLDQYNILAEQQKGCRKSSQGCKEQLTIDAIVMRQAHTRNRNIHTMYVDYKKAFDSVPHSWLIYILQHYKIHPNIVSFLGEAMLQWKTKLKLMNNISLTTEFIKIQRGIFQGDALSPLWFCMALNPLSELLNNTNIGFKLKHNNAFHILSHLLYMDDIKIYATNNTELFKLADITQTFSTDIHMQFGVDKCKIHSINRGKIENNSYLLDTGEQIEPMDEHSTYKYLGFHQSKQIHQKATKLELTKKFKARINQILRTQLNSRNTVKAINTYAIPVLIYSFGIINWSQSDLLKLQRIINTHMTAHRKHHPRSCTQRLTLPRQDGGRGLIDIQNLHNNLIDKLRKYFYFKAEQSKLHKFLVESDQNLTPLKLCHRNIQPKVINKQQKIDMWSQKSLHGRHLADLSQAHVDKETSNEWLRRGELFPETEAFVIAIQDQVIDTRNYQKFITRVPNLPTDLCRRCHSSSETIQHITGSCKSIVQTDYKHRHDQVAAIIHQNLAYRHLFIPKKIAYYKYKPSTVLENNLFKIYWDRTIITDKTIHYNRPDITILDKIKKTVFIIDIAVCNTHNLLTTHTEKMAKYIDLSTEIKKQWQVNAVKIVPIIISTTGVVPKTLQNNLSILEMPKSTTILIQKAVLLNTCRLTRKFLASSSS

SEQ ID NO: 23168 - protein, 755 aa, Junonia vestina
MDFENIPADIMLQVIKRTHNWKAPGTDNIHNYWYKKLTCTHPFIHKHICTFIQSPKTMPKFITHGITYMLPKGSDTKNPANYRPITCLQTIYKIITGCISEIIYTHLDQYNILAEQQKGCRKSSQGCKEQLTIDAIVMRQAHTRNRNIHTMYVDYKKAFDSVPHSWLIYILQHYKIHPNIVSFLGEAMLQWKTQLKLMNNISLTTEFIKIQRGIFQGDALSPLWFCMALNPLSELLNNTNIGFKLKHNNAFHILSHLLYMDDIKIYATNNTELFKLADITQTFSTDIHMQFGVDKCKIHSINRGKIENNSYLLDTGEQIEPMDEHSTYKYLGFHQSKQIHQKATKLELTKKFKARINQILRTQLNSRNTVKAINTYAIPVLIYSFGIINWSQSDLLKLQRIINTHMTAHRKHHPRSCTQRLTLPRQDGGRGLIDIQNLHNNLIDKLRKYFYFKAEQSKLHKFLVESDQNLTPLKLCHRNIQPKVINKQQKIDMWSQKSLHGRHLADLSQAHVDKETSNEWLRRGELFPETEAFVIAIQDQVIDTRNYQKFITRVPNLPTDLCRRCHSSSETIQHITGSCKSIVQTDYKHRHDQVAAIIHQNLAYRHLFIPKKIAYYKYKPSTVLENNLFKIYWDRTIITDKTIHYNRPDITILDKIKKTVFIIDIAVCNTHNLLTTHTEKMAKYIDLSTEIKKQWQVNAVKIVPIIISTTGVVPKTLQNNLSILEMPKSTTILIQKAVLLNTCRLTRKFLASSSS

SEQ ID NO: 23169 - protein, 1240 aa, Junonia coenia
MNRFIWRTYLLITKCETTQMNNYLEFLHREFHNRYPEMQATRQRLGDQKRAILRRKLLPQNILDEIALQVKEHIQTENVNHSSTHNHTDVIISSQTNITSNKRMKWTDEINEDIIRFYFEVTELEINKTAYRKKLYELFIEKYPHLSNLTEQRIADQRRLIFNNKMYTNRIHDLKKEVELKLMNINNQSQLERELNYNATITQQTYHENIIDNTLTLTDIITLNNPENENNLNPDRIETNNIETEFNNALTRFNTTDLEERPFIPKQKSSRKFAQIVNYLNDKILPKHLNHELDFISLNTLIYSAAFTAATCNGTRFKTDENLNTNKQNRKPSWQKRIEKRIEKYRLEIGRLTQYIQGNRSQRIVKTVDEIQNKYKTHSQHEEPNTEPQHFLDTLKQKLNAISTRLKRYLTCTKRKKQNTIFLNNEKHFYRTLNFNHQTNSSQPNESPSPQHLRQFWAGIWENPVQHNSQAGWLQKIADTSNINEMDFENIPADIMLQVIKRTHNWKAPGTDNIHNYWYKKLTCTHPFIHKHICTFIQSPKTMPKFITHGITYMLPKGSDTKNPANYRPITCLQTIYKIITGCISEIIYTHLDQYNILAEQQKGCRKSSQGCKEQLTIDAIVMRQAHTRNRNIHTMYVDYKKAFDSVPHSWLIYILQHYKIHPNIVSFLGEAMLQWKTKLKLMNNISLTTEFIKIQRGIFQGDALSPLWFCMALNPLSKLLNNTNIGFKLKHNNTFHILSHLLYMDDIKIYATNNTELFKLADITQTFSTDIHMQFGVDKCKIHSINRGKIENNSYLLDTGEQIEPMDEHSTYKYLGFHQSKQIHQKATKLELTKKFKARINQILRTQLNSRNTVKAINTYAIPVLIYSFGIINWSQSDLLKLQRIINTHMTAHRKHHPRSCTQRLTLSRQDGGRGLIDIQNLHNNLIDKLRKYFYFKAEQSKLHKFLVESDQNLTPLKLCHRNIQPKVINKQQKIDMWSQKSLHGRHLADLSQAHVDKETSNEWLRRGELFPETEAFVIAIQDQVIDTRNYQKFITHVPNLPTDLCRRCHSSSETIQHITGSCKSIVQTDYKHRHDQVAAIIHQNLAYRHLFIPKKIAYYKYKPSTVLENNLFKIYWDRTIITDKTIHYNRPDITILDKVKKTVFIIDIAVCNTHNLLTTHTEKMAKYTDLSTEIKKQWQVNAVKIVPIIISTTGVVPKTLQNNLSILEMPKSTTILIQKAVLLNTCRLTRKFLASSSS

SEQ ID NO: 23170 - protein, 1029 aa, Junonia evarete
MKWTDEINEDIIRFYFEVTQLEINKTAYRKKLYELFIEKYPNLSNLTEQRIADQRRLIFNNKMYTNRINDLKKEVELNLTSMNILPQLEREQNYNVTNTHHIHNQNATDNTQTLTEIITLNNSDNENNPNHGHIETNSIEIEFNNAVARFSTLDPEERPFIPKQKTSRKFAQIVHCLNNEILPKYLNQDLDFISLHTLIYAAAYTAATFNGTRFKIDENRNTNQKNRKPSWQKRIESRIEKYRLEIGRLTQYIQGNRSQRIVKTVDEIQNKYKTHSQHEEPNTEPQHFLDTLKQKLNAISTRLKRYLTCTKRKKQNTIFLNNEKHFYRTLNFNHQTNSSQPNESPSPQHLRQFWAGIWENPVQHNSQAGWLQKIADTSNINQMDFENIPADIMLQVIKRTHNWKAPGTDNIHNYWYKKLTCTHPFIHKHICTFIQSPKTMPKFITHGITYMLPKGSDTKNPANYRPITCLQTIYKIITGCISEIIYTHLDQYNILAEQQKGCRKSSQGCKEQLTIDAIVMRQAHTRNRNIHTMYVDYKKAFDSVPHSWLIYILQHYKIHPNIVSFLGEAMLQWKTKLKLMNNISLTTEFIKIQRGIFQGDALSPLWFCMALNPLSELLNNTNIGFKLKHNNAFHILSHLLYMDDIKIYATNNTELFKLADITQTFSTDIHMQFGVDKCKIHSINRGKIENNSYLLDTGEQIEPMDEHSTYKYLGFHQSKQIHQKATKLELTKKFKARINQILRTQLNSRNTVKAINTYAIPVLIYSFGIINWSQSDLLKLQRIINTHMTAHRKHHPRSCTQRLTLPRQDGGRGLIDIQNLHNNLIDKLRKYFYFKAEQSKLHKFLVESDQNLTPLKLCHRNIQPKVINKQQKIDMWSQKSLHGRHLADLSQAHVDKETSNEWLRRGELFPETEAFVIAIQDQVIDTRNYQKFITRVPNLPTDLCRRCHSSSETIQHITGSCKSIVQTDYKHRHDQVAAIIHQNLAYRHLFIPKKIVYYKYKPCTVLENNLFKISMWKKQETFFDFDDFF

SEQ ID NO: 23171 - protein, 1364 aa, Trichoplusia ni
MNSQNKRYSLRPLPGGRRGASGADAGCHSMRTVGDGGLNRRVPLEQNTTADRSSSPSSSEHSLFSNIPSPSSTHTLFKSPISSPSSMYSFRSTRSTAVVQEAIANLPAPTTGPSRARKKWTESMNRFIWRTYLQITKCETTQMNNYLEPLHQAFNDIYPEMQATRQRLGDQRRAILRRKLLPQHILDEIVSEIQDQIQTNDCHHPIIHNHSQIEHTTQTNINNNTRLKWSEEVNEDIIRCYFEVTEVEVNKTAYRKKLFELFKERHPHLSHVTEQRIADQRRLVFNNKSYENKIVEIRREVELKLTAENHQASIDQNLNIEHRQLIQDYLLDNTPVTLEDSISLSVNSINANNLVPNNIEEYRSIETEFDRAVLQFNNMHPESRPFIPKQKSSRKFAQIVNYLNNVILPRYLSHGLDFNSLHTYIYSAAYAAATCNGTRLKIQENTNRSSDSRKPTWQRRIESRIKKYRLELGRLTQYIAGRRNRKIVKTVEEIMIKYNSHSKHEEPNTEPQHFLDTIKQKLNAISSRLRRYLACTQRKKQNATFVNNEKQFYRTLGNFSQINTEVASETPSPQILQQFWSGIWENPVQHNADADWLNKTAKNVLINEMEFENIPIDTFTRVINSTHNWKAPGTDHIHNYWYKKLTCTHPFIHKHICHFIQSPDIMPSFITHGITYMLPKSSDPTDPANYRPITCLQTIYKIITGCISQLIYKHLENHNILAEQQKGCKQNSQGCKEQLTIDAIVMKQAQTKNRNIHTMFIDYKKAFDSVPHSWLIYILKHYKIHPNIISFLNTSMLQWETKLKLIKNKPITTGPIKIQRGIFQGDALSPLWFCMALNPLSELLNGTNIGFKLKYNNSVHAISHLLYMDDIKLFAATNTDLTKLADITQLFSTDIKMEFGVDKCKIFSVNKGKIQANSYILDTGEQVEPMDENDTYKYLGFHQSKQIHQKFAKSELTNKFKRRLNQILKTHLNSKNTIKAINTFAIPVLTYSFGIIKWSQSDLIKLQRIINTRMTANRKHHPRSCIQRLTLPRQDGGRGLIDIHNLHHNIIEKLRKYFYTKAEESQLHKQVVGIDKKLTPLNLCNSTWQIKLVNKEQKMDMWSQKSLHGRHFADLRQEHVDKDASNEWLRRGELFPETEAFVIAIQDQVIDTRNYQKFITRIPNLPTDLCRRCHSSSETIQHITGACKSIVQTDYKHRHDQVASIIHQNLAHKHSFITQKIAYYKYKPSTVLENNRFKIYWDRTIITDKTVHFNRPDITVLDKSEKTVFVIDVAVCNTHNLLTTYTEKMSKYVDLATEIKRQWQVETVKIVPIIISTTGVVPKSLQPNLNLLDMPKSTLTLLQKATLLNTCRLTRKFLASSSSS

SEQ ID NO: 23172 - protein, 1240 aa, Junonia genoveva
MNRFIWRTYLLITKCETTQMNNYLEFLHREFHNRYPEMQATRQRLGDQKRAILRRKLLPQNILDEIALQVKEHIQTENVNHSSTHNHTDVIISSQTNITSNKRMKWTDEINEDIIRFYFEVTELEINKTAYRKKMYELFIEKYPHLSNLTEQRIADQRRLIFNNKMYTNRIHDLKKEVELKLMNINNQSQLERELNYNATITQQTHHENIIDNTLTLTDIITLNNPENENNLNPDRIETNNIETEFNNALTRFNTTDPEERPFIPKQKSSRKFAQIVNYLNDKILPKHLNHELDFISLNTLIYSAAFTAATCNGTRFKTDENLNTNKQNRKPSWQKRIEKRIKKYRLEIGRLTQYIQGNRSQRIVKTVDEIQNKYKTHSQHEEPNTEPQHFLDTLKQKLNAISTRLKRYLTCTKRKKQNTIFLNNEKHFYRTLNFNHQTNSSQPNESPSPQHLRQFWAGIWENPVQHNSQAGWLQKIADTSNINQMDFENIPADIMLQVIKRTHNWKAPGTDNIHNYWYKKLTCTHPFIHKHICTFIQSPKTMPKFITHGITYMLPKGSDTKNPANYRPITCLQTIYKIITGCISEIIYTHLDQYNILAEQQKGCRKSSQGCKEQLTIDAIVMRQAHTRNRNIHTMYVDYKKAFDSVPHSWLIYILQHYKIHPNIVSFLGEAMLQWKTKLKLMNNISLTTEFIKIQRGIFQGDALSPLWFCMALNPLSELLNNTNIGFKLKHNNAFHILSHLLYMDDIKIYATNNTELFKLADITQTFSTDIHMQFGVDKCKIHSINRGKIENNSYLLDTGEQIEPMDEHSTYKYLGFHQSKQIHQKATKLELTKKFKARINQILRTQLNSRNTVKAINTYAIPVLIYSFGIINWSQSDLLKLQRIINTHMTAHRKHHPRSCTQRLTLPRQDGGRGLIDIQNLHNNLIDKLRKYFYFKAEQSKLHKFLVESDQNLTPLKLCHRNIKPKVINKQQKIDMWSQKSLHGRHLADLSQAHVDKETSNEWLRRGELFPETEAFVIAIQDQVIDTRNYQKFITRVPNLPTDLCRRCHSSSETIQHITGSCKSIVQTDYKHRHDQVAAIIHQNLAYRHLFIPKKIAYYKYKPSTVLENNLFKIYWDRTIITDKTIHYNRPDITILDKIKKTVFIIDIAVCNTHNLLTTHTEKMAKYIDLSTEIKKQWQVNAVKIVPIIISTTGVVPKTLQNNLSILEMPKFTTILIQKAVLLNTCRLTRKFLASSSS

SEQ ID NO: 23173 - protein, 1374 aa, Fabriciana adippe
MEYSMNSQNKRYNLRPLPGGRRGASGADAGCLSMRTVGDGGLSRRVPLEQNTTADRLPSPSSSEHSLFINIPSPSSTHTLFRSPISSPSSIYSSRSTRSTAVVQEAVAVNPAPTAGPSRARKKWSEEMNRFIWRTYLTITKCETTQMNNYLESLHTEFDNRYPEMQATRQRVGDQRRTILRRKLLPQHVLDEINKEVKEEIQTTDNYSSFAHSHNHTQHTTLTQSHANSTANTRIKWSDEMNEDIIRLYFEITELEVNKTSYRKKLYELFIEKYPNLSHITEQRIADQRRVIFCNKLNTDKIRRLKREVELKLIEQNNYLHSNTEQLHDTVENTHNTQYDNTLNSTHTPIVPTTSESVGNDIELPSTQNDAIELNSIEVEFNKAVGQFSDVHPEERPYIPKQRSSRKFAQIVQYLNSVILPKHLSREIDFMSLHTLIYSAAFAAATCNGTKFRVDNVPLSRCKRKPPWQRRIERRIEKYRFEIGRLTQYIVGNRNSRILKTVEEIKVKYKTHSQHEEPNTEPQDFLDTLKQKLNAASNRLRRYLACTHRKQQNSTFVNNEKQFYRTLGINNNQQNLNLEVPSPKNLQQFWAELWENPVQHETNADWLQRIEDTTLTPTMKFENIPIDTFLQVIKRTHNWKAPGTDHIHNYWYKKFTCTHSFLHSNIIRFIESPHTMPSFITHGITYMLPKGSDSKNPANYRPVTCLQTIYKIITGCISDIIYKHLDQHNILAEQQKGCKRNSQGCKEQLTIDAIVMKQAQVKNRNIHTMYVDYKKAFDSVPHSWLIYVLEHYKIHESVISFLRTTMLQWQTKLKLINDSCLTTDPIKIQRGIFQGDALSPLWFCLALNPLSELLNSTKLGFKLKYNNSSHILSHLLYMDDIKIYASNHTELIKLADITQLFSNDIHMQFGVDKCKIHSVNRGKVQSNTYVLETGEHIEPMDEHSTYKYLGFHQSKQIHQKQAKLELTNTFKIRLNQILRTHLNSRNSIKAINTYAIPVLTYSFGIIKWSKSDLIKLQRIINTRMTTHRKHHPRSCIQRLTLPRQEGGRGLIDIQNLHSNIVDKIRKYFYAKADESLLHKYVTDIDKNLTPLNLSNTNLQPNVVSKQQKLDMWSQKSLHGRHLTDLSQEHVDKDASNDWLRRGELFPETEAFVIAIQDQVIDTRNYQKHISRIPNLVTDLCRRCHSNSETIQHITGACKSIVQTDYKHRHDQVAAIIHQNLAHRHSFIPHKIAYYKYKPNTVLENNLIKIYWDRTIITDRTIHYNRPDITILDKINNSVFVIDIAVCNTHNLLTTYTEKMAKYVDLAIEIKRQWQVDTVKIVPLVISSTGVVPKSLQPNLNTLGVPKSTLTLLQKATLLNTCRLTRKFLASSSSS

SEQ ID NO: 23174 - protein, 1372 aa, Junonia neildi
MEKIMESQTKRYSLRPLPGGRRGASGADAGCHSMRSVGDGGLSRRVPLEQNTTAERSSSPSSTASSERSLFSNIPSPSSTQSLFRSPNSSPSSSSTYSSRTTRSTAVVQEASAINPAPTVGLNRARKKWTEDMNRFIWRTYLLITKCETTQMNNYLEFLHREFHNRYPEMQATRQRLGDQKRAILRRKLLPQNILDEIALQVKEHIQTENVNHSSTHNHTDVIISSQTNITSNKRMKWTDEINEDIIRFYFEVTELEINKTAYRKKLYELFIEKYPHLSNLTEQRIADQRRLIFNNKMYTNRIHDLKKEVELKLMNINNQSQLERELNYNATITQQTHHENIIDNTLTLTDIITLNNPENENNLNPDRIETNKIETEFNNALTRFNTTDLEERPFIPKQKSSRKFAQIVNYLNDKILPKHLNHELDFISLNTLIYSAAFTAATCNGTRFKTDENLNTNKQNRKPSWQKRIEKRIKKYRLEIGRLTQYIQGNRSQRIVKTVDEIQNKYKTHSQHEEPNTEPQHFLDTLKQKLNAISTRLKRYLTCTKRKKQNTIFLNNEKHFYRTLNFNHQTNSSQPNESPSPQHLRQFWAGIWENPVQHNSQAGWLQKIADTSNINQMDFENIPADIMLQVIKRTHNWKAPGTDNIHNYWYKKLTCTHPFIHKHICTFIQSPKTMPKFITHGITYMLPKGSDTKNPANYRPITCLQTIYKIITGCISEIIYTHLDQYNILAEQQKGCRKSSQGCKEQLTIDAIVMRQAHTRNRNIHTMYVDYKKAFDSVPHSWLIYILQHYKIHPNIVSFLGEAMLQWKTKLKLMNNISLTTEFIKIQRGIFQGDALSPLWFCMALNPLSELLNNTNIGFKLKHNNAFHILSHLLYMDDIKIYATNNTELFKLADITQTFSTDIHMQFGVDKCKIHSINRGKIENNSYLLDTGEQIEPMDEHSTYKYLGFHQSKQIHQKATKLELTKKFKARINQILRTQLNSRNTVKAINTYAIPVLIYSFGIINWSQSDLLKLQRIINTHMTAHRKHHPRSCTQRLTLPRQDGGRGLIDIQNLHNNLIDKLRKYFYFKAEQSKLHKFLVESDQNLTPLKLCHRNIQPKVINKQQKIDMWSQKSLHGRHLADLSQAHVDKETSNEWLRRGELFPETEAFVIAIQDQVIDTRNYQKFITRVPNLPTDLCRRCHSSSETIQHITGSCKSIVQTDYKHRHDQVAAIIHQNLAYRHLFIPKKIAYYKYKPSTVLENNLFKIYWDRTIITDKTIHYNRPDITILDKIKKTVFIIDIAVCNTHNLLTTHTEKMAKYIDLSTEIKKQWQVNAVKIVPIIISTTGVVPKTLQNNLSILEMPKSTTILIQKAVLLNTCRLTRKFLASSSS

SEQ ID NO: 23175 - protein, 1240 aa, Junonia litoralis
MNRFIWRTYLLITKCETTQMNNYLEFLHREFHNRYPEMQATRQRLGDQKRAILRRKLLPQNILDEIALQVKEHIQTENVNHSSTHNHTDVIISSQTNITSNKRMKWTDEINEDIIRFYFEVTELEINKTAYRKKMYELFIEKYPHLSNLTEQRIADQRRLIFNNKMYTNRIHDLKKEVELKLMNINNQSQLERELNYNATITQQTHHENIIDNTLTLTDIITLNNPENENNLNPDRIETNNIETEFNNALTRFNTTDLEERPFIPKQKSSRKFAQIVNYLNDKILPKHLNHELDFISLNTLIYSAAFTAATCNGTRFKTDENLNTNKQNRKPSWQKRIEKRIKKYRLEIGRLTQYIQGNRSQRIVKTVDEIQNKYKTHSQHEEPNTEPQHFLDTLKQKLNAISTRLKRYLTCTKRKKQNTIFLNNEKHFYRTLNFNHQTNSSQPNESPSPQHLRQFWAGIWENPVQHNSQAGWLQKIADTSNINQMDFENIPADIMLQVIKRTHNWKAPGTDNIHNYWYKKLTCTHPFIHKHICTFIQSPKTMPKFITHGITYMLPKGSDTKNPANYRPITCLQTIYKIITGCISEIIYTHLDQYNILAEQQKGCRKSSQGCKEQLTIDAIVMRQAHTRNRNIHTMYVDYKKAFDSVPHSWLIYILQHYKIHPNIVSFLGEAMLQWKTKLKLMNNISLTTEFIKIQRGIFQGDALSPLWFCMALNPLSELLNNTNIGFKLKHNNAFHILSHLLYMDDIKIYATNNTELFKLADITQTFSTDIHMQFGVDKCKIHSINRGKIENNSYLLDTGEQIEPMDEHSTYKYLGFHQSKQIHQKATKLELTKKFKARINQILRTQLNSRNTVKAINTYAIPVLIYSFGIINWSQSDLLKLQRIINTHMTAHRKHHPRSCTQRLTLPRQDGGRGLIDIQNLHNNLIDKLRKYFYFKAEQSKLHKFLVESDQNLTPLKLCHRNIQPKVINKQQKIDMWSQKSLHGRHLADLSQAHVDKETSNEWLRRGELFPETEAFVIAIQDQVIDTRNYQKFITRVPNLPTDLCRRCHSSSETIQHITGSCKSIVQTDYKHRHDQVAAIIHQNLAYRHLFIPKKIAYYKYKPSTVLENNLFKIYWDRTIITDKTIHYNRPDITILDKIKKTVFIIDIAVCNTHNLLTTHTEKMAKYIDLSTEIKKQWQVNAVKIVPIIISTTGVVPKTLQNNLSILEMPKSTTILIQKAVLLNTCRLTRKFLASSSS

SEQ ID NO: 23176 - protein, 1240 aa, Junonia evarete
MNRFIWRTYLLITKCETTQMNNYLEFLHREFHNRYPEMQATRQRLGDQKRAILRRKLLPQNILDEIALQVKEHIQTENVNHSSTHNHTDVIISSQTNITSNKRMKWTDEINEDIIRFYFEVTELEINKTAYRKKMYELFIEKYPHLSNLTEQRIADQRRLIFNNKMYTNRIHDLKKEVELKLMNINNQSQLERELNYNATITQQTHHENIIDKTLTLTDIITLNNPENENNLNPDCIETNNIETEFNNALTRFNTTDPEERPFIPKQKSSRKFAQIVNYLNDKILPKHLNHELDFISVNTLIYSAAFTAATCNGTRFKTDENLNTNKQNRKPSWQKRIEKRIEKYRLEIGRLTQYIQGNRSQRIVKTVDEIQNKYKTHSQHEEPNTEPQHFLDTLKQKLNAISTRLKRYLTCTKRKKQNTIFLNNEKHFYRTLNFNHQTNTSQPNESPSPQHLRQFWAGIWENPVQHNSQAGWLQKIADTSNINQMDFENIPADIMLQVIKRTHNWKAPGTDNIHNYWYKKFTCTHPFIHKHICTFIQSPKTMPKFITHGITYMLPKGSDTKNPANYRPITCLQTIYKIITGCISEIIYTHLDQYNILAEQQKGCRKSSQGCKEQLTIDAIVMRQAHTRNRNIHTMYVDYKKAFDSVPHSWLIYILQHYKIHPNIVSFLGEAMLQWKTKLKLMNNISLTTEFIKIQRGIFQGDALSPLWFCMALNPLSELLNNTNIGFKLKHNNAFHILSHLLYMDDIKIYATNNTELFKLADITQTFSTDIHMQFGVDKCKIHSINRGKIENNSYLLDTGEQIEPMDEHSTYKYLGFHQSKQIHQKATKLELTKKFKARINQILRTQLNSRNTVKAINTYAIPVLIYSFGIINWSQSDLLKLQRIINTHMTAHRKHHPRSCTQRLTLPRQDGGRGLIDIQNLHNNLIDKLRKYFYFKAEQSKLHKFLVESDQNLTPLKLCHRNIQPKVINKQQKIDMWSQKSLHGRHLADLSQAHVDKETSNEWLRRGELFPETEAFVIAIQDQVIDTRNYQKFITRVPNLPTDLCRRCHSSSETIQHITGSCKSIVQTDYKHRHDQVAAIIHQNLAYRHLFIPKKIAYYKYKPSTVLENNLFKIYWDRTIITDKTIHYNRPDITILDKIKKTVFIIDIAVCNTHNLLTTHTEKMAKYIDLSTEIKKQWQVNAVKIVPIIISTTGVVPKTLQNNLSILEMPKSTTILIQKAVLLNTCRLTRKFLASSSS

SEQ ID NO: 23177 - protein, 1453 aa, Arctia plantaginis
MEHLMETEKKKYNLRSLPGERRGASGADAGCHSMRTIGGGTLSRRTLTKQSTTAGRGELSRRAHLVEATAGRNELNWRTHDVEVTVDSSGDDTKTLSSSIPQTCLPYMTRRTARLSSTSTNNAYAMQRRSTERLPSPSLSTTQSEHSLFSNIPSPSSTHSLFRSPTSSLSSTCTYSSRTTRSTAAVQEALATNPVPTAGPSRTRKKWTEDMNRFIWRTYLLITNCETSQMNNYLEALHREFDNRYPDMHATRQRLGDQKRAIIRRKLLSQPVLDEIVFEVKEQIGDKTLNHSQIHSHDDHTTRNRANVFNNSRMKWTEEMNDDVIRCYLEATELETNKTAYRKKLYDLFLEKHPNLSNLTEQRIADQRRLIFINKTYTNRIIKLKHEVQLKLTDQNNQILPNLNDSITEQTHNTHESLIDCTLTLTETTTTTTNAQNENITIHNTDSNSSLDSNRIEIEFNKALTRFNRIDPEARPYIPKQKTSRKFAKITQFLNINILPKHLNHELDFSSLHTLIYSAAYTAAICNGTKFSTEDSITTYKRNRTPAWQRRIESRIEKYRLEIGRLTQYMSGNRSQRILKTVEEIKNKYKTHSQHEEPNTEPQHFLDTLKQKLNATANRLKRYLNCTKRKQQNGNFINNEKQFYRTLGHNNQITSKTTEIPSPQNLHQFWAGIWENPVQHNTHADWLQKIADTSNINQMEFENIPVDTFIQIINGTHNWKAPGTDNIHNYWYKKLTCTHPFVHSHICKFIQSPHTLPTFITQGITYMLPKGSDSKNPANYRPITCLQTIYKIITSCISEIIYRHLNEYNVLAEQQKGCKKNSQGCKEQLIIDSIVMRQAQTKNRNIHMMYVDYKKAFDSVPHSWLLYVLDHYKIHPSLITFLSTAMLHWKTKLKLINNELTTDLIKIKRGIFQGDALSPLWFCMALNPLSELLDSTNIGFKLRCNNSFHILSHLLYMDDIKIYATNNTELNKLTDITQSFSRDIHMQFGVDKCKTHSINRGKTEYNFYTLDTGEQIEPMDEHTTYKYLGFRQSRQIQQKQTKLELTQKFKARISQILRTQLNSRNTIKAINTYAIPVLIYSFGILAWSQSDLIKLQRTINTHMTTNRKHHPRSCTQRLTLPRQDGGRGLIDIQNLHNNLIDKLRKYFYAQAGQSHLHKFLTDIDKKLTPLNLNDTNIQPKLLSKQQKIDLWAQKSLHGRHLADLSQTHVDRKASNEWLRRGELFPETEAFVIAIQDQVIDTLNYKKHIIRTPNLPTDLCRRCHSSSETIQHITGSCKSIVQTDYKHRHDQVAAIIHQNLAHKYSFISNKTAYYKYKPSTVLENNAFKIYWDRTIITDKTIHYNRPDITILDKTNKIVFIIDIAVCNTHNLLTTHTEKMTKYIDLATEIKRQWQVDRVKIVPIVISTTGVVPKTLQDSLNTLEMPKSSLILLQKAVLLNTCRLTRKFLASSSSS

SEQ ID NO: 23178 - protein, 1409 aa, Arctia plantaginis
MCFHVPKILTAGRGELSRRAHRVEATAGRNELNWQTHDVEVTADSSGDDTKTLSSSIPQTCLPYMTRRTARLSSTNTNNAYAMQRRSTERLPSPSLSTTQSEHSLFSNIPSPSSTHSLFRSPTSSLSSTCTYSSRTTRSTAAVQEALATNPVPTAGPSRTRKKWTEDMNRFIWRTYLLITNCETSQMNNYLEALHREFDNRYPDMHATRQRLGDQKRAIIRRKLLPQPVLDEIVFEVKEQIGDKTLNHSQIHSHDDHTTRNRANVFNNSRMKWTEEMNDDVIRCYLEATELETNKTAYRKKLYDLFLEKHPNLSNLTEQRIADQRRLIFINKTYTNRINKLKHEVQLKLTDQNNQILPNLNDSITEQTHNTHESLIDCTLTLTETSTTTNAQNENITIHNTDSNSSLDSNRIEIEFNKALTRFNIIDPEARPYIPKQKTSRKFAKITQFLNVNILAKHLNHELDFSSLHTLIYSAAYTAAICNGTKFSTEDSITTYKRNRTPAWQRRIESRIEKYRLEIGRLTQYMSGNRSQRILKTVEEIKNKYKTHSQHEEPNTEPQHFLDTLKQKLNATANRLKRYLKFTKRKQQNGNFINNEKQFYRTLGHNNQITSKTTEIPSPQNLHQFWAGIWENPVQHNTHADWLQKIADTSNINQMEFENIPVDTFIQIINRTHNWKAPGTDNIHNYWYKKLTCTHPFVHSHICKFIQSPHTLPTFITQGITYMLPKGSDSKNPANYRPITCLQTIYKIITSCISEIIYRHLNEYNVLAEQQKGCKKNSQGCKEQLIIDSIVMRQAQTKNRNIHMMYVDYKKAFDSVPHSWLLYVLDHYKIHPSLITFLSTAMLHWKTKLKLINNELTTDLIKIKRGIFQGDALSPLWFCMALNPLSELLDSTNIGFKLRCNNSFHILSQLLYMDDIKIYATNNTELNKLTDITQSFSTDIHMQFGVDKCKTHSINRGKTEYNFYTLDTGEQIEPMDEHTTYKYLGFRQSRQIQQKQTKLELTQKFKARISQILRTQLNSRNTIKAINTYAIPVLIYSFGILAWSQSDLIKLQRTINTHMTTNRKHHPRSCTQRLTLPRQDGGRGLIDIQNLHNNLIDKLRKYFYAQAGQSHLHKFLTDIDKKLTPLNLNDTNIQPKLLSKQQKIDLWAQKSLHGRHLADLSQTHVDREASNEWLRRGELFPETEAFVIAIQDQVIDTLNYKKHIIRTPNLHTDLCRRCHSSSETIQHITGSCKSIVQTDYKHRHDQVAAIIHQNLAHKYSFISNKTAYYKYKPSTVLENNAFKIYWDRTIITDKTIHYNRPDITILDKTNKIVFIIDIAVCNTHNLLTTHTEKMTKYTDLATEIKRQWQVDRVKIVPIVISTTGVVPKTLQDSLNTLEMPKSSLILLQKAVLLNTCRLTRKFLASSSSS

SEQ ID NO: 23179 - protein, 1114 aa, Arctia plantaginis
MNNYLEALHREFDNRYPDMHATRQRLGDQKRAIIRRKLLSQPVLDEIVFEVKEQIGDKTLNHSQIHSYDDHTTRNRANVFNNSRMKWMEEMNDDVIRCYLEATELETNKTAYRKKLYDLFLEKHPNLSNLTEQRIADQRRLIFINKTYTNRINKLKHEVQLKLTDPNNQILPNLNDSITEQTHNTHESLIDCTLTLTETTTTTNAQNENITIHNTDSNSSLDSNRIEIEFNKALTRFNIIDPEARPYIPKQKTSRKFAKITQFLNINILPKHLNHELDFSSLHTLIYSAAYTAAICNGTKFSTEDSITTYKRNRTPTWQRRIESRIEKYRLEIGRLTQYMSGNRSQRILKTVEEIKNKYKTHSQHEEPNTEPQHFLDTLKQKLNATANRLKRYLNCTKRKQQNGNFINNEKQFYRTLGHNNQITSKTTEIPSPQNLHQFWAGIWENPVQHNTHADWLQKIADTSNINQMEFENIPVDTFLQIIHRTHNWKAPGTDNIHNYWYKKLTCTHPFVHSHICKFIQSPHTLPTFITQGITYMLPKVSDYKNPANYRPITCLQTIYKIITSCISEIIYRHLNEYNVLAEQQKGCKKNSQGCKEQLIIDSIVMRQAQTKNRNIHMLYVDYKKAFDSVPHSWLLYVLDHYKIHPSLITFLSTAMLQWKTKLKLINNELTTDLIKIKRGIFQGDALSPLWFCMALNPLSELLDSTNIGFKLRCNNSFHILSHLLYMDDIKIYATNNTELNKLTDITQSFSTDIHMQFGVDKCKTHSINHGKTEYNFYTLDTGEQIEPMDEHTTYKYLGFRQSRQIQQKQTKLELTQKFKARISQILRTQLNSRNTIKAINTYAIPVLIYSFGILAWSQSDLIKLQRTINTHMSTNRKHHPRSCTQRLTLPRQDGGRGLIDIQNLHNNLIDKLRKYFYAQAGQSHLHKFLTDIDKKLTPLNLNDTNIQPKLLSKQQKIDLWAQKSLHGRHLADLSQTHVDRKASNEWLRRGELFPETEAFVIAIQDQVIDTLNYKKHIIRTPNLPTDLCRRCHSSSETIQHITGSCKSIVQTDYKHRHDQVAAIIHQNLAHKYSFISNKTAYYKYKPSTVLENNAFKIYWDRTIITDKTIQLTK

SEQ ID NO: 23180 - protein, 1451 aa, Arctia plantaginis
MEHLMETEKKKYNLRSLPGERRGASGADAGCHSMRTIGGGTLSRRTLTKQSTTAGRGELSRRAHRVEATAGRNELNWRTHDVEVTADSSGDDTKTLSSSIPQTCLPYMTRRTARLSSTSTNNAYAMQRRSTERLPSPSLSTTQSEHSLFSNIPSPSSTSLFRSPTSSLSSTCTYSSRTTRSTAAVQEALVTNPVPTAGPSRTRKKWTEDMNRFIWRTYLLITNCETSQMNNYLEALHREFDNRYPDMHATRQRLGDQKRAIIRRKLLPQPVLDEIVFEVKEQIGDKTLNHSQIHSHDDHTTRTRANVFNNSRMKWTADMNDDVIRCYLEATELETNKTAYRKRLYDLFLEKHPNLSNLTEQRIADQRRLIFINKTYTNRINKLKHEVQLKLTDQNNQILPNLNDSITEQTHNTHESLIDCTLTLTETTTTTNAQNENITIHNTDSNNSLDSNRIEIEFNKALTRFNIIDPEARPYIPKQKTSRKFAKITQFLNINILPKHLNHELDFSTLHTLIYSAAYTAAICNGTKFSTEDSITTYKRNRTPAWQRRIESRIEKYRLEIGRLTQYMSGNRSQRILKTVEEIKNKYKTHSQHEEPNTEPQHFLDTLKQKLNATANRLKRYLNCTKRKQQNGNFINNEKQFYRTLGHNNQITSKTTEIPSPQNLHQFWAGIWENPVQHNTHADWLQKIADTSNINQMEFENIPVDTFIQIINRTHNWKAPGTDNIHNYWYKKLTCTHPFVHSHICKFIQSPHTLPTFITQGITYMLPKGSDSKNPANYRPITCLQTIYKIITSCISEIIYRHLNEYNVLAEQQKGCKKNSQGCKEQLIIDSIVMRQAQTKNRNIHMMYVDYKKAFDSVPHSWLLYVLDHYKIHPSLITFLSTAMLHWKTKLKLINNELTTDLIKIKRGIFQGDALSPLWFCMALNPLSELLDSTNIGFKLRCNNSFHILSHLLYMDDIKIYATNNTELNKLTDITQSFSTDIHMQFGVDKCKTHSINRGKTEYNFYTLDTGEQIEPMDEHTTYKYLGFRQSRQIQQKQTKLELTQKFKARISQILRTQLNSRNTIKAINTYAIPVLIYSFGILAWSQSDLIKLQRTINTHMTTNRKHHPRSCTQRLTLPRQDGGRGLIDIQNLHNNLIDKLRKYFYAQAGQSHLHKFLTDIDKKLTPFNLNDTNIQPKLLSKQQKIDLWAQKSLHGRHLADLSQTHVDRKASNEWLRRGELFPETEAFVIAIQDQVIDTLNYKKHIIRTPNLPTDLCRRCHSSSETIQHITGSCKSIVQTDYKHRHDQVAAIIHQNLAHKYSFISNKTAYYKYKPSTVLENNAFKIYWDRTIITDKTIHYNRPDITILDKTNKIVFIIDIALCNTHNLLTTHTEKMTKYTDLATEIKRQWQVDRVKIVPIVISTTGVVPKTLQDSLNTLEMPKSSLILLQKAVLLNTCRLTRKFLASSSSS

SEQ ID NO: 23181 - protein, 1345 aa, Arctia plantaginis
MTRRTARLSSTSTNNAYAMQRRSTERLPSPSLSTTQSEHSLFSNIPSPSSTHSLFRSPTSSLSSTCTYSSRTTRSTAAVQEALATNPVPTAGPSRTRKKWTEDMNRFIWRTYLLITNCETSQMNNYLEALHREFDNRYPDMHATRQRLGDQKRAIIRRKLLSQPVLDEIVFEVKEQIGDKTLNHSQIHSHDDHTTRNRANVFNNSRMKWTEEMNDDVIRCYLEATELETNKTAYRKKLYDLFLEKHPNLSNLTEQRIADERRLIFINKTYTNRINKLKHEVQLKLTDQNNQVLPNLNDSITEQTHNTHESLIDCTLTLTETTTTTNAQNENITIHNTNSNSSLDSNRIEIEFNKALTRFNIIDPEARPYIPKQKTSRKFAKITQFLNINILPKHLNHELDFSSLHTLIYSAAYTAAICNGTKFSTEDSITTYKRNRTPAWQRRIESRIEKYRLEIGRLTQYMSGNRSQRILKTVAEIKNKYKTHSQHEEPNTEPQHFLDTLKQKLNATANRLKRYLNCTKRKQQNGNFINNEKQFYRTLGHNNQITSKTTEIPSPQNLHQFWAGIWENPVQHNTHADWLQKIADTSNINQMEFENIPVDTFIQIINRTHNWKAPGTDNIHNYWYKKLTCTHPFVHSHICKFIQSPHTLPTFITQGITYMLPKGSDSKNPANYRPITCLQTIYKIITSCISEIIYRHLNEYNVLAEQQKGCKKNSQGCKEQLIIDSIVMRQAQTKNRNIHMMYVDYKKAFDSVPHSWLLYVLDHYKIHPSLITFLSTAMLHWKTKLKLINNELTTDLIKIKRGIFQGDALSPLWFCMALNPLSELLDSTNIGFKLRCNNSFHILSHLLYMDDIKIYATNNTELNKLTDITQSFSTDIHMQFGVDKCKTHSINRGKTEYNFYTLVTGEQIEPMDEHTTYKYLGFRQSRQIQQKQTKLELTQKFKARISQILRTQLNSRNTIKAINTYAIPVLIYSFGILAWSQSDLIKLQRTINTHMTTNRKHHPRSCTQRLTLPRQDGGRGLIDIQNLHNNLIDKLRKYFYAQAGQSHLHKFLTDIDKKLTPLNLNDTNIQPKLLSKQQKIDLWAQKSLHGRHLADLSQTHVDRKASNEWLRRGELFPETEAFVIAIQDQVIDTLNYKKHIIRTPNLPTDLCRRCHSSSETIQHITGSCKSIVQTDYKHRHDQVAAIIHQNLAHKYSFISNKTAYYKYKPSTVLENNAFKIYWDRTIITDKTIHYNRPDITILDKTNKIVFIIDIAVCNTHNLLTTHTEKITKYTDLATEIKRQWQVDRVKIVPIVISTTGVVPKTLQDSLNTLEMPKSSLILLQKAVLLNTCRLTRKFLASSSSS

SEQ ID NO: 23182 - protein, 1452 aa, Arctia plantaginis
MEHLMETEKKKYNLRSLPGERRGASGADAGCHSMRTIGGGTLSRRTLTKESTTAGRGELSRRAHRVEATAGRNELNWRTHDVEVTADSSGDDTKTLSSSIPQTCLPYMTRRTARLSSTSTNNAYAMQRRSTERLPSPSLSTTQSEHSLFSNIPSPSSTHSLFRSPTSSLSSTCTYSSRTTRSTAAVQEALATNPVPTAGPSRTRKKWTEDMNRFIWRTYLLITNCETSQMNNYLEALHREFDNRYPDMHATRQRLGDQKRAIIRRKLLSQPVLDEIVFEVKEQIGDKTLNHSQIHSHDEHTTRNRANVFNNSRMKWTEEMNDDVIRCYLEATELETNKTAYRKKLYDLFLEKHPNLSNLTEQRIADQRRLIFINKTYTNRINKLKHEVQLKLTDQNNQILPNLNDSITEQTHNTHESLIDCTLTLTETTTTTNAQNENITIHNTDSNSSLDSNRIEIEFNKALTRFNRIDPEARPYIPKQKTSRKFAKITQFLNINILPKHLNHELDFSSLHTLIYSAAYTAAICNGTKFSTEDSIITYKRNRTPAWQRRIESRIEKYRLEIGRLTQYMSGNRSQRILKTVEEIKNKYKTHSQHEEPNTEPQHFLDTLKQKLNATANRLKRYLNCTKRKQQNRNFINNEKQFYRTLGHNNQITSKTAEIPSPQNLHQFWAGIWENPVQHNTHADWLQKIADTSNINQMEFENIPVDTFIQIINRTHNWKAPGTDNIHNYWYKKLTCTHPFVHSHICKFIQSPHTLPTFITQGITYMLPKGSDSKNPANYRPITCLQTIYKIITSCISEIIYRHLNEYNVLAEQQKGCKKNSQGCKEQLIIDSIVMRQAQTKNRNIHMMYVDYKKAFDSVPHSWLLYVLDHYKIHPSLITFLSTAMLHWKTKLKLINNELTTDLIKIKRGIFQGDALSPHWFCMALNPLSELLDSTNIGFKLRCNNSFHILSHLLYMDDIKIYATNNTELNKLTDITQSFSRDIHMQFGVDKCKTHSINRGKTEYNFYTLDTGEQIEPMDEHTTYKYLGFRQSRQIQQKQTKLELTQKFKARISQILRTQLNSRNTIKAINTYAIPVLIYSFGILAWSQSDLIKLQRTINTHMTTNRKHHPRSCTQRLTLPRQDGGRGLIDIQNLHNNLIDKLRKYFYAQAGQSHFHKFLTDIDKKLTPLNLNDTNIQPKLLSKQQKIDLWAQKSLHGRHLADLSQTHVDRKASNEWLRRGELFPETEAFVIAIQDQVIDTLNYKKHIIRTPNLPTDLCRRCHSSSETIQHITGSCKSIVQTDYKHRHDQVAAIIHQNLAHKYSFISNKTAYYKYKPSTVLENNAFKIYWDRTIITDKTIHYNRPDITILDKTNKIVFIIDIAVCNTHNLLTTHTEKMTKYIDLATEIKRQWQVDRVKIVPIVISTTGVVPKTLQDSLNTLEMPKSSLILLQKAVLLNTCRLTRKFLASSSSS

SEQ ID NO: 23183 - protein, 1452 aa, Arctia plantaginis
MEHLMETEKKKYNLRSLPGERRGASGADAGCHSMRTIGGGTLSRRTLTKQSTTAGQGELSRRAHRVEATAGRNELNWRTHDVEVTADSSGDDTKTLSSSIPQTCLPYMTRRTARLSSTSTNNAYAMQRRSTERLPSPSLSTTQSEHSLFSNIPSPSSTHSLFRSPTSSLSSTCTYSSRTTRSTAAVQEALATNPVPTAGPSRTRKKWTEDMNRFIWRTYLLITNCETSQMNNYLEALHREFDNRYPDMHATRQRLGDQKRAIIRRKLLSQPVLDEIVFEVKEQIGDKTLNHSQIHSHDDHTTRNRANVFNNSRMKWTEEMNDDVIRCYLEATELETNKTAYRKKLYDLFLEKHPNLSNLTEQRIADQRRLIFINKTYTNRINKLKHEVQLKLTDQNNQILPNLNDSITEQTHNTHESLVDCTLTLTETTTTTNAQNENITIHNTDSNSSLDSNRIEIEFNKALTRFNRIDPEARPYIPKQKTSRKFAKITQFLNINILPKHLNHELDFSSLHTLIYSAAYTAAICNGTKFSTEDSIITYKRNRTPAWQRRIESRIEKYRLEIGRLTQYMSGNRSQRILKTVEEIKNKYKTHSQHEEPNTEPQHFLDTLKQKLNATANRLKRYLNCTKRKQQNGNFINNEKQFYRTLGHNNQITSKTTEIPSPQNLHQFWAGIWENPVQHNTHADWLQKIADTSNINQMEFENIPVDTFIQIINRTHNWKAPGTDNIHNYCYKKLTCTHPFVHSHICKFIQSPHTLPTFITQGITYMLPKGSDSKNPANYRPITCLQTIYKIITSCISEIIYRHLNEYNVLAEQQKGCKKNSQGCKEQLIIDSIVMRQAQTKNRNIHMMYVDYKKAFDSVPHSWLLYVLDHYKIHPSLITFLSTAMLHWKTKLKLINNELTTDLIKIKRGIFQGDALSPLWFCMALNPLSELLDSTNIGFKLRCNNSFHILSHLLYMDDIKIYATNNTELNKLTDITQSFSRDIHMQFGVDKCKTHSINRGKTEYNFYTLDTGEQIEPMDEHTTYKYLGFRQSRQIQQKQTKLELTQKFKARISQILRTQLNSRNTIKAINTYAIPVLIYSFGILAWSQSDLIKLQRTINTHMTTNRKHHPRSCTQRLTLPRQDGGRGLIDIQNLHNNLIDKLRKYFYAQAGQSHLHKFLTDIDKKLTPLNLNDTNIQPKLLSKQQKIDLWAQKSLHGRHLADLSQTHVDRKASNEWLRRGELFPETEAFVIAIQDQVIDTLNYKKHIIRTPNLPTDLCRRCHSSSETIQHITGSCKSIVQTDYKHRHDQVAAIIHQNLAHKYSFISNKTAYYKYKPSTVLENNAFKIYWDRTIITDKTIHYNRPDITILDKTNKIVFIIDIAVCNTHNLLTTHTEKMTKYIDLATEIKRQWQVDRVKIVPIVISTTGVVPKTLQDSLNTLEMPKSSLILLQKAVLLNTCRLTRKFLASSSSS

SEQ ID NO: 23184 - protein, 1452 aa, Arctia plantaginis
MEHLMETEKKKYYLRSLPGERRGASGADAGCHSMRTIGGGTLSRRTLTKQSTTAGRGELSRRAHRVEATAGRNELNWRTHDVEVTADSSGDDTKTLSSSIPQTCLPYMTRRTARLSSTSTNNAYAMQRRSTERLPSPSLSTTQSEHSLFSNIPSPSSTHSLFRSPTSSLSSTCTYSSRTTRSTAAVQEALATNPVPTAGPSRTRKKWTEDMNRFIWRTYLLITNCETSQMNNYLEALHREFDNRYPDMHATRQRLGDQKRAIIRRKLLPQPVLDEIVFEVKEQIGDKTINHSQIHSHDDHTTRTRANVFNNSRMKWTEEMNDDVIRCYLEATELETNKTAYRKKLYDLFLEKHPNLSNLTEQRIADQRRLIFINKTYTNRINKLKHEVQLKLTDQNNQILPNLNDSITEQTHNTHESLIDCTLTLTETTTTTNAQNENITIHNTDSNNSLDSNRIEIEFNKALTRFNIIDPEARPYIPKQKTSRKFAKITQFLNINILPKHLNHELDFSSLHTLIYSAAYTAAICNGTKFSTEDSITTYKRNRTPAWQRRIESRIEKYRLEIGRLTQYMSGNRSQRILKTVEEIKNKYKTHSQHEEPNTEPQHFLDTLKQKLNATANRLKRYLNCTKRKQQNGNFINNEKQFYRTLGHNNQITSKTTEIPSPQNLHQFWAGIWENPVQHNTHADWLQKIADTSNINQMEFENIPVDTFIQIINRTHNWKAPGTDNIHNYWYKKLTCTHPFVHSHICKFIQSPHTLPTFITQGITYMLPKGSDSKNPANYRPITCLQTIYKIITSCISEIIYRHLNEYNVLAEQQKGCKKNSQGCKEQLIIDSIVMRQAQTKNRNIHMMYVDYKKAFDSVPHSWLLYVLDHYKIHPSLITFLRTAMLHWKTKLKLINNELTTDLIKIKRGIFQGDALSPLWFCMALNPLSELLDSTNIGFKLRCNNSFHILSHLLYMDDIKIYATNNTELNKLTDITQSFSTDIHMQLGVDKCKTHSINRGKTEYNFYTLDTGEQIEPMDEHTTYKYLGFRQSRQIQQKQTKLELTQKFKARISQILRTQLNSRNIIKAINTYAIPVLIYSFGILAWSQSDLIKLQRTINTHMTTNRKHHPRSCTQRLTLPRQDGGRGLIDIQNLHNNLIDKLRKYFYAQAGQSHLHKFLTDIDKKLTPLNLNDTNIQPKLLSKQQKIDLWAQKSLHGRHLADLSQTHVDRKASNEWLRRGELFPETEAFVIAIQDQVIDTLNYKKHIIRTPNLPTDLCRRCHSSSETIQHITGSCKSIVQTDYKHRHDQVAAIIHQNLAHKYSFISNKTAYYKYKPSTVLENNAFKIYWDRTIITDKTIHYNRPDITILDKTNKIVFIIDIAVCNTHNLLTTHTEKMTKYTDLATEIKRQWQVDRVKIVPIVISTTGVVPKTLQDSLNTLEMPKSSLILLQKAVLLNTCRLTRKFLASSSSS

SEQ ID NO: 23185 - protein, 1454 aa, Arctia plantaginis
MEHLMETEKKKYNLRSLPGERRGASGADAGCHSMRTIGGGTLSRRTLTKQSTTAGRGELSRRAHRVEATAGRNELIWRTHDVEVTADSSGDDTKTLSSSIPQTCLPYMTRRTARLSSTSTNNAYAMQRRSTERLPSPSLSTTQSEHSLFSNIPSPSLTHSLFRSPTSSLSSTCTYSSRTTRSTAAVQEALATNPVPTAGPSRTRKKWTEDMNRFIWRTYLLITNCETSQMNNYLDALHREFDNRYPDMHATRQRLGDQKRAIIRRKLLSQPVLDEIVFEVKEQIGDKTLNHSQIHSYDDHTTRNRANVFNNSRMKWTEEMNDDVIRCYLEATELETNKTAYRKKLYDLFLEEHPNLFNLTEQRIADQRRLIFINKTYTNRINKLKHEVQLKLTDQNNQILPNLNDSITEQTHNTHESLIDCTLTLTETTTTTNAQNENITIHNTDSNSDSSLDSIRIEIEFNKALTRFNIIDPEARPYIPKQKTSRKFAKITQFLNINILPKHLNHELDFSSLHTLIYSAAYTAAICNGTKFSTEDSITTYKRNRTPAWQRRIESRIEKYRLEIGRLTQYMSGNRSQRILKTVEEIKNKYKTHSQHEEPNTEPQHFLDTLKQKLNATANRLKRYLNCTKRKQQNGNFINNEKQFYRTLGHNNQITSKTTEIPSPQNLHQFWAGIWENPVQHNTHADWLQKIADTSNINQMEFENIPVDTFIQIINRTHNWKAPGTDNIHNYWYKKLTCTHPFVHSHICKFIQSPHTLPTFITQGFTYMLPKGSDSKNPANYRPITCLQTIYKIITSCISEIIYRHLNEYNVLAEQQKGCKKNSQGCKEQLIIDSIVMRQAQTKNRNIHMMYVDYKKAFDSVHHSWLLYVLDHYKIHPSLITFLSTAMLHWKTKLKLINNELTTDLIKIKRGIFQGDALSPLWFCMALNPLSELLDSTNIGFKLRCNNSFHILSHLLYIDDIKIYATNNTELNKLTDITQSFSTDIYMQFGVDKCKTHSINRGKTEYNFYTLDTGEQIEPMDEHTTYKYLGFRQSRQIQQKQTKLELTQKFKARISQILRTQLNSRNTIKAINTYAIPVLIYSFGILAWSQSDLIKLQRTINTHMTTNRKHHPRSCTQRLTLPRQDGGRGRIDIQNLHNNLIDKLRKYFYAQAGQSHLHKFLTDIDKKLTPLNLNDTNIQPKLLSKQQKIDLWAQKSLNGRHLADLSQTHVDRKASNEWLRRGELFPETEAFVIAIQDQVIDTLNYKKHIIRTPNLPTDLCRRCHSSSETIQHITGSCKSIVQTDYKHRHDQVAAIIHQNLAHKYSFISNKTAYYKYKPSTVLENNAFKIYWDRTIITDETIHYNRPDITILDKTNKIVFIIDIAVCNTHNLLTTHTEKMTKYTDLATEIKRQWQVDRVNIVPIVISTTGVVPKTLQDSLNTLEMPKSSLILLQKAVLLNTCRLTRKFLASSSSS

SEQ ID NO: 23186 - protein, 1452 aa, Arctia plantaginis
MEHLMETEKKKYNLRSLPGERRGASGADAGCHSMRTIGGGTLSRRTLTKQSTTAGRGELSRRAHRVEATAGRNELNWRTHDVEVTADSSGDDTKTLSSSIPQTCLPYMTRRTARLSSTSTNNAYAMQRRSTERLPSPSLSTTQSEHSLFSNIPSPSSTHSLFRSPTSSLSSTCTYSSRTTRSTAAVQEALATNPVPTAGPSRTRKKWTEDMNRFIWRTYLLITNCETSQMNNYLEALHREFDNRYPDMHATRQRLGDQKRAIIRRKLLPQPVLDEIVFEVKEQIGDKTLNHSQIHSHDDHTTRNRANVFNNSRMKWTEEMNDDVIRCYLEATELETNKTAYRKKLYDLFLEKHPNLSNLTEQRIADQRRLIFINKTYTNRINKLKHEVQLKLTDQNNQVLPNLNDSITEQTHNTHESLIDCTLTLTETTTTTNAQNENITIHNTNSNSSLDSNRIEIEFNKALTRFNIIDPEARPYIPKQKTSRKFAKITQFLNINILPKHLNHELDFSSLHTLIYSAAYTAAICNGTKFSTEDSIITYKRNRTPAWQRRIESRIEKYRLEIGRLTQYMSGNRSQRILKTVEEIKNKYKTHSQHEEPNTEPQHFLDTLKQKLNATANRLKRYLNCTKRKQQNGNFINNEKQFYRTLGHNNQITSKTTEIPSPQNLHQFWAGIWENPVQHNTHADWLQKIADTSNINQMEFENIPVDTFIQIINRTHNWKAPGTDNIHNYWYKKLTCTHPFVHSHICKFIQSPHTLPTFITQGITYMLPKGSDSKNPANYRPITCLQTIYKIITSCISEIIYRHLNEYNVLAEQQKGCKKNSQGCKEQLIIDSIVMRQAQTKNRNIHMMYVDYKKAFDSVPHSWLLYVLDHYKIHPSLITFLSTAMLHWKTKLKLINNELTTDLIKIKRGIFQGDALSPLWFCMALNPLSELLDSTNIGFKLRCNNSFHILSHLLYMDDIKIYATNNTELNKLTDITQSFSTDIHMQFGVDKCKTHSINRGKTEYNFYTLVTGEQIEPMDEHTTYKYLGFRQSRQIQQKQTKLELTQKFKARISQILRTQLNSRNTIKAINTYAIPVLIYSFGILAWSQSDLIKLQRTINTHMTTNRKHHPRSCTQRLTLPRQDGGRGFIDIQNLHNNLIDKLRKYFYAQAGQSHLHKFLTDIDKKLTPLNLNDTNIQPKLLSKQQKIDLWAQKSLHGRHLADLSQTHVDRKASNEWLRRGELFPETEAFVIAIQDQVIDTLNYKKHIIRTPNLPTDLCRRCHSSSETIQHITGSCKSIVQTDYKHRHDQVAAIIHQNLAHKYSFISNKTAYYKYKPSTVLENNAFKIYWDRTIITDKTIHYNRPDITILDKTNKIVFIIDIAVCNTHNLLTTHTEKITKYTDLATEIKRQWQVDRVKIVPIVISTTGVVPKTLQDSLNTLEMPKSSLILLQKAVLLNTCRLTRKFLASSSSS

SEQ ID NO: 23187 - protein, 1452 aa, Arctia plantaginis
MEHLMETEKKKYNLRSLPGERRGASGADAGCHSMRTIGGGTLSRRTLTKQSTTAGRGELSRRAHRVEATAGRNELNWRTHDVEVTADSSGDDTKTLSSSIPQTCLPYMTRRTARLSSTSTNNAYAMQRRSTERLPSPSLSTTQSEHSLFSNIPSPSSTHSLFRSPTSSLSSTCTYSSRTTRSTAAVQEALATNPVPTAGPSRTRKKWTEDMNRFIWRTYLLITNCETSQMNNYLEALHREFDNRYPDMHATRQRLGDQKRAIIRRKLLSQPVLDEIVFEVKEQTGDKTLNHSQIHSHDDHTTRNRANVFNNSRMKWTEEMNDDVIRCYLEATELETNKTAYRKKLYDLFLEKHPNLSNLTEQRIADQRRLIFINKTYTNRINKLKHEVQLKLTDQNNQILPNLNDSITEQTHNTHESLIDCTLTLTETTTTTNAQNENITIHNTNSNSSLDSNRIEIEFNKALTRFNIIDPEARPYIPKQKTSRKFAKITQFLNINILPKHLNHELDFSSLHTLIYSAAYTAAICNGTKFSTEDSIITYKRNRTPAWQRRIESRIEKYRLEIGRLTQYMSGNRSQRILKTVEEIKNKYKTHSQHEEPNTEPQHFLDTLKQKLNATANRLKRYLNCTKRKQQNGNFINNEKQFYRTLGHNNQITSKTTEIPSPQNLHQFWAGIWENPVQHNTHADWLQKIADTSNINQMEFENIPVDTFIQIINRTHNWKAPGTDNIHNYWYKKLTCTHPFVHSHICKFIQSPHTLPTFITQGITYMLPKGSDSKNPANYRPITCLQTIYKIITSCISEIIYRHLNQYNVLAEQQKGCKKNSQGCKEQLIIDSIVMRQAQTKNRNIHMMYVDYKKAFDSVPHSWLLYVLDHYKIHPSLIIFLSTAMLHWKTKLKLINNELTTDLIKIKRGIFQGDALSPLWFCMALNPLSELLDSTNIGFKLRCNNSFHILSHLLYMDDIKIYATNNTELNKLTDITQSFSTDIHMQFGVDKCKTHSINRGKTEYNFYTLDTGEQIEPMDEHTTYKYLGFRQSRQIQQKQTKLELTQKFKARISQILRTQLNSRNTIKAINTYAIPVLIYSFGILAWSQSDLIKLQRTINTHMTTNRKHHPRSCTQRLTLPRQDGGRGLIDIQNLHNNLIDKLRKYFYAQAGQSHLHKFLTDIDKKLTPLNLNDTNIQPKLLSKQQKIDLWAQKSLHGRHLADLSQTHVDRKASNEWLRRGELFPETEAFVIAIQDQVIDTLNYKKHIIRTPNLPTDLCRRCHSSSETIQHITGSCKSIVQTDYKHRHDQVAAIIHQNLAHKYSFISNKTAYYKYKPSTVLENNAFKIYWDRTIITDKTIHYNRPDITILDKTNKIVFIIDIAVCNTHNLLTTHTEKMTKYIDLATEIKRQWQVDRVKIVPIVISTTGVVPKTLQDSLNTLEMPKSSLILLQKAVLLNTCRLTRKFLASSLSS

SEQ ID NO: 23188 - protein, 884 aa, Arctia plantaginis
MSGNRSQRILKTVEEIKNKYKTHSQHEEPNTEPQHFLDTLKQKLNATANRLKRYLNCTKRKQQNGNFINNEKQFYRTLGHNNQITSKTTEIPSPQNLHQFWAGIWENPVQHNTHADWLQKIADTSNINQMEFENIPVDTFIQIINRTHNWKAPGTDNIHNYWYKKLTCTHPFVHSHICKFIQSPHTLPTFITQGITYMLPKGSDSKNPANYRPITCLQTIYKIITSCISEIIYRHLNEYNVLAEQQKGCKKNSQGCKEQLIIDSIVMRQAQTKNRNIHMMYVDYKKAFDSVPHSWLLYVLDHYKIHPSLITFLSTAMLHWKTKLKLINNELTTDLIKIKRGIFQGDALSPLWFCMALNPLSELLDSTNIGFKLRCNNSFHILSHLLYMDDIKIYATNNTELNKLTDITQSFSTDIHMQFGVDKCKTHSINRGKTEYNFYTLDTGEQIEPMDEHTTYKYLGFRQSRQIQQKQTKLELTQKFKARISQILRTQLNSRNTIKAINTYAIPVLIYSFGILAWSQSDLIKLQRTINTHMTTNRKHHPRSCTQRLTLPRQDGGRGLIDIQNLHNNLIDKLRKYFYAQAGQSHLHKFLTDIDKKLTPLNLNDTNIQPKLLSKQQKIDLWAQKSLHGRHLADLSQTHVDRKASNEWLRRGELFPETEAFVIAIQDQVIDTLNYKKHIIRTPNLPTDLCRRCHSSSETIQHITGSCKSIVQTDYKHRHDQVAAIIHQNLAHKYSFISNKTAYYKYKPSTVLENNAFKIYWDRTIITDKTIHYNRPDITILDKTNKIVFIIDIAVCNTHNLLTTHTEKMTKYTDLATEIKRQWQVDRVKIVPIVISTTGVVPKTLQDSLDTLEMPKSSLILLQKAVLLNTCRLTRKFLASSSSS

SEQ ID NO: 23189 - protein, 1452 aa, Arctia plantaginis
MEHLMETEKKMYNLRSLPGERRGASGADAGCHSMRTIGGGTLSRRTLTKQSTTAGRGELSRRAHRVEATAGRNELNWRTHDVEVTADSSGDDTKTLSSSIPQTCLSYMTRRTARLSSTSTNNAYAMQRRSIKRLPSPSLSTTQSEHSLFSNIPSPSSTHSLFRSPTSSLSSTCTYSSRTTRSTAAVQEALATNPVPTAGPSRTRKKWTEDMNRFIWRTYLLITNCETSQMNNYLEALHREFDNRYPDMHATRQRLGDQKRAIIRRKLLSQPVLDEIVFEVKEQIGDKTLNHSQIHSHDDHTTRNRANVFNNSRMKWTEEMNDDVIRCYLEATELETNKTAYRKKLYDLFLEKHPNLSNLTEQRIADQRRLIFINKTYTNRINKLKHEVQLKLTDQNNQILPNLNDSITEQTHNTHESLIDCTLTLTETTTTTNAQNENITIHNTDSNSTLDSNRIEIEFNKALTRFNIIDPEARPYIPKQKTSRKFAKITQFLNINILPKHLNHELDFSSLHTLIYSAAYTAAICNGTKFSTEDSIITYKRNRTPAWQRRIESRIEKYRLEIGRLTQYMSGNRSQRILKTVEEIKNKYKTHSQHEEPNTEPQHFLDTLKQKLNATANRLKRYLNCTKRKQQNGNFINNEKQFYRTLGHNNQITSKTTEIPSPQNLHQFWAGIWENPVQHNTHADWLQKIADTSNINQMEFENIPVVTFIQIINRTHNWKAPGTDNIHNYWYKKLTCTHPFVHSHICKFIQSPHTLPTFITQGITYMLPKGSDSKIPANYRPITCLQTIYKIITSCISEIIYRHLNEYNVLAEQQKGCKKNSQGCKEQLIIDSIVMRQAQTKNRNIHMMYVDYKKAFDSVPHSWLLYVLDHYKIHPSLITFLSTAMLHWKTKLKLINNELTTDLIQIKRGIFQGDALSPLWFCMALNPLSELLDSTNIGFKLRCNNSFHILSHLLYMDDIKIYATNNTELNKLTDITQSFSTDIHMQFGVDKCKTHSINRGKTEYNFYTLDTGEQIEPMDEHSTYKYLGFRQSRQIQQKQTKLELTQKFKARISQILRTQLNSRNTIKAINTYAIPVLIYSFGILAWSQSDLIKLQRTINTHMTTNRKHHPRSCTQRLTLPRQDGGRGLIDIQNLHNNLIDKLRKYFYAQAGQSHLHKFLTDIDKKLTPLNLNDTNIQPKLLSKQQKIDLWAQKSLHGRHLADLSQTHVDRKASNEWLRRGELFPETEAFVIAIQDQVIDTLNYKKHIIRTPNLPTDLCRRCHSSSETIQHITGSCKSIVQTDYKHRHDQVAAIIHQNLAHKYSFISNKTAYYKYKPSTVLENNAFKIYWDRTIITDKTIHYNRPDITILDKTNKIVFIIDIAVCNTHNLLTTHTEKMTKYIDLATEIKRQWQVDRVKIVPIVISTTGVVPKTLQDSLNTLEMPKSSLILLQKAVLLNTCRLTRKFLASSSSS

SEQ ID NO: 23190 - protein, 1361 aa, Fabriciana adippe
MENMENKRYSLRPLPGGRRGASGADAGCYSMRTVGDGGLSRRVPLEQNATADHSPSLSPSLSRHSLFTNIPSPSSTHTLFRSSNSSPSSSYSSETRSTAVVQKATATNSVSTAGPSRARKKWTESMNRFIWRTYLNITKCETTLMNNYLEPLHQEFNTKFPEMQATRQRIGDQRRAILRRKLLPQNILDDIRNEVMNLLQIENRFQTQNTNQSTHTLPPTNTRMRWSNELNEEIVRCYFEVTKLETNKTGYRKNLFELFIARHPHLSHLTEQRIADQRRLIFNNKSIHTDRINEIRREIELKLVPNTQSTSNQNTATGDTIYHIQLDNSANSTSVQLDSQQLTHPLTQNTRNNLTEKHPSELLKYIETEFNNALTRFIDTNPEARPYIPKQKSSRKFSQIVQHLNNEILPKHLINDLSFNSLHTIIYTAAFTAALCNGTKFNFSEKNSTRKNKPSWQKRIERKIGKYRLEIGRLTQYISGNRNQRIVKTVEEIKLKYKTHTQHEEINTEPQHFLDTLKQKLNATSNRLRRYLTCTKRKQQNYTFTTNEKQFYRNLTNTHQNNTAQSTESPSQGDLQQFWSNIWETPTQHNVNAVWLQRETNKHIVQMDFENIPLDIITQTIKRTHNWKAPGTDNIHNYWYKHLTCTHSLIHKHVNQFIQSPSTLPTFITHGVTYMLPKGSDTKNPANYRPITCLQTIYKIITGCISAIIYRHVDQNKILVEQQKGCRKNSQGCKEQLTIDAIVMKQAQTRNIHTMYIDFKKAFDSVPHSWLLHVLKQYKIHPTLITFLSFAMVQWNTRLKLTSNNISLTTEPIKIRRGIFQGDALSPLWFCLALNPLSELLNDTNIGFKLKYNNTDHTLSHLMYMDDIKLYASNYSDLETLADITQSFSTDICMEFGVDKCKIHSVVRGKTQHNTYTLDTGEQIDPMDENSTYKYLGFHQAKQIKQKHTKLELTKKFKLRLNQILKTQLNARNNVKAINTFAIPILSYSFGIINWSQTDLTKLQRIINTHMTTHRKHHPKSCIQRLTLPRQNGGIGLIDIRNLHNNLITKLRNYFHLKAENSELHKCITEIDKKYSPLNLHDRNVQLNQNTISKQQKIEAWSQKSLHGRHLADLSQTYVDKDASNEWLRRGELFPETEAFMVAIQDQVIDTRNYQKHIIRRPNMLTDLCRRCHCSSETIQHITGACKSIVQTDYKHRHDQVAAIIHQHLALKYSLITQAQKTPYYKYTPQTILESPNYKLYWDRTIITDKTIHYNRPDILLLDKTNNTVFLIDIAIPNTHNLAPTYSSKIAKYTDLSIELRSQWKVQTVTTIPIVLSTTGVIPHTLHTSLEILGLHRSTYILLQKATILNTCRIVRKFLSS

SEQ ID NO: 23191 - protein, 1361 aa, Fabriciana adippe
MENMENKRYSLRPLPGGRRGASGADAGCYSMRTVGDGGLSRRVPLEQNATADHSPSLSPSLSRHSLFTNIPSPSSTHTLFRSSNSSPSSSYSSETRSTAVVQKATATNSVSTAGPSRARKKWTESMNRFIWRTYLNITKCETTLMNNYLEPLHQEFNTKFPEMQATRQRIGDQRRAILRRKLLPQNILDDIRNEVMNLLQIENRFQTQNTNQSTHTLPPTNTRMRWSNELNEEIVRCYFEVTKLETNKTGYRKNLFELFIARHPHLSHLTEQRIADQRRLIFNNKSIHTDRINEIRREIELKLVPNTQSTSNQNTATGDTIYHIQLENSANSTSVQLDSQQLTHPLTQNTRNNLTEKHPSELLKYIETEFNNALTRFIDTNPEARPYIPKQKSSRKFSQIVQHLNNEILPKHLINDLSFNSLHTIIYTAAFTAALCNGTKFNFSEKNSTRKNKPSWQKRIERKIGKYRLEIGRLTQYISGNRNQRIVKTVEEIKLKYKTHTQHEEINTEPQHFLDTLKQKLNATSNRLRRYLTCTKRKQQNYTFTTNEKQFYRNLTNTHQNNTAQSTESPSQGDLQQFWSNIWETPTQHNVNAVWLQRETNKHIVQMDFENIPLDIITQTIKRTHNWKAPGTDNIHNYWYKHLTCTHSLIHKHVNQFIQSPSTLPTFITHGVTYMLPKGSDTKNPANYRPITCLQTIYKIITGCISAIIYRHVDQNKILVEQQKGCRKNSQGCKEQLTIDAIVMKQAQTRNIHTMYIDFKKAFDSVPHSWLLHVLKQYKIHPTLITFLSFAMVQWNTRLKLTSNNISLTTEPIKIRRGIFQGDALSPLWFCLALNPLSELLNDTNIGFKLKYNNTDHTLSHLMYMDDIKLYASNYSDLETLADITQSFSTDICMEFGVDKCKIHSVVRGKTQHNTYTLDTGEQIDPMDENSTYKYLGFHQAKQIKQKHTKLELTKKFKLRLNQILKTQLNARNNVKAINTFAIPILSYSFGIINWSQTDLTKLQRIINTHMTTHRKHHPKSCIQRLTLPRQNGGIGLIDIRNLHNNLITKLRNYFHLKAENSELHKCITEIDKKYSPLNLHDRNVQLNQNTISKQQKIEAWSQKSLHGRHLADLSQTYVDKDASNEWLRRGELFPETEAFMVAIQDQVIDTRNYQKHIIRRPNMLTDLCRRCHCSSETIQHITGACKSIVQTDYKHRHDQVAAIIHQHLALKYSLITQAQKTPYYKYTPQTILESPNYKLYWDRTIITDKTIHYNRPDILLLDKTNNTVFLIDIAIPNTHNLAPTYSSKIAKYTDLSIELRSQWKVQTVTTIPIVLSTTGVIPHTLHTSLEILGLHRSTYILLQKATILNTCRIVRKFLSS

SEQ ID NO: 23192 - protein, 1361 aa, Fabriciana adippe
MENMENKRYSLRPLPGGRRGASGADAGCYSMRTVGDGGLSRRVPLEQNATADHSRSLSPSLSRHSLFTNIPSPSSTHTLFRSSNSSPSSSYSSETRSTAVVQKATATNSVSTAGPSRARKKWTESMNRFIWRTYLNITKCETTLMNNYLEPLHQEFNTKFPEMQATRQRIGDQRRAILRRKLLPQNILDDIRNEVMNLLQIENRFQTQNTNQSTHTLPPTNTRMRWSNELNEEIVRCYFEVTKLETNKTGYRKNLFELFIARHPHLSHLTEQRIADQRRLIFNNKSIHTDRINEIRREIELKLVPNTQSTSNKNTATGDTIYHIQLDNSANSTSVQLDSQQLTHPLTQNTRNNLTEKHPSELLKYIETEFNNALTRFIDTNPEARPYIPKQKSSRKFSQIVQHLNNEILPKHLINDLSFNSLHTIIYTAAFTAALCNGTKFNFSEKNSTRKNKPSWQKRIERKIGKYRLEIGRLTQYISGNRNQRIVKTVEEIKLKYKTHTQHEEINTEPQHFLDTLKQKLNATSNRLRRYLTCTKRKQQNYTFTTNEKQFYRNLTNTHQNNTAQSTESPSQGDLQQFWSNIWETPTQHNVNAAWLQRETNKHIVQMDFENIPLDIITQTIKRTHNWKAPGTDNIHNYWYKHLTCTHLLIHKHVNQFIQSPSTLPTFITHGVTYMLPKGSDTKNPANYRPITCLQTIYKIITGCISAIIYRHVDQNKILVEQQKGCRKNSQGCKEQLTIDAIVMKQAQTRNIHTMYIDFKKAFDSVPHSWLLHVLKQYKIHPTLITFLSFAMVQWNTRLKLTSNNISLTTEPIKIRRGIFQGDALSPLWFCLALNPLSELLNDTNIGFKLKYNNTDHTLSHLMYMDDIKLYASNYSDLETLADITQSFSTDICMEFGVDKCKIHSVVRGKTQHNTYTLDTGEQIDPMDENSTYKYLGFHQAKQIKQKHTKLELTKKFKLRLNQILKTQLNARNNVKAINTFAIPILSYSFGIINWSQTDLTKLQRIINTHMTTHRKHHPKSCIQRLTLPRQNGGIGLIDIRNLHNNLITKLRNYFHLKAENSELHKCITEIDKKYSPLNLHDRNVQLNQNTISKQQKIEAWSQKSLHGRHLADLSQTYVDKDASNEWLRRGELFPETEAFMVAIQDQVIDTRNYQKHIIRRPNMLTDLCRRCHCSSETIQHITGACKSIVQTDYKHRHDQVAAIIHQHLALKYSLITQAQKTPYYKYTPQTILESPNYKLYWDRTIITDKTIHYNRPDILLLDKTNNTVFLIDIAIPNTHNLAPTYSSKIAKYTDLSIELRSQWKVQTVTTIPIVLSTTGVIPHTLHTSLEILGLHRSTYILLQKATILNTCRIVRKFLSS

SEQ ID NO: 23193 - protein, 1361 aa, Fabriciana adippe
MENMENKRYSLRPLPGGRRGASGADAGCYSMRTVGDGGLSRRVPLEQNATADHSPSLSPSLSRHSLFTNIPSPSSTHTLFRSSNSSPSSSYSSETRSTAVVQKATATNSVSTAGPSRARKKWTESMNRFIWRTYLNITKCETTLMNNYLEPLHQEFNTKFPEMQATRQRIGDQRRAILRRKLLPQNILDDIRNEVMNLLQIENRFQTQNTNQSTHTLPPTNTRMRWSNELNEEIVRCYFEVTKLETNKTGYRKNLFELFIARHPHLSHLTEQRIADQRRLIFNNKSIHTDRINEIRREIELKLVPNTQSTSNQNTATGDTIYHIQLDNSANSTSVQLGSQQLTHPLTQNTRNNLTEKHPSELLKYIETEFNNALTRFIDTNPEARPYIPKQKSSRKFSQIVQHLNNEILPKHLINDLSFNSLHTIIYTAAFTAALCNGTKFNFSEKNSTRKNKPSWQKRIERKIGKYRLEIGRLTQYISGNRNQRIVKTVEEIKLKYKTHTQHEEINTEPQDFLDTLKQKLNATSNRLRRYLTCTKRKQQNYTFTTNEKQFYRNLTNTHQNNTAQSTESPSQGDLQQFWSNIWETPTQHNVNAVWLQRETNKHIVQMDFENIPLDIITQTIKRTHNWKAPGTDNIHNYWYKHLTCTHSLIHKHVNQFIQSPSTLPTFITHGVTYMLPKGSDTKNPANYRPITCLQTIYKIITGCISAIIYRHVDQNKILVEQQKGCRKNSQGCKEQLTIDAIVMKQAQTRNIHTMYIDFKKAFDSVPHSWLLHVLKQYKIHPTLITFLSFAMVQWNTRLKLTSNNISLTTEPIKIRRGIFQGDALSPLWFCLALNPLSELLNDTNIGFKLKYNNTDHTLSHLMYMDDIKLYASNYSDLETLADITQSFSTDICMEFGVDKCKIHSVVRGKTQHNTYTLDTGEQIDPMDENSTYKYLGFHQAKQIKQKHTKLELTKKFKLRLNQILKTQLNARNNVKAINTFAIPILSYSFGIINWSQTDLTKLQRIINTHMTTHRKHHPKSCIQRLTLPRQNGGIGLIDIRNLHNNLITKLRNYFHLKAENSELHKCITEIDKKYSPLNLHDRNVQLNQNTISKQQKIEAWSQKSLHGRHLADLSQTYVDKDASNEWLRRGELFPETEAFMVAIQDQVIDTRNYQKHIIRRPNMLTDLCRRCHCSSETIQHITGACKSIVQTDYKHRHDQVAAIIHQHLALKYSLITQAQKTPYYKYTPQTILESPNYKLYWDRTIITDKTIHYNRPDILLLDKTNNTVFLIDIAIPNTHNLAPTYSSKIAKYTDLSIELRSQWKVQTVTTIPIVLSTTGVIPHTLHTSLEILGLHRSTYILLQKATILNTCRIVRKFLSS

SEQ ID NO: 23194 - protein, 1361 aa, Fabriciana adippe
MENMENKRYSLRPLPGGRRGASGADAGCYSMRTVGDGGLSRRVPLEQNATADHSPSLSPSLSRHSLFTNIPSPSSTHTLFRSSNSSPSSSYSSETRSTAVVQKATATNSVSTAGPSRARKKWTESMNRFIWRTYLNITKCETTLMNNYLEPLHQEFNTKFPEMQATRQRIGDQRRAILRRKLLPQNILDDIRNEVMNLLQIENRFQTQNTNQSTHTLPPTNTRMRWSNELNEEIVRCYFEVTKLETDKTGYRKNLFELFIARHPHLSHLTEQRIADQRRLIFNNKSIHTDRINEIRREIELKLVPNTQSTSNQNTATGDTIYHIQLDNSANSTSVQLDSQQLTHPLTQNTRNNLTEKHPSELLKYIETEFNNALTRFIDTNPEARPYIPKQKSSRKFSQIVQHLNNEILPKHLINDLSFNSLHTIIYTAAFTAALCNGTKFNFSEKNSTRKNKPSWQKRIERKIAKYRLEIGRLTQYISGNRNQRIVKTVEEIKLKYKTHTQHEEINTEPQHFLDTLKQKLNATSNRLRRYLTCTKRKQQNYTFTTNEKQFYRNLTNTHQNNTAQSTESPSQGDLQQFWSNIWETPTQHNVNAVWLQRETNKHIVQMDFENIPLDIITQTIKRTHNWKAPGTDNIHNYWYKHLTCTHSLIHKHVNQFIQSPSTLPTFITHGVTYMLPKGSDTKNPANYRPITCLQTIYKIITGCISAIIYRHVDQNKILVEQQKGCRKNSQGCKEQLTIDAIVMKQAQTRNIHTMYIDFKKAFDSVPHSWLLHVLKQYKIHPTLITFLSFAMVQWNTRLKLTSNNISLTTEPIKIRRGIFQGDALSPLWFCLALNPLSELLNDTNIGFKLKYNNTDHTLSHLMYMDDIKLYASNYSDLETLADITQSFSTDICMEFGVDKCKIHSVVRGKTQHNTYTLDTGEQIDPMDENSTYKYLGFHQAKQIKQKHTKLELTKKFKLRLNQILKTQLNARNNVKAINTFAIPILSYSFGIINWSQTDLTKLQRIINTHMTTHRKHHPKSCIQRLTLPRQNGGIGLIDIRNLHNNLITKLRNYFHLKAENSELHKCITEIDKKYSPLNLHDRNVQLNQNTISKQQKIEAWSQKSLHGRHLADLSQTYVDKDASNEWLRRGELFPETEAFMVAIQDQVIDTRNYQKHIIRRPNMLTDLCRRCHCSSETIQHITGACKSIVQTDYKHRHDQVAAIIHQHLALKYSLITQAQKTPYYKYTPQTILESPNYKLYWDRTIITDKTIHYNRPDILLLDKTNNTVFLIDIAIPNTHNLAPTYSSKIAKYTDLSIELRSQWKVQTVTTIPIVLSTTGVIPHTLHTSLEILGLHRSTYILLQKATILNTCRIVRKFLSS

SEQ ID NO: 23195 - protein, 1361 aa, Fabriciana adippe
MENMENKRYSLRPLPGGRRGASGADAGCYSMRTVGDGGLSRRVPLEQNATADQSPSLSPSPSSHSLFTNIPSPSSTHTLFRSSNSSPSSSYSSETRSTAVVQEATATNSVSTAGPSRARKKWTESMNRFIWRTYLNITKCETTLMNNYLKPLHQEFNTKFPEMQATRQRIGDQRRAILRRKLLPQNILDDIRNEVMNLLQIENRFQTQNTNQSTHTLPPTNTRMRWSNELNEEIVRCYFEVTKLETNKTGYRKNLFELFIARHPHLSHLTEQRIADQRRLIFNNKSIHTDRINEIRREIELKLVPNTQSTLNQNTATGDTIYHIQLDNSAKSISVQLDSQQLTHPLTQSTRNNLTEKHPSELLKYIETEFNNALTRFIDTNPEARPYIPKQKSSRKFSQIVQHLNNEILPKHLINDLSFNSLHTIIYTAAFTAALCNGTKFNFSEKNSTRKNKPSWQKRIERKIGKYRLEIGRLTQYISGNRNQRIVKTVEEIKLKYKTHTQHEEINTEPQHFLDTLKQKLNATSNRLRRYLTCTKRKQQNYTFTTNEKQFYRNLTNTHQNNTAQSTESPSQEDLQQFWSNIWETPTQHNVNAVWLQRETNKHIVQMDFENIPLDIITQTIKRTHNWKAPGTDNIHNYWYKHLTCTHSLIHKHVNQFIQSPSTLPTFITHGITYMLPKGSDTKNPANYRPITCLQTIYKIITGCISAIIYRHVDQNKILVEQQKGCRKNSQGCKEQLTIDAIVMKQAQTRNIHTMYIDFKKAFDSVPHSWLLHVLKQYKIHPTLITFLSFAMVQWNTRLKLTSNNISLTTEPIKIRRGIFQGDALSPLWFCLALNPLSELLNDTNIGFKLKYNNTDHTLSHLMYMDDIKLYASNYSDLETLADITQSFSTDICMEFGVDKCKIHSVVRGKTQHNTYTLDTGEQIDPMDENSTYKYLGFHQAKQIKQKHTKLELTKKFKLRLNQILKTQLNARNNVKAINTFAISILSYSFGIINWSQTDLTKLQRIINTHMTSHRKHHPKSCIQRLTLPRQNGGIGLIDIRNLHNNLITKLRNYFHLKAENSELHKCITEIDKKYSPLNLHDRNVQLNQNTISKQQKIEAWSQKSLHGRHLADLSQTYVDKDASNEWLRRGELFPETEAFMVAIQDQVIDTRNYQKHIIRRPNMLTDLCRRCHCSSETIQHITGACKSIVQTDYKHRHDQVAAIIHQHLALKYSLITQAQKTPYYKYTPQTILESPNYKLYWDRTIITDKTIHYNRPDILLLDKTNNTVFLIDIAIPNTHNLAPTYSSKIAKYTDLSIELRSQWKVQTVTTIPIVLSTTGVIPHTLHTSLEILGLHRSTYILLQKATILNTCRIVRKFLSS

SEQ ID NO: 23196 - protein, 1361 aa, Fabriciana adippe
MENMENKRYSLRPLPGGRRGASGADAGCYSMRTVGDGGLSRRVPLEQNATADHSPSLSPSLSRHSLFTNIPSPSSTHTLFRSSNSSPSSSYSSETRSTAVVQKATATNSVSTAGPSRARKKWTESMNRFIWRTYLNITKCETTLMNNYLEPLHQEFNTKFPEMQATRQRIGDQRRAILRRKLLPQNILDDIRNEVMNLLQIENRFQTQNTNQSTHTLPPTNTRMRWSNELNEEIVRCYFEVTKLETNKTGYRKNLFELFIARHPHLSHLTEQRIADQRRLIFNNKSIHTDRINEIRREIELKLVPNTQSTSNQNTATGDTIYHIQLDNSANSTSVQLDSQQLTHPLTQNTRNNLTEKHPSELLKYIETEFNNALTRFIDTNPEARPYIPKQKSSRKFSQIVQHLNNEILPKHLINDLSFNSLHTIIYTAAFTAALCNGTKFNFSEINSTRKNKPSWQKRIERKIGKYRLEIGRLTQYISGNRNQRIVKTVEEIKLKYKTHTQHEEINTEPQDFLDTLKQKLNATSNRLRRYLTCTKRKQQNYTFTTNEKQFYRNLTNTHQNNTAQSTESPSQGDLQQFWSNIWETPTQHNVNAVWLQRETNKHIVQMDFENIPLDIITQTIKRTHNWKAPGTDNIHNYWYKHLTCTHSLIHKHVNQFIQSPSTLPTFITHGVTYMLPKGSDTKNPANYRPITCLQTIYKIITGCISAIIYRHVDQNKILVEQQKGCRKNSQGCKEQLTIDAIVMKQAQTRNIHTMYIDFKKAFDSVPHSWLLHVLKQYKIHPTLITFLSFAMVQWNTRLKLTSNNISLTTEPIKIRRGIFQGDALSPLWFCLALNPLSELLNDTNIGFKLKYNNTDHTLSHLMYMDDIKLYASNYSDLETLADITQSFSTDICMEFGVDKCKIHSVVRGKTQHNTYTLDTGEQIDPMDENSTYKYLGFHQAKQIKQKHTKLELTKKFKLRLNQILKTQLNARNNVKAINTFAIPILSYSFGIINWSQTDLTKLQRIINTHMTTHRKHHPKSCIQRLTLPRQNGGIGLIDIRNLHNNLITKLRNYFHLKAENSELHKCITEIDKKYSPLNLHDRNVQLNQNTISKQQKIEAWSQKSLHGRHLADLSQTYVDKDASNEWLRRGELFPETEAFMVAIQDQVIDTRNYQKHIIRRPNMLTDLCRRCHCSSETIQHITGACKSIVQTDYKHRHDQVAAIIHQHLALKYSLITQAQKTPYYKYTPQTILESPNYKLYWDRTIITDKTIHYNRPDILLLDKTNNTVFLIDIAIPNTHNLAPTYSSKIAKYTDLSIELRSQWKVQTVTTIPIVLSTTGVIPHTLHTSLEILGLHRSTYILLQKATILNTCRIVRKFLSS

SEQ ID NO: 23197 - protein, 1364 aa, Emmelina monodactyla
MSNYNQKYNLRKRLPVTTFSATSSNQAQVRNAPEHEIHATFLPSSSPVLFHNENSSTLSPHSLFSNIPSPSSIHSLFRSHNSSPSSSSCISELTVDAVQSANANISVLTAATSRARKKWTFEHNSFLWRTYLIVTKCETTNLNNYLGTLHQEFTNKFPEMQASRQRIGDQRRQIIKKHYLTLEIRDQIRTEVASSLETSSLIQPASSLSLNTLTSSSQSTGNQNNSRMRWSNEINEDIVRCYLEVTDLERNKTAYRQKLHQNFLNKHPQLAHITEQRIADQRRIIFKNKMVDEIRMNEIRTEVANYLASNTEFTINTESTIIQENSNSLQTEPLPNDINIYADHEPIQPTNNLDLDDNIEVKFYETLEKFKNSNPETRPFIPKQKSSKKLSQTILYIDTKIIPKLLNHDQTFEDFHTIIYTAAYTAALVNGTKFTVSLGTNKRYRKPAWQRRLEKKVDKYRREIGRLTQFILGNRNPRVCATVEYIVQNYQTHSSHENPNTQLPEFLDTLKQKLNVTSTRLKRYLLCTERKKQNSNFRNNEKQFYRQLRSPISQNNNSRPPSLHEIQHFWASVWENPLSHNNSAEWIPKLPDTSHIGEMQLDNIPVETFINILNRAHNWKAPGSDNIHNFWYKKFSSTHPFIHSHICQFIKSPNTIPPFLAKGITYMLPKASDTTNPSNFRPITCLQTFYKLLTGCISELIYKHLNQYNILTEQQKGCRKNSQGCKEQLTIDAIVMKQKLTSKQNMHTMYIDYKKAFDSVPHSWLTYVLKHYKIHPHLIVFLQKVMKLWQTQLHLKHNNSTLSSDAIKIQRGIFQGDSLSPLWFCLALNPLSELLNTSQVGLDLKSSNSSHTLSHLMYMDDIKLYANNKTDLNDLADITQTFSTDIHMHFGVDKCKINSINRGKVQPDYYILDTGETIEPMDEHNTYKYLGFHQSRQIHHKTTKSELIKQFKFRLNSILKSHLHSCNIVKAINTYAIPVLTYSFGIVKWSQTDLVKLQRIVNTHMTTHRKHHPRSCTQRQTLPRREGGIGLIDIKNLHNKQITSLRKYFYNKADTSQLHKHIITLDTKFTPLNLHDSNIQINEKITDIQTKINNWAQKSLHGRHRADLCQPHVDKDASNAWLRRGELFPETEAFMVAIQDQVIDTRNYQKYIIRRPNLPTDLCRRCHSSSETIQHITGACKSIVQTDYKHRHDQVAAIIHQNLAFQYKLITQTTAYYKYQPNTILENNQYRLYWDRTIITDKTIHYNRPDITVLDKTNKTAFLIDIAVCNTHNLLSTHTEKMSKYTDLSIELKTQWQVDRVHIVPIIISTTGVVPKTLPTNLNLLNMQKYTLFLLQKASILNTCRITRKFLATSSTSSLTFQHM

SEQ ID NO: 23198 - protein, 1363 aa, Emmelina monodactyla
MLNLNQKYNLRKRLPVTTFSASSNQAQVRNAPEHEIHASSSPSSSPVPFHNENSSTMSPHSLFSNIPSPSSIHSLFRSHNSSPSSSSCTSELTADAVQSANANISVLTAATTRARKKWTFEHNSFLWRTYLIVTKCETTNLNNYLGTLHQEFTNKFPEMQASRQRIGDQRRQIIKKHYLTLEIRNQIRTEVASSLETSSLIQPASRLSLNTLTSSSQSTENQNNSRMRWSNEINEDIVRCYLEVTDLERNKTAYRQKLHHNFLNKHPQLAHITEQRIADQRRIIFKNKMVDDIRMDEIRTEVANYLASNSEFTINTESAIIQENSNSSQTETFPDDITIYADHEQIQPTNNLDLDDNIEVKFYETLEKFKNSNPETRPFIPKQKSSKKLSQTILYIDTKIIPKLLNHDQMFEDFHTIIYTAAYTAALVNGTKFTVSLGTNKRYRKPAWQKRLEKKVEKYRREIGRLTQFILGNRNPRVCATVEYIVQNYQTHSSHENPNTQLPEFLDTLKQKLNVTSTRLKRYLLCTERKKQNSNFKNNEKQFYRQLHSPITQNNNSRPPSLHEIKQFWTSVWENPLSHNDNAEWIKKLPDTSHINEMQLDNIPVETFINILNRAHNWKAPGSDNIHNFWYKKFSSTHPFIHSHICQFIKSPNTIPPFLAKGITYMLPKASDTTNPSNFRPITCLQTFYKLLTGCISELIYKHLDQYNILTEQQKGCRKNSQGCKEQLTIDAIVMKQKLNSKQNMHTMYIDYKKAFDSVPHSWLTYVLKHYKIHPHLIVFLQEVMNLWQTQLYLKHNDSTVTSDAIKIQRGIFQGDSLSPLWFCLALNPLSELLNTSQFGLDLKSSNSSHTLSHLMYMDDIKLYANNKTDLNDLADITQTFSTDIHMHFGVDKCKINSINRGKVQSDFYILDTGETIEPMDEHNTYKYLGFHQSRQIHHKTTKSELIKQFKIRLNRILKSHLHSCNIVKAINTYAIPVLTYSFGVVKWSQTDLVKLQRIVNTHMTTHRKHHPRSCTQRQTLPRREGGIGLIDIKNLHNKQISSLRKYFYNKADTSQLHKHIITLDTKFTPLNLHDSNLQINEKITDMQTKINNWAQKSLHGRHRADLCQPHVDKDASNAWLRRGELFPETEAFMVAIQDQVIDTRNYQKYIIRRPNLPTDLCRRCHSSSETIQHITGACKSIVQTDYKHRHDQVAAIIHQNLAFQYKLITQTTAYYKYQPTTILENNQYRVYWDRTIITDKTIHYNRPDITVLDKTNKIAFLIDIAVCNTHNLLSTHTEKMSKYTDLSIELKTQWQVDRAHIVPIIISTTGVVPKTLPTNLKLLNMPKYTLFLLQKASILNTCRITRKFLATSSTSSLTFQHM

SEQ ID NO: 23199 - protein, 1364 aa, Emmelina monodactyla
MSNYNQKYNLRKRLPVTTFSATSSNQAQVRNAPEHEIHATFSPSSSPVLFHNENSSTLSPHSLFSNIPSPSSIHSLFRSHNSSPSSSSCISELTVDAVQSANANISVLTAATSRARKKWTFEHNSFLWRTYLIVTKCETTNLNNYLGTLHQEFTNKFPEMQASRQRIGDQRRQIIKKHYLTLEIRDQIRTEVASSLETSSLIQPASSLSLNTLTSSSQSTGNQNNSRMRWSNEINEDIVRCYLEVTDLERNKTAYRQKLHQNFLNKHPQLAHITEQRIADQRRIIFKNKMVDDIRMNEIRTEVANYLASNTEFTINTESTIIQENSNSLQTEPLPNDINIYADHEPIQPTNNLDLDDNIEVKFYETLEKFKNSNPETCPFIPKQKSSKKLSQTILYIDTKIIPKLLNHDQTFEDFHTIIYTAAYTAALVNGTKFTVSLGTNKRYRKPAWQRRLEKKVDKYRREIGRLTQFILGNRNPRVCATVEYIVQNYQTHSSHENPNTQLPEFLDTLKQKLNVTSTRLKRYLLCTERKKQNSNFRNNEKQFYRQLRSPISQNNNSRPPSLHEIQHFWASVWENPLSHNNSAEWIPKLPDTSHIGEMQLDNIPVETFINILNRAHNWKAPGSDNIHNFWYKKFSSTHPFIHSHICQFIKSPNTIPPFLAKGITYMLPKASDTTNPSNFRPITCLQTFYKLLTGCISELIYKHLNQYNILTEQQKGCRKNSQGCKEQLTIDAIVMKQKLTSKQNMHTMYIDYKKAFDSVPHSWLTYVLKHYKIHPHLIVFLQEVMKLWQTQLHLKHNNSTLSSDAIKIQRGIFQGDSLSPLWFCLALNPLSELLNTSQVGLDLKSSNSSHTLSHLMYMDDIKLYANNKTDLNDLADITQTFSTDIHMHFGVDKCKINSINRGKVQPDYYILDTGETIEPMDEHNTYKYLGFHQSRQIHHKTTKSELIKQFKFRFNSILKSHLHSCNIVKAINTYTIPVLTYSFGIVKWSQTDLVKLQRIVNTHMTTHRKHHPRSCTQRQTLPRREGGIGLIDIKNLHNKQITSLRKYFYNKADTSQLHKHIITLDTKFTPLNLHDSNIQINEKITDIQTKINNWAQKSLHGRHRADLCQPHVDKDASNAWLRRGELFPETEAFMVAIQDQVIDTRNYQKYIIRRPNLPTDLCRRCHSSSETIQHITGACKSIVQTDYKHRHDQVAAIIHKNLAFQYKLITQTTAYYKYQPNTILENNQYRLYWDRTIITDKTIHYNRPDITVLDKTNKTAFLIDIAVCNTHNLLSTHTEKMSKYTDLSIESKTQWQVDRVHIVPIIISTTGVVPKTLPTNLNLLNMQKYTLFLLQKASILNTCRITRKFLATSSTSSLTFQHM

SEQ ID NO: 23200 - protein, 1370 aa, Nymphalis urticae
MERSNKRYSLRSLPGGRRGASGADAGCHSMRSVGDGGLNRRVPLEEYVTADQSPSPSSTSLSNHPLSSNFPSPSSTATLFESPSSSPPSRCSSHISMPTAVAQEACAINAAPSAGTSRVRNKWSQDMNRFIWHTYLLITKCETTQMNNYLQLLHEQFNQKFPNMQVSRQRVGDQRRAILRRKLLPQNVLDEIRNEVADKIQAEGEKADIPLRQSSQSEHLASQISSNSNKRMKWSNVINEDIVRCYFESTNLETNKTAYRKKLFELVVDKHPHLSHLSEQRIADQRRVIFFNNLVNKDKIEEIKIEINKKLQNAINQSKYNIPIESNIASTDSNHSQPETNLGTGISLTESESDSIFLANNKLTPNFIEIEFNNAINRFKDMHPEERPYIPKQKTSRKFATITRTLNNEILPKHLNSNIDFKYLHALIYSAAYTAAVCNCTIFRVNNDTVQNKYLKKPTWQRRIEKRIEKYRLEIGRLTQYIAGNRNQKVIKTVEDIKIKYKTHSQYEEPNIESEHFLDTLKQKLNTASKRLKRYLTCTNRKQQNFTFTNNERTFYRNLGTHNQNTLTQNTEYTTPQKLHEFWAGIWSNPVQHNANANWLQKIVDSTHIEQMNFKDIPIETFTQLIKRTHNWKAPGTDNIHNFWLKKLTCIHPYIHNHICQFIKSPETTPKFLTTGITYMLPKESDLKNPANYRPITCLQTIYKIITGCISEIIYQHLEAYNILAEQQKGCRKNSQGCKEQLVIDTIVMKQALTSKRNIYTMYVDYKKAFDSVPHSWLLHVLQLYKIDPVLINFFSCIMPQWQTTLKVYQNNTSITTDPIKIQRGIFQGDALSPLWFCMALNPLSDLLNNTNAGFKLKHNGTHCLISHLMYMDDIKIYGTTKAELIKLTDVTQSFSTDIQMHFGVDKCKTHSINRGKTETNTYMLETGEQIEAMDEMSTYKYLGFHQSKQIKHKQIKKELIQKFKIRLNQILKTHLNSRNSTKAINTYAIPLLTYSFGIINWSKTDLQKLQRIINTHMTTHRKHHPKSCTQRLTLPRGEGGRGFIDIHNLHNSLIAKLRKFFHDKAESTPIHKYITEIDKKFTPLNLHNRNKQSSEQIISKEQKISMWSQKSLHGRHRADLSQAHVDMEASNEWLRRGELFPETEAFMIAIQDQVIDTRNYQKHIIRTANLPTDLCRRCQSSSETIQQITGACKSIVQTDYKHRHDQVAAIIHQNLAHQYKFITKKVAYYKYQPCKVLENNNYKIYWDRTIITDQTIHYNRPDITVVDKNNKIVYIVDIAVCNTHNLLSTHNEKVIKYIELATEIKKQWSINTVKILPIILSTTGVVPKTLKTNLNILQMSKSTLALLQKAVILNTTRLTRKFLTSPFSI

SEQ ID NO: 23201 - protein, 766 aa, Emmelina monodactyla
MQLDNIPVETFINILNRAHNWKAPGSDNIHNFWYKKFSSTHPFIHSHICQFIKSPNTIPPFLAKGITYMLPKASDTTNPSNFRPITCLQTFYKLLTGCISELIYKHLDQYNILTEQQKGCRKNSQGCKEQLTIDAIVMKQKLNSKQNMHTMYIDYKKAFDSVPHSWLTYVLKHYKIHPHLIVFLQEVMNLWQTQLNLKHNDSTVTSDAIKIQRGIFQGDSLSPLWFCLALNPLSELLNTSQFGLDLKSSNSSHTLSHLMYMDDIKLYANNKTDLNDLADITQNFSTDIHMHFGVDKCKINSINRGKLQSDFYILDTGETIEPMDEHNTYKYLGFHQSRQIHHKTTKSELIKQFKIRLNRILKSHLHSCNIVKAINTYAIPVLTYSFGVVKWSQTDLVKLQRIVNTHMTTHRKHHPRSCTQRQTLPRREGGIGLIDIKNLHNKQISSLRKYFYNKADTSQLHKHIITLDTKFTPLNLHDSNLQINEKITDMQTKINNWAQKSLHGRHRADLCQPHVDKDASNAWLRRGELFPETEAFMVAIQDQVIDTRNYQKYIIRRPNLPTDLCRRCHSSSETIQHITGACKSIVQTDYKHRHDQVAAIIHQNLAFQYKLITQTTAYYKYQPTTILENNQYRVYWDRTIITDKTIHYNRPDITVLDKTNKNAFLIDIAVCNTHNLLSTHTEKMSKYTDLSIELKTQWQVDRVHIVPIIISTTGVVPKTLPTNLKLLNMPKYTLFLLQKASILNTCRITRKFLATSSTSSLTFQHM

SEQ ID NO: 23202 - protein, 1368 aa, Nymphalis urticae
MERSNKRYSLRSLPGGRRGASGADAGCHIMRSVGDGGLNRRVPLEEYVTADQSPSPSSTSLSNHSLSSNFPSPSSTATLFESPSSSPPSRCSSHISMPTAVAQEACAINAAPSAGTSRVRNKWSQDMNRFIWHTYLLITKCETTQMNNYLQLLHEQFNQKFPNMQLSRQRVGDQRRAILRRKLLPQNVLDEIRNKVADKIQAEGEKADIPLRQSSQSEHLASQISSNSNKRMKWSNVINEDIVRCYFESTNLETNKTAYRKMLFELVVDKHPHLSHLSEQRIADQRRVIFFNNLVNKDKIEEIQIEINKKLQNAINQSKYNIPIESNSTDSNHSQPETNLGTGISLTENESDSIFLANNKLTPNFIEIEFNNAINRFKDMHPEERPYIHKQKTSRKFATITRTLNNEILPKHLNSNIDFKYLHALIYSAAYTAAVCNGTIFRVNNDTVQNKYLKKPTWQRRIEKRIEKYRLEIGRLTQYIAGNRNQKVIKTVEDIKVKYKTHSQYEEPNIELEHFLDTLKQKLNTASKRLKRYLTCTNRKLQNFTFTNNERTFYRNLGTHNQNTLTQNTEYTTPQKLHEFWAGIWSNPVQHNANANWLQKIGDSTHIEQMNFKDIPIETFTQIIKRTHNWKAPGTDNIHNFWLKKLTCIHPYIHNHICQFIKSPETTPKFLTTGITYMLPKESDLKNPANYRPITCLQTIYKIITGCISEIIYQHLEAYNILAEQQKGCRKNSQGCKEQLVIDTIVMKQALTSKRNIYTMYIDYKKAFDSVPHSWLLHVLQLYKIDPVLINFFSCIMPQWQTTLKVYQNNTSITTDPIKIQRGIFQGDALSPLWFCMALNPLSDLLNNTNAGFKLKHNGTHCLISHLMYMDDIKIYGTTKAELIKLTDVTQSFSTDIQMHFGVDKCKTHSINRGKTETNTYMLETGEQIEAMDEMSTYKYLGFHQSKQIKHKQIKKELIQKFKIRLNQILKTHLNSRNSTKAINTYAIPLLTYSFGIINWSKTDLQKLQRIINTHMTTHRKHHPKSCTQRLTLPRGEGGRGFIDIHNLHNSLIAKLKKFFHDKAESTSIHKYITEIDKKFTPLNLHNRNKQSSEQIISKEQKISMWSQKSLHGRHRADLSQAHVDMEASNEWLRRGELFPETEAFMIAIQDQVIDTRNYQKHIIRTANLLTDLCRRCQSSSETIQHITGACKSIVQTDYKHRHDQVAAIIHQNLAHQYKFITKKVAYYKYQPCKVLENNNYKIYWDRTIITDQTIHYNRPDITVVDKNNKIVYIVDIAVCNTHNLLSTHNEKVIKYIELATEIKKQWSINTVKILPIILSTTGVVPKTLKTNLNILQMSKSTLALLQKAVILNTTRLTRKFLTSPFSI

SEQ ID NO: 23203 - protein, 1363 aa, Emmelina monodactyla
MSNYNQKYNLRKRLPVTTFSATSSNQAQVRNAPEHEIHATFSPSSPVLFHNENSSTLSPHSLFSNIPSPSSIHSLFRSHNSSPSSSSCISELTVDAVQSANANISVLTAATSRARKKWTFEHNSFLWRTYLIVTKCETTNLNNYLGTLHQEFTNKFPEMQASRQRIGDQRRQIIKKHYLTLEIRDQIRTEVASSLETSSLIQPASSLSLNTLTSSSQSTGNQNNSRMRWSNEINEDIVRCYLEVTDLERNKTAYRQKLHQNFLNKHPQLAHITEQRIADQRRIIFKNKMVDEIRMNEIRTEVANYLASNTEFTINTESTIIQENSNSLQTEPLPNDINIYADHEPIQPTNNLDLDDNIEVKFYETLEKFKNSNPETRPFIPKQKSSKKLSQTILYIDTKIIPKLLNHDQTFEDFHTIIYTAAYTAALVNGTKFTVSLGTNKRYRKPAWQRRLEKKVDKYRREIGRLTQFILGNRNPRVCATVEYIVQNYQTHSSHENPNTQLPEFLDTLKQKLNVTSTRLKRYLLCTERKKQNSNFRNNEKQFYRQLRSPISQNNNSRPPSLHEIQHFWASVWENPLSHNNSAEWIPKLPDTSHIGEMQLDNIPVETFINILNRAHNWKAPGSDNIHNFWYKKFSSTHPFIHSHICQFIKSPNTIPPFLAKGITYMLPKASDTTNPSNFRPITCLQKFYKLLTGCISELIYKHLNQYNILTEQQKGCRKNSQGCKEQLTIDAIVMKQKLTSKQNMHTMYIDYKKAFDSVPHSWLTYVLKHYKIHPHLIVFLQEVMKLWQTQLHLKHNNSTLSSDAIKIQRGIFQGDSLSPLWFCLALNPLSELLNTSQVGLDLKSSNSSHTLSHLMYMDDIKLYANNKTDLNDLADITQTFSTDIHMHFGVDKCKINSINRGKVQPDYYILDTGETIEPMDEHNTYKYLGFHQSRQIHHKTTKSELIKQFKFRLNSILKSHLHSCNIVKAINTYAIPVLTYSFGIVKWSQTDLVKLQRIVNTHMTTHRKHHPRSCTQRQTLPRREGGIGLIDIKNLHNKQITSLRKYFYNKADTSQLHKHIITLDTKFTPLNLHDSNIQINEKITDIQTKINNWAQKSLHGRHRADLCQPHVDKDASNAWLRRGELFPETEAFMVAIQDQVIDTRNYQKYIIRRPNLPTDLCRRCHSSSETIQHITGACKSIVQTDYKHRHDQVAAIIHQNLAFQYKLITQTTAYYKYQPNTILENNQYRLYWDRTIITDKTIHYNRPDITVLDKTNKTAFLIDIAVCNTHNLLSTHTEKMSKYTDLSIELKTQWQVDRVHIVPIIISTTGVVPKTLPTNLNLLNMQKYTLFLLQKASILNTCRITRKFLATSSTSSLTFQHM

SEQ ID NO: 23204 - protein, 1394 aa, Trichoplusia ni
MVLVAWLKNLPKKYHLSQLTIPTTLSSNGENMNSQNKRYCLRPLPGGRRGASGADAGCHSMRTVGDGGLNRRVPLEQNATADRSSSPSSSEHSLFSNIPSPSSTHTLFRSPISSPSSIYSSRSTRSTAVVQEAMANCPAPTVGPSRARKKWTESMNRFIWRTYLQITKCETTQMNNYLEPLHQAFNEIYPEMQATRQRLGDQKRAILRRKLLPQHVLDEIVSEIQDHIQTNDSHHLTIHNHSQIEYSTQTNFNNKTRLKWSEEVNEDIIRCYFEVTELEINKTAYRKKLFELFKERHPHLSHVTEQRIADQRRLVFNNKSYENKILEIRREVEIKLTAENHQASIEQNLNLEHMQLIQDCLLDNTPVIPEDPTSVSVNSINDNNLAYNNIYRRIETEFDRAVLQFNNTHPESRPFIPKQKTSRKFAQIVNYLNNMILPKYLSHDLDFNSLHTYIYSAAYSAATCNGTRFKTQENTNRSSDSRKPTWQRRIESRIKKYRLELGRLTQYIAGRRNRKIVKTVKEIMIKYNTHSKHEEPNTEPQHFLDTIKQKLNAISSRLRRYLACTQRKKQNATFVNNEKQFYRTLGNSSQINPEVASETPSPQLLQQFWSRIWENPIQHNADADWLHNTAKHVLINEMEFENIPIDTFARVINSTHNWKAPGTDHIHNYWYKKFTCTHPFIHKHICHFIQSPDIMPSFITHGITYMLPKNSDPTDPANYRPITCLQTIYKIITGCISQLIYKHLESHNILAEQQKGCKQNSQGCKEQLTIDAIVMKQAQTKNRNIHTMFIDYKKAFDSVPHSWLIYILKHYKIHPNIILFLNTSMLQWETKLKLIKNNPVTTGPIKIQRGIFQGDALSPLWFCMALNPLSELLNSTNIGFKLKYNNSVHSISHLLYMDDIKLFAASHTDLTKLADITQLFSTDIKMEFGVDKCKIFSVNRGKIQANSYILDSGEQVEPIDENSTYKYLGFHQSKQIHQKNAKLELTNKFKSRLNQILKTHLNSRNIIKAINTFAIPVLTYSFGIIKWSQSDLIKLQRIVNTRMTSNRKHHPRSCIQRLTLPRQDGGRGLIDIHNLHNNIIEKLRKYFYSKAEESQLHTHIVGIDNKLTPLNLCNSTWQIKLVSKEQKMNMWSQKSLHGRHFADLSQEHVDKNASNEWLRRGELFPETEAFVIAIQDQVIDTRNYQKFITRIPNLPTDLCRRCHSSSETIQHITGACKSIVQTDYKHRHDQVASIIHQNLAHKHSFIQQKIAYYKYKPSTVLENNRFKIYWDRTIITDKTVHFNRPDITVLDKVEKTVFLIDVAVCNTHNLLTTYTEKMSKYIDLATEIKRQWQVETVKIIPIIISTTGVVPKSLQPNLNLLDMPKSTLTLLQKATLLNTCRLTRKFLASSSSSS

SEQ ID NO: 23205 - protein, 1397 aa, Trichoplusia ni
MVLVAWLKNLPKKYHLSQLTIPTTLSSNGENMNSQNKRYCLRPLPGGRRGASGADAGCHSMRTVGDGGLNRRVPLEQNATADRSSSPSSSEHSLFSNIPSPSSTHTLFRSPISSPSSIYSSRSTRSTAVVQEAMANCLAPTVGPSRARKKWTESMNRFIWRTYLQITKCETTQMNNYLEPLHQAFNEIYPEMQATRQRLGDQKRAILRRKLLPQHVLDEIVSEIQDHIQTNDSHHLTIHNHSQIEYSTQTNFNNKTRLKWSEEVNEDIIRCYFEVTELEINKTAYRKKLFELFKERHPHLSHVTEQRIADQRRLVFNNKSYENKILEIRREVEIKLTAENHQASIEQNLNLEHMQLIQDSLLDNTPVIPEDPTSLSVYSINDNNLAYNNIEEYRRIETEFDRAVLQFNNTHPESRPFIPKQKTSRKFAQIVNYLNNMILPKYLSHDLDFNSLHTYIYSAAYSAATCNGTRFKTQENTNRSSDSRKPTWQRRIESRIKKYRLELGRLTQYIAGRRNRKIVKTVEEIMIKYNTHSKHEEPNTEPQHFLDTIKQKLNAISSRLRRYLACTQRKKQNATFVNNEKQFYRTLGNSSQINPEVASETPSPQLLQQFWSRIWENPIQHNADADWLHNTAKHVLINEMEFENIPIDTFARVINSTHNWKAPGTDHIHNYWYKKFTCTHPFIHKHICHFIQSPDIMPSFITHGITYMLPKNSDPTDPANYRPITCLQTIYKIITGCISQLIYKHLESHNILAEQQKGCKQNSQGCKEQLTIDAIVMKQAQTKNRNIHTMFIDYKKAFDSVPHSWLIYILKHYKIHPNIILFLNTSMLQWETKLKLIKNNPVTTGPIKIQRGIFQGDALSPLWFCMALNPLSELLNSTNIGFKLKYNNSVHSISHLLYMDDIKLFAASHTDLTKLADITQLFSTDIKMEFGVDKCKIFSVNRGKIQANSYILDSGEQVEPIDENSTYKYLGFHQSKQIHQKNAKLELTNKFKSRLNQILKTHLNSRNIIKAINTFAIPVLTYSFGIIKWSQSDLIKLQRIVNTRMTSNRKHHPRSCIQRLTLPRQDGGRGLIDIHNLHNNIIEKLRKYFYSKAEESQLHTHIVGIDNKLTPLNLCNSTWQIKLVSKEQKMNMWSQKSLHGRHFADLSQEHVDKNASNEWLRRGELFPETEAFVIAIQDQVIDTRNYQKFITRIPNLPTDLCRRCHSSSETIQHITGACKSIVQTDYKHRHDQVASIIHQNLAHKHSFIQQKIAYYKYKPSTVLENNRFKIYWDRTIITDKTVHFNRPDITVLDKVEKTVFLIDVAVCNTHNLLTTYTEKMSKYIDLATEIKRQWQVETVKIIPIIISTTGVVPKSLQPNLNLLDMPKSTLTLLQKATLLNTCRLTRKFLASSSSSSS

SEQ ID NO: 23206 - protein, 1406 aa, Trichoplusia ni
MSEQLTIKYNLYMVLVAWLKNLPKKYHLSQLTIPTTLSSNGENMNSQNKRYCLRPLPGGRRGASGADAGCHSMRTVGDGGLNRRVPLEQNATADRSSSPSSSEHSLFSNIPSPSSTHTLFRSPISSPSSIYSSRSTRSTAVVQEAMANCPAPTVGPSRARKKWTESMNRFIWRTYLQITKCETTQMNNYLEPLHQAFNEIYPEMQATRQRLGDQKRAILRRKLLPQHVLDEIVSEIQDHIQTNDSHHLTIHNHSQIEYSTQTNFNNKTRLKWSEEVNEDIIRCYFEVTELEINKTAYRKKLFELFKERHPHLSHVTEQRIADQRRLVFNNKSYENKILEIRREVEIKLTAENHQASIEQNLNLEHMQLIQDCLLDNTPVIPEDPTSVSVNSINDNNLAYNNIYRRIETEFDRAVLQFNNTHPESRPFIPKQKTSRKFAQIVNYLNNMILPKYLSHDLDFNSLHTYIYSAAYSAATCNGTRFKTQENTNRSSDSRKPTWQRRIESRIKKYRLELGRLTQYIAGRRNRKIVKTVKEIMIKYNTHSKHEEPNTEPQHFLDTIKQKLNAISSRLRRYLACTQRKKQNATFVNNEKQFYRTLGNSSQINPEVASETPSPQLLQQFWSRIWENPIQHNADADWLHNTAKHVLINEMEFENIPIDTFARVINSTHNWKAPGTDHIHNYWYKKFTCTHPFIHKHICHFIQSPDIMPSFITHGITYMLPKNSDPTDPANYRPITCLQTIYKIITGCISQLIYKHLESHNILAEQQKGCKQNSQGCKEQLTIDAIVMKQAQTKNRNIHTMFIDYKKAFDSVPHSWLIYILKHYKIHPNIILFLNTSMLQWETKLKLIKNNPVTTGPIKIQRGIFQGDALSPLWFCMALNPLSELLNSTNIGFKLKYNNSVHSISHLLYMDDIKLFAASHTDLTKLADITQLFSTDIKMEFGVDKCKIFSVNRGKIQANSYILDSGEQVEPIDENSTYKYLGFHQSKQIHQKNAKLELTNKFKSRLNQILKTHLNSRNIIKAINTFAIPVLTYSFGIIKWSQSDLIKLQRIVNTRMTSNRKHHPRSCIQRLTLPRQDGGRGLIDIHNLHNNIIEKLRKYFYSKAEESQLHTHIVGIDNKLTPLNLCNSTWQIKLVSKEQKMNMWSQKSLHGRHFADLSQEHVDKNASNEWLRRGELFPETEAFVIAIQDQVIDTRNYQKFITRIPNLPTDLCRRCHSSSETIQHITGACKSIVQTDYKHRHDQVASIIHQNLAHKHSFIQQKIAYYKYKPSTVLENNRFKIYWDRTIITDKTVHFNRPDITVLDKVEKTVFLIDVAVCNTHNLLTTYTEKMSKYIDLATEIKRQWQVETVKIIPIIISTTGVVPKSLQPNLNLLDMPKSTLTLLQKATLLNTCRLTRKFLASSSSSS

SEQ ID NO: 23207 - protein, 969 aa, Schrankia costaestrigalis
MSHPVYHLNNLIIPKHLNHELDFLKLHSIIYSAAFAAAICNGTKLQLDNSTRINKHNTIPRWQRRLEEKIKKYRLEIGRLTQYIAGNRQPKILNNVSEIKLKYKTHSQHEEPNTVPQHFLDTLKQKLNAASSRLKRYTACTKRKQQNLTFKNNERLFYRSLGNSDLNNTNPSPSLPSSQDLHQFWANIWENPVQHKTNADWLSDLKDTTNINNMHSDSISFDTLIQIINRTHNWKATGSDNIHNYWYKKLTCTHPFIHNHINKFIQTPHTMPTFISHGITYMLPKGTDSINPANYRPITCLQTIYKIITGCISHLIYKHLDIHNILSEQQKGCRKSSQGCKEQLTIDAVIMKQALISKRNIHTMYIDYKKAFDSVPHSWLLHTLQLYKIHPTLIAFLSSTMLHWQTSLKLKQNNSILTTDPIKIQRGIFQGDSLSPLWFCIALSPLSELLNNSDVGFKLKHNSSYHTVSHLYMDDIKIYATNNTQLIKLADITQTFSTDIHMEFGVDKCKIHSIVKGKSQPNSYILHSGEQIEHMDEHNTYKYLGFHQSKQIQQKDTKLDLTKKLKIKLNQILRSHLDSRNTVKAVNTYAIPVLTYSFGIINWSQTDLQKLQRIINTHMTTHRKHHPRSCVQRLTLPRQDGGQGLIDIQNLHNSLITKLRTYFYYKAEHSQLHKYVNAIDKKLTPLNHSNDIIQPIVTSRQRKIDMWAQKSLHGRHLADLNQPHVDKNASNEWLRRGELFPETEAFMIAIQDQVMDTRNYQKYIIRLPNLPTDLCRRCHSSSETIQHITGACKSIVQTDYKHRHDQVASIIHQNLAFTHSFIPKKVAYYKYKPETVLENNSVKLYWDRTIITDKTIHFNRPDITLLDKTNNTVNIIDIAVCNTHNLLSTFNEKITKYVDLASEIKRQWQVDNVKILPIVISTTGVIPKSLLTSLNSLQMPVSTTILLQKAAILNTCRFTRKFLASSTSP

SEQ ID NO: 23208 - protein, 1309 aa, Parnassius apollo
MENCMDSQSKRYSLRPLPGVRRGASGANAGCHSMRTVGDGGLNRRVPLEKIATAERSHSPSSTVSSEYSLFGNITSPSSTHSLFRSPDSSPSSSYTSRITRSTAVVQEASATKPAPTVGQLRARKKWTEDMNRFIWRTYLLITKCETTHMNNYLEILHQEFESRYPEMKATRQRLGNQKRAILRRKLLPQKLLDEIGNEVREYIIQNENHKHTHSTQITAPSQTNTTNNTRMKWSDEINEDIIRFYLEVTELEKDQTGYRKKLYELFIERHPYLSYLTEQRIADQRRLIFKNKKYSNKINELRREVELKLELNNRQLVTDQNYTEVEQTQQTPYESTTDIFTPTQHTQLENMIDSTNTVIKTCNAQKENSQLQNLIESNKIEIEFNNAIAIFSTTHAEARPYIPKQKYSRKFAQIVHYLNNEILPRHLSHDLDFISLHTLIYSAAYTAALCNGTRFNTEGNITANNRNRKPTWQRRIESRIEKYRLEIGRLTQYIIGNRNQRILKTVEEIKRKYKTHSEHEESNTEPQHFLDTLKQKLNALSNRLRRYLTCTKRKQQNANFLNNEKQFYRTLGHEHHINTTRSTQFPSPQHLQQFWAGLWENPVAHNSKAEWLDKIPKAPNIKQMDFENITIETFIQIIKRTQNWKAPGTDNIHNYWYKKLTCTHPFIYNHICQFIHSPHNMPTFVTSGLTYMLPKDSDPKDPANYRPITCLQTIYKIITGCISETIYRHLDQQNILAEQQKGCKKNSQGCKEQLTIDAIAMKQAHSKNRNIHIMYIDYKKAFDSVPHSWLIYVLKYYKIHTSLISFLNVAMLHWKTKLKLINNSSLSTESIKIQRGLFQGDAISPLWFCLALNPLSELLNSTNVGFKLKYNNSYHILSHLLYMDDIKIYATNNTELTKLADLTQSFSTDIKMQFGVDKCKVHSIIRGKSINNTYILSTGEQIEPMDEPSTYKYLGFHQSKQIHQKQAKIDLTKKFKIRINQILRTQLNSRNIIKAINTYAIPILIYSFGIINWSQSDLVKLQRTINTNMTVNRKHHPRSCTQRLTLPRQDGGRGIIDIQNLHNSLIDKFRKYFYVKSEHSQLHKYIVGIDKKLTPLNLNDRNFQLKIVSKQQKIDLWSQKSLHGRHLADLGQAHVARQASNEWLRRGELFPETEAFVIAIQDQVIDTRNYQKHIIHIPSPPTDLCRRCHSGSETIQHITGACKSIVQTDYKHRHDQVAAIVHQNLAHKHSFILKKVAYYKYIPSTILESDSVKIYWDRTIITDKTIHYNRPDITILDKIKKSVFIIDIAVCNTHNLITTHSGKNDKVC

SEQ ID NO: 23209 - protein, 874 aa, Laothoe populi
MRTVEEITTKYKNHSQHEEPNTEPQLFLDTIKQKLNAASTRLKRYLACTKRKKQNSIFNNNEKIFYRTLGKSQQNNTSDSSQIPSPEHLEQFWANIWQNPVEHNADADWLHKIPDTTHINQMSFENITVDTLTKVINRTHNWKAPGVDNIHNYWYKKLTCTHPFIHKHITQYIQTPHTVPIFITHGITYMLPKGADSKNPANYRPITCLPTIYKIITGCISDSIYQHLDEQNILAEQQKGCKKNSQGCKEQLTIDSVIMKQAQTKNRNIHTMYIDYQKAFDSVPHSWLINVLEYYKIHPKIIEFLKATMAQWATKLKLNKNNTTITTNTIKIQRGIFQGYALSPLWFCVALNPLSELLNNTYAGFKLNDSDSYHTISHLMYMDDIKFYASNNIELKKLADITQSFSTDIRMQFGVDKCKMHSVSRGKTQLNTYTLETGETIEPMDEHATYKYLGFHQSKHILQKRAKLEITQKFKLRLNQILRTQLNSRNMIKAINTYAVPTLTYSFGIINWSQSDLIKLQRIINTHLTTHRKHHPKSCIQRLVLPRTMGGRGLIDIRNLHNNLITKLRHYFHTKAEHTQLHKYITRLDKKLTPLNLHDRSTQSLYQITTVQHKISLWSQKSLHGRHLADLSQTHVDEWLRRGELFPETEAFMTAIQDQIINTRNYQKHIIRIPNLPADQCRRCYSGSETIQHITSACKSIAQTDYKHRHDQVAAIIHQYLAFKYSLITHKTPYYKYKPATILESSHYKLYWDRTIITDKTIHYNRPDILLYDKNNKIIFLIDIAIPNTNNLTSTFNEKIAKYTDLSIELKNQWQVHTVKTIPIIISSTGVIPYTLHTSLQSLGMHKLSYILLQKATILNTCRIVRKFLSTDLT

SEQ ID NO: 23210 - protein, 1395 aa, Schrankia costaestrigalis
MIIYNNNTYPTNDPKTPKNLMESRPSKYNLRPLPGVRRGTSGADAGCHSMRTVGDGGLNRRVPLDKNTTAERSSSPSSIITLSEHSPFSDIPSPSSTHSLFRSSHSSPCSSPSSTITLRSTRSTAVVQEALATNPASTAGPSRARKRWTEDMNRFIWRTYLLITKCETTQLNSYLELFHQEFDNKFPDMQASRQRVGDQRRAILRRKLLTQTTFDEIFNEINQLINTHSTNHSLTRYTNTQLTTPMLTQYSTTSSRIRWSDEMNDDIIRFYFEVTKLETDKTAYRKKLHEIFIEKHPQLSHITEQRIADQRRILFNNKIYTNKINNIKAEVQQKLNEYNTELELDTLHVNTQTLNTTETIVDNTDHQNSMDTLATLTQIQPFTQTLSDPDFENQQISQIELEFNKALSHFSNTDPESRPFIPKQKLSRTFSQIIYHLNNIIIPKHLNHELDFLKLHTIIYSSAFAAAICNGTRLQLDNNTRINKQNRIPTWQRRIEEKIKKYRLEIGRLTQYIAGNRQPKILNTVNEIKLKYKTHSQYEEPNSVPQHFLDTLKQKLNAASSRLKRYMACTKRKQQNLTFKNNERQFYRSLGNSNNTNPSPTLPSSQDLHQFWANIWENPVQHKTNADWFSNLRDTTHINNMNSDCISIDTLIQIIKRTHNWKAPGTDNIHNYWYKKLTCTHPFIHNHINNFIQTPHTMPNFISHGITYMLPKGTDSINPANYRPITCLQTIYKIITGCISHLIYKHLDVHKVLAEQQKGCRKSSQGCKEQLTIDTIIMKQAHIGKRNIHTMYIDYKKAFDSVPHSWLLHTLHLYKIHPTLITFLSSTMLHWQTSLKLIQNTLTTDPIKIQRGIFQGDSLSPLWFCIALNPLSELLNNTNIGFKLKHDNSCHTISHLLYMDDIKIYSTNNTQLTELADITQTFSTDIHMQFGVDKCKIHSIVKGKSQPNSYILNSGEQIEHMDEHNTYKYLGFHQSKQIQQKETKLDLTKKFKIRLNQILRTHLDSRNTVKAINTYAIPVLTYSFGIINWSQTDLLKLQRMINTHMTTHRKHHPRSCVQRLTLPRQDGGQGLIDIQNLHNTLVTKLRTYFHNKAENSELHKYVNAIDKKLTPLNLSNNISQPIITSRQQKIDIWSQKSLHGRHLADLNQPHVDNHASNEWLRRGELFPETEAFMIAIQDQVIDTRNYQKYIIRLPNLTTDLCRRCHSSSETIQHITGACKSIVQTDYKHRHDQVASIIHQNLAYTHSFIHKRVAYYKYKPETVLENNSVKLYWDRTIITDKTIHFNRPDITLLDKTKNIVYLIDIAVCNTHNLLSTFNEKITKYVDLASEIKRQWQVDNVKILPIVLSTTGVIPKSLSTSLNSLQMPFSTTILLQKAAILNTCRLTRKFLATSTSP

SEQ ID NO: 23211 - protein, 1371 aa, Autographa gamma
MEYSMKSQNRRYSLRPLPGGRRGASGADAGCHSMRTVGDGGLNRRVPLDKNTTADRSPSPSSSDHSLFADIPSPSSTHTLFRSPISSPSSTYSCRSTRSTAVVQEALATNPAPTAGLSRARKKWTENMNRFIWRTYLIITKCETTLMNNYLEPLHQEFNNLYPEMQATRQRLGDQRRAILRRKLLPQQVLDEICTEVKEQVQVNEYSSTHNHSQMEITSQTISHTNSNINTRLKWSEDINEDIIRCYLEVTELEINKTAYRKKLFELFTERHPHLSHLTEQRIADQRRLVFNNKLYANKILDIKKEVELKLLAQNIHLQPGIEQNTHVTEQVDLTQYGVTLDSTLPPSEDLTIVSVDNSNGTSLVNSLEEPNNIEVEFNKAVTRFRDVHPEARPYIPKQNTSRKFSQLVHYLNYVILPKHLCHEIDFNSLHNIIYSAAYAAATCNGTRFNTLENTNKSSDSRKPTWQRRIESRIGKYRLEIGRLTQYISGRRSKNIVKTVKAIMIKYKIHSKHEEPNSEPQHFLDTLKQKLNAISNRLTRYLACTQRKKQNATFVNNEKQFYRNLSKFIENDTSVPSEGPSTDSLKQFWAGIWEQPVQHNADATWLHNTADTVPIDEMEFENIPIDTFARVINGTHNWKAPGTDHIHNYWYKKFTCTHPFIHKHICQFIQSPHTMPSFITHGVTYMLPKGSDPKNPANYRPITCLQTIYKIITGCISQLMYKHLENHNILAEQQKGCKQNSQGCKEQLTVDTIVMKQAKTRNIHTMFIDYKKAFDSVPHSWLIYILKHYKIHPDIVVFLSTSMLHWETKLKLINNNSLTTDPIKIQRGIFQGDALSPLWFCMALNPLSEILNNTNIGFQLKYNNSVHLISHLLYMDDIKLYAANNTDLIKLADLTQMFSTDIKMAFGVDKCKIFSMNRGKVQANTYTLDTGERIEPMDEYSTYKYLGFQQSKQIHQKLAKTELTSKFKSRLNKILKTHLNSRNSIKAINTYAIPVLTYSFGIIKWSQSDLIKLQRIINTSMTANRKHHPRSCVQRLTLPRQDGGRGLIDIRNLHDNIVDKLRKYFYTKAEQSPLHRHLVETDRKLTPLNLKHFDSQAKLISRQQKLDMWSQKSLHGRHLADLSQEHVDKDASNEWLRRGELFPETEAFVIAIQDQVIDTRNYQKFISRIPNLSTDLCRRCHSSSETIQHITGACKSIVQTDYKHRHDQVAAIIHQNLAHKNSFIPQKIAYYKYKPSTVLENDSLKIYWDRTIITDKTVHFNRPDITVLDKVQKSVFIIDVAVCNTHNLVTTYTEKMSKYIDLATEIKRQWQVESVKIIPIVISTTGVVPKSLQPNLNLIQMPKTTLTLLQKATLLNTCRLTRKFLASSSST

SEQ ID NO: 23212 - protein, 1372 aa, Autographa pulchrina
MEYIMKSQNRRYSLRPLPGGRRGASGADAGCHSMRNVGDGGLSRRVPLDKNTTADRSPSLSSSEHSLFADIPSPSSTHALFRSPISSPSSAYSCRSTRSTAVVQEALATNPVPTAGLSRARKKWTENMNRFIWRTYLIITKCETTLMNNYLEPLHQEFNNIYPEMQATRQRLGDQRRAILRRKLLPQHVLDEIGSEVKEQVQVNEYSSTHNHSQMEYTSQTISQTNSNINTRLKWSEDINEDIIRCYLEVTELEINKTAYRKKLFELFTERHPHLSHLTEQRIADQRRLVFNNKSYANKILEIKKEVELKLLAQNNHLQPGIEQNIYATEQVHLTLHDITLDSTLPPSEDPTIVTVDNSNELSLTVNSLEEPNNIEVEFNKAVTQFRDVHPEARPYIPKQKTSRKFAQLVHYLNYVILPKHLCHELDFNSLHNIIYSAAYAAATCNGTKFSTLENTNKSSHSRKPAWQRRIEGRIGKYRLEIGRLTQYISGNRSKNIVKTVEEIMIKYKIHSKHEEPNSEPQHFLDTLKQKLNAISNRLTRYLACTQRKKQNATFVNNEKQFYRNLSKFIENDTSVPSEGPSTDSLKQFWAGIWEQPVQHNADAAWLHNTGDTVPIDEMEFESIPIDTFARVINGTHNWKAPGTDHIHNYWYKKFTCTHPFIHKHICQFIQSPHTMPSFITHGVTYMLPKGSDPKNPANYRPITCLQTIYKIITGCISQLMYKHLENHNILAEQQKGCKQNSQGCKEQLTVDTIVMKQAKTRNIHTMFIDYKKAFDSVPHSWLIYILKYYKIHPDIVVFLSTSMLNWETKLKLINNNSLTTDPIKIQRGIFQGDALSPLWFCMALNPLSEILNNTNIGFQLKYNNSVHLISHLLYMDDIKLYAANNTDLIKLADLTQIFSTDIKMAFGVDKCKIFSMNRGKVQANTYTLDTGERIEPMDEYSTYKYLGFQQSKQIHQKLAKIELTNKFKSRLNKILKTHLNSRNSIKAINTYVIPVLTYSFGIIKWSQSDLIKLQRIINTRMTANRKHHPRSCVQRLTLPRQDGGRGLIDIRNLHDNIIEKLRKYFYTKAEQSQLHKHLVETDRKLTPLNLKRFECQAKLISRQQKMDMWSQKSLHGRHLADLSQEHVDKDASNEWLRRGELFPETEAFVIAIQDQVIDTRNYQKFISRIPNLNTDLCRRCHSSSETIQHITGACKSIVQTDYKHRHDQVAAIIHQNLAHKNSFIPQKIAYYKYKPSTVLENDSLKIYWDRTIITDKTVHFNRPDITVLDKVQKSVFIIDVAVCNTHNLVTTYTEKMSKYVDLATEIKRQWQVESVKIIPIVISTTGVVPKSLQPNLNLLQMPKTTLTLLQKATLLNTCRLTRKFLASSSST

SEQ ID NO: 23213 - protein, 1372 aa, Autographa pulchrina
MEYIMKSQNRRYSLRPLPGGRRGASGADAGCHSMRTVGDGGLSRRVPLDKNTTADRSPSPSSSEHSLFADIPSPSSTHTLFRSPISSPSSTYSCRSTRSTAVVQEALATNPAPTAGLSRARKKWTENMNRFIWRTYLIITKCETTLMNNYLEPLHQEFNNIYPEMQATRQRLGDQRRAILRRKLLPQHVLDEIGSEVKEQVQVNEYSSTHNHSQMEYTSQTISQTNSNINTRLKWSEDINEDIIRCYLEVTELEINKTAYRKKLFELFTERHPHLSHLTEQRIADQRRLVFNNKLYANKILEIKKEVELKLLAQNNHLQPGIEQNIYVTDQVHLTLHDITLDSTLPPSEDPTIVTVDNSNELSLTVNSLEEPNNIEVEFNKAVTQFRDVHPEARPYIPKQKTSRKFAQLVHYLNYVILPKHLCHELDFNSLHNIIYSAAYAAATCNGTKFNTLENTNKSSHSRKPTWQRRIESRIGKYRLEIGRLTQYISGNRSKNIVKTVEEIMIKYKIHSKHEEPNSEPQHFLDTLKQKLNAISNRLTRYLACTQRKKQNATFVNNEKQFYRNLSKFIENDTSVPSEGPSTDSLKQFWAGIWEQPVQHNADAAWLHNTADTVPIDEMKFENIPIDTFARVINGTHNWKAPGTDHIHNYWYKKFTCTHPFIHKHICQFIQSPHTMPSFITHGVTYMLPKGSDPKNPANYRPITCLQTIYKIITGCISQLMYKHLENHNILAEQQKGCKQNSQGCKEQLTVDTIVMKQAKTRNIHTMFIDYKKAFDSVPHSWLIYILKHYKIHPDIVVFLSTSMLNWETKLKLINDNSLTTDPIKIQRGIFQGDALSPLWFCMALNPLSEILNNTNIGFQLKYNNSVHLISHLLYMDDIKLYAANNTDLIKLADLTQMFSSDIKMAFGVDKCKIFSMNRGKVQANTYTLDTGERIEPMDEYSTYKYLGFQQSKQIHQKLAKIELTNKFKSRLNKILKTHLNSRNSIKAINTYAIPVLTYSFGIIKWSQSDLIKLQRIINTRMTANRKHHPRSCVQRLTLSRQDGGRGLIDIRNLHDNIIEKLRKYFYTKAEQSQLHKHLVETDRKLTPLNLKRFESQAKLISRQQKMDMWSQKSLHGRHLADLSQEHVDKDASNEWLRRGELFPETEAFVIAIQDQVIDTRNYQKFISRIPNLNSDLCRRCHSSSETIQHITGACKSIVQTDYKHRHDQVAAIIHQNLAHKNSFIPQKIAYYKYKPSTVLENDSLKMYWDRTIITDKTVHFNRPDITVLDKVQKSVFIIDVAVCNTHNLVTTYTEKMSKYVDLATEIKRQWQVESVKIIPIVISTTGVVPKSLQPNLNLLQMPKTTLTLLQKATLLNTCRLTRKFLASSSST

SEQ ID NO: 23214 - protein, 1372 aa, Autographa pulchrina
MEYIMKSQNRRYSLRPLPGGRRGASGADAGCHSMRTVGDGGLSRRVPLDKNTTADRSPSPSSSEHSLFADIPSPSSTHTLFRSPISSPSSTYSCRSTRSTAVVQEALATNPAPTAGLSRARKKWTENMNRFIWRTYLIITKCETTLMNNYLEPLHQEFNNIYPEMQATRQRLGDQRRAILRRKLLPQHVLDEIGSEVKEQVQVNEYSSTLNHSQMEYTSQTISQTNSNINTRLKWSEDINEDIIRCYLEVTELEINKTAYRKKLFELFTERHPHLSHLTEQRIADQRRLVFNNKLYANKILEIKKEVELKLLAQNNHLQPGIEQNIYVTEQVHLTLHDITLDSTLPPSEDPTIVTVDNSNELSLTVNSLEEPNNIEVEFNKAVTQFRDVHPEARPYIPKQKTSRKFAQLVHYLNYVILPKHLCHELDFNSLHNIIYSAAYAAATCNGTKFNTLENTNKSSHSRKPTWQRRIEGRIGKYRLEIGRLTQYISGNRSKNIVKTVEEIMIKYKIHSKHEEPNSEPQHFLDTLKQKLNAISNRLTRYLACTQRKKQNATFVNNEKQFYRNLSKFIENDTSVPSEGPSTDSLKQFWAGIWEQPVQHNADAAWLHKTANTVPIDEMEFESIPIDTFARVINGTHNWKAPGTDHIHNYWYKKFTCTHPFIHKNICQFIQSPHTMPSFITHGVTYMLPKGSDPKNPANYRPITCLQTIYKIITGCISQLMYKHLENHNILAEQQKGCKQNSQGCKEQLTVDTIVMKQAKTKNIHTMFIDYKKAFDSVPHSWLIYILKHYKIHPDIVVFLSTSMLNWETKLKLINNNSLTTDPIKIQRGIFQGDALSPLWFCMALNPLSEILNNTNIGFQLKYNNSVHLISHLLYMDDIKLYAANNTDLIKLADLTQTFSTDIKMAFGVDKCKIFSMKRGKIQANTYTLDTGERIEPMDEYSTYKYLGFQQSKQIHQKLAKIELTNKFKSRLNKILKTHLNSRNSIKAINTYAIPVLTYSFGIIKWSQSDLIKLQRIINTRMTANRKHHPRSCVQRLTLPRQDGGRGLIDIRNLHNNIIEKLRKYFYTKAEQSQLHKHLVETDRKLTPLNLKRFESQAKLISRQQKMDMWSQKSLHGRHLADLSQEHVDKDASNEWLRRGELFPETEAFVIAIQDQVIDTRNYQKFISRIPNLNTDLCRRCHSSSETIQHITGACKSIVQTDYKHRHDQVAAIIHQNLAHKNSFIPQKIAYYKYKPSTVLENDSLKIYWDRTIITDKTVHFNRPDITVLDKVQKSVFIIDVAVCNTHNLVTTYTEKMSKYVDLATEIKRQWQVESVKIIPIVISTTGVVPKSLQPNLNLLQMPKTTLTLLQKATLLNTCRLTRKFLASSSST

SEQ ID NO: 23215 - protein, 868 aa, Autographa pulchrina
MIKYKIHSKHEEPNSEPQHFLDTLKQKLNAISNRLTRYLACTQRKKQNATFVNNEKQFYRNLSKFIENDTSVPSEGPSTDSLKQFWAGIWEQPVQHNADAAWLHNTADTVPIDEMKFENIPIDTFARVINGTHNWKAPGTDHIHNYWYKKFTCTHPFIHKHICQFIQSPHTMPSFITHGVTYMLPKGSDPKNPANYRPITCLQTIYKIITGCISQLMYKHLENHNILAEQQKGCKQNSQGCKEQLTVDTIVMKQAKTRNIHTMFIDYKKAFDSVPHSWLIYILKHYKIHPDIVVFLSTSMLNWETKLKLINNNSLTTDPIKIQRGIFQGDALSPLWFCMALNPLSEILNNTNIGFQLKYNNSVHLISHLLYMDDIKLYAANNTDLIKLADLTQMFSSDIKMAFGVEKCKIFSMNRGKVQANTYTLDTGERIEPMDEYSTYKYLGFQQSKQIHQKLAKIELTNKFKTRLNKILKTHLNSRNSIKAINTYAIPVLTYSFGIIKWSQSDLIKLQRIINTRMTANRKHHPRSCVQRLTLPRQDGGRGLIDIRNLHENIIEKLRKYFYTKAEQSQLHKHLVETDRKLTPLNLKRFESQAKLISRQQKMDMWSQKSLHGRHLADLSQEHVDKDASNEWLRRGELFPETEAFVIAIQDQVIDTRNYQKFISRIPNLNSDLCRRCHSSSETIQHITGACKSIVQTDYKHRHDQVAAIIHQNLAHKNSFIPQKIAYYKYKPSTVLENDSLKIYWDRTIITDKTVHFNRPDMTVLDKVQKSVFIIDVAVCNTHNLVTTYTEKMMKYVDLATEIKRQWQVESVKIIPIVISTTGVVPKSLQPNLNLLQMPKTTLTLLQKATLLNTCRLTRKFLASSSST

SEQ ID NO: 23216 - protein, 1364 aa, Heliconius numata
MALVTLFMENMENKRYNLRPLPGGRRGASGANAGCHSMRTVGDGGLSRRVPLEKNATAEQSSSSCTSSSSHSPISSIPSPPSTCTLLNSPNSSPTSSHSSLIIRSADVVQEAFANYPAPTAGSIRARKKWTDTMNRHIWRTYLIITKCETTLLNNYLEPLHQEFSNKFPEMQVTRQRIGDQRRAIIRNKLLSDNTLAQIMIEVKELLQVGDQPLTKNNIHSTQLSHSNTRMKWSNQLNEEIVKCYFEVTQLEVNKTSYRKNLYSLFISRNPHLSHLTEQRIADQRRLIFTNKSIQTDRIIELKREVEIKLANSNPLTTNITESNFASSQTNESSNSAYLQRNLQPVESLDQHCINRHNLIEKQQHYIEQEFNNALIEFNNTNPETRPYIPKQKSSRKFSQIVSFLNSKILPKHLNNELDFNALHNIIYTAAYTASLCNGTKFSFIDNYRTRNSKPWWQRRLESRVDKYRLQIGRLTQYISGNRSRKILKTVEEIKTQYKIHSHHEEPNTELPHFLDTLKQKLNATSNRLRRYLTCTKRKQQNNTFVNNEKHFYRTLSSTNQNTTTQLLENPTQNNLQQYWANIWENSIEHNTDAEWLKKIPDVEINVMKFNDITIETFNQIIQRTHNWKAPGTDNIHNYWYKKLTCTHSILLKHINQFIQSPCTLPLFVTNGITYMLPKGLDRTNPANYRPITCLQTIYKIITSCITDIIYKHIDQNNILAEQQKGCRKNSQGCKEQLTIDAIVMKQAHNKNINTMYIDYRKAFDSVPHSWLLYILKKYKIHPILTTFLSSVMLSWKTRLKLINNNETLITDSIKIQRGIFQGDALSPLWFCLALNPLSELLNNTNTGFKLKHNNTYHIISHLMYMDDIKLYASNNKELKILADLTQSFSTDIRMEFGIEKCKVHSIVRGKSQQNTYTLSTGEQIESMDENSTYKYLGFQQAKQIQQKQTKIELTNKFKFRLNQILRSHLNSRNIIKAINTYAIPILTYSFAIINWSQTDLSNLQRIINTHMTTHRKHHPKSCIQRLTIPRLDGGRGLIDIRNLHNNLVTKFRNYFYAKAEISELHKFIVNIDNKYTPLNLNDKNIQLNQTLITKQQKIEAWSLKSLHGRHLADLSQTHVDKVASNEWLRRGDLFPETEAFMMAIQDQVIDTRNYQKHIIKRPNLVNDLCRRCYSSPETIQHITGACKTIVQTDYKHRHDQVAAIIHQHLAVKHSLITQAHKTPYYKYSPQAILESTNFKLYWDRTIITDKTVHYNRPDILLHDKVKNSVYLIDIAIPNTHNLASTFSNKIDKYTDLTIELKSQWKVQFVTTVPIVISTTGVVPHTLHTSLETLGIHRLSYILLQKAAILNTCRVVRKFLSSNN

SEQ ID NO: 23217 - protein, 1238 aa, Eueides isabella
MRSTDVVQEASANYPAPTAGPSRARKKWTEIMNRHIWRTYLIITKCETTLLNNYLEPLQQEFNTKFPEMQVTRQRIGDQRRAIIRRKLLSEHTLSEIFDEVQELLKNDSQSLTNNNIDITHLPSQTKTRIRWSNELNEEIVRCYFEVTHLENNKSCYRKKMYTLFISRNPHLSHFTEQRIADQRRLIFTGKTIDNDKIVEIRRQVEIKLANSSLLSKNIVEADYPITQTNETVDVANTQTSQPIEIQIQHCISMQNLTEKQQNFIEIEFNKALIEFNNTNPETRIYIPKQKPSRKFSQIVNFLNNKVLPKHLNSELDFIALHKLIYTTAYTAALCNGTKFSFGSNFRTSDRKPSWQRRIETRINTYRLQIGRLTQFISGNRNHKIEKTVDEIKLKYKTHSNHEEPNTELNHFLDTLKQKLNATSNRLRRYLTCTKRKQQNNKFSNNEKCFYRNLNSANQRTTTQPLETPTQNDLRCYWANIWETPMQHNLDAEWLKKSPDVDINTMSFEDISIQTLNQIITRTHNWKAPGTDNIHNYWYKKLTCTHLLLLKHINQFIHSPHTLPNFVTNVITYMLPKGLFPKNPANYRPITCLQTIYKIITACITDIIYKHIDQNNILVEQQKGCKKNSQGCKEQLTIDAIIMKQAYNKNIHTMYIDYRKAFDSVPHSWLVYILQKYKIHPTIITFLNSVMLHWCTRLNLTNKNETLTTAPIKIQRGIFQGDALSPLWFCLALNPLSELLNDTNIGYQLKHNNTQHTISHLMYMDDIKLYATNNDKLKKLADITQSFSTDIRMEFGIAKCKIHSIIQGKTVQNTYILNTGEQIDSINENNTYKYLGFQQAKQIHQKQSKLQLTRKFKYRLNQILKSQLNSNNIIKAINTYAIPILTYSFGIIKWSQTDLSKLQRTISTHMTTYRKHHPKSCTQRLTISRQDGGRGLIDIRNLHNNLITKLRTYFYSKAENSELHKFIVQLDKKCTPLNLHSKNTQLNQILISQQQKKETWSLKSLHGRHFTDLTQSHVDTVASNEWLRQGNLFPETEAFMLAIQDQVIDTRNYQKYIIKRSNMTNDLCRKCYSNPETIQHITGACKSIVQTDYKHRHDQVAAIIHQHLAIKHSLITQAERTPFYKYTPQTILESAHHKLYWDRTIITDKTIHYNRPDILLHDKIKNIVYLIDIAIPNTHNLVSTFSNKIDKYTDLSIELRSQWKVQSVTTVPIVLSTTGVIPHSLHASLETIGMHRLR

SEQ ID NO: 23218 - protein, 1042 aa, Eueides isabella
MYTLFISRNPHLSHFTEQRIADQRRLIFTGKTIDNDKIVEIRRQVEIKLANSSLLSKNIVEADYPITQTNETVDVANTQTSQPIEIQIQHCISKQNLTEKQQNFIEIEFNKALIEFNNTNPETRIYIPKQKPSRKFSQIVSFLNNKVLPKHLNSELDFIALHKLIYTTAYTAALCNGTKFSFGSNFRTSDRKPSWQRRIETRINTYRLQIGRLTQFISGNRNHKIEKTVDEIKLKYKTHSNHEEPNTELNHFLDTLKQKLNATSTRLRRYLTCTKRNQQNNTFINNEKCFYRNLNSANQRTTTQPLETPTQNDLRCYWANIWETPMQHNLDAEWLKKSPDVDINTMSFEDISIQTLNQIITRTHNWKAPGTDNIHNYWYKKLTCTHLLLLKHINQFIHSPHTLPNFVTNGITYMLPKGLDPKNPANYRPITCLQAIYKIITACITDIIYKHIDQNNILVEQQKGCKKNSQGCKEQLTIDAIIMKQAYNKNIHTMYIDYRKAFDSVPHSWLVYILQKYKIHPTIITFLNSVMLHWCTRLKLTNKNETLTTAPIKIQRGIFQGDALSPLWFCLALNPLSELLNDTNIGYQLKHNNIQHTISHLMYMDDIKLYATNNDKLKKLADITQSFSTDIRMEFGIAKCKIHSIIQGKTVQNTYILNTGEQIDSINENNTYKYVGFQQAKQIHQKQSKLQLTRKFKYRLNQILKSQLNSNNIIKAINTYAIPILTYSFGIIKWSQTDLSKLQRTISTHMTTYRKHHPKSCTQRLTISRQDGGRGLIDIRNLHNNLITKLRTYFYSKAENSELHKFIVQLDKKCTPLNLHSKNTQLNQILISQQQKKETWSLKSLHGRHFTDLTQSHVDTVASNEWLRQGNLFPETEAFMLAIQDQVIDTRNYQKYIIKRSNMTNDLCRKCYSNPETIQHITGACKSIVQTDYKHRHDQVAAIIHQYLAIKHSLITQAERTPFYKYTPQTILESAHHKLYWDRTIITDKTIYYNKPDILLHDKTKNIIYLIDIAIPNIHSLASAFSNKIDKYTDLSIELRSQ

SEQ ID NO: 23219 - protein, 1351 aa, Eueides isabella
MENMENKRYSLRPLPGGRRGASGANAGCHSMRTVGDGGLSRRVPLEKNTTAEKSPSSPTSSHSLFSNVPSPSSSHTLFISPNSSPVHTSQNMRSTDVVQEASANYPAPTAGPSRARKKWTEIMNRHIWRTYLIITKCETTLLNNYLEPLQQEFNTKFPEMQVTRQRIGDQRRAIIRRKLLSEHTLSEIFDEVQELLKNDSQSLTNNNIDITHLPSQTKTRIRWSNELNEEIVRCYFEVTHLENNKSCYRKKMYTLFISRNPHLSHFTEQRIADQRRLIFTGKTIDNDKIVEIRRQVEIKLANSSLLSKNIVEADYPITQTNETVDVANTQTSQPIEIQIQHCISKQNLTEKQQNFIEIEFNKALIEFNNTNPETRIYIPKQKPSRKFSQIVNFLNNIVLPKHLNSELDFIALHKLIYTTAYTAALCNGTKFSFGSNFRTSDRKPSWQRRIETRISTYRLQIGRLTQFISGNRNHKIEKTVDEIKLKYKTHSNHEEPNTELNHFLDTLKQKLNATSNRLRRYLTCTKRKQQNNKFSNNEKCFYRNLNSANQKTTTQPLETPTQNDLRCYWANIWETPMQHNLDAEWLKKSPDVDINTMSFEDISIQTLNQIITRTHNWKAPGTDNIHNYWYKKLTCTHLLLLKHINQFIHSPHTLPNFVTNGITYMLPKGLDPKNPANYRPITCLQTIYKIITACITDIIYKHIDQNNILVEQQKGCKKNSQGCKEQLTIDAIIMKQAYNKNIHTMYIDYRKAFDSVPHSWLVYIIQKYKIHPTIITFLNSVMLHWCTRLKLTNKNETLTTAPIKIQRGIFQGDALCPLWFCLALNPLSELLNDTNIGYQLKHNNTQHTISHLMYMDDIKLYATNNDKLKKLADIPQSFSTDIRMEFGIAKCKIHSIIQGKTIQNTYTLNTGEQIDSINENNTYKYLGFQQAKQIHQKQSKLQLTRKFKYRLNQILKSQLNSNNIIKAINTYAIPILTYSFGIIKWSQTDLSKLQRTISTHMTTYRKHHPKSCTQRLTISRQDGGRGLIDIRNLHNNLITKLRTYFYSKAENSELHKFIVQLDKKCTPLNLHSKNTQLNQILISQQQKKETWSLKSLHGRHFTDLTQSHVDTVASNEWLRQGNLFPETEAFMLAIQDQVIDTRNYQKYIIKRSNMTNDLCRKCYSNPETIQHITGACKSIVQTDYKHRHDQVAAIIHQHLAIKHSLITQAERTPFYKYTPQTILESAHHKLYWDRTIITDKTIHYNRPDILLHDKIKNIVYLIDIAIPNTHNLVSTFSNKIDKYTDLSIELRSQWKVQSVTTVPIVLSTTGVIPHTLHASLETIGMHRLSYILLQKATILNTCRIVRKFLSL

SEQ ID NO: 23220 - protein, 1100 aa, Eueides isabella
MYTLFISRNPHLSHFTEQRIADQRRLIFTGKTIDNDKIVEIRRQVEIKLANSSLLSKNIVEADYPITQTNETVDVANTQTSQPIEIQIQHCISKQNLTEKQQNFIEIEFNKALIEFNNTNPETRIYILKQKPSRKFSQIVNFLNNKVLPKHLNSELDFIALHKLIYTTAYTAALCNGTKFSFGSNFRTSDRKPSWQRRIETRINTYRLQIGRLTQFISGNRNHKIEKTVDEIKLKYKTHSNHEEPNTELNHFLDTLKQKLNATSNRLRRYLTCTKRKQQNNKFSNNEKCFYRNLNSSNQKTTTQPLETLTQNDLRCYWANIWETPMQHNLDAEWLKKSPDVDINTMSFEDISIQTLNQIITRTHNWKAPGTDNIHNYWYKKLTCTHLLLLKHINQFIHSPHTLPIFVTNGITYMLPTGLDPKNPANYRPITCLQTIYKIITACITDIIYKHIDQNNILVEQQKGCKKNSQGCKEQLTIDAIIMKQAYNKNIHTMYIDYRKAFDSVPHSWLVYILQKYKIHPTIITFLNSVMLHWCTRLKLTNKNETLTTAPIKIQRGIFQGDALSPLWFCLALNPLSELLNDTNIGYQLKHNNTQHTISHLMYMDDIKLYATNNDKLKKLADITQSFSTDIRMEFGIAKCKIHSIIQGKTVQNTYILNTGEQIDSINENNTYKYLGFQQAKQIHQKQSKLQLTRKFKYRLNQILKSQLNSNNIIKAINTYAIPILTYSFGIIKWSQTDLSKLQRTISTHMTTYRKHHPKSCTQRLTISRQDGGRGLIDIRNLHNNLITKLRTYFYSKAENSELHKFIVQLDKKCTPLNLHSKNTQLNQILISQQQKKETWSLKSLHGRHFTDLTQSHVDTVASNEWLRQGNLFPETEAFMLAIQDQVIDTRNYQKYIIKRSNMTNDLCRKCYSNPETIQHITGACKSIVQTDYKHRHDQVAAIIHQHLAIKHSIITQAERTPFYKYTPQTILESAHHKLYWDRTIITDKTIHYNRPDILLHDKIKNIVYLIDIAIPNTHNLVSTFSNKIDKYTDLSIELRSQWKVQSVTTVPIVLSTTGVIPHTLHASLETIGMHRLSYILLQKATILNTCRIVRKFLSL

SEQ ID NO: 23221 - protein, 1362 aa, Heliconius melpomene
MALVTLFMENMENKRYNLRPLPGGRRGASGANAGCHSMRTVGDGGLSRRVPLEKNVTAEQSSSPLTSSSSHSPVSSIPSPSSTRTLLNSPNSSPTSSHSSLVIRSADVVQEALANYPAPTAGSIRARKKWTDIMNRYIWRTYLIITKCETTLLNNYLEPLHQEFSSKFPEMQVTRQRIGDQRRAIIRNKLLSDDTLAQILIEVKELLQIGDQPLTQNNIHSIQLSHSNTRIKWSNELNEEIVKCYFEVTLLEVNKTSYRKNLYSLFISRNPHLSHLTEQRIADQRRLIFMNKSVHNDRIIELKREVEIKLANSNSLTKNITESNSPSSQTNEINDSAYVQSNLQPVEPLDQHCINRHYLIEKHYVEQEFNNALIQFNNTNPETRPYIPRQKSSRKFSQIVSFLNSEVLPKHLNNELDFNALHNIIYTAVYTASLCNGTKFSFIDNYRPRNSKPSWQRRLESRIDKYRLQIGRLTQYISGNRNRKILKTVEEIKTQYKIHSHHEEPNTELPHFLDTLKQKLNATSNRLRRYLTCTKRKHQNNTFVNNEKHFYRTLSSTNQNTTTQLQEHPTENNLQQYWANIWETSIEHHADAEWLNKIPDVEINLMKFKDISIETFNQIIQRTHNWKAPGTDNIHNYWYKKLTCTHSLLLKHINQFIQSPCTLPLFITNGITYMLPKGLDPTNPANYRPITCLQTIYKIITACITDIIYKHIDQNNILAEQQKGCRKNSQGCKEQLTIDAIVMKQAHNKNTNTMYIDYRKAFDSVPHSWLLYIFKKYKIHPILITFLSSVMLSWKTRLKLINNNETLITDWIKIQRGIFQGDALSPLWFCLALNPLSELLNNTNTGFKLKHNNTYHIISHLMYMDDIKLYASNNKELKILADLTQSFSTDIRMEFGIEKCKVHSIKRGKSQQNTYILNTGEQIESIDENSTYKYLGFQQAKQIQQKQTKIELTNKFKFRLNKILRSQLNSRNIIKAINTYAIPILTYSFAIINWSQTDLTNLQRIINTHMTTHRKHHPKSCIQRLTISRLDGGRGLIDIRNLHNNLVTKFRNYFYAKAEISELHKFIVNIDNKYTPLNLNDRNIQLNQTLITKQQKIEAWSLKSLHGRHLADLSQTHVDKVASNEWLRRGDLFPETEAFMMAIQDQVIDTRNYQKHIIKRPNVVNDLCRRCYSSPETIQHITGACKTIVQTDYKHRHDQVAAIIHQHLAFKHSLITQAQKTPYYKYSPQAILESTNFKLYWDRTIITDKTVHYNRPDILLHDKVKNSVYLIDIAIPNTHNLASTFSNKIDKYTDLTIELKSQWKVQSVTTVPIVLSTTGVVPHTLHTSLETLGIHRLSYILLQKAAILNTCRIVRKFLSSNN

SEQ ID NO: 23222 - protein, 1365 aa, Heliconius numata
MALVTLFMENMENKRYNLRPLPGGRRGASGANAGCHSMRTVGDGGLSRRVPLEKNATAEQSSSSCTSSSSHSPISSIPSPPSTCTLLNSPNSSPTSSHSSLIIRSADVVQEAFANYPAPTAGSIRARKKWTDTMNRHIWRTYLIITKCETTLLNNYLEPLHQEFSNKFPEMQVTRQRIGDQRRAIIRNKLLSDDTLAQIMIEVKELLQVGDQPLTKNNIHSTQLSHSNTRMKWSNQLNEEIVKCYFEVTQLEVNKTSYRKNLYSLFISRNPHLSHLTEQRIADQRRLIFTNKSIQTDRIIELKREVEIKLANSNPLTTNITESNFASSQTNEISNSAYLQRNLQPVESLDQHCINRHNLIEKQQHYIEQEFNNALIEFNNTNPETRPYIPKQKSSRKFSQIVSFLNSKILPKHLNNELDFNALHNIIYTAAFTASLCNGTKFTFIDNCRTRNSKPSWQRRLESRVDKYRLQIGRLTQYISGNRSRKILKTVEEIKTQYKIHSHHEEPNTELPHFLDTLKQKLNATSNRLRRYLTCTKRKQQNNTFVNNEKHFYRTLSSTNQNTTTQSLENPTQNNLQQYWANIWENSIEHNTDAEWLKKKIPDVEINVMKFNDITIETFNQIIQRTHNWKAPGTDNIHNYWYKKLTCTHSILLKHINQFIQSPCTLPLFVTNGITYMLPKGLDRTNPANYRPITCLQTIYKIITACITDIIYKHIDQNNILAEQQKGCRKNSQGCKEQLTIDAIVMKQAHNKNINTMYIDYRKAFDSVPHSWLLYILKKYKIHPILITFLSSVMLSWKTRLKLINNNETLITDSIKIQRGIFQGDALSPLWFCLALNPLSELLNNTNTGFKLKHNNTYHIISHLMYMDDIKLYASNNKELKILADLTQSFSTDIRMEFGIEKCKVHSIVRGKSQQNTYTLNTGEQIESMDENSTYKYLGFQQAKQIQQKQTKIELTNKFKFRLNQILRSHLNSRNIIKAINTYAIPILTYSFAIINWSQTDLSNLQRIINTHMTTHRKHHPKSCIQRLTIPRLDGGRGLIDIRNLHNNLVTKFRNYFYAKAEISELHKFIVNIDNKYTPLNLNDKNIQLNQTLITKQQKIEAWSLKSLHGRHLADLSQTHVDKVASNEWLRRGDLFPETEAFMMAIQDQVIDTRNYQKHIIKRPNMVNDLCRRCYSSPETIQHITGACKTIVQTDYKHRHDQVAAIIHQHLAVKHSLITQAQKTPYYKYSPQAILESTNFKLYWDRTIITDKTVHYNRPDILLHDKVKNSVYLIDIAIPNTHNLASTFSNKIDKHTDLTIELKSQWKVQSVTTIPIVISTTGVVPHTLHTSLETLGIHRLSHILLQKAAILNTCRIVRKFLSSNN

SEQ ID NO: 23223 - protein, 1362 aa, Heliconius numata
MALVTLFMENIENKRYSLRPLPGGRRGASGANAGCHSMRTVGDGGLSRRVPLEKNATAEQSSSSLTSSSSHSPVSSIPSPSSTRTLLNSPNSSPTSSHSSLVIRSADVVQEALADYPAPTAGSIRARKKWTDIMNRYIWRTYLIITKCETTLLNNYLEPLHQEFSSKFPEMQVTRQRIGDQRRAIIRNKLLSDDILAQILIEVKELLQIGDQPLTQNNIHSTQLSHSNTRMKWSNQLNEEIVKCYFEVTLLEVNKTSYRKNLYSLFISRNPHLSHLTEQRIADQRRLIFMNKSVHNDRIIELKREVEIKLADSNSLTRNITEPNSPSSQTNEINDPAYVRSNLQPVEPLDQHCINKHNLIEKHHVEQEFNNALIQFNNTNPETRPYIPRQKSSRKFSQIVSFLNSEVLPKHLNNELDFNALHNIIYTAAYTASLCNGTKFSFIDKYRTRNSKPSWQRRLESRIDKYRLQIGRLTQYISGNRNRKILKTVEEIKTQYKIHSHHEEPNTELPHFLDTLKQKLNATSNRLRRYLTCTKRKQQNNTFVNNEKFFYRTLSSTNQNITTQLQEHPTENNLQQYWANIWETSIEHNADAEWLNKIPDVEINLMKFKDISIETFNQIIQRKHNWKAPGTDNIHNYWYKKLTCTHSLLLKHINQFIQSPCTLPLFITNGITYMLPKGLDPTNPANYRPITCLQTIYKIITACITDIIYKHIDQNNILAEQQKGCRKNSQGCKEQLTIDAIVMKQALNKNINTMYIDYKKAFDSVPHSWLLYILKKYKIHPILITFLSSVMLSWKTRLKLINKNETLITDSIKIQRGIFQGDALSPLWFCLALNPLSELLNNTNIGFKLKHNLTHHTISHLMYMDDIKLYASNNKELKILADLTQSFSTDIRMEFGIEKCKVHSIVRGKSQQNTYILNTGEQIESMDENSTYKYLGFQQAKQIQQKQTKIELTNKFKFRLNQILKSHLNSRNIIKAINTYAIPILTYSFAIINWSQTDLSNLQRIINTHMTTHRKHHPKSCIQRLTISRLDGGRGLIDIRNLHNNLVTKFRNYFYSKAENSELHEFIVNIDNKYTPLNLKDRNIQLNQTLITKQQKIEAWSLKSLHGRHLADLSQTHVDRVASNEWLRRGDLFPETEAFMMAIQDQVIDTRNYQKHIIKRPNMINDLCRRCYCSSETIQHITGACKTIVQTDYKHRHDQIAAIIHQHLAVKHSLITQAQKTPYYKYSPQAILESTYFKLYWDRTIITDKTVHYNRPDILLHDKVKNSVYLIDIAIPNTHNLASTFSNKIDKYTDLSIELKRQWKVQSVTTVPIVLSTTGVVPHVLHTSLETLGIHRLSYVLLQKAAILNTCRIVRKFLSSNN

SEQ ID NO: 23224 - protein, 1232 aa, Heliconius hecuba
MNRQIWRTYLIITKCETTLLNNYLEPLHQEFSSKFPEMQVTRQRIGDQRRAIIRNKLLSDDTLAQIFIEVKEHIGDQPYNLTKNNIDSANILSQANTRMKWSNELNEEIVRCYFEVTQLELNKTSYRKNLYSLFISRNPHLSHLTEQRIADQRRLIFINKSIQADKILELKKEVELKLANSNPLRKNIIELESPSSQTNESIDLAYIQRNSQPVEQLVQSSIFKHNLTEKQQHYIETEFNNALIEFNNTDPETRPHIPKQKSSRKFSQIVSFLNNEVVPKHLNIELDFNGLHTVIYSTAYTAALCNGTKFSFIDNCQTRNRKPSWQRRIESRIDKYRLQIGRLTQYISGNRNRKIIKTVEEIKIQYKTHSRHEEPNTELQHFLDTLKQKLNATSNRLRRYLTCTKRKQQNNTFVNNEKQFYRSLTSTSQNNITQSMETPTQNNLQHYWANIWETSIQHNADADWLEKIPDREIDLMKFIDISTETFLQIIKRTHNWKAPGTDNIHNYWYKKLTCTHSHLLKHINQFIQTPHTIPIFVTNGITYMLPKGLDLLNPSNYRPITCLQTIYKIITACIADIIYKHINNNNILVEQQKGCRKNSQGCKEQLTIDAIVMKQAYNKNIHTMYIDYRKAFDSVPHSWLLYVLKKYKIHPILITFLSSVMLVWSTRLKLISKNETLTTDVIKIQRGIFQGDALSPLWFCLALNPLSEVLNSTNVGFQLKHNDTHHTISHLMYMDDIKLYATNNDELKMLADITQSFSSDIRMQFGIEKCKIHSIIQGKSQQNTYILNTGEQIESMDETSTYKYLGFQQAKQIQQKQTKLDLTNKFKHRLNQILKSHLNSHNIIKAINTYAIPILTYSFAVINWSQTDLSKLQRIINTHMTTHRKHHPKSCIQRLTIPRQDGGRGLIDIRNLHNNLITKFRSYFYSKAEISELHKFIVNIDKKYTPLNLNCRNTQLNQTLISKQQKIEAWSLKSLHGRHLADLSQTHVDKGASNEWLRRGDLFPETEAFMVAIQDQIIDTRNYQKHIIKRPNMINDLCRRCYCSPETIQHITGACKTIVQTDYKHRHDQIAGIIHQHLAVKYSLITQEKKTPYYKYIPQTVLESTNYKLYWDRTIITDKTIHYNRPDILLHDKVKNAIYLIDIAIPNTHNLTSTYSNKIDKYTDLSIELKRQWKVQSVTTVPIVLSTTGIIPHTLHTSLETIGMHRLSYILLQKAAILNTCRIVRKFLSLNN

SEQ ID NO: 23225 - protein, 1361 aa, Dryas iulia
MAMATLFMENMENKRYSLRPLPGGRRGASGADAGCHSMRTVGDGGLNRRVPLEKHATADQSYSPSTSSTNSPFSSIPSPSSSHTLLISPNSSPSSSFSLRTTRSTDVVQEAAAVHTVPTARPTRARNKWTEIMNRHIWRTYLLITKCETTLMNNYLEPLHQEFCAKFPEMQVTRQRIGDQRRAIIRRKLLSENTLAEIFTEVYELLQTKNQPTQIPIEHTTHTLSQTSVRMKWSNELNEEIVRCYFEVTQLESHKTSYRKKMYNLFISRNPHLSHLTEQRIADQRRLIFNNKSIQSDKMMEIKKDVQIKLANSHHQSENILESDSHSSQINEVILVTNEQQNSQINEAVTQNYNNNLNLTDKQQNHIEVEFIKALDQFKNINPETRPYIPKQKSSRKFSQIVSFLNSEVLPKHLSNELDFISLHNIIYTAAYTAALCNGTTFNFNENYRNHKSKPSWQRRIESRIDRYRLQIGRLTQYISGNKSPKIVKTVEEIKIQYNTHSHHEKPNTELQHFLDTLKQKLNATSSILRRYLTCTKRKQQNNTFINNEKLFYRNLTSTNQNITTQLQGTPTQDNLRHFWANIWENPIQHNEDAKWLKEIPDLTIDSMKFKEISIDTFNQVIKYTHNWKAPGSDNIHNYWYKKLTCTHSLLLQHINQFIQSPQALPKFVTNGITYMLPKGLDPKNPANYRPITCLQTIYKIMSACITNIIYKHVDQNNILSEQQKGCRKNSQGCKEQLTIDAIVMKQAYNKNIHTMYIDYKKAFDSVPHSWLLYILKKYKIDPILITFLNSVMLQWSTKLKLINKTTNLTTDPIKIQRGIFQGDALSPLWFCMALNPLSELLNSINVGLQLKHDDIHHTVSHLMYMDNNNKYATNNTGLTKLADITQSFSTDIRMEFGVEKCKIHSIVRGRTQQNTYTLDTGEQIESLDENSTYKYLGFQQAKQIRQKQTKLELTNKFKFRLNQILKSQLNSRNIIKAINTYAIPVLNYSFGIVNWSQTDLSKLQRIINTHMTTHRKHHPKSCIQRLTLSRQDGGRGLIDIRNLHNNLITKFRNYFYSKIDVSELHKLIVNIDKKYTPLNLSDKSMQLNQSLLSKQQKIDAWSLKSLHGRHLSDLSQSHVDKIASNDWLRRGDLFPETEAFMIAIQDQVIDTRNYQKHIIKRPNMVNDLCRRCYSSSETIQHITGACKSIVQTDYKHRHDQIAAIIHQQLALKHSLITQAQKTPYYKYSPETVLESVDYKLYWDRTIITDKTIHYNRPDILLLDKIKNTVFIIDIAIPNTHNLASTYSSKIEKYTDLAIELKNQWKVQSVTIVPIVISTTGVIPHTLHVSLNTIGIHHSTYILLQKAAILNTCRIVRKFLR

SEQ ID NO: 23226 - protein, 757 aa, Heliconius numata
MKFKDISIETFNQIIQRTHNWKAPGTDNIHNYWYKKLTCTHSLLLKHINQFIQSPCTLPLFITNGITYMLPKGLDPTNPANYRPITCLQTIYKIITACITDIIYKHIDQNNILAEQQKGCRKNSQGCKEQLTIDAIVMKQAHNKNINTMYIDYKKAFDSVPHSWLLYILKKYKIHPILITFLSSVMLSWKTRLKLINKNETLITDSIKIQRGIFQGDALSPLWFCLALNPLSELLNNTNIGFKLKHNLTHHTISHLMYMDDIKLYASNNKELKILADLTQSFSTDIRMEFRIEKCKVHSIVRGKSQQNTYILNTGEQIESMDENSTYKYLGFQQAKQIQQKHTKIELTNKFKFRLNQILKSHLNSRNIIKAINTYAIPILTYSFAIINWSQTDLSHLQRIINTHMTTHRKHHPKSCIQRLTISRLDGGRGLIDIRNLHNNLVTKFRNYFYSKAENSELHEFIVNIDNKYTPLNLNDRNIQLNQTLITKQQKIEAWALKSLHGRHLADLSQTHVDRVASNEWLRRGDLFPETEAFMMAIQDQVIDTRNYQKHIIKRPNMINDLCRRCYCSSETIQHITGACKTIVQTDYKHRHDQIAAIIHQHLAVKHSLITQAQKTPYYKYSPQAILESTYFKLYWDRTIITDKTVHYNRPDILLHDKVKNSVYLIDIAIPNTHNLASTFSNKIDKYTDLSIELKRQWKVQFVTTVPIVLSTTGVVPHVLHTSLETLGIHRLSYVLLQKAAILNTCRIVRKFLSSNN

SEQ ID NO: 23227 - protein, 1362 aa, Heliconius numata
MALVTLFMENMENKRYNLRPLPGGRRGASGANAGCHSMRTVGDGGLNRRVPLEKNATAEQSSSSCTSSSSHSPISSIPSPPSTCTLLNSPNSSSTSSHSSLIIRSADVVQEAFANYPAPTAGSIRARKKWTDTMNRHIWRTYLIITKCETTLLNNYLEPLHQEFSNKFPEMQVTRQRIGDQRRAIIRNKLLSDDTLAQIMIEVKELLQVGDQPLTKNNIHSTQLSHSNTRMKWSNQLNEEIVKCYFEVTQLEVNKTSYRKNLYSLFISRNPHLSHLTEQRIADQRRLIFTNKSIQTDRIIELKREVEIKLANSNPLTTNITESNFASSQTNELSNSAYLQRNLQPVESLDQHCINRHNLIEKQQHYIEQEFNNALIEFNNTNPETRPYIPKQKSSRKFSQIVSFLNSKILPKHLNNELDFNALHNIIYTAAYTASLCNGTKFSFIDNYRTRNSKPWWQRRLESRVDKYRLQIGRLTQYISGNRSRKILKTVEEIKTQYKIHSHHEEPNTELPHFLDTLKQKLNATSNRLRRYLTCTKRKQQNNTFVNNEKHFYRTLSSTNQNTTTQLLENPTQNNLQQYWVNIWENSIEHNTDAEWLKKIPDVEINVMKFNDITIETFNQIIQRTHNWKAPGTDNIHNYWYKKLTCTHSILLKHINQFIQSPCTLPLFVTNGITYMLPKGLDRTNPANYRPITCLQTIYKIITACITDIIYKHIDQNNILAEQQKGCRKNSQGCKEQLTIDAIVMKQAHNKNINTMYIDYRKAFDSVPHSWLLYILKKYKIHPILITFLSSVMLSWKTRLKLINNNETLITDSIKIQRGIFQGDALSPLWFCLALNPLSELLNNTNTGFKLKHNNTYYIISHLMYMDDIKLYASNNKELKILADLTQSFSTDIRMEFGIEKCKVHSIVRGKSQQNTYTLSTGEQIESMDENSTYKYLGFQQAKQIQQKQTKIELTNKFKFRLNQILRSHLNSRNIIKAINTYAIPILTYSFAIINWSQTDLSNLQRIINTHMTTHRKHHPKSCIQRLTIPRLDGGRGLIDIRNLHNNLVTKFRNYFYAKAEISELHKFIVNIDNKYTPLNLNNKNIQLNQTLITKQQKIEAWSLKSLHGRHLADLSQTHVDKVASNEWLRRGDLFPETEAFMMAIQDQVIDTRNYQKHIIKRPNMVNDLCRRCYSSPETIQHITGACKTIVQTDYKHRHDQVAAIIHQHLAVKHSLITHKTPYYKYSPQAILESTNFKLYWDRTIITDKTVHYNRPDILLHDKVKNSVYLIDIAIPNTHNLASTFSNKIDKYTDLTIELKSQWKVQSVTTVPIVISTTGVVPHTLHTSLETLGIHRLSYILLQKAAILNTCRVVRKFLSSNN

SEQ ID NO: 23228 - protein, 1229 aa, Heliconius numata
MNRYIWRTYLIITKCETTLLNNYLEPLHQEFSSKFPEMQVTRQRIGDQRRAIIRNKLLSDDILAQILIEVKELLQIGDQPLTQNNIHSTQLSHSNTRMKWSNQLNEEIVKCYFEVTLLEVNKTSYRKNLYSLFISRNPHLSHLTEQRIADQRRLIFMNKSVHNDRIIELKREVEIKLADSNSLTRNITEPNSPSSQTNEINDSAYVRSNLQPVEPLDQHCINKHNLIEKHHVEQEFNNALIQFNNTNPETRPYIPRQKSSRKFSQIVSFLNSEVLPKHLNNELDFNALHNIIYTAAYTASLCNGTKFSFIDNYRTRNSKPSWQRRLESRIDKYRLKIGRLTQYISGNRNRKILKTVEEIKTQYKIHSHHEEPNTELPHFLDTLKQKLNATSNRLRRYLTCTKRKQQNNTFVNNEKFFYRTLSSTNQNITTQLQEHPTENNLQQYWANIWETSIEHNADAEWLNKIPDVEINLMKFKDISIETFNQIIQRTHNWKAPGTDNIHNYWYKKLTCTHSLLLKHINQFIQSPCTLPLFITNGITYMLPKGLDPTNPANYRPITCLQTIYKIITACITDIIYKHIDQNNILAEQQKGCRKNSQGCKEQLTIDAIVMKQAHNKNINTMYIDYKKAFDSVPHSWLLYILKKYKIHPILITFLSSVMLSWKTRLKLINKNETLITDSIKIQRGIFQGDALSPLWFCLALNPLSELLNNTNIGFKLKHNLTHHTISHLMYMDDIKLYASNNKELKILADLTQSFSTDIRMEFRIEKCKVHSIVRGKSQQNTYILNTGEQIESMDENSTYKYLGFQQAKQIQQKHTKIELTNKFKFRLNQILKSHLNSRNIIKAINTYAIPILTYSFAIINWSQTDLSNLQRIINTHMTTHRKHHPKSCIQRLTISRLDGGRGLIDIRNLHNNLVTKFRNYFYSKAENSELHEFIVNIDNKYTPLNLNDRNIQLNQTLITKQQKIEAWALKSLHGRHLADLSQTHVDRVASNEWLRRGDLFPETEAFMMAIQDQVIDTRNYQKHIIKRPNMINDLCRRCYCSSETIQHITGACKTIVQTDYKHRHDQIAAIIHQHLAVKHSLITQAQKTPYYKYSPQAILESTYFKLYWDRTIITDKTVHYNRPDILLHDKVKNSVYLIDIAIPNTHNLASTFSNKIDKYTDLSIELKRQWKVQFVTTVPIVLSTTGVVPHVLHTSLETLGIHRLSYVLLQKAAILNTCRIVRKFLSSNN

SEQ ID NO: 23229 - protein, 1399 aa, Eilema depressum
MEGKSKRYSLRPLPGGRRGASGADAGCHSMRTVGDGGLSRRVPLEQNTTAGLGGLSRRVSLEENATAGTPISPSSISLSDRSLFSHVPSPSSTHSYLRSLTSSPSSICSYSTRSSAVVQEALATIPAPTVGPTRARKRWTEDMNRFIWRTYLIVTKCETTNMNNYLESLHREFDNRYPEMQATRQRLGDQRRAILRSKLLSDRILHEINTEVKECIQIENVNHSLTFNHTPLEHTPINTTTNSRMRWSDEINEDIIRCYFEITELESNKTAYRQKLHSLFIERHPNLSHLTEQRIADQRRLIFNNKTYTDKINTLKKEVELKLRDLNNQRLEDINTNQDAIEHSHTQQGLAANITLTPTQHSSHEDIIDNTLTLSETFTQTNLNNSNNLDQIQSHIETNAIESEFNNAIARFNTTEPEARPYIPKQKSSRKFAQIVQYLNSEILPKYLNHDLDFTSLHALIYSAAFTAASCNGTKFNTEQSRIINKKDRRPTWQKRIESRIGKYRKEIGRLTQYILGNRSRRILDAVENIKTNYKTHSQHEEPNTEPEHFLDTLKQKLNATSIRLKRYLNCTKRKQQNATFINNEKQLYRTLGQNQQTHTTQVSHAPSPENLHQFWAGIWENPVHHNADAEWLHEIANTTHINQMEFENIPVDTFIQVIKRTHNWKAPGSDNIHNYWYKKFSCVHPFLHNHICSLIQSPQTMPKFITHGITYMLPKGSDPKEPANYRPITCLQTIYKIITGCISELIYKHLENHSILAEQQKGCKKNSQGCKEQLTIDAIVMKQALTKNRNIHTMYIDYKKAFDSVPHSWLIYILEHYKIHHNLISFLSATMLEWRTKLKFINSNLTTEPIKIQRGIFQGDALSPLWFCLALNPLSELLNSTNAGFKLRHNNSQHTISHLLYMDDIKLYATNNTELTKLADITQSFSTDINMQFGVDKCKIHSIIRGKTQNNTYTLDTGEHIEPMDEYSTYKYLGFHQSKQIHQKQAKVELTKKFKARINQILRSQLNARNCIKAINTFAIPVLTYSFGIINWSHTDLIRLQRTINTHMTANRKHHPRSCTQRLTLSRQDGGRGLIDIQNLHNSLVDKLRKYFYTKAEQSQLHKYVTDIDKKLTPLNLDNKNSEPKILSKQDKIDAWAQKSLHGRHLADLSQSHVDKVASNEWLRRGELFPETEAFVIAIQDQIIDTRNYQKHIIRIPNLPTDLCRRCQSSSETIQHITGACKSIVQTDYKHRHDQIAAIIHQNIAHKHSFIPQKIAYYKYKPSTVLENASYKIYWDRTIITDKTIHYNRPDITVLDKNNKSVFIIDIAVCNTHNLNTTHSEKMAKYIDLATEIRRQWQVDIVKIVPIIISTTGVVPKTLQTNLNTLQMPKSTLTLIQKAALLNTCRLTRKFLASPTSN

SEQ ID NO: 23230 - protein, 1399 aa, Eilema depressum
MEGKSKRYSLRPLPGGRRGASGADAGCHSMRTVGDGGLSRRVPLEQNTTAGLGGLSRRVSLEENATAGTPISPSSISLSDRSLFSHVPSPSSTHSYLRSLTSSPSSICSYSTRSSAVVQEALATIPAPTVGPTRARKRWTEDMNRFIWRTYLIVTKCETTNMNNYLESLHREFDNRYPEMQATRQRLGDQRRAILRSKLLSDRILHEINTEVKECIQIENVNHSLTFNHTPLEHTPINTTTNSRMRWSDEINEDIIRCYFEITELESNKTAYRQKLHSLFIERHPNLSHLTEQRIADQRRLIFNNKTYTDKINTLKKEVELKLRDLNNQRLEDINTNQDAIEHSHTQQGLAANITLTPTQHSSHEDIIDNTLTLSETFTQTNLNNSNNLDQIQSHIETNAIESEFNNAIARFNTTEPEARPYIPKQKSSRKFAQIVQYLNSEILPKYLNHDLDFTSLHALIYSAAFTAASCNGTKFNTEQSRIINKKDRRPTWQKRIESRIGKYRKEIGRLTQYILGNRSRRILDAVENIKTSYKTHSQHEEPNTEPEHFLDTLKQKLNATSIRLKRYLNCTKRKQQNATFINNEKQFYRTLGQNQQTHTTQVSHAPSPENLHQFWAGIWENPVHHNADAEWLHEIANTTHINQMEFENIPVDTFIQVIKRTHNWKAPGSDNIHNYWYKKFSCVHPFLHNHICSLIQSPQTMPKFITHGITYMLPKGSDPKEPANYRPITCLQTIYKIITGCISELIYKHLENHSILAEQQKGCKKNSQGCKEQLTIDAIVMKQALTKNRNIHTMYIDYKKAFDSVPHSWLIYILEHYKIHHNLISFLSATMLEWRTKLKFINSNLTTEPIKIQRGIFQGDALSPLWFCLALNPLSELLNSTNAGFKLRHNNSQHTISHLLYMDDIKLYATNNTELTKLADITQSFSTDINMQFGVDKCKIHSIIRGKTQNNTYTLDTGEHIEPMDEYSTYKYLGFHQSKQIHQKQAKVELTKKFKARINQILRSQLNARNCIKAINTFAIPVLTYSFGIINWSQTDLIRLQRTINTHMTANRKHHPRSCTQRLTLSRQDGGRGLIDIQNLHNSLVDKLRKYFYTKAEQSQLHKYVTDIDKKLTPLNLDNKNSEPKILSKQDKIDAWAQKSLHGRHLADLSQSHVDKVASNEWLRRGELFPETEAFVIAIQDQIIDTRNYQKHIIRIPNLPTELCRRCQSSSETIQHITGACKSIVQTDYKHRHDQIAAIIHQNIAHKHSFIPQKIAYYKYKPSTVLENASYKIYWDRTIITDKTIHYNRPDITVLDKNNKSVFIIDIAVCNTHNLNTTHSEKMAKYIDLATEIRRQWQVDIVKIVPIIISTTGVVPKTLQTNLNTLQMPKSTLTLIQKAALLNTCRLTRKFLASPTSN

SEQ ID NO: 23231 - protein, 1399 aa, Eilema depressum
MEGKSKRYSLRPLPGGRRGASGADAGCHSMRTVGDGGLSRRVPLEQNTTAGLGGLNRRVSLEENATAGTPISPSSISLSDRSLFSHIPSPSSTHSYLRSLTSSPSSICSYSTRSSAVVQEALATIPAPTVDPTRARKRWTEDMNRFIWRTYLIVTKCETTNMNNYLESLHREFDNRYPEMQATRQRLGDQRRAILRSKLLSDRILHEINTEVKECIQIENINHSLTFNHTPLEHTPINTTTNSRMRWSDEINEDIIRCYFEITELESNKTAYRQKLHSLFIERHPNLSHLTEQRIADQRRLIFNNKTYTDKINTLKKEVELKLRDLNNQRLEDININQDAIEHSHTQQGLAANITLTPTQHSSHEDIIDNTLTLSEIFTQTNLNNSNNLDQIQSHIETNAIESEFNNAIARFNTTEPEARPYIPKQKSSRKFAQIVQYLNSEILPKYLNHNLDFTSLHALIYSAAFTAASCNGTKFNTEQSRIINKKDRRPTWQKRIESRIGKYRKEIGRLTQYILGNRSRRILDAVENIKTSYKTHSQHEEPNTEPEHFLDTLKQKLNATSIRLKRYLNCTKRKQQNATFINNEKQFYRTLGQNQQTHTTQFSHAPSPENLHQFWAGIWENPVHHNADAEWLHEIANTTHINQMEFENIPVDTFIQVIKRTHNWKAPGSDNIHNYWYKKFSCVHPFLHNHICSLIQSPQTMPKFITHGITYMLPKGSDPKEPANYRPITCLQTIYKIITGCISELIYKHLENHSILAEQQKGCKKNSQGCKEQLTIDAIVMKQALTKNRNIHTMYIDYKKAFDSVPHSWLIYILEHYKIHHNLISFLSATMLEWRTKLKFINSNLTTEPIKIQRGIFQGDALSPLWFCLALNPLSELLNRNNAGFKLRHNNSQHTISHLLYMDDIKLYATNNTELTKLADITQSFSTDINMQFGVDKCKIHSIIRGKTQNNTYTLDTGEHIEPMDEYSTYKYLGFHQSKQIHQKQAKVELTKKFKARINQILRSQLNARNCIKAINTFAIPVLTYSFGIINWSQTDLIRLQRTINTHMTANIKHHPRSCTQRLTLSRQDGGRGLIDIQNLHNSLVDKLRKYFYTKAEQSQLHKYVTDIDKKLTPLNLDNKNSEPKILSKQDKIDAWAQKSLHGRHLADLSQSHVDKVASNEWLRRGELFPETEAFVIAIQDQIIDTRNYQKHIIRIPNLPTDLCRRCQSSSETIQHITGACKSIVQTDYKHRHDQIAAIIHQNIAHKHSFIPQKIAYYKYKPSTVLENASYKIYWDRTIITDKTIHYNRPDITVLDKNNKSVFIIDIAVCNTHNLNTTHSEKMAKYIDLATEIRRQWQVDIVKIVPIIISTTGVVPKTLQTNLNTLQMPKSTLTLIQKAALLNTCRLTRKFLASPTSN

SEQ ID NO: 23232 - protein, 1085 aa, Eilema depressum
MALEVELKLRDLNNQRLEDININQDAIEHSHTQQGLAANITLTPTQHSSHEDIIDNTLTLSEIFTQTNLNNSNNLDQIQIHIETNAIESDFNNAIARFNTTEPEARPYIPKQKSSRKFAQIVQYLNSEILPKYLNHDLDFTSLHALIYSAAFTAASCNGTKFNTEQSRIINKKDRRPTWQKRIESRIGKYRKEIGRLTQYILGNRSRRILDAVENIKTSYKTHSQHEEPNTEPEHFLDTLKQKLNATSIRLKRYLNCTKRKQQNATFINNEKQFYRTLGQNQQTHTTQVCHAPSPENLHQFWAGIWENPVHHNADAEWLHEIANTTHINQMEFENIPVDTFIQVIKRTHNWKAPGSDNIHNYWYKKFSCVHPFLHNHICSLIQSPQTMPKFITHGITYMLPKGSDPKEPANYRPITCLQTIYKIITGCISELIYKHLENHSILAEQQKGCKKNSQGCKEQLTIDAIVMKQALTKNRNIHTMYIDYKKAFDSVPHSWLIYILEHYKIHHNLISFLSATMLEWRTKLKFINSNLTTEPIKIQRGIFQGDALSPLWFCLALNPLSELLNSTNAGFKLRHNNSQHTISHLLYMDDIKLYATNNTELTKLADITQSFSTDINMQFGVDKCKIHSIIRGKTQNNTYTLDTGEHIEPMDEYSTYKYLGFHQSKQIHQKQAKIELTKKFKARINQILRSQLNARNCIKAINTFAIPVLTYSFGIINWSQTDLIRLQRTINTHMTANRKHHPRSCTQRLTLSRQDGGRGLIDIQNLHNSLVDKLRKYFYTKAEQSQLHKYVTDIDKKLTPLNLDSKNSEPKILSKQHKIDAWAQKSLHGRHLADLSQSHVDKVASNEWLRRGELFPETEAFVIAIQDQIIDTRNYQKHIIRIPNLPTDLCRRCQSSSETIQHITGACKSIVQTDYKHRHDQIAAIIHQNIAHKHSFIPQKIAYYKYKPSTVLENASYKIYWDRTIITDKTIHYNRPDITVLDKNNKSVFIIDIAVCNTHNLNTTHSEKMAKYIDLATEIRRQWQVDIVKIVPIIISTTGVVPKTLQTNLNTLQMPKSTLTLIQKAALLNTCRLTRKFLASPTSN

SEQ ID NO: 23233 - protein, 1384 aa, Eilema depressum
MNDVIFYIFSAINSRFTSINNKLSRRVPLEQNTTAGLGGLSRRVSLEENATAGTPISPSSISLSDRSLFSHIPSPSSTHSYLRSLTSSPSSICSYSTRSSAVVQEALATIPAPTVGPTRARKRWTEDMNRFIWRTYLIVTKCETTNMNNYLESLHREFDNRYPEMQATRQRLGDQRRAILRSKLLSDRILHEINTEVKECIQIENVNHSLTFNHTPLEHTPINTTTNSRMRWSDEINEDIIRCYFEITELESNKTAYRQKLHSLFIERHPNLSHLTEQRIADQRRLIFNNKTYTNKINTLKKEVELKLRDLNNQRLEDINTNQDAIEHSHTQQGLAANITLTPTQHSSHEDIIDNTLTLSETFTQTNLNNSNNLDQIQSHIETNAIESEFNNAIARFNTTEPEARPYIPKQKSSRKFAQIVQYLNSEILPKYLNHDLDFTSLHALIYSAAFTAASCNGTKFNTEQSRIINKKDRRPTWQKRIESRIGKYRKEIGRLTQYILGNRSRRILDAVENIKTSYKTHSQHEEPNTEPEHFLDTLKQKLNATSIRLKRYLNCTKRKQQNATFINNEKQFYRTLGQNQQTHTTQVSHAPSPENLHQFWAGIWENPVHHNADAEWLHEIANTTHINQMEFENIPVDTFIQVIKRTHNWKAPGSDNIHNYWYKKFSCVHPFLHNHICSLIQSPQTMPKFITHGITYMLPKGSDPKEPANYRPITCLQTIYKIITGCISELIYKHLENHSILAEQQKGCKKNSQGCKEQLTIDAIVMKQALTKNRNIHTMYIDYKKAFDSVPHSWLIYILEHYKIHHNLISFLSATMLEWRTKLKFINSNLTTEPIKIQRGIFQGDALSPLWFCLALNPLSGLLNSTNAGFKLRHNNSQHTISHLLYMDDIKLYATNNTELTKLADITQSFSTDINMQFGVDKCKIHSIIRGKTQNNTYTLDTGEHIEPMDEYSTYKYLGFHQSKQIHQKQAKVELTKKFKARINQILRSQLNARNCIKAINTFAIPVLTYSFGIINWSQTDLIRLQRTINTHMTANRKHHPRSCTQRLTLSRQDGGRGLIDIQNLHNSLVDKLRKYFYTKAEQSQLHKYVTDIDKKLTPLNLDNKNSEPKILSKQDKIDAWAQKSLHGRHLADLSQAHVDKVASNEWLRRGELFPETEAFVIAIQDQIIDTRNYQKHIIRIPNLPTDLCRRCHSSSETIQHITGACKSIVQTDYKHRHDQIAAIIHQNIAHKHSFIPQKIAYYKYKPSTVLENASYKIYWDRTIITDKTIHYNRPDITVLDKNNKSVFIIDIAVCNTHNLNTTHSEKMAKYIDLATEIRRQWQVDIVKIVPIIISTTGVVPKTLQTNLNTLQMPKSTLTLIQKAALLNTCRLTRKFLASPTSN

SEQ ID NO: 23234 - protein, 1370 aa, Nymphalis polychloros
MERSNKRYSLRTLPGGRRGASGADAGCHSMRSVGDGGLNRRVPLEEYVTADQSPSTSSSSLSNHSLFSNFPSPSSAATLFESPCSSPPSRRSSHISMPTAVAQEACAMNAAPSAGTSRVRNKWSQDMNRFIWHTYLLITKCETTQMNKYLHILHEQFIQKFPNMQVTRQRVGDQRRAILRRKLLPQNVLDEIRNEVADKIQTEGEIVNFPLRQPSQPEHLVPQINSNSNKRMKWSNVINEDIIRCYFESTNLETNKTAYRKKLFELVVDKHPHLSHLSEQRIADQRRVIFFNDLVNKDKIEEIRMEINKKLQNAINQSEHNIPIESNIASKDSNYNQPEMISCTGISLTENESNSTLVENSKLTPSYIEIEFNNAINRFKDMHPEERPYIPKQKTTRKFANITQILNNEILPKHLNDNINFKYLHALIYSAAHAAAVCNGKIFRVNNDTVQNKYAKKPKWQRRIEKRIEKYRLEIGRLTQYIAGNRTQRVIKTVEEIKIKYKEHSQYEEPNIELEHFLDTLKQKLIAVSKRLKRYLTCTNRKQQNFTFTNNERTFYRNLGTHNQNTLTQNTEYTTPQKLHEFWADIWSNPVQHNANANWLQDIGDSTHIEKMNFKDIPIETFTQIIKRTHNWKAPGTDNIHNFWLKKLTCIHPYIHKYICQFIKSPETIPKFLTTGITYMLPKDSDLKNPANYRPITCLQTVYKIMTGCISDTIYQHLEAYKILAEQQKGCRKKSQGCKEQLVIDSIVMKQALSSKRNIYTMYVDYKKAFDSVPHSWLLYVLQLYKIDTVLINFFSCIMSQWETTLKVYQNNTPITTDPIKIQRGIFQGDALSPLWFCMALNPLSDLLNNTNAGFKLKHNDTHCVISHLMYMDDIKIYGTTKAELIKLTDVTQSFSTDIQMHFGVDKCKMHSINRGKTVTNTYMLETGEQIEAMDEMSTYKYLGFYQSKQIKHKQIKKELIQKFKIRLNKILKTHLNSRNSTKAINTYAIPLLSYSFGIINWSKTDLQKLQRIINTHMTTHRKHHPKSCIQRLTLPRAEGGRGFIDIHNLHNSLITKLRKFFYDKAENTPIHKYITKIDKKFTPLNLHNRNKQSSEQIISKEQKMCMWSQKSLHGRHRADLSQAHVDMDASNEWLRRGELFPETEAFMIAIQDQVIDTRNYQKHIIRTPNLPTDLCRRCLSSSETIQHITGACKSIVQTDYKHRHDQVAAIVHQNLAHQYKFIANKVAYYKYQPCKVLENNNFKIYWDRTIITDKTIHYNRPDITVIDKNNKIVFIIDIAVCNTHNLLSTHTEKVIKYIELATEIKKQWSINTVKILPIILSSTGVIPKTLKINLNILQMSKSTLALLQKAVILNTTRLTRKFLASPLSI

SEQ ID NO: 23235 - protein, 1370 aa, Nymphalis urticae
MERSNKRYSLRSLPGGRRGASGADAGCHSMRSVGDGGLNRRVPLEEYVTADQSPSPSSTSLSNHSLSSNFPSPSSTATLFESPSSSPPSRCSSHISMPTAVAQEACAINAAPSAGTSRVRNKWSQDMNRFIWHTYLLITKCETTQMNNYLQLLHEQFNQKFPNMQVSRQRVGDQRRAILRRKLLPQNVLDEIRNEVADKIQAEGEIADIPLRQSSQSEHLASQINSNSNKRMKWSNVINEDIVRCYFESTNLETNKTAYRKKLFELVVDKHPHLSHLSEQRIADQRRVIFFNNLVNKDKIEEIKIEINKKLQNAINQSKHNIPIESNIASTDSNHSQPETILGTGISLTENESDSIFLENSKLTPNFIEIEFNNAINRFKDMHPEERPYIPKQKTSRKFATITRTLNNEILPKHLNSNIDFKYLHALIYSAAYTAAVCNGTIFRVNNDTVQNKYLKKPTWQRRIEKRIEKYRLEIGRLTQYIAGNRNQKVIKTVEDIKVKYKTHSQYEEPNIELEHFLDTLKQKLNTASKRLKRYLTCTNRKQQNFTFTNNERTFYRNLGTHNQNTLTQNTEYTTPQKLHEFRAGIWSNPVQHNANANWLQKIGDSTHIEQMNFKDIPIETFTQIIKRTHNWKAPGTDNIHNFWLKKLTCIHPYIHNHICQFIKSPETTPKFLTTGITYMLPKESDLKNPANYRPITCLQTIYKIITGCISEIIYQHLEAYNILAEQQKGCRKNSQGCKEQLVIDTIVMKQALTSKRNIYTMYVDYKKAFDSVPHSWLLHVLQLYKIDPVLINFFSCIMPQWQTTLKVYQNNTSITTDPIKIQRGIFQGDALSPLWFCMALNPLSDLLNNTNAGFKLKHNGTHCLISHLMYMDDIKIYGTTKAELIKLTDVTQSFSTDIQMHFGVDKCKTHSINRGKTETNTYMLETGEQIEAMDEMSTYKYLGFHQSKQIKHKQIKKELIQKFKIRLNQILKTHLNSRNSTKAINTYAIPLLTYSFGIINWSKTDLQKLQRIINTHMTTHRKHHPKSCTQRLTLPRGEGGRGLIDIHNLHNSLIAKLRKFFHDKAESTSIHKYITEIDKKFTPLNLHNRNKQSSEQIISKEQKISMWSQKSLHGRHRADLSQAHVDMEASNEWLRRGELFPETEAFMIAIQDQVIDTRNYQKHIIRTANFPTDLCRRCQSSSETIQHITGACKSIVQTDYKHRHDQVAAIIHQNLAHQYKFITKKVAYYKYQPRKVLENNNYKIYWDRTIITDQTIHYNRPDITVVDKNNKIVYIVDIAVCNTHNLLSTHNEKVIKYIELATEIKKQWSINTVKILPIILSTTGVIPKTLKTNLNILQMSKSTLALLQKAVILNTTRLTRKFLTSPLSI

SEQ ID NO: 23236 - protein, 1374 aa, Furcula furcula
MNSESKTYSLRPLPGGRRGASGADAGCHSMRTVGDGGLNRRVPLEKYTTADRSSSPTSSSLSQESLFPNIPSPPSTHSLFRSTNSSPSSSYSSRTTRSTAVVQEAIATEPAPTAGLRRARKKWTGDMNRFIWRTYLLVTKCETTQQNNYLHHLHSEFNNKYPEMQATRQRIGDQRRAIIRRKLLSQDTLDEINSEVKQYIDSEILQTDDSTLAYNHDNSPRTTYSTRMKWSNEINEDIVRFYYEVTKLETNKTAYRQNLYKLFIERYPQLSHLTEQRLADQRRYIFNNKKVNTQRLEEIRKEVELKLMECTDSQINLEQNFSLGETAYNTQTHTADLNSIDTQIQTCITEHENNLFDEHNNELEENNIDTELNKAILRFSQISPESRPYIPKQKSSRRLSQIVQHLNNIILPKYLNNNMDFNTLHTLIYSAAFTAATCNGTKFRSQEINIQSSRDKKPNWQRRMEKKIEKYRLEIGRLTQYVAGNRNRRVVNTVEEIKIKYKTHTQHEESNTEPQHFLDTLKQKLNATSSRLKRYLTCTKRKQQNSIFTNNEKLFYRNIADNKQNNITPSSGSPSAQHLHQFWANIWENPVHHNINADWLHKISDTTHVNQMDFENITIDTFTQIVKRSHNWKAPGTDNIHNYWYKKLTCTHPFIHNHICQFIISPHTMPAFITHGITYMIPKGSDAKDPANYRPITCLQTIYKIMTGCISEIIYKHLIQYDILAEQQKGCRKNSQGCKEQLTIDGIVMKQAKTRNRNIHTMYIDYKKAFDSVPHSWLIHVLNHYKIHPNLTVFLNAAMLEWKTQLKLNYNNTTLITEPIKIQRGIFQGDALSPLWFCLALNPLSDLLNSTTIGFKLKHNNAYHTLTHLMYMDGIKLYATNNTELTKLADITQSFSTDIKMQFGVDKCKIHSISRGKTQNNTYTLDNGEKVEPMDEGSTYKYLGFHQSKQIHQKQTKLELIKKFKLRLNQILRSQLNSRNIIKAINTYAIPTLTYSFGVIKWSQSDLIRLQRIINTHMTTHRKHHPKSCIQRLVLPRRDGGRGLIDIRNLHNEQITKLRKYFHTKSEQSQLHRYITNMDITLTPLNLHDRSTQSNLQVISRQQKIDTWSQKSLHGRHLADLRQTHVDKVASNEWLRQGELFPETEAFIMAIQDQVIPTRNYKKYIIRTPNLATDICRRCHSSSETIQHITGACKSIVQTDYKHRHDQVAAIVHQNLAHKYNFIDKKIAYYKYQPSTILENNLFKIYWDRSIITDKTIHYNRPDITLLDKINKIVYIIDIAVCNTHNLLTTHTEKVSKYVDLATEIKRQWQIDTVKIIPVIISTTGVIPKTLHTSLNTLQMPKHTLILIQKAVILNTCRLTRKFLASSSNTDTLD

SEQ ID NO: 23237 - protein, 1379 aa, Zerynthia polyxena
MENRMDSQSKKYSLRPLPGGRRGASGADAGCHSMRTVGDGGLSRRVPLEQNATAERSPSSSSIALSDNSLFCNIPSPSSTNSLFRSLESSPSSIYSSRTTRSTAVVQEALANNLASTVGHTRVRKKWTEDMNRFIWRTYLLITKCETIQMNNYLDPLHQEFNNKYPEMQTTRQRLGDQRRAILRRKLLSQHILDEIANEVRNHIHIENYNHTLTYNTEHITHIPAQLQTNSTKRTRMKWSDETNEDIVRFYFEVTELETNKTAYRKKLYELFKERHPHLSHLTEQRIADQRRLIFKNKKYSNKITELKREVESKLIELRNQLTHTDQNQIIIEQIQQNHYENTHHTQHENTKDSTLTEAVTLTNVENENEVTQLQHQTEINKIETEFYRAIARFSGTNPETRPYIPKQNSSRKFAQIVYYLNSVILPRHLNHDLDFTSLHTLIYSAAFTAALCNGTRFNIEENSITNSRNRKPNWQKRIENRIEKYRLEIGRLTQYIYGNRNCRILKTVEEIKIKYKTHSQHEESNTEPQHFLDTLKQKLNAASNRLKRYLTCTKRKQQNATFIKNEKQFYRSLGHKQQINACEFPSTEHLQQFWAGIWENPIEHNINAEWLDKIATTAHINQMEFNNISVNTFIQIIKRTHNWKAPGTDNIHNYWYKKLTCTHPFLHSHICQFIESPHIMPTFITQGITYMLPKGSDPKNPANYRPITCLQTIYKIITGCISEIIYSHLDRHNILAEQQKGCRKNSQGCKEQLTIDAIAMKQAQTSNRNIHTMYIDYTKAFDSVPHSWLIYVLEHYKIHPSLIAFLKVAMLQWKTQLKFINNNSLTTEPIKIQRGIFQGDALSPLWFCLALNPLSELLNNTNVGFKLKCNNSFYTLTHLLYMDDIKMYATNKTELCKLTDITQSFSIDIKMQFGVDKCKIHSISRGKYQNNTYILETGEQIEPMDEHSTYKYLGFHQSKQIHQKQAKLDLTKKFKTRLNQILRTQLNSRNSIKAINTYAIPTLIYSFGIIKWSQSDLIKLQRTINTHMSANRKHHPKSCTQRLTLPRQDGGRGLIDIQNLHNNLIEKLRKYFYIKADQSQLHKFITDIDKKLTPLNLNDRNFQLKLLSKQQKIDLWSQKSLHGRHLADLSQEHVDSRGSNEWLRRGELFPETEAFVIAIQDQVIDTRNYQKFIMRIPNPQPDLCRRCHSNSETIQHITGACKSIVQTDYKHRHDQVAAIIHQNLAHNYSFIPKKTAYYKYKPSTVLENNLFKIYWDRTIITDKTIHHNRPDITILDKIKKSVFIIDIAVCNTHNLITTHSEKMAKYVDLATEIKRQWQVDTIKIIPIVISTTGVVPKSLQNNLDKIQMPKSTLTLLQKAVLLNTCRLTRKFLSSPTSV

SEQ ID NO: 23238 - protein, 943 aa, Abrostola tripartita
MSLHTLIYSAAFAAASCNGTKFRIENANFNKRNRKPAWQRRIESRIEKYRFEIGRLTQYIVGNRSSRIVKTVEEIKIKYKTHSQHEEPNTELQHFLDTLKQKLNAASNRLRRYLACTQRKQQNSTFVNNEKQFYRTLGINNQQNLNSDAPSPQNLQQFWAEIWQNPVQHTTDADWLQRTADTALITHMNSENIPIDTFLQVIKRTHNWKAPGTDHIHNYWYKKFTCTHPFIHGKICSFIQSPHTMPSFITHGITYMLPKGPDPKTPANYRPITCLQTIYKIITGCISDIIYKHLDQNNILAEQQKGCKRNSQGCKEQLTIDAIVMKQAQIKNRNIHTMFIDYKKAFDSVPHSWLIYVLEHYKIHENLILFLRSTMLQWQTKLKLINDSCFTTDPIKIQRGIFQGDALSPLWFCLALNPLSELLNNTNLGFKLKCNNSSHILSHLLYMDDIKIYASNHTELIKLADITQSFSNDINMQFGVDKCKIHSINRGKVQSNTYVLDTGEHIDPMDEHSTYKYLGFHQSKQIHQKQAKVELIHKFKVRLNLILRTHLNSRNSIKAINTYAIPVLTYSFGIIKWSKSDLIKLQRIINTRMTTHRKHHPRSCTQRLTLPRQDGGRGLIDIHNLHSNILDKIRKYFHSKADESLLHKHVTEIDKNLTPLNLNNMDLQLNVVSRQQKLNTWSQKSLHGRHLADLSQEHVDKDASNEWLRRGELFPETEAFVIAIQDQVIDTRNYQKHICRIPNLVTDLCRRCHSNSETIQHITGACKSIVQTDYKHRHDQVAAIIHQNLAYTHSFVLHKIAYYKYKPNTVLENNLIKIYWDRTIITDKTVHYNRPDITILNKINNSVFIIDIAVCNTHNLLTTYTEKMSKYIDLATEIKRQWQVDTVKIIPIVISSTGVVPKSLQPNLNTLQMPKSTLTLLQKATLLNTCRLTRKFLASPSSS

SEQ ID NO: 23239 - protein, 1242 aa, Junonia grisea
MNRFIWRTYLLITKCETTQMNNYLEPLHREFHNRYPEMQATRQRLGDQKRAILRRKLLPQNILDEIISQVKEHIQTENVNHSPIHNHTDHTSLISSQTNVTINRRMKWTDEINEDIIRFYFEVTQLEINKTAYRKKLYELFIEKYPNLSNLTEQRIADQRRLIFNNKMYTNRINDLKKEVELKLTSMNILPQLEREQNHNVTNTHHIHNQNATDNTQTLTEIITLNNSDNENNPNHGHIETNSIEIEFNNAIARFSTLDPEERPFIPKQKTSRKFAQIVHCLNNEILPKYLNQDLDFISLHTLIYAAAYTAATFNGTRFKIDENRNTNQKNRKPSWQKRIESRIEKYRLEIGRLTQYIKGNRSQRILMTVEEIQNKYKTHSQHEEFNTEPQHFLDTLKQKLNAISIRLQRYLTCTKRKEQNATFLNNEKQFYRTLSSNHHTNPSHPIESPTTQHLHQFWTGIWENPVQHNRQAGWLQKIADTSYINQMDFENIPADIFIQVIKRTHNWKAPGTDNIHNYWYKKFTCTHPFIHNHICAFIQSPNNMPKFITHGITYMLPKGTDTKNPANYRPITCLQTIYKIITGCISELIYRHIDHHNILAEQQKGCRKNSQGCKEQLTIDAIVMRQANTRNRNIHTMYIDYKKAFDSVPHSWLIYVLEHYKIHPNLISFLGTAMLEWKTKLKLFNNISETTESIKIQRGIFQGDALSPLWFCIALNPLSELLNNTNIGFKLKCNNSFHILSHLLYMDDIKIYATNNTELCKLADITQSFSIDIRMEFGVDKCKVHSINRGKTENNTYRLDTGEQIEPMDEHSTYKYLGFHQSKQIQQKETKSELIKKFKARLNQILRTQLNSRNTIKSINTYAIPVLIYSFGIINWSQSDLIKLQRIINTHMTAHRKHHPRSCTQRLTLPRQDGGRGIIDIQNLHNSLVDKLRKYFYLKAEQSQLHKYLTDIDNKLTPLNLCDRNFQRNLLTKQQKIEMWSQKSLHGRHFADLSQAHVDKEASNEWLRRGELFPETEAFVIAIQDQVIDTRNYQKFITRIPNLSTDLCRRCHSSSETIQHITGSCKSIVQTDYKHRHDQVAAIIHQNLAHKHLFIPKKIAYYKYKPSAVLENNLFKIYWDRTIITDKTIHYNRPDITIHDKTKKTVFIIDIAVCNTHNLLTTHTEKMAKYIDLSTEIKRQWQVDTVKIIPIVISTTGVVPKTLQNNLNLLEMPKSTITLLQKAALLNTCRLTRKFLASSSS

SEQ ID NO: 23240 - protein, 1374 aa, Junonia genoveva
MEKIMESQTKRYSLRPLPGGRRGASGADAGCHSMRSVGDGGLSRRVPLEQNTTAERSSSPSSTASSKRSLFSNIPSPSSTQSLFRSPNSSPSSSSTYSSRTTRSTAVVQEASAINPAPTVGLNRARKKWTEDMNRFIWRTYLLITKCETTQMNNYLEPLHREFHNRYPEMQATRQRLGDQKRAILRRKLLPQNILDEIISQVKEHIQTENANHSPTHNHTDHTSLTSSQTNVTINRRMKWTDEINEDIIRFYFEVTQLEINKTAYRKKLYELFIEKYPNLSNLTEQRIADQRRLIFNNKMYTNRINDLKKEVELKLTSMNILPQLEREQNYNVTNTHHIHNQNATDNTQTLTEIITLNNSDNENNPNHGHIETNSIEIEFNNAIARFSTLDPEERPFIPKQKTSRKFAQIVHCLNNEILPKYLNQDLDFISLHTLIYAAAYTAAAFNGTRFKIDENRNTNKKNRKPSWQKRIESRIEKYRLEIGRLTQYIKGNRSQRILMTVEEIQNKYKTHSQHEEFNTEPQHFLDTLKQKLNAISIRLQRYLTCTKRKEQNATFLNNEKQFYRTLSSNHHTNPSHPIESPTTQHLHQFWTGIWENPVQHNRQAGWLQKIADTSYINQMDFENIPADIFIQVIKRTHNWKAPGTDNIHNYWYKKFTCTHPFIHNHICAFIQSPNNMPKFITHGITYMLPKGTDTKNPANYRPITCLQTIYKIITGCISELIYRHIDHHNILAEQQKGCRKNSQGCKEQLTIDAIVMRQANTRNRNIHTMYIDYKKAFDSVPHSWLIYVLEHYKIHPNLISFLGTAMLEWKTKLKLFNNISETTESIKIQRGIFQGDALSPLWFCIALNPLSELLNNTNIGFKLKCNNSFHILSHLLYMDDIKIYATNNTELCKLADITQSFSIDIRMEFGVDKCKVHSINRGKTENNTYRLDTGEQIEPMDEHTTYKYLGFHQSKQIQQKETKSELIKKFKARLNQILRTQLNSRNTIKSINTYAIPVLIYSFGIISWSQSDLIKLQRIINTHMTAHRKHHPRSCTQRLTLPRQDGGRGIIDIQNLHNSLVDKLRKYFYLKAEQSQLHKYLTDIDNKLTPLNLCDRNFQRNLLTKQQKIEMWSQKSLHGRHFADLSQAHVDKEASNEWLRRGELFPETEAFVIAIQDQVIDTRNYQKFITRIPNLSTDLCRRCHSSSETIQHITGSCKSIVQTDYKHRHDQVAAIIHQNLAHKHLFIQKKTAYYKYKPSAVLENNLFKIYWDRTIITDKTIHYNRPDITIHDKTKKTVFIIDIAVCNTHNLLTTHTEKMAKYIDLSTEIKRQWQVDTVKIIPIIISTTGVVPKTLQNNLNLLEMPKSTITLLQKAALLNTCRLTRKFLASSSS

SEQ ID NO: 23241 - protein, 1375 aa, Junonia zonalis
MEKIMESQTKRYSLRPLPGGRRGASGADAGCHSMRSVGDGGLNRRVPLEQNITAERSSSPSSTASSERSLFSNIPSPSSTQSLFHLSNSSPSSSSSTYSSRTTRSTAVVQEASAINPAPTVGLNRARKKWTEDMNRFIWRTYLLITKCETTQMNNYLEPLHREFHNRYPEMQATRQRLGDQKRAILRRKLLPQNILDEIISQVKEHIQTENANHSPTHNHTDHTSLTSSQTNVTINRRMKWTDEINEDIIRFYFEVTQLEINKTAYRKKLYELFIEKYPNLSNLTEQRIADQRRLIFNNKMYTNRINDLKKEVELKLTSMNILPQLEREQNYNVTNTHHIHNQNATDNTQTLTETITLNNSDNENYYNHGHIETNSIEIEFNNAVARFSNLDPEERPFIPKQKTSRKFAQIVHCLNNEILPKYLNQDLDFISLHTLIYAAAYTAATFNGTRFKIDENRNTNQKNRKPSWQKRIESRIKKYRLEIGRLTQYIKGNRSQSIIMTVEEIQNKYKTHSQHEEFNTEPQHFLDTLKQKLNAISIRLHRYLTCTKRKEQNATFLNNEKQFYRTLSSNHHTNPSHPIESPTTQHLHQFWTGIWENPVQHNRQAGWLQKIADTSYINQMDFENIPADIFIQVIKRTHNWKAPGTDNIHNYWYKKFTCTHPFIHNHICAFIQSPNNMPKFITHGITYMLPKGTDTKNPANYRPITCLQTIYKIITGCISELIYRHIDHHNILAEQQKGCRKNSQGCKEQLTIDAIVMRQANTRNRNIHTMYIDYKKAFDSVPHSWLIYVLEYYKIHPNLISFLGTAMLEWKTKLKLFNNISETTESIKIQRGIFQGDALSPLWFCIALNPLSELLNNTNIGFKLKCNNSFHILSHLLYMDDIKIYATNNTELCKLADITQSFSIDIRMEFGVDKCKVHSINRGKTENNTYRLDTGEQIEPMDEHSTYKYLGFHQSKQIQQKETKSELIKKFKARLNQILRTQLNSRNTIKSINTYAIPVLIYSFGIISWSQSDLIKLQRIINTHMTAHRKHHPRSCTQRLTLPRQDGGRGIIDIQNLHNSLVDKLRKYFYLKAEQSQLHKYLTDIDNKLTPLNLCDRNFQQNLLSKQQKIEMWSQKSLHGRHFADLSQAHVDKEASNEWLRRGELFPETEAFVIAIQDQVIDTRNYQKFITRIPNLSTDLCRRCHSSSETIQHITGSCKSIVQTDYKHRHDQVAAIIHQNLAHKHLFIPKKIAYYKYKPSAVLENNLFKIYWDRTIITDKTIHYNRPDITIHDKTKKTVFIIDIAVCNTHNLLTTHTEKMAKYIDLSTEIKRQWQVDTVKIIPIIISTTGVVPKTLQNNLNLLEMPKSTITLLQKAALLNTCRLTRKFLASSSS

SEQ ID NO: 23242 - protein, 1242 aa, Junonia coenia
MNRFIWRTYLLITKCETTQMNNYLEPLHREFHNRYPEMQATRQRLGDQKRAILRRKLLPQNILDEIISQVKEHIQTENVNHSPIHNHTDHTSLISSQTNVTINRRMKWTDEINEDIIRFYFEVTQLEINKTAYRKKLYELFIEKYPNLSNLTEQRIADQRRLIFNNKMYTNRINDLKKEVELKLTSMNILPQLEREQNYNVTNTHHIHNQNATDNTQTLTEIITLNNSDNENNPNHGHIETNSIEIEFNNAIARFSTLDPEERPFIPKQKTSRKFAQIVHCLNNEILPKYLNQDLDFISLHTLIYAAAYTAATFNGTRFKIDENRNTNQKNRKPSWQKRIESRIEKYRLEIGRLTQYIKGNRSQRILMTVEEIQNKYKTHSQHEEFNTEPQHFLDTLKQKLNAISIRLQRYLTCTKRKEQNATFLNNEKQFYRTLSSNHHTNPSHPIESPTTQHLHQFWTGIWENPVQHNRQAGWLQKIADTSYINQMDFENIPADIFIQVIKRTHNWKAPGTDNIHNYWYKKFTCTHPFIHNHICAFIQSPNNMPKFITHGITYMLPKGTDTKNPANYRPITCLQTIYKIITGCISELIYRHIDHHNILAEQQKGCRKNSQGCKEQLTIDAIVMRQANTRNRNIHTMYIDYKKAFDSVPHSWLIYVLEHYKIHPNLISFLGTAMLEWKTKLKLFNNISETTESIKIQRGIFQGDALSPLWFCIALNPLSELLNNTNIGFKLKCNNSFHILSHLLYMDDIKIYATNNTELCKLADITQSFSIDIRMEFGVDKCKVHSINRGKTENNTYRLDTGEQIEPMDEHSTYKYLGFHQSKQIQQKETKSELIKKFKARLNQILRTQLNSRNTIKSINTYAIPVLIYSFGIISWSQSDLIKLQRIINTHMTAHRKHHPRSCTQRLTLPRQDGGRGIIDIQNLHNSLVDKLRKYFYLKAEQSQLHKYLTDIDKKLTPLNLCDRNFQRNLLSKQQKIEMWSQKSLHGRHFADLSQAHVDKEASNEWLRRGELFPETEAFVIAIQDQVIDTRNYQKFITRIPNLSTDLCRRCHSSSETIQHITGSCKSIVQTDYKHRHDQVAAIIHQNLAHKHLFIPKKIAYYKYKPSAVLENNLFKIYWDRTIITDKTIHYNRPDITIHDKTKKTVFIIDIAVCNTHNLLTTHTEKMAKYIDLSTEIKRQWQVDTVKIIPIIISTTGVVPKTLQNNLNLLEMPKSTITLLQKAALLNTCRLTRKFLASSSS

SEQ ID NO: 23243 - protein, 1374 aa, Fabriciana adippe
MEYSMNSQNKRYNLRPLPGGRRGASGADAGCLSMRTVGDGGLSRRVPLEQNTTADRLPSPSSSEHSLFINIPSPSSTHTLFRSPISSPSSIYSSRSTRSTAVVQEAVAVNPAPTAGPSRARKKWSEEMNRFIWRTYLIITKCETTQMNNYLESLHTEFDNRYPEMQATRQRVGDQRRTILRKKLLPQHVLDEINTEVKEEIQTTDNYSSFAHSHNHTQHTTLTQSHTNSTANTRIKWSDEMNEDIIRLYFEITELEVNKTSYRKKLYELFIEKYPNLSHITEQRIADQRRLIFCNKLNTDKIRRLKREVELKLIDQNNYLHSNTEQLHDTVENTHNTQYDNTLNSTHTPIVSTTSESVGNDIELPSTQNDAIELNSIEVEFNKAVGQFSDVHPEERPYIPKQRSSRKFAQIVQYLNSVILPKHLSREVDFMSLHTLIYSAAFAAATCNGSKFRVDNVPLRRCKRKPPWQRRIESRIEKYRFEIGRLTQYIVGNRNSRILKTVEEIKVKYKTHSQHEEPNTEPQDFLDTLKQKLNAASNRLRRYLACTHRKQQNSTFVNNEKQFYRTLGINNNQQNLNLEVPSPKNLQQFWAELWENPVQHETNADWLQRIEDTTLTPTMKFENIPIDTFLQVIKRTHNWKAPGTDHIHNYWYKKFTCTHSFLHSNINRFIESPHIMPSFITHGITYMLPKGSDSKNPANYRPVTCLQTIYKIITGCISDIIYKHLDQHNILAEQQKGCKRNSQGCKEQLTIDAIVMKQAQVKNRNIHTMYVDYKKAFDSVPHSWLIYVLEHYKIHESVISFLRTTMLQWQTKLKLINDSCLTTDPIKIQRGIFQGDALSPLWFCLALNPLSELLNSTKLGFKLKYNNSSHILSHLLYMDDIKIYASNHTELIKLADITQLFSNNIHMQFGVDKCKIHSVNRGKVQSNTYVLETGEHIEPMDEHSTYKYLGFHQSKQIHQKQAKLELTNTFKIRLNQILRTHLNSRNSIKAINTYAIPVLTYSFGIIKWSKSDLIKLQRIINTRMTTHRKHHPRSCIQRLTLPRHEGGRGLIDIQNLHSNIVDKIRKYFYAKADESLLHKYVTDIDKNLTPLNLSNTNLQPNVVSKQQKLDMWSQKSLHGRHLTDLSQEHVDKDASNDWLRRGELFPETEAFVIAIQDQVIDTRNYQKHISRIPNLVTDLCRRCHSNSESIQHITGACKSIVQTDYKHRHDQVAAIIHQNLAHRHSFIPHKIAYYKYKPNTVLENNLIKIYWDRTIITDRTIHYNRPDITILDKINNSVFVIDIAVCNTHNLLTTYTEKMAKYVDLAIEIKRQWQVDTVKIVPLVISSTGVVPKSLQPNLNTLGVPKSTLTLLQKATLLNTCRLTRKFLASSSSS

SEQ ID NO: 23244 - protein, 1374 aa, Junonia vestina
MEKIMESQTKRYSLRPLPGGRRGASGADAGCHSMRSVGDGGLSRRVPLEQNTTAERSSSPSSTASSERSLFSNIPSPSSTQSLFRSPNSSPSSSSTYSSRTTRSTAAVQEASAINPAPTVGLNRARKKWTEDMNRFIWRTYLLITKCETTQMNNYLEPLHREFHNRYPEMQATRQRLGDQKRAILRRKLLPQNILDEIISQVKEHIQTENVNHSPTHNHTDHTSLTSSQTNVTINRRMKWTDEINEDIIRFYFEVTQLEINKTAYRKKLYELFIEKYPNLSNLTEQRIADQRRLIFNNKMYANRINDLKKEVELKLTSMNILPQLEREQNYNVTNTHHIHNQNATDNTQTLTEIITLNNSDNENYSNHGHIETNSIEIEFNNAVARFSTLDPEERPFIPKQKTSRKFAQIVHCLNNEILPKYLNQDLDFISLHTLIYAAAYTAATFNGTRFKIDENRNTNQKNRKPSWQKRIESRIEKYRLEIGRLTQYIKGNRSQRILMTVEEIQNKYKTHSQHEEFNTEPQHFLDTLKQKLNAISIRLQRYLTCTKRKEQNATFLNNEKQFYRTLSSNHHTNPSHPIESPTTQHLHQFWTGIWENPVQHNRQAGWLQKIADTSYINQMDFENIPADIFIQVIKRTHNWKAPGTDNIHNYWYKKFTCTHPFIHNHICAFIQSPNNMPKFITHGITYMLPKGTDTKNPANYRPITCLQTIYKIITGCISELIYRHKDHHNILAEQQKGCRKNSQGCKEQLTIDAIVMRQANTRNRNIHTMYIDYKKAFDSVPHSWLIYVLEYYKIHQNLISFLGTAMLEWKTKLKLFNNISETTESIKIQRGIFQGDALSPLWFCIALNPLSELLNNTNIGFKLKCNNSFHILSHLLYMDDIKIYATNNTELCKLADITQSFSIDIRMEFGVDKCKVHSINRGKTENNTYRLDTGEQIEPMDEHSTYKYLGFHQSKQIQQKETKSELIKKFKARLNQILRTQLNSRNTIKSINTYAIPVLIYSFGIISWSQSDLIKLQRIINTHMTAHRKHHPRSCTQRLTLPRQDGGRGIIDIQNLHNSLVDKLRKYFYLKAEQSQLHKYLTDIDNKLTPLNLCDRNFQRNLLSKQQKIEMWSQKSLHGRHFADLSQAHVDKEASNEWLRRGELFPETEAFVIAIQDQVIDTRNYQKFITRIPNLSTDLCRRCHSSSETIQHITGSCKSIVQTDYKHRHDQVAAIIHQNLAHKHLFIPKKIAYYKYKPSAVLENNLFKIYWDRTIITDKTIHYNRPDITIHDKTKKTVFIIDIAVCNTHNLLTTHTEKMAKYIDLSTEIKRQWQVDTVKIIPIIISTTGVVPKTLQNNLNLLEMPKSTITLLQKAALLNTCRLTRKFLASSSS

SEQ ID NO: 23245 - protein, 1375 aa, Junonia neildi
MEKIMESQTKRYSLRPLPGGRRGASGADAGCHSMRSVGDGGLNRRVPLEQNITAERSSSPSSTASSERLLFSNIPSPSSTQSLFHLSNSSPSSSSSTYSSRTTRSTAVVQEASAINPAPTVGLNRARKKWTEDMNRFIWRTYLLITKCETTQMNNYLEPLHREFHNRYPEMQATRQRLGDQKRAILRRKLLPQNILDEIISQVKEHIQTENANHSPTHNHTDHTSLTSSQTNVTINRRMKWTDEINEDIIRFYFEVTQLEINKTAYRKKLYELFIEKYPNLSNLTEQRIADQRRLIFNNKMYTNRINDLKKEVELKLTSMNILPQLEREQNYNVTNTHHIHNQNATDNTQTLTETITLNNSDNENYYNHGHIETNSIEIEFNNAVARFSNLDPEERPFIPKQKTSRKFAQIVHCLNNEILPKYLNQDLDFISLHTLIYAAAYTAAAFNGTRFKIDENRNTNKKNRKPSWQKRIESRIKKYRLEIGRLTQYIKGNRSQRILMTVEEIQNKYKTHSQHEEFNTEPQQFLDTLKQKLNAISIRLQRYLTCTKRKEQNATFLNNEKQFYRTLSSNRHTNPSHPIESPTTQHLHQFWTGIWENPVQHNRQAGWLQKIGDTSYINQMDFENIPADIFIQVIKRTHNWKAPGTDNIHNYWYKKFTCTHPFLHNHICAFIQSPNNMPKFITHGITYMLPKGTDTKNPANYRPITCLQTIYKIITGCISELIYRHIDHHNILAEQQKGCRKNSQGCKEQLTIDAIVMRQANTRNRNIHTMYIDYKKAFDSVPHSWLIYVLEYYKIHPNLISFLGTAMLEWKTKLKLFNNISETTESIKIQRGIFQGDALSPLWFCIALNPLSDLLNNTNIGFKLKCNNSFHILSHLLYMDDIKIYATNNTELCKLADITQSFSIDIRMEFGVDKCKVHSINRGKTENNTYRLDTGEQIEPMDEHTTYKYLGFHQSKQIQQKETKSELIKKFKARLNQILRTQLNSRNTIKSINTYAIPVLIYSFGIISWSQSDLIKLQRIINTHMTAHRKHHPRSCTQRLTLPRQDGGRGIIDIQNLHNSLIDKLRKYFYLKAEQSQLHKYLTDIDNKLTPLNLCDRNFQQNLLSKQQKIEMWSQKSLHGRHFADLSQAHVDKEASNEWLRRGELFPETEAFVIAIQDQVIDTRNYQKFITRIPNLSTDLCRRCHSSSETIQHITGSCKSIVQTDYKHRHDQVAAIIHQNLAHKHLFISKKIAYYKYKPSAVLENNLFKIYWDRTIITDKTIHYNRPDITIHDKTKKTVFIIDIAVCNTHNLLTTHTEKMAKYIDLSTEIKRQWQVDTVKIIPIIISTTGVVPKTLQNNLNLLEMPKSTITLLQKAALLNTCRLTRKFLASSSS

SEQ ID NO: 23246 - protein, 1242 aa, Junonia neildi
MNRFIWRTYLLITKCETTQMNNYLEPLHREFHNKYPEMQATRQRLGDQKRAILRRKLLPQNILDEIISQVKEHIQTENANHSPTHNHTDHTSLTSSQTNVTINRRMKWTDEINEDIIRFYFEVTQLEINKTAYRKKLYELFIEKYPNLSNLTEQRIADQRRLIFNNKMYTNRINDLKKEVELKLTSMNILPQLEREQNYNVTNTHHIHNQNATDNTQTLTETITLNNSDNENYYNHGHIETNSIEIEFNNAVARFSNLDPEERPFIPKQKTSRKFAQIVHCLNNEILPKYLNQDLDFISLHTLIYAAAYTAATFNGTRFKIDENRNTNQKNRKPSWQKRIESRIEKYRLEIGRLTQYIKGNRSQRILMTVEEIQNKYKTHSQHEEFNTEPQHFLDTLKQKLNAISIRLQRYLTCTKRKEQNATFLNNEKQFYRTLSSNHHTNPSHPIESPTTQHLHQFWTGIWENPVQHNRQAGWLQKIGDTSYINQMDFENIPADIFIQVIKRTHNWKAPGTDNIHNYWYKKFTCTHPFIHNHICAFIQSPNNMPKFITHGITYMLPKGTDTKNPANYRPITCLQTIYKIITGCISELIYRHIDHHNILAEQQKGCRKNSQGCKEQLTIDAIVMRQANTRNRNIHTMYIDYKKAFDSVPHSWLIYVLEYYKIHPNLISFLGTAMLEWKTKLKLFNNISETTESIKIQRGIFQGDALSPLWFCIALNPLSELLNNTNIGFKLKCNNSFHILSHLLYMDDIKIYATNNTELCKLADITQSFSIDIRMEFGVDKCKVHSINRGKTENNTYRLDTGEQIEPMDEHTTYKYLGFHQSKQIQQKETKSELIKKFKARLNQILRTQLNSRNTIKSINTYAIPVLIYSFGIINWSQSDLIKLQRIINTHMTAHRKHHPRSCTQRLTLPRQDGGRGIIDIQNLHNSLVDKLRKYFYLKAEQSQLHKYLTDIDNKLTPLNLCDRNFQQNLLSKQQKIEMWSQKSLHGRHFADLSQAHVDKEASNEWLRRGELFPETEAFVIAIQDQVIDTRNYQKFITRIPNLSTDLCRRCHSSSETIQHITGSCKSIVQTDYKHRHDQVAAIIHQNLAHKHLFIPKKIAYYKYKPSAVLENNLFKIYWDRTIITDKTIHYNRPDITIHDKTKKTVFIIDIAVCNTHNLLTTHTEKMAKYIDLSTEIKRQWQVDTVKIIPIVISTTGVVPKTLQNNLNLLEMPKSTITLLQKAALLNTCRLTRKFLASSSS

SEQ ID NO: 23247 - protein, 1374 aa, Junonia litoralis
MEKIMESQTKRYSLRPLPGGRRGASGADAGCHSMRSVGDGGLSRRVPLEQNTTAERSSSPSSTASSERSLFSNIPSPSSTQSLFRSPNSSPSSSSTYSSRTTRSTAVVQEASAINPAPTVGLNRARKKWTEDMNRFIWRTYLLITKCETTQMNNYLEPLHREFHNRYPEMQATRQRLGDQKRAILRRKLLPQNILDEIISQVKEHIQTENANHSPTHNHTDHTSLTSSQTNVTINRRMKWTDEINEDIIRFYFEVTQLEINKTAYRKKLYELFIEKYPNLSNLTEQRIADQRRLIFNNKMYTNRINDLKKEVELKLTSMNILPQLEREQNYNVTNTHHIHNQNATDNTQTLTETITLNNSDNENYYNHGHIETNSIEIEFNNAVARFSNLDPEERPFIPKQKTSRKFAQIVHCLNNEILPKYLNQDLDFISLHTLIYAAAYTAAAFNGTRFKIDENRNTNKKNRKPSWQKRIESRIEKYRLEIGRLTQYIKGNRSQRILMTVEEIQNKYKTHSQHEEFNTEPQHFLDTLKQKLNAISIRLQRYLTCTKRKEQNATFLNNEKQFYRTLSSNRQTNPSHPIESPTTQHLHQFWTGIWENPVQHNRQAGWLQKIADTSYINQMDFENIPADIFIQVIKRTHNWKAPGTDNIHNYWYKKFTCTHPFIHNHICAFIQSPNNMPKFITHGITYMLPKGTDTKNPANYRPITCLQTIYKIITGCISELIYRHIDHHNILAEQQKGCRKNSQGCKEQLTIDAIVMRQANTRNRNIHTMYIDYKKAFDSVPHSWLIYVLEYYKIHPNLISFLGTAMLEWKTKLKLFNNISETTESIKIQRGIFQGDALSPLWFCIALNPLSELLNNTNIGFKLKCNNSFHILSHLLYMDDIKIYATNNTELCKLADITQSFSIDIRMEFGVDKCKVHSINRGKTENNTYRLDTGEQIEPMDEHSTYKYLGFHQSKQIQQKETKSELIKKFKARLNQILRTQLNSRNTIKSINTYAIPVLIYSFGIISWSQSDLIKLQRIINTHMTAHRKHHPRSCTQRLTLPRQDGGRGIIDIQNLHNSLVDKLRKYFYLKAEQSQLHKYLTDIDNKLTPLNLCDRNFQRNLLSKQQKIEMWSQKSLHGRHFADLSQAHVDKEASNEWLRRGELFPETEAFVIAIQDQVIDTRNYQKFITRIPNLSTDLCRRCHSSSETIQHITGSCKSIVQTDYKHRHDQVAAIIHQNLAHKHLFIPKKIAYYKYKPSAVLENNLFKIYWDRTIITDKTIHYNRPDITIHDKTKKTVFIIDIAVCNTHNLLTTHTEKMAKYIDLSTEIKRQWQVDTVKIIPIVISTTGVVPKTLQNNLNLLEMPKSTITLLQKAALLNTCRLTRKFLASSSS

SEQ ID NO: 23248 - protein, 1075 aa, Junonia vestina
MYTNRINDLKKEVELKLTSMNILPQLEREQNYNVTNTHHIHNQNATDNTQTLTEIITLNNSDNENNPNHGHIETNSIEIEFNNAVARFSTLDPEERPFIPKQKTSRKFAQIVHCLNNEILPKYLNQDLDFISLHTLIYAAAYTAATFNGTRFKIDENRNTNQKNRKPSWQKRIESRIEKYRLEIGRLTQYIKGNRSQRILMTVEEIQNKYKTHSQHEEFNTEPQHFLDTLKQKLNAISIRLQRYLTCTKRKEQNATFLNNEKQFYRTLSSNHHTNPSHPIESPTTQHLHQFWTGIWENPVQHNRQAGWLQKIADTSYINQMDFENIPADIFIQVIKRTHNWKAPGTDNIHNYWYKKFTCTHPFIHNHICAFIQSPNNMPKFITHGITYMLPKGTDTKNPANYRPITCLQTIYKIITGCISELIYRHIDHHNILAEQQKGCRKNSQGCKEQLTIDAIVMRQANTRNRNIHTMYIDYKKAFDSVPHSWLIYVLEYYKIHPNVISFLGTAMLEWKTKLKLFNNISETTESIKIQRGIFQGDALSPLWFCIALNPLSELLNNTNIGFKLKCNNSFHILSHLLYMDDIKIYATNNTELCKLADITQSFSIDIRMEFGVDKCKVHSINRGKTENNTYRLDTGEQIEPMDEHSTYKYLGFHQSKQIQQKETKSELIKKFKARLNQILRTQLNSRNTIKSINTYAIPVLIYSFGIISWSQSDLIKLQRIINTHMTAHRKHHPRSCTQRLTLPRQDGGRGIIDIQNLHNSLVDKLRKYFYLKAEQSQLHKYLTDIDNKLTPLNLCDRNFQRNLLSKQQKIEMWSQKSLHGRHFADLSQAHVDKEASNEWLRRGELFPETEAFVIAIQDQVIDTRNYQKFITRIPNLSTDLCRRCHSSSETIQHITGSCKSIVQTDYKHRHDQVAAIIHQNLAHKHLFIPKKIAYYKYKPSAVLENNLFKIYWDRTIITDKTIHYNRPDITIHDKTKKTVFIIDIAVCNTHNLLTTHTEKMAKYIDLSTEIKRQWQVDTVKIIPIIISTTGVVPKTLQNNLNLLEMPKSTITLLQKAALLNTCRLTRKFLASSSS

SEQ ID NO: 23249 - protein, 1374 aa, Junonia stemosa
MEKIMESQTKRYSLRPLPGGRRGASGADAGCHSMRSVGDGGLNRRVPLEQNITAERSSSPSSTASSERLLFSNIPSPSSTQSLFHSSNSSPSSSSSTYSSRTTRSTAVVQEASAINPAPTVGLNRARKKWTEDMNRFIWRTYLLITKCETTQMNNYLEPLHREFHNRYPEMQATRQRLGDQKRAILRRKLLPQNILDEIISQVKEHIQTENVNHSPIHNHTDHTSLISSQTNVTINRRMKWTDEINEDIIRFYFEVTQLEINKTAYRKKLYELFIEKYPNLSNLTEQRIADQRRLIFNNKMYTNRINDLKKEVELKLTSMNILPQLEREQNHNVTNTHHIHNQNATDNTQTLTEIITLNNSDNENNPNHGHIETNSIEIEFNNAIARFSTLDPEERPFIPKQKTSRKFAQIVHCLNNEILPKYLNQDLDFISLHTLIYAAAYTAATFNGTRFKIDENRNTNQKNRKPSWQKRIESRIEKYRLEIGRLTQYIKGNRSQRILMTVEEIQNKYKTHSQHEEFNTEPQHFLDTLKQKLNAISIRLQRYLTCTKRKEQNATFLNNEKQFYRTLSSNHHTNPSHPIESPTTQHLHQFWTGIWENPVQHNRQAGWLQKIADTSYINQMDFENIPVDIFIQVIKRTHNWKAPGTDNIHNYWYKKFTCTHPFIHNHICAFIQSPNNMPKFITHGITYMLPKGTDTKNPANYRPITCLQTIYKIITGCISELIYRHIDHHNILAEQQKGCRKNSQGCKEQLTIDAIVMRQANTRNRNIHTMYIDYKKAFDSVPHSWLIYVLEHYKIHPNLISFLGTAMLEWKTKLKLFNNISETTESIKIQRGIFQGDALSPLWFCIALNPLSELLNNTNIGFKLKCNNSFHILSHLLYMDDIKIYATNNTELCKLADITQSFSIDIRMEFGVDKCKVHSINRGKTENNTYRLDTGEQIEPMDEHSTYKYLGFHQSKQIQQKETKSELIKKFKARLNQILRTQLNSRNTIKSINTYAIPVLIYSFGIINWSQSDLIKLQRIINTHMTAHRKHHPRSCTQRLTLPRQDGGRGIIDIQNLHNSLVDKLRKYFYLKAEQSQLHKYLTDIDNKLTPLNLCDRNFQRNLLTKQQKIEMWSQKSLHGRHFADLSQAHVDKEASNEWLRRGELFPETEAFVIAIQDQVIDTRNYQKFITRIPNLSTDLCRRCHSSSETIQHITGSCKSIVQTDYKHRHDQVAAIIHQNLAHKHLFIPKKIAYYKYKPSAVLENNLFKIYWDRTIITDKTIHYNRPDITIHDKTKKTVFIIDIAVCNTHNLLTTHTEKMAKYIDLSTEIKRQWQVDTVKIIPIIISTTGVVPKTLQNNLNLLEMPKSTITLLQKAALLNTCRLTRNFLASSF

SEQ ID NO: 23250 - protein, 1374 aa, Junonia evarete
MEKIMESQTKRYSLRPLPGGRRGASGADAGCHSMRSVGDGGLNRRVPLEQNITAERSSSPSSTASSERLLFSNIPSPSSTQSLFHSPNSSPSSSSTYSSRTTRSTAVVQEASAINPAPTVGLNRARKKWTEDMNRFIWRTYLLITKCETTQMNNYLEPLHREFHNRYPEMQATRQRLGDQKRAILRRKLLPQNKLDEIISQVKEHIQTENANHSPTHNHTDHTSLTSSQTNVAINRRMKWTDEINEDIIRFYFEVTQLEINKTAYRKKLYELFIEKYPNLSNLTEQRIADQRRLIFNNKMYTNRINDLKKEVELKLTSMNILPQLEREQNYNVTNTHHIHNQNATDNTQTLTEIITLNNSDNENYYNHGHIETNSIEIEFNNAVARFSNLDPEERPFIPKQKTSRKFAQIVHCLNNEILPKYLNQDLDFISLHTLIYAAAYTAAAFNGTRFKIDENRNTNKKNRKPSWQKRIESRIEKYRLEIGRLTQYIKGNRSQRILMTVEEIQNKYKTHSQHEEFNTEPQHFLDTLKQKLNAISIRLKRYLTCTKRKEQNATFLNNEKQFYRTLSSNRHTNPSHPIESPTTQHLHQFWTGIWENPVQHNRQAGWLQKIGDTSYINQMDFENIPADIFIQVIKRTHNWKAPGTDNIHNYWYKKFTCTHPFIHNHICAFIQSPNNMPKFITHGITYMLPKGTDTKNPANYRPITCLQTIYKIITGCISELIYRHIDHHNILAEQQKGCRKNSQGCKEQLTIDAIVMRQANTRNRNIHTMYIDYKKAFDSVPHSWLIYVLEYYKIHPNLISFLGTAMLEWKTKLKLFNNISETTESIKIQRGIFQGDALSPLWFCIALNPLSELLNNTNIGFKLKCNNSFHILSHLLYMDDIKIYATNNTELCKLADITQSFSIDIRMEFGVDKCKVHSINRGKTENNTYRLDTGEQIEPMDEHSTYKYLGFHQSKQIQQKETKSELIKKFKARLNQILRTQLNSRNTIKSINTYAIPVLIYSFGIISWSQSDLIKLQRIINTHMTAHRKHHPRSCTQRLTLPRQDGGRGIIDIQNLHNSLVDKLRKYFYLKAEQSQLHKYLTDIDNKLTPLNLCDRNFQRNLLSKQQKIEMWSQKSLHGRHFADLSQAHVDKEASNEWLRRGELFPETEAFVIAIQDQVIDTRNYQKFITRIPNLSTDLCRRCHSSSETIQHITGSCKSIVQTDYKHRHDQVAAIIHQNLAHKHLFIPKKIAYYKYKPSAVLENNLFKIYWDRTIITDKTIHYNRPDITIHDKTKKTVFIIDIAVCNTHNLLTTHTEKMAKYIDLSTEIKRQWQVDTVKIIPIIISTTGVVPKTLQNNLNLLEMPKSTITLLQKAALLNTCRLTRKFLASSSS

SEQ ID NO: 23251 - protein, 1247 aa, Parnassius apollo
MNRFIWRTYLLITKCETTHMNNYLEILHQEFESRYPEMKATRQRLGDQKRAILRRKLLPQKLLDEIGNEVREYIIQNENHKHTHSTQITAPSQTNTTNNTRMKWSDEINEDIIRFYLEVTELEKDQTGYRKKLYELFIERHPYLSYLTEQRIADQRRLIFKNKKYSNKINELRREVELKLELNIETYIEQTQQTPYESTTDIFTPTQHTQLENMIDSTNTVIKTCSLSNAQKENSQLQNLIESNKIEIEFNNAIAIFSTTHAEARPYIPKQKYSRKFAQIVHYLNNEILPRHLSHDLDFISLHTLIYSAAYTAALCNGTRFNTEGNITANNRNRKPTWQRRIESRIEKYRLEIGRLTQYIIGNRNQRILKTVEEIKRKYKTHSEHEESNTEPQHFLDTLKQKLNALSNRLRRYLTCTKRKQQNANFLNNEKQFYRTLGHEHHINTTRSTQFPSPQHLQQFWAGLWENPVVHNSKAEWLDKIPKAPNIKQMDFENITVETFIQIIKRTQNWKAPGTDNIHNYWYKKLTCTHPFIYNHICQFIHSPHNMPTFITSGLTYMLPKGSDPKDPANYRPITCLQTIYKIITGCISETIYRHLDQQNILAEQQKGCKKNSQGCKEQLTIDAIAMKQAHSKNRNIHIMYIDYKKAFDSVPHSWLIYVLKYYKIHTSLISFLNVAMLHWKTKLKLINNSSLSTESIKIQRGLFQGDALSPLWFCLALNPLTELLNSTNVGFKLKYNNSYHILSHLLYMGDIKIYATNNTELTKLADLTQSFSTDIKMQFGVDKCKVHSIIRGKSINNTYILSTGEQIEPMDEHSTYKYLGFHQSKQIHQKQAKIDLTKKFKIRINQILRTQLNSRNIIKVINTYAIPILIYSFGIINWSQSDLVKLQRTINTNMTVNRKHHPRSCTQRLIHYHAKMEGGGIIDIQNLHNSLIDKFRKYFYVKSEHSQLHKYIVGIDKKLTPLNLNDRNFQLKIVSKQQKIDLWSQKSLHGRHFADLGQAHVDRQASNEWLRRGELFPETEAFVIAIQDQVIDTRNYQKHIIHIPSPPTDLCRRCHSSSETIQHITGACKSIVQTDYKHRHDQVAAIVHQNLAHKHSFILKKVAYYKYIPSTILESDSVKIYWDRTIITDKTIHYNRPDITILDKIKKSVFIIDIAVCNTHNLITTHSEKMTKYVDLAIEIKRQWQVDSVKIIPIIISTTGVVPKTLQTSLNMLQMPKSTLTLIQKAVLLNTCRLTRKFLNSSPSSL

SEQ ID NO: 23252 - protein, 1370 aa, Drepana arcuata
MENMEQRKYNLRPLPGGRRGASGADAGCHSMRTVGDGGLSRRVPLEKLTTADRSSSPSSTSASETSPFSNIPSPSSSNSLFNVSLSPSSSYSSQTTRSTIVVQEATATEPAPNVDPIPARKKWTDEMNRFIWRTYLLITNCETALLNNYLEPLHQAFTHRYPEMRSTRQRIGDQRRAILRRKLLSQNTIEEINTEVRETTQMNTQSPSHSIHLPPSLHTQAQTNTTPRMKWSKEMNEDIIRCYYEVTELETNKTAYRRKLYERFIEKYPHLSSLTEQRVADQRRQIFTNKKISSNRFEELRRESELNQIQSANQFEPNIALSIEDTPRLSDSENIIDVQTLLQTASQTCTFNIDSPNPSEIQSSEIETNDIALQFEESLTRFKMMNPESRPRIPKQKSSRKFSQIICYLNEVILPKYLTAELDFESLHTIIYSAAFTAALCNGTRFSFDTNRNNQNNKPTWQRRMEQKIEQYRQEIGRLTQYIAGNRSQKVVKSVEKIKYKYNTHSQHEEPNTELEHFLDTLKQKLNATSNRLKRYLTCTNRKKQNCTFTTNEKLFYRNLGQQSNLTLASDVPSPHQLQQFWADIWENPIQHNENPDWLHKTADTTHIAQMCFEDISIETLTEVITRTHNWKAPGTDKIHNYWYKKFTCTHKFIHKYINQFIQSPHTMPTFITHGVTYMLPKGSDPKNPANYRPITCLQTIYKIITGCISEIIYKHLDQYNILAEQQKGCRKNSQGCKEQLTIDAIVMKQAQTKHRNIHTMYIDYKKAFDSVPHSWLLFILEHYKIHPNLVSFIKTAMGHWKTKLQLFHNNASLTTEPIKIQRGIFQGDALSPLWFCMALNPLSELLNSTNTGFKLKHNNTHHTLSHLMYMDDIKIYATNNTELTKLADITQSFSSDIHMQFGVDKCKTHSITKGKSVSNAYTLNTGEQIDPLDENSTYKYLGFHQSKQIHQTETKSQLTKKFKIRLNQILRSCLNSRNTVKAINTYAIPTLTYSFGVIKWSQTDLTKLQRIVNTHMTTHRKHHPKSCVQRLTLPRRDGGRGLIDIKNLHNTIVNKLRHYFHTKAENTALHQYIVNIDNKLTPLNLHDRNTQPSLHLSNRQQKLDMWSQKSLYGRHLADLSQAHVDKGASNEWLRRGELFPETEAFMIAIQDQVIDTRNYQKFIMRVPNLLTDLCRRCHSSSETIQHITGACKAIVQTDYKHRHDQVAAIVHQNIAHKYGFINKKVAYYKYKPNPVLENDRYKVYWDRTIITDKTIHYNRPDITILDKTNKTVSIVDIAVCNTHNIITTHTEKMSKYIDLSIETKRQWQIDTVRILPIVISTTGVVPNTLQTHLNTLQMPKSTLTLLQKAAILNTCRLTRKFLSSSTSSL

SEQ ID NO: 23253 - protein, 1385 aa, Drepana arcuata
MLANTYPTNDPKPKPMENMEQRKYNLRPLPGGRRGASGADAGCHSMRTVGDGGLSRRVPLEKLTTADRSSSPSSTSASETSPFSNIPSPSSSNSLFNVSLSPSSSYSSQTTRSTIVVQEATATEPAPNVDPIPARKKWTDEMNRFIWRTYLLITNCETALLNNYLEPLHQAFTHRYPEMRSTRQRIGDQRRAILRRKLLSQNTIEEINTEVRETTQMNTQSPSHSIHLPPSLHTQAQTNTTPRMKWSKEMNEDIIRCYYEVTELETNKTAYRRKLYERFIEKYPHLSSLTEQRVADQRRQIFTNKKISSNRFEELRRESELNQIQSANQFQPNIALSIEDTPRLSDSENIIDVQTLLQTASQTCTFNIDSPNPSEIQSSEIETNDIALQFEESLTRFKMMNPESRPRIPKQKSSRKFSQIICYLNEVILPKYLTAELDFESLHTIIYSAAFTAALCNGTRFRFDTNRNNQNNKPTWQRRMEQKIEQYRQEIGRLTQYIAGNRSQKVVKSVEKIKYKYNTHSQHEEPNTELEHFLDTLKQKLNATSNRLKRYLTCTNRKKQNCTFATNEKLFYRNLGQQSNLTLASDVPSPHQLQQFWADIWENPIQHNENPDWLHKTADTTHIAQMCFEDISIETLTEVITRTHNWKAPGTDKIHNYWYKKFTCTHKFIHKYINQFIQSPHTMPTFITHGVTYMLPKGSDPKNPANYRPITCLQTIYKIITGCISEIIYKHLDQYNILAEQQKGCRKNSQGCKEQLTIDAIVMKQAQTKHRNIHTMYIDYKKAFDSVPHSWLLFILEHYKIHPNLVSFIKTAMGHWKTKLQLFHNNASLTTEPIKIQRGIFQGDALSPLWFCMALNPLSELLNSTNTGFKLKHNNTHHTLSHLMYMDDIKIYATNNTELTKLADITQSFSSDIHMQFGVDKCKTHSITKGKSVSNAYTLNTGEQIDPLDENNTYKYLGFHQSKQIHQTETKSQLTKKFKIRLNQILRSCLNSRNTVKAINTYAIPTLTYSFGVIKWSQTDLTKLQRIVNTHMTTHRKHHPKSCVQRLTLPRRDGGRGLIDIKNLHNTIVNKLRHYFHTKAENTALHQYIVNIDNKLTPLNLHDRNTQPSLHLSNRQQKLDMWSQKSLHGRHLADLSQAHVDKGASNEWLRRGELFPETEAFMIAIQDQVIDTRNYQKFIMRVPNLLTDLCRRCHSSSETIQHITGACKAIVQTDYNHRHDQVAAIVHQNIAHKYGFINKKVAYYKYKPNPVLENDRYKVYWDRTIITDKTIHYNRPDITILDKTNKTVSIVDIAVCNTHNIITKHTEKMSKYIDLSIEIKRQWQINTVRILPIVISTTGVVPNTLQTHLNTLQMPKSTLTLLQKAAILNTCRLTRKFLSSSTSSL

SEQ ID NO: 23254 - protein, 1354 aa, Dryas iulia
MENMENKRYSLRPLPGGRRGASGADAGCHSMRSVGDGGLNRRVPLEKHATADQSYSPSTSSTNSLFSSIPSPSSSHPLLISPNSSPSSSFSLQTTRSTDVVQEAAAVHTVPTARPTRARNKWTEIMNRHIWRTYLLITKCETTLMNNYLEPLHQEFCAKFPEMQVTRQRIGDQCRAIIRTKLLSENTLAEIFTEVYELLQTKNQPTQIPIEHTTHTLSQTSVRMKWSNELNEEIVRCYFKVTRLESHKTSYRKKMYNLFISRNPHLSHLTEQRIADQRRLIFNNKSIQSDKMIEIKKDVEIKLASSRHQSENILESDSHSSQINEVILVTNEQQNSQINETVTQNYNNNLNLTDKQQNHIEVEFIKALDEFKNINPETRPYIPKQKSSRKFSQIVSFLNNEVLPKHLSNELDFISLHNIIYTAAYTAALCNGTKFNFNENYRNHKSKPSWQRRIESRIDKYRLQIGRLTQYISGNKNPKIVKTVEEIKIQYNTHSHHEKPNTELQHFLDTLKQKLNATSSRLRRYLTCTKRKQQNNTFINNEKLFYRNLTSTNQNITTQSQGTPTQDNLRHFWANIWENPIQHNEDAKWLKEIPDLTIDFMKFKEISIDTFNQVIKYTHNWKAPGSDNIHNYWYKKLTCTHSLLLQHINQFIQSPQALPKFVTNGITYMLPKGLDPKNPANYRPITCLQTIYKIMSACITNIIYKHVDQNNILSEQQKGCRKNSQGCKEQLTIDAIVMKQAYHKNIHTMYIDYKKAFNSVPHSWLLYILKKYKIDPILITFLNSVMLQWSTKLKLINKITNLTTDPIKIQRGIFQGDALSPLWFCMALNPLSELLNSINVGLQLKHDDIHHTVSHLMYMDDIKLYATNNTGLTKLADITQSFSTDIRMEFGVEKCKIHSIVRGRTQQNTYTLDTGEQIESLDENSTYKYLGFQQAKQIRQKQTKLELTNKFKFRLNQILKSQLNSRNIIKAINTYAIPVLTYSFGIVNWSQTDLSKLQRIINTHMTTHRKHHPKSCIQRLTLSRQDGGRGLIDIRNLHNNLITKFRNYFYSKIDVSELHKLIVNIDKKYTPLNLSDKSMQLNQSLLSKQQKIDAWSLKSLHGRHLSDLSQSHVDKIASNDWLRRGDLFPETEAFMIAIQDQVIDTRNYQKHIIKRSYMVNDLCRRCYSSSETIQHITGACKSIVQTDYKHRHDQIAAIIHQQLALKHSLITQAQKTPYYKYSPETVLESIDYKLYWDRTIITDKTIHYNRPDILLLDKIKNTVFIIDIAIPNTHNLASTYSSKIEKYTDLAIELKNQWKVQSVTIVPIVISTTGVIPHTLHVSLNTIGMHHSTYILLQKAAILNTCRIVRKFLR

SEQ ID NO: 23255 - protein, 754 aa, Dryas iulia
MKFKEISIDTFNQVIKYTHNWKAPGSDNIHNYWYKKLTCTHSLLLQHINQFIQSPQALPKFVTNGITYMLPKGLDPKNPANYRPITCLQTIYKIMSACITNIIYKYVDQNNILSEQQKGCRKNSQGCKEQLTIDAIVMKQAYNKNIHTMYIDYKKAFDSVPHSWLLYILKKYKIHPILITFLNSVMLQWSTKLKLINKNTNLTTDPIKIQRGIFQGDALSPLWFCMALNPLSELLNSINVGLQLKHDDIHHTVSHLMYMDDIKLYATNNTGLTKLADITQSFSTDIRMEFGVEKCKIHSIVRGRTQQNTYTLDTGEQIESLDENSTYKYLGFQQAKQIRQKQTKLELTNKFKFRLNQILKSQLNSRNIIKAINTYAIPVLTYSFGIVNWSQTDLSKLQRIINTHMTTHRKHHPKSCIQRLTLSRQDGGRGLIDIRNLHNNLITKFRNYFYSKIDVSELHKLIVNIDKKYTPLNLSDKSMQLNQSLLSKQQKIDAWSLKSLHGRHLSDLSQSHVDKIASNDWLRRGDLFPETEAFMIAIQDQVIDTRNYQKHIIKRPNMVNDLCRRCYSSSETIQHITGACKSIVQTDYKHRHDQIAAIIHQQLALKHSLITQAQKTPYYKYSPETVLESIDYKLYWDRTIITDKTIHYNRPDILLLDKIKNTVFIIDIAIPNTHNLASTYSSKIEKYTDLAIELKNQWKVQSVTIVPIVISTTGVIPHTLHVSLNTIGMHHSTYILLQKAAILNTCRIVRKFLR

SEQ ID NO: 23256 - protein, 1361 aa, Dryas iulia
MAMATLFMENMENKRYSLRPLPGGRRGASGADAGCHSMRTVGDGGLNRRVPLEKHATADQSYSPSTSSTNSLFSSIPSPSSSHPLLISPNSSPSSSFSLQTTRSTDVVQEAAAVHTVPTARPTRARNKWTEIMNRHIWRTYLLITKCETTLMNNYLEPLHQEFCAKFPEMQVTRQRIGDQRRAIIRTKLLSENTLAEIFTEVYELLQTKNQPTQIPIEHTTHTLSQTSVRMKWSNELNEEIVRCYFEVTQLESHKTSYRKKMYNLFISRNPHLSHLTEQRIADQRRLIFNNKSIQSDKMIEIKKDVEIKLASSRHQSENILESDSHSSQINEVILVTNEQQNSQINEAVTQNYNNNLNLTDKQQNHIEVEFIKALDEFKNINAETRPYILKQKSSRKFSQIVSFLNNEVLPKHLSNELDFISLHNIIYTAAYTAALCNGTKFNFNENYRNHKSKPSWQRRIESRIDKYRLQIGRLTQYISGNKNPKIVKTVEEIKIQYNTHSHHEKPNTELQHFLDTLKQKLNATSSRLRRYLTCTKRKQQNNTFINNEKLFYRNLTSTNQNITTQSQGTPTQDNLRHFWANIWENPIQHNEDAKWLKEIPDLTIDSMKFKEISIDTFNQVIKYTHNWKAPGSDNIHNYWYKKLTCTHSLLLQHINQFIQSPQALPKFVTNGITYMLPKGLDPKNPANYRPITCLQTIYKIMSACITNIIYKHVDQNNILSEQQKGCRKNSQGCKEQLTIDAIVMKQAYNKNIHTMYIDYKKAFDSVPHSWLLYILKKYKIHPILITFLNSVMLQWSTKLKLINKTTNLTTDPIKIQRGIFQGDALSPLWFCMALNPLSELLNSINVGLQLKHDDIHHTVSHLMYMDDIKLYATNNTGLTKLADITQSFSTDIRMEFGVEKCKIHSIVRGRTQQNTYTLDTGEQIESLDENSTYKYLGFQQAKQIQQKQTKLELTNKFKFRLNQILKSQLNSRNIIKAINTYAIPVLTYSFGIVNWSQTDLSKLQRIINTHMTTHRKHHPKSCIQRLTLSRQDGGRGLIDIRNLHNNLITKFRNYFYSKIDVSELHKLIVNIDKKYTPLNLSDKSMQLNQSLLSKQQKIDAWSLKSLHGRHLSDLSQSHVDKIASNDWLRRGDLFPETEAFMIAIQDQVIDTRNYQKHIIKRPNMVNDLCRRCYSSSETIQHITGACKSIVQTDYKHRHDQIAAIIHQQLALKHSLITQAQKTPYYKYSPETVLESIDYKLYWDRTIITDKTIHYNRPDILLLDKIKNTVFIIDIAIPNTHNLASTCSSKIEKYTDLAIELKNQWKVQSVTIVPIVISTTGVIPHTLHVSLNTIGMHHSTYILLQKAAILNTCRIVRKFLR

SEQ ID NO: 23257 - protein, 1319 aa, Dryas iulia
MRTVGDGGLNRRVPLEKHATADQSQSHSPSTSSSTNSPFSSIPSPSSSHALLISPNSSPSSSFSSQITRSTDVVQEAAAVHTVPTVRPTCARKKWTEIMNRHIWRTYLVITQCETTLMNNYLEPLHQEFCIKFPEMQVTRQRVGDQRRAIIRRKLLSENTLVEIFNEVQKMFQTENQSLSQTNVTETQSQSLSQTNVRMKWSNELNEEIVRCYFEVTDLENNKTSYRKKMYDLFMSRNSHLSHLTEQRIADQRRLIFTNKSIQNDRIIEIKREIEIKLTKESQTATIHTNKAPPVTYIQQNSQIIEALERNYTNKHNLTDKQQKNIEAEYNKALTEFRNTNPESKPYIPKQKSSRKFSLIVSFLNNEILPKHLSNEIDFNTLHNVIYTAAYTAALCNGTKFKFSENNRNPNSKPSWQRRIERKIDKYRLQIGRLTQYISGNRNPKIVKTVEEIKIQYKTHSLHEKPNTELDHFLDTLKQKLNATSNRLRRYLTCTKRKQQNNTFVNNEKHFYRHLSSTTQNITTQSQETPTQDNLHNFWANIWETPIQHNENAEWLERLPELDIDIMKFKEITIDIFDHVIKHTHNWKAPGTDNIHNYWYKKLTCTHTHLLKHINLFIKSPQTLPLFVTNGITFMLPKGLDSKNPSNYRPITCLQTIYKIITACITHIIYKHVDQNNILAEQQKGCRKNSQGCKEQLTIDAIVMKKAQNKNIHTMYIDYKKAFDSVPHTWLLFILKKYKIHPILVTFLSSVMLQWRTRLKLSNKNTTLITDPIKIQRGIFQGDALSPLWFCLALNPLSELLNNTNVGFQLKYNDTHYTLSHLMYMDDIKLYATNNTELTMLADITQSFSADIRMEFGVEKCKIHSIIRGKTQQNTYTLDTGEQIESIDEGSTYRYLGFQQAKQIQQKQTKLELTNKFQFRLNQILKSQLNSRNIIKAINTYAIPILTYSFAVINWSQTNLSKLQRMINTHMTTHRKHHPKSCIQRLTISRQDGGRGLIDIHNLHNSLITKLRNYFYFKAESSELHKCLVHIDKKYSPLNLSDSNAQLNQTLISKQQKIETWALKSLHGRHLADLSQTHVDKVASNEWLRRGDLFPETEAFMMAIQDQVIDTRNYQKHILKRPNMVNDLCRRCYCSPETIQHITGACKSIVQTDYKHRHDQVAAIIHQHLAFKYSLITKKSPYYKYTPQTILESTNYKLYWDRTIITDKTIHCNRPDILLHDKIKNTVYLIDIAIPNTHNLASTYSSKIDKYTELSIELRSQWRVQSVITVPIVLSTTGVIPRTLHTSLETLGLHGLTYILLQKATILNTCRIVRKFLSS

SEQ ID NO: 23258 - protein, 1364 aa, Nymphalis urticae
MERSNKRYSLRSLPGGRRGASGADAGCHSMRSVGDGGLNRRVPLEEYVTADQSPSPSSTSLSNHSLSSNFPSPSSTATLFESPSSSPPSRCSSHISMPTAVAQEACAINAAPSAGTSRVRNKWSQDMNRFIWHTYLLITKCETTQMNNYLQLLHEQFNQKFPNMQVSRQRVGDQRRAILRRKLLPQNVLDEIRNEVADKIQAEGEIADIPLRQSSQSEHLASQINSNSNKRMKWSHVINEDIVRCYFESTNLETNKTAYRKKLFELVVDKHPHLSHLSEQRIADQRRVIFFNNLVNKDKIEEIKIEINKKLQNSINQSKHNIPIESNIASTDSNHSQPETILGTGISLTENESDSIFLENTKSTPNFIEIEFKNAINRFKDMHPEERPYIPKQKTSRKFATITRTLNNEILPKHLNSNIDFKYLHALIHSAAYTAAVCNGTIFRVNNDTVQNKYLKKPTWQRRIEKRIEKYRLEIGRLTQYIAGNRNQKVIKTVEDIKVKYKTHSQYEEPNIELEHFLDTLKQKLNTASKRLKRYLTCTNRKQQNFTFTNNERTFYRNLGTHNQNTLTQNTEYTTPQKLHEFWAGIWSNPVQHNANANWFQKIGDSTHIEQMNFKDIPIETFTQIIKRTHNWKAPGTDNIHNFWLKKLTCIHPYIHNHICQFIKSPETTPKFLTTGITYMLPKESDLKNPANYRPITCLQTIYKIITGCISEIIYQHLEAYNILAEQQKGCRKNSQGCKEQLVIDTIVMKQALTSKRNIYTMYVDYKKAFDSVPHSWLLHVLQLYKIDPVLINFFSCIMPQWQTTLKVYQNNTSITTDPIKIQRGIFQGDALSPLWFCMALNPLSDLLNNTNAGFKLKHNGTHCLISHLMYMDDIKIHGTTKAELIKLTDVTQSFSTDIQMHFGVDKCKTHSINRGKTETNTYMLETGEQIEAMDEMSTYKYLGFHQSKQIKHKQIKKELIQKFKIRLNQILKTHLNSRNSTKAINTYAIPLLTYSFGIINWSKTDLQKLQRIINTHMTTHRKHHPKSCTQRLTLPRGEGGRGLIDIHNLHNSLIAKLRKFFHDKAESTSIHKYITEIDKKFTPLNLHNRNKQSSEQIISMWSQKSLHGRHRADLSQAHVDMEASNEWLRRGELFPETEAFMIAIQDQVIDTRNYQKHIIRTANFPTDLCRRCQSSSETIQHITGACKSIVQTDYKHRHDQVAAIIHQNLAHQYKFITKKVAYYRYQPRKVLENNNYKIYWDRTIITDQTIHYNRPDITVVDKNNKIVCIVDIAVCNTHNLLSTHNEKVIKYIELATEIKKQWSINTVKILPIILSTTGVIPKTLKTNLNILQMSKSTLALLQKAVILNTTRLTRKFLTSPLSI

SEQ ID NO: 23259 - protein, 755 aa, Boloria selene
MDFENITLDVTTQIIKRTHNWKAPGTDNIHNYWYKKLTCTHSLIHKHINQFIQSPNTLPAFITHGVTYMLPKGSDSKNPANYRPITCLQTIYKIITGCISAIIYEHVDQYKILAEQQKGCRKNSQGCKEQLTIDAIVMKQAQNRNFHTMYIDFKKAFDSVPHSWLIHVLKQYKINPILIKFLSSAMDQWKTRLILTANNESLTTESIKICRGIFQGDALSPLWFCLALNPLSELLNDTNIGFKLKYNSTEYTLSHLMYMDDIKLYASNYSDLETLADITQSFSTDICMEFGVDKCKIHSVSRGKIRHNTYTLDTGEQIDPMDENSTYKYLGFQQAKQIKQKYTKLELTKKFKQRLNQVLKTQLNARNTIKAINTYTIPILTYSFGIINWSQTDLTKLQRIINTHMTTHRKHHPKSCVQRLTLPHQNGGIGLIDIRNLHNNLITKLRDYFHSKATSSDLHKFITEIDKKYSPLNLHDRNMQLNQNTISKQQKIEAWSQKSLHGRHLADLSQTHVDKDASNEWLRRGELFPETEAFIVAIQDQVIDTRNYQKHIIRNPNMLNDLCRRCHCSSETIQHITGACKSIVQTDYKHRHDQVAAIIHQYLALKHSLITQAQKAPYYKYTPQTILESTAYKLYWDRTIITDKTIHYNRPDILLHDKNNNTVYLIDIAIPNTHNLASTYSSKIAKYTDLSIELRSQWKVQTVTTIPIVLSTTVVIPHTLHTSLETLGLHRLTYILLQKAAILNTCRIVRKFLSL

SEQ ID NO: 23260 - protein, 1351 aa, Emesis diogenia
MTGLNKRYNLRPLPGDRRGTSGANAGCHSMRTVGDGGLSRRVPLEQSSTADRSFSPSSITTSEHSLFKNFSLPSSTHSLFHSPNTSTSSSYSSCSSRTTAVVQEALAINSASNVCPPRARKKWNEDMNRFIWRTYLAITKNETTQMKNYLDPLHKKFISKYPDMEATRQRIGDQKRAILRKKLLSQDTLDEIRNEINQEIRTDSYTSPVSQNVSNLYFTQKSTQIKETTKSRMRWSDEMNEDIICFYLKITELETNMTAYRKKLHEMFIKKYPCLSHITEQRIADQRRAIFNNKAYKNKIQELKTQVVQLITQHNDTIIESLDYNHSETIGDTSTTHVHNDTQTQICTQTLYNNIDHENNLGSKIAIEFKNAIVRFNDTNPETRPYIPKQKSSRKFSQIVSHLNNTIIPKYLKHDLDFVSLHTIVYSAAFTAAVCNGTKFYTNENRDRNRFSKKPTWQRRIESKIQKFRLEIGRLTQYIAGNRQQKVLNTVDEIKKKYKTHSKHEEPNTEPQHFLDTLKQKLNTAANRLKRYLSCTQRKQQNLTFTHREKQFYRNLGSNPRDNNQILDPPSPQELQQYWASIWENPLLHNMNADWLSKLKNRAHINSMEFENISLDTFTQIINRIHNWKAPGTDNIHNYWYKKFTCTHSFIHNHINQFIDQPNSMPKFITHGITFMISKGSDPKNPANYRPITCLQTIYKIITGCISHLIYKHLELHNILAEQQKGCRKNSQGCKEQLTIDAIVMKQAHTKHRNIHTMYIDYKKAFDSVPHSWLQYILTLYNVHPSLISFLSTAMLQWETKLKICQNNKSVTTESIKIQRGIFQGDALSPLWFCMALNPLSELLNQSNIGFKLKCNDSHNTHTLSHLMYMDDIKMYAPTNIELKKLADITQTFSEDIQMQFGVEKCKIHSIIKGKSQHNTYLLNSGEQVEPMDEHSTYKYLGFHQSKQIQHKQTKLDLTKKFKIRLNQILKTQLNSRNSIKAINTYAISILTYSFGVINWSQTDLVKLQRIINTHMTMHRKHHPKSCVQRLTLPRQDGGQGLIDIQNLHNSVITKLRTYFYNKADLSQLHKYVTNIDNRLTPLNLNNRTFILNSISRQQKLNLWSEKSLHGRHLADLSQSHVDRTASNEWLQRGELFPETEAFMIAIQDQIIDTLNYQKHIIRVPNLQTDLCRRCHSSSETIQHITGACKSIVQTDYKHRHDQVAAIIHQNLAHIHSFIDQKIAYYKYIPKAVLENNMIKIYWDRTIITDKSVHCNRPDITVLDKGNRVAFLIDIAVCNTHNLLNTYTEKQTKYAELATEIKRQWQIDKVNIIPIIISTTGVIPKSLHTNLNTLQMPASTMTLIQKAVILN

SEQ ID NO: 23261 - protein, 1254 aa, Parnassius apollo
MNRFIWRTYLLITKCETTHMNNYLEILHQEFESRYPEMKATRQRLGDQKRAILRRKLLPQKLLDEIGNEVREYIIQNENHKHTHSTQITAPSQTNTTNNTRMKWSDEINEDIIRFYLEVTELEKDQTGYRKKLYELFIERHPYLSYLTEQRIADQRRLIFKNKKYSNKINELRREVELKLELNNRQLVTDQNYTVVEQTQQTPYESTTDIFTPTQHTQLENMIDSTNTVIKTCTLSNAQKENSQLQNLMESNKIEIEFNNAIAIFSITDGEARPYIPKQKYSRKFAQIVHYLNNEILSRHLSHDLDFISLHTLIYSAAYTAALCNGTRFNTEGNITANNRNRKPTWQRRIESRIEKYRLEIGRLTQYIIGNRNQRILKTVEEIKRKYKTHSEHEESNTEPQHFLDTLKQKLNALSNRLRRYLTCTKRKQQNANFLNNEKQFYRTLGHEHHINTTRSTQFPSPQHLQQFWAGLWENPVAHNSKAEWLDKIAKAPNIKQMDFENITIETFIQIIKRTQNWKAPGTDNIHNYWYKKLTCTHPFIYNHICQFIHSPHNMPTFITSGLTYMLPKGSDPKDPANYRPITCLQTIYKIITGCISETIYGHLDQQNILAEQQKGCKKNSQGCKEQLTIDAIAMKQAHSKNRNIHIMYIDYKKAFDSVPHSWLIYVLKYYKIHTSLISFLNVAMLHWKTKLKLINNSSLSTESIKIQRGLFQGDALSPLWFCLALNPLSELLNSTNVGFKLKYNNSYHILSHLLYMDDIKIYATNNTELTKLADLTQSFSTDIKMQFGVDKCKVHSIICGKSINNTYILSTGEQIEPMDEHSTYKYLGFHQSKQIHQKQAKIDLTKKFKIRINQILRTQLNSRNIIKAINTYAIPILIYSFGIINWSQSDLVKLQRTINTNMTVNRKHHPRSCTQRLTLPRQDGGRGIIDIQNLHNSLIDKFRKYFYVKSEHSQLHKYIVGIDKKLTPLNLNDRNFQLKIVSKQQKIDLWSQKSLHGRHLADLGQAHVDRQASNEWLRRGELFPETEAFVIAIQDQVIDTRNYQKHIIHIPSPPTDLCRRCHSSSETIQHITGACKSIVQTDYKHRHDQVAAIVHQNLAHKHSFILKKVAYYKYIPSTILESDSVKIYWDRTIITDKTIHYNRPDITILDKIKKSVFIIDIAVCNTHNLITTLSEKMTKYVDLAIEIKRQWQVDTVKIIPIIISTTGVVPKTLQTSLNMLQMPKSTLTLIQKAVLLNTCRLTRKFLNSSPSSL

SEQ ID NO: 23262 - protein, 1367 aa, Trichoplusia ni
MEKNMESQSRRYSLRPLPGGRRGASGADAGCHSMRTVGDGGLNRRVPLEQSTTADRSPSPSSSEHSLFANIPSPSSTHTLFRSPISSPSSTYSARSTRSAGVVQEAIAINPAPTAGPLRARKKWSEDMNRFIWRTYLLITKCETTQLNNYLESLHREFDDRYPDMQVTRQRVGDQRRAILRRKLLSQNVLEEIESEVKEHIQAFDHLPCTLNRNLTGHTTLTQSHTATAVTSRMKWSDEINEDIIKLYFEATELDTNKTNYRKKLYDLFIEKHSNLSHITEQRIADQRRLLFCNKANEDKISRLKKEVELKLTEQNSYLHCDIRRVEDAVMNIHPHNTTLEIHASPEQPVTESVDVAEEPILTNNDSMEYLEAEFNKAVGQFSSMDPEQRPYIPKQRTSRKFAQIVHSLNSVILPKHLNHELDFTSLHCLIYSAAFTAAISNGTKLNLEENTSRSRCNKKPAWQRRIESRIEKYRLEIGRLTQYIAGNRTTRILKTVDEIRIKYSTHSQHEEPNTEPQHFLDTLKQKLNVASNRLKRYLACTLRKQQNATFSNNERQFYRNLGIDNQQNHEPDAPSAQQLQKFWADIWESPVQHKNDADWLQKISDTGHINQMNFENIPIDTFVQIIKRTHNWKAPGTDNIHNYWYKKLSSTHPFIHSKICHFIQSPHSMPSFITHGITYMLPKGSDSKNPANYRPITCLQTIYKIITGCISDIVYKHLDKYNVLAEQQKGCKRNSQGCKEQLTIDAVVMKQAQTKNRNIHTMYIDYKKAFDSVPHSWLIYVLQHYKIHENIISFLGTTMLQWQTKLKLIQASITTDPIKIQRGIFQGDALSPLWFCLALNPLSELLDHTQLGFQLKYNNSSHVLSHLLYMDDIKIYASNITELVNLADITQMFSNDIHMQFGVDKCKIQSIHRGKVQNNSYLLDTGEEIEPMDEQSTYKYLGFHQSKQIHQKRAKLDLIDKFKVRLNKIMRTHLNSRNSIKAMNTYAIPVLTYSFGIIKWSKSDLLKLQRIINTRMTTHRKHHPRSCVQRLTLPRQEGGRGLIDIQNLHNNIIENIRKYFYAKAEQSQLHSFVSKIDINVTPLHLNNTNLQANVVSKQQKIDTWSQKSLHGRHLADLSQEHVDKDASNDWLRRGELFPETEAFVIAIQDQVIDTRNYQKYISRIPNLVSDLCRRCHSSSETIQHITGACKSIVQTDYKHRHDQVAAIIHQNLAHKHTFIPFKIAYYKYKPSTVLENNLIRIYWDRTIITDKTIHFNRPDILVFDKINKSVFIIDIAVCNTHNLLTTYTEKMSKYIDLATEIKRQWQVDSVRILPIVISSTGVVPKSLQPNLNTLHMPKSTLPLLQKATLLNTCRLTRKFLSSPSSS

SEQ ID NO: 23263 - protein, 1367 aa, Trichoplusia ni
MEKNMESQSRRYSLRPLPGGRRGASGADAGCHSMRTVGDGGLNRRVPLEQSTTADRSPSPSSSEHSLFANIPSPSSTHTLFRSPISSPSSTYSTRSTRSAAVVQEAIAINPAPTAGPLRARKKWSEDMNRFIWRTYLLITKCETTQLNNYLESLHREFDDRYPDMQATRQRVGDQRRAILRRKLLSQNVLEEIESEVKEHIQAFDHLPCTLNRNLTGHTTLTQSHTATAVTSRMKWSDEINEDIIKLYFEATELDTNKTNYRKKLYDLFIEKHSNLSHITEQRIADQRRLLFCNKANEDKISRLKKEVELKLTEQNSYLHCDIGRVEDAVMNIHPHNTTLEIHASPEQPVTESVDVAEEPILTNNDSMEYLEAEFNKAVGQFSSMDPEQRPYIPKQRTSRKFAQIVHSLNSVILPKHLNHELDFTSLHCLIYSAAFTAAISNGTKLNLEENTSRSRCNKKPAWQRRIESRIEKYRLEIGRLTQYIAGNRTTRILKTVDEIRIKYSTHSQHEEPNTEPQHFLDTLKQKLNVASNRLKRYLACTLRKQQNATFSNNERQFYRNLGIDNQQNHEPDAPSAQQLQKFWADIWESPVQHKNDADWLQKISDTGHINQMNFENIPIDTFVQIIKRTHNWKAPGTDNIHNYWYKKLSSTHPFIHSKICHFIQSPHSMPSFITHGITYMLPKGSDSKNPANYRPITCLQTIYKIITGCISDIVYKHLDKYNVLAEQQKGCKRNSQGCKEQLTIDAVVMKQAQTKNRNIHTMYIDYKKAFDSVPHSWLIYVLQHYKIHENIISFLGTTMLQWQTKLKLLQASITTDPIKIQRGIFQGDALSPLWFCLALNPLSELLDHTQLGFQLKYNNSSHALSHLLYMDDIKIYASNITELVNLADITQMFSNDIHMQFGVDKCKIQSIHRGKVQNNSYLLDTGEEIEPMDEQSTYKYLGFHQSKQIHQKRAKLDLIDKFKVRLNKIMRTHLNSRNSIKAINTYAIPVLTYSFGIIKWSKSDLLKLQRIINTRMTTHRKHHPRSCVQRLTLPRQEGGRGLIDIQNLHNNIIENIRKYFYAKAEQSQLHSFVSKIDINLTPLHLNNTNLQANVVSKQQKIDTWSQKSLHGRHLADLSQEHVDKDASNDWLRRGELFPETEAFVIAIQDQVIDTRNYQKYISRIPNLVSDLCRRCHSSSETIQHITGACKSIVQTDYKHRHDQVAAIIHQNLAHKHSFIPFKIAYYKYKPSTVLENNLIRIYWDRTIITDKTIHFNRPDILIFDKINKSVFIIDIAVCNTHNLLTTYTEKMSKYIDLATEIKRQWQVDSVRILPIVISSTGVVPKSLQPNLNTLHMPKSTLPLLQKATLLNTCRLTRKFLSSPSSS

SEQ ID NO: 23264 - protein, 1451 aa, Schrankia costaestrigalis
MYAFQRTGSPIDPSIMEKRNIIIIIITPPGDHLVVVGGLTDTGYWNIAYNIFCRLNRTNILMIIYNNNTYPTNDPKTPKNLMESRPSKYNLRPLPGVRRGTSGADAGCHSMRTVGDGGLNRRVPLDKNTTAERSSSPSSIITLSEHSPFSDIPSPSSTHSLFRSSHSSPHTSPCSSPSSTITLRSTRSTAVVQEALATNPASTAGPSRARKRWTEDMNRFIWRTYLLITKCETTQLNSYLELLHQEFDNKFPDMQASRQRVGDQRRAILRRKLLTQTTFDEIFNEINQLINTHSTNHSLTRYTNTQLTTPMLTQYSTTSSRIRWSDEMNDDIIRFYFEVTKLETDKTAYRKKLHEIFIEKHPQLSHITEQRIADQRRILFNNKIYTNKINNIKAEVQQKLNEYNTELELDTLHVNTQTLNTTETIVDNTDHQNSMDTLATLTQIQPFTQTLSDPDFENQQISQIELEFNKALSHFSNTDPESRPFIPKQKLSRKFSQIIYHLNNIIIPKHLNHELDFLKLHTIIYSSAFAAAICNGTRLQLDNNTRINKQNRIPTWQRRIEEKIKKYRLEIGRLTQYIAGNRQPKILNTVNEIKLKYKTHSQYEEPNSVPQHFLDTLKQKLNAASSRLKRYMACTKRKQQNLTFKNNERQFYRSLGNSNNTNPSPTLPSSQDLHQFWANIWENPVQHKTNADWFSNLRDTTHINNMNSDCISIDTLIQIIKRTHNWKAPGTDNIHNYWYKKLTCTHPFIHNHINNFIQTPHTMPNFISHGITYMLPKGTDSINPANYRPITCLQTIYKIITGCISHLIYKHLDVHKVLAEQQKGCRKSSQGCKEQLTIDTIIMKQAHIGKRNIHTMYIDYKKAFDSVPHSWLLHTLHLYKIHPTLITFLSSTMLHWQTSLKLIQNNSTLTTGDSLSPLWFCIALNPLSELLNNTNIGFKLKHNNSCHTISHLLYMDDIKIYSTNNTQLTELADITQTFSTDIHMQFGVDKCKIHSIVKGKSQPNSYILNSGEQIEHMDEHNTYKYLGFHQSKQIQQKETKLDLTKKFKIRLNQILRTHLDSRNTVKAINTYAIPVLTYSFGIINWSQTDLLKLQRMINTHMTTHRKHHPRSCVQRLTLPRQDGGQGLIDIQNLHNTLVTKLRTYFHNKAENSELHKYVNAIDKKLTPLNLSNNISQPIITSRQQKIDIWSQKSLHGRHLADLNQPHVDKNASNEWLRRGELFPETEAFMIAIQDQVIDTRNYQKYIIRLPNLTTDLCRRCHSSSETIQHITGACKSIVQTDYKHRHDQVASIIHQNLAYTHSFIHKRVAYYKYKPETVLENNSVKLYWDRTIITDKTIHFNRPDITLLDKTKNIVYLIDIAVCNTHNLLSTFNEKITKYVDLASEIKRQWQVDNVKILPIVLSTTGVIPKSLSTSLNSLQMPFSTTILLQKAAILNTCRLTRKFLATSTSP

SEQ ID NO: 23265 - protein, 1140 aa, Lycaena phlaeas
MAWNIEMNEHVMRCYYSATRLDTQVVGYRPEMWRLFVLKYPELSERVTEQRIVDQKRTILSSKKISVMRLEQIKAEVADELQLSTGCNIIEVQCTEPESLVTIIPDTSNSQSERMQTQTNLTDDQSVNQIYGETYLRNLRAEFATALTEFLGTDPLQRPRIPRQNTSRKLAVAVQAVNAVILPKYFAASERSFETIHTAIYAAAVCVIRSIGGKIVIASKKLDTKSRTPAWEIRLTKGVDKLRSQIGHLTQYIKGNRNKKIMSTYQRLCTEVMTHTHHDPPNKTPEEILDTLRQKLALKANRLRRYRVAAKRKKDNFTFTRSEKQFYRQLRNSPMNSKEWTEKKLPCEADVENFWRGIWSKNVDHNQNATWIEKEEQRIKDIPLMASAVITADDVTRSVNKTLNWKATGLDGIHNFWLKKFTSIHEPLAECYTSFLRNPQQVPSYLTTGITYLLPKNNNTEDPAQYRPITCLCTVYKLLTSCISDKIYDHLQSYSVLAEEQKGCIKRSQGCKEQLIIDAVVSEQAYQRKRNICMAYIDYRKAFDSVPHSWLIMVLKLYKVNPDIVALLQQLMTTWETELTLSDNIKTRRIPIKRGIFQGDSLSPLWFCLALNPLSSILKQTGYGFNIKGSSQFKLSHLLYMDDIKIYASNSKELRGLLHCTEQFSNDIKMSFGLEKCKTLCVEKGKILPSEGYNLYTEGEMNAMVEGDTYKYLGLLQSLRADHKDIRTRVTKEYHRRLGTILKTGLNGKNLFKAINTFAVPVLTYTFGIVKWPQTEIEGVERATRVMLTKYRVHHPKSAVERITLPRSLGGRGMADIGRLCAKQIEVLQQYFCTQCTSPLHQAVASADDKLTPLDLLHFKNTVPHDSTTDSERVRIKINQWTSKPLHGRFPHELRQSYVDQEASSGWLTVGGIYAETEGFMLAIQDQVVPTRNYLKYIIKAEVEDDKCRRCHLVTETIQHITGACQALASREYTERHNDVAKVVHQALALKYSLLLETEVPYWQYQPKSVLDNGTYQLYWDRSILTDRPMPYNRPDIVLVDRTRSATWLLDIGVPNSHNINRYTEEKIKKYEQLSEEIRQIWQQQEVFVLPLILSNTGIIPKSLLENLVKLDLPVTLRYKMQKAVILRTTAIVRRHLNLP

SEQ ID NO: 23266 - protein, 1201 aa, Lycaena phlaeas
MRRFKRTNIPTQNSVEGARNNTPYPIPSPSQSPILSPTLPAASASRCVQPLTTKAGRPRQRMAWNIEMNEHVMRCYYSATRLDTQVVGYRPEMWRLFVLKYPELSERVTEQRIVDQKRTILSSKKISVMRLEQIKAEVADELQLSTGCNIIEVQCTEPESLVTIIPDTSNSQSERMQTQTNLTDDQSVNQIYGETYLRNLRAEFATALTEFLGTDPLQRPRIPRQNTSRKLAVAVQAVNAVILPKYFAASERSFETIHTAIYAAAVCVIRSIGGKIVIASKKLDTKSRTPAWEIRLTKGVDKLRSQIGHLTQYIKGNRNKKIMSTYQRLCTEVMTHTHHDPPNKTPEEILDTLRQKLALKANRLRRYRVAAKRKKDNFTFTRSEKQFYRQLRNSPMNSKEWTEKKLPCEADVENFWRGIWSKNVDHNQNATWIEKEEQRIKDIPLMASAVITADDVTRSVNKTLNWKATGLDGIHNFWLKKFTSIHEPLAECYTSFLRNPQQVPSYLTTGITYLLPKNNNTEDPAQYRPITCLCTVYKLLTSCISDKIYDHLQSYSVLAEEQKGCIKRSQGCKEQLIIDAVVSEQAYQRKRNICMAYIDYRKAFDSVPHSWLIMVLKLYKVNPDIVALLQQLMTTWETELTLSDNIKTRRIPIKRGIFQGDSLSPLWFCLALNPLSSILKQTGYGFNIKGSSQFKLSHLLYMDDIKIYASNSKELRGLLHCTEQFSNDIKMSFGLEKCKTLCVEKGKILPSEGYNLYTEGEMNAMVEGDTYKYLGLLQSLRADHKDIRTRVTKEYHRRLGTILKTGLNGKNLFKAINTFAVPVLTYTFGIVKWPQTEIEGVERATRVMLTKYRVHHPKSAVERITLPRSLGGRGMADIGRLCAKQIEVLQQYFCTQCTSPLHQAVASADDKLTPLDLLHFKNTVPHDSTTDSERVRIKINQWTSKPLHGRFPHELRQSYVDQEASSGWLTVGGIYAETEGFMLAIQDQVVPTRNYLKYIIKAEVEDDKCRRCHLVTETIQHITGACQALASREYTERHNDVAKVVHQALALKYSLLLETEVPYWQYQPKSVLDNGTYQLYWDRSILTDRPMPYNRPDIVLVDRTRSATWLLDIGVPNSHNINRYTEEKIKKYEQLSEEIRQIWQQQEVFVLPLILSNTGIIPKSLLENLVKLDLPVTLRYKMQKAVILRTTAIVRRHLNLP

SEQ ID NO: 23267 - protein, 1221 aa, Scaeva pyrastri
MVKMNTRNDNEQPLPEVVGAHSGATAGGVSMRTGGGRVLERAQAAQFATAESDPQNHPNTAVGALSGIPATTAAGLIRRRIKWSREMNIAVIRCFYKATNNQELDAHQQEHTIGYRHIMYTLFLQEYPELADRLTEQNLADRRRTIIARNYITAVEMTTIRDELNTPMTQNQATTQQQQTIDPNVTTNRTLNRPVTINNNSETETQTTVAEAIEEIPQQIEPTIDPLLQANFQTCLIEYTYIDPTCRPPIPRLTFSHSSRTKVKEMNQQILPILLNNEADLERIHLVLYCAAMAITKTLGIKEKRQNKNDRNLATSPPEPKWQKRIKSQIDKLRTEIGKLTAYQRTPNPKLEKKINKFMNGDNTRPITPNSLTDTIDTRTQKLLAYSQRLRRYIESDQKKKQNKLFSINESKLYKQISKDTRQDPITEQQYPPIAEAKRFWTDIWSTPKEHNRTATWLVQESRDHEHLQPMPNRVVSEKEITDVTRKLNDWRAPGPDQLQNYWLKHFTAAHKPLADAITLLLSRQIEIPSFLTIGNTHLIPKGETLPNPSKYRPITCLSTMYKIITKIICNRVYEHTQSNNIITTEQKGCARNTQGCKDQLIIDSVVVKQAITKCRNLSMSYIDYQKAFDSVPHSYLTEILSIYGVSNEITSFIANAMRSWRVRLLLNGETSQPIPILNGIFQGDAFSALWFCLALNPLSRMLNKAPYGYRIKGGATTTAITITHLMFMDDIKVYSNNKDSLHSQLNLVTHFSKDIHMKFGLNKCRSVHIKKGKLVTTEGFSINNEEQITDLSSEENYKYLGICQLRGIQHTKMKQQLTKKFQERVVKILRSQLNGPNKIKAINTWAIPLLTYSFGILTWSNTDIDDLSRLIRTKMTKHRCHHALSAIERLYLPRSQGGRSLLDIRTLHTNQVRNLREYFLSNNSLLYRTIAEADSSITPLNLSGELNLREIITHDQLIQSWKEKSIRGAHPYQLEQSHVDQTLSNNWLQKGRLFAETEGFFIAIQDKIIATKNYRKYILKENVVDTCRKCNRPGETIDHVIDGCTALAATDYLHRHNNVAKIIHQDLALQYKLIETKKPYYQYNPAPVLQNETHKLYWDRSIITDTTISANKPDIVLFDCRKKEIKIIDIAIPLTTNLIASYNTKVSKYTDLSLEMEKMYRGYKTTIIPLIISSTAVTPRCLPKHLEELNIKGEFTTIQKAVVLETCNITRRFLQNNNHH

SEQ ID NO: 23268 - protein, 1464 aa, Eimeria sp.
MDVRLAEKDADLPLHQSAEQPESQQQHVTGTEMSDRLQDAVEDNEDDLTTPRSFSSNQSDGGREEELNCEMGEPPPRETSPPRSPPALQLDPLVQMVGRDDAMMRVQGSIPSTELIECATQQQQGQIAQNVEPPTDTPEVQGSVSRESISPSRYVQRGWSALCSRGESLRDRIRRFIAERRSTKETNAAEEPPVHTSTETITQREIPLFVFGGSINTTTARKPPDKETTARKEVEPQPVCCPNCKRSFNNKRGLGNHLRRGANNPCAQLHAEIINEHQNVPAPNPSTTKRGRTNEGECSSSQRTQTRSPRRKQVRKHPPLPPGSPPWADPEPTDGPPTQAANNPPEPLIYVPSRAVCQSDRAISSAATEPSEEEVRETTLATYQNQQMPIENSAEEALHVNNLPAQNPERNQPITRRKPLRIPRLSAEAREKLQKVLEVLALETAAKVQGGAWEEVEAAIDSFTTQLYDAIWFADKPLTAANQHRPKNQQLPNSKHKEAPKARVSPRLAQAQDNVTKALHALREEEKAQQGKQNESSIEAKLKKRALERHLRTARRRLINILKEESARNLQTLYNKDRKKCVEQLLADEDQSTRQDCPIQLSELEAHFIKEHSEQKIDPTSQLAHEFLDPLAAAPEGAPEIDIHFTAEDVRAQLLKSNLKSAAGPDGIGYFVYKQFGDVLIPALSVIYNACSQHRKVPKKWKESVTVLIPKGGDPNSVRNWRPINLQDCIYKLYAALWATKITNWVIETGVASKSQKGFMPVNGCHEHLFLAQSILNSTRRGKKSLYMTYYDLKNAFGSISHQLIHVVLQAQRFPKHVREVITDLYQGASFCISTKEGCTGRIDNLRGVKQGCPLSPILFNLAIEPLLQRLAACDAGLELHTTDGKPNVKVSHMAYADDLKTVAASHSGISRLHQVVEDFLKWTGLQANPSKCATLGLRVYKGKQQPDPAKLLLHNEIVPVVKLGEAYKYLGIKDALETTVHHSQILRVMSKAKKDITKIFRSELLPWQKLDALRTFVMSRLDYHLRHCYPYKVHLIAFDRHLRAVLKAAFKLPKSTSSEVFHQPISNGGMGCTSLQTIATVTQIGHALQMLNSPDELIRSVAEGQVLEVIKRAFIYTPDDVNSDRTAILAFLNGKDIGCLRRRSNKADVRSLWSELPGNISMSKTQIVTGSNGCYVLQKANGTSLDQKQLIRSLKQYIAEWQRDVWKDKVDQGKSVAYQTADSNTFLRGPSRLKPEEIFFAVRARSAQLPTRAYLKRIGVSKVTRCRHCTADPESLAHVLNHCPHNLDSKIKERHNQALGRIAAAIKHSGVNRGKTLKIDSCPEDMETRLRPDIILRDERQKTITIADVAIVFEDYKKNSLGSARIHKEEKYQELKTHYEKHGYRVSVHALVYGSLGCIAQENRKVLTEELGIAERTAWALQRTISIDCIRGSYLIWGFHIADNGSRRARGGGRSRAGKPHTA

SEQ ID NO: 23269 - protein, 886 aa, Eimeria sp.
MKDRRKCVEQLLADGDQSRSQDCPIQLSELEAYFRDQHSEQSIDPTSQLAHEFLEPLAAAPVGAPAIDTLFTEEDVRAQLLKSNLMSAAGPDGIGFFVYKRFEGVLVPALTAIYNACSQHRKVPMRWKESVTVLIPKGGDPDDVRNWPPINLQDCIYKLYAALWASKITNWAIKTGVASKSQKGFMPVNGCHGHLFLAQSILNSTRRGKRSLCMTYYDLKNAFGSISYELIHVVLRAQRLPQHVREVITDLYEGASFCISTKEGCTGRIENRRRVKQGCPLSPVLFNLAIEPLLQRLAACNDGLELRTTDGKPPVKVSHMAYADDLKTVASTRKGISSLHQVVERFLQWTGLQANPSKCATMGWRVDKTKQQPDPVKLKLHNEALPVVKLGEAYKYLGVKDAIETTVHHKQILQVMSKAKKDITKILRSALLPWQKLDAVRTFVMSRLDYHLRHCYPYKQQLILFDRHLRAVLNATFKLSKSTASEVFHQPSYNGGLGCTSLQTIAAATQIGHAIQMLNSKDSMVQAIAEGQLLEVIKRAFIYTPDSDVSDPEAILAYLNGRDLGCLQRRSRKVDIRSLWSELPGSISASKTRIETGSDGRYLVKTADGATLDQQHLIRSIKQHIAGWQHDIWKEKVDQGKSVAYQAAASNAFLRGPTRLKSEEVVFALRARSAQLPTRAYLKKIKASKVSHCRHCTADPETLAHVLNHCPHSLDSKIKERHNKALQRIAAAVKHSRVNRGKTLQIDSCPTDMETLLRPDIILRDDKQKKITIADAAIVFEDYKKNSFGAARLKEEKYQSLKKYYEDRGYRVSVHALVYGSLGCIAKENRQVLTQDLGITDRTAWAIQREISIDCIRHSHRIWGFHVADNGTRRPRGGGRSRAHTP

SEQ ID NO: 23270 - protein, 805 aa, Eimeria sp.
MSAAGPDGIGFFVYKRFEDVLVPAITAIYNACSRHRRVPAKWKESVTVLIPKGGDPKIVKNWRPINLQDCIYKLYAALWAGRITDWAIHTGVASKSQKGFMPVNGCHEHLFLAQSILNSTRRGKKSLYMTYYDLKNAFGSIPHKLIHTVLQAQRLPKHVREIIVDLYRGASFCILTKEGCSGRIENKRGVKQGCPLSPILFNLAIEPLLQQLASCKEGLELRTTNGKPSVKVSHMAYADDLKIVANSRAGISSLHQVVKGFLQWTGLEANPSKCATLGWKVSGTRQQPDPVELKLHNEVLPVVKLGEAYKYLGLKDALETPVHQGQILRVMSKAKKDITKILRSALLPWQKLDAVRTFVISRLDYHLRHCYPYKKHLDLFDRHIRAVLKTTFKLSKSTTTEMFHQPTFNGGMGCTSLQTIATATQIGHAIQMLNCKDSVIQAVAEGQVLEVIKRAFVYTPDSEDSDRAAILAYLNGSDLGCLKRRSKKVDIRSLWSELPGSLSTSKTRIETGSDGSYLVKATDGSDLDQQHLIRSIKQHMAGRQRDVWKDKVEQGKSVAYQTAASNAFLRGPTRLKPEEVVFALRARSAQLPTRAYLKKIKASKVSRCRHCTADPETLAHVLNHCPHSLDSKIKERHNKALERITTAIKRSAVNRDKTLQVDSCPADMETLLRPDIILRDEQRKRITIADVAIVYEDYQKNSFGSARLHKEEKYQSFKTYYEKRGYTVSVQALVYGSLGCIAKENKHVLTHDLGLNERTAWFVQREISTDCIRQSYRIWGFHMADNGTRRQRGGGRSRAPTSLAA

SEQ ID NO: 23271 - protein, 769 aa, Patiria miniata
MSNSAPGKDWLEYRHFRQVDGAFRVTLEIFNRCLRESRVPSSWKTATTKLIHKKGDDTDPANFRPIALQSCLYKLLMAILSDRVTTWALDNDLISSSQKSARPGEGCYEHTFLLSTVVKDARRNQKNMYAAWLDLQNAFGSIPHDAMFTVLTEGLVSLVRDVYTDASTDFVTPTGRTAAVPIHSGVKQGCPISPVLFNLTLELIIRAVNTSATQDRSAPVVHGQAVPILAYADDLVILSRSSDGLQSLLTTASIMATKIQLKFKPAKCASLSLECRRGTKVRPLEFNVQDKIIPALTEEQHYRYLGVPIGLYRTDDSLETLVAKMTDDIQRIDSSLLAPWQKLDAIRTFVQPCLAYTLRAGDCAKKHLKRLRGQLVKTARKVCNLPTRATTNYIFADRRAGGLGFIDPNVDADIQIITQAVRMLSSPDDITRAIATGQLSSVVHRTIHRALTQEETDEFLSASMEGDFANSGNSGQASSLWSRARAAARRLKVTISSSLSGSVITKSTENRAAKSITAALRAQSRAHYTHRLLSLPDQGKVGQSLNQDEYMNSSSWMSSGSYIRFRDWRFIHRARLNTLPTNAAAQRWKPNTSPACRHCQHPQETLPHILNHCPPNMVPIRRRHNLVQQRIVSAVRHGRVFVDQHIPEDPNPRERPDITVVEGDKVTIIDVCCPFDNGRDALMTAAAAKETKYADLKQALVAAGKDVEVFGFAFGSLGSWLPSNERALRRLGIAKRFRTLMHKLLRIDAIKGSRDVYIEHMCGHRQYTD

SEQ ID NO: 23272 - protein, 1275 aa, Bathochordaeus stygius
MAAEAPSTPRGRQRLALRVTTPVANNNNSRSSTGRNLQGRNCTEGRERNNYDDDDGVNNNDDDNDNNNDNNNDYEICAEPTQTSSYDMTSSSVTMMSSVGKRRQKTRRQEVEGTLRPLTKKQLDGFISSLTVGCVVKLRVTQSVAPETFEAVVVELKRGEFTVVISQDDEEETYTFGSGIDPGDGTVVSADRLSSLPDMPVFNWSSRQLQNNPMWCIYYDGSSGVGGGVPSAAAIQVVHMLTGSTFSMARFHPSSSINVVEFTAQIAAIRISKVLPGTVAIIGDSKFAQDHLKGLTKVTKPHLKDYADTSRREWGVIDHERVSLHHMFGHNAGPLGCNPADDVAKICKNRARDADQIAEIVVFDSRGQISVTLPSKNDIFPGILLVSQSVSKKGRLTTTKGMRESDASAIILQDFKVTSVEDYLFVRRFPARHEPPREVRSQWASIQLAQIRRVLDASDEEARSEAMLEFMVLPNLWLPRNVPARRIITHFGQGAPFRIPKRKEGQHETSEKSQMQRLQEMVVRKAKDYDVKGALNILKSEAEVDSPMSFDDKIEKLQDKFPTQLSFGVNRTLPDINVPIFSNNTLQSVVKVFKRHASTSVDGWSKGMIQQAWRDKPDLVSAWAVLLSQILRSQFTPLVMDCLRAGRLVAIPKPDGGIRPISVTHFFMKLAGACSLKVSAAECQSWQYATGGKGVDGCRSIFLNLKKHMQQGKTVVKFDQKNAYGTMPRSLIRRIFDKTDTDATLTAYFKCMYLTDSTMAVYGPNGHRTIQMVEGVRQGDSTSSMMYCLALDIIVADIIRKAESATVVERGEVVVSPIVLSGVYAYMDDLTMVTDNAFDAVRLAEIAQQVFGDHRISLNMESRKSAAMIPEGDPYWTSPHIKQRFTNLQFTAQGYDDEFVVLGGDLCNKPRSFLERYAEKVRRFFNLLGRVGIHPAILFTLLRLCGVPKLVHLCSMMAPTPDLLEVCKIFDKCCYEHLNGPALMNGKLHADNAMIHDRNGAGLPCYEKRAHDLYESACRRIDENRKSQQVPPVELVTTAPRTPVPRGDSRVASDWMFWRGGDYDISNGDFVAALAIRLGILPERVTSMTCDCGKTSIHEVEFIDHVLVCARSTRFGFKARHDLLMRSVNRVVLEYGITYKSEPTSYTYTAGENRPDTTYWVQPPVVTDFTIVFPQVRTDFAAQDAAKRKIDKHEDAVKAAGHVFIPFAVETYGHAHESVHLLIRELANALLPIQRGEFTRDMLHATSVALATGRAQAIRSATAIQNAMHMRGLIA

SEQ ID NO: 23273 - protein, 1278 aa, Bathochordaeus stygius
MMAADAPSSPEGRRRLALRVMAPVTNTNNCTVDNSLQGRNCIDGRERMIDDNECSNRDDDDDDVLMDDDDDDKSRATTNAETPLLHSYDVGTVSPSIMSSVGMRQRKTRRPEFSEESRSSALPADQLIAFISSITIGCVVKLRVTQSAAPQIFNAVVRAVKKNEFTVIEVQDMAEEEFTFGAGMNPGDGIVVSAERITSLPNLPVFNWSSRLLLNDPMWCIYYDGSSGVGAGAPSAAAIKVVHMPTNVTFGMACFHPESSANVVEFVALIAAMRVARVLPDTVAIVGDSKLSQDLTLGRGKVSRPHLKDYVDISRNEWAQTDHERVSLHHMYGHNAGPLGCNPADGVAKACKNTARDVNQITEIVVSESRSQISVTLPPKIFPDILLVSKTVPRKGRPTTTSKSMRESDASAIILQDFKVTSVEDYLFMRRFPARHEPPREVRTQWAGIQMAQIQEVLTANSDESRTNAMLKFMVLPNLWLPRNVPARRIVSRFNMNTPFRIPKRKEGTHEVTEKSQTQRLHEMVVRKAKDYDVKGALNILKSEAEIDSPMSFDQKIEKLQDKFPKSLSFPVVSNIPSVNFPIFSDKILESVVRVFKRHASTGIDGWSKGMVLQAWQDRPELVSAWAVLLSQILRSQFSPLVMDCLRAGRLVAIPKPDGGIRPIAVTHFFMKLAGACSLRVSAAECQPWQYATGGKGIDGCRTIFLSLKQHMQQGKTIVKFDQKNAYGTMPRSLIKLVLSKPDTDESLKAYFRCMYLSASAMAVYGPTNHETIQMVEGVRQGDSTSGMMYCLALDIIVAEIRRRAEIATVMENGMKIVRPIVLSGTYAYMDDLTMVTENAVDAIRLAEIAHEVFKEHKIDLNMESKKSAAMIPPHDPYWTSPTLRQRFADFHFTAQGYDREFVVLGGDLCNTPRSFLERYAEKIRRFFRLLGRVGIHPAILFTLLRICGAPKLVHLCSMMEPTADLLTVCKIFDDCCFEHLNGPALLNGKLKSNSALIHDKSGAGLPCYVKLAPSLYSDACKRLEDRESREVPSVELVTTAPRTPVPRGDSRAASDWMFWRGGNYEISCGDFVAALAVRLRILPEQVNSMTCDCGKTATVEDEFIDHVLLCASATRFGFKARHEELMRSVNRVVREYGITYETEPATYTYSDGALNRPDTTYYVQPPVATDFTIVFPKLMTDVAAQDAAKRKTDKHGDAVKAKGHKFIPFAVETYGHAHQSVHLLIRELANSLLPLQRKEFARDMMHATSVALARGRAQAIRSAIVLQNREFMQCLRS

SEQ ID NO: 23274 - protein, 1278 aa, Bathochordaeus stygius
MAAEAPSTPRGRQRLVLRTGTPVDKDKDKDKDAGGSLQGRKCTEGREMHNNERNDGVNFNNEDVDGNNDDDAPFAATTRTYSSSYDTSTVTTDITMMSSVGKRRQKSARQDDTFESHSKPLSADQFQAFTSSLTIGCVVKLQVIQSAAPSVFEAAVRAVSMTQFSVVSFQDDDNETYTFGSGDEPGDGTVVSAERLSTLPNLPVFNWSSRQLINDPMWCIYYDGSSGMGSGVPSSAAVRVVHMPTKSTFDMARFHSASTSNVVEIVAQIAAVRIAKTLPGTVAIIGDSKFAQDHMKGVTKVVKPHLKDYVETARFEWLTVDQEKVSLHHMYGHNAGPLGCNPADGVAKACKIAARDVVQLAEIVVLDNRAPVSVTLPKDEIFPAIILVSPSLQAKVRRMTTTKSMRESDASAIILQDYKVKNVEDYLYIRKFPARHEPPREVRTQWAAIQMAQIQKVLNADNDDSRTSAMLEFMVLPNLWLPRNVPARRIVTHFGQATPFRVPERKGGSHGSADKSQIQRLHEMVVRKAKDYDVKGALNILKSEAEVESPMSFDAKIRQLRDKFPERLSSPIDRNLPDVKIPLFSNNTLESVLKVFKRHASTSIDGWSKGMVQRAWLDKPELVSAWSALLYQVLRSQFSPLVMDCLRAGRLVAIPKPDGGVRPISVTHFFMKLAGACALKVSAAECREWQYATGGKGIDGCRAIFHSLRHHMKQGRTVVKFDQKNAYGTMPRSLIRLVLGKPDTDATLMAYFKCMYLSSSAMAVYGPNGHKTVQMVEGVRQGDSTSSMMYCLALDLIVAEIVRRAESATIADGAVMVARPIMLRGVYAYMDDLTMVTDDAISAVRLAEIAQEVFSENNISLNMLSKKSAAMIPTGDPYWTSPLIQQRFKNIQFTAQGYDDEFVVLGGDLCNKPRSFLERYAEKVTRFFNLLGRVGIHPAILFTLLRLCGVPKLVHLCSMMEPTPDLLKVCKIFDDCCFNHLNGPALLNGKLRPGNELMHDKKGAGLPQYVMRASDLYDSACRRLEGRKSQQVPPVELVTTAPRTPVPREDSRVANDWMFWRGGNCDITEGDFVAALAIRLGILPERIKSMTCDCGKTSMHETEFTDHVLVCARSTRFGFKARHDELMRSVNRVVQEYGILYTTEPTTYTYPENVLNRPDTTYWVQPPVATDFTIAFPQIRTDVAAHDAAKRKTDKHEAAVKARGHKFIPFAVETYGHAHESVHHLIRELAHSLLPVQRGEFTRDMLHATSVALAKGRAQAIRSATAIQNNVRVIGLNA

SEQ ID NO: 23275 - protein, 1267 aa, Dendronephthya gigantea
MACPRTAKLECVVPFPITGLPCPICHKTQRDSSTFKTHARRVHQVQNPETPTTCSVCQQTFNTFRAGSAHYSRKHFDASSTPDGSPQRTLKTPPPAKTPEVAKVVASIINTHDHPNQPAKATPASTRKLIRQILENNAPPQSPRNTSPSTSAEPTPTSSTASPRPPSPEFPPPIPVNSRSTICPHPEREVRQLIRHYRRKPSKSSMPSPTSPSPPPTPTTNHLPSDTLQNINTNLDRLRATLQDVDSDDLSSQTPPRPNSLPIPEPLSDSPIPSTDNPMSPNNPSPTLFTPSQPSPPQQPSPHVPRTNNPSTNDVIPPTSPDEINMENHVQNTEDIQNFHDHWSTTFAAALSWNDFSEQCELFADSCRTLASEINSRNRPARATNPPQAQDPRRPPYGRRIANFNPTEARKIQGLYRHSKKRAARKILSTNNVTYTGSRDEAQSFFTDVFAAKDCNQDALTAALKETFPIPDSDNEALYDEMTQQEISQKLRSAANTSPGSDRVEYRHLKRIDPQAKILTLIFNRCLEQKDVPQPWKEAVTVLIHKKDDPNDVANFRPIALMSCIYKLFTSVLGRRLSTWAIQKGILSQEQKSARPSEGCYEHTYILQSLMGDARRNKRSLFTAWLDLRNAFGSVPHTTIQTTLLHLGIPQSFVDLVMNSYTNATTTVRTHQGDTDPIPLNAGVKQGCPMSAILFNLCLELVLRAIKNKAASLPNGTVSHFSTHISVLAYADDLVIVARNKPTLQKLLDVASSSATTLGLEFRPNKCASLSFINERRQAQRIATNTFIVQDGPIPALSREESYRYLGVPIGIIHRIDDLPSIIPRLIDDITAITKSLLAPWQKLDAIRSFVEPCLTYALRAGNPAKQSLEPLRVVLISSLRNICDLPKRSSQSYFFASKHAGGLAFQDPTKEDDVQAIVQALRILSSDDPTVSSIAQNELRSITSRATSSNATPALISEYLSGSTTNRCANINYTASSLWTRCRNACRRMKIAFHFSDTEPASITADDSAKIRSKSISQFLHRLIQQRAANTLMNLRDQGKVAQSLATDQYANGSTWSHTGLNMRFKDWRFIHKARLNLLPTNAVKARWSGSSPTCRHCADVETLPHILCHCRPEMVSIRSRHDKIVERLSNAIRFGEVTTDRAIANSNSRLRPDIVIEEDNQVLIIDVTCPFDNGATALDEAAAAKINKYDILKDHFTQQGKDCHVLPFVIGALGSWHPPNEQVLQRLGMTRSYRSLFRKLCCSDVIQGSCDIFRVHFGWDQNASE

SEQ ID NO: 23276 - protein, 871 aa, Dasypogon diadema
MDLGNPRSTELVNIAENAINGRYNHAQTLDWLHSQFPNTRRPRGPKISFPAPVIEGNSSERKRRKYAVLQGCFRKGFKTGARAVLDDTWLTGREGPSDEPVFQFWESILATPSSEYNPTDSVSSNELVKLWDPITVDEIKESDLDNKTSPGLDGISACMWNHLDPNMRALLYNTFMLLGDLPAELLQSRTIFVPKVSEGITPEKLRPISISSVVLRQFHKILANRFTKLYHHDNRQRGFLPMDGCGDNLLILKELLSNAQGVRRELHMATIDLTKAFDTVSHEAIIGRMKEVGCHEKFANYISGIYRGGNTVLQIGSNERVVPVGRGVKQGDPLSPQLFNMVLDSALSGLDGEVGYELNGQRINAMAYADDIILVSSTKRGLLKNLEMFNTRISKLGLEINLSKSASLSLVPDGRRKKVKVLEIPWVSLNGSLLPTISLLDQWRYLGVEFQGKSVKKNVSDIIQRLSHIDKAPLKPQQRVAVVRDYLIPKYIHSWVLGKITGGFLGKIDDRIRASLRKWLHLPHDTTRSFFHAPIKSGGLGIPKLQDTIPALLLSRLDKASLSANPLVSCIARQRLFVERKRYDSIIRRLNINFMHETSENVVGDLAPSTAEPQVHPINTVSANSQFLHKRVNAGRLVGRFWATQLHSSTDGKDLTRAADSHLSTFWVGHGRGMSGADYVRGIRLRVNALPSRARTSRGRTSDISCRAGCLQPETNYHVVQKCSRTHGGRVLRHDKVVVALEQAFNALGYVVLKEYRFTTHVGVRKPDLIVSRGDTAVVLDAQIVSGTNIVQTHRAKISKYKDIPSFTDLVGATTNCSNVTYGAITISWRGIWCSQSISHLRSLGFLLEPSNGSPLGYSVALTCAGKGSIL

SEQ ID NO: 23277 - protein, 709 aa, Alatina alata
MCNRLIPYIDREIAFWQRAYLNKRDRQELIYTLKSEIDDFKHMSTKFYSCFIDFSDAFGSVEHQFIFKSLEAYKIPLRYCIIIEDLYRYSNFQVLCEGGELSRNFYIIKGTKTGDPLSAFLFIVVIDCIFKPMVSVVMASQNLQNEKLINPIPVQGFADDIVLVTYDENLLQSMLQSSEHLMNEAGLVVKSGKCAVFYERRSGNNWYKGKNDRKPKIMIQNHILPVLRRKESYKYLGKSLSIDGEDKEQLIEVIEKYKDLVDKIVNCQLPLTLKVCALNNMALAKVIHHFCNSRLEDGMLKSVDDYLTNNVRKLFGLHQSTTRAAIFLPRMCGGIGVKWFSAVYRCVRVSFIVKMLNHPEESFRNVARSSLKLDMQKRGVRVTIAPNNFLGYEVTNEGYFASSTYYGCQTDWVELIRYCRKLGVMMQWRNEKAVVIINGQIYDDTSDLNKVLYNHVMTSLKSKVSTLNLQGPFLSLNNVDRKQSNTILYNWKTNDELVKFCVKARLNILPTYFTLHIWNRENDPRCRFCNHGTESMAHVMNGCQREFKNFYTKRHDRIVNHIFSSVKSRDRSYKAYTNKNMDSILPEWKNDITTVSNRKPDIVRVEPVRRMIEIIEVTVCYDLYFETAYLSKKEKYEPLSEVLTRLGFKVTVCVLCFGSLGCIRRNCFKDLRRYIDSKTECKEILKWCSISNIIAANYIWRKRCKKLLG

SEQ ID NO: 23278 - protein, 709 aa, Alatina alata
MCNRLIPYIDREIAFWQRAYLNKRDRQELIYTLKSEIDDFKHMSTKFYSCFIDFSDAFGSVEHQFIFKSLEAYKIPLRYCIIIEDLYRYSNFQVLCEGGELSRNFYIIKGTKTGDPLSAFLFIVVIDCIFKPMVSVVMASQNLQNEKLINPIPVQGFADDIVLVTYDENLLQSMLQSSEHLMNEAGLVVKSGKCAVFYERRSGNNWYKGKNDRKPEIMIQNHILPVLRRKESYKYLGKSLRIDGEDKEQLIEVIEKYKNLVHKIVNCQLPLTLKVCALNNMALAKVIHHFCNSRLEDGMLKSVDDYLTNNVRKLFGLHQSTTRAAIFLPRMCGGIGVKWFSAVYRCVRVSFIVKMLNHPEESFRNVARSSLKLDMQKRGVRVTIAPNSFLGYEVTNEGYFASSTYYGCQTDWVELIRYCRKLGVMMQWRNEKAVVIINGQIYDDTSDLNKVLYNHVMTSLKSKVSTLNLQGPFLSLNNVDRKQSNTIFYNWKTNDELLKFCVKARLNILPTNFTLHIWNRENDPRCRFCNHGTESMAHVMNGCQREFKNFYIKRHDRIVNHIFSSVKSRDRSYKAYTNKNMDSILPEWKNDITTVSNRKPDIVRVEPVRRMIEIIEVTVCYDLYFETAYLSKKEKYEPLREVLTRLGFKVTICVLCFGSLGCIRRNCFKDLRRYIESKAECKEILKWCSISNIIAANYIWRKRCKKLLG

SEQ ID NO: 23279 - protein, 1046 aa, Alatina alata
MKLVLRLKRAFKEALRSGKVKCVQKQIGRYHHDDFLQQPRLLQNEEWGHFEEKELRFRNHISSKKLVYSHFQCKDFEKWTDVVKILNGIFFKDGEFLYRRSDRRPWSVELLKFIKRILKTLPNDPSREEEGFSEIEKINRHLCYITSTLQTYFSKQKFTQQNERSAVSRKKLTHLWVQRRNKAIAVINNDGYWPKKETINISKEENETYYKSLSKYLCDNELVCHLSDHYFDTNKVEEDDCPLFSSHEIKNVIANCSNGKSPGPDGVTYEDIKQHWCDYSEDIKNIFNTVLINRKIPRDWKHALIQRIPKKTFSRNDLTTLRDISLLPTLYKVFSRCMCNRLISYIDREIAFWQRAYLNKRDRQELIYTLKSEIDDFKHMSTKFYSCFIDFSDAFGSVEHQFIFKSLEAYKIPLRYCIIIEDLYRYSNFQVLCEGGELSRNFYIIKGTKTGDPLSAFLFIVVIDCIFKPMVSVVMASQNLQNEKLINPIPVQGFADDIVLVTYDENLLQSMLQSSEHLMNEAGLVVKSGKCAVFYERRSGNNWYKGKNDRKPEIMIQNHILPVLRRKESYKYLGKSLSIGGEDKEQLIEVIEKYKNLVHKIVNCQLPLTLKVCALNNMALAKVIHHFCNSRLEDGMLKSVDDYLTNNVRKLFRLHQSTTRAAIFLPRMCGGIGVKWFSAVYRCVRVSFIVKMLNHPEESFRNVARSSLKLDMQKRGVRVTIAPNNFLGYEVTNEGYFASSTYYGCQTDWVELIRYCRKLGVMMQWRNEKAVVIINGQIYDDTSDLNKVLYNHVMTSLKSKVSTLNLQGPFLSLNNVDRKQSNTIFYNWKTNDELLKFCVKARLNILPTNFTLHIWNRENDPRCRFCNHGTESMADVMNGCQREFKNFYIKRHDRIVNHIFSSVKSRDRSYKAYTNKNMDSILPEWKNDITTVSNRKPDIVRVEPVRRMIEIIEVTVCYDLYFETAYLSKKEKYEPLREVLTRLGFKVTICVLCFGSLGCIRRNCFKDLRRYIESKAECKEILKWCSISNIIAANYIWRKRCKKLLG

SEQ ID NO: 23280 - protein, 709 aa, Alatina alata
MCNRLIPYIDREIAFWQRAYLNKRDRQELIYTLKSEIDDFKHMSTKFYSCFIDFSDAFGSVEHQFIFKSLEAYKIPLRYCIIIEDLYRYSNFQVLCEGGELSRNFYIIKGTKTGDPLSAFLFIVVIDCIFKPMVSVVMASQNLQNEKLINPIPVQGFADDIVLVTYDENLLQSMLQSSEHLMNEAGLVVKSGKCAVFYERRSGNNWYKGKNDRKPKIMIQNHILPVLRRKESYKYLGKSLSIDGEDKEQLIEVIEKYKDLVDKIVNCQLPLTLKVCALNNMALAKVIHHFCNSRLEDGMLKSVDDYLTNNVRKLFGLHQSTTRAAIFLPRMCGGIGVKWFSAVYRCVRVSFIVKMLNHPEESFRNVARSSLKLDMQKRGVRVTIAPNNFLGYEVTNEGYFASSTYYGCQTDWVELIRYCRKLGVMMQWRNGKAVVIINGQIYDDTSDLNKVLYNHVMTSLKSKVSTLNLQGPFLSLNNVDRKQSNTIFYNWKTNDELVKFCVKARLNILPTYFTLHIWNRENDPRCRFCNHGTESMAHVMNGCQREFKNFYTKRHDRIVNHIFSSVKSRDRSYKAYTNKNMDSILPEWKNDITTVSNRKPDIVRVEPVRRMIEIIEVTVCYDLYFETAYLSKKEKYEPLSEVLTRLGFKVTVCVLCFGSLGCIRRNCFKDLRRYIDSKTECKEILKWCSISNIIAANYIWRKRCKKLLG

SEQ ID NO: 23281 - protein, 1055 aa, Aulacorthum solani
MSDYNLEPRIVAGSQTAAGDNRVGAGIVGAVGLAAPAFKCQYCDKTYATKIGVGVHVSKAHKPEANDQIVVERKLLRWPPEEKRLLALAEAKLVFGGVTSGGINRELLKMHGGRTLESIKGRRRAQDHRDQVAAFLAGLQGTPQVVPSTSRETTLPITREVDPVSEGNDDSAAVGDQAGRLDRLSLAQGASQQAVVLLTAVSGHGVDKLLTAARHLVEESRNPGHAIAAWYTEYGKNARVKQRVSGGRLQSGTNPAAGHSDRRKPATTKALKAASYRRNVSEWRTDPGKVADRVLTGVDSRATMPRPSDMIKYWAPIIEGQDESQSPANQPEATAGTSWSHTVLDPITPEEVTESLPSAKTAPGPDGFPARLWRRLPCNLIAGIFNMFNAYGSLPEKLVKSRTIFVAKKGDPGCPGNYRPISIASIAIRHYHRILAKRLEKLSLVDSRQRAFRRADGVAENLFLLDSVLRDARSSKKGLCLASLDLSKAFDTVSHLSITSAMQGVGLDPRFVEYIRGTYRRSETFIQVSGQSSRGICPRSGVRQGDPLSPLLFNLVVDTGLRAIPEAVGYTLGRTVVNAIAFADDVILVAETPAGLRQACETFTKRLEVTGLRVNPAKCATLTLVPSGRDKKVKTVAEVYSLGGAPLPTLDVTSLWKYLGIAFAGSKIDVFDSTAYVTALNRISSEPMKAQMRVSLARDYLVPKFVHGLTFSATSVQRLRSLTYETRSAVKRWLNLPTSCPDAYVHSPTMAGGLGIPDFVRFVPKNRVKRLIRLENSEVPAVREAYRLHGRSALARSQRALEGHRLKRSHMQSLYESVDGSELKLCSEEAASVAWLRRPDGIPSSDFKDYARIRINALPSRKRVNRGKAGPVRCRACGAPSETLAHIVQSCPRTHGGRIMRHDCLVKRITGGLREKRYEVEEEYLYKLHGGNLKPDIVATVSDEVRGRISVICDVQVVSGNGSNLWHANKVAKYDDRADLKAAIRARHLSTEVQTVAATLSWRGIWVPESFRALRQLGLSRGLLEGLVTRALKGTLLSWHSFNSRTDTLTRVGVG

SEQ ID NO: 23282 - protein, 1046 aa, Rhopalosiphum padi
MPRIATASQTAGGSNRVGADVVGTVTSATSAYKCRFCTKSFATKIGVGVHVSSAHVQNANDQIDVARSKARWPVEEQRLFAALEAELVFNNIPPGQINGQLYEKHRGRTHESIKGRRKTLKHREMVATHLACLKGVPNVPITDTVPVESNSSDARPLPTDDDGSAAVNDRSTTVDRLSPALEAGQKAVDLLSTVSGHGADKLLLAARRLVEQSLDPCHAIAAWYIDYNCKNSRKKTKKGRRPGTIPGAGICAGRRPNKKALKTACYRRNVTEWRKNASSVAERVLTGVDQGALMPPASEMTKYWVPIIEGNFESRPQTPAVSFDTHGTPQNATVFDVITPEEVSECLPSKTTAPGPDGFPARLWRRLPCNLTAGLFNLFVAYGSLPPILVKSRTVFVAKKGDPQCPGSYRPISIASVAIRHFHRILARRLEKLSLVDERQRAFRRADGVAENLFLLQSVLTDARSSCKGLCLASLDLSKAFDTVSHDSIASAMRRVGLDQRFVDYIRGTYQHSETFLQVGGQATRGLFPRSGVRQGDPLSPLLFNLVVDGGLQEIPEAVGYTLGDTVVNAIAFADDVILLAETPDGLRRACEAFTDRLSVAGLMANPQKCATLTLVPSGRDRKVKTVDEVYTLSGIDLPTLNVTSLWRYLGVGFAGSRIDAFDSAAYVTALNRISTEPMKAQMRLCIARDYLIPKFVHGLTFSVVSVRKLRSLAHETRRAVRRWLDLPTSCPNAYIHSPTSAGGLGIPDFVLFVPRNRVNRLVRLENSSLAAVREAFRLHGRTALASARRSTEGHRLKLSHAQQLHASVDGSELKACSSESASVAWLRRPDGIPSSDFKNYARIRINALPTRKRVNRGRNGLAHCRACFAPAETLAHVVQSCPRTHDGRILRHDCVAKRIAGGLHDKGYEIEREYLYKLHNGNLKPDIVATISDETRGRISVICDVQVVSGIGTALWHANKVEKYSDRVDLLSAIRARHHSTDVRTVAATLTWRGVWEPSSFQSLRALGLSRGLLEGLVTRVLKGTLSNWQTFNTKNDMTTRVGVG

SEQ ID NO: 23283 - protein, 1057 aa, Metopolophium dirhodum
MTSNKEPRIVLGSQTAAEDNRVGAELAGVDDPATPAFDCQFCQRTFSTKIGVGVHISSAHREGANDQIVVERSKPRWPDEEKRLFALSEAKLVFDGVPSGGINRELRLKYQSRTSDSIKGRRKQQDHRDLVAMFLAGLQGNLVAPVAERVEMVPETNEVETQYDGDDGVEAADDRVRELDHLSAAQSGAQKAVDLLSTVTGHGALKLLTAAQRLVEQSIDPNHAIAAWYIEYGKNSRASRVRMPGGRFAAGTIPAAGHSARRRPATTKALKAASYRRNVTEWRKNPGTVADRVLTGVDQKATMPSAREMIKYWVPIIEGVDNSQPQSPVHQPQASEDTERYVTVLEPISPEEVTECLPSAKTAPGPDGFPARLWRSLPCNLIAGLFNMFNATSSLPEQLVKSRTIFVAKKGDPKCPGNYRPISIASVAIRHYHRILAKRLEKLSLVDSRQRAFRRADGVAENLFLLDSVLKDARKSVKGLCLASLDLSKAFDTVSHQSIASAMRGVGLDPRFVEYIRGTYRRSETVIQVSGQCSRGIQPHCGVRQGDPLSPLLFNLVVDKGLQAIPEAVGYTLGQTVVNAIAFADDVILMAETPAGLRLACEAFTKRLEIAGLRVNPAKCATLTMIPSGRDRKVKTVCETYSLGGTVLPTLDIASLWRYLGVTFAGNKIDVFDSAAYVTALNRISSEPMKAQMRLAIARDYLVPKFVHGLTFAVTSGRRLRCLAHETRRAVRRWLNLPTSSPNAYIHSPTSAGGLGVPDFVRFVPKNRVKRLVKLENSGVPAVREAFRLHGKSALAGARRALESHRLKPSPMQDLYASVDGSELKLCSEEPGSVAWLRRPFGIPSSDFKDYARIRINALPTRKRVNRGKAGPTRCRACGLVDETLAHVSQTCQRTHDGRILRHDCLVKRITGGLREKKYEVEVEHLYKLHNGNLKPDIVATISDETRGRISVICDVQVVSGSDPKMWHSNKVEKYNDRADLKAAVRARHLSTDVQTVAATLSWRGVWVPESFRALRSLGLSSGLLEGLVTRVLKGTQLNWISFNGRNLAVQARAGVG

SEQ ID NO: 23284 - protein, 1041 aa, Paraescarpia echinospica
MRAQTKSRWATEETAAMASHEAILRLRGVRTVNVGSGVRTLNINSELTTVMPGRSLEAIKGHRRRPEYRRMVDDYMAVHANDPDKQIPRRAHAAQTARGDDIEPEGSTGGRVTRARAARAALATTEIPTPIAPVTEGAGSQGQADTDAEILDTPPQLPNTPTALGIDGDESRADVPDWRGPIIEAILLQAGEANVCPELIEQVTLAPQGDQGCLQALIDRDLLGLLPPVERPGHRDNHQHGPPRQEARNTRAQRKADYARIQSLYRSSRAGCARVVLDGQWNGVPPTLPLREQVAYWKPLMETPSIVDSRLLPEGVDPAWGMIRPISISEVLRHLRSMKDGAAGPDHRRKGDLTALRAEALTCRFNIWMLTGIAPELFRHGITVLIPKSGESVEPNQFRPITMGSILCRLYHRILAERIETSYSISERQKAFRRGDGIADNIYILRCVLSDRQARCQSTGLLFLDVSKAFDSVSHNSIFLAAAAAGIPPPLVAYVRSLYRNTTTRIRVNGHLSEEVQIQRGVRQGDPLSPVLFNSVIDLTLRHMDPLIGVDVGGQMLSCLAFADDLVLFARTPRGLQSQFTTVERALERCGLSLNARKSSTIRLDVHGKRKMWACNPNEFIVTRTGEMIKALSIANGYKYLGNLVGAGRQSGTTMENLREGVSQLTKAPLKPQQRMFFLRCNLLPSLLHMAVLGRLSRGTLDFLDKISRAAVRGWVKLPKDTPIPFFHANQRDGGLAIPRLKLLIPVLRTKRMSRMMNSQDPVVRGVTELPSFRKDFRRWSEPRSAFGCPLWDGDGIQKAMGIGLHTSVDGRGLGGCREVGFVNSWMVDGTAFLTGRSFVNCVRLKGNLIHTALRASRGRPESNIRCDSCNATESLGHILQVCPRTHESRVSRHDGVNRYLNSVLEKQGYSTRMEPPIPTPAGFRKPDLVAWRDGKCYVIDTSIVADNYDLNAAHQRKADYYDKPAIRAWCAETADVSTEDVRTSACILNWRGTPSTRSVNELKEVGVKHYHWTTMSVRTLEGGARSIARFRASTCVRRTR

SEQ ID NO: 23285 - protein, 1233 aa, Chelonus insularis
MSHTNQHLSSSVDDRPPSALNRICRDHRHTTNTNINTYLQLYRMGETTVQPCEYAYTNEQRQFSTSSTSSTVVTSTSQSSVSRARWSEEDIRRLAAAELAASPQATRAINEYLHANVQLTSIRCLAAIKHLRLRERYKSVLQEMRANQPQTREAMAHTENVEEQSVSQLDSHPTSRSSEANASRTVSEIFDDIESNDAIRCPDCPRLFQSVRSLAQHKRHAHTSSPHLVISNPMELLHKCRYCTRSFSSPQGLGLHKKRAHPSQANEEIEVTDNTPWHDEDIRRLARAELRAPASKKKNLARYLHGLKLVSRNQASISYIRSTKRYKEVRECLSRELAINRLVSSELECLHIEDSSVSPTSTIISHSLPSDFMEYFDRLLSVLQAPDCRLTGVEHIIEAINVLKSGLNPESCILKWYDKCYPSTTPSQPPVKPSWRQPTSVSRSHLRRREYARVQSLWKRNRAKAAKLVIDGDCDDRLTAPSLATQEAFWRPIFERPSAPFSPVDEDVSTLPRFDDICGPISAQEVQKIKPQLRSAPGPDGLKPVDWVTRLEPVLVAAVMNIVICWGHVPALWRDSRTILIPKKSGSQDPALYRPISISAIFLRHLHRIIADRIISRVAFDRRQRGFIHADGTAENVAIYAAILDKARRDLKSAHVVSIDAQKAFDTVSHRALDHVFRKRGFSTLFTEYFMNLYAEANTYLEVNGERSAPIHPCQGVRQGDPFSAIAFNLIMDEVLTSLNPSTGFNLNGVLVSALSFADDLDLVSSTKDGMQDALNRIDQAMSRHGLSPAPQKCTAVSLILAGKVQKVKVITDSLFTINGQSIKQLGLEDSWRHLGVMFTIKGPCSPVIDIRSKLERISKAPLKPQQRLIILRTFLLPRFMHQLVLGKISYGLLNRLDKRVRKAVRFWLKLPHDAPSAFIHAPVPSGGLGVLSFASRIPELVLARIEAFKNSSFDAAVAASQSKWARDRINWTTGQSFPHNEWPDRLHLTTDGSELRQCRDTPLSHAWVYAQLGIPPGDWLEYLRVRINALPSRVRTSRGLRRESHNIWCRANCQKVETLYHIIQQCVRTRGGRTLRHDAIVDALARMLKDAGYETKAESRIPTSVGLRKPDLVVWKANKAAVIDAQVVSGNGDLNLKHLAKRCKYADNPDVVQSVAGLTGVPVSQVQFSSVTISWRGVWARQSASFLMSLGLSKRKLLSLTTRALRGSYLNFVRFNAMTTVANHNLWPHRIR

SEQ ID NO: 23286 - protein, 1233 aa, Chelonus insularis
MSHTNQHLSSSVDDRPPSALNRICRDHRHTTNTNINTYLQLYRMGETTVQPCEYAYTNEQRQFSTSSTSSTVVTSTSQSSVSRARWSEEDIRRLAAAELAASPQATRAINEYLHANVQLTSIRCLAAIKHLRLRERYKSVLQEMRANQPQTGEAMAHTENVEEQSESQLDSHPTSRSSEANASRTESEIFDDIESNDAIRCPDCPRLFQSVRSLAQHKRHAHTSSPHLVISNSMELLHKCRYCTRSFSSPQGLGLHKKRAHPSQANEEIEVTDNAPWHDEDIRRLARAELRAPASKKKNLARYLHGLKLVSRNQASISYIRSTKRYKEVRECLSRELAINRLVSSERECLHIEDSSVSPTSTIISHSLPSDFMEYFDRLLSVLQAPDCRLTGAEHIIEAINVLKSGLNPESCILKWYDECYPSTTPSQSPVKPSWRQPTSVSRSHLRRREYARVQSLWKRNRAKAAKLVIDGDCDDRLTAPSLATQEAFWRPIFERPSAPFSPVDDDVSTLPRFDDVCGPISAQEVQKIKPQLRSAPGPDGLKPVDWVTRLEPVLVAAVMNIVICWGHVPALWRDSRTILIPKKSGSQDPALYRPISISAVFLRHLHRIIADRIISRVAFDRRQRGFIHADGTAENVAIYAAILDKARRDLKSVHVVSIDAQKAFDTVSHRALEHVFRKRGFSILFTEYFMNLYAKANTYLEVNGERSAPIHPCQGVRQGDPFSAIAFNLIMDEVLTSLDPSTGFDLNGVLVSALSFADDLDLVSSTKDGMQDALNRIDQAMSRHGLSPAPHKCTAVSLILAGKVQKVKVITDSLFTINGQSIKQLGLEDSWRHLGVMFTIKGPCSPVIDIRSKLERISKAPLKPQQRLIILRTFLLPRFMHQLVLGKISYGLLNRLDKQVRKAVRFWLKLPHDAPSAFIHAPVPSGGLGVLSFASRIPELVLARIEALKNSSFDAAVAASQGEWARDRINWTTGQSFPHNEWPDRLHLTTDGSELRQCRDTPLSYAWVYAQLGIPPRDWLEYLRVKINALPSRVRTSRGLRRESHNIWCRANCQKVETSYHIIQQCVRTQGGRTLRHDAIVDALARMLKDAGYETEAESRIPTSVGLRKPDLVVWKANKAAVIDAQVVSGNGDLNLKHLAKRCKYADNPDVVQSVAGLTGVPVSQVQFSSVTISWRGVWARQSASFLMSLGLSKRKLLSLTTRALRGSYLNFVRFNAMTTVANHNSCYYLVK

SEQ ID NO: 23287 - protein, 1328 aa, Ephydatia muelleri
MEVASEDRAAEAASTAGESRDKRKLWTKEERTLFEEALKRHGPSSNIVLANAIGSKTKVQVGNYKRAFLLKNPNWLEVNRPPTIPANPLPPQLSTSSDDSDSQHVPAPSSPAHPSSPAIPQSAKPSRCAPVIDSPRSIHTQGETFISSVLPHASDLSLPTPSASPPSPSSPPRQVNVSQPPPLSTTIDICSFSPPPSPSSPSRHVNVSQSPPLSGIVNVCSLSPPPSPSSPSRHVNVSQSPPLSGVVNLCSSSQVSIPLPATPPLLNPYSLPSHASRLSNVPLNPDAHTFRPAAVSSPTMPHPPVPPPLSPRSLTPPLSPHIPNATPTTRSPSMPTAESDDINATLRAPFLQEVRSFSGRALNATEWEAFCQTLLRWADKLRVLTTSFQPRTRNPTTGWARRRNAHRRPPPPSLIEPQQETTPAPSNTNNAARVTNSHHRAPGRQRNVAKARELQRLYRTNPSVCIRKILDDTPPSYCAIPEAELVTHFTSTYSAARPLETAPPWLFSRKTHEDILDAPFSPLEIQHQLRRAKKTAPGADKLSYGNWKWADPEGAILSTIFNICRSAGKIPAEWKRSAVTLLPKGGDGSIIRNWRPICLQNNIYKLYSGAIARRIADWAISSGAILPSQKGFLPYDGCVEHSFVLRSLINDSRRRKRNILLAWLDLRDAFGSVSHELLLLMMSRIGLCGKTLEIVGDIYQDSTIAIKTGRDSFTPDIPQRRGVKQGCPLSPVLFNIALEGLLRHLAACNYGYRLNQSISINHLAYADDICVIADSRQQGQALLDRCTEFTTWAGLTFNPQKCGSLCSINNVSPIYVDPTPLHLNADNIPAMSWRQRYKYLGCPVGAESSHDLTAIRGSLLRDCEKIMTSHLAEWQRLDAFRRFLFPRLTYVLKVFFPGSAWCRKLDTNLRKWLKKAVCLPMRAKSSFLYTPQSAGGLGIPSCEDEMHVARVVQAFKFLADTRDPSIRLIARQQLESVVRKRTRTPKTSPVTDDDLAAFLVSPAPSQEGARGDVKSLWSSVRASLQFTNSCIRLSPESATLSCGNSEISWSKRKEANHLLKHATQSRHLTDLQEAPDQGRSSYSTSLAEASNYFTYTGAYLTFPQYRFALRARLNLLPTRTVQARCGKRITDTCCRQCHLVPETLSHLTNHCLPNMGMIRDRHNAVLERLIRAIPPSMGNKFKEQPLPETTGANRPDLTIISTDGNSAILVDVCVPFEGSPEALHEAAAEKISKYEPLRQTLLNRFQNVEVFPFVIGSLGSWFPPNDGVLKRLRIGHKYAALMRRLCVASAIAGSQNIWFHSACSRPGTNIPNRLQPHDPPIPPTLPHR

SEQ ID NO: 23288 - protein, 1029 aa, Ephydatia muelleri
MPHPPVPPPLSPRSLTPPLSPHIPNATPTTRSPSMPTAESDDINATLRAPFLQEVRSFSGRALNATEWEAFCQTLLRWADKLRVLTTSFQPRTRNPTTGWARRRNAHRRPPPPSLIEPQQETTPAPSNTNNAARVTNSHHRAPGRQRNVAKARELQRLYRTNPSVCIRKILDDTPPSYCAIPEAELVTHFTSTYSAARPLETAPPWLFSRKTHEDILDAPFSPLEIQHQLRRAKKTAPGADKLSYGNWKWADPEGAILSTIFNICRSAGKIPAEWKRSAVTLLPKGGDGSIIRNWRPICLQNNIYKLYSGAIARRIADWAISSGAILPSQKGFLPYDGCVEHSFVLRSLINDSRRRKRNILLAWLDLRDAFGSVSHELLLLMMSRIGLCGKTLEIVGDIYQDSTIAIKTGRDSFTPDIPQRRGVKQGCPLSPVLFNIALEGLLRHLAACNYGYRLNQSISINHLAYADDICVIADSRQQGQALLDRCTEFTTWAGLTFNPQKCGSLCSINNVSPIYVDPTPLHLNADNIPAMSWRQRYKYLGCPVGAESSHDLTAIRGSLLRDCEKIMTSHLAEWQRLDAFRRFLFPRLTYVLKVFFPGSAWCRKLDTNLRKWLKKAVCLPMRAKSSFLYTPQSAGGLGIPSCEDEMHVARVVQAFKFLADTRDPSIRLIARQQLESVVRKRTRTPKTSPVTDDDLAAFLVSPAPSQEGARGDVKSLWSSVRASLQFTNSCIRLSPESATLSCGNSEISWSKRKEANHLLKHATQSRHLTDLQEAPDQGRSSYSTSLAEASNYFTYTGAYLTFPQYRFALRARLNLLPTRTVQARCGKRITDTCCRQCHLVPETLSHLTNHCLPNMGMIRDRHNAVLERLIRAIPPSMGNKFKEQPLPETTGANRPDLTIISTDGNSAILVDVCVPFEGSPEALHEAAAEKISKYEPLRQTLLNRFQNVEVFPFVIGSLGSWFPPNDGVLKRLRIGHKYAALMRRLCVASAIAGSQNIWFHSACSRPGTNIPNRLQPHDPPIPPTLPHR

SEQ ID NO: 23289 - protein, 1290 aa, Ephydatia muelleri
MLKLNISVPSQTQFHCEVCTLNYTTLASLRRHLKTSHSRYTVEESFSCDVCGKLASTLKAIKAHQKSTHIGTAPQTATFDDDANSVSPCPYCPLRFPSKKSLGQHVRGKHMDEASSERAAASRDNDGKRKLWDPVEVDKFKEALRRLGPSSNVDIANEIGTRTCKQVGVFKRAFLLKNPTWLTDNRPSDTVPAPPLQQIPLGHVSSNLDLNLNLNTASSPSSPCHPAPPHATCTLSPPLSQSTTVCTDTPRADNAHTSRLSPPFVLCTPPSSPLHVPALSLSHAACTSSPPLLSQLAATCASLTPSSQLAATCASLTPSSQPVSISPSSHAMCIPIPHIPHIPASTPPPPVLPLPSLPLAAYSPSTAPSADPTNEDINASLRAPFYSDVRAFYGRVLQGAEWEVVCKTLLSWAHKIRLSLPTSQTSHPTTGWARRRHQGHRPPPSQSGYPDIPPSEDAAPRHPGERGHHRRASGRQREAAKASQLQRSYRFNPGACIRKILDDTPPTYCTIPEPELIAHFSATYAPPQPISEPPPWLVALDSQEDVLATPFTPSEVLHQMQRAKKSAPGSDKLTYANWKWADPEGVTLAAVFNICREAGHIPPDWKGSTVTLLPKGGDPTVVRNWRPICLQKTIYKLYSAAIARRIADWAMTSGSILPTQKGFLPYDGCAEHSFVLRSALNDSRRRKRNVVLAWLDLRDAFGSVSHELLLLMMSRLGLTGKTIDVVNDIYKDATVAINTGRDTYTTDIAQSRGVKQGCPLSPLLFNIALEGLLRHLGSCNHGYSISNSVLLNHLAYADDVCILAGSRMQAQALLDRCTEFTSWAGLTFNPQKCGTLCLRNSTSPVSVDPEPFHLGPAPIPALTWRQRYKYLGCPVGAMSSADLTAISTSYLRDCEVIMSSHLAEWQKLDAYRRFIFPRLQHVFRVFFPGSSWCRKIDTRARKWLKKAVRLPLRSCTGYLYTPQALGGLGIPSCEDHMHVARVAQAFKFLADTRDPAVRHIAVLQLSETIRKRLRVPLSTPVTTQMLEAFLNTPAPSQEGARGDIRSLWSSVRASLQFTRASIHLSDDSASLLCGEKKLTWGQRGKVNEMLNTTTQARHLTTLQQSPDQGRASFSTSLCSSSNYFTYTGAFLSFPQYRFVLKARLNLLPTRTVQMRSGTNIPDARCRICHQHTETLAHLINHCHYNLDMVRERHNAVLERVIRAIPPSLGEKYKEQPLPNTTGANRPDLTIVSPDGRSVILLDVSIPFEGCPEALQEAAQSKLTKYEPLRQQLLERYDTVDVLPGELVPCK

SEQ ID NO: 23290 - protein, 1290 aa, Ephydatia muelleri
MLKLNISVPSQTQFHCEVCTLNYTTLASLRRHLKTSHSRYTVEESFSCDVCGKLASTLKAIKAHQKSTHIGTAPQTATFDDDANSVSPCPYCPLRFPSKKSLGQHVRGKHMDEASSERAAASRDNDGKRKLWDPVEVDKFKEALRRLGPSSNVDIANEIGTRTCKQVGVFKRAFLLKNPTWLTDNRPSDTVPAPPLQQIPLGHVSSNLDLNLNLNTASSPSSPCHPAPPHATCTLSPPLSQSTTVCTDTPRADNAHTSRLSPPFVLCTPPSSPLHVPALSLSHAACTSSPPLLSQLAATCASLTPSSQLAATCASLTPSSQPVSISPSSHAMCIPIPHFPHIPASTPPPPVLPLPSLPLAAYSPSTAPSADPTNEDINASLRAPFYSDVRAFYGRVLQGAEWEAFCKTLLSWAHKIRLSLPTSQTSHPTTGWARRRHQGHRPPPSQSGYPDIPPSEDAAPRHPGERGHHRRASGRQREAAKASQLQRSYRFNPGACIRKILDDTPPTYCTIPEPELIAHFSATYAPPQPISEPPPWLVALDSQEDVLATPFTPSEVLHQMQRAKKSAPGSDKLTYANWKWADPEGVTLAAVFNICREAGHILPDWKGSTVTLLPKGGDPTVVRNWRPICLQKTIYKLYSAAIARRIADWAMTSGSILPTQKGFLPYDGCAEHSFVLRSALNDSRRRKRNVVLAWLDLRDAFGSVSHELLLLMMSRLGLTGKTIDVVNDIYKDATVAINTGRDTYTTDIAQSRGVKQGCPLSPLLFNIALEGLLRHLGSCNHGYSISNSVLLNHLAYADDVCILAGSRMQAQALLDRCTEFTSWAGLTFNPQKCGTLCLRNSTSPVSVDPEPFHLGPAPIPALTWRQRYKYLGCPVGAMSSADLTAISTSYLRDCEVIMSSHLAEWQKLDAYRRFIFPRLQHVFRVFFPGSSWCRKIDTRARKWLKKAVRLPLRSCTGYLYTPQALGGLGIPSCEDHMHVARVAQAFKFLADTRDPAVRHIAVLQLSETIRKRLRVPLSTPVTTQMLEAFLNTPAPSQEGARGDIRSLWSSVRASLQFTRASIHLSDDSASLLCGEKKLTWGQRGKVNEMLNTTTQARHLTTLQQSPDQGRASFSTSLCSSSNYFTYTGAFLSFPQYRFVLKARLNLLPTRTVQMRSGTNIPDARCRICHQHTETLAHLINHCHYNLDMVRERHNAVLERVIRAIPPSLGEKYKEQPLPNTTGANRPDLTIVSPDGRSVILLDVSIPFEGCPEALQEAAQSKLTKYEPLRQQLLERYDTVEVLPGELVPCK

SEQ ID NO: 23291 - protein, 950 aa, Platycheirus albimanus
MMARVEAEGTLGNERFINQFLLGRIPNRTLEAIKGVRRKPTYRDMVTNAILELNQQEDEIIPEPGPSGQFSAGEDIPILEAESHHNIKEKIRYLINNMGDAGEFQTTELLSIARQCLEGDDVTEGCSLWLRSVFPPPTRRTAANRRAQTTPRQSNAPRWRRRRKEYAKMQTLFRKDMGAAAKLALDGPVESELPTLANLIDFWKPILEEPSTQNIGESRRTTPSQDLDFIWKPIDLEEVNASNAALSSAPGIDGISPRQWRSVPARIRALFFNIVMANGGFPKDLMTSRTIFVPKKTGATEPGHFRPISISSVAVRQLHKIFASRLRASGLIDEKQRCLEDGCIDNTAVLATLLDDSRRRLKELHIASLDVAKAFDSVSHYAISEVLQRKGLPDAFTSYVMHAYQSSTTTIERNGERSDEIRVRRGVKQGDPLSSIIFCLVVDDILAAIPPDVGYDINGQLINAFAYADDIIIVTSTKFGMETSLDRVEKKAEEKGLLMNSAKCGALSIVPDGKNKTYKVVSRQQFKLRGGGIPQLLSSQEWRYLGIDIRPVGPRKAGNDLAPYMESLSKAPLKPQQRLKILRSFLIPRLYHRLVLSTTTMDRLKAMDVQIRTNVRKWLRLPADVALGFYHASVSDGGLGIPALATTVPGLILSRYGNLSASTSSAVRAVAAEHWITQKIEWSQKVLTKDGTLLETKDDRQKWWANRLYNSTDGAEIREAAKSSLSTAWINYGLFAVPGRDFIQNVHVRINCLPTRIRTTRGIRRSTAEIQCRGGCNVTETAAHVIQGCHRTHGGRIKRHNAVCKVIVAGLKDKGYRVEEEPRIPTTEGLRKPDMVASKDGRVIVIDSQVVSGATSINNAHERKKAKYADNRDLVNHLATKNNVTPSDIRFTTCTISWRGIWSSRSASDLQELGLSKKLLAGITTRVLQGSSTNWNRWNMMTGVVRTGVG

SEQ ID NO: 23292 - protein, 947 aa, Xanthogramma pedissequum
MMARNEAEGIRKKERFINQYLMEKIPNRSLEAIKGARRKPAYKELVVIAIADLNSRQQPNIATLQPGPTNSTTDTVQLADNLDIRDEIRALIDSMNGFQEFKTQQLITIAKDCIEGNDVSASCSTWLKSVFPPINQRRTMTRRITRRDTNTNIPRRKQRRRDYAKVQTLLRKDMGAAAKLALDGPVLSESPTIEAMTNYWKPILEEPSTQPTGEEAIIPPLSDLEYIWKPIKIEEVNNNNVPLSSAAGIDGISTRQWRSVPARIRALFFNIIMANGRFPDDLLMSRTVFVPKKTGASEPGHFRPISITSVTVRQMHKILASRLRSSGLVDEKQRCLEDGCTENIAVLATLLEDSRRNLKELHITTLDVAKAFDSVSYHAIAEMLKQRGLPTAFGDYVIQTYRRSTTILECEGMRSEEIKVQRGVKQGEPLSAIIFCLVIDSILAEIPSDVGYYINGRNINAFAYADDILLITSTKYGMQVSIDRVEKKAEEKGLLMNSLKCGALSIMPDGKRKTYKVMSQPQFRLKGGTIPQLKSSEEWKYLGVDIRPVGPKKPGHDLASFLQNLSKAPMKPQQRLKILRCFLIPRLYHRLVLATTTMSRLKTMDKQIRANVRRWLRLPEDVPTGYFRTTIADGGLGIPALATTVPGLILSRFKNLPTSTSSAVRAVAQERWVTQKLDWSQKVLTRNGILLETKDMRRKWWADCLYNSNDGIELREVAKTNLSTMWMESSVYAVPGREFIQNVHIRINCLPTRIRTSRGVRRATTDIQCRGGCSITETAAHVIQGCHRTHGGRIKRHNAVCKVLVAGLRDKGFQVVEEPRIQTSAGLRKPDIVAIKDGIVNIIDSQVVSGATSINSAHERKKCYYANNEDLVREVAERYDVRTSNIKFSTCTISWRGVWSSKSADFLKGLGLSEKLMAGITTRVLQGSSMNWNRWNRMTGVIRTGVG

SEQ ID NO: 23293 - protein, 951 aa, Melanostoma mellinum
MASIEAEGMRNNERFLNQFLHGRIPERSLEAIKGARRKPAYKQLVEAALNDQVDQQEDHFGSQPGPSDVSNGITPVTGNQDVCNIRRQILDLIANIENVEGFKTTELIRIGRECLEGRQVLGDCLRWIQSVFPPPAVRTQASTAARRRDTQHTNVRIPRWRQRRREYAKMQSLFKRDMGAAAKLVLDGEVLSQPPTLLSMTSFWKPILEQPSAQIPRVENDFLPNPALETLWRPIEGDEVSKSNISQSSAAGIDEISPRQWRSVPSKVRALFFNIIMASGSFPDEMLKSRTIFVAKKSGASEPGHFRPISITSVVVRQLHKILAYRLRTCGLIDTRQRCLEDGCTDNIAVLATLLEDARSRLKEVHIASLDVAKAFDSVSHHAIEEMLCRRGIPMAFTKYIMNIYVSSKTVLECEGKRSQEIRVQRGVRQGDPLSALIFCMIVDDVLSAVPNEVGYEIGGQRINAFAYADDIILVAATKLGMKIALERVEEKAGEKGLLFNNQKCGAVSIVPDGKNKTYKVLSQTQFRLRGGIVPQLLSSQEWRYLGLDIRPVGPRKAGRYLAPFMESLSKAPFKPQQRLKILRSFLIPRLYHQLVLSTITMDRLKVMDKQVRMGIRGWLRLPPDTPTGFFHAAISDGGLGVPALVTTVPGLVLSRFRNLSSSTSPAVRAVANEHWVSQKIEWSQKVLTKEGSLLETKDQRQKWWAKCLHDSNDGLELREASRTNLSTMWVERGSFAIPGKDFIQNVHVRINCLPTRIRTSRGIRRSAANIQCRGGCNVTETAAHVIQSCHRTHGGRILRHNAVSKVLTTGLKDLGFRVFEEPRIRTSEGLRKPDLIAVKGGRVNVIDSQVVSGATSLNEAHERKKGYYSNNADVVSSLASTHNVNPSDIRFSSCTISWRGIWSSRSAEFLQGLGLSKKLLAGITTRVIQGSSTNWNRWNRMTGVVRRGIG

SEQ ID NO: 23294 - protein, 1080 aa, Melanostoma mellinum
MEEVGLLSPLDCRVASPVILKTVGPKRNENDNNKISRCRPRSTEPTENVVVANPNPPPGVLAPIPEASPQPTNSEGEQTAIKCIYCTRTGFKSLRGLGVHVRSAHPDQRNEEISVDRKKKQWSDEELKLMARLEVQGIKNNERFLNQFLHGKMPERSLEAIKGARRKPAYKQLVEEALADIRDHHEDHLGPQPGPNNPSNASTPVTRNHNVCNIKEQIRHLIAEVEDIEGFKASDLRRIGRMCLEDREVLGDCLLWIRSVFPPPAERRQTNAGERRRDTQHTNVRIPRWRQRRKEYAKMQSLFKRDMGAAAKLALDGEVHCQPPTLLSMTSFWQPILEQPSAQISRLENDFHANPDLDVLWRPIEGDEINKSNISQSSAAGIDGISPRQWRSVPSKIRALFFNIIMASGSFPKEMLTSRTIFVAKKSGASEPGHFRPISITSVVVRQLHKILAYRLKSCGLVDTRQRCLEDGCTDNIAVLATLLEDARSRLKEIHIASLDVTKAFDSVSHHAIDEMLCRRGVPPAFTKYIMSIYNSSKTVIECEGKRSREIKVQRGVRQGDPLSALIFCMIVDDILEAVPCEVGYQIGIESVNAFAYADDIILVTSTKLGMKTALELVEEKAGEKGLLFNTDKCGAVSIVPDGKNKTYKVLSQIQFGLRGGSIPQLLSSQEWRYLGVDIRPIGPRKAGRDLAPYMESLRRAPLKPQQRLKILRSFLIPRLYHRLVLSTTTMDILKRMDKQIRTGIRGWLRLPPDTPTGFFHAAISDGGLGIPALVTTVPGLIFSRFRNLSNSSSPAVRAVANEHWVCQKIEWSRKVLMKEGSLLETKEDRQKWWAKRLHDSNDGLELREASKTNLSTMWIERGSFAIPGKDFIQNVHVRINCLPTRIRTSRGIRRVAADIQCRGGCNVTETAAHVIQSCHRTHGGRILRHNAVSKVLATGLKDLGFRVYEEPKIRTTEGLRKPDIVAVKGGRVNVIDSQVVSGATSLNEAHERKRCYYSNNAGVVANLASTHNVNPSDIRFSSCTVSWRGIWSSRSAEFLQGLGLSKKLLAGITTRVIQGSSTNWNRWKRMTGVVRRGIG

SEQ ID NO: 23295 - protein, 1170 aa, Limonius californicus
MIFPCVCGKEFATESGLKQHIRRRYCRGPPEQRINEKVCPICSIEFKTYQGVRQHMRLTHPEQYNRELEDQFDNPIRDANAWSDDDLNALARAEVQFTGRFINKHLHSLFPMRTLEAIKSRRRKDDYKDLINQVSNNTLNPIVDIEEEVEEEDRPVSPTRELEIINENLISPIPSTSKGHPTPLRRRLRSGRTFGSPHAGGSNAGVVVSEVRSPMGPGPNSVPSVPSSASSPESLPTGNYSDREEDSTFSEPINNNNMQHEGPRVTQTGRHQRTPPDQGQEPVAGGDVSINISVSEGYRDIRDFLEEYFHSKEGWSPQDQALYTAITSNSVANGRDIILLRLEGWVEDLIHSLNPNANRRKVTTRPTERIQGTGRRSDERAKVYKTVQQMYFNNRKELAECIIDDKPLASPENFPDFDDVRAKFSRLFSDISPLDNEPVGDFKNSDGRIKTFLPITEAEIADGIASTKSNACGPDRIRLSQLKGEIMLRKMVLMFNTMLLFGVIPKGLKASRTILIEKGGDPKEVDNWRPITISSTLLRLVNKIMARRLAALPIHENQRGFRQVDGVLLNTITIETIIKTCRKKLKPYSILSLDLSKAFDRVSHRAIERALRRFNVEEGTARFILEGYRGTSTTIHMGTFSSPPIDITRGVKQGDPLSPILFNLIIDELVSQLEEKDDGVKLSDHLKVSVLGYADDLVLLAETPKSARKQLGHAIQFFENRGLTLNATKSVALATGVVQGKKILFTHTKPLFYYGGKSMRQLGPVDLLKYLGQKYSYLGQTRPCIENLNSQLQRIRAAPLKPAQKLQIIKQYLIPRYIHHLQSPRITDKLLRYVDRKIRMYTRAILHLNRTSPDAFIHANTRDGGLGIMSFRSAIPMIIRSRIVNIAAKADRLTAAVLALPDAEKLWDRLSRSTAARGMNKTRVRQKWCQLLDASYSGNGLRQGEREQTSGYWVDNPPAYWGGREYIDAVLLRGNLLPTKGIPSNPPHERRCRAGCNKSESLSHVLQGCPATHWHRIKRHDRVCDRLAKLVGNKGWIVQQEPRLRLEDGTLRKPDLVFIRGDRVVVCDVAISWEGPNLLSQAHEQKVGYYNTNLMKRKIQNTYPDKEIVVSALVIGARGIWSPSNDQISQVLGLTMPERKSLVSNTINGSVLIHRDFMRLVYRTTQRPRN

SEQ ID NO: 23296 - protein, 1014 aa, Bombus opulentus
MRSMPHELWNPKGLSTHERHAHPALRNAKRRGTDPPNKVWTVDEINLLRELNKKFRDHRFPNIKISKILTSKTIDQIKYQRRKLRAAGEAVNPQEIATGTEGGCDLVDPGNAYFKTPEVSINENLESTNQWRLSIKNFIETQTDVPPVLSEVNDRLKSIWLNQGYGEALTKELDILIEKLYGAIKQHNNMNSYIESDKKPQNRGNPNKRNNRNARKRFTYARCQDIFKECPKRLADVVINDDRAYLEPARQPPEAAEIKRLYEELWGQTGSSNVPITNTGVSQLPLNDYFSPISPEEVAERIKRLRKKAAAGPDGLTKEHLTIPGLPAILAKIYNICLYHSCYPSIWKSNRTTLIPKINKPSSRVENWRPITIGPIFGRIFSSILDRRIRNGVVLNLRQKGFTSESGCKINIDLFNSELNHSKRENGGIFTIVDISKAFDTIPHSAITPCLAKKGVPTPIIELINQMYTNNKTIIRANGKMGVEIEILRGVKQGDPLSPLLFNLCLEPLLDSIEESTRGIKVNNERSIPVLAFADDIVLLGANQGEPQRQVDILHEYLKGLRMNISLEKSQTFQIVTKRDTWFVKNPEIRLDNQDIPTVDPAEAFKYLGAKMGPWRGVHCGVVVPEILSVVRRVRKLSLKPCRKIELLTKYVLPRYIYHLLINPPGDTVLRLLDSEVRQEIKAIYHLMPSTATRFFYAPKNLGGLGIPRFEHIIKLGVLKNALKIKNSIDPAVSGLFNDKLDKHLKKIAKSLRINWPASLEDIEKARKRLKGSHIQQWGELRSQGQGILDFAKNKSGNVWLHEYNLLKPSRFIDALRLRTNTFGTRTVLARADKRTEVACRKCRVQPETLGHILGLCQYTKGLRIKRHDEAKLTLADSLRKNNEVFVEPTLNVDGNLYKPDLVVKNEERILVVDVTVRYENKDYLSKAENEKVDKYLPCLNHLKSKFKIDEGQVLPVVLGSRGAITPNTEKQLKQLGVSNATIKTVVMNVLRSSIEICNTFLDTILKMDIILFI

SEQ ID NO: 23297 - protein, 1126 aa, Bombus hypnorum
MQGDRNEASDAASPGPGGAVADSSALEGTIVDDLAMSLDTIFDISIPIVGNQVACPVCEEREVHLFFMNLTDLGKHLDQHHTTARIQWSCKECGKGFSKLHGARCHLPHCSGGPSQRPEGAFKCEACPMSFGTQRGLSTHERHAHPAVRNVKRRGTDPPEKKWTFQELALLRELCETYKDHRHPNKKISEILTSKTIDQIKYQRRKLRMLGEDPQEAAPATEGGCDPVDPGNACFEEPEISGNNQIESWKLQLELAIMTQTEVPPVLRWVHTRLINTWVTLKGNREALESGINEFIKVTLYGAIKAFNKDKIKENKCKEKFFKRIGHQKKSKKRNAKKRYSYARCQELLVENPRRLADAIVNNDQAFLQPAREPPDAEEVRRLYEDLWGKTGPVDAPVPGSRASELSLSEFFPPIAVEDVAERIKKIRMKAAAGPDGFQKEHLLIPGLPIILAKIYNILCYISYFPPIWKENRTTLIPKANKDSSLVENWRPITIGPILGRIFSAIIDGRIRRGIVQNPRQKGFTADSGCKINIDLLSAALDYSKREKGGVFTIVDISKAFDTVPHSAIKPCLVRKGVPAPITELISKMYENIKTRIRAGNNMGVDIAILRGVKQGDPLSPLLFNLCLEPLLELMETQTSGININETRKIPVLAFADDVVLLGADVGEAQRQVDMLDKYLEDFGMNISRGKSQTFQVVSKRDTWFIEEPKIRLRENTIPTVDPGEVFRYLGAKMGPWKGVHCGIIVPELLSVMRRVRKLSLKPCQKFDLITKYILPRYIYYLLVNPPGDCVLKLLDSEIRQEIKAIFHLMPSTATGFFYAPKSWGGLGLPRFEHIIKLGTLKSAIKIKNSVDPAVSSLVDDQTEMKLKKTANSLRINWPASIEDIEKARKRLKAAHIRQWADLRSQGQGVFDFSRNRIGNAWLVDNKLLKPSRFIDALKLRTNTFGTRTVLARADKNIDVTCRKCRAQPETLGHILGLCQYTKGLRIKRHDEAKMTLAEALRKKNEVFIEPTLKVGGILYKPDLVVKNEERVLVVDVTVRYENKDYLSKAEKEKSEKYRPCLEHLKAKFNVSRGQVIPVVLGSRGAVPLFTERCLKLLGIGDQTIKTMALNVLRSSIELCNIFLDE

SEQ ID NO: 23298 - protein, 1027 aa, Bombus sylvestris
MNNKQASDAAPLGPGGAVADSSASEGTIVDELATSPDMTFKIMVPLVGDRVGCPICEARETHLFFMSLSDLDRHLDQDHLNAGVQWGCRCGRSFPKLHGAQCHLPKCSGTNKKTEGGCDPVTPGNASPQPEISGYTATNDNNESEWRLQLIRSIETPTEVPLVLKEVNDRLQNMWRHELGNEEALTREINNLIETHLYGAIFKNSEVEKRKQKERREHKNKPETATGKSNKQKSRNSRKRFSYARCQELFHECPKKLADVVINNDRTLLEPARQLPEAADIRRLYSDLWGRADAIVAPPRSGGASALSLSEMFPPISAEDVMARINKIKKKTAAGPDGLTREHLLIPGLPAVLAKIYNICCFFSYYPAVWKNNRTTLIPKPNKNSSQVENWRPITIGPILGRIFSAILDGRIRKGIVLNLRQKGFTSENGCKINTELLSAALDHSKRESGGIFTIVDISKAFDTIPHSALAPCLARKGVPAPIIELIQNMYKNNITTIRANGNIGVEIKILRGVKQGDPLSPLLFNLCLEPLLEILEEQTSGIRINSNHKIPVLAFADDVVLLGANKREAQCQVEVLHKYLGSLNMNISRDKSRTFQVVPKRDTWFVDDPQLCIDGNYIPKIDPEEVFRYLGAKMGPWKGLHCGIIVPELISVVRRVRKLYLKPHQKIELLEKYVFPRYIFHLLTKPPSDSTLKLLDSEVRQEIKGILHLVPSTTTGLFYAPKAYGGLGLPRFEHLVKLGTLKSKLKMKESKDPAVSSLVDISEEAKLKKMANSLRINWPATLDDIDRAKRRLKCAHVKQWSELKNQGQGVTDFIRSRTGNVWLKDQNLLKPSRFIDALRLRTNTFGTRTVLARADKVLDVSCRKCRAQPETLGHVLGLCQYTKGLRIKRHDEVKSILADRLRRKNEVFVEPTLKVGSNLYKPDLVIKNEERVLVVDVTVRYENKDYLSKAEKEKVDKYKRCVEYLKEKFKVGEGEVLPVVLGSRGAITPNTEQNLKVLGINKQDIKTIVLNVLRSSIEMCNIFLDG

SEQ ID NO: 23299 - protein, 1079 aa, Bombus sylvicola
MSFDVMIPIVGTQVACPVCQEGGINLFFLSLSDLGKHLEQHHVTARIQWRCHDCGKGFSKLHGAQCHLPHCSGPSEISEGPYKCEACPRSFPTQRGLSTHERHAHPAVRNVKRRGTDPPKSKWTFQELALLRELCETYKDHRYINKKISEVLTNKTIDQIKYQRKKLIEEDPSSQVATQATEGGCDPVDPGNAHLEEPGINGDIDEWKLQLERAIEIQTEVPPVVRWVHTRLMTVWGTLKGDREALGSGINEFLKTLYGAIELYNKDKDINIEKEKPIIRQKKRNRKNAKKRYSFARCQELFLENPKRLADVVVNNDQAFLQPARDPPDAAEVRRLYEDLWGRIGPTNAPVPGNRAPELSLCEVFPPIAVEDVEEKIKRIRKKAAAGPDGFQKDHLLIPGLPIILAKLFNMLCYISYFPSARKENRTTLIPKANKPSSLVENWRPITIGPILGRIFSSIIDGRIRGGITLNPRQKGFTAESGCKINIELLSAALDYSKKEKGGIFTIVDISKAFDSVPHSAIEPCLARKGVPAPIVKLIKNMYQGSYTTIKTRNNMGVKIEMLRGVKQGDPLSPLLFNLCLEPLLELIQEKTSGINVNKTRKIPVLAFADDVVLLGADDGEAQCQVDLLCQYLNGLGMNISREKSQAFQIVSKRDTWFVKDPELKIGENIIPTVDPGEAFRYLGAKMGPWKGIHCGIIVPELLGVMRRVRKLSLKPCQKLDLITKYIFPRYIYHLLVNPPGDCVLRLLDSEIRQEIKAIFHLVPSTATGFFYAPKSWGGLGLPRFEHIIKLGTLKNAIKMKYSNDPAVSGLVDEHGELKLKRIANSLRINWPASIEDIEKARKTLKAAHIKQWAELRSQGQGVLDFSRNKTGNIWLREYELLKPSRFIDALKLRTNTFGTRTVLARADKNIDVACRKCRAQPETLGHILGLCQYTKGLRIKRHDEAKTTLADNLRKDNEVFIEPTLKVEGNLYKPDLVIKNEERVLIVDVTVRYENKDYLSQAEKRKIKKYKPCLEHLKGKFNVGRGEVIPVVLGSRGAITPSTEIRLLQMGINKKVIKTIVMNVLRSSIELCNIFLDE

SEQ ID NO: 23300 - protein, 1126 aa, Bombus consobrinus
MDTEKQSTASDAASLGPGDAVADLSAREGTSGDNPATSTVKILVPLMGDQVACPVCERREIHLFFMTLGDLNKHLDQHHLDARIQWGCNFCEKSFPKLHGAKCHIPKCSGTTQSKNLPHKCEACPMSFGTQRGLSTHERHAHPAVRNVKRRGADPPSKIWTEEEVALLRELEEIYKNHRFPNVEISKILTSKTVDQIKYKRKQLKQASEDTSPQRATQETEGGCDPVISGNARNIAPESSGININESTQQWRLDLINAIDQPVEIPPVLREVYDRLHEILVGYRGSRETLGLKINGLISTTLYGAIKENIKDAALTKPLGKSRVQANRKNKVNRNSRKRYSYARCQELFLECPKKLADVVINNDRAYLEPTRQPPSEETVRRFYEDLWGQTGPSSPPIPSSGISELSLDRFFSPITAEEVGERINRIRKKAAAGPDGIIKEHLLIPGLPALLAKIYNICLYCSYYPTVWKDNRTTLIPKPNKPSSLIENWRPITIGPILGRIFSSILDGRIRRGVVLSLRQKGFASENGCKINIDLFNSALTHCKRSKGGIFTIVDISKAFDTIPHSAIRPCLERKGVPAPISELIENMYINTKTVIKAKDGMGVEVSILRGVKQGDPLSPLLFNLCMEPLIETIEEQTSGVHINDNRAIPILAFADDIVLLGKDKREAQHQVDILHGYLRDLGMKVSVEKSQTFQVVAKKDTWFIDDPKVWLENKDIPAVDPDEAFKYVGAKIGPWKGAHCGVIVPEILSMARRVRKLSLKPCQKIELLTNYIFPRFIYHLLVNPPTDSVLKLLDNEIRQEVKAILHLMPSTATGFIYAPKSCGGLGIPRFEHIIKLGILKSAINMEKSIDPAVSGLIDEETNRKLKKIANSLRINWPATLADIEKARKRLKYEHIKQWAELRSQGQGAYDFARNKAGNVWLDQYNLLKPSRFIDALRLRTNTFGTKTVLARADKKIDVTCRRCRAQPETLGHILGLCQYTKGLRIKRHDEVKSILAQQLRKKNEVSIEPTLRVGSNLFKPDLVVKNEERILVVDVTVRYENKDYLRKAEKEKIDKYSSLLHDLKNKFNIGDGEVLPVVLGSRGAITPNTLNNLRKLGIDPKNIKTIIMNVLRSSIEMCNIFLDH

SEQ ID NO: 23301 - protein, 1129 aa, Bombus sylvestris
MNNDKASDAASLSPGGAVADSSALEGTIDDDSAMSPVTILVPLVGDQVACPVCERREVHLFFMSLTELGKHLDQHHLETLIKWKCSSCEKSFPKLHGAKCHLPKCSGATQPKDLPHKCEICPMSFGTQRGLSTHERHAHPALRNTKRKGTGKTKTWTVEEVALLKELDAIYKDHRFPNSEISKILTTKTVDQIKYQRRKLKATNEGEDLQGATQVTEGGCDLVTSGNARQHVPESSDIINDESTQCWRLTIAKAIEENIEVPPVLREVYDKLKQLWNDHRGNEEALGIQLNQVICTSLYGAIEKNYLNNKNKETAKFKQAVNNNNRKKNTSSSQNRRNARKRFSYARCQELFNECPKKLADVVVNNDNAYLQPAGQLPNADEVRRLYDDLWGQSGPSSVPIAEQRASELSLNDHFTPVTAEDVGMRIARMRNKDAAGPDGFKKEHLLIPGLPAIMSKIYNICWYSGYFPTIWKENRTTLIPKANKPSSLVENWRPITIGPVLGRIFSSILDDKIRRGIVLSPRQKGFTSENGCKANVVLLSAALDYSKRNNGGIFTIVDISKAFDTIPHSALKPCLARKGVPAPIINLIIKMYESNRTKIKAANNIGVEINILRGVKQGDPLSPLLFNLCIEPLIETIEELTSGVNINQSHKVSILAFADDIIVLGENEREAQRQVHILHGYLRDLGMKISGEKSLTFQVVAKKDTWFIQDPKIGIENKMIPTVDPDEAFRYLGAKMGPWKGVHCGVIVPELLSVVKRVRKLSLKPCQKLELLIKYIFPRYIFHLLINPPGDGVLKMLDSEVRQEIKAIFHLMPSTATGFFYTPKSWGGLGVPRFEHIVKLGTLKNAIKMKTSIDPAVSGPIDEAAEAKLKKIANSLRINWPATLEDIEKSRKILRASHIKRWAELKSQGQCVIDFSKNKAGNVWLEEHNLLKPSRFIDALRLRTITFGTKVVLARADKNMDVTCKRCRAQPETLGHILGLCQYTKGLRIKRHDEVKSILVDNLRKNNQVFVEPSLRVGSDLFKPDLVVKNEERVLVVDVTVRYENRDYLQKAEKEKIDKHANVLQHLKEKFKVGEGSVLPVVLGSRGAITPNTLKILKSLSISDKDIKTIIMNVLRSSIEMCNIFLDY

SEQ ID NO: 23302 - protein, 1133 aa, Bombus vancouverensis
MFEENNRINIMVNKDIESASDAASLGPGDVAADSSALEGTSVDDLASSPDTIDIMVPIVGDQVACPVCQKREIDLFFLSLSDLGRHLEQHHVTARIQWRCKDCGKGFPKLHGARCHLPHCRGTSQGPSGSYRCETCPMSFGTLRGLSTHERHAHPAVRNVKRRGTDPPEKKWTAEELAQLRELWEIYKDHKFPNKMISEILTSKTIEQIRYQRKKLRLIGEETSSQEPTQVTEGGCDPVDPGNACFEEPGVSGLEYEQWRLQLESAIMTQVEVPPVLRWVHTRLMTIWVSLKGNREALESAINEFLEFTLYGAIKEINSKKRASSVKNKRIGHQGKKKGNRNARKRYSYARCQELFTENPRRLADAVINDDRAFLQPARDLPDAEEVRRLYEDLWGQTGPVEAPVPGSRASELSLCEVFPPIAVEDVAEKLSRIRMKAAAGPDGFQKEHLLIPGLPTILTILYNILLYCSYFPPIWKENRTTLIPKPNKSSSLVENWRPITIGPILGRIFSSIIDGRIRRGIVLNPRQKGFTAESGCKINIDLLSAALDYSKKKKGGVFTIVDISKAFDTVPHSAIVPCLRRKGVPIPITDLIRNMYSEGKTTIKSKNSTGVEIKILRGVKQGDPLSPLLFNLCLEPLLDLIEQQTSGINVNETRKIPVLAFADDVVLLGADIGEAQRQVDVLDEYLNGLGMTISRDKCQAFQVVAERRTWFIKEPKIKHGNNTIPTVDPDEAFRYLGAKMGPWKGIHCGIIVPELLSVVRRVRKLSLKPCQKLELITKHIFPRYIYNLLVSPPSDSVLRLLDSEVRQEIKAIFHLTPSTATGFFYAPKSWGGLGLPRFEHIVKLGTLKSAIKIKDSIDPAVSSLVDEKYNEKLKKMANSLRINWPASVEDIERARKRLKAGHVKQWAELRSQGQGVPDFSRSKAGNVWLKDCELLKPSRFIDALKLRTNTVGTRTVLARVDKNLDINCRKCRAQPETLGHILGLCQYTKGLRIKRHDEAKMTLAESLRKNNEVFVEPTLRVGGALFKPDLVVKNEERVLVVDVTVRYENKDYLSRAEKEKVNKYRPCLEHLKARFNVGKGEVIPVVLGSRGAITPSTESNLKRMGIGGQIIKTLVLNVLRSSIELCNIFLDT

SEQ ID NO: 23303 - protein, 847 aa, Bombus balteatus
MNIWVALKENRESLERGIDELIETLYGAIKNINKIDEINQKSKTRIGHRNVKKRRNAKKRYSYARCQELFLENPKRLAEAIVSNDQAFLQQARDPPEAAEVRRLYEELWGQTGPLIAPIPNDGASELSLCEIFPPIDEEDVGKRISKIRKKAAAGPDGLIKEHLLIPGLPTILVKLYNMLCYCSYFPPAWKENRTTLIPKPNKPSSQIENWRPITIGPILGRIFSSIIDGRIRRGIVLSPRQKGFTAESGCKINIDLLSAALDYSKREKGGVFTIVDISKAFDTVPHSVIKPCLSRKGVPAPIVDLVGNMYQNVKTKIRAKDQMGVEIEIRRGVKQGDPLSPLLFNLCLEPLVETIDQQTGGINVNDNRKVPVLAFADDVVLLGADNGEAQRQVDMLCEYLNGLGMSISRDKSQTFQIVAKRDTWFIQEPKVKIGNNTIPTVDPGEVFKYLGAKLGPWKGVHCGIIVPELLSMMRRVRKLSLKPCQKLELITNYIFPKYIYHLLINPPGDSVLRLLDSEVRQEVKAIFHLVPSTATGFFYTPKSWGGLGLPRFEHLVKLGTLKSAIKIKESTDPAVSGLVGERDEIKLKKIANSLRINWPASLEDIERARRRLKAAHIRQWADLRSQGQGVLDFSRNRTGNVWLADYKLLKPSRYIDAIKLRTNTFGTRTVLARADKNIDVACRKCRAQPETLGHILGLCQYTKGLRIKRHDEAKMTLADSLRKKNEVFVEPTIRVGGDLYKPDLVVKNEDRVLIVDVTVRYENKDYLSKAEKEKVDKYQPCLQHLKAKFNVSKGEVVPVVLGSRGAITPFTERSLKLMGIGDQTIKTLVLNVLRSSIELCNIFLDD

SEQ ID NO: 23304 - protein, 1132 aa, Bombus sylvestris
MNNKQASDAAPLGPGGAVADSSASEGTIVDELATSPDMTFKIMVPLVGDRVGCPICEAREIHLFFMSLSDLDRHLDQDHLNAGVQWGCRCGRSFPKLHGAQCHLPKCSGTNKKTEGAFKCEECPMSFGTQRGLSTHERHAHPALRNVKRRGANPPSKVWSVEEVALLKELDDKFKNHRFPNVEISKVLTTKSLEQIKYQRRKLKAASEDPALQDATLETEGGCDPVTPGNASPQPEISGYTATNDNNESEWRLELIRSIETPTEVPLVLKEVNDRLQNMWRHELGNEEALTREINNLIETHLYGAIFKNSEVEKRKQKERREHKNKPETATGKSNKQKSRNSRKRFSYARCQELFHECPKKLADVVINNDRTLLEPARQLPEAADIRRLYSDLWGRADAIVAPPRSGGASALSLSEMFPPISAEDVMARINKIKKKTAAGPDGLTREHLLIPGLPAVLAKIYNICCFCSYYPPVWKNNRTTLIPKPNKNSSQVENWRPITIGPILGRIFSAILDGRIRKGIVLNLRQKGFTSENGCKINTELLSAALDHSKRESGGIFTIVDISKAFDTIPHSALAPCLARKGVPAPIIELIQNMYNNNTTTIRANGNIGVEIKILRGVKQGDPLSPLLFNLCLEPLLEILEEQTSGIRINNNHKIPVLAFADDVVLLGANKREAQCQVEVLHKYLGSLNMNISRDKSRTFQVVPKRDTWFVDDPQLSIDGNYIPKIDPEEVFRYLGAKMGPWKGLHCGIIVPELISVVRRVRKLYLKPHQKIELLEKYVFPRYIFHLLTKPPSDSTLKLLDSEVRQEIKAILHLVPSTTTGLFYAPKAYGGLGLPRFEHLVKLGTLKSKLKMKESKDPAVSSLVDISEEAKLKKMANSLRINWPATLDDIDRAKRRLKCAHVKQWSELKSQGQGVTDFIRSRTGNVWLKDQNLLKPSRFIDALRLRTNTFGTRTVLARADKVLDVSCRKCRAQPETLGHVLGLCQYTKGLRIKRHDEVKSILADRLRRKNEVFVEPTLKVGSNLYKPDLVIKNGERVLVVDVTVRYENKDYLSKAEKEKVDKYKRCVEYLKEKFKVGEGEVIPVVLGSRGAITPNTEQNLKVLGINKQDIKTIVLNVLRSSIEMCNIFLDG

SEQ ID NO: 23305 - protein, 849 aa, Bombus sylvicola
MTVWGTLKGDREALGSGINEFLKTLYGATELYNKDKGINIEKKKPKRIIRQNKRNRKNAKKRYSFARCQELFLENPKRLADVVVNNDQAFFQPARDPPDAAEMRRLYEDLWGRIGPTNAPVPGNRAPELSLCEVFPPIAVEVVEEKIKRIRKKAAAGPDGFQKDHLLIPGLPIILAKLFNMLCYISYFPSAWKENRTTLIPKANKPSSLVENWRPITIGPILGRIFSSIIDGRIRGGITLNPRQKGFTAESGCKINIELLSAALDYSKKEKGGIFTIVDISKAFDTVPHSAIEPCLARKGVPAPIVELIKNMYQGSHTTIKTRNNMGVKIEMLRGVKQGDPLSPLLFNLCLEPLLELIQEKTSGINVNKTRKIPVLAFADDVVLLGADDGEAQCQVDLLCQYLNGLGMNISREKSQAFQIVSKRDTWFVKDPELKIGENIIPTVDPGEAFRYLGAKMGPWKGIHCGIIVPELLGVMRRVRKLSLKPCQKLDLITKYIFPRYIYHLLVNPPGDCVLRLLDSEVRQEIKAIFHLVPSIATGFFYAPKSWGGLGLPRFEHIIKLGTLKNAIKMKYSNDPAVSGLVDEHGELKLKRIANSLRINWPASIEDIEKARKTLKAAHIKQWAELRSQGQGVLDFSRNKTGNIWLREYELLKPSRFIDALKLRTNTFGTRTVLARADKNIDVACRKCRAQPETLGHILGLCQYTKGLRIKRHDEAKTTLADNLRKDNEVFIEPTLKVEGNLYKPDLVIKNEERVLIVDVTVRYENKDYLSRAEKEKIKMYEPCLEHLKGKFNVGRGEVIPMVLGSRGAITPSTEIRLLQMGINKKVIKTIVMNVLRSSIELCNIFLDE

SEQ ID NO: 23306 - protein, 1126 aa, Bombus balteatus
MSRCGTNDASDAASLGPGGAVADSSALEGTIDDDPALSQDMRFCILVPIVGNQVACPVCQKREIHLFFLSLADLGRHLDQHHTTALIEWKCKDCGKCFQKLHGARCHLPHCRGPSQKPEGPYKCEACPMSFGTQRGLSTHERHAHPAVRNVKRRGEDLPDKKWTFEEVTLLKELCETYKDHRHLNKKISEVLTNKTIDQIKYQRKKLRLIGEDRDPQEVTQETEGGCDPVDPGNASLEAPGVSGFNENDIIEWRLQLEEAIMKQTDVPPVLRWAHIRLINIWVTFKGNREALEREINEFLNALYGAIKNINKIKDEKDEQRGKFGRQNTKSKKRNAKKRYSFARCQELFTENPKRLADAVISNDQAFLQQAKEPPEAAEVRRLYEELWGQTGPMSAPIPESRVPELSLCEIFPPIEDTDVGEKISKIRKKAAAGPDGFIKEHLLIPGLPTILAKLFNILCYCSYFPPAWKENRTTLIPKPNKPSSLTENWRPITIGPILGRIFSSIIDGRIRRGIVLNPRQKGFTAESGCKINIELLSAALDHSKKEKGGVFTIVDISKAFDTVPHSAIKPCLARKGVPAPIVDLVDNMYKNVKTTIRAKDRMGVEIEILRGVKQGDPLSPLLFNLCLEPLLESIDMQTSGINVNVSRRIPVLAFADDVVLLGADEGEAQRQVDMLCKYLNGLGMSISREKSATFQVVAKKDTWFIREPEIKIGNNIIPTVDPGEAFKYLGAKMGPWKGVHCGIIVPELLGILRRVRKLSLKPCQKLELITSYILPKYIYHLLVNPPGDCVLRLLDSEIRQEIKAIFHLMPSTATGFFYAPKSWGVLGLPRFEHLVKLGTLKSAIKIKESTDPAVSGLVDERSEEKLKKIANSLRINWPASVEDIERAKRRLKATHIKQWAELRSQGQGVLDFSKNKTGNVWLEDYKLLKPSRYIDALKLRTNTFGTRTVLARADKNIDVYCRKCRAQPETLGHILGLCQYTKGLRIKRHDEAKMTLADSLRNKYEVFVEPTIKEGGSLYKPDLVVKNEERVLIVDVTVRYENRDYLSKAEKEKVDKYQSCLNHLKARFNVSSGEVIPVVLGSRGAITPFTERNLKHLGISDQTIKTLVLNVLRSSIELCNIFLDG

SEQ ID NO: 23307 - protein, 1129 aa, Bombus sylvestris
MNNDKASDAASLSPGGAVADSSALEGTIDDDPAMSPVTILVPLVGDQVACPVCERREVHLFFMSLTELGKHLDQHHLETLFKWKCSSCEKSFPKLHGAKCHLPKCSGTTQQKNLPHKCEVCPMSFGTQRGLSTHERHAHPALRNTKRKGTGKIKTWTLEEVALLKELDAIYKDHRFPNSEISKILTTKTVDQIKYQRRKLKATNEGEDLQRATQVTEGGCDLVTSGNARQHVPESSDIINDESTQCWRLTIAKAIEENIEVPPVLREAYDKLKQLWNDHRGNEEALGIQLNQFICTSLYGAIEGNYLNNKNKETAKSKQAVNNSNRRKNTRSSQNRRNARKRFSYARCQELFNECPKKLADVVVNNDNAYLQPAGQLPNAGEVRRLYDDLWGQSGPSSVPIAEQRASELSLNDHFTPVTAEDVGMRIARMRNKAAAGPDGFKKEHLLIPGLPAIMSKVYNICWYSGYFPTIWKENRTTLIPKANKPSSLVENWRPITIGPVLGRIFSSILDDKIRRGIVLNPRQKGFTSENGCKANVDLLSAALDYSKRNNGGIFTIVDISKAFDTVPHSALKPCLARKGVPAPIINLITKMYEGNQTKIKAANNIGVEINILRGVKQGDPLSPLLFNLCIEPLIETIEELTSGINISHNHKVSILAFADDIVVLGENEREAQRQVDILHGYLRGLGMKISGEKSLTFQVIAKKDTWFVQDPKIGIENKMIPTVDPDEAFRYLGAKMGPWKGVHCGVIVPELLSVVKRVRKLSLKPCQKLELLVKYIFPRYIFHLLINPPGDGVLKMLDGEVRQEIKAIFHLMPSTATGFFYTPKSWGGLGVPRFEHIVKLGTLKNAIKMKTSIDPAVSGLIDEAAEAKLKKIANSLRINWPATLEDIEKSRKILKASHVKRWAELKSQGQGVLDFSKNKAGNVWLEEHNLLRPSRFIDALRLRTNTFGTKVVLARADKNIDVACRRCRAQPETLGHILGLCQYTKGLRIKRHDEVKSILVDNLRKNNQVFIEPSLRVGSDLFKPDLVVKNEERVLVVDVTVRYENRDYLQKAEKEKIDKYANVLQHLKEKFKVGEGSVLPVVLGSRGAITPNTLKILKTLSISDKDIKTIIMNVLRSSIEMCNIFLDY

SEQ ID NO: 23308 - protein, 1126 aa, Bombus hypnorum
MQGDRNEASDAASPGPGGAVADSSALEGTIGDDLAMSLDTIFDISIPIVGNQVACPVCEEREVHLFFMNLTDLGKHLDQHHTAARIQWSCKECGKGFSKLHGARCHLPHCSGGPSQRPEGAFKCEACPMSFGTQRGLSTHERHAHPAVRNVKRRGTDPPEKKWTFQELALLRELCETYKDHRHPNKKISEILTSKTIDQIKYQRRKLRMLGEDPQEAAPATEGGCDPVDPGNACFEEPEISGNNQIESWKLQLELAIMTQTEVPPVLRWVHTRLINTWVTLKGNREALESGINEFIKVTLYGAIKAFNKDKIKENKCKEKFFKRIGHQKKSKKRNAKKRYSYARCQELLVENPRRLADAIVNNDQAFLQPAREPPDAEEVRRLYEDLWGKTGPVDAPVPGSRASELSLSEFFPPIAVEDVAERIKKIRMKAAAGPDGFQKEHLLIPGLPIILAKIYNILCYISYFPPIWKENRTTLIPKANKDSSLVENWRPITIGPILGRIFSAIIDGRIRRGIVQNPRQKGFTAESGCKINIDLLSAALDYSKREKGGVFTIVDISKAFDTVPHSAIKPCLVRKGVPAPITELISKMYENIKTRIRAGNNMGVDIAILRGVKQGDPLSPLLFNLCLEPLLELMETQTSGININETRKIPVLAFADDVVLLGADVGEAQRQVDMLDKYLEDFGMNISRGKSQTFQVVSKRDTWFIEEPKIRLRENTIPTVDPGEVFRYLGAKMGPWKGVHCGIIVPELLSVMRRVRKLSLKPCQKFDLITKYILPRYIYHLLVNPPGDCVLKLLDSEIRQEIKAIFHLMPSTATGFFYAPKSWGGLGLPRFEHIIKLGTLKSAIKIKNSVDPAVSSLVDDQTEMKLKKTANSLRINWPASIEDIEKARKRLKAAHIRQWADLRSQGQGVFDFSRNRIGNAWLVDNKLLKPSRFIDALKLRTNTFGTRTVLARADKNIDVTCRKCRAQPETLGHILGLCQYTKGLRIKRHDEAKMTLAEALRKKNEVFIEPTLKVGGILYKPDLVVKNEERVLVVDVTVRYENKDYLSKAEKEKSEKYRPCLEHLKAKFNVSRGQVIPVVLGSRGAVPLFTERCLKLLGIGDQTIKTMALNVLRSSIELCNIFLDE

SEQ ID NO: 23309 - protein, 1129 aa, Bombus sylvestris
MNNDKASDAASLSPGGAVADSSALEGTIDDDPAMSPVTILVPLVGDQVACPVCERREVHLFFMSLTELGKHLDQHHLETLFKWKCSSCEKSFPKLHGAKCHLPKCSGTTQQKNLPHKCEVCPMSFGTQRGLSTHERHAHPALRNTKRKGTGKIKTWTLEEVALLKELDAIYKDHRFPNSEISKILTTKTVDQIKYQRRKLKATNEGEDLQRATQVTEGGCDLVTSGNARQHVPESSDIINDESTQCWRLTIAKAIEENIEVPPVLREAYDKLKQLWNDHRGNEEALGIQLNQFICTSLYGAIEGNYLNNKNKETAKSKQAVNNSNRRKNTRSSQNRRNARKRFSYARCQELFNECPKKLADVVVNNDNAYLQPAGQLPNAGEVRRLYDDLWGQSGPSSVPIAEQRASELSLNDHFTPVTAEDVGMRIARMRNKAAAGPDGFKKEHLLIPGLPAIMSKVYNICWYSGYFPTIWKENRTTLIPKANKPSSLVENWRPITIGPVLGRIFSSILDDKIRRGIVLNPRQKGFTSENGCKANVDLLSAALDYSKRNNGGIFTIVDISKAFDTVPHSALKPCLARKGVPAPIINLITKMYEGNQTKIKAANNIGVEINILRGVKQGDPLSPLLFNLCIEPLIETIEELTSGINISHNHKVSILAFADDIVVLGENEREAQRQVDILHGYLRGLGMKISGEKSLTFQVIAKKDTWFVQDPKIGIENKMIPTVDPDEAFRYLGAKMGPWKGVHCGVIVPELLSVVKRVRKLSLKPCQKLELLVKYIFPRYIFHLLINPPGDGVLKMLDGEVRQEIKAIFHLMPSTATGFFYTPKSWGGLGVPRFEHIVKLGTLKNAIKMKTSIDPAVSGLIDEAAEAKLKKIANSLRINWPATLEDIEKSRKILKASHVKRWAELKSQGQGVLDFSKNKAGNVWLEEHNLLRPSRFIDALRLRTNTFGTKVVLARADKNIDVACRRCRAQPETLGHILGLCQYTKGLRIKRHDEVKSILVDNLRKNNQVFVEPSLRVGSDLFKPDLVVKNEERVLVVDVTVRYENRDYLQKAEKEKIDKYANVLQHLKEKFKVGEGSVLPVVLGSRGAITPNTLKILKTLSISDKDIKTIIMNVLRSSIEMCNIFLDY

SEQ ID NO: 23310 - protein, 1129 aa, Bombus sylvestris
MNNDKASDAASLSPGGAVADSSALEGTIDDDPAMSPVTILVPLVGDQVACPVCERREVHLFFMSLTELGKHLDQHHLETLFKWKCSSCEKSFPKLHGAKCHLPKCSGTTQPKDLPHKCEVCPMSFGTQRGLSTHERHAHPALRNTKRKGTGKIKTWTAEEVALLKELDAIYKDHRFPNSEISKILTTKTVDQIKYQRRKLKATNEGEDLQRATQVTEGGCDLVTSGNARQHVPESSDIINDESTQCWRLSIAKAIEENIEVPPVLREVYDKLKQLWNDHRGNEEALGIQLNQFICTSLYGAIEKNYLNNKNKETAKSKQAVNNNNRKKNTSSSQNRRNARKRFSYARCQELFNECPKKLADVVVNNDNAYLQPAGQLPNAGEVRRLYDDLWGQSGPSSVPIAEQRASELSLNDHFTPVTAEDVGMRIARMRNKAAAGPDGFKKEHLLIPGLPAIMSKVYNICWYSGYFPTIWKENRTTLIPKANKPSSLVENWRPITIGPVLGRIFSSILDDKIRRGIVLNPRQKGFTSENGCKANVDLLSAALDYSKRNNGGIFTIVDISKAFDTVPHSALKPCLARKGVPAPIINLITKMYEGNQTKIKAANNIGVEINILRGVKQGDPLSPLLFNLCIEPLIETIEELTSGINISHNHKVSILAFADDIVVLGENEREAQRQVDILHGYLRGLGMKISGEKSLTFQVIAKKDTWFVQDPKIGIEHKMIPTVDPDEAFRYLGAKMGPWKGVHCGVIVPELLSVVKRVRKLSLKPCQKLELLVKYIFPRYIFHLLINPPGDGVLKMLDGEVRQEIKAIFHLMPSTATGFFYTPKSWGGLGVPRFEHIVKLGTLKNAIKMKTSIDPAVSGLIDEAAEAKLKKIANSLRINWPATLEDIEKSRKILKASHVKRWAELKSQGQGVLDFSKSKAGNVWLEEHNLLKPSRFIDALRLRTNTFGTKVVLARADKNIDVACRRCRAQPETLGHILGLCQYTKGLRIKRHDEVKSILVDNLRKNNQVFVEPSLRVGSDLFKPDLVVKNEERVLVVDVTVRYENRDYLQKAEKEKIDKYANVLQHLKEKFKVGEGSVLPVVLGSRGAITPNTLKILKTLSISDKDIKTIIMNVLRSSIEMCNIFLDY

SEQ ID NO: 23311 - protein, 1133 aa, Bombus vancouverensis
MFEENNRINIMVNKDIESASDAASLGPGDVAADSSALEGTSVDDLASSPDTIDIMVPIVGDQVACPVCQKREIDLFFLSLSDLGRHLEQHHVTARIQWRCKDCGKGFPKLHGARCHLPHCRGTSQGPSGSYRCETCPMSFGTLRGLSTHERHAHPAVRNVKRRGTDPPEKKWTAEELAQLRELWEIYKDHKFPNKMISEILTSKTIEQIRYQRKKLRLIGEETSSQEPTQVTEGGCDPVDPGNACFEEPGVSGLEYEQWRLQLESAIMTQVEVPPVLRWVHTRLMTIWVSLKGNREALESAINEFLEFTLYGAIKEINSKKRASSVKNKRIGHQGKKKGNRNARKRYSYARCQELFTENPRRLADAVINDDRAFLQPARDLPDAEEVRRLYEDLWGQTGPVEAPVPGSRASELSLCEVFPPIAVEDVAEKLSRIRMKAAAGPDGFQKEHLLIPGLPTILAVLYNILLYCSYFPPIWKENRTTLIPKPNKSSSLVENWRPITIGPILGRIFSSIIDGRIRRGIVLNPRQKGFTAESGCKVNIDLLSAALDYSKKKKGGVFTIVDISKAFDTVPHSAIVPCLRRKGVPIPITDLIRNMYNEGKTTIKSKNSTGVEIKILRGVKHGDPLSPLLFNLCLEPLLDLIEQQTSGINVNETRKIPVLAFADDVVLLGADIGEAQRQVGVLDEYLNGLGMTISRDKCQAFQVVAERRTWFIKEPKIKHGNNTIPTVDPDEAFRYLGAKMGPWKGIHCGIIVPELLSVVRRVRKLSLKPCQKLELITKHIFPRYIYNLLVSPPSDSVLRLLDSEVRQEIKAIFHLTPSTATGFFYAPKSWGGLGLPRFEHIVKLGTLKSAIKIKDSIDPAVSSLVDEKYNEKLKKMANSLRINWPASVEDIERARKRLKAGHVKQWAELRSQGQGVPDFSRSKAGNVWLKDCELLKPSRFIDALKLRTNTVGTRTVLARVDKNLDINCRKCRAQPETLGHILGLCQYTKGLRIKRHDEAKMTLAESLRKNNEVFVEPTLRVGGALFKPDLVVKNEERVLVVDVTVRYENKDYLSRAEKEKVNKYRPCLEHLKARFNVGKGEVIPVVLGSRGAITPSTESNLKRMGIGGQIIKTLVLNVLRSSIELCNIFLDT

SEQ ID NO: 23312 - protein, 1126 aa, Bombus hypnorum
MQGDRNEASDAASPGPGGAVADSSALEGTIGDDLAMSLDTIFDISIPIVGNQVACPVCEEREVHLFFMNLTDLGKHLDQHHTTARIQWSCKECGKGFSKLHGARCHLPHCSGGPSQRSEGAFKCEACPMSFGTQRGLSTHERHAHPAVRNVKRRGTDPPEKKWTFQELALLRELCETYKDHRHPNKKISEILTSKTIDQIKYQRRKLRMLGEDPQEAAPATEGGCDPVDPGNACFEEPEISGNNQIESWKLQLELAIMTQTEVPPVLRWVHTRLINTWVTLKGNREALESGINEFIKVTLYGAIKAFNKDKIKENKYKEKFFKRIGHQKKSKKRNAKKRYSYARCQELLVENPRRLADAIVNNDQAFLQPAREPPDAEEVRRLYEDLWGKTGPVDAPVPGSRASELSLSEFFPPIAVEDVAERIKKIRMKAAAGPDGFQKEHLLIPGLPIILAKIYNILCYISYFPPIWKENRTTLIPKANKDSSLVENWRPITIGPILGRIFSAIIDGRIRRGIVQNPRQKGFTAESGCKINIDLLSAALDYSKREKGGVFTIVDISKAFDTVPHSAIKPCLVRKGVPAPITELISKMYVNIKTRIRAGNNMGVDIAILRGVKQGDPLSPLLFNLCLEPLLELMETQTSGININETRKIPVLAFADDVVLLGADVGEAQRQVDMLDKYLEDFGMNISRGKSQTFQVVSKRDTWFIEEPKIRLRENTIPTVDPGEVFRYLGAKMGPWKGVHCGIIVPELLSVMRRVRKLSLKPCQKFDLITKYILPRYIYHLLVNPPGDCVLKLLDSEIRQEIKAIFHLMPSTATGFFYAPKSWGGLGLPRFEHIIKLGTLKSAIKIKNSVDPAVSSLVDDQTEMKLKKTANSLRINWPASIEDIEKARKRLKAAHIRQWADLRSQGQGVFDFSRNRIGNAWLVDNKLLKPSRFIDALKLRTNTFGTRTVLARADKNIDVTCRKCRAQPETLGHILGLCQYTKGLRIKRHDEAKMTLAEALRKKNEVFIEPTLKVGGILYKPDLVVKNEERVLVVDVTVRYENKDYLSKAEKEKSEKYRPCLEHLKAKFNVSRGQVIPVVLGSRGAVPLFTERCLKLLGIGDQTIKTMALNVLRSSIELCNIFLDE

SEQ ID NO: 23313 - protein, 1133 aa, Bombus vancouverensis
MFEENNRINIMVNKDIESASDAASLGPGDVAADSSALEGTSVDDLASSPDTIDIMVPIVGDQVACPVCQKREIDLFFLSLSDLGRHLEQHHVTARIQWRCKDCGKGFPKLHGARCHLPHCRGTSQGPSGSYRCETCPMSFGTLRGLSTHERHAHPAVRNVKRRGTDPPEKKWTAEELAQLRELWEIYKDHKFPNKMISEILTSKTIEQIRYQRKKLRLIGEETSSQEPTQVTEGGCDPVDPGNACFEEPGVSGLEYEQWRLQLESAIMTQVEVPPVLRWVHTRLMTIWVSLKGNREALESAINEFLEFTLYGAIKEINSKKRASSVKNKRIGHQGKKKGNRNARKRYSYARCQELFTENPRRLADAVINDDRAFLQPARDLPDAEEVRRLYEDLWGQTGPVEAPVPGSRASELSLCEVFPPIAVEDVAEKLSRIRMKAAAGPDGFQKEHLLIPGLPTILAVLYNILLYCSYFPPIWKENRTTLIPKPNKSSSLVENWRPITIGPILGRIFSSIIDGRIRRGIVLNPRQKGFTAESGCKINIDLLSAALDYSKKKKGGVFTIVDISKAFDTVPHSAIVPCLRRKGVPIPITDLIRNMYSEGKTTIKSKNSTGVEIKILRGVKQGDPLSPLLFNLCLEPLLDLIEQQTSGINVNETRKIPVLAFADDVVLLGADIGEAQRQVDVLDEYLNGLGMTISRDKCQAFQVVAERRTWFIKEPKIKHGNNTIPTVDPDEAFRYLGAKMGPWKGIHCGIIVPELLSVVRRVRKLSLKPCQKLELITKHIFPRYIYNLLVSPPSDSVLRLLDSEVRQEIKAIFHLTPSTATGFFYAPKSWGGLGLPRFEHIVKLGTLKSAIKIKDSIDPAVSSLVDEKYNEKLKKMANSLRINWPASVEDIERARKRLKAGHVKQWAELRSQGQGVPDFSRSKAGNVWLKDCELLKPSRFIDALKLRTNTVGTRTVLARVDKNLDINCRKCRAQPETLGHILGLCQYTKGLRIKRHDEAKMTLAESLRKNNEVFVEPTLRVGGALFKPDLVVKNEERVLVVDVTVRYENKDYLSRAEKEKVNKYRPCLEHLKARFNVGKGEVIPVVLGSRGAITPSTESNLKRMGIGGQIIKTLVLNVLRSSIELCNIFLDT

SEQ ID NO: 23314 - protein, 1133 aa, Bombus vancouverensis
MFEENNRINIMVNKDIESASDAASLGPGDVAADSSALEGTSVDDLASSPDTIDIMVPIVGDQVACPVCQKREIDLFFLSLSDLGRHLEQHHVTARIQWRCKDCGKGFPKLHGARCHLPHCRGTSQGPSGSYRCETCPMSFGTLRGLSTHERHAHPAVRNVKRRGTDPPEKKWTAEELAQLRELWEIYKDHKFPNKMISEILTSKTIEQIRYQRKKLRLIGEETSSQEPTQVTEGGCDPVDPGNACFEEPGVSGLEYEQWRLQLESAIMTQVEVPPVLRWVHTRLMTIWVSLKGNREALESAINEFLEFTLYGAIKEINSKKRASSVKNKRIGHQGKKKGNRNARKRYSYARCQELFTENPRRLADAVINDDRAFLQPARDLPDAEEVRRLYEDLWGQTGPVEAPVPGSRASELSLCEVFPPIAVEDVAEKLSRIRMKAAAGPDGFQKEHLLIPGLPTILTILYNILLYCSYFPPIWKENRTTLIPKPNKSSSLVENWRPITIGPILGRIFSSIIDGRIRRGIVLNPRQKGFTAESGCKINIDLLSAALDYSKKKKGGVFTIVDISKAFDTVPHSAIVPCLRRKGVPIPITDLIRNMYSEGKTTIKSKNSTGVEIKILRGVKQGDPLSPLLFNLCLEPLLDLIEQQTSGISVNETRKIPVLAFADDVVLLGADIGEAQRQVDVLDEYLNGLGMTISRDKCQAFQVVAERRTWFIKEPKIKHGNNTIPTVDPDEAFRYLGAKMGPWKGIHCGIIVPELLSVVRRVRKLSLKPCQKLELITKHIFPRYIYNLLVSPPSDSVLRLLDSEVRQEIKAIFHLTPSTATGFFYAPKSWGGLGLPRFEHIVKLGTLKSAIKIKDSIDPAVSSLVDEKYNEKLKKMANSLRINWPASVEDIERARKRLKAGHVKQWAELRSQGQGVPDFSRSKAGNVWLKDCELLKPSRFIDALKLRTNTVGTRTVLARVDKNLDINCRKCRAQPETLGHILGLCQYTKGLRIKRHDEAKMTLAESLRKNNEVFVEPTLRVGGALFKPDLVVKNEERVLVVDVTVRYENKDYLSRAEKEKVNKYRPCLEHLKARFNVGKGEVIPVVLGSRGAITPSTESNLKRMGIGGQIIKTLVLNVLRSSIELCNIFLDT

SEQ ID NO: 23315 - protein, 1126 aa, Bombus hypnorum
MQGDRNEASDAASPGPGGAVADSSALEGTIVDDLAMSLDTIFDISIPIVGNQVACPVCEEREVHLFFMNLTDLGKHLDQHHTTARIQWSCKECGKGFSKLHGARCHLPHCSGGPSQRPEGAFKCEACPMSFGTQRGLSTHERHAHPAVRNVKRRGTDPPEKKWTFQELALLRELCETYKDHRHPNKKISEILTSKTIDQIKYQRRKLRMLGEDPQEAAPATEGGCDPVDPGNACFEEPEISGNNQIESWKLQLELAIMTQTEVPPVLRWVHTRLINTWVTLKGNREALESGINEFIKVTLYGAIKAFNKDKIKENKCKEKFFKRIGHQKKSKKRNAKKRYSYARCQELLVENPRRLADAIVNNDQAFLQPAREPPDAEEVRRLYEDLWGKTGPVDAPVPGSRASELSLSEFFPPIAVEDVAERIKKIRMKAAAGPDGFQKEHLLIPGLPIILAKIYNILCYISYFPPIWKENRTTLIPKANKDSSLVENWRPITIGPILGRIFSAIIDGRIRRGIVQNPRQKGFTAESGCKINIDLLSAALDYSKREKGGVFTIVDISKAFDTVPHSAIKPCLVRKGVPAPITELISKMYENIKTRIRAGNNMGVDIAILRGVKQGDPLSPLLFNLCLEPLLELMETQTSGININETRKIPVLAFADDVVLLGADVGEAQRQVDMLDKYLEDFGMNISRGKSQTFQVVSKRDTWFIEEPKIRLRENTIPTVDPGEVFRYLGAKMGPWKGVHCGIIVPELLSVMRRVRKLSLKPCQKFDLITKYILPRYIYHLLVNPPGDCVLKLLDSEIRQEIKAIFHLMPSTATGFFYAPKSWGGLGLPRFEHIIKLGTLKSAIKIKNSVDPAVSSLVDDQTEMKLKKTANSLRINWPASIEDIEKARKRLKAAHIRQWADLRSQGQGVFDFSRNRIGNAWLVDNKLLKPSRFIDALKLRTNTFGTRTVLARADKNIDVTCRKCRAQPETLGHILGLCQYTKGLRIKRHDEAKMTLAEALRKKNEVFIEPTLKVGGILYKPDLVVKNEERVLVVDVTVRYENKDYLSKAEKEKSEKYRPCLEHLKAKFNVSRGQVIPVVLGSRGAVPLFTERCLKLLGIGDQTIKTMALNVLRSSIELCNIFLDE

SEQ ID NO: 23316 - protein, 1126 aa, Bombus hypnorum
MQGDRNEASDAASPGPGGAVADSSALEGTIVDDLAMSLDTIFDISIPIVGNQVACPVCEEREVHLFFMNLTDLGKHLDQHHTTARIQWSCKECGKGFSKLHGARCHLPHCSGGPSQRPEGAFKCEACPMSFGTQRGLSTHERHAHPAVRNVKRRGTDPPEKKWTFQELALLRELCETYKDHRHPNKKISEILTSKTIDQIKYQRRKLRMLGEDPQEAAPATEGGCDPVDPGNACFEEPEISGNNQIESWKLQLELAIMTQTEVPPVLRWVHTRLINTWVTLKGNREALESGINEFIKVTLYGAIKAFNKDKIKENKCKEKFFKRIGHQKKSKKRNAKKRYSYARCQELLVENPRRLADAIVNNDQAFLQPAREPPDAEEVRRLYEDLWGKTGPVDAPVPGNRASELSLSEFFPPIAVEDVAERIKKIRMKAAAGPDGFQKEHLLIPGLPIILAKIYNILCYISYFPPIWKENRTTLIPKANKDSSLVENWRPITIGPILGRIFSAIIDGRIRRGIVQNPRQKGFTAESGCKINIDLLSAALDYSKREKGGVFTIVDISKAFDTVPHSAIKPCLVRKGVPAPITELISKMYENIKTRIRAGNNMGVDIAILRGVKQGDPLSPLLFNLCLEPLLELMETQTSGININETRKIPVLAFADDVVLLGADVGEAQRQVDMLDKYLEDFGMNISRGKSQTFQVVSKRDTWFIEEPKIRLRENTIPTVDPGEVFRYLGAKMGPWKGVHCGIIVPELLSVMRRVRKLSLKPCQKFDLITKYILPRYIYHLLVNPPGDCVLKLLDSEIRQEIKAIFHLMPSTATGFFYAPKSWGGLGLPRFEHIIKLGTLKSAIKIKNSVDPAVSSLVDDQTEMKLKKTANSLRINWPASIEDIEKARKRLKAAHIRQWADLRSQGQGVFDFSRNRIGNAWLVDNKLLKPSRFIDALKLRTNTFGTRTVLARADKNIDVTCRKCRAQPETLGHILGLCQYTKGLRIKRHDEAKMTLAEALRKKNEVFIEPTLKVGGILYKPDLVVKNEERVLVVDVTVRYENKDYLSKAEKEKSEKYRPCLEHLKAKFNVSRGQVIPVVLGSRGAVPLFTERCLKLLGIGDQTIKTMALNVLRSSIELCNIFLDE

SEQ ID NO: 23317 - protein, 1126 aa, Bombus hypnorum
MQGDRNEASDAASPGPGGAVADSSALEGTIVDDLAMSLDTIFDISIPIVGNQVACPVCEEREVHLFFMNLTDLGKHLDQHHTTARIQWSCKECGKGFSKLHGARCHLPHCSGGPSQRPEGAFKCEACPMSFGTQRGLSTHERHAHPAVRNVKRRGTDPPEKKWTFQELALLRELCETYKDHRHPNKKISEILTSKTIDQIKYQRRKLRMLGEDPQEAAPATEGGCDPVDPGNACFEEPEISGNNQIESWKFQLELAIMTQTEVPPVLRWVHTRLINTWVTLKGNREALESGINEFIKVTLYGAIKAFNKDKIKENKCKEKFFKRIGHQKKSKKRNAKKRYSYARCQELLVENPRRLADAIVNNDQAFLQPAREPPDAEEVRRLYEDLWGKTGPVDAPVPGSRASELSLSEFFPPIAVEDVAERIKKIRMKAAAGPDGFQKEHLLIPGLPIILAKIYNILCYISYFPPIWKENRTTLIPKANKDSSLVENWRPITIGPILGRIFSAIIDGRIRRGIVQNPRQKGFTAESGCKINIDLLSAALDYSKREKGGVFTIVDISKAFDTVPHSAIKPCLVRKGVPAPITELISKMYENIKTRIRAGNNMGVDIAILRGVKQGDPLSPLLFNLCLEPLLELMETQTSGININETRKIPVLAFADDVVLLGADVGEAQRQVDMLDKYLEDFGMNISRGKSQTFQVVSKRDTWFIEEPKIRLRENTIPTVDPGEVFRYLGAKMGPWKGVHCGIIVPELLSVMRRVRKLSLKPCQKFDLITKYILPRYIYHLLVNPPGDCVLKLLDSEIRQEIKAIFHLMPSTATGFFYAPKSWGGLGLPRFEHIIKLGTLKSAIKIKNSVDPAVSSLVDDQTEMKLKKTANSLRINWPASIEDIEKARKRLKAAHIRQWADLRSQGQGVFDFSRNRIGNAWLVDNKLLKPSRFIDALKLRTNTFGTRTVLARADKNIDVTCRKCRAQPETLGHILGLCQYTKGLRIKRHDEAKMTLAEALRKKNEVFIEPTLKVGGILYKPDLVVKNEERVLVVDVTVRYENKDYLSKAEKEKSEKYRPCLEHLKAKFNVSRGQVIPVVLGSRGAVPLFTERCLKLLGIGDQTIKTMALNVLRSSIELCNIFLDE

SEQ ID NO: 23318 - protein, 1096 aa, Bombus sibiricus
MSTDTNYSIMVPLVGNQVACPVCEKREIHLFFMSLSDLDRHIDQHHTGALIHWKCSTCQRSFPKLHGARCHLPKCSGPNQRPEGAYKCEACPLSFGTQRGLSTHERHAHPVVRNIKRRGTDPLDPSKWTEDEVALLKELWDTYKGHKYPNKMIGQILTSKTIDQIKYQRRKLKLTSEDPSPQEATLATEGGCDPVDPGNARSQGSGIIGINNLELIHEWKLQLENEIVTSADVPPVLREVYDKLLKIWVEYKDFNEALNAQIDNFISTSLYGAIKNLNENANEKVGSIDRSRKERTRSKRKNRNSRKRYSYARCQELFHECPKKLADIVVSNDRAYLEPTRQLPEAVEVRRLYENLWGQTGPFHVPISENRVSELSLSEIFPPVIAEDVAEKINKMRKKAAAGPDGFTKEHLMIPGLPTILAKLFNILYWSSYFPSAWKVNRTTLIPKPNKPSSQVENWRPITISPILGRIFSSILDGRIRGGVVLNLRQKGFPSENGCKINIELLNSALNYSKRSKGGVFTIVDIFKAFDTIPHSALKPCLARKGVPTPILDLVENMYKNNKTIIRANGNIGVEIEILRGVKQGDPLSPLLFNLCLEPLLETIEEDTSGINVNESRKVPVLAFADDVVLLGADEGEAQRQVGVFHEYLNGLGMTISRDKSQTFQVVAKKDTWFIKEPTIRLGDANIPTVDPDQAFRYLGAKMGPWKGVHCGVIVPEILSVVRRVRKLSLKPCQKIELLAKYIFPKYIYNLLVNPPGDSVLRLLDSEVRQEVKAIFHLVPSTATGFFYAPKACGGLGLPRFEHLVKLGTLKSAIKKMNSIDPAVSSLIDDECNKRLKRMANSLRINWPASIEDIEKAKKRLKASHIKQWSELRSQGQGVLDFSRNKTGNVWLEEFDLLKPSRFIDALRLRTNTFGTRTVLARADKNIDVACRKCRAQPETLGHILGLCQYTKGLRIKRHDEVKSILADKLRKNNEVFIEPTLNVEGNLWKPDLVIKNEERVLVVDVTVRYENKDYLSKAEKEKADKYLPCLNHLKEKFGVSGGEVLPVVLGSRGAITPNTERILLTMGIARQEIKTIVMNVLRSSIEMCNIFLDNN

SEQ ID NO: 23319 - protein, 1092 aa, Bombus sibiricus
MFTAKIMVPLVGDRVACPVCEKREVHLYFMSLSDLSKHLDQHHVEARIQWGCLHCERNFPKLHGAKCHLPKCSGRIQEKEEPYKCEACPMSFGTQRGLSTHERHAHPAIRNVKRRGTDPPDRKWKVEEVALLRELEEIYKDHRFPNIEISKILTTKTIDQIKYQRRKLKLMCEDENPQSATRATEGGCDPVDPGNARSQRSEIIGTNNLELIREWKLQLEKEITTSVDVPPVLREVNNELLKIWVEYKDLNEALNAQIDDFISTSLYGAIKNLNDKENLNVGNKEMNHRGKMSKKKKNRNSKKRYSYARCQELFHECPRKLADIVINNDRAYLEPTRQLPDAEEVRRLYENLWGQTGPFNAPIPDNGVSELSLIEIFPPVIAEDVAEKINKMRKKAAAGPDGFTKEHLMIPGLPTILAKLFNILYWSSYYPSAWRVNRTTLIPKLNKPSSQVENWRPITISPILGRIFSSILDGRIRGGIVLNQRQKGFTSENGCKINIDLLNSAVNHSKRSNGGVFTIVDISKAFDTIPHSALKPCLARKGVPTPILELIQNMYKRNKTKIKTNDNQGVEIEILRGVKQGDPLSPLLFNLCLEPLLETIEEDTSGINVSESRKIPVLAFADDIVLLGADEGEAQRQVGIFHEYLNGLGMTISRDKSQTFQVVAKKDTWFIKEPTIRLGDANIPSVDPDQAFRYLGAKMGPWKGVHCGVIVPEILSVVRRVRKLCLKPCQKIELLIKYIFPRYIYNLLVNPPGDSVLKLLDSEVRQEVKAIFHLVPSTATGFFYAPKACGGLGLPRFEHLVKLGTLKSAINMMNSVDPAVSSLINEESNKRLKRIANSLRINWPASIEDIIKAKKRLKASHIKQWAELRSQGQGVLDFSRNKTGNVWLEEFDLLKPSRFIDALRLRTNTFGTRTVLARADKNIDVACRKCRAQPETLGHILGLCQYTKGLRIKRHDEVKSILANKLSKNNEVFVEPTLNVEGNLWKPDLVVKNEERVLVVDVTVRYENKDYLSKAEKEKADKYLPCLNHLKEKFGVGGGAVLPVVLGSRGAITPNTERILLMMGIARNEIKTIVLNVLRSSIEMCNIFLDND

SEQ ID NO: 23320 - protein, 1144 aa, Bombus pascuorum
MDMIWYAIGTYRKISKFFLMIKKANKNLASDMAHFSPGCAVADSSAPEGTTDDDLARQRIRAPIISVPLVGDRVACPVCEGEGINLFFMSLADLNRHLDQHHIETKVQWGCLCGKSFSKLHGAQCHIPKCSGTSQKKEGKFKCEACPMSFGTQRGLSTHERHAHPALRNFKRRGTDPPNKGWTTEEINLLRELENKFSAHRFPNIEINKVLTNKTIDQIKYQRKKLKTISEITNPQEITQTTEGGCDPVEPGNALQITPDTNNSNESINEWKLKLKDSIEARTDVPPNLREVNDRLKDMWLERGNEETLASNINEMIEKHLYGAIRLINRVDSNKRENKPQNKGSNNSKKNRNARKRFSYARCQDMFKECPKRLADIVMNEDLAHLDQARQLPEAAEVKKLYEDLWGKNLPSSFPITNTEVPELSLNEYFSPITAEEVAERIKRIRKKAAAGPDGLQKGQLTIPGLPAILAKIYNICLYGSYYPSAWKTNRTTLIPKANKPSSQVENWRPITIGPILGRILSSILDRRIRKGIVLNLRQKGFTSENGCKINIDMLNTALSNSKIENGGIFTIVDISKAFDTVPHSALAPCLARKGVPTPIVKLIEKMYQNVQTTIRANGKTGVEIKIRRGVKQGDPLSPLLFNLCLEPLLETIEKSTRGVKINSTQEIPVLAFADDIVLLGANEKEAQHQVDALQKYLNDLGMKASVSKSQTFQTVSKRDTWFVKNPEVKLEGQNIPTVDPSEAFKYLGTKMGPWKGIHCGIVVPEILSVIRRVRKLSLKPCQKIELLTRHVFPKYIYHLLINPPSDTVLKLLDSEIRQEIKAIYHLMPSTATGFIYAPKNCGGLGMPRFEHITKLGILKSAIKMKNSTDPAVSSLYTETLNLNLKKIANSLRINWPASLDEIEKAKKRLKYAHVQQWGELKSQGQGVLDFSKNKSGNVWLREYELLKPSRFIDALRLRTNTFGTRTVLARADKKISTVCRRCRAQPETLGHILGLCQYTKGLRIKRHDEVKLTLAESLRKDNEVFIEPTIKVEGNLYKPDLVIKNKERILVVDVTVRYENKDYLSQAEKEKANKYQPGLEHLKRKFKIDKGQVLPVVLGSRGTITPNTENNLKIMGISKSTIKTIVMNVLRSSIEMSNIFLDN

SEQ ID NO: 23321 - protein, 1126 aa, Bombus hypnorum
MQGDRNEASDAASPGPGGAVADSSALEGTIGDDLAMSLDTIFDISIPIVGNQVACPVCEEREVHLFFMNLTDLGKHLDQHHTTARIQWSCKECGKGFSKLHGARCHLPHCSGGPSQRPEGAFKCEACPMSFGTQRGLSTHERHAHPAVRNVKRRGTDPPEKKWTFQELALLRELCETYKDHRHPNKKISEILTSKTIDQIKYQRRKLRMLGEDPQEAAPATEGGCDPVDPGNACFEEPEISGNNQIESWKLQLELAIMTQTEVPPVLRWVHTRLINTWVTLKGNREALESGINEFIKVTLYGAIKAFNKDKIKENKCKEKFFKRIGHQKKSKKRNAKKRYSYARCQELLVENPRRLADAIVNNDQAFLQPAREPPDAEEVRRLYEDLWGKTGPVDAPVPGSRASELSLSEFFPPIAVEDVAERIKKIRMKAAAGPDGFQKEHLLIPGLPIILAKIYNILCYISYFPPIWKENRTTLIPKANKDSSLVENWRPITIGPILGRIFSAIIDGRIRRGIVQNPRQKGFTAESGCKINIDLLSAALDYSKREKGGVFTIVDISKAFDTVPHSAIKPCLVRKGVPAPITELISKMYENIKTRIRAGNNMGVDIAILRGVKQGDPLSPLLFNLCLEPLLELMETQTSGININETRKIPVLAFADDVVLLGADVGEAQRQVDMLDKYLEDFGMNISRGKSQTFQVVSKRDTWFIEEPKIRLRENTIPTVDPGEVFRYLGAKMGPWKGVHCGIIVPELLSVMRRVRKLSLKPCQKFDLITKYILPRYIYHLLVNPPGDCVLKLLDSEIRQEIKAIFHLMPSTATGFFYAPKSWGGLGLPRFEHIIKLGTLKSAIKIKNSVDPAVSSLVDDQTEMKLKKTANSLRINWPASIEDIEKARKRLKAAHIRQWADLRSQGQGVFDFSRNRIGNAWLVDNKLLKPSRFIDALKLRTNTFGTRTVLARADKNIDVTCRKCRAQPETLGHILGLCQYTKGLRIKRHDEAKMTLAEALRKKNEVFIEPTLKVGGILYKPDLVVKNEERVLVVDVTVRYENKDYLSKAEKEKSEKYRPCLEHLKAKFNVSRGQVIPVVLGSRGAVPLFTERCLKLLGIGDQTIKTMALNVLRSSIELCNIFLDE

SEQ ID NO: 23322 - protein, 1129 aa, Bombus sylvestris
MNNDKASDAASLSPGGAVADSSALEGTIDDDPAMSPVTILVPLVGDQVACPVCERREVHLFFMSLTELGKHLDQHHLETLFKWKCSSCEKSFPKLHGAKCHLPKCSGTTQQKNLPHKCEVCPMSFGTQRGLSTHERHAHPALRNTKRKGTGKIKTWTLEEVALLKELDAIYKDHRFPNSEISKILTTKTVDQIKYQRRKLKATNEGEDLQRATQVTEGGCDLVTSGNARQHVPESSDIINDESTQCWRLTIAKAIEENIEVPPVLREAYDKLKQLWNDHRGNEEALGIQLNQFICTSLYGAIEKNYLNNKNKETAKSKQAVNNSNRRKNTRSSQNRRNARKRFSYARCQELFNECPKKLADVVVNNDNAYLQPAGQLPNAGEVRRLYDDLWGQSGPSSVPIAEQRASELSLNDHFTPVTAEDVGMRIARMRNKAAAGPDGFKKEHLLIPGLPAIMSKVYNICWYSGYFPTIWKENRTTLIPKANKPSSLVENWRPITIGPVLGRIFSSILDDKIRRGIVLNPRQKGFTSENGCKANVDLLSAALDYSKRNNGGIFTIVDISKAFDTVPHSALKPCLARKGVPAPIINLITKMYEGNQTKIKAANNIGVEINILRGVKQGDPLSPLLFNLCIEPLIETIEELTSGINISHNHKVSILAFADDIVVLGENEREAQRQVDILHGYLRGLGMKISGEKSLTFQVIAKKDTWFVQDPKIGIENKMIPTVDPDEAFRYLGAKMGPWKGVHCGVIVPELLSVVKRVRKLSLKPCQKLELLVKHIFPRYIFHLLINPPGDGVLKMLDGEVRQEIKAIFHLMPSTATGFFYTPKSWGGLGVPRFEHIVKLGTLKNAIKMKTSIDPAVSGLIDEAAEAKLKKIANSLRINWPATLEDIEKSRKILKASHVKRWAELKSQGQGVLDFSKNKAGNVWLEEHNLLKPSRFIDALRLRTNTFGTKVVLARADKNIDVACRRCRAQPETLGHILGLCQYTKGLRIKRHDEVKSILVENLRKNNQVFVEPSLRVGSDLFKPDLVVKNEERVLVVDVTVRYENRDYLQKAEKEKIDKYANVLQHLKEKFKVGEGSVLPVVLGSRGAITPNTLKILKTLSISDKDIKTIIMNVLRSSIEMCNIFLDY

SEQ ID NO: 23323 - protein, 1132 aa, Bombus sylvestris
MNNKQASDAAPLGPGGAVADSSASEGTIVDELATSPDMTFKIMVPLVGDRVGCPICEAREIHLFFMSLSDLDRHLDQDHLNAGVQWGCRCGRSFPKLHGAQCHLPKCSGTNKKTEGAFKCEECPMSFGTQRGLSTHERHAHPALRNVKRRGANPPSKVWSVEEVALLKELDDKFKNHRFPNVEISKVLTTKSIEQIKYQRRKLKAASEDPALQGATLETEGGCDPVTPGNASPQPEISGYTATNDNNESEWRLELIRSIETPTEVPLVLKEVNDRLQNMWRHELGNEEALTREINNLIETHLYGAIFKNSEVEKGKQKERREHKNKPETATGKSNKQKSRNSRKRFSYARCQELFHECPKKLADVVINNDRTLLEPARQLPEAADIRRLYSDLWGRADAIVAPPRSGGASALSLSEMFPPISAEDVMARINKIKKKTAAGPDGLTREHLLIPGLPAVLAKIYNICCFCSYYPPVWKNNRTTLIPKPNKNSSQVENWRPITIGPILGRIFSAILDGRIRKGIVLNLRQKGFTSENGCKINTELLSAALDHSKRESGGIFTIVDISKAFDTIPHSALAPCLARKGVPAPIIELIQNMYNNNTTTIRANGNIGVEIKILRGVKQGDPLSPLLFNLCLEPLLEILEEQTSGIRINNNYKIPVLAFADDVVLLGANKREAQCQVEVLHKYLGSLNMNISRDKSRTFQVVPKRDTWFVDDPQLSIDGNYIPKIDPEEVFRYLGAKMGPWKGLHCGIIVPELISVVRRVRKLYLKPHQKIELLEKYVFPRYIFHLLTKPPSDSTLKLLDSEVRQEIKAILHLVPSTTTGLFYAPKAYGGLGLPRFEHLVKLGTLKSKLKMKESKDPAVSSLVDISEEAKLKKMANSLRINWPATLDDIDRAKRRLKCAHVKQWSELKSQGQGVTDFIRSRTGNVWLKDQNLLKPSRFIDALRLRTNTFGTRTVLARADKVLDVSCRKCRAQPETLGHVLGLCQYTKGLRIKRHDEVKSILADRLRRKNEVFIEPTLKVGSNLYKPDLVIKNEERVLVVDVTVRYENKDYLSKAEKEKVDKYKRCVEYLKEKFKVGEGEVIPVVLGSRGAITPNTEQNLKVLGINKQDIKTIVLNVLRSSIEMCNIFLDG

SEQ ID NO: 23324 - protein, 1132 aa, Bombus skorikovi
MNNELASDAAPLDPGGAVADSSALEGTIFDGMATSPDMRFKIMVPLVGDRVGCPVCEEREVHLFFVSLNDLDRHLDQDHLNAGVQWGCRCGRSFPKLHGAQCHLPKCSGTNKKTEGAFKCEECPMSFGTQRGLSTHERHAHPAMRNIKRRGAGPPSKVWSVEEVALLKELDEKFKNYRFPNVEISKVLTTKSIEQIKYQRRKLKAASEDPALQGATLETEGGCDPVTPGNACSQPETSGYTIINENNESEWRLELIRSIETPTEVPLVLKEVNDRLQNIWRHELGNEEALTSEINNFIITHLCGAIFKYNEANENKQKERREHENKPEAATGKSNKRKCRNSRKRFSYARCQELFHECPKKLADVVINNDRALLEPARQLPEAADIRRLYLDLWGRADTIVAPPQSGRASALSLSEMFPPISAEDVMARINKIKKKTAAGPDGLTREHLLIPGLPAVLAKIYNICCFCSYYPTVWKSNGTTLIPKPNKNSSQVENWRPITIGPILGRIFSAILDGRIRKGIVLNLRQKGFTSENGCKINTELLSAALDHSKRESGGIFTIVDISKAFDTIPHSALAPCLARKGVPAPIIELIENMYKNNNTIIRANGNIGVEIKILRGVKQGDPLSPLLFNLCLEPLLEILEEQTNGIKVSNTHKIPVLAFADDVVLLGANKREAKCQVEVLHKYLSSLNMNISRDKSRTFQVVPKRDTWFVDDPQLRIDGNYIPKIDPEEVFRYLGAKMGPWKGLHCGIIVPELICVVRRVRRLCLKPHQKLELLQKYIFPRYIFHLLTKPPSDSTLKLLDSEVRQEIKAILHLVPSTTTGLFYAPKAYGGLGLPRFEHLVKLGTLRNTLKMKESKDPAVSSLVNINEEAKLKKMANSLRINWPATLEDIDRAKRRLKYAHVKQWSELRSQGQGVTDFIRSRTGNVWLKEQNLLKPSRFIDALRLRTNTFGTRTVLARADKVLDVNCRRCRAQPETLGHILGLCQYTKGLRIKRHDEVKSILADRLRRNNEVFVEPTLKAGGNLYKPDLVIKNEGRVLVVDVTVRYENKDYLSKAEKENIDKYRSCIKYLKEKFKVGEGEVLPVVLGSRGAITPNTERNLRALGIGKQDVKTIVLNVLRSSIEMSNIFLDG

SEQ ID NO: 23325 - protein, 1132 aa, Bombus sylvestris
MNNKQASDAAPLGPGGAVADSSASEGTIVDELATSPDMTFKIMVPLVGDRVGCPICEAREIHLFFMSLSDLDRHLDQDHLNAGVQWGCRCGRSFPKLHGAQCHLPKCSGTNKKTEGAFKCEECPMSFGTQRGLSTHERHAHPALRNVKRRGANPPSKVWSVEEVALLKELDDKFKNHRFPNVEISKVLTTKSIEQIKYQRRKLKAASEDPALQGATLETEGGCDPVTPGNASPQPEISGYTATNDNNESEWRLELIRSIETPTEVPLVLKEVNDRLQNMWRHELGNEEALTREINNLIETHLYGAIFKNSEVEKRKQKERREHKNKPETATGKSNKQKSRNSRKRFSYARCQELFHECPKKLADVVINNDRTLLEPARQLPEAADIRRLYSDLWGRADAIVAPPRSGGASALSLSEMFPPISAEDVMARINKIKKKTAAGPDGLTREHLLIPGLPAVLAKIYNICCFCSYYPPVWKNNRTTLIPKPNKNSSQVENWRPITIGPILGRIFSAILDGRIRKGIVLNLRQKGFTSENGCKINTELLSAALDHSKRESGGIFTIVDISKAFDTIPHSALAPCLARKGVPAPIIELIQNMYNNNTTTIRANGNIGVEIKILRGVKQGDPLSPLLFNLCLEPLLEILEEQTSGIRINNNYKIPVLAFADDVVLLGANKREAQCQVEVLHKYLGSLNMNISRDKSRTFQVVPKRDTWFVDDPQLSIDGNYIPKIDPEEVFRYLGAKMGPWKGLHCGIIVPELISVVRRVRKLYLKPHQKIELLEKYVFPRYIFHLLTKPPSDSTLKLLDSEVRQEIKAILHLVPSTTTGLFYAPKAYGGLGLPRFEHLVKLGTLKSKLKMKESKDPAVSSLVDISEEAKLKKMANSLRINWPATLDDIDRAKRRLKCAHVKQWSELKSQGQGVTDFIRSRTGNVWLKDQNLLKPSRFIDALRLRTNTFGTRTVLARADKVLDVSCRKCRAQPETLGHVLGLCQYTKGLRIKRHDEVKSILADRLRRKNEVFVEPTLKVGSNLYKPDLVIKNEERVLVVDVTVRYENKDYLSKAEKEKVDKYKRCVEYLKEKFKVGEGEVIPVVLGSRGAITPNTEQNLKVLGINKQDIKTIVLNVLRSSIEMCNIFLDG

SEQ ID NO: 23326 - protein, 958 aa, Bombus skorikovi
MRSITPNSEISKILTTKTVVQIKYQRRKLKATNEGEDLQRATQVTEGGCDLVTSDNARQRVPDSSDIYNDESTQCWRLTIAKAIEENIEVPPALREVYDNLKQLWNDHRGNEEAIGIQLNQIICTSLYGAIEKYHTNNKNKEAAKPKHTINNNNKKKNTSSSQTRRNARKRFSYARCQELFNECPKKLADVVVNNDSAYLQPARQPPNASEVRRLYNDLWGQSGPSSVPIAEQRASELSLNDHFTPVTAEDVGMRIARMRNKAAAGPDGFKKEHLLIPGLPAIMSKIYNICWYSGYFPTIWKENRTTLIPKANKPSSLVENWRPIIIGPVLGRIFSSILDDKIRRGIVLSPRQKGFTSENGCKANVDLLSAALGYSKRNNGGIITIVDISKAFDTMPHSALKPCLARRGVPAPIINLIIKMYEGNQTKISAANNIGVEIKILRGVKQGDPLSPLLFNLCIEPLIETIEELTSGVNINQNHKVSILAFADDIVVLGENEREAQRQVDILHGYLWDLGMKISSEKSLTFQVVAKKDTWFIQDPKIGIENKTIPTVDPDEAFRYLGAKMGPWKGVHCGVIVPELLRVVKRVRKLSLKPCQKLELLIKYIFPRYIFHLLINPPGDGVLKMLDSEVRQEIKAIFHLMPSTATGFFYTPKSRGGLGVPRFEHIVKLGTLKNAIKMKTSIDPAVSGLIDEAAEAKLKKIANSLRINWPATLEDIEKSRKILRASHNKRWAELKSQGQGVLDFSKNKAGNVWLKEHNLLKPSRFIDALRLRTNTFGTKVVLARADKNMDVTCRRCRAQPETLGHILGLCQYTKGLRIKRHDEVKSILVDNLRKNNQVFVEPSLRVGSDLFKPDLVVKNEERVLVVDVTVRYENRDYLQKAEKEKIDKYAPVLQHLKEKFKVGDGSVLPVVLGSRGAITPNTLKILKSLSISDKDIKTIIMNVLRSSIEMCNIFLDY

SEQ ID NO: 23327 - protein, 1126 aa, Bombus hypnorum
MQGDRNEASDAASPGPGGAVADSSALEGTIVDDLAMSLDTIFDISIPIVGNQVACPVCEEREVHLFFMNLTDLGKHLDQHHTTARIQWSCKECGKGFSKLHGARCHLPHCSGGPSQRPEGAFKCEACPMSFGTQRGLSTHERHAHPAVRNVKRRGTDPPEKKWTFQELALLRELCETYKDHRHPNKKISEILTSKTIDQIKYQRRKLRMIGEDPQEAAPATEGGCDPVDPGNACFEEPEISGNNQIESWKLQLELAIMTQTEVPPVLRWVHTRLINTWVTLKGNREALESGINEFIKVTLYGAIKAFNKDKIKENKCKEKFFKRIGHQKKSKKRNAKKRYSYARCQELLVENPRRLADAIVNNDQAFLQPAREPPDAEEVRRLYEDLWGKTGPVDAPVPGSRASELSLSEFFPPIAVEDVAERIKKIRMKAAAGPDGFQKEHLLIPGLPIILAKIYNILCYISYFPPIWKENRTTLIPKANKDSSLVENWRPITIGPILGRIFSAIIDGRIRRGIVQNPRQKGFTAESGCKINIDLLSAALDYSKREKGGIFTIVDISKAFDTVPHSAIKPCLVRKGVPAPITELISKMYENVKTRIRAGNNMGVDIAILRGVKQGDPLSPLLFNLCLEPLLELMETQTSGININETRKIPVLAFADDVVLLGADVGEAQRQVDMLDKYLEDFGMNISRGKSQTFQVVSKRDTWFIEEPKIRLRENTIPTVDPGEVFRYLGAKMGPWKGVHCGIIVPELLSVMRRVRKLSLKPCQKFDLITKYILPRYIYHLLVNPPGDCVLKLLDSEIRQEIKAIFHLMPSTATGFFYAPKSWGGLGLPRFEHIIKLGTLKSAIKIKNSVDPAVSSLVDDQTEMKLKKTANSLRINWPASIEDIEKARKRLKAAHIRQWADLRSQGQGVFDFSRNRIGNAWLVDNKLLKPSRFIDALKLRTNTFGTRTVLARADKNIDVTCRKCRAQPETLGHILGLCQYTKGLRIKRHDEAKMTLAEVLRKKNEVFIEPTLKVGGILYKPDLVVKNEERVLVVDVTVRYENKDYLSKAEKEKSEKYRPCLEHLKAKFNVSRGQVIPVVLGSRGAVPLFTERCLKLLGIGDQTIKTMALNVLRSSIELCNIFLDE

SEQ ID NO: 23328 - protein, 1150 aa, Bombus polaris
MDMIWFTDGFGETISDNIVKFDSESDIASDAAPLGPGGVVADSSAREGTMIDDSASSLVYEINVPLVSNQVACPVCEKREVHLFFLNLSDLDRHLDQHHLEALIQWKCLQCQRGFPKLHGARCHIPKCNGPTQRETGAYKCENCPMSFGTQRGLSTHERHAHPAARNIKRRGADPPGRNENENKKDWKVEEVTLLKELWEVYKNHRHPNKEIQKVLTNKTIDQIKYQRRKLNLVGEASSQEVTQATEGGCDPVNSGNAYFEEPVFRGNNDEELIQEWRLQLENNITAPVEMPPVLREVHTRIMDIWAIYKDLNDLLEDRINDLIVTSLYGAIKQVKNSCENSNEKRVIERKKNKNNSRNSKKRYSYARCQELFKECPKKLAEAIVNNDQAYLEPTRQPPEAVEIRKLYNDLWGKTGPENVPIPTNRAPGLSITELFPPITAEDVAERINKIRKKAAAGPDGFVKDDLMIPGLPIILAKIYNIICYGSFFPSVWKENRTTLIPKANKTSSQVENWRPITIGPILGRIFSSILDGRVRRGVVFNLRQKGFTSENGCKINIDLLSAALSYSKRNKGGVFTIVDISKAFDTIPHSALKPCLARKGVPAPIIDLINNMYKGSHTTIRANGNIGVEIKILRGVKQGDPLSPLLFNLCLEAFLETIEENTSGINVSDTRKVPVLAFADDVVLLGEDEGEAQRQVDALQSYLSDLGMNISRDKSQVFQIVAKKDTWYVEEPTIMLGEESIPTVDPDQAFRYLGAKVGPWKGVHCGVIVPENLCVVRRVRKLSLKPCQKIELLMKFIFPRYIYHLLINPPSDSVLKLLDGEVRQEIKAILHLVPSTATGFFYAPKSCGGLGLPRFEHLVKLGTLKAAIKIKNSIDPTVSSLIGGEEDKKLKKVANSLRINWPASLEDLDKAKRRLKATHVKQWAELRSQGQGVSDFVKNSTGNIWLEEYNLLKPSRFIDALRLRTNTFGTKVVLARADKKIDVTCRRCRAQPETLGHILGLCQYTKGLRIKRHDEVKSILADRLKRSNEVFIEPTLTVGGDLFKPDLVIKNEERVLVVDVTVRYENKDYLSKAEKEKVDKYTPCIKYLKEKFGVGGGRVLPIVLGSRGAITPKTEQTLKELGIAKHDIKTLVMNVLRSSIEMCNIFLDN

SEQ ID NO: 23329 - protein, 1126 aa, Bombus hypnorum
MQGDRNEASDAASPGPGGAVADSSALEGTIVDDLAMSLDTIFDISIPIVGNQVACPVCEEREVHLFFMNLTDLGKHLDQHHTTARIQWSCKECGKGFSKLHGARCHLPHCSGGPSQRPEGAFKCEACPMSFGTQRGLSTHERHAHPAVRNVKRRGTDPPEKKWTFQELALLRELCETYKDHRHPNKKISEILTSKTIDQIKYQRRKLRMLGEDPQEAAPATEGGCDPVDPGNACFEEPEISGNNQIESWKFQLELAIMTQTEVPPVLRWVHTRLINTWVTLKGNREALESGINEFIKVTLYGAIKAFNKDKIKENKCKEKFFKRIGHQKKSKKRNAKKRYSYARCQELLVENPRRLADAIVNNDQAFLQPAREPPDAEEVRRLYEDLWGKTGPVDAPVPGNRASELSLSEFFPPIAVEDVAERIKKIRMKAAAGPDGFQKEHLLIPGLPIILAKIYNILCYISYFPPIWKENRTTLIPKANKDSSLVENWRPITIGPILGRIFSAIIDGRIRRGIVQNPRQKGFTAESGCKINIDLLSAALDYSKREKGGVFTIVDISKAFDTVPHSAIKPCLVRKGVPAPITELISKMYENIKTRIRAGNNMGVDIAILRGVKQGDPLSPLLFNLCLEPLLELMETQTSGININETRKIPVLAFADDVVLLGADVGEAQRQVDMLDKYLEDFGMNISRGKSQTFQVVSKRDTWFIEEPKIRLRENTIPTVDPGEVFRYLGAKMGPWKGVHCGIIVPELLSVMRRVRKLSLKPCQKFDLITKYILPRYIYHLLVNPPGDCVLKLLDSEIRQEIKAIFHLMPSTATGFFYAPKSWGGLGLPRFEHIIKLGTLKSAIKIKNSVDPAVSSLVDDQTEMKLKKTANSLRINWPASIEDIEKARKRLKAAHIRQWADLRSQGQGVFDFSRNRIGNAWLVDNKLLKPSRFIDALKLRTNTFGTRTVLARADKNIDVTCRKCRAQPETLGHILGLCQYTKGLRIKRHDEAKMTLAEALRKKNEVFIEPTLKVGGILYKPDLVVKNEERVLVVDVTVRYENKDYLSKAEKEKSEKYRPCLEHLKAKFNVSRGQVIPVVLGSRGAVPLFTERCLKLLGIGDQTIKTMALNVLRSSIELCNIFLDE

SEQ ID NO: 23330 - protein, 1101 aa, Bombus polaris
MIDDSASSLVYEINVPLVSNQVACPVCEKREVHLFFLNLSDLDRHLDQHHLEALIQWKCLQCQRGFPKLHGARCHIPKCSGPTQRETGADKCENGPMSFGTQRGLSTHERHAHPAARNAKRRGADPPGRNENENRKDWKVEEVTLLKELWEVYRNHRHPNKEIQKVLTNKTIDQIKYQRRKLNLVGEASSQEVTQATEGGCDPVNSGNAYFEEPVFSGNNDEELIQEWRLQLDNSITAPVEMPPVLREVHTRIIDIWAIYKDLNELLEDRINDLIVTSLYGAIKQVKNSCENSNEKRVIKGKKNKKNSRNSKKRYSYARCQELFNECPKKLAEAIINNDQAYLETTRQPPEAVEIRKLYNDLWGKTGPESVPIPANRAPGLSITELFPPITAEDVAERINKIRKKAAAGPDGFVKDDLMIPGLPIILAKIYNIMCYGSFFPSVWKENRTTLIPKANKTSSQVENWRPITIGPILGRIFSSILDGRVRRGVVFNLRQKGFTSENGCKINIDLLSAALSYSKRNKGGVFTIVDISKAFDTIPHSALKPCLARKGVPAPIIDLIDNMYRGSHTTIRANGNIGVEIKILRGVKQGDPLSPLLFNLCPEAFLETIEENTSGINVSDTRKVPVLAFADDVVLLGEDEGEAQRQVDALQSYLSDLGMNISRDKSQVFQIIAKKDTWYVEEPTIMLGEESIPTVDPDQAFRYLGAKVGPWKGVHCGVIVPEILSVVRRVRKLSLKPCQKIELLTKFLFPRYIYHLLINPPSDSVLKLLDGEVRQEIKAILHLVPSTATGFFYAPKSCGGLGLPRFEHLVKLGTLKAAIKIKNSIDPTVSALIGDEEDKKLKKIANSLRINWPASLEDLEKAKRRLKATHVKQWAELRSQGQGVSDFAKNSSGNIWLEEYNLLKPSRFIDALRLRTNTFGTKVVLARADKKIDVTCRRCRAQPETLGHILGLCQYTKGLRIKRHDEVKSILADRLKRNNEVFIEPTLTVGGDLFKPDLVIKNEERVLVVDVTVRYENKDYLSKAEKEKVDKYTPCIKYLKEKFGVGGGRVIPIVLGSRGAITPKTEQTLKELGIAKHDIKTLVMNVLRSSTEMCNIFLDN

SEQ ID NO: 23331 - protein, 705 aa, Bombus sylvestris
MRIARMRNKAAAGPDGFKKEHLLIPGLPAIMSKVYNICWYSGYFPTIWKENRTTLIPKANKPSSLVENWRPITIGPVLGRIFSSILDDKIRRGIVLNPRQKGFTSENGCKANVDLLSAALDYSKRNNGGIFTIVDISKAFDTVPHSALKPCLARKGVPAPIINLITKMYEGNQTKIKAANNIGVEINILRGVKQGDPLSPLLFNLCIEPLIETIEELTSGINISHNHKVSILAFADDIVVLGENEREAQRQVDILHGYLRGLGMKISGEKSLTFQVIAKKDTWFVQDPKIGIENKMIPTVDPDEAFRYLGAKMGPWKGVHCGVIVPELLSVVKRVRKLSLKPCQKLELLVKHIFPRYIFHLLINPPGDGVLKMLDGEVRQEIKAIFHLMPSTATGFFYTPKSWGGLGVPRFEHIVKLGTLKNAIKMKTSIDPAVSGLIDEAAEAKLKKIANSLRINWPATLEDIEKSRKILKASHVKRWAELKSQGQGVLDFSKNKAGNVWLEEHNLLKPSRFIDALRLRTNTFGTKVVLARADKNIDVACRRCRAQPETLGHILGLCQYTKGLRIKRHDEVKSILVDSLRKNNQVFVEPSLRVGSDLFKPDLVVKNEERVLVVDVTVRYENRDYLQKAEKEKIDKYANVLQHLKEKFKVGEGSVLPVVLGSRGAITPNTLKILKTLSISDKDIKTIIMNVLRSSIEMCNIFLDY

SEQ ID NO: 23332 - protein, 1123 aa, Bombus bifarius
MVNKDTESASDAASLGPGDVAADSSALEGTSVDDLASSPDTIDIMVPIVGDQVACPVCQKREIDLFFLSLSDLGRHLEQHHVTARIQWRCKDCGKGFPKLHGARCHLPHCRGTSQGPSGSYRCETCPMSFGTLRGLSTHERHAHPAVRNVKRRGTDPPEKKWTAEELAQLRELCEIYKDHKFPNKMISEILTSKTIEQIRYQRKKLRLIGEEASSQEPTQVTEGGCDPVDPGNACFEEPGVSGLEYEQWRLQLESAIMTQVEVPPVLRWVHTRLMTIWVSLKGNREALESAINEFLEFTLYGAIKEINSKKRASSAKNKRIGHQGKKKGNRNARKRYSYARCQELFTENPRRLADAVINDDRAFLQPARDLPDAEEVRRLYEDLWGQTGPVEAPVPGSRASELSLCEVFPPIAVSDVAEKLSRIRMKAAAGPDGFQKEHLLIPGLPTILAVLYNILLYCSYFPPIWKENRTTLIPKPNKSSSLVENWRPITIGPILGRIFSSIIDGRIRRGIVLNPRQKGFTAESGCKINIDLLSAALDYSKKKKGGVFTIVDISKAFDTVPHSAIVPCLRRKGVPIPITDLIRNMYNEGKTTIKSKNSTGVEIKILRGVKQGDPLSPLLFNLCLEPLLDSIEQQTSGINVNKTRKIPVLAFADDVVLLGADIGEAQRQVDVLDEYLNGLGMTISRDKCQAFQVVAERRTWFIKEPKIKHGNNTIPTVDPDEAFRYLGAKMGPWKGIHCGIIVPELLSVVRRVRKLSLKPCQKLELITKHIFPRYIYNLLVSPPSDSVLRLLDSEVRQEIKAIFHLTPSTATGFFYAPKSWGGLGLPRFEHIVKLGTLKSAIKIKDSIDPAVSSLVDEKYNEKLKKMANSLRINWPASVEDIERARKRLKAGHVKQWAELRSQGQGVPDFSRSKAGNVWLEDCELLKPSRFIDALKLRTNTVGTRTVLARVDKNLDINCRKCRAQPETLGHILGLCQYTKGLRIKRHDEAKMTLAESLRKNNEVFVEPTLRVGGALFKPDLVVKNEERVLVVDVTVRYENKDYLSRAEKEKVNKYRPCLEHLKARFNVGKGEVIPVVLGSRGAITPSTESNLKRMGIGGQIIKTLVLNVLRSSIELCNIFLDT

SEQ ID NO: 23333 - protein, 1142 aa, Bombus polaris
MRWNVGKIKIWSTSKIIMQRDENTHASDAAPLGPGGAVADSSALEGTFDDDLAMSQDMIYEITVPIVGNQVACPICQKREIHLFFLSLADLGRHLDQHHTTALLEWKCRDCGKGFSKLHGARCHLPHCKGPNEKPEGPYKCEACPMSFGTQRGLSTHERHAHPAVRNVKRRGEDPPERGWTFEEVTLLRELCEQFKDHRHPNKKISEILTNKTIDQIKYQRKKLRLVGEDGGSQEVAQVTEGGCGLVDPGNVRLVEPGISENREIDFNNWRLQLEQAINKHADVPPVLRWVHIRLMNIWVALKENRESLESGINDFIATLYGAIKQINKIDKKEKKLKRRIGHQHKKKSRNARKKYSYARCQELFLENPKRLAEAITSNDQALLQQAREPPEATEVRRLYDELWGQTGPTDAPIPSSGASELSLCEIFPPISEEDVGGRISKIRKKAAAGPDGLIKEHLLIPGLPTILAKLYNILCYCSYFPPAWKENRTTLIPKPNRPSSQVENWRPITIGPILGRIFSSIIDGRIRKGIVLSPRQKGFTAESGCKINVDLLSAALDYSKKEKGGVFTIVDISKAFDTVPHSAIKPCLFRKGVPAPIVDLIDNMYKNVKTKIRAKDQMGVEIEILRGVKQGDPLSPLLFNLCLEPLLEMIDQQTSGINVNENRKIPVLAFADDVVLLGADVGEAQRQVDMLCGYLNGLGMSISREKSQTFQIVAKRDTWFIQDPSVKIGGNTIPTVDPGEAFKYLGTKMGPWKGVHCGIIVPELLSMMRRVRKLSLKPCQKLELITTYIFPKYVYHLLINPPGDSVLRLLDSEVRQEVKAIFHLVPSTATGFFYAPKSWGGLGLPRFEHLVKLGTLKSAIKIKESTDPAVSGLVDERSDTKLRKIANSLRINWPASLEDIGRARRRLKAAHIRQWADLRSQGQGVLDFSRNKTGNVWLADYKLLKASRYIDALKLRTNTFGTRAVLSRADKDIDVACRKCRAQPETLEHILGLCQYTKGLRIKRHDEAKMTLADNLRKKSEVFVEPTIKVGGVLYKPDLVVKNEDRVLIVDVTVRYENKDYLSKAEKEKVDKYQPCLEYLKAKFNVSKGEVVPVVLGSRGAITPFTERSLKLMGIGDQTIKTLVLNVLRSSIEICNIFLDD

SEQ ID NO: 23334 - protein, 1123 aa, Bombus vancouverensis
MVNKDKESASDAASLGPGDVAADSSALEGTSVDDLASSPDTIDIMVPIVGDQVACPVCRKREIDLFFLSLSDLGRHLEQHHVTGRIQWRCKDCGKGFPKLHGARCHLPHCRGTSQGPSGSYRCETCPMSFGTLRGLSTHERHAHPAVRNVKRRGTDPPEKKWTAEELAQLRELWEMYKDHKFPNKMISEILTSKTIEQIRYQRKKLRLIGEETSSQEPTQVTEGGCDPVDPGNACFEEPGVSGLEYEQWRLQLESAIMTQVEVPPVLRWVHTRLMTIWVSLKGNREALESAINEFLKFTLYGAIKEINSKKRASSVKNKRIGHQGKKKGNRNARKRYSYARCQELFTENPRRLADAVINDDRAFLQPARDLPDAEEVRRLYEDLWGQTGPVEAPVPGSRASELSLCEVFPPIAVEDVAEKLSKIRMKAAAGPDGFQKEHLLIPGLPTILAVLYNILLYCSYFPPIWKENRTTLIPKPNKSSSLVENWRPITIGPILGRIFSSIIDGRIRRGIVLNPRQKGFTAESGCKINIDLLSAALDYSKKKKGGVFTIVDISKAFDTVPHSAIVPCLRRKGVPIPITDLIWNMYNEGKTTIKSKNSTGVEITILRGVKQGDPLSPLLFNLCLEPLLDLIEQQTSGINVNETRKIPVLAFADDVVLLGADIGEAQRQVDVLDEYLNGLGMTISRDKCQAFQIVAERRTWFIKEPKIKHGNNTIQTVDPDEAFRYLGAKMGPWKGIHCGIIVPELLSVVRRVRKLSLKPCQKLELITKHIFPRYIYNLLVSPPSDSVLRLLDSEVRQEIKAIFHLTPSTATGFFYAPKSWGGLGLPRFEHIVKLGTLKSAIKIKDSIDPAVSSLVDEKYNEKLKKMANSLRINWPASVEDIERARKRLKAGHVKQWAELRSQGQGVPDFSRSKAGNVWLKDCELLKPSRFIDALKLRTNTVGTRTVLARVDKNLDINCRKCRAQPETLGHILGLCQYTKGLRIKRHDEAKMTLAESLRKNNEVFVEPTLRVGGALFKPDLVVKNEERVLVVDVTVRYENKDYLSRAEKEKVNKYRPCLEHLKARFNVGKGEVIPVVLGSRGAITPSTESNLKRMGIGGQIIKTLVLNVLRSSIELCNIFLDT

SEQ ID NO: 23335 - protein, 1126 aa, Bombus polaris
MMQRRDNEDASDAAPLGPGGAVADSSAQEGTNVDDLAISPDMIYEITVPIVGNQVACPICQKREIYLFFLSLADLGRHLDQHHTTALLEWKCKDCGKGFSKLHGARCHLPHCKGPNEKPEGPYKCEACPMSFGTQRGLSTHERHAHPAVRNVKRRGEDPPERGWTFEEVTLLRELCEQFKDHRHPNKKISEILTNKTIDQIKYQRKKLRLVGEDGGSQEVTQVTEGGCGHVDPGNVRLEEPGISESNEMEFDNWRLQLEQAINKHADVPPVLRWVHIRLMNIWVALKESRESLESGINDFIATLYGAIRKINNIEKESKKLKIRIGHQRKRKSRNAKKKYSYARCQELFLENPKRLAEAVTSNDQAFLQQAREPPEATEVRRLYDELWGQTGPTDAPIPSSGASELSLCEIFPPINEEDVGGRISKIRKKAAAGPDGLIKEHLLIPGLPTILAKLYNILCYCSYFPPAWKENRTTLIPKPNRPSSQVGNWRPITIGPILGRIFSSIIDGRIRKGIVLSPRQKGFTAESGCKINIDLLSAALDYSKKEKGGVFTIVDISKAFDTVPHSAIKPCLLRKGVPAPIVDLVDNMYKNVKTKISAKDQMGVEIEILRGVKQGDPLSPLLFNLCLEPLLEMIDHQTSGINVNENRKIPILAFADDVVLLGADIGEAQRQVDTLCGYLNGLGMSISREKSQVFQIVAKRDTWFIQDPNIKIGNNTIPTVDPGEAFKYLGTKMGPWKGVHCGIIVPELLSMMRRVRKLSLKPCQKLELITTYIFPKYIYHLLINPLGDSVLRLLDSEVRQEVKAIFHLVPSTATGFFYAPKSWGGLGLPRFEHLVKLGTLKSAIKIKESTDPAVSGLVDERSDLKLRKIANSLRINWPASLEDIEKARKRLKAAHIRQWADLRSQGQGVLDFSRNRTGNVWLTDYKLLKPSRYIDALKLRTNTFGTRAVLARADKNIDVACRKCRAQPETLGHILGLCQYTKGLRIKRHDEAKMTLADNLRKKSEVFVEPTIKVGGVLYKPDLVVKNEDRVLIVDVTVRYENKDYLSKAEKEKVDKYQPCLDHLKAKFNVSKGEVVPVVLGSRGAITPFTERSLKLMGIGDQTIKTLVLNVLRSSIEICNIFLDD

SEQ ID NO: 23336 - protein, 1132 aa, Bombus sylvestris
MSNKQASDAAPLGPGGAVADSSASEGTIVDELAMPPDMTFKIMVPLVGDRVGCPICEARETHLFFMSLSDLDRHLDQNHLNAGVQWGCRCGRSFPKLHGAQCHLPKCSGTNKKTEGAFKCEECPMSFGTQRGLSTHERHAHPALRNVKRRGANPPSKVWSVEEVALLKELDDKFKNHRFPNVEISKVLTTKSIEQIKYQRRKLKAASEDPALQGATLETEGGCDPVTPGNASPQPEISGYTATNENNESEWRLELIRSIETPTEVPLVLKEVNDRLQNMWRHELGNEEALTREINNLIETHLYGAIFKNSDAEKRKQKERREHKNKPETATGKSNKQNSRNSRKRFSYARCQELFHECPKKLADVVINNDRTLLEPARQLPEAADIRRLYSDLWGRADAIVAPPRSGGASALSLSEMFPPISAEDVMARINKIKKKTAAGPDGLTREHLLIPGLPAVLAKIYNICCFCSYYPAVWKNNRTTLIPKPNKNSSQVENWRPITIGPILGRIFSAILDGRIRKGIVLNLRQKGFTSENGCKINTELLSAALDHSKRESGGIFTIVDISKAFDTIPHSALAPCLARKGVPAPIIELIQNMYKNNITTIRANGNIGVEIKILRGVKQGDPLSPLLFNLCLEPLLEILEEQTSGIRINSNHKIPVLAFADDVVLLGANKREAQCQVEVLHKYLGSLNMNISRDKSRTFQVVPKRDTWFVDDPQLTIDGSNIPKIDPEEVFRYLGAKMGPWKGLHCGIIVPELISVVRRVRKLYLKPHQKIELLEKYVFPRYIFHLLTKPPSDSTLKLLDSEVRQEIKGILHLVPSTTTGLFYAPKAYGGLGLPRFEHLVKLGTLKSKLKMKESKDPAVSSLVDINEETKLKKMANSLRINWPATLDDIDRAKRRLKCAHVKQWSELKSQGQGVTDFIRSRTGNVWLKDQNLLKPSRFIDALRLRTNTFGTRTVLARADKVLDVNCRKCRAQPETLGHVLGLCQYTKGPRIKRHDEVKSILADRLRRNNEVFVEPTLKVGSNLYKPDLVIKNEERVLVVDVTVRYENKDYLSKAEKEKVDKYRRCVEHLKEKFKVGEGEVLPVVLGSRGAITPNTEQNLKVLGINKQDIKTIVLNVLPSSIEMCNIFLDG

SEQ ID NO: 23337 - protein, 1133 aa, Bombus vancouverensis
MFEENNRINIMVNKDIESASDAASLGPGDVAADSSALEGTSVDDLASSPDTIDIMVPIVGDQVACPVCQKREIDLFFLSLSDLGRHLEQHHVTARIQWRCKDCGKGFPKLHGARCHLPHCRGTSQGPSGSYRCETCPMSFGTLRGLSTHERHAHPAVRNVKRRGTDPPEKKWTAEELAQLRELWEIYKDHKFPNKMISEILTSKTIEQIRYQRKKLRLIGEETSSQEPTQVTEGGCDPVDPGNACFEEPGVSGLEYEQWRLQLESAIMTQVEVPPVLRWVHTRLMTIWVSLKGNREALESAINEFLEFTLYGAIKEINSKKRASSVKNKRIGHQGKKKGNRNARKRYSYARCQELFTENPRRLADAVINDDRAFLQPARDLPDAEEVRRLYEDLWGQTGPVEAPVPGSRASELSLCEVFPPIAVEDVAEKLSRIRMKAAAGPDGFQKEHLLIPGLPTILAILYNILLYCSYFPPIWKENRTTLIPKPNKSSSLVENWRPITIGPILGRIFSSIIDGRIRRGIVLNPRQKGFTAESGCKINIDLLSAALDYSKKKKGGVFTIVDISKAFDTVPHSAIVPCLRRKGVPIPITDLIRNMYSEGKTTIKSKNSTGVEIKILRGVKQGDPLSPLLFNLCLEPLLDLIEQQTSGINVNETRKIPVLAFADDVVLLGADIGEAQRQVDVLDEYLNGLGMTISRDKCQAFQVVAERRTWFIKEPKIKHGNNTIPTVDPDEAFRYLGAKMGPWKGIHCGIIVPELLSVVRRVRKLSLKPCQKLELITKHIFPRYIYNLLVSPPSDSVLRLLDSEVRQEIKAIFHLTPSTATGFFYAPKSWGGLGLPRFEHIVKLGTLKSAIKIKDSIDPAVSSLVDEKYNEKLKKMANSLRINWPASVEDIERARKRLKAGHVKQWAELRSQGQGVPDFSRSKAGNVWLKDCELLKPSRFIDALKLRTNTVGTRTVLARVDKNLDINCRKCRAQPETLGHILGLCQYTKGLRIKRHDEAKMTLAESLRKNNEVFVEPTLRVGGALFKPDLVVKNEERVLVVDVTVRYENKDYLSRAEKEKVNKYRPCLEHLKARFNVGKGEVIPVVLGSRGAITPSTESNLKRMGIGGQIIKTLVLNVLRSSIELCNIFLDT

SEQ ID NO: 23338 - protein, 854 aa, Bombus sylvestris
MWRHELGNEEALTSEINILIETHLYGAIFKNSEANESKQKERREHKNKPEAATGKSNKRKSRNSRKRFSYARCQELFHECPKKLADVVINNDRTLLEPARQLPEAADIRRLYSDLWGRADAIVAPPRSGGASALSLSEMFPPISAEDVMARINKIKKKTAAGPDGLTREHLLIPGLPAVLAKIYNICCFFSYYPAVWKNNRTTLIPKPNKNSSQVENWRPITIGPILGRIFSAILDGRIRKGIVLNLRQKGFTSENGCKINTELLSAALDHSKRESGGIFTIVDISKAFDTIPHSALAPCLARKGVPAPIIELIQNMYKNNITTIRANGNIGVEIKILRGVKQGDPLSPLLFNLCLEPLLEILEEQTSGIRINSNHKIPVLAFADDVVLLGANKREAQCQVEVLHKYLGSLNMNISRDKSRTFQVVPKRDTWFVDDPQLCIDGNYIPKIDPEEVFRYLGAKMGPWKGLHCGIIVPELISVVRRVRKLYLKPHQKIELLEKYVFPRYIFHLLTKPPSDSTLKLLDSEVRQEIKGILHLVPSTTTGLFYAPKAYGGLGLPRFEHLVKLGTLKSKLKMKESKDPAVSSLVDISEEAKLKKMANSLRINWPATLDDIDRAKRRLKCAHVKQWSELKNQGQGVTDFIRSRTGNVWLKDQNLLKPSRFIDALRLRTNTFGTRTVLARADKVLDVNCRKCRAQPETLGHVLGLCQYTKGLRIKRHDEVKSILADRLRRKNEVFVEPTLKVGSNLYKPDLVIKNEERVLVVDVTVRYENKDYLSKAEKEKVDKYRRCVEYLKEKFEVGEGEVLPVVLGSRGAITRNTEQNLKVLGINKQDIKTIVLNVLRSSIEMCNIFLDG

SEQ ID NO: 23339 - protein, 991 aa, Bombus sylvicola
MNFDVMVPIVGTQVACPVCQEGGINLFFLSLSDLGKHLEQHHVTARIQWRCHDCGKGFSKLHGAQCHLPHCSGPSEISEGPYKCEACPRSFPTQRGLSTHERHAHPAVRNVKRRGTDPPKSKWTFQELALLRELCETYKDHRYINKKISEVLTNKTIDQIKYQRKKLIEEDPSSQEATQVTEGGCDPVDPGNAHFEEPGINGDIDEWKLQLERAIEIQTEVPPVVRWVHTRLMTVWGTLKGNREALGSGINEFLKTLYGAIELYNKDKDINVKKRKPIIRQNKRNRKNAKKRYSFARCQELFLENPKRLADVVVNNDQAFLQPARDPPDAAEVRRLYEDLWGRIGPTNAPVPGNRAPELSLCEIFPPIAVEDVEEKIKRIRKKAAAGPDGFQKDHLLIPGLPIILAKLFNMLCYISYFPSAWKENRTTLIPKVNKTSSLVENWRPITIGPILGRIFSSIIDGRIRGGITFNPRQKGFTAESGCKINIELLSAALDYSKKEKGGIFTIVDISKAFDSVPHSAIEPCLARKGVPAPIVKLIQNMYQGSYTTIKTRNNMGVKIEMLRGVKQGDPLSPLLFNLCLEPLLELIQEKTSGININKTRKIPVLAFADDVVLLGADDGEAQCQVDLLCQYLNGLGMNISREKSQAFQIVSKRDTWFVKDPELKIGENIIPTVDPGEAFRYLGAKMGPWKGIHCGIIVPELLGVMRRVRKLSLKPCQKLDLITKYIFPRYIYHLLVNPPGDCVLRLLDSEVRQEIKEIFHLVPSTATGFFYAPKSWGLGLPRFEHIIKLGTLKNAIKMKHSNDPAVSGLVDEHGELKLKRIANSLRINWPASIEDIEKARKILKAAHIKQWAELRSQGQGVLDFSRNKTGNIWLREYELLKPSRFIDALKLRTNTFGTKTVLARADKNIDVACRKCRAQPETLGHILGLCQYTKGLRIKRHDEAKTILADNLRKNNEVFIEPTLKVEGNLYKPDIVIKNEERVLIVSGVE

SEQ ID NO: 23340 - protein, 1121 aa, Bombus campestris
MSNVIASDAAPLGPGGAVADSSASEGTNVDEQATSPDMLKIMVPLVGNRVGCPVCEKREVHLFFMSLADLDRHLDQNHLNAGVQWGCRCGRSFPKLHGAQCHLPKCGGTVKRTEGAFKCEECPMSFGSQRDLSTHERHAHPALRNIKRRGADPPSKVWKVEEVALLKELEIKFKDHRFPNVEISKVLTSKTIDQIKYQRRKLRAASEDPALQGATPETEGGCDPVTPGNARAQPVNGNEIEESEWRLNLIHSIETPIEVPPVLEEVYSRLKHIWRHAQGNEKALAEDINILIKKDLYGAIIKYNEAHAINKNDSKTANKPKAAMGNRKNRNSRKRFTYARCQELFRECPKKLADVVINNDRALLEPARQLPEAADVRRLYLDLWGRAEAIDARIQPSSASSLSLIDLFPPITAEEVAARIHKMKKKTAAGPEGLTREHLLMPGLPAILAKIFNISYFCSCYPSEWKVNRTTLIAKPNKDHSLVENWRPITIGPILGRIFSAILDGRIRKGVVLNLRQKGFTTENGCKINIDLLSAALENSKKESGGIFTIVDISKAFDTIPHSALAPCLARKGVPAPIVDLVQEMYKGNTTKIRANGNIGVEIEILRGVKQGDPLSPLLFNLCLEPLLEKLEEQTSGIKINNEYKIPVLAFADDIVLLGANKREAQCQVEMLHKYLNSLNMSISRDKSQTFQVVPKRDTWFVIDPQIRLDDALIPTINPEEVFKYLGAKMGPWKGLHCGIIVPELLSVIKRTRKLSLKPCQKIELIQKYIFPRYTYHLLVKPPSDSVLKLLDSEVRQEIKGILHLVSSTATGLFYAPKACGGLGLPRFEHMIKLGTLKNFIKTNNSIDPAVSSIANMDNVKIKKMANSLRINWPASLEDIERAKRRLKYAHVKNWAELKSQGQGVADFARSRTGNVWLTETNLLKPSRFIDALRLRSNTFGTRSVLARADRNMDVTCRRCRAQPETLGHILGLCQYTKGLRIKRHDEVKSILAEKLRERNEVFVEPTLKVGGNLYKPDLVIKNEGRILVVDVTVRYENKDYLSKAEKEKIDKYRSCLSYLKEKFKVSEGEVLPVVLGSRGAITPNTERNLKILGIGKRDIKTIVLNVLRSSIEMSNIFLDG

SEQ ID NO: 23341 - protein, 1122 aa, Bombus campestris
MSRDNASDAAPLGPGGAVADSSASEGTNVDELATSPDIMRIMVPLVGDRVGCPVCEKREVHLFFMSLADLDRHLDQNHLNAGVQWGCRCGRSFPKLHGAQCHLPKCSGTVKKTEGAYKCEECPMSFGSQRGLSTHERHAHPALRNTKRRGADPPSKVWLVEEVALLKELEIKFKDHRFPNVEISKVLTSKTVEQIKYQRRKLRAASEDLALQGATLETEGGCDPVTPGNARAQPESGNENIESEWRLQLIHSIETPIEVPPVLEEVYSRLKYIWRHAQGNEKALAKEINAFIKNNLYGAIIKYYEAHTTHNKNKDKTENKPKAAMGKYKNRNSRKRFTYARCQELFRECPKKLADVVINNDRALLEPARQLPEAADVRGLYLDLWDRAEAIDALFQPSSASSLSLIDLFPPITAEEVAARIQKIKKKTAAGPEGLTREHLLMPGLPAVLAKTFNICYFCSCYPSEWKVNRTTLIAKPNKDHSLVENWRPITIGPILGRIFSAILDGRIRKGVVLNLRQKGFTTENGCKINIDLLSAALENSKKESGGIFTIVDISKAFDTIPHSALAPCLARKGVPAPIVDLVQEMYKGNTTKIRANGNIGVEIEILRGVKQGDPLSPLLFNLCLEPLLEQLEEQTSGIKINKDHKIPVLAFADDIVLLGANKREAQCQVEMLHKYLNSLKMSISRDKSQTFQVVPKRDTWFVNDPQLRLEDKLIPTISPDEVFKYLGAKMGPWKGLHCGIIVPELLSVIKRTRKLCLKPCQKIELIQKYIFPRYTYHLLVKPPSDSVLKLLDSEVRQEIKAILHLVPSTATGLFYAPKACGGLGLPRFEHLVKLGTLKNFIKTKNSIDPAVSSLINMDDTRIKKMANSLRINWPATLEDIERAKRRLKYAHLKSWSELKSQGQGVADFARSRTGNVWLTEPNLLKPSRFIDALRLRSNTFGTRTVLAQADKNIDITCRRCRAQPETLGHILGLCQYTKGLRIERHDEVKSILAEKLRERNEVFVEPTLKVGGNLYKPDLVIKNEGRILVVDVTVRYENKDYLSKAEKEKVDKYRSCLSYLKEKFKVSEGEVLPVVLGSRGAITPNAERNLKMLGIGNKDIKTIVLNVLRSSIEMSNIFLDG

SEQ ID NO: 23342 - protein, 1084 aa, Bombus campestris
MIKVMVPLVGDRVGCPVCEKREVHLFFMSLADLDRHLDQNHLNAGVQWGCRCGRSFPKLHGAQCHLPKCGGTVKRTEGAYKCEECPMSFGSQRGLSTHERHAHPALRNIKRRGADPPSKIWKVEEVALLKELEVKFKEHRFPNVEISKVLTTKTVEQIKYQRRKLRAASEDPALQGATLETEGGCDPVTPGNARAQPESGNDNTESEWRLLLIHSIETPIEVPPVLEEVYSRLKHIWRHAQGNEKALAEDINIFIKNDLYRAMIKYNEAQVIKKNNNKTANKPKAAMGKKKNRNSRKRFTYARCQELFRECPKKLADVVINNDRALLEPARQLPEAADVRRLYSDLWGRAEAIDARFQSSSASSLSLIDLFPPITAEEVAARIHKIKKKTAAGPEGLTREHLLMPGLPAILAKVFNICYFCSCYPSEWKVNRTTLIAKPNKDHSLVENWRPITIGPILGRIFSAILDGRIRKGVVLNLRQKGFTTENGCKINIDLLSAALENSKKESGGIFTIVDISKAFDTIPHSALAPCLARKGVPAPIVDLVLEMYRGNKTKIRANGNIGVEIEILRGVKQGDPLSPLLFNLCLEPLLEKLEEQTSGIKINNEYKIPVLAFADDIVLLGANKREAQCQVEMLHKYLNSLNMSISRDKSQTFQVVPKRDTWFVIDPQIRLDDASIPTINPEEVFKYLGAKMGPWKGLHCGIIVPELLSVIKRTRKLSLKPCQKIELIQKYIFPRYTYHLLVKPPSDSVLKLLDSEVRQEVKAILHLASSTATGLFYAPKACGGLGLPRFEHMVKLGTLKNFIKVNNSIDPAVSSIANMDNAKIKKMANSLRINWPASLEDIERAKRRLKYAHVKNWAELKSQGQGVADFARSRTGNVWLTETNLLKPSRFIDALRLRSNTFGTRTVLARADKNIDVTCRRCRAQPETLGHILGLCQYTKGLRMKRHDEVKSILAEKLRERNEVFVEPTLKVGGNLYKPDLVIKNEGRILVVDVTVRYENKDYLSKAEKEKIDKYRSCLSYLKEKFKVSEGEVLPVVLGSRGAITPNTERNLKLLGIGNRDIKTIVLNVLRSSIEMSNIFLDG

SEQ ID NO: 23343 - protein, 1121 aa, Bombus campestris
MSNNNASDAAPLGPGGAVADSSASEGTNVDELATSPDMIKVMVPLVGDRVGCPVCEKREVHLFFMSLADLDRHLDQNHLNAGVQWGCRCGRSFPKLHGAQCHLPKCGGTVKRTEGAYKCEECPMSFGSQRGLSTHERHAHPALRNIKRRGADPPSKIWKVEEVALLKELEVKFKEHRFPNVEISKVLTTKTVEQIKYQRRKLRAASEDPALQGATLETEGGCDPVTPGNARAQPVNGNEIEESEWRLNLIHSIETPIEVPPVLEEVYSRLKHIWRHAQGNEKALAKDINILIKNDLYGAIFKYNEAQVVKKNNNKTANKPKAAMGKKKNRNSRKRFTYARCQELFRECPKKLADVVINNDRALLEPARQLPEAADIRRLYSDLWGRAEAIDARFQSSSASSLSLIDLFPPITAEEVAARIQKIKKKTAAGPEGLTREHLLMPGLPAVLAKIFNICYFCSCYPSEWRVNRTTLIAKPNRDHSLVENWRPITIGPILGRIFSAILDGRIRKGVVLNLRQKGFTTENGCKINIDLLSSALEYSKKESGGIFTIVDISKAFDTIPHSALAPCLARKGVPAPIVDLIQEMYKGNVTRIRANGNIGVEIEILRGVKQGDPLSPLLFNLCLEPLLEQLEEQTSGIKINNDHKIPVLAFADDIVLLGANKREAQCQVEMLHKYLNSLKMSISRDKSQTFQVVSKRDTWFVNDPQLRLEDKLIPTISPDEVFKYLGAKMGPWKGLHCGIIVPELLSVIKRTRKLCLKPCQKIELIQKYIFPRYTYHLLVKPPSDSVLKLLDSEVRQEIKAILHLVPSTATGLFYAPKACGGLGLPRFEHLVKLGTLKNFIKTKNSIDPAVSSLMNTDNSKIKKMANSLRINWPATLEDIERAKRRLKYAHLKNWSELKSQGQGVADFARSRTGNVWLTETNLLKPSRFIDALRLRSNTFGTRTVLARADKNIDVTCRRCRAQPETLGHILGLCQYTKGLRIKRHDEVKSILAEKLRERNEVFVEPTLKVEGNLYKPDLVIKNEGRILVVDVTVRYENKDYLSKAEKEKIDKYRSCLSHLKEKFKVSEGEVLPVVLGSRGTIMPNAERNLKMLGIGSKDIKTIVLNVLRSSIEMSNIFLDG

SEQ ID NO: 23344 - protein, 1119 aa, Bombus campestris
MSNNNASDAAPLGPGGAVADSSASEGTNVDELATSPDMIKIMVPLVGDRVGCPVCEKREVHLFFMSLADLDRHLDQNHLNADVQWGCRCGRSFPKLHGAQCHLPKCGGTVKRTEGAYKCEECPMSFGSQRGLSTHERHAHPALRNIKRRGADPPSKIWKVEEVALLKELEIRFKEHRFPNVEISKVLTTKTIEQIKYQRRKLRAASEDPALQGATLETEGGCDPVTPGNARAQPVNGNEIEESEWRLLLIHSIETPIEVPPVLEEVYSRLKHIWRHAQGNEKALAKDINNFINKDLYGAIFRYKEAQSTNENKIANKPKAAMGNRKNRNSRKRFTYARCQELFRECPKKLADVVISNDRALLEPARQLPEAADIRRLYSELWGRAEAIDARFQSSSASSLSLIDQFPPITAEEVAARIQKIKKKTAAGPEGLTREHLLMPGLPAVLAKVFNICYFCSCYPSEWKVNRTTLIAKPNKDHSLVENWRPITIGPILGRIFSAILDGRIRKGVVLNLRQKGFTTENGCKINIDLLSAALENSKKESGGIFTIVDISKAFDTIPHSALAPCLARKGVPAPIVDLVLEMYRGNKTKIRANGNIGVEIEILRGVKQGDPLSPLLFNLCLEPLLEKLEEQTSGIKINNEYKIPVLAFADDIVLLGANKREAQCQVEMLHKYLNSLNMSISRDKSQTFQVVPKRDTWFVTDPQIRLDDALIPTINPEEVFKYLGAKMGPWKGLHCGIIVPELLSVIKRTRKLSLKPCQKIELIQKYIFPRYTYHLLVKPPSDSVLKLLDSEVRQEFKAILHLVSSTATGLFYAPKACGGLGLPRFEHMIKLGTLKNFIKINNSIDPAVSSIANMDNTKIKKMANSLRINWPASLEDIERAKRRLKYAHVKNWAELKSQGQGVADFARSRTGNVWLTETNLLKPSRFIDALRLRSNTFGTRTVLARADKNIDVTCRRCRAQPETLGHILGLCQYTKGLRIKRHDEVKSILAEKLRERNEVFVEPTLKVEGNLYKPDLVIKNEGRILVVDVTVRYENKDYLSKAEKEKIDKYRSCLSHLKEKFKVSEGEVLPVVLGSRGTITPNAERNLKMLGIGSKDIKTIVLNVLRSSIEMSNIFLDG

SEQ ID NO: 23345 - protein, 1119 aa, Bombus campestris
MSNDNASDAAPLGPGGAVADSSASEGTNVDELATSPDMIKVMVPLVGDRVGCPVCEKREVHLFFMSLADLDRHLDQNHLNAGVQWGCRCGRSFPKLHGAQCHLPKCGGTVKRTEGAYKCEECPMSFGSQRGLSTHERHAHPALRNIKRRGADPPSKIWKVEEVALLKELEIRFKEHRFPNVEISKVLTTKTIEQIKYQRRKLRAASEDPALQGATLETEGGCDPVTPGNARAQPVNGNEIEESEWRLLLIHSIETPIEVPPVLEEVYSRLKHIWRHAQGNEKALAKDINNFINKDLYGAIFRYKEAQSTNENKIANKPKAAMGNRKNRNSRKRFTYARCQELFRECPKKLADVVISNDRALLEPARQLPEAADIRRLYSELWGRAEAIDARFQSSSASSLSLIDQFPPITAEEVAARIKKIKKKTAAGPEGLAREHLLMPGLPAVLAKIFNICYFCSCYPSEWKVNRTTLIAKPNKDHSLVENWRPITIGPILGRIFSAILDGRIRKGVVLNLRQKGFTTENGCKINIDLLSAALENSKKESGGIFTIVDISKAFDTIPHSALAPCLARKGVPAPIVDLVLEMYRGNKTKIRANGNIGVEIEILRGVKQGDPLSPLLFNLCLEPLLEKLEEQTSGIKINNEYKIPVLAFADDIVLLGANKREAQCQVEMLHKYLNSLNMSISRDKSQTFQVVPKRDTWFVTDPQIRLDDALIPTINPEEVFKYLGAKMGPWKGLHCGIIVPELLSVIKRTRKLSLKPCQKIELIQKYIFPRYTYHLLVKPPSDSVLKLLDSEVRQEFKAILHLASSTATGLFYAPKACGGLGLPRFEHMIKLGTLKNFIKINNSIDPAVSSIANMDNTKIKKMANSLRINWPASLEDIERAKRRLKYAHVKNWAELKSQGQGVADFARSRTGNVWLTETNLLKPSRFIDALRLRSNTFGTRTVLARADKNIDVTCRRCRAQPETLGHILGLCQYTKGLRIKRHDEVKSILAEKLRERNEVFVEPTLKVGGNLYKPDLVIKNEGRILVVDVTVRYENKDYLSKAEKEKIDKYRSCLSHLKEKFKVSEGEVLPVVLGSRGTITPNAERNLKMLGIGSKDIKTIVLNVLRSSIEMSNIFLDG

SEQ ID NO: 23346 - protein, 1119 aa, Bombus campestris
MSNNNASDAAPLGPGGAVADSSASEGTNVDELATSPDMIKIMVPLVGDRVGCPVCEKREVHLFFMSLADLDRHLDQNHLNADVQWGCRCGRSFPKLHGAQCHLPKCGGTVKRTEGAYKCEECPMSFGSQRGLSTHERHAHPALRNIKRRGADPPSKIWKVEEVALLKELEIRFKEHRFPNVEISKVLTTKTIEQIKYQRRKLRAASEDPALQGATLETEGGCDPVTPGNARAQPVNGNEIEESEWRLLLIHSIETPIEVPPVLEEVYSRLKHIWRHAQGNEKALAKDINNFINKDLYGAIFRYKEAQSTNENKIANKPKAAMGNRKNRNSRKRFTYARCQELFRECPKKLADVVISNDRALLEPARQLPEAADIRRLYSELWGRAEAIDARFQSSSASSLSLIDQFPPITAEEVAARIQKIKKKTAAGPEGLTREHLLMPGLPAVLAIILNICYFCSCYPSEWKVNRTTLIAKPNKDHSLVENWRPITIGPILGRIFSAILDGRIRKGVVLNLRQKGFTTENGCKINIDLLSAALENSKKESGGIFTIVDISKAFDTIPHSALAPCLARKGVPAPIVDLVLEMYRGNKTKIRANGNIGVEIEILRGVKQGDPLSPLLFNLCLEPLLEKLEEQTSGIKINNEYKIPVLAFADDIVLLGANKREAQCQVEMLHKYLNSLNMSISRDKSQTFQVVPKRDTWFVTDPQIRLDDALIPTINPEEVFKYLGAKMGPWKGLHCGIIVPELLSVIKRTRKLSLKPCQKIELIQKYIFPRYTYHLLVKPPSDSVLKLLDSEVRQEFKAILHLVSSTATGLFYAPKACGGLGLPRFEHMIKLGTLKNFIKINNSIDPAVSSIANMDNTKIKKMANSLRINWPASLEDIERAKRRLKYAHVKNWAELKSQGQGVADFARSRTGNVWLTETNLLKPSRFIDALRLRSNTFGTRTVLARADKNIDVTCRRCRAQPETLGHILGLCQYTKGLRIKRHDEVKSILAEKLRERNEVFVEPTLKVEGNLYKPDLVIKNEGRILVVDVTVRYENKDYLSKAEKEKIDKYRSCLSHLKEKFKVSEGEVLPVVLGSRGTITPNAERNLKMLGIGSKDIKTIVLNVLRSSIEMSNIFLDG

SEQ ID NO: 23347 - protein, 1141 aa, Bombus campestris
MDSIGHIWIFYTDTKKKVYRTNMSNNNASDAAPLGPGGAVADSSASEGTNVDELATSPDMIKIMVPLVGDRVGCPVCEKREVHLFFMSLADLDRHLDQNHLNADVQWGCRCGRSFPKLHGAQCHLPKCGGTVKRTEGAYKCEECPMSFGSQRGLSTHERHAHPALRNIKRRGADPPSKIWKVEEVALLKELEIRFKEHRFPNVEISKVLTTKTIEQIKYQRRKLRAASEDPALQGATLETEGGCDPVTPGNARAQPVNGNEIEESEWRLLLIHSIETPIEVPPVLEEVYSRLKHIWRHAQGNEKALAKDINNFINKDLYGAIFRYKEAQSTNVNKIANKPKAAMGNRKNRNSRKRFTYARCQELFRECPKKLADVVINNDRALLEPARQLPEAADIRRLYSELWGRAEAIDARFQSSSASSLSLIDLFPPITAEEVAAKIHKIKKKTAAGPEGLTREHLLMPGLPAVLAKVFNICYFCSCYPSEWKVNRTTLIAKPNKDHSLVESWRPITIGPILGRIFSAILDGRIRKGVVLNLRQKGFTTENGCKINIDLLSSALEYSKKESGGIFTIVDISKAFDTIPHSALAPCLARKGVPAPIVDLVLEMYRGNKTKIRANGNIGVEIEILRGVKQGDPLSPLLFNLCLEPLLEKLEEQTSGIKINNEYKIPVLAFADDIVLLGANKREAQCQVEMLHKYLNSLNMSISRDKSQTFQVVPKRDTWFVTDPQIRLDDALIPTINPEEVFKYLGAKMGPWKGLHCGIIVPELLSVIKRTRKLSLKPCQKIELIQKYIFPRYTYHLLVKPPSDSVLKLLDSEVRQEVKAILHLASSTATGLFYAPKACGGLGLPRFEHMIKLGTLKNFIKINNSVDPAVSSIANMDNTKIKKMANSLRINWPASLEDIERAKRRLKYAHIKSWSELKSQGQGVADFARSRTGNVWLTETNLLKPSRFIDALRLRSNTFGTRTVLARADKNIDVTCRRCRAQPETLGHILGLCQYTKGLRIKRHDEVKSILAEKLRERNEVFVEPTLKVGGNLYKPDLVIKNEGRILVVDVTVRYENKDYLSKAEKEKIDKYRSCLSHLKEKFKVSEGEVLPVVLGSRGTITPNAERNLKMLGIGSKDIKTIVLNVLRSSIEMSNIFLDG

SEQ ID NO: 23348 - protein, 1120 aa, Bombus vancouverensis
MVNQDTQSASDAASLGPGDAVADSSALEETSVDDQALSLDMIEISVPIVGDQVACPVCQKREIDLFLLSLSDLGRHLEQHHVTARIQWRCKDCGKGFPKLHGARCHLPHCRVTSQGSGGSYRCETCPMSFGTLRGLSTHEQHAHPAVRNVKRRGKDPPEKKWTAEELAQLRELCEIYNDHKFPNKMISEILTSKTIGQIRYQRKKLRLIGEEANSQEPTQVTEGGCDHVDPGNACFEEPGVSGLEYEQWRLQLESAIVTQVEVPPVLRWVHTRLMTIWVSLKGNREALESAINEFLKITLYGAIKEINSRKRASSVSNRRIGHQKKKNRNARKRYSYARCQELFIENPRRLADAVINDDQAFLQPARDLPDAEEVKRLYEDLWGQTGPVEAPIPGSRATELSLCEVFPPIAVKDVAEKLSKIRMKAAAGPDGFQKEHLIPGLPIILAKLYNILLYCSYFPPIWKENRTTLIPKPNKPSSLVENWRPITIGPILGRIFSSIIDGRIRRGIVLNKRQKGFTAESGCKINIELLSAALDYSKKKKGGIFTTVDISKAFDTVPHSAIVPCLRRKGVPTPITDLISNMYTEGKTTIKSKDNMGVENTILRGVKQGDPLSPLLFNLCLEPLLDLIEKQTSGINISETRKIPVLAFADDVVLLDADVGEAQRQVDMRDECLNGFGMTISRDKCQIFQIVTERRTWFIKEPKIKLGNNTIPTVDPDEAFRYMGAKMGTWKGIHCVIIVPELLSVVRRVRKLSLKPCLKLELITKYIFTRYIYNLLVSPPRDCVLRLLDSEVRQEVKAIFHLTPSTTTGFFHAPKSWGGLGLPRFEHIVKLGTLKSAIKIKDSIDPAVSSLVDEKYNEKLKKMANSLRINWPDSVEDIERARKRLKAGHVKESAELRSQGQGVPDFSRNKTGNVWLEDYELLRPSRFIDALKLRTNTVGTRTVLARVDKNLDINCRKCRAQPETLGHILGLCQYNKGLRIKRHDEAKMTLAESLRRNNEVFVEPTLRVGGALFKPDLVVKNEERVLVVDVTVRYGNKDYLSRAEKEKINKYRPCFEHLKARFNVGKGEVIPVVLGSRGTITPSTESNLKRMGIGGHVIKTLVMNVLRSSIELCNIFLDT

SEQ ID NO: 23349 - protein, 1133 aa, Bombus vancouverensis
MFEENNRINIMVNKDIESASDAASLGPGDVAADSSALEGTSVDDLASSPDTIDIMVPIVGDQVACPVCQKREIDLFFLSLSDLGRHLEQHHVTARIQWRCKDCGKGFPKLHGARCHLPHCRGTSQGPSGSYRCETCPMSFGTLRGLSTHERHAHPAVRNVKRRGTDPPEKKWTAEELAQLRELWEIYKDHKFPNKMISEILTSKTIEQIRYQRKKLRLIGEETSSQEPTQVTEGGCDPVDPGNACFEEPGVSGLEYEQWRLQLESAIMTQVEVPPVLRWVHTRLMTIWVSLKGNREALESAINEFLEFTLYGAIKEINSKKRASSVKNKRIGHQGKKKGNRNARKRYSYARCQELFTENPRRLADAVINDDRAFLQPARDLPDAEEVRRLYEDLWGQTGPVEAPVPGSRASELSLCEVFPPIAVEDVAEKLSRIRMKVAAGPDGFQKEHLLIPGLPTILTILYNILLYCSYFPPIWKENRTTLIPKPNTSSSLVENWRPITIGPILGRIFSSIIDGRIRRGIVLNPRQKGFTAESGCKINIDLLSAALDYSKKKKGGVFTIVDISKAFDTVPHSAIVPCLRRKGVPIPITDLIRNMYSEGKTTIKSKNSTGVEIKILRGVKQGDPLSPLLFNLCLEPLLDLIEQQTSGISVNETRKIPVLAFADDVVLLGADIGEAQRQVDVLDEYLNGLGMTISRDKCQAFQVVAERRTWFIKEPKIKHGNNTIPTVDPDEAFRYLGAKMGPWKGIHCGIIVPELLSVVRRVRKLSLKPCQKLELITKHIFPRYIYNLLVSPPSDSVLRLLDSEVRQEIKAIFHLTPSTATGFFYAPKSWGGLGLPRFEHIVKLGTLKSAIKIKDSIDPAVSSLVDEKYNEKLKKMANSLRINWPASVEDIERARKRLKAGHVKQWAELRSQGQGVPDFSRSKAGNVWLKDCELLKPSRVIDALKLRTNTVGTRTVLARVDKNLDINCRKCRAQPETLGHILGLCQYTKGLRIKRHDEAKMTLAESLRKNNEVFVEPTLRVGGALFKPDLVVKNEERVLVVDVTVRYENKDYLSRAEKEKVNKYRPCLEHLKARFNVGKGEVIPVVLGSRGAITPSTESNLKRMGIGGQIIKTLVLNVLRSSIELCNIFLDT

SEQ ID NO: 23350 - protein, 1123 aa, Bombus vancouverensis
MVNKDTESASDAASLAPGDVAADSSALEGTSVDDLASSPDTIDIMVPIVGDQVACPVCQKREIDLFFLSLSDLGRHLEQHHVTARIQWRCKDCGKGFPKLHGARCHLPHCRVTSQGSGGSYRCETCPMSFGTLRGLSTHEQHAHPAVRNVKRRGKDPPEKKWTAEELAQLRELCQIYNDHKFPNKMISEILTSKTIEQIRYQRKKLRLIGEEANSQEPTQVTEGGCDPVDPGNACFEEPGVSGLEYEQWRLQLESAIMTQVEVPPVLRWVHTRLMTIWVSLKGNREALESTINEFLKFTLYGAIKEINSKKRASSVKNKRIGHQGKKKGNRNARKRYSYARCQELFTENPRRLADAVINDDRAFLQPARDLPDAEEVRRLYEDLWGQTGPVEAPVPGSRASELSLCEVFPPIAVEDVAEKLSRIRMKAAAGPDGFQKEHLLIPGLPTILTILYNILLYCSYFPPIWKENRTTLIPKPNKSSSLVENWRPITIGPILGRIFSSIIDGRIRRGIVLNPRQKGFTAESGCKINIDLLSAALDYSKKKKGGVFTIVDISKAFDTVPHSAIVPCLRRKGVPIPITDLIRNMYSEGKTTIKSKNSTGVEIKILRGVKQGDPLSPLLFNLCLEPLLDLIEQQTSGINVNETRKIPVLAFADDVVLLGADIGEAQRQVDVLDEYLNGLGMTISRDKCQAFQVVAERRTWFIKEPKIKHGNNTIPTVDPDEAFRYLGAKMGPWKGIHCGIIVPELLSVVRRVRKLSLKPCQKLELITKHIFPRYIYNLLVSPPSDSVLRLLDSEVRQEIKAIFHLTPSTATGFFYAPKSWGGLGLPRFEHIVKLGTLKSAIKMKNSIDPAVSSLVDEKYNEKLKKMANSLRINWPDSVEDIERARKRLKAGHVKESAELRSQGQGVPDFSRNKTGNVWLEDYELLRPSRFIDALKLRTNTVGTRTVLARVDKNLDINCRKCRAQPETLGHILGLCQYNKGLRIKRHDEAKMTLAESLRRNNEVFVEPTLRVGGALFKPDLVVKNEERVLVVDVTVRYGNKDYLSRAEKEKINKYRPCFEHLKARFNVGKGEVIPVVLGSRGTITPSTESNLKRMGIGGHVIKTLVMNVLRSSIELCNIFLDT

SEQ ID NO: 23351 - protein, 997 aa, Bombus bifarius
MRNLSFGTLRGLSTHEQHAHPAVRNVKRRGKDPPERKWTAEELAQLRELCEIYKDHKFPNKMISEILTSKTIGQIRYQRKKLRLIGEEANSQEPTQVTEGGCDPVDPGNACFEEPGISGIDYEQWRLQLESAIVSQVEVPPVLRWVRTRLMTIWVSLKGNREALESAINEFLKITLYGAIKEINSRKRASSVSNRRIGHQKKKNRNARKRYSYARCQELFIENPRRLADAVINDDQAFLQPARDLPDAEEVKRLYEDLWSQTGPVEAPIPGSRATELSLCEVFPPIAVKDVAEKLSKIRMKAAAGPDGFQKEHLLIPGLPIILAKLYNILLYCSYFPPIWKENRTTLIPKPNKPSSLVENWRPITIGPILGRIFSSIIDGRIRRGIVLNKRQKGFTAESGCKINIELLSAALDYSKKKKGGIFTTVDISKAFDTVPHSAIVPCLRRKGVPTPITDLISNMYTEGKTTIKSKDNMGVENTILRGVKQGDPLSPLLFNLCLEPLLDLIEKQTSGINISETRKIPVLAFADDVVLLDADVGEAQRQVDMLDECLNGFGMTISRDKCQIFQIVAERRTWFIKEPKIKLGNNTIPTVDPDEAFRYMGAKMGTWKGIHCVIIVPELLSVVRRVRKLSLKPCLKLELITKYIFTRYIYNLLVSPPRDCVLRLLDSEVRQEVKAIFHLTPSTATGFFHAPKSWGGLGLPRFEHIVKLGTLKSAIKIKDSIDPAVSSLVDEKYNEKLKKMANSLRINWPDSVEDIERARKRLKAGHVKQSAELRSQGQGVPDFSRNKTGNVWLEDYELLRPSRFIDALKLRTNTVGTRTVLARVDKNLDINCRKCRAQPETLGHILGLCQYNKGLRIKRHDEAKMTLAESLRRNNEVFVEPTLRVGGALFKPDLVVKNEERVLVVDVTVRYGNKDYLSRAEKEKVNKYRPCLEHLKARFNVGKGEVIPVVLGSRGTITPSTESNLKRMGIGGHVIKTLVMNVLRSSIELCNIFLDT

SEQ ID NO: 23352 - protein, 1137 aa, Bombus hortorum
MRLLRFQLTIAAMDNDSNASDAASLGPGDAVADSSAREGTSGDDLAMSPVKILVPLVGDQVACPVCERREIHLFFMTLGDLNKHLDQHHLDARIQWGCNFCEKSFPKLHGAQCHIPKCSGTNQSKNLPHKCEACPMSFGTQRGLSTHERHAHPAVRNAKRRGADPPNRMWKEEEVALLRELEEIYKNHRFPNVEISKILTSKTVDQIKYKRKQLKQASEDTSPQRATQETEGGCDPVNSGNARSIAPELSGTNENNESIQQWRLDLMNAIDQPIEVSPVLREVYDRLLVILRDYRGNRETLGLMVNGLISNSLYGAINENAKDAALTKPLGKPRVQANKKNNVNRNSRKRYSYARCQELFLECPKKLADVVLNNDRAYLEPTRQPPSEETVRRFYEDLWGQAGPSNPPIPSSGTSELSLDRFLPITAEEVGERINRIRKKAAAGPDGITKEQLLIPGLPALLAKIYNICLYCSYYPTAWKDNRTTLIPKPNKQSSLIENWRPITIGPILARIFSSILDGRIRRGVVLSLRQKGFASVFGCKINIDLFNSALTHCKRSKGGGIFTIVDISKAFDTIPHSAIRPCLERKGVPAPISELIENMYINVKTTIRAKDGMGVEVSVLRGVKQGDPLSPLLFNLCMEPLIETIEEQTSGVHINDNHAIPILAFADDIVLLGKDKREAQHQVDILQGYLRDLGMRVSAEKSQTFLVVAKRDTWFIDDPRIGLDKKDIPAVDPNEAFKYLGAKIGPWKGAHCGVIVPEILSMVRRVRKLSLKPCQKIELLTDYIFPRYIYHLLVNPPSDSVLKLLDSEIRQEFKVILHLMPSTAIGFFYTPKNCGGLGIPRFEHIIKLGILKSAINMEKSIDPAFSGLIDEDTDKKLKKIANSLRINWPATLADIEKARKRLRYDHVKQWAELRSQGQGAYDFARNKAGNVWMKQYNLLKPSRFIDALRLRTNTFGTKTVLARADKKIDVTCRKCRAQPETLGHILGLCQYTKGLRIKRHDEVKSILAAQLRKKNEVFVEPTLRVASNLYKPDLVIKNEERILVVEVTVPYENKDYLRKAEKEKIEKYSPCLQHLKDKFNIGDGEVLPVVLGSRGAITPNTLINLKKLGINDKNTKTIIMNVLRSSIEMCNIFLDH

SEQ ID NO: 23353 - protein, 1061 aa, Bombus consobrinus
MTLGDLNKHLDQHHLDARIQWGCNFCEKSFPKLHGAKCHIPKCSGTTQSKDLPYKCEACPMSFGTQRGLSTHERHAHPAVRNVKRRGADPPSKIWTEEEVALLRELEEMYKNHRFPNVEISKILTSKTVEQIKYKRKQLKQTSEDTSPQRATQETEGGCDPVISGNARNIAPESSGTNINESTQQWRLDLINAIDQPVEVPPVLREVYDRLRDILVDYRGNRETLGLKINGLISTTLYGAIKENIKDAALTKPLGKSRVQASKRNKINRNSRKRYSYARCQELFLECPKKLADVVINNDRAYLEPTRQPPSEETVRRFYEDLWGQIGPSSPPIPSSRTSELSLDRFFAPITAEEVGERINRIRKKAAAGPDGIIKEHLLIPGLPALLAKIYNICLYCSYYPTVWKDNRTTLIPKPNKPSSLIENWRPITIGPILGRIFSSILDGRIRRGVVLSLRQKGFASENGCKINIDLFNSALTHCKRSKGGIFTIVDISKAFDTIPHSAIRPCLERKGVPAPIVELIENMHINTRTTIKAKDGMGVEVSILRGVKQGDPSSPLLFNLCMEPLIEMIEEQTSGIHINDIRAIPILAFADDIVLLGKDKREAQHQVDILHGYLRDLGMKVSAEKSQIFQVVAKRDTWFIDDPQIGLDGKDIPAVDPNEAFKYLGTKIGPWKGAHCGVIVPEILSMVRRVRKLSLKPCQKIELLTNYIFPRFIYHLLVNPPSDSVLKLLDNEIRQEVKAILHLMPSTATGFIYAPKSCGGLGIPRFEHIIKLGILKSAINMEKSIDPAVSGLINEETNSKLKKIANSLRINWPATLADIEKARKRLKHDHIKQWAELRSQGQGAYDFARNKAGNVWMEQYNLLKPSRFIDALRLRTNTFGTKTVLARADKKVDVTCRRCRAQPETLGHVLGLCQYTKGLRIKRHDEVKSVLAQQLRKKNEVSIEPTLRVGSNLFKPDLVIKNEERILVVDVTVRYENKDYLRKAEKEKIEKYSSLLHHLKNKFNISDGEVLPVVLGSRGAITPNTLNNLRKLKIDPKHIKTIIMNVLRSSIEMCNIFLDH

SEQ ID NO: 23354 - protein, 1140 aa, Bombus hortorum
MDAIGCVCVGFITKGKMDENDNASDAASLGPGDAVADSSAREGTSGDDLAMSPVKILVPLVGDQVACPVCERREIHLFFMTLGDLNKHLDQHHLDARIQWGCNFCEKSFPKLHGAQCHVPKCSGTNQSKNLPHKCEACPMSFGTQRGLSTHERHAHPAVRNAKRRGADPPNRMWKVEEVALLRELEEIYKNHRFPNVEISKILTSKTVDQIKYKRKQLKQASEDTSPQRATQVTEGGCDPVNSGNARNIASESSGISNDSESIQQWRLDLLNAIDQPIEVSPVLREVYDRLRNILTDYRGNRETLGFKINGLISTTLYGAIKENSKDAALTKPLEKPRVQANKKNKINRNSRKRYSYARCQELFLECPKKLADVVVNNDRAYLEPARQPPSEETVRRFYEDLWGQTGPTNPPIPSSGTSELSLDRFSPITAEEVGERISKIRKKAAAGPDGITKEQLLIPGLPALLAKIFNICLYCSYYPTAWKDNRTTLIPKPNKSSSLIENWRPITIGPILARIFSSILDGRIRRGIVLSLRQKGFASENGCKINIDLFNSALTHCKRSKGGIFTIVDISKAFDTIPHSAIRPSLERKGVPAPISELIENMYLNTKTTIRAKDGMGVEVSILRGVKQGDPLSPLLFNLCLEPLIEKIEEQTSGVHINDNRSIPILAFADDIVLLGKDKGEAQHQVDILHGYLRDLGMKVSAEKSQVFQVVAKRDTWFLDDPKIGLDNRDIPAVDPNEAFKYLGAKIGPWKGAHCGVIVPEILSMARRVRKLSLKPCQKIELLTSYIFPRYIYHLLVNPPSDSVLKLLDSEIRQEVKAILHLMPSTATGFIYAPKNCGGLGIPRFEHIIKLGILKSAINMEKSIDPAVSGLIDEEANKRLKKIANSLRINWPATLSDIEKARKRLKYDHVRQWAELRSQGQGAYDFARNKAGNVWMEQYNLLKPSRFIDALRLRTNTFGTKTVLARADKKMDVTCRRCRAQPETLGHILGLCQYTKGLRIKRHDEVKSILANQLRKKNEVSIEPTLRVGSNLYKPDLVIKNEERILVVDVTVRYENKDYLRKAEKEKIEKYASLLQHLKNKFNIGDGEVLPVVLGSRGAITPNTLNNLKKLGIDPKHIKTIIMNVLRSSIEMSNIFLDH

SEQ ID NO: 23355 - protein, 1140 aa, Bombus hortorum
MDAIGCVCVGFITKGKMDENDNASDAASLGPGDAVADSSAREGTSGDDLAMSPVKILVPLVGDQVACPVCERREIHLFFMTLGDLNKHLDQHHLDARIQWGCNFCEKSFPKLHGAQCHVPKCSGTNQSKNLPHKCEACPMSFGTQRGLSTHERHAHPAVRNAKRRGADPPNRMWKVEEVALLRELEEIYKNHRFPNVEISKILTSKTVDQIKYKRKQLKQASEDTSPQRATQVTEGGCDPVNSGNARNIASESSGISNDSESIQQWRLDLLNAIDQPIEVSPVLREVYDRLRNILTDYRGNRETLGFKINGLISTTLYGAIKENSKDAALTKPLEKPRVQANKKNKINRNSRKRYSYARCQELFLECPKKLADVVVNNDRAYLEPARQPPSEETVRRFYEDLWGQTGPTNPPIPSSGTSELSLDRFSPITAEEVGERISKIRKKAAAGPDGITKEQLLIPGLPALLAKIFNICLYCSYYPTAWKDNRTTLIPKPNKSSSLIENWRPITIGPILARIFSSILDGRIRRGIVLSLRQKGFASENGCKINIDLFNSALTHCKRSKGGIFTIVDISKAFDTIPHSAIRPSLERKGVPAPISELIENMYLNTKTTIRAKDGMGVEVSILRGVKQGDPLSPLLFNLCLEPLIEKIEEQTSGVHINDNRSIPILAFADDIVLLGKDKGEAQHQVDILHGYLRDLGMKVSAEKSQVFQVVAKRDTWFLDDPKIGLDNRDIPAVDPNEAFKYLGAKIGPWKGAHCGVIVPEILSMARRVRKLSLKPCQKIELLTSYIFPRYIYHLLVNPPSDSVLKLLDSEIRQEVKAILHLMPSTATGFIYAPKNCGGLGIPRFEHIIKLGILKSAINMEKSIDPAVSGLIDEEANKRLKKIANSLRINWPATLSDIEKARKRLKYDHVRQWAELRSQGQGAYDFARNRAGNVWMEQYNLLKPSRFIDALRLRTNTFGTKTVLARADKKMDVTCRRCRAQPETLGHILGLCQYTKGLRIKRHDEVKSILANQLRKKNEVSIEPTLRVGSNLYKPDLVVKNEERILVVDVTVRYENKDYLRKAEKEKIEKYASLLQHLKNKFNIGDGEVLPVVLGSRGAITPNTLNNLKKLGIDPKHIKTIIMNVLRSSIEMSNIFLDH

SEQ ID NO: 23356 - protein, 1140 aa, Bombus hortorum
MDAIGCVCVGFITKGKMDENDNASDAASLGPGDAVADSSAREGTSGDDLAMSPVKILVPLVGDQVACPVCERREIHLFFMTLGDLNKHLDQHHLDARIQWGCNFCEKSFPKLHGAQCHVPKCSGTNQSKNLPHKCEACPMSFGTQRGLSTHERHAHPAVRNAKRRGADPPNRMWKVEEVALLRELEEIYKNHRFPNVEISKILTSKTVDQIKYKRKQLKQASEDTSPQRATQVTEGGCDPVNSGNARNIAPESSGISNDSESTQQWRLDLLNAIDQPIEVSPVLREVYDRLRNILTDYRGNRETLGFKINGLISTTLYGAIKENSKDAALTKPLEKPRVQANKKNKINRNSRKRYSYARCQELFLECPKKLADVVVNNDRAYLEPARQPPSEETVRRFYEDLWGQTGPTNPPIPSSGTSELSLDRFSPITAEEVGERISKIRKKAAAGPDGITKEQLLIPGLPALLAKIFNICLYCSYYPTAWKDNRTTLIPKPNKSSSLIENWRPITIGPILARIFSSILDGRIRRGIVLSLRQKGFASENGCKINIDLFNSALTHCKRSKGGIFTIVDISKAFDTIPHSAIRPSLERKGVPAPISELIENMYLNTKTTIRAKDGMGVEVSILRGVKQGDPLSPLLFNLCLEPLIEKIEEQTSGVHINDNRSIPILAFADDIVLLGKDKGEAQHQVDILHGYLRDLGMKVSAEKSQVFQVVAKRDTWFLDDPKIGLDNRDIPAVDPNEAFKYLGAKIGPWKGAHCGVIVPEILSMARRVRKLSLKPCQKIELLTSYIFPRYIYHLLVNPPSDSVLKLLDSEIRQEVKAILHLMPSTATGFIYAPKNCGGLGIPRFEHIIKLGILKSAINMEKSIDPAVSGLIDEEANKRLKKIANSLRINWPATLSDIEKARKRLKYDHVRQWAELRSQGQGAYDFARNKAGNVWMEQYNLLKPSRFIDALRLRTNTFGTKTVLARADKKMDVTCRRCRAQPETLGHILGLCQYTKGLRIKRHDEVKSILANQLRKKNEVSIEPTLRVGSNLYKPDLVIKNEERILVVDVTVRYENKDYLRKAEKEKIEKYASLLQHLKNKFNIGDGEVLPVVLGSRGAITPNTLNNLKKLGIDPKHIKTIIMNVLRSSIEMSNIFLDH

SEQ ID NO: 23357 - protein, 1140 aa, Bombus hortorum
MDAIGYVCVGFITKGKMDENDNASDAASLGPGDAVADSSAREGTSGDDLAMSPVKILVPLVGDQVACPVCERREIHLFFMTLGDLNKHLDQHHVDARIQWGCNFCEKSFPKLHGAQCHVPKCSGTNQSKNLPHKCEACPMSFGTQRGLSTHERHAHPAVRNAKRRGADPPNRMWKVEEVALLRELEEIYKNHRFPNVEISKILTSKTVDQIKYKRKQLKQASEDTSPQRATQVTEGGCDPVNSGNARNIAPESSGISNDSESTQQWRLDLLNAIDQPIEVSPVLREVYDRLRNILMDYRGNRETLGFKINGLISTTLYGAIKENSKDAALTKPLEKPRVQANKKNKINRNSRKRYSYARCQELFLECPKKLADVVVNNDRAYLEPARQPPSEETVRRFYEDLWGQTGPTNPPIPSSGTSELSLDRFSPITAEEVGERISKIRKKAAAGPDGITKEQLLIPGLPALLAKIFNICLYCSYYPTAWKDNRTTLIPKPNKSSSLIENWRPITIGPILARIFSSILDGRIRRGIVLSLRQKGFASENGCKINIDLFNSALTHCKRSKGGIFTIVDISKAFDTIPHSAIRPSLERKGVPAPISELIENMYLSTKTTIRAKDGMGVEVSILRGVKQGDPLSPLLFNLCLEPLIEKIEEQTSGVHINDNRSIPILAFADDIVLLGKDKGEAQHQVDILHGYLRDLGMKVSAEKSQVFQVVAKRDTWFLDDPKIGLDNRDIPAVDPNEAFKYLGAKIGPWKGAHCGVIVPEILSMARRVRKLSLKPCQKIELLTSYIFPRYIYHLLVNPPSDSVLKLLDSEIRQEVKAILHLMPSTATGFIYAPKNCGGLGIPRFEHIIKLGILKSAINMEKSIDPAVSGLIDEEANKRLKKIANSLRINWPATLSDIEKARKRLKYDHVRQWAELRSQGQGAYDFARNKAGNVWMEQYNLLKPSRFIDALRLRTNTFGTKTVLARADKKMDVTCRRCRAQPETLGHILGLCQYTKGLRIKRHDEVKSILANQLRKKNEVSIEPTLRVGSNLYKPDLVIKNEERILVVDVTVRYENKDYLRKAEKEKIEKYASLLQHLKNKFNIGDGEVLPVVLGSRGAITPNTLNNLKKLGIDPKHIKTIIMNVLRSSIEMSNIFLDH

SEQ ID NO: 23358 - protein, 1140 aa, Bombus hortorum
MDAIGYVCVGFITKGKMDENDNASDAASLGPGDAVADSSAREGTSGDDLAMSPVKILVPLVGDQVACPVCERREIHLFFMTLGDLNKHLDQHHLDARIQWGCNFCEKSFPKLHGAQCHVPKCSGTNQSKNLPHKCEACPMSFGTQRGLSTHERHAHPAVRNAKRRGADPPNRMWKVEEVALLRELEEIYKNHRFPNVEISKILTSKTVDQIKYKRKQLKQASEDTSPQRATQVTEGGCDPVNSGNARNIAPESSGISNDSESTQQWRLDLLNAIDQPIEVSPVLREVYDRLRNILMDYRGNRETLGFKINGLISTTLYGAIKENSKDAALTKPLEKPRVQANKKNKINRNSRKRYSYARCQELFLECPKKLADVVVNNDRAYLEPARQPPSEETVRRFYEDLWGQTGPTNPPIPSSGTSELSLDRFSPITAEEVGERISKIRKKAAAGPDGITKEQLLIPGLPALLAKIFNICLYCSYYPTAWKDNRTTLIPKPNKSSSLIENWRPITIGPILARIFSSILDGRIRRGIVLSLRQKGFASENGCKINIDLFNSALTHCKRSKGGIFTIVDISKAFDTIPHSAIRPSLERKGVPAPISELIENMYLNTKTTIRAKDGMGVEVSILRGVKQGDPLSPLLFNLCLEPLIEKIEEQTSGVHINDNRSIPILAFADDIVLLGKDKGEAQHQVDILHGYLRDLGMKVSAEKSQVFQVVAKRDTWFLDDPKIGLDNRDIPAVDPNEAFKYLGAKIGPWKGAHCGVIVPEILSMARRVRKLSLKPCQKIELLTSYIFPRYIYHLLVNPPSDSVLKLLDSEIRQEVKAILHLMPSTATGFIYAPKNCGGLGIPRFEHIIKLGILKSAINMEKSIDPAVSGLIDEEANKRLKKIANSLRINWPATLSDIEKARKRLKYDHVRQWAELRSQGQGAYDFARNKAGNVWMEQYNLLKPSRFIDALRLRTNTFGTKTVLARADKKMDVTCRRCRAQPETLGHILGLCQYTKGLRIKRHDEVKSILANQLRKKNEVSIEPTLRVGSNLYKPDLVIKNEERILVVDVTVRYENKDYLRKAEKEKIEKYASLLQHLKNKFNIGDGEVLPVVLGSRGAITPNTLNNLKKLGIDPKHIKTIIMNVLRSSIEMSNIFLDH

SEQ ID NO: 23359 - protein, 1140 aa, Bombus hortorum
MDAIGYVCVGFITKGKMDENDNASDAASLGPGDAVADSSAREGTSGDDLAMSPVKILVPLVGDQVACPVCERREIHLFFMTLGDLNKHLDQHHLDARIQWGCNFCEKSFPKLHGAQCHIPKCSGTNQSKNLPHKCEACPMSFGTQRGLSTHERHAHPAVRNVKRRGADPPNRMWKVEEVALLRELEEIYKNHRFPNVEISKILTSKTVDQIKYKRKQLKQASEDTSPQRATQVTEGGCDPVNSGNARNIASESSGISNDSESIQQWRLGLLNAIDQPIEVSPVLREVYDRLQNILSDYRGNRETLGFKINGLINTTLYGAIKENSKDAALTKPLEKPRVQANKKNKINRNSRKRYSYARCQELFLECPKKLADVVVNNDRAYLEPARQPPSEETVRRFYEDLWGQTGPTNPPIPSSGTSELSLDRFSPITAEEVGERISKIRKKAAAGPDGITKEQLLIPGLPALLAKIFNICLYCSYYPTAWKDNRTTLIPKPNKSSSLIENWRPITIGPILARIFSSILDGRIRRGIVLSLRQKGFASENGCKINIDLFNSALTHCKRSKGGIFTIVDISKAFDTIPHSAIRPSLERKGVPAPISELIENMYLNTKTTIRAKDGMGVEVSILRGVKQGDPLSPLLFNLCLEPLIEKIEEQTSGVHINDNRSIPILAFADDIVLLGKDKGEAQHQVDILHGYLRDLGMKVSAEKSQVFQVVAKRDTWFLDDPKIGLDNRDIPAVDPNEAFKYLGAKIGPWKGAHCGVIVPEILSMARRVRKLSLKPGQKIELLTSYIFPRYIYHLLVNPPSDSVLKLLDSEIRQEVKAILHLMPSTATGFIYAPKNCGGLGIPRFEHIIKLGILKSAINMEKSIDPAVSGLIDEEANKRLKKIANSLRINWPATLSDIEKARKRLKYDHVRQWAELRSQGQGAYDFARNKAGNVWMEQYNLLKPSRFIDALRLRTNTFGTKTVLARADKKMDVTCRRCRAQPETLGHILGLCQYTKGLRIKRHDEVKSILANQLRKKNEVSIEPTLRVGSNLYKPDLVIKNEERILVVDVTVRYENKDYLRKAEKEKIEKYASLLQHLKNKFNIGDGEVLPVVLGSRGAITPNTLNNLKKLGIDPKHIKTIIMNVLRSSIEMSNIFLDH

SEQ ID NO: 23360 - protein, 1140 aa, Bombus hortorum
MDAIGYVCVGFITKGKMDENDNASDAASLGPGDAVADSSAREGTSGDDLAMSPVKILVPLVGDQVACPVCERREIHLFFMTLGDLNKHLDQHHVDARIQWGCNFCEKSFPKLHGAQCHVPKCSGTNQSKNLPHKCEACPMSFGTQRGLSTHERHAHPAVRNAKRRGADPPNRMWKVEEVALLRELEEIYKNHRFPNVEISKILTSKTVDQIKYKRKQLKQASEDTSPQRATQVTEGGCDPVNSGNARNIAPESSGISNDSESTQQWRLDLLNAIDQPIEVSPVLREVYDRLRNILMDYRGNRETLGFKINGLISTTLYGAIKENSKDAALTKPLEKPRVQANKKNKINRNSRKRYSYARCQELFLECPKKLADVVVNNDRAYLEPARQPPSEETVRRFYEDLWGQTGPTNPPIPSSGTSELSLDRFSPITAEEVGERISKIRKKAAAGPDGITKEQLLIPGLPALLAKIFNICLYCSYYPTAWKDNRTTLIPKPNKSSSLIENWRPITIGPILARIFSSILDGRIRRGIVLSLRQKGFASENGCKINIDLFNSALTHCKRSKGGIFTIVDISKAFDTIPHSAIRPSLERKGVPAPISELIENMYLNTKTTIRAKDGMGVEVSILRGVKQGDPLSPLLFNLCLEPLIEKIEEQTSGVHINDNRSIPILAFADDIVLLGKDKGEAQHQVDILHGYLRDLGMKVSAEKSQVFQVVAKRDTWFLDDPKIGLDNRDIPAVDPNEAFKYLGAKIGPWKGAHCGVIVPEILSMARRVRKLSLKPCQKIELLTSYIFPRYIYHLLVNPPSDSVLKLLDSEIRQEVKAILHLMPSTATGFIYAPKNCGGLGIPRFEHIIKLGILKSAINMEKSIDPAVSGLIDEEANKRLKKIANSLRINWPATLSDIEKARKRLKYDHVRQWAELRSQGQGAYDFARNKAGNVWIEQYNLLKPSRFIDALRLRTNTFGTKTVLARADKKMDVTCRRCRAQPETLGHILGLCQYTKGLRIKRHDEVKSILANQLRKKNEVSIEPTLRVGSNLYKPDLVIKNEERILVVDVTVRYENKDYLRKAEKEKIEKYASLLQHLKNKFNIGDGEVLPVVLGSRGAITPNTLNNLKKLGIDPKHIKTIIMNVLRSSIEMSNIFLDH

SEQ ID NO: 23361 - protein, 1134 aa, Bombus hypnorum
MQGDRWNEASDAASPGPGGAVADSSALEGTTVDDLAMSLDTIFDISIPIVGNQVACPVCEEREVHLFFMNLTDLGKHLDQHHTTARIQWSCRECGKGFSKLHGARCHLPHCSGGPSQRPEGAFKCEACPMSFGTQRGLSTHERHAHPAVRNVKRRGTDPPEKKWTFQELALLRELCETYKDHRHPNKKISEILTSKTIDQIKYQRRKLRMLGEDPQEATPATEGGCDPVDPGNACFEEPEISGNNLNLNQIENWKLQLELAIMTQTEVPPVLRWVHTRLINTWVTLKGNREALESGINEFIKVTLYGAIKAFNKDKIKENKYNEKFFKRIGHQKKKSKKRNAKKRYSYARCQELLVENPRRLADAIVNNDQAFLQPAREPPDAEEVRRLYEDLWGKTGPVDAPVPGSRASELSLSEFFPPIAFEDVAERIKKIRMKAAAGPDGFQKEHLLIPGLPIILAKIYNILCYISYFPPIWKENRTTLIPKANKDSSLVENWRPITIGPILGRIFSAIIDGRIRRGIVQNPRQKGFTAESGCKINIDLLSAALDYSKREKGGVFTIVDISKAFDTVPHSAIKPCLVRKGVPAPITELISNMYQNIKTRIRAGNNMGVDIAILRGVKQGDPLSPLLFNLCLEPLLELMETQTSGININETRKIPVLAFADDVVLLGADVGEAQRQVDMLDKYLEDFGMNISRDKSQTFQVVSKRDTWFIEEPKIRLRENTIPTVDPGEVFRYLGAKMGPWKGVHCGIIVPELLSVMRRVRKLSLKPCQKFDLITKYILPRYIYHLLVNPPGDCVLKLLDSEIRQEVRAIFHLMPSTATGFFYAPKSWGGGGLGLPRFEHIIKLGTLKSAIKIKNSVDPAVSSLVDDQTEMKLKKTANSLRINWPASIEDIEKARKRLKAAHIRQWADLRSQGQGVFDFSRNRIGNAWLVGNKLLKPSRFIDALMLRTNTFGTRTVLARADKNIDVTCRKCRAQPETLGHILGLCQYTKGLRIKRHDEAKMTLAETLRKKNEVFIEPTLKVGGILYKPDLVVKNEERVLVVDVTVRYENKDYLSKAEKEKSEKYRPCLEHLKVKFNVSRGQVIPVVLGSRGAVPLFTERCLKLLGIGDQTIKTMALNVLRSSIELCNIFLDE

SEQ ID NO: 23362 - protein, 611 aa, Bombus sibiricus
MRKKAAAGPDGLKREHLLIPGLPEILAKVYNICWYRSYFPTVWKENRTTLIPKINKPSSDVENWRPITIGPVLGRIFSSILDGRIRRGIVLNLRKKGFTSENGCKANIDLLSAALDYSKRNKGGIFTIVDISKAFDTIPYSAIKPCLERKGVPAPIIYIVLSMYDRTKTTIRTGDNMGIEIEILRGVKQGDPLSPLLFNLCIEPLIEKIEEETSGININDNIKVPILAFADDIVVLGENEREAQHQVDVLHGYLGDMGMKISREKSQTFQVVAKKDTWYVKDPTIRINNDNIPSVDPDEAFKYLGAKIGLWKGIHCGIIVPEILSVVRRVRKLSLKLCQKLELLIKYIFSRYIYNLLVNPPSDSVLKLLDSEVRQEIKAIFHLMPSTATGFFYAPKSWGGLGVPKFEHIMKLGTLKSAIRMKMSIDPAVSNLIKENVEVKLKKIANSLRINWPATLDDIEKAKRRLKGSHPQQLKSQGQGVYDFSKNKAGNVCIEEYELLKPSRFIDALRLRTNTFGTKTVLARADKKIDVTCRKCRAQPETLGHILGLCQYTKGLRIKRHDEVKSVLAGSLSKSNEVFIEPSLRVGSNLYKPDLVVKNEERVLVVDVTVR

SEQ ID NO: 23363 - protein, 868 aa, Bombus pascuorum
MPADVPPVLSEVHDRLKGIWLKQGDGETLVKDLDVLIEEHLYGAIKTFNKNEPNRIIKPNKDKSYGNKNYNKSNRNARKRFSFARCQDIFKECPKRLADVVINDDRAYLEPVRQLPEAAEIKRLYEKLWGQSGPSKVPITNTRVSQLPLEEYFAPISSEEVVERIKRLRKKAAAGPDGLTREHLSIPGLPTILAKLYNICLYESCYPSVWKVNRTTLIPKPNKPSSRVENWRPITIGPILGRIFSSILDRRIRQGIVLNLRQKGFTPESGCKINIELFNSALNYCKRDNGGIFTIVDISKAFDTIPHSALTPCLARKGVPAPIIELIKNMYTNTKTIIRSNGQTGVEIKILRGVKQGDPLSPLLFNLCMEPLLDSIEESSRGIKINNEKTIPVLAFADDIVLLGANQGEAQRQVDVLHKYLNGLDMNISIDKSQTFQIVSKRDTWFVKDPEIRLDEQDIPSTDPADAFRYLGAKLGPWRGVHCGVVVPEILSVIRRVRKLSLKPCQKIELLTKYVLPRYIYHLLINPPGDTVLRLLDSEIRQEIKAIYHLMPSTAIGFIYAPKTYGGLGIPRFEHIVKLGVLKSALKMRDSVDPAVSSLFNNRKAELDLKKMANSLRINWPASLDDIEKARKRLKGSHIQLWGELKSQGQGVPDFAKNKTGNVWLSEYNLLKPSRFIDALRLRTNTFGTRTVLARADKRTDVACRNCRAQPETLGHILGLCQYTKGLRIKRHDEAKLTLAESLRKNNEVFVEPTLTVDGNLYKPDLVVKNEERILVVDVTVRYENKDYLSQAEKEKANKYQPGLEHLKRKFKIDKGQVLPVVLGSRGTITPNTENNLKIMGISKSTIKTIVMNVLRSSIEMSNIFLDN

SEQ ID NO: 23364 - protein, 1013 aa, Bombus skorikovi
MNNKQASDAAPLGPGGAVADSSASEGTIVDELATSPDMTFKIMVPLVGDRVGCPICEARETHLFFMSLSDLDRHLDQNHLNAGVQWGCRCGRSFPKLHGAQCHLPKCSGTSRKREGAYKCEECPMSFGTQRGLSTHERHAHPALRNIKRRGTDPSSKIWKVEEVALLKELDEKFKSHRFPNVEISKVLATKSVEQIKYQRRKLKAASEDPALQRATLETEGGCDPVAPGNARSQPETSGYTNVNENNESEWRLELIRSIETPTEVPLVLKEVNDRLQNIWRHEQGNEETLTREINNFIVTHLYGAIFKYNVANKNEQKERREHKNKPEAVTGKSNKRKSRNSRKRFSYARCQELFHECPKKLADVVINNDHALLEPARQLPEAADVRRLYTELWSRVSTIDAPLQPSGVSALSLQAKFPPITAEEVAARINKIKKKTAAGPDGLTREHLLIPGLPTILAKIFNICYCCSWYPSVWKDNRTTLISKPNKNSSQVENWRPITIGPILGRIFSAILDGRIRKGIVLNLRQKGFTSENGCRINIELLSAVLEHSKKKSGGIFTIVDISKAFDTIPHSALAPCLARKGVPAPIVKLIDKMYSNNKTCIRTKENIGVEIEILREVKQGDPLSPLLFNLCLEPLLEILEEQTNGIMIDNDQRIPVLAFADDIVLLGGNKREAQCQVEVLHKYLSSLNMSISRDKSRTFQVVPTRDTWFVEDPQIRLEGAKIPTINPDEVFKYLGAKIGPWKGLHGGIIVPELLSVIRRVRKLYLKPHQKIELIDKYIFPRYIYQLLTKPPSDSVLKLLDSEVRQEIKAILHLVPSTATGLFYAPKACGRLGLPRFEHLVKLGTLKYMLKMKDSIDPAVSSLISLDDIKLKKMANSLRINWPATLEDIDRAKRRLKYAHVKQWSELRSQGQGVTDFIRSRTGNVWLKEQNLLKPSRFIDALRLRTNTFGTRTVLARADKQIDVTCRRCRAQPETLGHILRLCQYTKGLRIKRHDEVKSIHRDNWLVAAKRS

SEQ ID NO: 23365 - protein, 1121 aa, Bombus campestris
MSNVIASDAAPLGPGGAVADSSASEGTNVDEQATSPDMMKIMVPLVGDRVGCPVCEKREVHLFFMSLADLDRHLDQNHLNAGVQWGCRCGRSFPKLHGAQCHLPKCSGTVKRTEGAYKCEECPMSFGSQRGLSTHERHAHPALRNIKRRGADPPSKVWKVEEVALLKELEIKFKDHRFPNVEISKVLTSKTIDQIKYQRRKLRAASEDPALQGATLETEGGCDLVTSGNARLPDSNENDIDESEWRLDLIHSIETATEVPPVLEEVNSRLLYIWRQAQGNVNTLANEINNFIEKHLYGAILSNFAANDKKSKENREKYKPKAAMGKAKNRSSRKRFSYARCQELFRECPKKLADVVINNDRALLEPARQLPEAADVRRLYEDLWGRADTISVLPQPSGASTLSLREIFSPITAEDVAARINKIKKKSAAGPDGLTKEHLLIPGLPAIIAKIYNICYYCSYYPSVWKINRTTLIPKADKDSSQVENWRPITIGPILGRIFSAILDGRIRKGVVLNLRQKGFTSESGCKINIELLSAALDHGKKESGGVFTIVDISKAFDTIPHSALEPCLARKGVPAPIIKMVIEMYRGNKTVIRANGNIGVEIEILRGVKQGDPLSPLLFNLCLEPLLDQLMERTGGMNISKDYRIPVLAFADDILLLGANTREAQCQVEVLHNYLNSLNMKISRDKSRTFQVVPKRDTWFVKDPQIRLDNTLIPTIDPDEVFRYLGAKMGPWKGLHCGIIVPELLGVIRRVRKLYLKPCQKIELIEKYIFPRYIYQLLIKPPSDSVLKLLDSEVRQEIKAILHLVPSTATGLFYAPKACGGLGLPKFEHLVKLGTLKFALKMNHSVDPAVSSLSNIQDVRLKKMANSLRINWPATLEDIEKARKRLKWEHAKQWSELKCQGQGITDFVRNKTGNVWLTEQNLLKPSRFIDALRLRSNTFGTKTVLARADKQIDVTCRRCHAQPETLGHILGLCQYTKGLRIKRHDEVKTILAERLRSNNEVFVEPTLKVGGNLYKPDLVIKSEGRVLVVDVTVRYENKDYLSKAEKEKVDKYTNCIPYLKEKFRVCEGEVIPVVLGSRGAITPNTEKSLKSLGISKKDIKTIVLNVLRSSVEMCNIFLDG

SEQ ID NO: 23366 - protein, 1122 aa, Bombus sylvicola
MYDNDNEASDAASLSPGGAVADSSALEGTTVDDLAMSMEKIFDIMVPIVGTQVACLVCQEEGTNLFFLLLADLGKHLEQHHITARIQWRCQYCGKGFSKLHGAHCHQPHCGGGPIEIPEGPYKCEACPRSFGSQRGLSTHERHAHPAVRNVKRREADPPGKRWTFQELALLRELCETYRGHRNINVKINEILTSKTIDQIKYQRKKLEDAQEATQATEGGCDPVDPGNACFEEPGISGDFEEWKLQMEQAIEKQTEVPPVLRWVHIRLMNIWVSLKGNREALESGINEFIQTLYRVITEYNKEKNLVKENKNLNVNNKRIGHQNKKKRRNAKKRYSFARCQELFLENPRRLADAVVNNDQAFLQPARDPPDAAEVRRLYEDLWGQAGPADAPIPGRRASELSLCEVFPPIADMDVAEKIKKIRKKAAAGPDGFQKDHLSIPGLPTILAKLYNMCCYISCFPSAWKENRTTLIPKANKPSSLVENWRPITIGPILGRIFSSIIDGRIRGGIVLNPRQKGFTAESGCKINIELLSAALDHSKKEKGGVFTIVDISKAFDTVPHSAIEPCLARKGVPAPIRSLIRNMYNGNNTRIKTRDNMGVEINILRGVKQGDPLSPLLFNLCLEPLLELIENRTSGINVNENRKVPVLAFADDVVLLGADEGEAQCQVDTLKEYLDGLGMTISRDKSQIFQIVSKRDTWFVQEPKIKLGGNNTIPTVDPGEAFRYLGAKMGPWRGVHCGIIVPELLSVVRRVRKLSLKPCQKLDLIVKYILPKYIYHLLVNPPGDCVLRLLDSEIRQEVKAIFHLVPLTATGFFYAPKSWGGLGLPRFEHIIKLGTLKSAIKMKNSIDPAVSGLIDEHGEQKLKKIANSLRINWPASIEDVEKARKSLKAAHIRQWADLRSQGQGVLDFSRNRLGNVWLTDHSLLKPSRFIDALKLRTNTFGTRAVLARADKNIDVACRKCRAQPETLGHILGLCQYTKGLRIKRHDEAKMTLAENLKKKNEVFIEPTIRVDGVLYKPDLVVKNEERVLIVDVTVRYENKDYLSKAEKEKIEKYQPCVNYLKAKFNVSWGQVLPVVLGSRGAVTPFTERNLKLMNIGNQTIKTLVMNVLRSSIELCNIFMDE

SEQ ID NO: 23367 - protein, 1085 aa, Bombus sylvicola
MIFDITVPIVGTQVACPVCQEGGINLFFLSLTDLGKHLEQHHVTALIQWRCRDCGRGFSKLHGARCHLPYCSGPSEIPEPEGPYKCEACPRSFQTQRGLSTHERHAHPAVRNVKRRGTDPPKSKWTFQELALLRELCETYKDHRYPNKMISEVLTNKTIDQIKYQRKRLIGEDPSSQEATQATEGGCGPVDPGNAYLEEPGISGDFDEWKLQLEQAIMTQTEVPPVLRWVHTRLTNVWVTLKGDKQALERGINEFLKTLYGAIEFINENKEKDTSTEKKIKRIGHQNKRKRRNAKKRYSYARCQDLFLENPKRLADAVVNNDQAFLQPARDPPAAAEVRRLYEGLWGQTGPINAPVPGSRVAELSLCEIFPPIAVEDVEEKIKRIRKKAAAGTDGFQKEHLLIPGLSIIFARLYNILCYISYFPSAWKENRTTLIPKANKPCSLLENWRPITIGHILGRIFSSIIDGRIRRGIVLNPRQKGFTAESGCKINIDLLSAALDHSKKEKRGVFTIVDISKAFDTVPHSAIEPCLARKGVPAPIVDLIKNMYKGSHTIIKTRDNMGVKINILRGVKQGDPLSPLLFNLCLEPLLELIQEKTSGIDISNTRKIPVLAFADDVVLLGANEGEAQCQVDLLKEYLDGLGMTISRDKSQTFQIVSKRDTWFVKEPEVKLGENIIPTVDPGEAFRYLGAKMGPWKGVHCGIIVPELLGVVRRVRKLSLKPCQKLELITKYIFPRYIYHLLVNPPGDCVLKLLDGEVRQEVKAIFHLVPSTATGFFYAPKSWGMGLGLPRFEHIVKLGTLKSAIRIKSSNDPAVSGLVNEHSELKLKRIANSLRINWPASIEDVEKARKTLKAAHIKQWAELRSQGQGVLDFSRNKTGNVWLREYELLKPSRFIDAVKLRTNTFGTRTVLARADKNIDVACRKCRAQPETLGHILGLCQYTKGLRIKRHDEAKNTLTDNLRKNNEVFIEPTLKVGGNLYKPDLVVKNEERVLVVDVTVRYENKDYLSRAEKEKIRKYEPCVDHLKAKFNVSRGEVVPVVLGSRGAITPSTEKSLRLMGIGGQIIKTIVMNVLRSSIELCNIFLDE

SEQ ID NO: 23368 - protein, 1128 aa, Bombus hortorum
MITNNNNDASDAASLGPGDAVADSSAREGTSGDDLAISTDTSYDITVPIVGSQVACPVCEKREIHLFFLSLSDLDRHLDQHHTGALLKWNCLYCGKSFSKLHGARCHTPKCRGPIQDPIKLYTCEACPMSFYTQRGLSTHERHAHPAVRNIKRRGADPQDPNKWTEEEIALLKNLWDAYKYHRHPNKMINQVLTNKTIDQIKYQRKKLNLVSGDPTLQEAEAAQATEGGCDPVDPGNAYFKEPGIDGNQNMESIQQWRLQLEKVIMTSTDVPLVLKGFYQRLQDTWVIYKDFNEVFKERVNTLISTSLYPLIKELDKGKIEPKNQRTSKPKKKNNRNSRKRYSYARCQELFHECPKRLADAVINDNKTYLEPPRQLPEAAEVRRLYEDLWGRAGPSEAPIPGSRCSELSLNEIFPPITAEEVAEKITKIRKKAAAGPDGLTKEHLLIPGLPVILARLYNILCWSSYFPPIWKVNRTTLIPKPNKPSSLVENWRPITIGPILGRIFSSILDGRIRRGVVLSLRQKGFTSGNGCKANIDLLSTALSYSKKDKGGVFTIVDISKAFDTIPHSAIKPCLARKGVPDPLIKLVNDMYADNYSKIKASGGSEVDIKILRGVKQGDPLSPLLFNLCLEPLLEQIEEQTSGININDTRKIPVLAFADDVVLLGANVREAQRQVDVLHEYLDGLGMTISRDKSQTFQVVAKKDTWFIKEPNIKLEGANIPSVDPEQAFRYLGAKMGPWKGVHCGIIVPEILSVVRRVRKLSLKPCQKIELLTKYIFPKYIYNLLMNPPADCVLKLLDGEVRQEIKAILHLVPSTATGFFYAPKSCGGLGLPRFEHIVKLGTLKNAINMKNSIDPAVSGLIDMPTDQKLKKIANSLRINWPASIEDIEKARKRLKAAHIQQWSELKSQGQGVFDFARNRLGNVWLDQYNLLKPSRYIDALRLRTNTFGTRAVLARADKKIEVTCRRCRAQPETLGHVLGLCQYTKCLRIKRHDEVTSLLADRLRQKNEVFVEPTVRVEGNLFKPDLVVKNEERVLVVDVTVRYENKDYLSKAAKEKVDKYQECLEHLKRKFNVGWGEVVPVVLGSRGAITNNTERALLAMGIAPHDIKTIIINILRSSIEMCNLFIDD

SEQ ID NO: 23369 - protein, 1061 aa, Bombus hortorum
MALKGGAARWRGLCRLYAWKVVHALPVCFSKLHGARCHTPKCRGPIQDPTKLYICEACSMSFYTQRGLSTHERHAHPAVRNIKRRGADPQDPNKWTEEEIALLKNLWDAYKDHRHPNKMINQVLTNKTIDQIKYQRKKLNLVSGDPILQEAEAAQATEGGCDPVDPGNAYFKEPGIDGNQNMESIQQWRLQLEKVIMTSTDVPLVLKGFYQRLQDTWVIYKDFDEVFKERVNTLISTSLYPLIEEFDKGKIESKGITKSQKPTRKKSNRNSRKRYSYARCQELFHECPKRLADAVINDNKTYLEPPRQLPEAAEVRRLYEDLWGRAGPSEAPIPGSRCSELSLNEIFPPITAEEVAEKITKIRKKAAAGPDGLTKEHLLIPGLPVILARLYNILCWSSYFPPIWKVNRTTLIPKPNKPSSLVENWRPITIGPILGRIFSSILDGRIRRGVVLSLRQKGFTSGNGCKANIDLLSTALSYSKKDKGGVFTIVDISKAFDTIPHSAIKPCLARKGVPDPLIKLINDMYADNYSTIKASGGSEVDIKILRGVKQGDPLSPLLFNLCLEPLLEQIEEQTSGININDTRKIPVLAFADDVVLLGANVREAQRQVDVLHEYLDGLGMTISRDKSQTFQVVAKKDTWFIKEPNIKLEGANIPSVDPEQAFRYLGAKMGPWKGVHCGIIVPEILSVVRRVRKLSLKPCQKIELLTKYIFPKYIYNLLMNPPADCVLKLLDGEVRQEIKAILHLVPSTATGFFYAPKSCGGLGLPRFEHIVKLGTLKNAINMKNSIDPAVSGLIDTPTDQKLKKIANSLRINWPASIEDIEKARKRLKAAHIQQWSELKSQGQGVFDFARNRLGNVWLDQYNLLKPSRYIDALRLRTNTFGTRAVLARADKKIEVTCRRCRAQPETLGHVLGLCQYTKCLRIKRHDEVTSLLADRLRQKNEVFVEPTVRVEGNLLKPDLVVKNEERVLVVDVTVRYENKDYLSKAAKEKVDKYQGCLEHLKRKFNVGWGEVVPVVLGSRGAITNNTERALLAMGIAPHDIKTIIINILRSSIEMCNLFIDD

SEQ ID NO: 23370 - protein, 1143 aa, Bombus hortorum
MWSSRFNQLTMTVMNKNNDYDASDAASLGPGGAVADSSADQGTIVDELAMSTDTSYDITVPIVGSQVACPVCEKREIHLFFLSLSDLDRHLDQHHTGALLKWNCLYCGKSFSKLHGARCHTPKCRGPIQDPTKLYICEACSMSFYTQRGLSTHERHAHPAVRNIKRRGADPQDPNKWTEEEIALLKNLWDAYKDHRHPNKMINQVLTNKTIDQIKYQRKKLNLVSGDPILQEAEAAQATEGGCDPVDPGNAYFKEPGIDGNQNMESIQQWRLQLEKVIMTSTDVPLVLKGFYQRLQDTWVIYKDFDEVFKERVNTLISTSLYPLIEEFDKGKIESKGITKSQKPTKNKSNRNSRKRYSYARCQELFHECPKRLADAVVNNNKTYLEPPRQPPEAAEVRRLYEDLWGRAGPSEAPIPGSRGSELSLNEIFPPITAEEVAEKIKRIRKKAAAGPDGFTKEHLLIPGLPVILARLYNILCWSSYFPPIWKVNRTTLIPKPNKPSSLVENWRPITIGPILGRIFSSILDGRIRRGVVLSLRQKGFTSGNGCKANIDLLSTALSYSKKDKGGVFTIVDISKAFDTIPHSAIKPCLARKGVPDPLIKLVNDMYADNHSKIKASGGPEVDIKILRGVKQGDPLSPLLFNLCLEPLLEQIEEQTSGINISETRKIPVLAFADDVVLLGANVREAQRQVDVLHEYLDGLGMTISRDKSQTFQVVAKKDTWFIKEPNIKLEGANIPSVDPEQAFRYLGAKMGPWKGVHCGIIVPEILSVVRRVRKLSLKPCQKIELLTRYIFPKYIYNLLMNPPADCVLKLLDGEVRQEIKAILHLVPSTATGFFYAPKSCGGLGLPRFEHIVKLGTLKNAINMKNSIDPAVSGLIDMPIDLKLKKIANSLRINWPASIEDIEKARKRLKAAHIQQWSELKSQGQGVFDFARNRLGNVWLDQYNLLKPSRYIDALRLRTNTFGTRAVLARADKKIEVTCRRCRAQPETLGHVLGLCQYTKCLRIKRHDEVTSLLADRLRQKNEVFVEPTVRVEGNLLKPDLVVKNEERILVVDVTVRYENKDYLSKAAKEKVDKYQGCLEHLKRKFNVGWGEVVPVVLGSRGAITNNTERALLAMGIAPHDIKTIIINILRSSIEMCNLFIDD

SEQ ID NO: 23371 - protein, 1002 aa, Bombus hortorum
MSFYTQRGLSTHERHAHPAVRNVKRRGADPQDPNKWTEEEIALLKNLWDAYKDHRHPNKMINQVLTNKTIDQIKYQRKKLNLVSGDPILQEAEAAQATEGGCDPVDPGNAYFKEPGIDGNQNMESIQQWRLQLEKVIMTSTDVPLVLKGFYQRLQDTWVIYKDFDEVFKERVNTLISTSLYPLIEEFDKGKIESKGITKSQKPTKKKSNRNSRKRYSYARCQELFHECPKRLADAVVNNNKTYLEPPRQPPEAAEVRRLYEDLWGRAGPSEAPIPGSRCSELSLNEIFPPITAEEVAEKITKIRKKAAAGPDGLTKEHLLIPGLPVILARLYNILCWSSYFPPIWKVNRTTLIPKPNKPSSLVENWRPITIGPILGRIFSSILDGRIRRGVVLSLRQKGFTSGNGCKANIDLLSTALSYSKKDKGGVFTIVDISKAFDTIPHSAIKPCLARKGVPDPLIKLVNDMYADNHSKIKASGGPEVDIKILRGVKQGDPLSPLLFNLCLEPLLEQIEEQTSGININDTRKIPVLAFADDVVLLGANVREAQRQVDVLHEYLDGLGMTISRDKSQTFQVVAKKDTWFIKEPNIKLEGANIPSVDPEQAFRYLGAKMGPWKGVHCGIIVPEILSVVRRVRKLSLKPCQKIELLTKYIFPKYIYNLLVNPPADCVLKLLDGEVRQEIKAILHLVPSTATGFFYAPKSCGGLGLPRFEHIVKLGTLKNAINMKNSIDPAVSGLIDMPTDQKLKKIANSLRINWPASIEDIEKARKRLKAAHIQQWSELKSQGQGVFDFARNRLGNVWLDQYNLLKPSRYIDALRLRTNTFGTRAVLARADKKIEVTCRRCRAQPETLGHVLGLCQYTKCLRIKRHDEVTSLLADRLRQKNEVFVEPTVRVEGNLFKPDLVVKNEERVLVVDVTVRYENKDYLSKAAKEKVDKYQECLEHLKRKFNVGWGEVVPVVLGSRGAITNNTERALLAMGIAPHDIKTIIINTLRSSIEMCNLFIDD

SEQ ID NO: 23372 - protein, 1128 aa, Bombus hortorum
MITNNNNDASDAASLGPGDAVADSSAREGTSGDDLAISTDTSYDITVPIEGSQVACPVCEKREIHLFFLSLSDLDRHLDQHHTGALLKWNCLYCGKSFSKLHGARCHTPKCRGPIQDPIKLYTCEACPMSFYTQRGLSTHERHAHPAVRNIKRRGADPQDPNKWTEEEIALLKNLWDAYKYHRHPNKMINQVLTNKTIDQIKYQRKKLNLVSGDPTLQEAEAAQATEGGCDPVDPGNAYFKEPGIDGNQNMESIQQWRLQLEKVIMTSTDVPLVLKGFYQRLQDTWVIYKDFNEVFKERVNTLISTSLYPLIKELDKGKIEPKNQRTSKPKKKNNRNSRKRYSYARCQELFHECPKRLADAVINDNKTYLEPPRQLPEAAEVRRLYEDLWGRAGPSEAPIPGSRCSELSLNEIFPPITAEEVAEKITKIRKKAAAGPDGLTKEHLLIPGLPVILARLYNILCWSSYFPPIWKVNRTTLIPKPNKPSSLVENWRPITIGPILGRIFSSILDGRIRRGVVLSLRQKGFTSGNGCKANIDLLSTALSYSKKDKGGVFTIVDISKAFDTIPHSAIKPCLARKGVPDPLIKLINDMYADNYSTIKASGGSEVDIKILRGVKQGDPLSPLLFNLCLEPLLEQIEEQTSGININDTRKIPVLAFADDVVLLGANVREAQRQVDVLHEYLDGLGMTISRDKSQTFQVVAKKDTWFIKEPNIKLEGANIPSVDPEQAFRYLGAKMGPWKGVHCGIIVPEILSVVRRVRKLSLKPCQKIELLTKYIFPKYIYNLLMNPPADCVLKLLDGEVRQEIKAILHLVPSTATGFFYAPKSCGGLGLPRFEHIVKLGTLKNAINMKNSIDPAVSGLIDMPTDQKLKKIANSLRINWPASIEDIEKARKRLKAAHIQQWSELKSQGQGVFDFARNRLGNVWLDQYNLLKPSRYIDALRLRTNTFGTRAVLARADKKIEVTCRRCRAQPETLGHVLGLCQYTKCLRIKRHDEVTSLLADRLRQKNEVFVEPTVRVEGNLFKPDLVVKNEERVLVVDVTVRYENKDYLSKAAKEKVDKYQECLEHLKRKFNVGWGEVVPVVLGSRGAITNNTERALLAMGIAPHDIKTIIINTLRSSIEMCNLFIDD

SEQ ID NO: 23373 - protein, 1098 aa, Bombus vosnesenskii
MVNQSKQRASDAASLSPGGAVADSSALEGTSVDDPATSSDMNEILVPIVGDQVACPVCQKREIDLFFLSLTDLGRHLEQHHVTARIQWRCKDCGKGFPKLHGARCHLPHCRGTSQSAAGSYRCETCPMSFGTLRGLSTHELHAHPAVRNVKRRGTDPPEKKWAVEELAQLRELCETYKDHKFPNKMISEILTSKTIDQIRYQRKKLRLIGEDTEPTQVTEGGCDPVDPGNACFEEPGISGLEYQEWKLQLESAIMTQVEVPPVLRWVHTRLMTIWVSLKGNREALESAINDFIKCTLYGALHEINKKRARNENKNNKRIAHQNRKNRNARKRYSFARCQELFTENPRRLADAVINDDQAFLQPARDPPNAEEVKGLYEDLWGQTGPVEVPVPGNRAPELSLCDIFPPIAVEDVAEKLNKIRKKAAAGPDGFQKEHLLIPGLPIILTKLYNILIYCSYFPPIWKENRTTLIPKANKPSSLVENWRPITIGPILGRIFSAIIDGRIRRGIVLNPRQKGFTAESGCKINIDLLSAALDHSKKKKGGIFTIVDISKAFDTLPHSAIVPCLRRKGVPTPITDLISDMYKEGKTMIKTKNNMGVEITILRGVKQGDPLSPLLFNLCLEPLLDLIERQTSGISINESRKIPVLAFADDVVLLGADIGEAQRQVDMLSEYLNGFGMTISRDKSQAFQIVTERRTWFVKEPKIKLGNNTIPTIDPDEAFRYLGAKMGPWKGIHCGVIVPELLSVVRRVRKLSLKPCQKLELITKYIFPRYIYNLLVNPPSDCVLRLLDSEVRQEVKAIFHLTPSTATGFFYAPKSWGGLGLPRFEHIVKLGTLKSAIKMKSSIDPAVSSLIDERCNERLKKMANSLRINWPASVEDIERARKRLKAGHTKQWAELRSQGQGVPDFSKNKTGNVWLEDYELLRPSRFIDTLKLRTNTVGTRTVLARVDKNLDINCRKCRAQPETLGHILGLCQYTKGLRMKRHDEAKMTLAESLRTKNEVFVEPTLRVGGDLFKPDLVIKNEERVLVVDVTVRYENKVYLSRAEKEKVNKYQSCLEHLKARFNVGKGEVIPVVLGSRGTITPSTEYNLKRMGIGNQVI

SEQ ID NO: 23374 - protein, 1119 aa, Bombus vosnesenskii
MVNQSNQRASDAASLSPGGAVADSSALEGTSVDDPATSSDMNEILVPIVGDQVACPVCQKREIDLFFLSLTDLGRHLEQHHLTARIQWRCKDCGKGFPKLHGARCHLPHCRGASQSAGGSYRCETCSMSFGTLRGLSTHERHAHPAVRNVKRRGADPPEKKWTVEELAQLRELCETYKDHKFPNKMISEILTSKTIDQIRYQRKKLRLIGEDTEPTQVTEGGCDPVDPGNACFEEPGISGLEYQEWKLQLESAIMTQVEVPPVLRWVHTRLMTIWVSLKGNREALESAINDFIKCTLYGALHEINKKRARNENKNNKRIAHQNRKNRNARKRYSFARCQELFTENPRRLADAVINDDQAFLQPARDPPNAEEVKGLYEDLWGQTGPVEVPVPGNRAPELSLCDIFPPIAVEDVAEKLNKIRKKAAAGPDGFQKEHLLIPGLPIILTKLYNILIYCSYFPPIWKENRTTLIPKANKPSSLVENWRPITIGPILGRIFSAIIDGRIRRGIVLNPRQKGFTAESGCKINIDLLSAALDHSKKKKGGIFTIVDISKAFDTLPHSAIVPCLRRKGVPTPITDLISDMYKEGKTMIKTKNNMGVEITILRGVKQGDPLSPLLFNLCLEPLLDLIERQTSGISINESRKIPVLAFADDVVLLGADIGEAQRQVDMLSEYLNGFGMTISRDKSQAFQIVTERRTWFVKEPKIKLGNNTIPTIDPDEAFRYLGAKMGPWKGIHCGVIVPELLSVVRRVRKLSLKPCQKLELITKYIFPRYIYNLLVNPPSDCVLRLLDSEVRQEVKAIFHLTPSTATGFFYAPKSWGGLGLPRFEHIVKLGTLKSAIKMKSSIDPAVSSLIDERCNERLKKMANSLRINWPASVEDIERARKRLKAEHTKRWAELRSQGQGVSDFSRNKTGNVWLEEYELLKPSRFIDALKLRTNTVGTRTVLARVDKNLDINCRKCRAQPETLGHILGLCQYTKGLRMKRHDEAKLTLAESLRTKNEVFIEPTLRVGGDLFKPDLVIKNEERVLVVDVTVRYENKDYLARAEKEKVNKYKPCLEHLKAKFNVGKGEVIPVVLGSRGTITPSTEYNLKLMGIANKIIKTLVMNVLRSSIEMCNIFLDT

SEQ ID NO: 23375 - protein, 1090 aa, Bombus terrestris
MSLITVPLVGNRVTCPECEKRETNLFFLNLSDLDRHLTQHHPDAPIFWSCINCAKCFPKLHGARCHIPKCGGASSQARTGEFQCEACPMSFGSRRGLSTHERHAYPAVRNIKRRGADPPEENTKSWKVEEVARLKGLWEIFKDHKYPNKEISKFLTTKTIDQIKYQRKKLNLIGAESPQEAISLATEGGCDLVSSGNASFGSPVGRNENEEELIHEWKLSLKNEINKPTEVPPILKEVYNRLMLIWEEHQDDRDSLTESLDHFIRTALYELINKINKNQMDLKTKRAAKTKSPKNNRNSRKRFSYARCQELFHECPRRLADAVVNNDQAYLEPARQPPGSEEVRGLYEKLWGQVGSTYVPAPVTRVPKLSLSEIFPPIAAEDVGERIGKIRKKAAAGPDGLQRDHLTIPGLPIIMAKIYNILVYCSYFPSAWKENRTTLIPKINKPCSLVENWRPITISPILGRIFSSIIDGRIRRGTVLNMRQKGFTSENGCKINIELLNSALNYSKRNSGGIFTIVDISKVFDTVPHAALKPCLAKKGVPALIVDLIDEMYKNVKTTIKTKDGGVEIMIRRGVKQGDPLSPLLFNLCLEPLLEEIEEQASGINVSEHRKVSVLAFADDIVLLGADAREAQHQINVLTDYLQSLMMNLSIEKCQTFEVVAKKDTWFIKEPGLKIGNQIMPTVDPDEAFKYLGAKIGPWKGVHCGVIVPELLSVVKRVRKLSLKPGQKVELLTKYIFPRYIYHLLVSPPSDTVLKLLDSEVRQEVKTILHLVPSTATGFFYTPKACGGIGIPRFEHIIKLGTLKSAIKIANSIDPAVAGLIDDAAIKKLKQTANSLRINWPASLEDIEKARKRLRKEHISQWADLKCQGQGVPDFIKNKTGNLWLEDHSLLKPSRLIDALRLRTNTFGTRSVLARADKNIDVTCRRCRAQPETLGHILGLCQHTKGLRIKRHDEVKSLLEGRLKSKKNNEVFVEPTIKAGGSLFKPDLVIKNGERVLVVDVTVRYENKNYLALAEKEKIEKYRPCLRALKEIFNAKGGEILPVVLGSRGTITPNTEKVLKRLGIANNDIKTILLNVLRSSIELCNIFIDD

SEQ ID NO: 23376 - protein, 1103 aa, Bombus breviceps
MSTAKIMVPLVGDQVACPICEKREVHLFFMNLSDLSRHLNQHHLRARIQWGCLYCERNFLKLHGAQCHIPKCSGTGQDQDKPHKCEACPMSFETQRGLSTHERHAHPAVRNIKRRGTDSPSNKIWTVEEEALLRELEEKYKDHRFPNVEISKILTGKTIEQIKYKRRKLRMAGGVEIPQEVAQETEGGCDPVDPGNAYSRLPDVSGNDIELLQQWRLELEKSIEEPAEVPPVLKELNERLAILWNDHRGNEETLGFKLNDLICTSLYETIKQINNNKNAAKNIANKNLKKNIKSNKILNIDSRNKKQLRNAKKKYSYARCQELFHECPKKLADVVINDDRAFLEPARQPPDATEVRRLYDELWGKTGPFETPISDSGAPALSITDHFKPITAEDVGERIKKIRKKAAAGPDQLQKEHLLIPGLPAILAKIYNICWYNSYFPTVWKENRTTLIPKANKPSSQVENWRPITIGPILGRIFSSILDGKIRKGVVLSLRQKGFTSESGCKANIDLLSAALDYSKRNKGGVFTIVDISKAFDTIPHSALRPCLERKGVPAPIVKLIKNMYEKVTTTIRTKDNIGVEVKILRGVKQGDPLSPLLFNLCMEPLIERIEEQTSGVNVNENRKVSILAFADDIVLLGDNQRDAQRQMDILHEYLKGLGMSISRDKSQTFQVVAKRDTWFVKDPEIRLNENKNKLPTIDPDEAFRYLGAKMGPWKGIHCGIIVPEILDMVRRVRKLSLKPCQKIELLIKYIFPRYLYQLLINPPSDSVLKLLDSEVRQEIKAILHLVPSTATGLFYTPKVCGGLGVPRFEHIVKLGTLKNAIKMKQSIDPAVSSLINEQVNERLKKIANSLRINWPATLEDLEKAKKRLKLSHITQWAGLKSQGQGVKEFVKVKTGNVWLEEYNLLKPSRFIDALRLRTNTFGTRTVLARADKNMDVTCRRCRAQPETLGHILGLCQYTKGLRIKRHDEVKSILIENLRKKNQVFVEPTLQVGSNLYKPDLVIKNEERVLVVDVTVRYENKDYLQKAEKEKIEKYSPCLNYLKEKFHASAGEILPVVLGSRGAITPSTINNLKILGIPDRDIKTIIMNVLRSSIEMCNIFIDY

SEQ ID NO: 23377 - protein, 1099 aa, Bombus vosnesenskii
MVNQNSQRVSDAASLGPGGAVADSSALEGTSVDDLASSSDMSEIMVPIVGDQVACPVCQKREIDLFFLSLSDLGRHLEQHHVTARIQWRCKDCGKGFPKLHGARCHLPHCRGTSQSAAGSYRCETCPMSFGTLRGLSTHELHAHPAVRNVKRRGTDPPEKKWALEELAQLRELCETYKDHKFPNKMISEILTSKTIDQIRYQRKKLRLIGEETEPAQVTEGGCDPVDPGNACFEEPGISGLEYQEWRLQLESAITTQVEVPPVLRWVHTRLMTIWVSLKGNREALESAINDFLKFTLYGALREINKRKKRARQENKNNKRIAHQSNKKNRNARKRYSFARCQELFTENPRRLADAVINDDQAFLQPARDPPNAEEVKRLYEDLWGQTGPVEVPVPGSRAPELSLCEVFPPIAVEDVAEKLSKIRMKAAAGPDGFQKEHLLIPGLPIILTKLYNILIYCSYFPPIWKENRTTLIPKANKPSSLVENWRPITIGPILGRIFSSIIDGRIRRGIVLNPRQKGFTAESGCKINIDLLSAALDHSKKKKGGIFTIVDISKAFDTVPHSAIVPCLRRKGVPTPITDLISNMYDEGKTTIKTKNNMGVEITILRGVKQGDPLSPLLFNLCSEPLLDLIEKQTSGINISESRKIPVLAFADDVVLLGADIGEAQRQVDMLNEYLNGFGMTISRDKRGISVAERRTWFIKEPKIKLGNNTIPTVDPDEAFRYLGAKMGPWKGIHCGVIVPELLSVVRRVRKLSLKPRQKLELITKYIFPRYIYNLLVNPPSDCVLRLLDSEVRQEIKAIFHLTPSTATGFFYAPKSWGGLGLPRFEHIVKLGTLKSAIKMKNSIDPAVSSLIDEKCNEKLKKMANSLRINWPASVEDIERARKRLKAGHTKQWAELRSQGQGVPDFSKNKTGNVWLEDYELLRPSRFIDTLKLRTNTVGTRTVLARVDKNLDINCRKCRAQPETLGHILGLCQYTKGLRMKRHDEAKMTLAESLRTKNEVFVEPTLRVGGDLFKPDLVIKNEERVLVVDVTVRYENKVYLSRAEKEKVNKYQSCLEHLKARFNVGKGEVIPVVLGSRGTITPSTEYNLKRMGIGNQVI

SEQ ID NO: 23378 - protein, 1207 aa, Neoneuromus ignobilis
MTQMNSACGLSMETPVRAHRDVIRWTDSMRIDLLSALYEVCGHAWPPPFSRIPKDRLLSNFLGRQPQLRARVSARKLMDNSRNYRARYPHLVRQVETSTAMGTTATEEDPRLPDPGQITDSNPSVVDHIVEILPTAPIDTHVLDSRNPAQSTESPSLATQPETANQVNISGSDADIAVSPEVRALISRLRNRMACHLSSSGRLTQRKILRRTPVVNLTELDTAVSQILRAVNQTDYWYLNCLVYSAAEIATQGPNPADSTWRSLAEIEKELVAANNEVQRARRVVSYVSDACKGRDVLTTRQERNERIALHYLEVPFYPHTAGKWSEILGLAKNHLAACASRARYLKQLRAQRSDNERFAHDRGRLLRQYLGETGDQAHGDPTEIVAYWKSLWQETQAHTETPDLTRAVRHLEDHCGDADQSVGPLGWPIFVRMIKSKPNWKAAGPDRIQHFWWKKLPSVWPYLKLHIDAWILGTSELPQWLCEARTVLIPKGDVANAGLGDFRPISCPNAMYKICTSYLLKTINVLDTGTQRMHTMQRGTRHAVSGLIETGLLNRWAIEDAITNKRDLSVAWIDFRKAFDTVSHSWISRVLYACRFPEPVIKAICGTVSQWSTRLEVRSKEGTVRSDPISFSRGILQGDALSPYIFCLCTSPISYLIDQLDCGYSPGGSVSRQAPLSHNYYLDDLKLYCRSPVGLEKVLHTLSSALDGLGFVVNPSKSGYLHLKAGKPQTTPVCGIQNRPLPERSSAAGGYKYLGVYEAAAIDKIENVQALTTKVTERMKRLGKSALHAKNFSQAVNQCVLPCIEYQAQTVDFTDVHIKHFSQLLKQNLVDVHFQRRTANTTRLFVPRTSGGRGILSPRDAVARAYIRRVVTVLHSPDSMVRSIAQCESRTWKHLVRTLCTVFRRVGISVDLIGGVLSLDGASCELAGLSQISRWAIKIYTQTATARRLSKIEGMALHGSYTRMCAGVQVSDISNEGMFTRSFLDNRTEGIIASAQENAVPVRWYVKNILKQDVPVVCRKCSNNNETLEHVLSSCPVLSFTQYLQRHDNMLRPIYEHLRSLIQSGGHTQGIQNLVVGDKELLWNTSIETSPPVAACKPDIVYKDRKRILLIEGTVVHTSTLEAKASAKRDKYQPLARALSYMYPGRTIAVIPIVVGTLGAFTDTLIRNVSQLPEVDNDLAKKLVWKMQRNVMIASKRIITGFTAFH

SEQ ID NO: 23379 - protein, 990 aa, Bradysia coprophila
MRRHKKPKNDQGSLTESLINDVINVAVTNDIENESNFEFSVESDGNTQSVKDNESDTVPCMLCKDNKMYKRKGGLKIHCVRKHKSEDYSIMFEKTESGKAFDIKSLSDKISYYKRNIRILKRIPKGARMTAAYELTRIIENTVRLNDSSSWEDLLLFPFKAFQVPENNKKNLTKLVKNNINRETLDPSFRKFSNNQDLLSNRVESKISDGDIRGAVKLLSSSNELAKDNEETYKRLLTKHPLPSRNIDIPPVDDDLEYVVVEERQVYSAIFSFPNGSASGIDGLSPQHLKDMICKSNGEASVKLISAITKLSNLMLSGDVNKDVLSIVYGANLCALTKDDGGVRPIAVGCTFRRLTSKMACRSEFGNVSPILFPKQVGVAIKGGVESAVHAVRSFMFQNRGKNKIMVKVDLSNAFNAIERDDLLKAILKSTPRLYRFFHQCYAAPTTLFFGDYRISSEVGVQQGDPSGPLIFSLAIQPILEEIKSELNIWFLDDGTLIGEAETVKSDLIMIQQKFKTMGLNINFDKCELFQLSDEATVGMTTINELFPGMKVVGEKDLTLLGAPLTMAAVEPVFDKKIAEMELLFSRLKILKSHMAYFILKHCFGIPKLIYFLRTTPLWKFPHIINKIDLSLKKAIETICNIKLNDYQLSVYSLPCHMGGIGIRKIADIVLPAFLSSVTSTSSLVNSILSVTTSDLVEDAFYEEGIAIWNSMKNIVPINAMATQNQWDKINTKRIISSLQFKTDKQNALFKASSEYESSLWLSVLPSKNIGTLLDDNTFRISMALRLGADMCNEHTCARCGKLVEKSGIHGLSCLKNIGKYAKHRELNNIIHRTLHSANVPAKLEPDGLFRDDGKRLDGLTLIPWKRGSCLAWDATCVDTLAASYINISKVKAGRAAEKAALRKQNLYKAIKEKNIILLPFAVETLGPWCEEAKSFTDELGRLLVAATGEKRATKFFKQNISIAIQRGNAASIMGTFESGRNLEEIYFIL

SEQ ID NO: 23380 - protein, 934 aa, Bradysia odoriphaga
MVSCMLCNDNKMYKRKGGLKIHCVRKHKNEDYSIMFEKTESGKSFDIKSLSDKISYYKRNIRILKRIPKGARMPAAYELTRMIEKTVRLNDSSSWEDLLLFPFKAFQVPENNKKNLTKLVKNNINRETLDPSFRKFTNNQDLLSNRVESKISEGDIRGAVKLLSSSNELAKDNEETHKRLLTKHPLPSRNIDIPPVDDDLEYIVVEERQVYSAIFSFPNGSASGIDGLSPQHLKDMICKSNGEASVKLVSAITKLSNLMLSGNVNKDVLSIIYGANLCALTKDDGGVRPIAVGCTFRRLTSKMACRSEFGNASSILFPKQVGVAIKGGVESAVHAVRSFMFQNRGTNKVMVNVDLSNAFNAIERDDLLKAILKSTPRLYRFFHQCYAAPTTLFFGDYRISSEVGVQQGDPSGPLIFSLAIQPILEEIKSELNIWFLDDGTLVGEAETVKSDLIMIQQKFKAMGLNINFDKCELFQLSDEATGGMTTINELFPGMKVVGEKDLTLLGAPLTMAAVEPVFDKKITEMELLFSRLNILKSHMAYFILKHCFGIPKLIYFIRTTPLWKFPHIISKIDLSLKKAIETICNMKLNDYQLSVYSLPCHMGGIGIRKIADIVLPAFLSSVTSTSSLVNSILSVTTSDLVEDAFYEEGIAIWNSMKNVIPINAMATQNQWDKINIKRLISSLQFITDKHNALFKASSEYESSLWLSVLPSKNIGTLLDDNTFRISMALRLGADMCHEHTCGRCGKLVEKSGMHGLSCLKNIGKYAKHRELNNIIHRTLHSANVPAKLEPDGLFRDDGKRLDGLTLIPWKRGSCLAWDATCVDTLAASYINISKVKAGRAAEKAALKKHNLYKAIKEKNIILLPFAVETLGPWCEEAKSFTDELGRLLVAATGEKRAKKFFKQNISIAIQRGNAASIMGSFESGRNLEEIYFIL

SEQ ID NO: 23381 - protein, 1083 aa, Bradysia coprophila
MGNSESRECICKNSSPSDRWIICDRCLHWFHPNCASLTDEQFENIMRKNKHWVCTTCNSQEIEQAKSLLLQTSSLSCDECGFKAKNANGLKIHMRRHKKPKNDQGSLTESLINDVINVAVTNDIENESNFEFSVESDGNTQSVKDNESDTVPCMLCKDNKMYKRKGGLKIHCVRKHKSEDYSIMFEKTESGKAFDIKSLSDKISYYKRNIRILKRIPKGARMTAAYELTRIIENTVRLNDSSSWEDLLLFPFKAFQVPENNKKNLTKLVKNNINRETLDPSFRKFSNNQDLLSNRVESKISDGDIRGAVKLLSSSNELAKDNEETYKRLLTKHPLPSRNIDIPPVDDDLEYVVVEERQVYSAIFSFPNGSASGIDGLSPQHLKDMICKSNGEASVKLISAITKLSNLMLSGDVNKDVLSIVYGANLCALTKDDGGVRPIAVGCTFRRLTSKMACRSEFGNVSPILFPKQVGVAIKGGVESAVHAVRSFMFQNRGKNKIMVKVDLSNAFNAIERDDLLKAILKSTPRLYRFFHQCYAAPTTLFFGDYRISSEVGVQQGDPSGPLIFSLAIQPILEEIKSELNIWFLDDGTLIGEAETVKSDLIMIQQKFKTMGININFYKCELFQLSDEATVGMTTINELFPGMKVVGEKDLTLLGAPLTMAAVEPVFDKKIAEMELLFSRLKILKSHMAYFILKHCFGIPKLIYFLRTTPLWKFPHIINKIDLSLKKAIETICNIKLNDYQLSVYSLPCHMGGIGIRKIADIVLPAFLSSVTSTSSLVNSILSVTTSDLVEDAFYEEGIAIWNSMKNIVPINAMATQNQWDKINTKRIISSLQFKTDKQNALFKASSEYESSLWLSVLPSKNIGTLLDDNTFRISMALRLGADMCNEHTCARCGKLVEKSGIHGLSCLKNIGKYAKHRELNNIIHRTLHSANVPAKLEPDGLFRDDGKRLDGLTLIPWKRGSCLAWDATCVDTLAASYINISKVKAGRAAEKAALRKQNLYKAIKEKNIILLPFAVETLGPWCEEAKSFTDELGRLLVAATGEKRATKFFKQNISIAIQRGNAASIMGTFESGRNLEEIYFIL

SEQ ID NO: 23382 - protein, 1083 aa, Bradysia coprophila
MGNSESRECICKNSSPSDRWIICDRCLHWFHPNCASLTDEQFENIMRKNKHWVCTTCNSQEIEQAKSLLLQTSSLSCDECGFKAKNANGLKIHMRRHKKPKNDQGSLTESLINDVINVAVTNDIENESNFEFSVESDGNTQSVKDNESDTVPCMLCKDNKMYKRKGGLKIHCVRKHKSEDYSIMFEKTESGKAFDIKSLSDKISYYKRNIRILKRIPKGARMTAAYELTRIIENTVRLNDSSSWEDLLLFLFKAFQVPENNKKNLTKLVKNNINRETLDPSFRKFSNNQDLLSNRVESKISDGDIRGAVKLLSSSNELAKDNEETYKRLLTKHPLPSRNIDIPPVDDDLEYVVVEERQVYSAIFSFPNGSASGIDGLSPQHLKDMICKSNGEASVKLISAITKLSNLMLSGDVNKDVLSIVYGANLCALTKDDGGVRPIAVGCTFRRLTSKMACRSEFGNVSPILFPKQVGVAIKGGVESAVHAVRSFMFQNRGKNKIMVKVDLSNAFNAIERDDLLKAILKSTPRLYRFFHQCYAAPTTLFFGDYRISSEVGVQQGDPSGPLIFSLAIQPILEEIKSELNIWFLDDGTLIGEAETVKSDLIMIQQKFKTMGLNINFDKCELFQLSDEATVGMTTINELFPGMKVVGEKDLTLLGAPLTMAAVEPVFDKKIAEMELLFSRLKILKSHMAYFILKHCFGIPKLIYFLRTTPLWKFPHIINKIDLSLKKAIETICNIKLNDYQLSVYSLPCHMGGIGIRKIADIVLPAFLSSVTSTSSLVNSILSVTTSDLVEDAFYEEGIAIWNSMKNIVPINAMATQNQWDKINTKRIISSLQFKTDKQNALFKASSEYESSLWLSVLPSKNIGTLLDDNTFRISMALRLGADMCNEHTCARCGKLVEKSGIHGLSCLKNIGKYAKHRELNNIIHRTLHSANVPAKLEPDGLFRDDGKRLDGLTLIPWKRGSCLAWDATCVDTLAASYINISKVKAGRAAEKAALRKQNLYKAIKEKNIILLPFAVETLGPWCEEAKSFTDELGRLLVAATGEKRATKFFKQNISIAIQRGNAASIMGTFESGRNLEEIYFIL

SEQ ID NO: 23383 - protein, 870 aa, Bombyx mori
MVAEELKKNIDQVLHDNNVTSWEDLLSFAYRILHVDKQSNNSHSLTKKIKDNCKNNSNKTLLDDGVNYDKQQRPFNKVAKIEGKVSDGDLKGASQLLFSSDSLAPNNADTLLALKSKHPAPLTPVSVPPPQSSTTLPRVSLDDVLTTITSFKNGSAAGLDGLSPQHFKDLINVSAGDVGRSLLKSIVSLVNLMLAGSVPESIADILYGANLCALMKRDGGIRPIAVGGTLRRIVSRLCCKEVLPILSGMFRPIQLGVGTKGGCEAAVHAARTFLKGGGAEVLVKVDLKNAFNCIDRNAFLKEVKEHIPSIYPYLYQCYGNPSKLVYKENLVESATGCQQGDPLGPAIFSLGIHPVLRELKSSLNLWYLDDGTLGGDISTVLRDLEYLKSALASLGLELNFAKCELFINASCCSVPVSDVFAKFNTAAPNIKIVDENSLMLLGAPILDGSIDAYIDEQIDKFSQCSNNLFEINSHMALFIIRHCLFVPKFTYVLRCSFLWKHNNKLNSLDEMIKGVLCKIINCNLGDLSWEQCVLPVRFGGIGVRKASAVALPAFLASAHASCLIVGNVLNPCMGSVEIVGVSEAGSAWQSLCQADFPTLPHLQRLWDTPLCQRIQQRLLQSYDNSVDIARFRAVTEKESSYWLQAYPSSNTGTLLDNNALSLAIGLRLGAHINVPHFCVCGEYVNELGHHGLSCQKSAGRIPRHASLNDMIRRALTTINVPAVLEPIGILRSDGKRPDGVTLIPWSVGRCLVWDATCVDTVAPCHLDGTSSRPGSAAASAEITKKRKYSGLGSSYSFLPFAVETMGPWGPEAKKFFTEISKRLKEVTHDAKAGWYFAQRVSLAVQRGNVASILGTVPPSSALEDLFYCVG

SEQ ID NO: 23384 - protein, 966 aa, Bombyx mori
MSHSQPLPPNPNTFPAGLTQCDECLRYFKGNRDLKIHTGRIHKAESVPNTLCPGSLRDNRVSVVPLWKKLSLYKNNSPVVKRVPRGARVMVAEELKKNIDQVLHDNNVTSWEDLLSFAYRILHVDKQSNNSHSLTKKIKDNCKNNSNKTLLDDGVNYDKQQRPFNKVAKIEGKVSDGDLKGASQLLFSSDSLAPNNADTLLALKSKHPAPLTPVSVPPPQSSTTLPRVSLDDVLTTITSFKNGSAGGLDGLSPQHFKDLINVSAGDVGRSLLKSIVSLVNLMLAGSVPDSIADILYGANLCALMKRDGGIRPIAVGGTLRRIVSKLCCKEVLPILSGMFRPIQLGVGTKGGCEAAVHAARTFLKGGGAEVLVKVYLKNAFNCIDRNAFLKEVKEHIPSIYPYLYQCYGNPSKLVYKENLVESATGCQQGDPLGPAIFSLGIHPVLRELKSSLNLWYLDDGTLGGDISTVLKDLEYLKSALASLGLELNFAKCELFINASCCSVPVSNVFAKFNAAAPNIKIVDENSLMLLGAPILDGSIDAYIDEQIDKFSQCSNNLFEINSHMALFIIRHCLFVPKFTYVLRCSFLWKHNNKLNSLDEMIKGVLCKIINCNLGDLSWEQCVLPVRFGGIGVRKASAVALPAFLASAHASCLIVGNVLNPCMGSVEIVGVSEAGSAWQSLCQADFPTLPHLQRLWDTPLCQRIQQRLLQSYDNSVDIARFRAVTEKESSYWLQAYPSSNTGTLLDNNALSLAIGLRLGAHINVPHFCVCGEYVNELGRHGLSCQKSAGRIPRHASLNDMIRRALTTINVPAVLEPIGILRSDGKRPDGVTLIPWSVGRCLVWDATCVDTVAPCHLDGTSSRPGSAAASAEITKKRKYSGLGSSYSFLPFAVETMGPWGPEAKKFFTEISKRLKEVTHDAKAGWYFAQRVSLAVQRGNVARSWGLCLLQARWKICSIVYKKKKKLNT

SEQ ID NO: 23385 - protein, 959 aa, Bombyx mori
MSHSQPLPPNPNTFPAGLTQCDECLRYFKGNRGLKIHTGRIHKAESVPNTLCPGSSRDNRVSVVPLWKKLSLYKNNSPVVKRVPRGARVMVAEELKKNIDQVLHDNNVTSWEDLLSFAYRILHVDKQSNNSHSLTKKIKDNCKNNSNKTLLDDGVNYDKQQRPFNKVAKIEGKVSDGDLKGASQLLFSSDSLAPNNADTLLALKSKHPAPLTPVSVPPPQSSTTLPRVSLDDVLTTITSFKNGSAAGLDGLSPQHFKDLINVSAGDVGRSLLKSIVSLVNLMLAGSVPESIADILYGANLCALMKRDGGIRPIAVGGTLRRIVSRLCCKEVLPILSGMFRPIQLGVGTKGGCEAAVHAARTFLKGGGAEVLVKVDLKNAFNCIDRNAFLKEVKEHIPSIYPYLYQCYGNPSKLVYKENLVESATGCQQGDPLGPAIFSLGIHPVLRELKSSLNLWYLDDGTLGGDISTVLRDLEYLKSALASLGLELNFAKCELFINASCCSVPVSDVFAKFNTAAPNIKIVDENSLMLLGAPILDGSIDAYIDEQIDKFSQCSNNLFEINSHMALFIIRHCLFVPKFTYVLRCSFLWKHNNKLNSLDEMIKGVLCKIINCNLGDLSWEQCVLPVRFGGIGVRKASAVALPAFLASAHASCLIVGNVLNPCMGSVEIVGVSEAGSAWQSLCQADFPTLPHLQRLWDTPLCQRIQQRLLQSYDNSVDIARFRAVTEKESSYWLQAYPSSNTGTLLDNNALSLAIGLRLGAHINVPHFCVCGEYVNELGHHGLSCQKSAGRIPRHASLNDMIRRALTTINVPAVLEPIGILRSDGKRPDGVTLIPWSVGRCLVWDATCVDTVAPCHLDGTSSRPGSAAASAEITKKRKYSGLGSSYSFLPFAVETMGPWGPEAKKFFTEISKRLKEVTHDAKAGWYFAQRVSLAVQRGNVASILGTVPPSSALEDLFYCVG

SEQ ID NO: 23386 - protein, 960 aa, Bombyx mori
MSHSQPLPPNPNTFPAGLTQCDECLRYFKGNRGLKIHTGRIHKAESVPNTLCPGSSRDNRVSVVPLWKKLSLYKNNSPVVKRVPRGARVMVAEELKKNIDQVLHDNNVTSWEDLLSFAYRILHVDKQSNNSHSLTKKIKDNCKNNSNKTLLDDGVNYDKQQRPFNKVAKIEGKVSDGDLKGASQLLFSSDSLAPNNADTLLALKSKHPAPLTPVSVPPPQSSTTLPRVSLDDVLTTITSFKNGSAAGLDGLSPQHFKDLINVSAGDVGRSLLKSIVSLVNLMLAGSVPESIADILYGANLCALMKRDGGIRPIAVGGTLRRIVSRLCCKEVLPILSGMFRPIQLGVGTKGGCEAAVHAARTFLKGGGAEVLVKVDLKNAFNCIDRNAFLKEVKEHIPSIYPYLYQCYGNPSKLVYKENLVESATGCQQGDPLGPAIFSLGIHPVLRELKSSLNLWYLDDGTLGGDISTVLRDLEYLKSALASLGLELNFAKCELFINASCCSVPVSDVFAKFNTAAPNIKIVDENSLMLLGAPILDGSIDAYIDEQIDKFSQCSNNLFEINSHMALFIIRHCLFVPKFTYVLRCSFLWKHNNKLNSLDEMIKGVLCKIINCNLGDLSWEQCVLPVRFGGIGVRKASAVALPAFLASAHASCLIVGNVLNPCMGSVEIVGVSEAGSAWQSLCQADFPTLPHLQRLWDTPLCQRIQQRLLQSYDNSVDIARFRAVTEKESSYWLQAYPSSNTGTLLDNNALSLAIGLRLGAHINVPHFCVCGEYVNELGHHGLSCQKSAGRIPRHASLNDMIRRALTTINVPAVLEPIGILRSDGKRPDGVTLIPWSVGRCLVWDATCVDTVAPCHLDGTSSRPGSAAASAEITKKRKYSGLGSSYSFLPFAVETMGPWGPEAKKFFTEISKRLKEVTHDAKAGWYFAQRVSLAVQRGNVASILGTVPPSSALEDLFYYSKK

SEQ ID NO: 23387 - protein, 1139 aa, Strongyloides ratti
METNPRLGDPSGEVVSNEPFQMTERGRKRKILEDINNINHNNDDITPKKKDENLMKMGINKTYAEIVKNNENNINKSNTKVSKANIRFCNLAKKKPISKPPKIMAKSKKVINHLIPEKKDIIHGNSFNLNPNQRWIIFQKQCGRKQKIFRHELRKWTPIEEIDFLLHDKLKDLMKIWDKPKVNHKESMITWRKASKEILIAGMITKSYDSRKFDDEGNRIDNIIKLQKALKRTTTFQKKVRNDLKKKGNKNAEYRIRQIIKKNKKKFKNIEQILHFNDQRITKLGERLKITNDKYEYLRINKIFENKPSLKVLEQNKKNIVEISKEKMHEYLKEFFKKGNCAKPQILKEWMNHMKSQQVNVTQNYEFNEEYFDEILKYSQNWKCPGENGIPIFLIKKLPSAKTFVKKWMKGVVENRIPITEYDIKGNAYAIFKKGDKNIESNYRFINALNSHYKLLMKYLNKCVREWCSNLISDNQFSGKQGYDGALDIGITNRILQEMGQFAQGWYDMQKAYDSVDHSRLKMIINSVKEIPKPIRNLLCKLPKMYKFSVVNCSPNRDENGKIIKEKKKSWITMKRGIYQGCSLAPWLFCLCLAPLQWKMKQIIDPIDLYGQKKIDILLFMDDIKGFGKNKNELDKITNLIINYGKEIGLTINKDKTEYSIPDEEKIIQYKYMGVYENNKTACDEINAEQLLMKLDEKMDKIFNSKLNVKNIIKAINGCVIPTCTYLFSHEFSDEERIQLARNVDIRIRSYMNTKGMKLSSISNARCYLPRKQLGLGLRSTEVEMDKDTIKNFIHIILSPHLKFAIIHDANHGNKWRNRAMLAANKYGINLQTNAENTKIIINNKEFSSFNLKEAKYKIKELINEFSDKSWETHYKRKKTFPKIANEMELECPWLTNGNITPEIFYKASMYQDNSCIKLNSPGNTESKCLYCYGRDNSKHIMADCTNEEMVKKRKTRHDKVLESIVNSISYEKTKKFINMKNLRKIHEIKDIKVAVDQVNYINGETIHHSRPDLIIETNNQLIVAEVSVVTPLHLLSAKKLKEQRYTINGESEILVPSDNLQEGSNFCSYLQKNSAKQVIFIPLIIGTLGELDGLNQKCWNNFIQLLGLSPELIWRASKIATEQSIYIVDQYIKTKLNN

SEQ ID NO: 23388 - protein, 1039 aa, Gerris buenoi
MSFSTAAGRSNHVRSAHPVLREKEKELESKAPGRHRDRAWTPEELHIYDREMATHYPARGYAARVALSLPGKTAEQVREKARSRRPPCSSSSLEVGGAIVAEEDFVSLVTGDEPGPSIGGPVVEPSLGRDREQFQAPKECPVRPERPEGPDPEVGGSSSEGNMLEWKGVLIRAISEVPSALVDPAAIEINDSVGSLAGRVGMGVSLLTDEIDVLIDRLTALLVVEEGESVKKTARSSRKASKMPNSVKTRRYAKTQNLMRENPRELARVIEDRDLDILSRDDTRRPAFSSEEVVGLYGPLWGVEGGTQWTVSSDAPPVPPEGVWTPIRPDEVMDRIRKISRTSSGGLDRVVKGGILRVTGIEGLLARLFMLILVTGYFPRRWRVNRTVLIPKAGKDPSLIGNNRPITIGSLLVRIYSGLVCSRLSARMHFGPRQKGFRSVNGTFENCFLLDEVTRAAKSGRKDLVVLVVDIKRAFDTVPHVALRGALRGAGMHPDVISRVMVMYEDISSRFLTTNGETYLKLLRGVKQGDPCSPLLFNAVVEPLIARIASDSAEGYGPLAYADDLTILCRSPEEGQKFLSSIEAYLGALGMELSVGKCFAYWLKRLPSGAMKLQDPKLTIGGVEIGHVAPGKKFQYLGVNFDPLKGLDNGSILGHLVRSSELVGRLPLKPRQKIRLMYEFVIPRCFYRMAIDPPSKTRLKGLDRTLRTWVKDVLHLPPSTPNGLLHTRVKDGGLGIPRLATQIWCSHLKAADAVTRSEDPLMLYYCDANGVVERLRRASEGMRIPWPDDGPDLALAKTLERQLKLDQWCNLPATGHGVSSFLDDPVGNRWLRDPCLLGESNFLLALRLRGNLVGVRQALRRVDQSIPSECRRCGDENESLMHVLNVCPSNHAKIVKRHDDVKELVAKRLAELGWSVAVETAFEVNQGGELIRLKPDIVAWKDDEVRVMDVAIAYESQDSLKRVADGKVSRYSALEGLLLERFQCRNFAVLPIVIGSRGALPERTKRNLRLVGLATSVDGLTMSLIALRCSIGIACRHLS

SEQ ID NO: 23389 - protein, 1033 aa, Eufriesea mexicana
MDDAPVLGGHQIGPPTGVTEPVSKDVPACPGPSSGFACEFPGCTRNFTTKSGRGVHHRRAHMEWYDAHQNTDHRKARWDPEESALLARREAQLVSQGVRFINQGLLSFFPKRTLESIKGQRRKADHKSAVQKALKELDTPSPRSMLPPVDADNPEVAEHQPLVRSAPGRAPDLSEERVAAGVVDYINKLPPCDCVRLSSDRLNSICSSLNTWSRDRVFEELSLYLLEIFPPPPSPRGPPKVENNRGASLTRRRARRAEYSRVQRAWKKNRSTCVRALLKDKQTSSAPPMDVMIPFWERVMTSTDDSTPGVDSSEEVLINIWSPVTPTEVKAALPRAGSAPGPDGLSVEQLRGIPLGILVRIFNIVILCGKMPTHLLQSYTTLIPKKDGASDPADFRPITVSSGLVRTFHKVLANRLSRSVRLDSRQKAFRPMDGCSENTFLMDFALRYSRQNFKPLYMASLDVAKAFDSVTHASIMDTLRSAGVPELAVEYLAGTYKRSMTRLRCGQWESHPIHPTCGVKQGDPLSPICFNMVIDRLLSRIPQDIGIRLGGTVLNAACFADDLVLFATTSGGLQTMIDITADFLNCCGLRVNAAKCFTVALKSVPKAKKSVVDAGETFRCLGASLPALRRSDEWRYLGVPFTPEGRLMSRPLEKFKGELNILSAAPLKPQQRLFVLRTVILPSFHHLLVLGMTNISLLNQMDCLTRSYARKWLALPHDVPNAYFHADVRDGGLSLTSYRWAVPLHRRNRLLRIKVHEGTEIPESMQKFIDQEVRRVELRLKDGSHTITTLDECKQRFAALLHKSNDGVPLSGSDRVPQQHRWVTDGNLFLTGRDFINANKLRINAIPLRSRMARGRVRDKQCRAGCGHPETLQHVLQSCERTHHARIRRHNALLEFLSKRPDRNTEIFKEPHFKTSEGLRKPDLIVKREDEAIVIDAIIAGERANLDQVHKGKISKYEGLAGSVMSRYKVKKVTFTSVTISARGVWSSESFKHLCSLGLLNKSDAKVMSTRVLIGGLSILSSFKNSTARSRHC

SEQ ID NO: 23390 - protein, 1083 aa, Dolomedes plantarius
MVAFRCHFCSREFSTKTGLGVHTRRAHPEDANAAIDIPSSKRRWTREEDAMLAAAEVELVRRGSKNINADLHERFPGRTLESIKSRRKRREYCDLRKKLQDEYTLPPSFAGPSASAYSASTSAATCVPTASSAFPVDDQPLSPEVERSLIGSLLQDEDDSINAAYSPDVPPAPVAVDGSSTTRVPAAVSPSSGMSPHERNDAPCAASGSTHNVDVLVSGPVDSVYDFCSALFRASPAKPESPEDLLDQAFFNFSFDRDRDVLLGRLGYALEALLPSRPFRLPVAVSEARPLPSRSKKETRRAQYAETQKLFKKNPKRAASKILDPSGSTDVSKFPSTMSAYWKNIFTLPANNDQCSNTLFSRIPKGDSNIQMWGPILKEEVVAAFPRPSSAPGPDGIRVPTLKKLGVLTLMKIFNLLLLCGQLPRRLLWSKTIFIPKKESAVDPGDFRPISMSSVIVRAFHRILAARLARFLKLSTEQRAFIEADGAAQNIFLLDAALCNAKKNFKDLFASSLDIRKAFDSVAHDSIEMALRAAGADLSFVRYVKHLYCNAFTSFVFAGADSEFHPTCGVRQGDPLSPLLFNLVLDGLVRELASSPIGTQLGDEMRVTCSAFADDLVLFASTEMGLQSLVDTSVGYLRKCNLVINVAKSFTITLKANAKRRVTKLDSSAIKICGSALPAIKIGQKFKYLGVYFDAGGLLYHSPVDQVRELLPRLKSAPLKPQQRLYILRNFFFPRLYHLCVLSRVRVGALRKADVLIRAFARCILNLPGDCPNAYFHAAVNDGGLGIPSLRLLVPSLRLRRLNALQLSLSVEAAKSVPGAFLRETIAKVSSVTTTSCPDLAMRESLYRSVDGSGLRDSCCTPSQYSWIESPSLFLSGKDYINCVKARINALPTRARLSRGRPQRERFCRAGCNRIEDLAHILQVCSRTHARRIARHNAVVNYISRGLAHRGYEVHSEPIYETIAGRKKPDLVAVKDDRAYILDAQVVDHRTIDRAHQNKLNYYRPLQLDVAEKLNVSEVETLAVTMSWRGVWCSASAKSLLDAKVVRKGDLKVLSTRVLIGGLASFRAFNSSCARSGGSGGAG

SEQ ID NO: 23391 - protein, 1083 aa, Dolomedes plantarius
MVAFRCHFCSREFTTKTGLGVHTRRAHPEDANAAIEVPSSKRRWTREEDAMLAAAEVELVRRGSKNINADLHERFPGRTLESIKSRRKRREYIELRKKLLDEYTLPPSFAGPSASAYSASTSTAACVPTTSSAVSIDDQPLSPEVERSLIGSLLQDEEDSVDAAHSPDVLPAPVADDGLSTTRVPAAVSPSSVMMPCERNEVPGAASGSAHDVDDPVSGPVDTVYDFCSSLFRASPAKPESPEDLLDQAFLNFSFDRDREILLGRLGYALEALLPSRPFRLPVAVSGTRPAPSRSKKETRRAQYAETQKLFKKNPKRAASKILDPSGSTDVSMFPATMSAYWKNIFTLPANYDKCSVDLFSRIPKGDSNIQMWGPILKEEVVAAFPRPSSAPGPDGIRVPTLKKLGVLTLMKIFNLLLLCGQLPRRLLWSKTIFIPKKESAVDPGDFRPISMSSVIVRAFHRILAARLARFLKLSTEQRAFIEADGAAQNIFLLDAALCNAKKNFKDLFASSIDIRKAFDSVAHDSIEMALRAAGADLSFVRYVKYLYCNAFTSFVFAGADSEFHPTCGVRQGDPLSPLLFNLVLDGLVRELASSPIGTQLGDEMRVTCSAFADDLVLFASTEMGLQSLVDTSVGYLRKCNLVINVAKSFTITLKANAKRRVTKLDSSAIKICGSALPAIKIGQKFKYLGVYFDAGGLLYHSPVDQVRELLPRLKSAPLKPQQRLYILRNFFFPRLYHLCVLSRVRVGALRKADVLIRAFARCILNLPGDCPNAYFHAAVKDGGLGIPSLRLLVPSLRLRRLNALQLSLSVEAAKSVPGAFLRETIAKVSSVATTSCPDLAMRESLYRSVDGSGLRDSCCTPSQHSWVDSPSLFLSGKDYINCVKARINALPTRARLSRGRPQRERFCRAGCNRIEDLAHILQVCSRTHARRIARHNAVVNYISRGLAHRGYEVHSEPIYETIAGRRKPDLVAVKDDRAYILDAQVVDHRTIDRAHQNKLNYYRPLQLDVAEKLNVSEVETLAVTMSWRGVWCSASAKSLLDAKVVRKGDLKVLSTRVLIGGLASFRAFNSSCARSGRSGGAG

SEQ ID NO: 23392 - protein, 1099 aa, Desoria tigrina
MANTDMLDEDDPTRLWCFCQQPHNNLFMIACDNCHEWFHGKCVHMTKKLNDFLLKNNKPWFCSDCLLPKHDATPSMLSNPDDFPDISQLIREIKTRQDSTSHLNDPLPSEMTPEDSDLISSTTKVKDSPCPKCLKLFRGLKGLRHHFRRMHPGESMEDLEPVNWNSSSLSQQLASLRASVPVLKRVPKACRHLIADELSSLINRCVASNTILDWSILFFFAYGVLRVPDKSPKKSHSLSTLVKQNLNNWHKLKTLHPSVLLRHLLELNTRKTRKIGFKHNNSERHRSQKVVSKLSEGDVHGAIRILCSEDSFAPNVESVFQELQSKHPLPMKDDIPIIEFPEDESCPFVSEPEVIKSIFSFPCGSAGGMDSIRPQHLKDLSSDSVGISSKRLLQSLSSLCNFMMSGSVTSEAIPVLYGASLCAISKKNGGIRPIAVGTTFRRLTAKIICNRNVHELGESLRPRQLGFGTKGGAEAGAHAARIFLSNNTNSGKVFLELDFRNAFNMCARGQLLSLVHRHLPAYYNFLYQCYASSSDLSFGEYTINSVRGVQQGDPLGPALFCLLIKTMTESLSSELNLWYLDDGALGGEPSIVLQDLNIVITSARALGLELNFKKCELCILSEDTDFRTQTYNDFCSLAPGILLSNPAEMTLLGCPLSDNGIHVAINEKLKVLKMMTSRLTDLPSHSAFFLLKNSLAIPRLTYLLRCSPCWKSQNLLMEYDAHLRQSLELISNTTFDDIAWSQATLPISKGGLGIRNVNSLCYSAFLGSIHSVKDLLSKMFGSFFAFDINTDAMSSEALVTWSTLSNAEPPLSPFSSFQKSWDNPICDNLLLSITTGASPVNLARLLASQTKESGAWLHAIPCSTIGTLLDDSSFRISMALRLGQPLCVPHSCTCGETVDKLGHHGLACRKSAGRWSRHEMVNDILKRALVSAGFPAIREPTGCSRNDGKRPDGMTLIPWKGGKPLIWDATCRDTLCASYLNMSCKVAGSAARLAENQKQNLYSNLTDFIFIPFAIETMGPWGEDAKNLIKSIGRVICGLTNEKKSTSYLIQRISLAIQRGNAASIMGTVPSSDSLDEITYFYFLLNLNFEFSKILFLLL

SEQ ID NO: 23393 - protein, 1081 aa, Desoria tigrina
MANTDMLDEDDPTRLWCFCQQPHNNLFMIACDNCHEWFHGKCVHMTKKLNDFLLKNNKPWFCSDCLLPKHDATPSMLSNPDDFPDISQLIREIKTRQDSTSHLNDPLPSEMTPEDSDLISSTTKVKDSPCPKCLKLFRGLKGLRHHFRRMHPGESMEDLEPVNWNSSSLSQQLASLRASVPVLKRVPKACRHLIADELSSLINRCVASNTILDWSILFFFAYGVLRVPDKSPKKSHSLSTLVKQNLNNWHKLKTLHPSVLLRHLLELNTRKTRKIGFKHNNSERHRSQKVVSKLSEGDVHGAIRILCSEDSFAPNVESVFQELQSKHPLPMKDDIPIIEFPEDESCPFVSEPEVIKSIFSFPCGSAGGMDSILQHLKDLSSDSVGISSKRLLQSLSSLCNFMMSGSVTSEAIPVLYGASLCAISKKNGGIRPIAVGTTFRRLTAKIICNRNVHELGESLRPRQLGFATKGGAEAGAHAARIFLSNNTNSGKVFLELDFRNAFNMCARGQLLSLVHRHLPAYYNFLYQCYASSSDLSFGEYIINSVRGVQQGDPLGPALFCLLIKTMTESLSSELNLWYLDDGALGGEPSIVLQDLNIVITSARALGLELNFKKCELCILSEDTDFRTQTYNDFCSLAPGILLSNPAEMTLLGCPLSDNGIHVAINEKLKVLKMMTSRLTDLPSHSAFFLLKNSLAIPRLTYLLRCSPCWKSQNLLMEYDAHLRQSLELISNTTFDDIAWSQATLPISKGGLGIRNVNSLCYSAFLGSIHSVKDLLSKMFGSFFAFDINTDAMSSEALVTWSTLSNAEPPLSPFSSFQKSWDNPICDNLLLSITTGASPVNLARLLASQTKESGAWLHAIPCSTIGTLLDDSSFRISMALRLGQPLCVPHSCTCGETVDKLGHHGLACRKSAGRWSRHEMVNDILKRALVSAGFPAIREPTGCSRNDGKRPDGMTLIPWKGGKPLIWDATCRDTLCASYLNMSCKVAGSAARLAENQKQNLYSNLTDFIFIPFAIETMGPWGEDAKNLIKSIGRVICGLTNEKKSTSYLIQRISLAIQRGNAASIMGTVPSSDSLDEIFYLT

SEQ ID NO: 23394 - protein, 1082 aa, Desoria tigrina
MANTDMLDEDDPTRLWCFCQQPHNNLFMIACDNCHEWFHGKCVHMTKKLNDFLLKNNKPWFCSDCLLPKHDATPSMLSNPDDFPDISQLIREIKTRQDSTSHLNDPLPSEMTPEDSDLISSTTKVKDSPCPKCLKLFRGLKGLRHHFRRMHPGESMEDLEPVNWNSSSLSQQLASLRASVPVLKRVPKACRHLIADELSSLINRCVASNTILDWSILFFFAYGVLRVPDKSPKKSHSLSTLVKQNLNNWHKLKTLHPSVLLRHLLELNTRKTRKIGFKHNNSERHRSQKVVSKLSEGDVHGAIRILCSEDSFAPNVESVFQELQSKHPLPMKDDIPIIEFPEDESCPFVSEPEVIKSIFSFPCGSAGGMDSIRPQHLKDLSSDSVGISSKRLLQSLSSLCNFMMSGSVTSEAIPVLYGASLCAISKKNGGIRPIAVGTTFRRLTAKIICNRNVHELGESLRPRQLGFGTKGGAEAGAHAARIFLSNNTNSGKVFLELDFRNAFNMCARGQLLSLVHRHLPAYYNFLYQCYASSSDLSFGEYTINSVRGVQQGDPLGPALFCLLIKTMTESLSSELNLWYLDDGALGGEPSIVLQDLNIVITSARALGLELNFKKCELCILSEDTDFRTQTYNDFCSLAPGILLSNPAEMTLLGCPLSDNGIHVAINEKLKVLKMMTSRLTDLPSHSAFFLLKNSLAIPRLTYLLRCSPCWKSQNLLMEYDAHLRQSLELISNTTFDDIAWSQATLPISKGGLGIRNVNSLCYSAFLGSIHSVKDLLSKMFGSFFAFDINTDAMSSEALVTWSTLSNAEPPLSPFSSFQKSWDNPICDNLLLSITTGASPVNLARLLASQTKESGAWLHAIPCSTIGTLLDDSSFRISMALRLGQPLCVPHSCTCGETVDKLGHHGLACRKSAGRWSRHEMVNDILKRALVSAGFPAIREPTGCSRNDGKRPDGMTLIPWKGGKPLIWDATCRDTLCASYLNMSCKVAGSAARLAENQKQNLYSNLTDFIFIPFAIETMGPWGEDAKNLIKSIGRVICGLTNEKKSTSYLIQRISLAIQRGNAASIMGTVPSSDSLDEIFYLT

SEQ ID NO: 23395 - protein, 1082 aa, Desoria tigrina
MANTDMLDEDDPTRLWCFCQQPHNNLFMIACDNCHEWFHGKCVHMTKKLNDFLLKNNKPWFCSDCLLPKHDATPSMLSNPDDFPDISQLIREIKTRQDSTSHLNDPLPSEMTPEDSDLISSTTKVKDSPCPKCLKLFRGLKGLRHHFRRMHPGESMEDLEPVNWNSSSLSQQLASLRASVPVLKRVPKACRHLIADELSSLINRCVASNTILDWSILFFFAYGVLRVPDKSPKKSHSLSTLVKQNLNNWHKLKTLHPSVLLRHLLELNTRKTRKIGFKHNNSERHRSQKVVSKLSEGDVHGAIRILCSEDSFAPNVESVFQELQSKHPLPMKDDIPIIEFPEDESCPFVSEPEVIKSIFSFPCGSAGGMDSIRPQHLKDLSSDSVGISSKRLLQSLSSLCNFMMSGSVTSEATPVLYGASLCAISKKNGGIRPIAVGTTFRRLTAKIICNRNVHELGESLRPRQLGFGTKGGAEAGAHAARIFLSNNTNSGKVFLELDFRNAFNMCARGQLLSLVHRHLPAYYNSLYQCYASSSDLSFGEYTINSVLGVQQGDPLRPALFCLLIKTMTESLSSELNLWYLDDGALGGEPSIVLQDLNIVITSARALGLELNFKKCELCILSEDTDFRTQTYNDFCSLAPGILLSNPAEMTLLGCPLSDNGIHVAINEKLKVLKMMTSRLTDLPSHSAFFLLKNSLAIPRLTYLLRCSPCWKSQNLLMEYDAHLRQSLELISNTTFDDIAWSQATLPISKGGLGIRNVNSLCYSAFLGSIHSVKDLLSKMFGSFFAFDINTDAMSSEALVTWSTLSNAEPPLSPFSSFQKSWDNPICDNLLLSITTGASPVNLARLLASQTKESGAWLHAIPCSTIGTLLDDSSFRISMALRLGQPLCVPHSCTCGETVDKLGHHGLACRKSAGRWSRHEMVNDILKRALVSAGFPAIREPTGCSRNDGKRPDGMTLIPWKGGKPLIWDATCRDTLCASYLNMSCKVAGSAARLAENQKQNLYSNLTDFIFIPFAIETMGPWGEDAKNLIKSIGRVICGLTNEKKSTSYLIQRISLAIQRGNAASIMGTVPSSDSLDEIFYLT

SEQ ID NO: 23396 - protein, 1082 aa, Desoria tigrina
MANTDMLDEDDPTRLWCFCQQPHNNLFMIACDNCHEWFHGKCVHMTKKLNDFLLKNNKPWFCSDCLLPKHDATPSMLSNPDDFPDISQLIREIKTRQDSTSHLNDPLPSEMTPEDSDLISSTTKVKDSPCPKCLKLFRGLKGLRHHFRRMHPGESMEDLEPVNWNSSSLSQQLASLRASVPVLKRVPKACRHLIADELSSLINRCVASNTILDWSILFFFAYGVLRVPDKSPKKSHSLSTLVKQNLNNWHKLKTLHPSVLLRHLLELNTRKTRKIGFKHNNSERHRSQKVVSKLSEGDVHGAIRILCSEDSFAPNVESVFQELQSKHPLPMKDVIPIIEFPEDESCPFVSEPEVIKSIFSFPCGSAGGMDSIRPQHLKDLSSDSVGISSKRLLQSLSSLCNFMMSGSVTSEAIPVLYGASLCAISKKNGGIRPIAVGTTFRRLTAKIICNRNVHELGESLRPRQLGFGTKGGAEAGAHAARIFLSNNTNSGKVFLELDFRNAFNMCARGQLLSLVHRHLPAYYNFLYQCYASSSDLSFGEYTINSVRGVQQGDPLGPALFCLLIKTMTESLSSELNLWYLDDGALGGEPSIVLQDLNIVITSARALGLELNFKKCELCILSEDTDFRTQTYNDFCSLAPGILLSNPAEMTLLGCPLSDNGIHVAINEKLKVLKMMTSRLTDLPSHSAFFLLKNSLAIPRLTYLLRCSPCWKSQNLLMEYDAHLRQSLELISNTTFDDIAWSQATLPISKGGLGIRNVNSLCYSAFLGSIHSVKDLLSKMFGSFFAFDINTDAMSSEALVTWSTLSNAEPPLSPFSSFQKSWDNPICDNLLLSITTGASPVNLARLLASQTKEYGAWLHAIPCSTIGTLLDDSSFRISMALRLGQPLCVPHSCTCGETVDKLGHHGLACRKSAGRWSRHEMVNDILKRALVSAGFPAIREPTGCSRNDGKRPDGMTLIPWKGGKPLIWDATCRDTLCASYLNMSCKVAGSAARLAENQKQNLYSNLTDFIFIPFAIETMGPWGEDAKNLIKSIGRVICGLTNEKKSTSYLIQRISLAIQRGNAASIMGTVPSSDSLDEIFYLT

SEQ ID NO: 23397 - protein, 1074 aa, Desoria tigrina
MTKRLNDFLLKNNKPWFCSSCLLPKRDATSSLLIDDDDFPDVSLLIREIKSRQKSSSQLSISNPHQLRRHTAFESSNPSTSQDFNDQSDFMIPNSLSNVLTPIENVPEFSDSTSSNATLKDSPCPRCFKLFRGLKGLRHHFRKMHPGESMDEFEPVNANPSSLSQQLAALRANVPVLKRVPKACRHLIADELSLLLNRCISSNTILDWSILFFFTFGALRVPEKSRKKCNYLSTSVKQNLKNWQKLKLLHPTALLRHLLELNTRKTRKFGFKQTNTDKHRSQKVQSKLSEGDVHGAIRILCSEDSMAPNVESVYLELQSKHPLPLKNDIPILDVTEEGSHLFISVPEVLKSILSFPCGSAGGMDSIRPQHLKDLTSDAVGFSAKRLLDSLTSLCNFMLSGTVTPEAIPVLYGASLCAISKKSGGIRPIAVGTTFRRLMAKIICHRNVNELGESFRPRQLGFGTKGGAEAGAHAARIYLSNNENSNFLELDFRNAFNMCARGQLLSLVRCHLPAYYGFLYQCYASSSDLSFGEYTINSVRGIQQGDPLGPALFCLLIKSMIESLSSELNLWYLDDGTLGGESSIVLQELNIIITTARTLGLELNFKKCELCILSEDPDFRTKTYDEFSSLAPGIILSNPAEMTLLGCPLSEDGIHDAIHEKLNILKRMTSRLADLPSHSSFFLLKNSLAIPRLTYLLRCSPCWKSHSLLMDYDSHLRQSLELISNTTFDDIDWSQATLPISKGGLGIRDVNLLCYSAFLGSIHSMKDLLTTIFGSFFAFDINTDAISSEALVSWCAISNAEPPTSPFPSFQKSWDNPICDNFLSNITTGASPVNLAGLLASQTKESGAWLHAIPCSTIGTLLDDSSFRISMALRLGQPVCVPHSCTCGETVDKLGHHGLACRKSAGRWSRHEMVKDILKRALVSAGFPAIREPTGCSRNDGKRPDGMTLIPWKGGKPLIWDATCRDTLCASYINMSCKVAGSAARLAENQKQNLYSNLTDFIFIPFAIETLGPWGEDAKNLIKSIGRVICGLTNEKKSTTYLIQRISLAIQRGNAASIMGTVPSSDSLDEIFYLT

SEQ ID NO: 23398 - protein, 941 aa, Hyles vespertilio
MDVNPEANLLCPHCTSNNLRRFTKRGLTIHITRKHRPTASVGVPSPTQNPGADEVNSSNSPLDLTRLERLANYRANVHVLKHIPKGARNLAAGRLNSIIVKCLQNNSPNDWYALLSFAYSALRVPEDGNDSKSLTGKVKRNIGDTLEYLPAQRPQRTSSLYKQIETKVFDGDLRGAVRLLTSDCTLAASDPVTLDRLREQHPSPIRSMSYTQASVDCLQVLQVTSKDVVEAIASFHCSSAAGLDGLRPQHLKELVSISAGDNGPKLLESLTSLCNFLLEGKLCSDVCPFLYGASLCALNKKVGGIRPIAVGSVIRRLVAKLGCRAVRDKAADLLQPHQLGFGTPRGCEAAIHSTRIFATDPQRDGNIIVKIDLKNAFNSIERGAMLVEARDKIPLLSPFLDQCYVCPSNLYFNGHKITSQTGAQQGDPLGPLLFSLTVNRIIATLGAPLNVWYLDDGIIGGDPYIVAKDLEMLILRLRDIGLTINSAKCELYRCGNVVEEKIENIKIVDEQSFELLGAPIFENGLTNCLRNRRRMLASARQHLPHLSGHVALTLFRSCLSVPKLMYVLRTCPTWLFPDEVDALDNDIKDALEGILNIHLDDKQWIQTSLPIRHGGLGVRRVRDVSVSAFLASAHGVVELVTNIIPLQGGSSAIPYAVEALSAWSLLCPAADQPENPSVQRLWDERVCAARNAELLHSARGVDLARLKSVSTPEAGAWLHAIPSPHLGTLLDDGSLRVAVALRVGSKICEPHVCGCGAQVDATGYHGLVCSRSAGRFPRHHTLNEVIRRALVSAGLPCTLEPPGLSRSDGKRPDGLTLVPWEKGRCLLWDATCVSTYAASHLTRTSRRAGSAEWAATQKHHKYAMLEQAYFFVPFAVEVSGVWCAEAKDFVRELGRRLRRNGQDHRAESFLVQHISLAIQRGNVASIMGTFSPGTVRGGLFD

SEQ ID NO: 23399 - protein, 949 aa, Hyles vespertilio
MDVNPEANLLCPHCTSNNLRRFTKRGLSIHITRKHRPTASVGVPSPTQNPGADEVNFSNSPLDLTRLERLANYRANVHVLKHIPKGARNLAAGRLNSIIVKCLQNNSPNDWYALLSFAYSALRVPEDGNDSKSLTGKVKRNIGDTLEYLPAQRPQRTSSLYKQIETKVFDGDLRGAVRLLTSDCTLAASDPVTLDRLREQHPSPIRSMSYTPASVDCLQVLQVTSKDVVEAIASFHCSSAAGLDGLRPQHLKELVSISAGDNGPKLLESLTSLCNFLLEGKLCSDVCPFLYGASFCALNKKDGGIRPIAVGSVIRRLVAKLGCRAVRDKAADLLQPHQLGFGTPRGCEAAIHSTRIFATDTQRDGNIIVKIDLKNAFNSIERGAMLVEARDKIPLLSPFLDQCYVCPSNLYFNGHKITSQTGAQQGDPLGPLLFSLTVNRIIATLGAPLNVWYLDDGIIGGDPDIVAKDLEMLILRLRDIGLTINRAKCELYRCGNVVEEKIEKIVNILPNIKIVDEQSFELLGAPIFENGLTNCLRNRRRMLASARQHLPHLSGHVALTLFRSCLSVPKLMYVLRTCPTWLFPDEVDALDNDIKDALEGILNIHLDDKQWIQTSLPIRHGGLGVRRVRDVSVSAFLASAHGVVELVTNILPLQGGSSAIPYAVEALSAWSLLCPAADQPENPSVQRLWDERVCAARNAELLHSARGVDLARLKSVSTPEAGAWLHAIPSPHLGTLLDDGSLRVAVALRVGSKICEPHVCGCGAQVDATGYHGLVCSRSAGRFPRHHTLNEVIRRALVSAGLPCTLEPPGLSRSDGKRPDGLTLVPWEKGRCLLWDATCVSTYAASHLTRTSRRAGSAAEWAATQKHHKYAMLEQAYFFVPFAVEVSGVWCAEAKDFVRELGRRLRRNGQDHRAESFLVQHISLAIQRGNVASIMGTFSPGTVRGGLFD

SEQ ID NO: 23400 - protein, 955 aa, Mimas tiliae
MNVNSESNLLCPHCPTDNLRRFTRRGLSIHITRKHRPTGTLVLPQAPLTSQPPQHPEVDDTESPVVLSDSPLLERLGSYRANLRILKHIPKGARNLAAGKLSSIIEKCLQSNAPNDWYTLLSFAYFALRVPEGDGGTESLTSKVKKNIGATLDYLPSDKPQRCPSIYKMIETKVFDGDLRGAVRILTSDCTLAPSDSNTLDSLRLKHPAPVRPISLSPSSTDCLGVLKLTSKDVAGAIASFHCSSAAGLDGLRPQHLKELVAISVGDNGPKLLESLTNLCNFLLEGKLCSDVCPFLYGASLCALNKKDGGIRPIAVGSVIRRLVAKVGCRAVRDEAADLLRPHQLGFGTQLGCEAAIHATRIFAMDPQQSGNIILKIDIENAFNCVERSAMLIEARDKIPLLSPFLEQCYVSPSNLYFNGHRIASQVGVQQGDPLGPLLFSLAINQMIATLRAPLNVWYLDDGIIGGRPDVVIKDLETLIPMLRDIGLIINSAKCELYPLGTVAGGRIEAIQRILPNLRVLDRQSFELLGAPIFQDGVASSLRTKREMLASARQHLLHLSAHVALTLYRSCLSVPKLVYVMRTCPTWFFPEEVGLLDNDIKDTLESILNIRLNEKQWLQASLPIRHGGLGVRRLGDTNLSAFLASAHGVLGLVTNILQVQGDSTIIPYAAEALNAWSLVYPSADQPENPNIQRQWDERVCKVRVADLFCSALGADVARLKSVSCLESGAWLHAIPSPHLGTFIDNGSLRVAVALRLGSNICEPHVCACGSQVDATGHHGLSCGRSAGRFPRHHMLNDIIRRALVSAGLPCTLEPPGLSRTDGKRPDGLTLIPWEKGRCLLWDATCVSTYAASHLTRTVREAGSAAEWAASQKHLKYSALEQTYFFVPFAVEVSGVWCAEAKEFVRELGRRLRRNGKDSRAELYLVQHISLSIQRGNIASVMGTFASDTVRGGLFD

SEQ ID NO: 23401 - protein, 931 aa, Deilephila porcellus
MDVNPHINLLCPHCPSDSLRRFTKRGLSIHNITRKHRPTATVGLTSPTQNPRADEIDPVIVSPDFSLLEGLGNIRANVHILKHIPKGARNLAAGRLNSIIVKCLQTNAPNDWYALLSFAYSALRVPEDGDSSKSLTSKVRKNIGDTFDFLPSQKPRRTPSIYKLIETKVFDGDFRGAVRLLTSDCTLAASDPATLGSLREKHPSPVRPMSYSPASVDCLQVLKVTSKDVMEAIASFHCSSAAGLDGLRPQHLKELVSISAGDNGPRLLKSLTDLCNFLLEGKLCGDVCPFLYGASLCALRKKDGGIRPIAVGSVIRRLVAKLGCRAVRDKAAELLQPYQLGFGTPRGCEAAIHATRIFAMDPQRGGNIIVKIDLKNAFNSLERGAMLVEARNKIPLLSPFLDQCYVCPSNLYFNGHKITSQMGAQQGDPLGPLLFSLTINQIIATLGAPLNVWYLDDGTIGGDPDIVTKDLELLILRLRDIGLTINSAKCELYRCGTVIEQNIERIRNILPDIKIVDQQTFELLGAPVFENGLANCLRTRRRALASARQHLPHLSGHVALTLYRSCLSVPKLMYVLRTCPTWLVPDEVDALDSDIKDALETILNIHLDDNKWVQASLPIRHGGLGVRRVRDVSVSAFLASAHGVAELVTNILQLQGDSSAIPYAAEALRAWSLLCPAADQPENPSVQRQWDERVCAASFAELLHSARGVDLARLKSVSTLESGAWLHAIPSPHLGTLLDDGSLRVAVALRVGSKICESHVCMCGVQVDATGHGLSCGRSAGRFPRHHMLNEVIRRALVSAGLPSTLEPPGLSRSDGKRPDGLTLVPWEKGRCLLWDATCVSTYAASHLTRSSRRAGSAAEWAAIQKHHKYATLERAYFFVPFAVEVSGVWCAEAKDFVRELGRGAMGRITAPNHSWCSTYLLPFNVAMLQA

SEQ ID NO: 23402 - protein, 938 aa, Tomocerus minor
MLQYRNSITSQYSPVPPVLNNSISEAVPNTSELDKAKEKLKEYKEKFDMLLNNEDFNEMMFLSLYDEFIKDLKAAQDKLPAPTHPAKRYYNLRKNKTCFVKNQNKKGFAKSSNPERSDKERRNRNRQDFQNQLIQHYYYFNRKKCVDLLLTKQNNVKCNIDVSELHSSFTERWSTENSYIRPEYEQSPSFTEQTEIDKTFSVFITKDEVDKALRKMNSDSSPGLDFVYVKTLKNAKCNQTLASIFTLMLLKNTVPISMKQAKTILIYKNGEKNDPKNWRPISICSTLRRLFERIIISRVGCYYSTCDFQSGSANSPGTYINTAILDGCLKKAKSSKKDLTVMFLDVLKAYDMIGHQHLFKTLDSIFMPQFLRNILKNLIKNNSTKIQVNGKKSDDIIFKRGIFQGSPLSSLLFNMSIDHILKELSEVEVSKKFGFKVNDDLNPLSSLGFMDDTVLVANSKASSICLFTMAKFLFEQVGLSLNVNKTNIICIEKGILIEAIIEVDNSNTLTSIKKGEIIKYLGVNFSNEIVLDKHSFTDTLSNSLNCLVSTPLLYPHQKLSIVNTFIWPKFVYTVQSTNMCLFSKCFLEDIDKIIRNATKEMLSLPSDFPNNCIYSHPKHKGLGVIRTTWEAPLQNFNINLTLQRTKNKYVDALRDIPKILENCLDRMNVEQEFKNLNINLMSTRQISQKLREILRLKEYNSWRSLTFHGKGVNQYAHCEKVNKTLFYKTGISSSEWINYLKMIPNVTASRSIPGRSQDGFHCRRCNEKNETLAHILGFCPFGLLLRNSRHHQIRSLIAKSLQDTGFEVYEEIHTVALDNSNRRIDIIALDHHNKKGYIIDPTIRFESNEDNQAEKVDTEKREIYEACIPDVQNKYRINYPFEVIGLYIGARGTVTKFFESFIKRMKLQKDLILDVAIISVKGSASIIQNHLYKSNNCC

SEQ ID NO: 23403 - protein, 888 aa, Tomocerus minor
MDQENVFDKNQFFELYGHFISNLQEAQERLPAPTHPAKRYYNMRKNKQCFLNRSKEGYSKSTNPTRKDKQKRERNKTNYINQLIQHYYYFNRKKCVDLLINSKQQVKCNIDISELQHSFNERWSTENLNIRYEYEPGPSETEQESLNFDFSTTITKEHIEKALRGMNSDSAPGQDHIYVKTLKMANCNEALAALFTIMFKHNIIPEPMKQAKTILIYKSGSKSDPKNWRPISICSTLRRLFERVITTMVNRYYSTNEFQSGSAHSPGTFINTAILDGCLKKAKRKKKDLTILFLDVLKAYDMIGHTHLFKTLESLSLPGNLRQILKNLITNNCTRIDVNGKTSDKIFFKRGIFQGSPLSSLLFNMSIDHILKQLSESEIAKKFGFNINDDIKPLSTLGFMDDTAIISNSKTSSIVLFNMANSAFKEIGLSLNIEKTKIIHIEKGNLIETNLIVEENNPIQTVKKEEMIKYLGVNFSQEIVLDKNTFMTKLSNNLNCLVSSPLLYPHQKLSIVNTFIWPKFVYTIQSSNICNFSKCFLENVDKILRSSIKEMLCLPSDFPNSCLYSHPKHKGLGAIRATWEAPLQNFNINLTLQRTKNKYVSSLRDIPSVLQICTEKMDIVHEVQDINLNDLTVRQVSQKFRDILRNKEYSTWCALQFHGKGVNQYKSCEKINKRLFYKEGLSSSEWINYLKMIPNVTASRSIPGRSQDGVHCRRCSERTETLPHILGSCPFGLLHRNSRHHQIRTLIANELRDIGLEVHEEFHTIARNNSNRRVDIIAWDHNSKKGYIIDPTIRFETDSLHQEEEVNEEKTNIYHDCIPDLKNQFRLNYPVEVIGLYIGARGMITKFLENFIKQMKLSNELAENIAILAVKGSAIILQNHLFQPNFSI

SEQ ID NO: 23404 - protein, 947 aa, Sminthurides bifidus
MNPNVSDSALARAIAEEKVISGKTIDALRSQIKSKDFKKDFEMMKREALQHESVSSENSNISSDVPERDLLVTALEDFLESECGEKFQEKKLRKVVRLALRGDGRASEELDGYLKSISPGEPTCAGKHHNPPAKGGRKKNHSARRKEQYAFYQGWFKKDKSKLAAKMFSKNELRIPEVKSSACDREIAEKWACLFRSVPKNKCTKNMTFRHENVNWKGFWGPVRKEEVRRILKKFSAAKSSGPDGLTVPLVKSMPMRLLLTLLNVIMINGHLPRSLTRSNTTLIPKVDDPAKFNDYRPISVASVLVRLFHGILAERCIVACPLSMKQRGFVKADGVAENVMVVDEVIKASHRWIKSTYLVSLDIKNAFGSVTHDAINKALELCQAPEEFRSYVKFLYSNAITNVKYAGGCVSAKVMNGTLQGCGLSPFLFNLVVDQVLSKIPERLGVKVGSKAEGVRLNALSFADDTILMTSSADGMRMALNELEDNLPKWGIEFNPKKCVGLALEASGREKKVKVNSDPMFKLHGDPIPMLRIGEEFRYLGAFFNPSGLVMRPKDLGFFIQRLLSAKLKPQQKLYLLRGHVLPRMMHSLVMGKMNAGLLRNLDKMVRRCLTGDGGIVKLEKSVPMAYFYAPIKEGGLGLINFRVSVPSLVAHRFEKMRDSDSSFTRAAATGFVNLTRVEQARKLMMRQEEGQLVDSPSAIKNYWVANLRKSVDGRSLTEANLVPQVHTWLKGDEGLLSGENFIMANKMRINSLPTRARTQRGKEGSRNCRAGCLEIETIHHVIQVCPRNHGYRIKRHDAVVNLLGGFLRQKGYEVEEEPLLKMKSGLLKPDVIAVKGDTGFIVDVQVCGAYERLSKLHERKLSKYGEEDVLRFVKTKYEISRLEVTSLTCTYHGLMAQESARFLRGIGLSDRQLRVLIIRTLEGSIYEWNSWRRSTANTRRSWRRR

SEQ ID NO: 23405 - protein, 1230 aa, Morbakka virulenta
MSAMNNINITNNDVNGTGDYCEGPSSGRGRVEASQVVIQRNPRTNVRTKWSKEVNKVVIECFYRSRPFDGDGKPIRGYRQRLMKEWRERGVFEVTEQRLCDQARAIRTNKWLSDLELESIQRMISSTSDDGNNNMETVQEPQTRNDGLRVADVLSEENNDLGNMSVNFEGLEEEELVIITNLNEIMIQGRNTDGISFKKIDMKTLNRVTRKVNKVIDLIETSNITETNNLIKAAAVWVADELGLKKFKPGKKKDPWWKRRLEGDIKQLRKDISLLERVKKGVLGFQKEAKGKCLMEKYRVKKKGLTTVIEELKQRILAKSAKINRYNQRIDQYRLNRLFKVDQKKVYNELNGNAGGSNDTPNAEESKTFWSNIWSVKKEHNKEAEWLNELKEETAAVEQNNVVITAEKIKNQCRKIPNWKAPGQDGVQGFWIKRFDAMHERIATQLNDMLNGRKTIPPWMTYGRTVLCQKDPAKGNAVDNFRPITCLPIMWKLLTGIIADDMYKFMERENLLPEEQKGCRRKSKGTKDQLLIDKTILRDCKRRKTNLAMAWIDYRKAYDLVPHSWILECLNMLGIADNIRAFIEKSMEKWKLLLTSNGSNLCEVEVNRGIFQGDSLSPLIFVICMIPLSVLLRKLSASYEWGKKEFKLNHLLFMDDLKLFGKNDDQIDSLVNTVYFFSKDIGMEFGLKKCGVIIMKRGKLARFDGIHLPNGEVMRHVDENGYMYLGVLELDQIKEKEMKSKVITEYKRRLRLILKSSLNGRNKIQAINTWAVALLRYGAGIIAWKVDELRKIDRTTRKILTMYGAFHPKGDIDRLYVKRKEGGRGLISIENCVWSEENNLGLYIRESNEMLLKGVRKGGVIQTDNLMEKDEFKRSSHNEIKTKWHEKRMYGQFVREMPEEIDKKLSWQWITRGDIKVQTEATIFAAQEQALRTNYIKNRIDKTSESPLCRMCGERAETVQHIVCECSKMAQREYKRRHDNIAKLIHWMLCGKYGLDRKEKWYEHCPEGVVEDENVKLIWDINIQCDNLIEARRPDIILLEKKTKDAIIIDVAVPGDCRAHEKENEKVEKYQDLKMELKRLWSLRKVKVVPVVVGALGCVSKRFNSWMEMLGLEVNVGIVQKTALLGSARIIRKVMDILKNPLGPWPLVVARPRGKYSAIRTACAKALKQIIIIIIMLFGIRNNMALFACALLFLSPNRAITNVQSVFNAAIPDLVLVLRYLSMYQCQLSG

SEQ ID NO: 23406 - protein, 1137 aa, Morbakka virulenta
MSAMNNINITNNDVNGTGDYCEGPSSGRGRVEASQVVIQRNPRTNVRTKWSKEVNKVVIECFYRSRPFDGDGKPIRGYRQRLMKEWRERGVFEVTEQRLCDQARAIRTNKWLSDLELESIQRMISSTSDDGNNNMETVQEPQTRNDGLRVADVLSEENNDLGNMSVNFEGLEEEELVIITNLNEIMIQGRNTDGISFKKIDMKTLNRVTGKVNKVIDLIETSNITETNNLIKAAAVWVADELGLKKFKPGKKKDPWWKRRLEGDIKQLRKDISLLERVKKGVLGFQKEAKGKCLMEKYRVKKKGLTTVIEELKQRILAKSAKINRYNQRIDQYRLNRLFKVDQKKVYNELNGNAGGSNDTPNAEESKTFWSNIWSVKKEHNKEAEWLNELKEETAAVEQNNVVITAEKIKNQCRKIPNWKAPGQDGVQGFWIKRFDAMHERIATQLNDMLNGRKTIPPWMTYGRTVLCQKDPAKGNAVDNFRPITCLPIMWKLLTGIIADDMYKFMERENLLPEEQKGCRRKSKGTKDQLLIDKTILRDCKRRKTNLAMAWIDYRKAYDLVPHSWILECLNMLGIADNIRAFIEKSMEKWKLLLTSNGSNLCEVEVNRGIFQGDSLSPLIFVICMIPLSVLLRKLSASYEWGKKEFKLNHLLFMDDLKLFGKNDDQIDSLVNTVYFFSKDIGMEFGLKKCGVIIMKRGKLARFDGIHLPNGEVMRHVDENGYMYLGVLELDQIKEKEMKSKVITEYKRRLRLILKSSLNGRNKIQAINTWAVALLRYGAGIIAWKVDELRKIDRTTRKILTMYGAFHPKGDIDRLYVKRKEGVGGLISIENCVWSEENNLGLYIRESNEMLLKGVRKGGVIQTDNLMEKDEFKRSSHNEIKTKWHEKRMYGQFVREMPEEIDKKLSWQWITRGDIKVQTEATIFAAQEQALRTNYIKNRIDKTSESPLCRMCGERAETVQHIVCECSKMAQREYKRRHDNIAKLIHWMLCGKYGLDRKEKWYEHCPEGVVEDENVKLIWDINIQCDNLIEARRPDIILLEKKTKDAIIIDVAVPGDCRAHEKENEKVEKYQDLKMELKRLWSLRKVKVVPVVVGALGCVSKRFNSWMEMLGLEVNVGIVQKTALLGSARIIRKVMDI

SEQ ID NO: 23407 - protein, 1173 aa, Morbakka virulenta
MGRGDSLALAGNPPSDGVTIKTPVVVHLKTQPRLSGMIKQIVKNNGVNGAGASGEGLSPGRCPPVRQRGPGRRPMTVRTKWSKEVNKVVMECFFRSKPFDMDGNPIRGYRQRLMHEWRERGIFHVTEQRLCDQARAIRKNGWLSKLELESIQRMIDADNKEENETVVEAEVEQSENVESGPDEGTDHILREAYEDIENPIPNVETFDEEAQLIFIQLQKIMIEGRGTSGISFKKVDTKSLNSLTAKVNRVIELIETTNITQTNNLIKAAGVWVADQLGLKAYKRGKKQEPWWKRRVESDIKQLKKDVSFLERLKRGEIRDHREGKAKFVKEKYRVERKGLTTVIEEIKQRILAKAAKITRYEQRIEQYRLNRLFDIDQKKVYNQLNGQTGNSDGHIPNAEESKTFWSKIWSVKKEHNREADWLKVMKREMGKVKQRNILIDENKVNKQSKKMPNWKAPGHDGVQGFWIKKLNKLHSRIAFQLNEMLEGKKDTPTWMTYGRTVLCQKDAAKGNAVDNFRPITCLPIMWKLMTGIISEEMYCFLESEKLLPEEQKGCKRKSRGTKDQLLIDKAILKDCKKRKTNLAMAWIDYKKAYDFVPHSWILECLEICGIAGNIRSFIELSMKGWKLLLTSNGSDLCELDVNRGIFQGDSLSPLIFVLCMIPLSLLLRKVKASYEWGQSKYKINHLLYMDDLKLFGKNENQIDSLVQTVYLFSEDIGMEFGLKKCAVVVLKRGKMITFEGIHLPNEEVMREVDKKGYTYLGILELNEIKEQEMKDKVIAEYKRRLRLVLKSKLNGKNKIKAINTWAVALLRYGAGIIGWKVEELKKIDRTTRKTLTMYGAFHPKSDVDRLYVKRRDGGRGLISIENCVRSEENNLGLYVRDSKEELLKGVKEVGIIEIGNLMGKEEFKRRNQNKAKMKWHDKRMYGQFDREMNDKIDKVLSWKWVVQSDLKVQTEALIFAAQEQALRTNYVKHKIDKTSENPLCRMCLEKGETVQHLICECKKLAQREYKRRHDNIAKLIHWKLCEKYGLDKKEKWYEHCPEGVVENDKVKLLWDMNIQCDNVIEARRPDLVLVEKKTKSCIIIDVAVPGDNRVHDKENEKVEKYQNLKRELIRLWSLRKALVVPVVIGAMGCVSKDFNGWMEKLDIEVGVGVVQKTALLGTARILRKVLEM

SEQ ID NO: 23408 - protein, 1137 aa, Morbakka virulenta
MNTNNIENNGVNGTGADREGASPGRCPLVRQRGPGRHPMTVRTKWSNQVNKIVMECFLRSKAFDENEKPVRGYRQRMMHEWRERGVFDVTEQRLCDQARAIRKNGWLSDLEIENIQRKINLDSEEVNVNTEEVEDIPKGNNRVIGGEESDHMFHEPNENFGDVIPYIETLDEETQLIIAQLNDIVIEGRNTDGIKFKNVNMKSLNVATAKVNRVLDFIETKSITETNNLIKAAGVWVADRLGLRKYKGGKKKDPWWKRRIEGDIKQLIKDINILERVKKKQIGVAREGKAKLVKEKYRVERKGLTTVIEELKQRVLAKAAKVTRYEQRIDQYRINRLFRVDQKKVYHELNGNARKSNGDIPNAEESRTFWSEIWSVGKEHNKDADWLNGLKEEMVNVKQKNIIIDKDMVMKQCRKMPNWKAPGHDGVQGFWIKKLNRVHERIASQLNDILDGTKEIPAWMTYGRTVLCQKEPTKGNAVENFRPITCLPLMWKLLTGVISEEMYCFMESENLLPEEQKGCKRKSRGTKDQLLIDKAILKDCKKRKTNLAMAWIDYRKAYDFVPHSWILECLNMFGIANNIRSFMEKSMKRWKLLLTSNGSELCEVDVKRGIFQGDSLSPLIFVICMIPLSLVLRKVNASYEWSKKEFKLNHLLFMDDLKLFGKSEDQIDSLVQTVFVFSKDIGMEFGLKKCGVIILKRGKLITCDGIHLPTKDIMKEVDENGYTYLGILELDEIKEKEMKLKVVSEYKRRLRLVLKSKLNGKNKIQAINTWAVALLRYGAGIIEWKVDELKKLDRTTRKTLTMYGALHPKSDVDRLYLKRKDGGRGLIGIETCVRLEENNLGLYVRESDKFLLKAVRKMGIIKTVNLVEKEEFKRQSQTKLKSKWHEKRMCGQFDREMPEEVDRELSWYWIAQSDLKIQTEATIFAAQEQALRTNYIKHKIDKTTENLMCRMCGEKGETVQHIICECKKLAQRDYKRRHDNIAKLIHWKLCEKYDLERKEKWYEHCPEGVVENDDMKLIWDINIQCDNVIEARRPDLIVVNKKSKSCIIIDVAVPGDCRVHDKEQEKIEKYQNLKIELKRLWSLKNARVVPIVVGALGCVSKNFKRWTEMIKIELDIGIIQKTALLGTARILRKVLEM

SEQ ID NO: 23409 - protein, 1137 aa, Morbakka virulenta
MSAMNNINITNNHVNGTGDYCKGPSSGRGRVEASQVVIQRNPRTNVRTKWSKEVNKVVIECFYRSRPFDGDGKPIRGYRQRLMKEWRERGVFEVTEQRLCDQARAIRTNKWLSDLELESIQRMISSTSDDGNNNMKTVQEPQTRNDGLRVADVLSEENNDLGNMSVNFEGLEEEELVIITNLNEIMIQGRNTDGISFKKIDMKTLNRVTGKVNKVIDLIETSNITETNNLIKAAAVWVADELGLKKFKPGKKKDPWWKRRLEGDIKQLRKDISLLERVKKGVLGFQKEAKGKCLMEKYRVKKKGLTTVIEELKQRILAKSAKINRYNQRIDQYRLNRLFKVDQKKVYNELNGNAGGSNDTPNAEESKTFWSNIWSVKKEHNKEAEWLNELKEETAAVEQNNVVITAEKIKNQCRKIPNWKAPGQDGVQGFWIKRFDAMHERIATQLNDMLNGRKTIPPWMTYGRTVLCQKDPAKGNAVDNFRPITCLPIMWKLLTGIIADDMYKFMERENLLPEEQKGCRRKSKGTKDQLLIDKTILRDCKRRKTNLAMAWIDYRKAYDLVPHSWILECLNMLGIADNIRAFIEKSMEKWKLLLTSNGSNLCEVEVNRGIFQGDSLSPLIFVICMIPLSVLLRKLSASYEWGKKEFKLNHLLFMDDLKLFGKNDDQIDSLVNTVYFFSKDIGMEFGLKKCGVIIMKRGKLARFDGIHLPNGEVMRHVDENGYMYLGVLELDQIKEKEMKSKVITEYKRRLRLILKSSLNGRNKIQAINTWAVALLRYGAGIIAWKVDELRKIDRTTRKILTMYGAFHPKGDIDRLYVKRKEGGRGLISIENCVWSEENNLGLYIRESNEMLLKGVRKGGVIQTDNLMEKDEFKRSSHNEIKTKWHEKRMYGQFVREMPEEIDKKLSWQWITRGDIKVQTEATIFAAQEQALRTNYIKNRIDKTSESPLCRMCGERAETVQHIVCECSKMAQREYKRRHDNIAKLIHWMLCGKYGLDRKEKWYEHCPEGVVEDENVKLIWDINIQCDNLIEARRPDIILLEKKTKDAIIIDVAVPGDCRAHEKENEKVEKYQDLKMELKRLSSLRKVKVVPVVVGALGCVSKRFNSWIEMLGLEVNVGIVQKTALLGSARIIRKVMDI

SEQ ID NO: 23410 - protein, 1173 aa, Morbakka virulenta
MGRGDSLALAGNPPSDGVTIKTPVVVHLKTQPRLSGMIKQIVKNNGVNGAGASGEGLSPGRCPPVRQRGPGRRPMTVRTKWSKEVNKVVMECFFRSKPFDMDGNPIRGYRQRLMHEWRERGIFHVTEQRLCDQARAIRKNGWLSKLELESIQRMIDADNKEENETVVEAEVEQSENVESGPDEGTDHILREAYEDIENPIPNVETFDEEAQLIFIQLQKIMIEGRGTSGISFKKVDTKSLNSLTAKVNRVIELIETTNITQTNNLIKAAGVWVADQLGLKAYKRGKKQEPWWKRRVESDIKQLKKDVSFLERLKRGEIRDHREGKAKFVKEKYRVERKGLTTVIEEIKQRILAKAAKITRYEQRIEQYRLNRLFDIDQKKVYNQLNGQTGNSDGHIPNAEESKTFWSKIWSVKKEHNREADWLKVMKREMGKVKQRNILIDENKVNKQSKKMPNWKAPGHDGVQGFWIKKLNKLHSRIAFQLNEMLEGKKDTPTWMTYGRTVLCQKDAAKGNAVDNFRPITCLPIMWKLMTGIISEEMYCFLESEKLLPEEQKGCKRKSRGTKDQLLIDKAILKDCKKRKTNLAMAWIDYKKAYDFVPHSWILECLEICGIAGNIRSFIELSMKGWKLLLTSNGSDLCELDVNRGIFQGDSLSPLIFVLCMIPLSLLLRKVKASYEWGQSKYKINHLLYMDDLKLFGKNENQIDSLVQTVYLFSEDIGMEFGLKKCAVVVLKRGKMITFEGIHLPNEEVMREVDKKGYTYLGILELNEIKEQEMKDKVIAEYKRRLRLVLKSKLNGKNKIKAINTWAVALLRYGAGIIGWKVEELKKIDRTTRKTLTMYGAFHPKSDVDRLYVKRRDGGRGLISIENCVRSEENNLGLYVRDSKEELLKGVKEVGIIEIGNLMGKEEFKRSNQNKAKMKWHDKRMYGQFDREMNDKIDKVLSWKWVVQSDLKVQTEALIFAAQEQALRTNYVKHKIDKTSENPLCRMCLEKGETVQHLICECKKLAQREYKRRHDNIAKLIHWKLCEKYGLDKKGKWYEHCPEGVVENDKVKLLWDMNIQCDNVIEARRPDLVLVEKKTKSCIIIDVAVPGDNRVHDKENEKVEKYQNLKRELIRLWSLRKALVVPVVIGAMGCVSKDFNGWMEKLDIEVGVGVVQKTALLGTARILRKVLEM

SEQ ID NO: 23411 - protein, 1137 aa, Morbakka virulenta
MNTNNIENNGVNGTGADSEGASPGRCPLVRQQGPGRHPMTVRTKWSNQVNKIVMECFLRSKAFDENEKPVRGYRQRMMHEWRERGVFDVTEQRLCDQARAIRKNGWLSDLEIENIQRKINLDSEEVNVNTEEVEDIPKGNNRVIGGEESDHMFHEPNENFGDVIPYIETLDEETQLIIAQLNDIVIEGRNTDGIKFKNVNMKSLNVATAKVNRVLDFIETKSITETNNLIKAAGVWVADRLGLRKYKGGKKKDPWWKRRIEGDIKQLIKDINILERVKKKQIGVAREGKAKLVKEKYRVERKGLTTVIEELKQRVLAKAAKVTRYEQRIDQYRINRLFRVDQKKVYHELNGNARKSNGDIPNAEESRTFWSEIWSVGKEHNKDADWLNGLKEEMVNVKQKNIIIDKDMVMKQCRKMPNWKAPGHDGVQGFWIKKLNRVHERIASQLNDILDGTKEIPAWMTYGRTVLCQKEPTKGNAVENFRPITCLPLMWKLLTGVISEEMYCFMESENLLPEEQKGCKRKSRGTKDQLLIDKAILKDCKKRKTNLAMAWIDYRKAYDFVPHSWILECLNMFGIANNIRSFMEKSMKRWKLLLTSNGSELCEVDVKRGIFQGDSLSPLIFVICMIPLSLVLRKVNASYEWSKKEFKLNHLLFMDDLKLFGKSEDQIDSLVQTVFVFSKDIGMEFGLKKCGVIILKRGKLITCDGIHLPTKDIMKEVDENGYTYLGILELDEIKEKEMKLKVVSEYKRRLRLVLKSKLNGKNKIQAINTWAVALLRYGAGIIEWKVDELKKLDRTTRKTLTMYGALHPKSDVDRLYLKRKDGGRGLIGIETCVRLEENNLGLYVRESDKFLLKGVRKMGIIRTVNLVEKEEFKRQSQTKLKSKWHEKRMCGQFDREMPEEVDRELSWYWIAQSDLKIQTEATIFAAQEQALRTNYIKHKIDKTTENLMCRMCGEKGETVQHIICECKKLAQRDYKRRHDNIAKLIHWKLCEKYDLERKEKWYEHCPEGVVENDDMKLIWDINIQCDNVIEARRPDLIVVNKKSKSCIIIDVAVPGDCRVHDKEQEKIEKYQNLKIELKRLWSLKNARVVPIVVGALGCVSKNFKRWTDMIKIELDIGIIQKTALLGTARILRKVLEM

SEQ ID NO: 23412 - protein, 1137 aa, Morbakka virulenta
MSAMNNINITNNDVNGTGTYCEGPSSGRGRVEASQIVIQRNPRTNVRTKWSKEVNKVVIECFYSSRPFDGDGKPIRGYRQRLMKEWRERGVFEVTEQRLCDQARAIRTNKWLSDLELESIQRMISSTSDDGNNNMETVQEPQTRNDGLRVADVLSEENNDLGNMSVNFEGLEEEELVIITNLNEIMIQGRNTDGISFKKIDMKTLNRVTGKVNKVIDLIETSNITETNNLIKAAAVWVADELGLKKFKPGKKKDPWWKRRLEGDIKQLRKDISLLERVKKGVLGFQKEAKGKCLMEKYRVKKKGLTTVIEELKQRILAKSAKINRYNQRIDQYRLNRLFKVDQKKVYNELNGNAGGSNDTPNAEESKTFWSNIWSVKKEHNKEAEWLNELKEETAAVEQNNVVITAEKIKNQCRKIPNWKAPGQDGVQGFWIKRFDAMHERIATQLNDMLNGRKTIPPWMTYGRTVLCQKDPAKGNAVDNFRPITCLPIMWKLLTGIIADDMYKFMERENLLPEEQKGCRRKSKGTKDQLLIDKTILRDCKRRKTNLAMAWIDYRKAYDLVPHSWILECLNMLGIADNIRAFIEKSMEKWKLLLTSNGSNLCEVEVNRGIFQGDSLSPLIFVICMIPLSVLLRKLSASYEWGKKEFKLNHLLFMDDLKLFGKNDDQIDSLVNTVYFFSKDIGMEFGLKKCGVIIMKRGKLARFDGIHLPNGEVMRHVDENGYMYLGVLELDQIKEKEMKSKVITEYKRRLRLILKSSLNGRNKIQAINTWAVALLRYGAGIIAWKVDELRKIDRTTRKILTMYGAFHPKGDIDRLYVKRKEGVGGLISIENCVWSEENNLGLYIRESNEMLLKGVRKGGVIQTDNLMEKDEFKRSSHNEIKTKWHEKRMYGQFVREMPEEIDKKLSWQWITRGDIKVQTEATIFAAQEQALRTNYIKNRIDKTSESPLCRMCGERAETVQHIVCECSKMAQREYKRRHDNIAKLIHWMLCGKYGLDRKEKWYEHCPEGVVEDENVKLIWDINIQCDNLIEARRPDIILLEKKTKDAIIIDVAVPGDCRAHEKENEKVEKYQDLKMELKRLWSLRKVKVVPVVVGALGCVSKRFNSWMEMLGLEVNVGIVQKTALLGSARIIRKVMDI

SEQ ID NO: 23413 - protein, 1168 aa, Morbakka virulenta
MGRGDSLALAGNPPSDGVTIKTPVVVHLKTQPRLSGMIKQIVKNNGVNGAGASGEGLSPGRCPPVRQRGPGRRPMTVRTKWSKEVNKVVMECFFRSKPFDMDGNPIRGYRQRLMHEWRERGIFHVTEQRLCDQARAIRKNGWLSKLELESIQRMIDADNKEENETVVEAEVEQSENVESGPDEGTDHILREAYEDIENPIPNVETFDEEAQLIFIQLQKIMIEGRGTSGISFKKVDTKSLNSLTAKVNRVIELIETTNITQTNNLIKAAGVWVADQLGLKAYKRGKKQEPWWKRRVESDIKQLKKDVSFLERLKRGEIRDHREGKAKFVKEKYRVERKGLTTVIEEIKQRILAKAAKITRYEQRIEQYRLNRLFDIDQKKVYNQLNGQTGNSDGHIPNAEESKTFWSKIWSVKKEHNREADWLKVMKREMGKVKQRNILIDENKVNKQSKKMPNWKAPGHDGVQGFWIKKLNKLHSRIAFQLNEMLEGKKDTPTWMTYGRTVLCQKDAAKGNAVDNFRPITCLPIMWKLMTGIISEEMYCFLESEKLLPEEQKGCKRKSRGTKDQLLIDKAILKDCKKRKTNLAMAWIDYKKAYDFVPHSWILECLEICGIAGNIRSFIELSMKGWKLLLTSNGSDLCELDVNRGIFQGDSLSPLIFVLCMIPLSLLLRKVKASYEWGQSKYKINHLLYMDDLKLFGKNENQIDSLVQTVYLFSEDIGMEFGLKKCAVVVLKRGKMITFEGIHLPNEEVMREVDKKGYTYLGILELNEIKEQEMKDKVIAEYKRRLRLVLKSKLNGKNKIKAINTWAVALLRYGAGIIGWKVEELKKIDRTTRKTLTMYGAFHPKSDVDRLYVKRRDGGRGLISIENCVRSEENNLGLYVRDSKEELLKGVKEVGIIEIGNLMGKEEFKRSNQNKAKMKWHDKRMYGQFDREMNDKIDKVLSWKWVVQSDLKVQTEALIFAAQEQALRTNYVKHKIDKTSENPLCRMCLEKGETVQHLICECKKLAQREYKRRHDNIAKLIHWKLCEKYGLDKKGKWYEHCPEGVVENDKVKLLWDMNIQCDNVIEARRPDLVLVEKKTKSCIIIDVAVPGDNRVHDKENEKVEKYQNLKRELIRLWSLRKALVVPMVIGAMGCVSKDFNGWMEKLDIEVGVGVVQKTARILRKVLEM

SEQ ID NO: 23414 - protein, 1137 aa, Morbakka virulenta
MSAMNNINITNNDVNGTGDYCEGPSSGRGRVEASQVVIQRNPRTNVRTKWSKEVNKVVIECFYRSRPFDGDGKPIRGYRQRLMKEWRERGVFEVTEQRLCDQARAIRTNKWLSDLELESIQRMISSTSDDGNNNMETVQEPQTRNDGLRVADVLSEENNDLGNMSVNFEGLEEEELVIITNLNEIMIQGRNTDGISFKKIDMKTLNRVTGKVNKVIDLIETSNITETNNLIKAAAVWVADELGLKKFKPGKKKDPWWKRRLEGDIKQLRKDISLLERVKKGVLGFQKEAKGKCLMEKYRVKKKGLTTVIEELKQRILAKSAKINRYNQRIDQYRLNRLFKVDQKKVYNELNGNAGGSNDTPNAEESKTFWSNIWSVKKEHNKEAEWLNELKEETAAVEQNNVVITAEKIKNQCRKIPNWKAPGQDGVQGFWIKRFDAMHERIATQLNDMLNGRKTIPPWMTYGRTVLCQKDPAKGNAVDNFRPITCLPIMWKLLTGIIADDMYKFMERENLLPEEQKGCRRKSKGTKDQLLIDKTILRDCKRRKTNLAMAWIDYRKAYDLVPHSWILECLNMLGIADNIRAFIEKSMEKWKLLLTSNGSNLCEVEVNRGIFQGDSLSPLIFVICMIPLSVLLRKLSASYEWGKKEFKLNHLLFMDDLKLFGKNDDQIDSLVNTVYFFSKDIGMEFGLKKCGVIIMKRGKLARFDGIHLPNGEVMRHVDENGYMYLGVLELDQIKEKEMMSKVITEYKRRLRLILKSSLNGRNKIQAINTWAVALLRYGAGIIAWKVDELRKIDRTTRKILTMYGAFHPKGDIDRLYVKRKEGGRGLISIENCVWSEENNLGLYIRESNEMLLKGVRKGGVIQTDNLMEKDEFKRSSHNEIKTKWHEKRMYGQFVREMPEEIDKKLSWQWITRGDIKVQTEATIFAAQEQALRTNYIKNRIDKTSESPLCRMCGERAETVQHIVCECSKMAQREYKRRHDNIAKLIHWMLCGKYGLDRKEKWYEHCPEGVVEDENVKLIWDINIQCDNLIEARRPDIILLEKKTKDAIIIDVAVPGDCRAHEKENEKVEKYQDLKMELKRLWSLRKVKVVPVVVGALGCVSKRFNSWMEMLGLEVNVGIVQKTALLGSARIIRKVMDI

SEQ ID NO: 23415 - protein, 1137 aa, Morbakka virulenta
MNAMNNINITNNDVNGTGTYCEGPSSCRGRVEASQVVIQRNPRTNVRTKWSKEVNKVVIECFYRSRPFDGDGKPIRGYRQRLMKEWRERGVFEVTEQRLCDQARAIRTNKWLSDLELESIQRMISSTSDDGNNNMETVQEPQTRNDGLRVADVLSEENNDLGNMSVNFEGLEEEELVIITNLNEIMIQGRNTDGISFKKIDMKTLNRVTGKVNKVIDLIETSNITETNNLIKAAAVWVADELGLKKFKPGKKKDPWWKRRLEGDIKQLRKDISLLERVKKGVLGFQKEAKGKCLMEKYRVKKKGLTTVIEELKQRILAKSAKINRYNQRIDQYRLNRLFKVDQKKVYNELNGNAGGSNDTPNAEESKTFWSNIWSVKKEHNKEAEWLNELKEETAAVEQNNVVITAEKIKNQCRKIPNWKAPGQDGVQGFWIKRFDAMHERIATQLNDMLNGRKTIPPWMTYGRTVLCQKDPAKGNAVDNFRPITCLPIMWKLLTGIIADDMYKFMERENLLPEEQKGCRRKSKGTKDQLLIDKTILRDCKRRKTNLAMAWIDYRKAYDLVPHSWILECLNMLGIADNIRAFIEKSMEKWKLLLTSNGSNLCEVEVNRGIFQGDSLSPLIFVICMIPLSVLLRKLSASYEWGKKEFKLNHLLFMDDLKLFGKNDDQIDSLVNTVYFFSKDIGMEFGLKKCGVIIMKRGKLARFDGIHLPNGEVMRHVDENGYMYLGVLELDQIKEKEMKSKVITEYKRRLRLILKSSLNGRNKIQAINTWAVALLRYGAGIIAWKVDELRKIDRTTRKILTMYGAFHPKGDIDRLYVKRKEGGRGLISIENCVWSEENNLGLYIRESNEMLLKGVRKGGVIQTDNLMEKDEFKRSSHNEIKTKWHEKRMYGQFVREMPEEIDKKLSWQWITRGDIKVQTEATIFAAQEQALRTNYIKNRIDKTSESPLCRMCGERAETVQHIVCECSKMAQREYKRRHDNIAKLIHWMLCGKYGLDRKEKWYEHCPEGVVEDENVKLIWDINIQCDNLIEARRPDIILLEKKTKDAIIIDVAVPGDCRAHEKENEKVEKYQDLKMELKRLWSLRKVKVVPVVVGTLGCVSKRFNTWMEMLGLKINVGIMQKTALLGSARIIRKVMDI

SEQ ID NO: 23416 - protein, 1137 aa, Morbakka virulenta
MSAMNNINITNNDVNGTGDYCEGPSSGRGRVEASQVVIQRNPRTNVRTKWSKEVNKVVIECFYRSRPFDGDGKPIRGYRQRLMKEWRERGVFEVTEQRLCDQARAIRTNKWLSDLELESIQRMISSTSDDGNNNMETVQEPQTRNDGLRVADVLSEENNDLGNMSVNFEGLEEEELVIITNLNEIMIQGRNTDGISFKKIDMKTLNRVTGKVNKVIDLIETSNITETNNLIKAAAVWVADELGLKKFKPGKKKDPWWKRRLEGDIKQLRKDISLLERVKKGVLGFQKEAKGKCLMEKYRVKKKGLTTVIEELKQRILAKSAKINRYNQRIDQYRLNRLFKVDQKKVYNELNGNAGGSNDTPNAEESKTFWSNIWSVKKEHNKEAEWLNELKEETAAVEQNNVVITAEKIKNQCRKIPNWKAPGQDGVQGFWIKRFDAMHERIATQLNDMLNGRKTIPPWMTYGRTVLCQKDPAKGNAVDNFRPITCLPIMWKLLTGIIADDMYKFMERENLLPEEQKGCRRKSKGTKDQLLIDKTILRDCKRRKTNLAMAWIDYRKAYDLVPHSWILECLNMLGIADNIRAFIEKSMEKWKLLLTSNGSNLCEVEVNRGIFQGDSLSPLIFVICMIPLSVLLRKLSASYEWGKKEFKLNHLLFMDDLKLFGKNDDQIDSLVNTVYFFSKDIGMEFGLKKCGVIIMKRGKLARFDGIHLPNGEVMRHVDENGYMYLGVLELDQIKEKEMKSKVITEYKRRLRLILKSSLNGRNKIQAINTWAVALLRYGAGIIAWKVDELRKIDRTTRKTLTMYGAFHPKGDIDRLYVKRKEGGRGLISIENCVWSEENNLGLYIRESNEMLLKGVRKGGVIQTDNLMEKDEFKRSSHNEIKTKWHEKRMYGQFVREMPEEIDKKLSWQWITRGDIKVQTEATIFAAQEQALRTNYIKNRIDKTSESPLCRMCGERAETVQHIVCECSKMAQREYKRRHDNIAKLIHWMLCGKYGLDRKEKWYEHCPEGVVEDENVKLIWDINIQCDNLIEARRPDIILLEKKTKDAIIIDVAVPGDCRAHEKENEKVEKYQDLKMELKRLWSLRKVKVVPVVVGALGCVSKRFNSWMEMLGLEVNVGIVQKTALLGSARIIRKVMDI

SEQ ID NO: 23417 - protein, 1137 aa, Morbakka virulenta
MNTNNIENNGVNGTGADREGASPGRCPLVRQRGPGRHPMTVRTKWSNQVNKIVMECFLRSKAFDENEKPVRGYRQRMMHEWRERGVFDVTEQRLCDQARAIRKNGWLSDLEIENIQRKINLDSEEVNVNTEEVEDIPKGNNRVIGGEESDHMFHEPNENFGDVIPYIETLDEETQLIIAQLNDIVIEGRNTDGIKFKNVNMKSLNVATAKVNRVLDFIETKSITETNNLIKAAGVWVADRLGLRKYKGGKKKDPWWKRRIEGDIKQLIKDINILERVKKKQIGVAREGKAKLVKEKYRVERKGLTTVIEELKQRVLAKAAKVTRYEQRIDQYRINRLFRVDQKKVYHELNGNARKSNGDIPNAEESRTFWSEIWSVGKEHNKDADWLNGLKEEMVNVKQKNIIIDKDMVMKQCRKMPNWKAPGHDGVQGFWIKKLNRVHERIASQLNDILDGTKEIPAWMTYGRTVLCQKEPTKGNAVENFRPITCLPLMWKLLTGVISEEMYCFMESENLLPEEQKGCKRKSRGTKDQLLIDKAILKDCKKRKTNLAMAWIDYRKAYDFVPHSWILECLNMFGIANNIRSFMEKSMKRWKLLLTSNGSELCEVDVKRGIFQGDSLSPLIFVICMIPLSLVLRKVNASYEWSKKEFKLNHLLFMDDLKLFGKSEDQIDSLVQTVFVFSKDIGMEFGLRKCGVIILKRGKLITCDGIHLPTKDIMKEVDENGYTYLGILELDEIKEKEMKLKVVSEYKRRLRLVLKSKLNGKNKIQAINTWAVALLRYGAGIIEWKVDELKKLDRTTRKTLTMYGALHPKSDVDRLYLKRKDGGRGLIGIETCVRLEENNLGLYVRESDKFLLKAVRKMGIIKTVNLVEKEEFKRQSQTKLKSKWHEKRMCGQFDREMPEEVDRELSWYWIAQSDLKIQTEATIFAAQEQALRTNYIKHKIDKTTENLMCRMCGEKGETVQHIICECKKLAQRDYKRRHDNIAKLIHWKLCEKYDLERKEKWYEHCPEGVVENDDMKLIWDINIQCDNVIEARRPDLIVVNKKSKSCIIIDVAVPGDCRVHDKEQEKIEKYQNLKIELKRLWSLKNARVVPIVVGALGCVSKNFKRWTDMIKIELDIGIIQKTALLGTARILRKVLEM

SEQ ID NO: 23418 - protein, 843 aa, Morbakka virulenta
MEKYRVKKKGLTTVIEELKQRILAKSAKINRYNQRIDQYRLNRLFKVDQKKVYNELNGNAGGSNDTPNAEESKTFWSNIWSVKKEHNKEAEWLNELKEETAAVEQNNVVITAEKIKNQCRKIPNWKAPGQDGVQGFWIKRFDAMHERIATQLNDMLNGRKTIPPWMTYGRTVLCQKDPAKGNAVDNFRPITCLPIMWKLLTGIIADDMYKFMERENLLPEEQKGCRRKSKGTKDQLLIDKTILRDCKRRKTNLAMAWIDYRKAYDLVPHSWILECLNMLGIADNIRAFIEKSMEKWKLLLTSNGSNLCEVEVNRGIFQGDSLSPLIFVICMIPLSVLLRKLSASYEWGKKEFKLNHLLFMDDLKLFGKNDDQIDSLVNTVYFFSKDIGMEFGLKKCGVIIMKRGKLARFDGIHLPNGEVMRHVDENGYMYLGVLELDQIKEKEMKSKVITEYKRRLRLILKSSLNGRNKIQAINTWAVALLRYGAGIIAWKVDELRKIDRTTRKILTMYGAFHPKGDIDRLYVKRKEGGRGLISIENCVWSEENNLGLYIRESNEMLLKGVRKGGVIQTDNLMEKDEFKRSSHNEIKTKWHEKRMYGQFVREMPEEIDKKLSWQWITRGDIKVQTEATIFAAQEQALRTNYIKNRIDKTSESPLCRMCGERAETVQHIVCECSKMAQREYKRRHDNIAKLIHWMLCGKYGLDRKEKWYEHCPEGVVEDENVKLIWDINIQCDNLIEARRPDIILLEKKTKDAIIIDVAVPGDCRAHEKENEKVEKYQDLKMDLKRLWSLRKVKVVPVVVGALGSVSKRFNSWMEMLGLEVNVGIVQKTALLGSARIIRKVMDI

SEQ ID NO: 23419 - protein, 748 aa, Morbakka virulenta
MKREMGKVKQRNILIDENKVNKQSKKMPNWKAPGHDGVQGFWIKKLNKLHSRIAFQLNEMLEGKKDTPTWMTYGRTVLCQKDAAKGNAVDNFRPITCLPIMWKLMTGIISEEMYCFLESEKLLPEEQKGCKRKSRGTKDQLLIDKAILKDCKKRKTNLAMAWIDYKKAYDFVPHSWILECLEICGIAGNIRSFIELSMKGWKLLLTSNGSDLCELDVNRGIFQGDSLSPLIFVLCMIPLSLLLRKVKASYEWGQSKYKINHLLYMDDLKLFGKNENQIDSLVQTVYLFSEDIGMEFGLKKCAVVVLKRGKMITFEGIHLPNEEVMREVDKKGYTYLGILELNEIKEQEMKDKVIAEYKRRLRLVLKSKLNGKNKIKAINTWAVALLRYGAGIIGWKVEELKKIDRTTRKTLTMYGAFHPKSDVDRLYVKRRDGGRGLISIENCVRSEENNLGLYVRDSKEELLKGVKEVGIIEIGNLMGKEEFKRRNQNKAKMKWHDKRMYGQFDREMNDKIDKVLSWKWVVQSDLKVQTEALIFAAQEQALRTNYVKHKIDKTSENPLCRMCLEKGETVQHLICECKKLAQREYKRRHDNIAKLIHWKLCEKYGLDKKEKWYEHCPEGVVENDKVKLLWDMNIQCDNVIEARRPDLVLVEKKTKSCIIIDVAVPGDNRVHDKENEKVEKYQNLKRELIRLWSLRKALVVPVVIGAMGCASKDFNGWMEKLDIEVGVGVVQKTALLGTARILRKVLEM

SEQ ID NO: 23420 - protein, 1128 aa, Morbakka virulenta
MSAMNNINITNNDVNGTGDYCEGPSSGRGRVEASQVVIQRNPRTNVRTKWSKEVNKVVIECFYRSRPFDGDGKPIRGYRQRLMKEWRERGVFEVTEQRLCDQARAIRTNKWLSDLELESIQRMISSTSDDGNNNMETVQEPQTRNDGLRVADVLSEENNDLGNMSVNFEGLEEEELVIITNLNEIMIQGRNTDGISFKKIDMKTLNRVTGKVNKVIDLIETSNITETNNLIKAAAVWVADELGLKKFKPGKKKDPWWKRRLEGDIKQLRKDISLLERVKKGVLGFQKEAKGKCLMEKYRVKKKGLTTVIEELKQRILAKSAKINRYNQRIDQYRLNRLFKVDQKKVYNELNGNAGGSNDTPNAEESKTFWSNIWSVKKEHNKEAEWLNELKEETAAVEQNNVVITAEKIKNQCRKIPNWKAPGQDGVQGFWIKRFDAMHERIATQLNDMLNGRKTIPPWMTYGRTVLCQKDPAKGNAVDNFRPITCLPIMWKLLTGIIADDMYKFMERENLLPEEQKGCRRKSKGTKDQLLIDKTILRDCKRRKTNLAMAWIDYRKAYDLVPHSWILECLNMLGIADNIRAFIEKSMEKWKLLLTSNGSNLCEVEVNRGIFQGDSLSPLIFVICMIPLSVLLRKLSASYEWGKKEFKLNHLLFMDDLKLFGKNDDQIDSLVNTVYFFSKDIGMEFGLKKCGVIIMKRGKLARFDGIHLPNGEVMRHVDENGYMYLGVLELDQIKEKEMKSKVITEYKRRLRLILKSSLNGRNKIQAINTWAVALLRYGAGIIAWKVDELRKIDRTTRKILTMYGAFHPKGDIDRLYVKRKEGGRGLISIENCVWSEENNLGLYIRESNEMLLKGVRKGGVIQTDNLMEKDEFKRSSHNEIKTKWHEKRMYGQFVREMPEEIDKKLSWQWITRGDIKVQTEATIFAAQEQALRTNYIKNRIDKTSESPLCRMCGERAETVQHIVCECSKMAQRKYKRRHNNIAKLTHWMVCEKYGLDRKEKSYEHCPEGVVENENVKLIWNINVQCDNLIEARRPEIILLEKKTKDAIIDVAVPGDCRAHEKENEKVEKYQDLKMQLKRLWSLRKVKVVPVVVGALVCVSKGFNSWMEMLGLKVNVGIVQKQPYWDLRG

SEQ ID NO: 23421 - protein, 1137 aa, Morbakka virulenta
MNTNNIENNGVNGTGADREGASPGRCPLVRQRGPGRHPMTVRTKWSNQVNKIVMECFLRSKAFDENEKPVRGYRQRMMHEWRERGVFDVTEQRLCDQARAIRKNGWLSDLEIENIQRKINLDSEEVNVNTEEVEDIPKGNNRVIGGEESDHMFHEPNENFGDVIPYIETLDEETQLIIAQLNDIVIEGRNTDGIKFKNVNMKSLNVATAKVNRVLDFIETKSITETNNLIKAAGVWVADRLGLRKYKGGKKKDPWWKRRIEGDIKQLIKDINILERVKKKQIGVAREGKAKLVKEKYRVERKGLTTVIEELKQRVLAKAAKVTRYEQRIDQYRINRLFRVDQKKVYHELNGNARKSNGDIPNAEESRTFWSEIWSVGKEHNKDADWLNGLKEEMVNVKQKNIIIDKDMVMKQCRKMPNWKAPGHDGVQGFWIKKLNRVHERIASQLNDILDGTKEIPAWMTYGRTVLCQKEPTKGNAVENFRPITCLPLMWKLLTGVISEEMYCFMESENLLPEEQKGCKRKSRGTKDQLLIDKAILKDCKKRKTNLAMAWIDYRKAYDFVPHSWILECLNMFGIANNIRSFMEKSMKRWKLLLTSNGSELCEVDVKRGIFQGDSLSPLIFVICMIPLSLVLRKVNASYEWSKKEFKLNHLLFMDDLKLFGKSEDQIDSLVQTVFVFSKDIGMEFGLKKCGVIILKRGKLITCDGIHLPTKDIMKEVDENGYTYLGILELDEIKEKEMKLKVVSEYKRRLRLVLKSKLNGKNKIQAINTWAVALLRYGAGIIEWKVDELKKLDRTTRKTLTMYGALHPKSDVDRLYLKRKDGGRGLIGIETCVRLEENNLGLYVRESDKFLLKAVRKMGIIKTVNLVEKEEFKRQSQTKLKSKWHEKRMCGQFDREMPEEVDRELSWYWIAQSDLKIQTEATIFAAQEQALRTNYIKHKIDKTTENLMCRMCGEKGETVQHIICECKKLAQRDYKRRHDNIAKLIHWKLCEKYDLERKEKWYEHCPEGVVENDDMKLIWDINIQCDNVIEARRPDLIVVNKKSKSCIIIDVAVPGDCRVHDKEQEKIEKYQNLKIELKRLWSLKNARVVPIVVGALGCVSKTFKRWTDMIKIELDIGIIQKTALLGTARILRKVLEM

SEQ ID NO: 23422 - protein, 956 aa, Morbakka virulenta
MIDADNKEENETVVEAEVEQSENVESGPKVNRVIELIETTNITQTNNLIKAAGVWVADQLGLKAYKRGKKQEPWWKRRVESDIKQLKKDVSFLERLKRGEIRDHREGKAKFVKEKYRVERKGLTTVIEEIKQRILAKAAKITRYEQRIEQYRINRLFDIDQKKVYNQLNGQTGNSDGHIPNAEESKTFWSKIWSVKKEHNREADWLKVMKGEMGKVKQRNILIDENKVNNQCKKMPNWKAPGHDGVQGFWIKKLNKLHSRIAFQLNEMLEGKKDTPTWMTYGRTVLCQKDAAKGNAVDNFRPITCLPIMWKLMTGIISEEMYCFLESEKLLPEEQKGCKRKSRGAKDQLLIDKAILKDCKKRKTNLAMAWIDYKKAYDFVPHSWILECLEICGIAGNIRSFIELSMKGWKLLLTSNGSDLCELDVNRGIFQGDSLSPLIFVLCMIPLSLLLRKVKASYEWGQSKYKINHLLYMDDLKLFGKNENQIDSLVQTVYLFSEDIGMEFGLKKCAVVVLKRGKMITFEGIHLPNEEVMREVDEKGYTYLGILELNEIKEQEMKDKVIAEYKRRLRLVLKSKLNGKNKIKAINTWAVALLRYGAGIIGWKVEELKKIDRTTRKTLTMYGAFHPKSDVDRLYVKRRDGGRGLISIENCVRSEENNLGLYVRDSKEELLKGVKEVGIIEIGNLMGKEEFKRSNQNKAKMKWHDKRMYGQFDREMNDKIDKVLSWKWVVQSDLKVQTEALIFAAQEQALRTNYVKHKIDKTSENPLCRMCLEKGETVQHLICECKKLAQREYKRRHDNIAKLIHWKLCEKYGLDKKEKWYEHCPEGVVENDKVKLLWDMNIQCDNVIEARRPDLVLVEKKTKSCIIIDVAVPGDNRVHDKENEKVEKYQNLKRELIRLWSLRKALVVPVVIGAMGCVSKDFNGWMEKLDIEVGVGVVQKTALLGTPRILRKVLEM

SEQ ID NO: 23423 - protein, 1099 aa, Morbakka virulenta
MTVRTKWSNQVNKIVMECFLRSKAFDENEKPVRGYRQRMMHEWRERGVFDVTEQRLCDQARAIRKNGWLSDLEIENIQRKINLDSEEVNVNTEEVEDIPKGNNRVIGGEESDHMFHEPNENFGDVIPYIETLDEETQLIIAQLNDIVIEGRNTDGIKFKNVNMKSLNVATAKVNRVLDFIETKSITETNNLIKAAGVWVADRLGLRKYKGGKKKDPWWKRRIEGDIKQLIKDINILERVKKKQIGVAREGKAKLVKEKYRVERKGLTTVIEELKQRVLAKAAKVTRYEQRIDQYRINRLFRVDQKKVYHELNGNARKSNGDIPNAEESRTFWSEIWSVGKEHNKDADWLNGLKEEMVNVKQKNIIIDKDMVMKQCRKMPNWKAPGHDGVQGFWIKKLNRVHERIASQLNDILDGTKEIPAWMTYGRTVLCQKEPTKGNAVENFRPITCLPLMWKLLTGVISEEMYCFMESENLLPEEQKGCKRKSRGTKDQLLIDKAILKDCKKRKTNLAMAWIDYRKAYDFVPHSWILECLNMFGIANNIRSFMEKSMKRWKLLLTSNGSELCEVDVKRGIFQGDSLSPLIFVICMIPLSLVLRKVNASYEWSKKEFKLNHLLFMDDLKLFGKSEDQIDSLVQTVFVFSKDIGMEFGLKKCGVIILKRGKLITCDGIHLPTKDIMKEVDENGYTYLGILELDEIKEKEMKLKVVSEYKRRLRLVLKSKLNGKNKIQAINTWAVALLRYGAGIIEWKVDELKKLDRTTRKTLTMYGALHPKSDVDRLYLKRKDGGRGLIGIETCVRLEENNLGLYVRESDKFLLKAVRKMGIIKTVNLVEKEEFKRQSQTKLKSKWHEKRMCGQFDREMPEEVDRELSWYWIAQSDLKIQTEATIFAAQEQALRTNYIKHKIDKTTENLMCRMCGEKGETVQHIICECKKLAQRDYKRRHDNIAKLIHWKLCEKYDLERKEKWYEHCPEGVVENDDMKLIWDINIQCDNVIEARRPDLIVVNKKSKSCIIIDVAVPGDCRVHDKEQEKIEKYQNLKIELKRLWSLKNVRVVPIVVGALGCVSKNFKRWTDMIKIELDIGIIQKTALLGTARIFRKVLEM

SEQ ID NO: 23424 - protein, 1044 aa, Morbakka virulenta
MLLQKQDIRKNRWLSDLEIENIQRKINLDSEEVNVNTEEVEDIPKGNNRVIGGEESDHMFHEPNENFGDVIPYIETLDEETQLIIAQLNDIVIEGRNTDGIKFKNVNMKSLNVATAKVNRVLDFIETKSITETNNLIKAAGVWVADRLGLRKYKGGKKKDPWWKRRIEGDIKQLIKDINILERVKKKQIGVAREGKAKLVKEKYRVERKGLTTVIEELKQRVLAKAAKVTRYEQRIDQYRINRLFRVDQKKVYHELNGNARKSNGDIPNAEESRTFWSEIWSVGKEHNKDADWLNGLKEEMVNVKQKNIIIDKDMVMKQCRKMPNWKAPGHDGVQGFWIKKLNRVHERIASQLNDILDGTKEIPAWMTYGRTVLCQKEPTKGNAVENFRPITCLPLMWKLLTGVISEEMYCFMESENLLPEEQKGCKRKSRGTKDQLLIDKAILKDCKKRKTNLAMAWIDYRKAYDFVPHSWILECLNMFGIANNIRSFMEKSMKRWKLLLTSNGSELCEVDVKRGIFQGDSLSPLIFVICMIPLSLVLRKVNASYEWSKKEFKLNHLLFMDDLKLFGKSEDQIDSLVQTVFVFSKDIGMEFGLKKCGVIILKRGKLITCDGIHLPTKDIMKEVDENGYTYLGILELDEIKEKEMKLKVVSEYKRRLRLVLKSKLNGKNKIQAINTWAVALLRYGAGIIEWKVDELKKLDRTTRKTLTMYGALHPKSDVDRLYLKRKDGGRGLIGIETCVRLEENNLGLYVRESDKFLLKAVRKMGIIKTVNLVEKEEFKRQSQTKLKSKWHEKRMCGQFDREMPEEVDRELSWYWIAQSDLKIQTEATIFAAQEQALRTNYIKHKIDKTTENLMCRMCGEKGETVQHIICECKKLAQRDYKRRHDNIAKLIHWKLCEKYDLERKEKWYEHCPEGVVENDDMKLIWDINIQCDNVIEARRPDLIVFNKKSKSCIIIDVAVPGDCRVHDKEQQKIEKYQNLKIELKRLWSLKNARVVPVVVGALGCVSKNFKRWTDMITIELDIGIIQKTALLGTARILRKVLEM

SEQ ID NO: 23425 - protein, 1137 aa, Morbakka virulenta
MNTNNIENNGVNGTGADREGASPGRCPLVRQRGPGRHPMTVRTKWSNQVNKIVMECFLRSKAFDENEKPVRGYRQRMMHEWRERGVFDVTEQRLCDQARAIRKNGWLSDLEIENIQRKINLDSEEVNVNTEEVEDIPKGNNRVIGGEESDHMFHEPNENFGDVIPYIETLDEETQLIIAQLNDIVIEGRNTDGIKFKNVNMKSLNVATAKVNRVLDFIETKSITETNNLIKAAGVWVADRLGLRKYKGGKKKDPWWKRRIEGDIKQLIKDINILERVKKKQIGVAREGKAKLVKEKYRVERKGLTTVIEELKQRVLAKAAKVTRYEQRIDQYRINRLFRVDQKKVYHELNGNARKSNGDIPNAEESRTFWSEIWSVGKEHNKDADWLNGLKEEMVNVKQKNIIIDKDMVMKQCRKMPNWKAPGHDGVQGFWIKKLNRVHERIASQLNDILDGTKEIPAWMTYGRTVLCQKEPTKGNAVENFRPITCLPLMWKLLTGVISEEMYCFMESENLLPEEQKGCKRKSRGTKDQLLIDKAILKDCKKRKTNLAMAWIDYRKAYDFVPHSWILECLNMFGIANNIRSFMEKSMKRWKLLLTSNGSELCEVDVKRGIFQGDSLSPLIFVICMIPLSLVLRKVNASYEWSKKEFKLNHLLFMDDLKLFGKSEDQIDSLVQTVFVFSKDIGMEFGLKKCGVIILKRGKLITCDGIHLPTKDIMKEVDENGYTYLGILELDEIKEKEMKLKVVSEYKRRLRLVLKSKLNGKNKIQAINTWAVALLRYGAGIIEWKVDELKKLDRTTRKTLTMYGALHPKSDVDRLYLKRKDGGRGLIGIETCVRLEENNLGLYVRESDKFLLKAVRKMGIIKTVNLVEKEEFKRQSQTKLKSKWHEKRMCGQFDREMPEEVDRELSWYWIAQSDLKIQTEATIFAAQEQALRTNYIKHKIDKTTENLMCRMCGEKGETVQHIICECKKLAQRDYKRRHDNIAKLIHWKLCEKYDLERKEKWYEHCPEGVVENDDMKLIWDINIQCDNVIEARRPDLIVVNKKSKSCIIIDVAVPGDCRVHDKEQEKIEKYQNLKIELKRLWSLKNARVVPIVVGALGCVSKNFKRWTDMIKIELDIGIIQKTALLGTARILRKVLEM

SEQ ID NO: 23426 - protein, 1173 aa, Morbakka virulenta
MGRGDSLALAGNPPSDGVTIKTPVVVHLKTQPRLSGMIKQIVKNNGVNGAGASGEGLSPGRCPPVRQRGPGRRPMTVRTKWSKEVNKVVMECFFRSKPFDMDGNPIRGYRQRLMHEWRERGIFHVTEQRLCDQARAIRKNGWLSKLELESIQRMIDADNKEENETVVEAEVEQSENVESGPDEGTDHILREAYEDIENPIPNVETFDEEAQLIFIQLQKIMIEGRGTSGISFKKVDTKSLNSLTAKVNRVIELIETTNITQTNNLIKAAGVWVADQLGLKAYKRGKKQEPWWKRRVESDIKQLKKDVSFLERLKRGEIRDHREGKAKFVKEKYRVERKGLTTVIEEIKQRILAKAAKITRYEQRIEQYRLNRLFDIDQKKVYNQLNGQTGNSDGHIPNAEESKTFWSKIWSVKKEHNREADWLKVMKREMGKVKQRNILIDENKVNKQSKKMPNWKAPGHDGVQGFWIKKLNKLHSRIAFQLNEMLEGKKDTPTWMTYGRTVLCQKDAAKGNAVDNFRPITCLPIMWKLMTGIISEEMYCFLESEKLLPEEQKGCKRKSRGTKDQLLIDKAILKDCKKRKTNLAMAWIDYKKAYDFVPHSWILECLEICGIAGNIRSFIELSMKGWKLLLTSNGSDLCELDVNRGIFQGDSLSPLIFVLCMIPLSLLLRKVKASYEWGQSKYKINHLLYMDDLKLFGKNENQIDSLVQTVYLFSEDIGMEFGLKKCAVVVLKRGKMITFEGIHLPNEEVMREVDKKGYTYLGILELNEIKEQEMKDKVIAEYKRRLRLVLKSKLNGKNKIKAINTWAVALLRYGAGIIGWKVEELKKIDRTTRKTLTMYGAFHPKSDVDRLYVKRRDGGRGLISIENCVRSEENNLGLYVRDSKEELLKGVKEVGIIEIGNLMGKEEFKRRNQNKAKMKWHDKRMYGQFDREMNDKIDKVLSWKWVVQSDLKVQTEALIFAAQEQALRTNYVKHKIDKTSENPLCRMCLEKGETVQHLICECKKLAQREYKRRHDNIAKLIHWKLCEKYGLDKKEKWYEHCPEGVVENDKVKLLWDMNIQCDNVIEARRPDLVLVEKKTKSCIIIDVAVPGDNRVHDKENEKVEKYQNLKRELIRLWSLRKALVVPVVIGAMGCVSKDFNGWMEKLDIEVGVGVVQKTALLGTARILLKVLEM

SEQ ID NO: 23427 - protein, 1137 aa, Morbakka virulenta
MSVMNNINITNNDVNGTGDYCEGPSSGRGRVEASQAVMQRNPRTNVRTKWSKEVNKVVIECFYRSRPFGGDGKPIRGHRQRLMKEWRERGVCEVTEQRLCDQARAIRTNKWLSDLELESIQRMISSNSDDGNNNMETVQEPQTRNDGLCVADVLGEENNDLGNMSVNFEGLEEEELVIITNVYEIMIQGRNTDGISFKKIDMKTLNRVTGKVNKVIDLIETSNITETNNLIKAAAVWVADELGLKKFKPGKKKDPWWKRRLEGDIKQLRKDISLLERVKKGVLGFQKEAKGKCLMEKYRVKKKGLTTVIEELKQRILAKSAKINRYNQRIDQYRLNRLFKVDQKKVYNELNGNAGGSNDTPNAEESKTFWSNIWSVKKEHNKEAEWLNELKEETAAVEQNNVVITAEKIKNQCRKIPNWKAPGQDGVQGFWIKRFDAMHERIATQLNDMLNGRKTIPPWMTYGRTVLCQKDPAKGNAVDNFRPITCLPIMWKLLTGIIADDMYKFMERENLLPEEQKGCRRKSKGTKDQLLIDKTILRDCKRRKTNLAMAWIDYRKAYDLVPHSWILECLNMLGIADNIRAFIEKSMEKWKLLLTSNGSNLCEVEVNRGIFQGDSLSPLIFVICMIPLSVLLRKLSASYEWGKKEFKLNHLLFMDDLKLFGKNDDQIDSLVNTVYFFSKDIGMEFGLKKCGVIIMKRGKLARFDGIHLPNGEVMRHVDENGYMYLGVLELDQIKEKEMKSKVITEYKRRLRLILKSSLNGRNKIQAINTWAVALLRYGAGIIAWKVDELRKIDRTTRKILTMYGAFHPKGDIDRLYVKRKEGGRGLISIENCVWSEENNLGLYIRESNEMLLKGVRKGGVIQTDNLMEKDEFKRSSHNEIKTKWHEKRMYGQFVREMPEEIDKKLSWQWITRGDIKVQTEATIFAAQEQALRTNYIKNRIDKTSESPLCRMCGERAETVQHIVCECSKMAQREYKRRHDNIAKLIHWMLCGKYGLDRKEKWYEHCPEGVVEDENVKLIWDINIQCDNLIEARRPDIILLEKKTKDAIIIDVAVPGDCRAHEKENEKVEKYQDLKMELKRLWSLRKVKVVPVVVGALGCVSKRFNSWMEMLGLEVNVGIVQKTALLGSARIIRKVMDI

SEQ ID NO: 23428 - protein, 1137 aa, Morbakka virulenta
MSAMNNINITNNDVNGTGDYCEGPSSGRGRVEASQVVIQRNPRTNVRTKWSKEVNKVVIECFYRSRPFDGDGKPIRGYRQRLMKEWRERGVFEVTEQRLCDQARAIRTNKWLSDLELESIQRMISSTSDDGNNNMETVQEPQTRNDGLRVADVLSEENNDLGNMSVNFEGLEEEELVIITNLNEIMIQGRNTDGISFKKIDMKTLNRVTGKVNKVIDLIETSNITETNNLIKAAAVWVADELGLKKFKPGKKKDPWWKRRLEGDIKQLRKDISLLERVKKGVLGFQKEAKGKCLMEKYRVKKKGLTTVIEELKQRILAKSAKINRYNQRIDQYRLNRLFKVDQKKVYNELNGNAGGSNDTPNAEESKTFWSNIWSVKKEHNKEAEWLNELKEETAAVEQNNVVITAEKIKNQCRKIPNWKAPGQDGVQGFWIKRFDAMHERIATQLNDMLNGRKTIPPWMTYGRTVLCQKDPAKGNAVDNFRPITCLPIMWKLLTGIIADDMYKFMERENLLPEEQKGCRRKSKGTKDQLLIDKTILRDCKRRKTNLAMAWIDYRKAYDLVPHSWILECLNMLGIADNIRAFIEKSMEKWKLLLTSNGSNLCEVEVNRGIFQGDSLSPLIFVICMIPLSVLLRKLSASYEWGKKEFKLNHLLFMDDLKLFGKNDDQIDSLVNTVYFFSKDIGMEFGLKKCGVIIMKRGKLARFDGIHLPNGEVMRHVDENGYMYLGVLELDQIKEKEMKSKVITEYKRRLRLILKSSLNGRNKIQAINTWAVALLRYGAGIIAWKVDELRKIDRTTRKILTMYGAFHPKGDIDRLYVKRKEGGRGLISIENCVWSEENNLGLYIRESNEMLLKGVRKGGVIQTDNLMEKDEFKRSSHNEIKTKWHEKRMYGQFVREMPEEIDKKLSWQWITRGDIKVQTEATIFAAQEQALRTNYIKNRIDKTSESPLCRMCGERAETVQHIVCECSKMAQREYKRRHDNIAKLIHWMLCGKYGLDRKEKWYEHCPEGVVEDENVKLIWDINIQCDNLIEARRPDIILLEKKTKDAIIIDVAVPGDCRAHEKENEKVEKYQDLKMELKRLWSLRKVKVVPVVVGALGCVSKRFNSWMEMLGLEVNVGIVQKTALLGSARIIRKVMDI

SEQ ID NO: 23429 - protein, 1173 aa, Morbakka virulenta
MGRGDSLALAGNPPSDGVTIKTPVVVHLKTQPRLSGMIKQIVKNNGVNGAGASGEGLSPGRCPPVRQRGPGRHPMTVRTKWSKEVNKVVMECFFRSKPFDMDGNPIRGYRQRLMHEWRERGIFHVTEQRLCDQARAIRKNGWLSKLELESIQRMIDADNKEENETVVEAEVEQSENVESGPDEGTDHILREAYEDIENPIPNVETFDEEAQLIFIQLQKIMIEGRGTSGISFKKVDTKSLNSLTAKVNRVIELIETTNITQTNNLIKAAGVWVADQLGLKAYKRGKKQEPWWKRRVESDIKQLKKDVSFLERLKRGEIRDHREGKAKFVKEKYRVERKGLTTVIEEIKQRILAKAAKITRYEQRIEQYRLNRLFDIDQKKVYNQLNGQTGNSDGHIPNAEESKTFWSKIWSVKKEHNREADWLKVMKREMGKVKQRNILIDENKVNKQSKKMPNWKAPGHDGVQGFWIKKLNKLHSRIAFQLNEMLEGKKDTPTWMTYGRTVLCQKDAAKGNAVDNFRPITCLPIMWKLMTGIISEEMYCFLESEKLLPEEQKGCKRKSRGTKDQLLIDKAILKDCKKRKTNLAMAWIDYKKAYDFVPHSWILECLEICGIAGNIRSFIELSMKGWKLLLTSNGSDLCELDVNRGIFQGDSLSPLIFVLCMIPLSLLLRKVKASYEWGQSKYKINHLLYMDDLKLFGKNENQIDSLVQTVYLFSEDIGMEFGLKKCAVVVLKRGKMITFEGIHLPNEEVMREVDKKGYTYLGILELNEIKEQEMKDKVIAEYKRRLRLVLKSKLNGKNKIKAINTWAVALLRYGAGIIGWKVEELKKIDRTTRKTLTMYGAFHPKSDVDRLYVKRRDGGRGLISIENCVRSEENNLGLYVRDSKEELLKGVKEVGIIEIGNLMGKEEFKRRNQNKAKMKWHDKRMYGQFDREMNDKIDKVLSWKWVVQSDLKVQTEALIFAAQEQALRTNYVKHKIDKTSENPLCRMCLEKGETVQHLICECKKLAQREYKRRHDNIAKLIHWKLCEKYGLDKKEKWYEHCPEGVVENDKVKLLWDMNIQCDNVIEARRPDLVLVEKKTKSCIIIDVAVPGDNRVHDKENEKVEKYQNLKRELIRLWSLRKALVVPVVIGAMGCVSKDFNGWMEKLDIEVGVGVVQKTALLGTARILRKVLEM

SEQ ID NO: 23430 - protein, 1148 aa, Morbakka virulenta
MNTNNIENNGVNGTGADREGASPGRCPLVRQRGPGRHPMTVRTKWSNQVNKIVMECFLRSKAFDENEKPVRGYRQRMMHEWRERGVFDVTEQRLCDQARAIRKNGWLSDLEIENIQRKINLDSEEVNVNTEEVEDIPKGNNRVIGGEESDHMFHEPNENFGDVIPYIETLDEETQLIIAQLNDIVIEGRNTDGIKFKNVNMKSLNVATAKVNRVLDFIETKSITETNNLIKAAGVWVADRLGLRKYKGGKKKDPWWKRRIEGDIKQLIKDINILERVKKKQIGVAREGKAKLVKEKYRVERKGLTTVIEELKQRVLAKAAKVTRYEQRIDQYRINRLFRVDQKKVYHELNGNARKSNGDIPNAEESRTFWSEIWSVGKEHNKDADWLNGLKEEMVNVKQKNIIIDKDMVMKQCRKMPNWKAPGHDGVQGFWIKKLNRVHERIASQLNDILDGTKEIPAWMTYGRTVLCQKEPTKGNAVENFRPITCLPLMWKLLTGVISEEMYCFMESENLLPEEQKGCKRKSRGTKDQLLIDKAILKDCKKRKTNLAMAWIDYRKAYDFVPHSWILECLNMFGIANNIRSFMEKSMKRWKLLLTSNGSELCEVDVKRGIFQGDSLSPLIFVICMIPLSLVLRKVNASYEWSKKEFKLNHLLFMDDLKLFGKSEDQIDSLVQTVFVFSKDIGMEFGLKKCGVIILKRGKLITCDGIHLPTKDIMKEVDENGYTYLGILELDEIKEKEMKLKVVSEYKRRLRLVLKSKLNGKNKIQAINTWAVALLRYGAGIIEWKVDELKKLDRTTRKTLTMYGALHPKSDVDRLYLKRKDGGRGLIGIETCVRLEENNLGLYVRESDKFLLKAVRKMGIIKTVNLVEKEEFKRQSQTKLKSKWHEKRMCGQFDREMPEEVDRELSWYWIAQSDLKIQTEATIFAAQEQALRTNYIKHKIDKTTENLMCRMCGEKGETVQHIICECKKLAQRDYKRRHDNIAKLIHWKLCEKYDLERKEKWYEHCPEGVVENDDMKLIWDINIQCDNVIEARRPDLIVVNKKSKSCIIIDVAVPGDCRVHDKEQEKIEKYQNLKIELKRLWSLKNARVVPIVVGALGCVSKNFKRWTDMIKIELDIGIIQKTALLGTARILRKVLEMQGEGNLLAFGC

SEQ ID NO: 23431 - protein, 986 aa, Morbakka virulenta
MFHEPNENFGDVIPYIETLDEETQLSIVQLNDIVIEGRNTDGIKFKNVNMKSLNVATAKVNRVLDFIETKSITETNNLIKAAGVWVADRLGLRKYKGGKKKDPWWKRRIEGDIKQLIKDINILERVKKKQIGVAREGKAKLVKEKYRVERKGLTTVIEELKQRVLAKAAKVTRYEQRIDQYRINRLFRVDQKKVYHELNGNARKSNGDIPNAEESRTFWSEIWSVGKEHNKDADWLNGLKEEMVNVKQKNIIIDKDMVMKQCRKMPNWKAPGHDGVQGFWIKKLNRVHERIASQLNDILDGTKEIPAWMTYGRTVLCQKEPTKGNAVENFRPITCLPLMWKLLTGVISEEMYCFMESENLLPEEQKGCKRKSRGTKDQLLIDKAILKDCKKRKTNLAMAWIDYRKAYDFVPHSWILECLNMFGIANNIRSFMEKSMKRWKLLLTSNGSELCEVDVKRGIFQGDSLSPLIFVICMIPLSLVLRKVNASYEWSKKEFKLNHLLFMDDLKLFGKSEDQIDSLVQTVFVFSKDIGMEFGLKKCGVIILKRGKLITCDGIHLPTKDIMKEVDENGYTYLGILELDEIKEKEMKLKVVSEYKRRLRLVLKSKLNGKNKIQAINTWAVALLRYGAGIIEWKVDELKKLDRTTRKTLTMYGALHPKSDVDRLYLKRKDGGRGLIGIETCVRLEENNLGLYVRESDKFLLKAVRKMGIIKTVNLVEKEEFKRQSQTKLKSKWHEKRMCGQFDREMPEEVDRELSWYWIAQSDLKIQTEATIFAAQEQALRTNYIKHKIDKTTENLMCRMCGEKGETVQHIICECKKLAQRDYKRRHDNIAKLIHWKLCEKYDLERKEKWYEHCPEGVVENDDMKLIWDINIQCDNVIEARRPDLIVVNKKSKSCIIIDVAVPGDCRVHDKEQEKIEKYQNLKIELKRLWSLKNARVVPIVVGALGCVSKNFKRWTDMIKIELDIGIIQKTALLGTARILRKVLEM

SEQ ID NO: 23432 - protein, 1137 aa, Morbakka virulenta
MSAMNNINITNNDVNGTGTYCEGPSSGRGRVEASQVVIQRNPRTNVRTKWSKEVNKVVIECFYRSRPFDGDGKPIRGYRQRLMKEWRERGVFEVTEQRLCDQARAIRTNKWLSDLELESIQRMISSTSDDGNNNMETVQEPQTRNDGLRVADVLSEENNDLGNMSVNFEGLEEEELVIITNLNEIMIQGRNTDGISFKKIDMKTLNRVTGKVNKVIDLIETSNITETNNLIKAAAVWVADELGLKKFKPGKKKDPWWKRRLEGDIKQLRKDISLLERVKKGVLGFQKEAKGKCLMEKYRVKKKGLTTVIEELKQRILAKSAKINRYNQRIDQYRLNRLFKVDQKKVYNELNGNAGGSNDTPNAEESKTFWSNIWSVKKEHNKEAEWLNELKEETAAVEQNNVVITAEKIKNQCRKIPNWKAPGQDGVQGFWIKRFDAMHERIATQLNDMLNGRKTIPPWMTYGRTVLCQKDPAKGNAVDNFRPITCLPIMWKLLTGIIADDMYKFMERENLLPEEQKGCRRKSKGTKDQLLIDKTILRDCKRRKTNLAMAWIDYRKAYDLVPHSWILECLNMLGIADNIRAFIEKSMEKWKLLLTSNGSNLCEVEVNRGIFQGDSLSPLIFVICMIPLSVLLRKLSASYEWGKKEFKLNHLLFMDDLKLFGKNDDQIDSLVNTVYFFSKDIGMEFGLKKCGVIIMKRGKLARFDGIHLPNGEVMRHVDENGYMYLGVLELDQIKEKEMKSKVITEYKRRLRLILKSSLNGRNKIQAINTWAVALLRYGAGIIAWKVDELRKIDRTTRKILTMYGAFHPKGDIDRLYVKRKEGGRGLISIENCVWSEENNLGLYIRESNEMLLKGVRKGGVIQTDNLMEKDEFKRSSHNEIKTKWHEKRMYGQFVREMPEEIDKKLSWQWITRGDIKVQTEATIFAAQEQALRTNYIKNRIDKTSESPLCRMCGERAETVQHIVCECSKMAQREYKRRHDNIAKLIHWMLCGKYGLDRKEKWYEHCPEGVVEDENVKLIWDINIQCDNLIEARRPDIILLEKKTKDAIIIDVAVPGDCRAHEKENEKVEKYQDLKMELKRLWSLRKVKVVPVVVGALGCVSKRFNSWMEMLGLEVNVGIVQKTALLGSARIIRKVMDI

SEQ ID NO: 23433 - protein, 1173 aa, Morbakka virulenta
MGRGDSLALAGNPPSDGVTIKTPVVVHLKTQPRLSGMIKQIVKNNGVNGAGASGEGLSPGRCPPVRQRGPGRRPMTVRTKWSKEVNKVVMECFFRSKPFDMDGNPIRGYRQRLMHEWRERGIFHVTEQRLCDQARAIRKNGWLSKLELESIQRMIDADNKEENETVVEAEVEQSENVESGPDEGTDHILREAYEDIENPIPNVETFDEEAQLIFIQLQKIMIEGRGTSGISFKKVDTKSLNSLTAKVNRVIELIETTNITQTNNLIKAAGVWVADQLGLKAYKRGKKQEPWWKRRVESDIKQLKKDVSFLERLKRGEIRDHREGKAKFVKEKYRVERKGLTTVIEEIKQRILAKAAKITRYEQRIEQYRLNRLFDIDQKKVYNQLNGQTGNSDGHIPNAEESKTFWSKIWSVKKEHNREADWLKVMKREMGKVKQRNILIDENKVNKQSKKMPNWKAPGHDGVQGFWIKKLNKLHSRIAFQLNEMLEGKKDTPTWMTYGRTVLCQKDAAKGNAVDNFRPITCLPIMWKLMTGIISEEMYCFLESEKLLPEEQKGCKRKSRGTKDQLLIDKAILKDCKKRKTNLAMAWIDYKKAYDFVPHSWILECLEICGIAGNIRSFIELSMKGWKLLLTSNGSDLCELDVNRGIFQGDSLSPLIFVLCMIPLSLLLRKVKASYEWGQSKYKINHLLYMDDLKLFGKNENQIDSLVQTVYLFSEDIGMEFGLKKCAVVVLKRGKMITFEGIHLPNEEVMREVDKKGYTYLGILELNEIKEQEMKDKVIAEYKRRLRLVLKSKLNGKNKIKAINTWAVALLRYGAGIIGWKVEELKKIDRTTRKTLTMYGAFHPKSDVDRLYVKRRDGGRGLISIENCVRSEENNLGLYVRDSKEELLKGVKEVGIIEIGNLMGKEEFKRRNQNKAKMKWHDKRMYGQFDREMNDKIDKVLSWKWVVQSDLKVQTEALIFAAQEQALRTNYVKHKIDKTSENPLCRMCLEKGETVQHLICECKKLAQREYKRRHDNIAKLIHWKLCEKYGLDKKEKWYEHCPEGVVENDKVKLLWDMNIQCDNVIEARRPDLVLVEKKTKSCIIIDVAVPGDNRVHDKENEKVEKYQNLKRELIRLWSLRKALVVPVVIGAMGCVSKDFNGWMEKLDIELGVGVVQKTALLGTARILRKVLEM

SEQ ID NO: 23434 - protein, 1173 aa, Morbakka virulenta
MGRGDSLALAGNPPSDGVTIKTPVVVHLKTQPRLSGMIKQIVKNNGVNGAGASGEGLSPGRCPPVRQRGPGRRPMTVRTKWSKEVNKVVMECFFRSKPFDMDGNPIRGYRQRLMHEWRERGIFHVTEQRLCDQARAIRKNGWLSKLELESIQRMIDADNKEENETVVEAEVEQSENVESGPDEGTDHILREAYEDIENPIPNVETFDEEAQLIFIQLQKIMIEGRGTSGISFKKVDTKSLNSLTAKVNRVIELIETTNITQTNNLIKAAGVWVADQLGLKAYKRGKKQEPWWKRRVESDIKQLKKDVSFLERLKRGEVRDHREGKAKFVKEKYRVERKGLTTVIEEIKQRILAKAAKITRYEQRIEQYRLNRLFDIDQKKVYNQLNGQTGNSDGHIPNAEESKTFWSKIWSVKKEHNREADWLKVMKREMGKVKQRNILIDENKVNKQSKKMPNWKAPGHDGVQGFWIKKLNKLHSRIAFQLNEMLEGKKDTPTWMTYGRTVLCQKDAAKGNAVDNFRPITCLPIMWKLMTGIISEEMYCFLESEKLLPEEQKGCKRKSRGTKDQLLIDKAILKDCKKRKTNLAMAWIDYKKAYDFVPHSWILECLEICGIAGNIRSFIELSMKGWKLLLTSNGSDLCELDVNRGIFQGDSLSPLIFVLCMIPLSLLLRKVKASYEWGQSKYKINHLLYMDDLKLFGKNENQIDSLVQTVYLFSEDIGMEFGLKKCAVVVLKRGKMITFEGIHLPNEEVMREVDKKGYTYLGILELNEIKEQEMKDKVIAEYKRRLRLVLKSKLNGKNKIKAINTWAVALLRYGAGIIGWKVEELKKIDRTTRKTLTMYGAFHPKSDVDRLYVKRRDGGRGLISIENCVRSEENNLGLYVRDSKEELLKGVKEVGIIEIGNLMGKEEFKRRNQNKAKMKWHDKRMYGQFDREMNDKIDKVLSWKWVVQSDLKVQTEALIFAAQEQALRTNYVKHKIDKTSENPLCRMCLEKGETVQHLICECKKLAQREYKRRHDNIAKLIHWKLCEKYGLDKKEKWYEHCPEGVVENDKVKLLWDMNIQCDNVIEARRPDLVLVEKKTKSCIIIDVAVPGDNRVHDKENEKVEKYQNLKRELIRLWSLRKALVVPVVIGAMGCVSKDFNGWMEKLDIEVGVGVVQKTALLGTARILRKVLEM

SEQ ID NO: 23435 - protein, 1056 aa, Morbakka virulenta
MMKEWRERDVFEVTEQRLCDRARAIRTNKWLSDLELENIQRMISSNSDDGNSNMETVQEPQTGNEGVRVADVLVEENNDLGNMSVNLEGLEEEELVIITKLNEIVIQGRNTDGISFKMIDMKTVNRVTGKVNKVIDLIETSNITETNNLIKAAAVWVADELGLKKFKPGKKKDPWWKRRLEGDIKQLRKDISLLERVKKGVLGFQKEAKGKCLMEKYRVKKKGLTTVIEELKQRILAKSAKINRYNQRIDQYRLNRLFKVDQKKVYNELNGNAGGSNDTPNAEESKTFWSNIWSVKKEHNKEAEWLNELKEETAAVEQNNVVITAEKIKNQCRKIPNWKAPGQDGVQGFWIKRFDAMHERIATQLNDMLNGRKTIPPWMTYGRTVLCQKDPAKGNAVDNFRPITCLPIMWKLLTGIIADDMYKFMERENLLPEEQKGCRRKSKGTKDQLLIDKTILRDCKRRKTNLAMAWIDYRKAYDLVPHSWILECLNMLGIADNIRAFIEKSMEKWKLLLTSNGSNLCEVEVNRGIFQGDSLSPLIFVICMIPLSVLLRKLSASYEWGKKEFKLNHLLFMDDLKLFGKNDDQIDSLVNTVYFFSKDIGMEFGLKKCGVIIMKRGKLARFDGIHLPNGEVMRHVDENGYMYLGVLELDQIKEKEMKSKVITEYKRRLRLILKSSLNGRNKIQAINTWAVALLRYGAGIIAWKVDELRKIDRTTRKTLTMYGAFHPKGDIDRLYVKRKEGGRGLISIKNCVWSEENNLGLYIRESNEMLLKGVRKGGVIQTDNLMEKDEFKRSSHNEIKTKWHEKRMYGQFVREMPEEIDKKLSWQWITRGDIKVQTEATIFAAQEQALRTNYIKNRIDKTSESPLCRMCGERAETVQHIVCECSKMAQREYKRRHDNIAKLIHWMLCGKYGLDRKEKWYEHCPEGVVEDENVKLIWDINIQCDNLIEARRPDIILVEKKTKDAIITDVAVPGDCRANEKENEKVEKYQDLKMELKRLWSLRKVKVVPVLVGALGCVSKRFNSWMEMLGLKVNVGIVQKTSLLGSARIIRKVMYI

SEQ ID NO: 23436 - protein, 1137 aa, Morbakka virulenta
MSAMNNINITNNDVNGTGDYCEGPSSGRGRVEASQVVIQRNPRTNVRTKWSKEVNKVVIECFYRSRPFDGDGKPIRGYRQRLMKEWRERGVFEVTEQRLCDQARAIRTNKWLSDLELESIQRMISSTSDDGNNNMETVQEPQTRNDGLRVADVLSEENNDLGNMSVNFEGLEEEELVIITNLNEIMIQGRNTDGISFKKIDMKTLNRVTGKVNKVIDLIETSNITETNNLIKAAAVWVADELGLKKFKPGKKKDPWWKRRLEGDIKQLRKDISLLERVKKGVLGFQKEAKGKCLMEKYRVKKKGLTTVIEELKQRILAKSAKINRYNQRIDQYRLNRLFKVDQKKVYNELNGNAGGSNDTPNAEESKTFWSNIWSVKKEHNKEAEWLNELKEETAAVEQNNVVITAEKIKNQCRKIPNWKAPGQDGVQGFWIKRFDAMHERIATQLNDMLNGRKTIPPWMTYGRTVLCQKDPAKGNAVDNFRPITCLPIMWKLLTGIIADDMYKFMERENLLPEEQKGCRRKSKGTKDQLLIDKTILRDCKRRKTNLAMAWIDYRKAYDLVPHSWILECLNMLGIADNIRAFIEKSMEKWKLLLTSNGSNLCEVEVNRGIFQGDSLSPLIFVICMIPLSVLLRKLSASYEWGKKEFKLNHLLFMDDLKLFGKNDDQIDSLVNTVYFFSKDIGMEFGLKKCGVIIMKRGKLARFDGIHLPNGEVMRHVDENGYMYLGVLELDQIKEKEMKSKVITEYKRRLRLILKSSLNGRNKIQAINTWAVALLRYGAGIIAWKVDQLRKIDRTTRKILTMYGAFHPKGDIDRLYVKRKEGGRGLISIKNCVWSEENNLGLYIRESNEMLLKGVRKGGVIQTDNLMEKDEFKRSSHNEIKTKWHEKRMYGQFVREMPEEIDKKLSWQWITRGDIKVQTEATIFAAQEQALRTNYIKNRIDKTSESPLCRMCGERAETVQHIVCECSKMAQREYKRRHDNIAKLIHWMLCGKYGLDRKEKWYEHCPEGVVEDENVKLIWDINIQCDNLIEARRPDIILLEKKTKDAIIIDVAVPGDCRAHEKENEKVEKYQDLKMELKRLWSLRKVKVVPVVVGALGCVSKRFNSWMEMLGLEVNVGIVQKTALLGSARIIRKVMDI

SEQ ID NO: 23437 - protein, 1082 aa, Morbakka virulenta
MFFRSKPFDMDGNPMRGYRQRLMHEWRERGIFHVTEQRLCDQARAIRKNGWLSKLELESIQRMIDADNKEENETVVEAEVEQSENVESGPDEGTDHILREAYEDIENPIPNVETFDEEAQLIFIQLQKIMIEGRGTSGISFKKVDTKSLNSLTAKVNRVIELIETTNITQTNNLIKAAGVWVADQLGLKAYKRGKKQEPWWKRRVESDIKQLKKDVSFLERLKRGEIRDHREGKAKFVKEKYRVERKGLTTVIEEIKQRILAKAAKITRYEQRIEQYRLNRLFDIDQKKVYNQLNGQTGNSDGHIPNAEESKTFWSKIWSVKKEHNREADWLKVMKREMGKVKQRNILIDENKVNKQSKKMPNWKAPGHDGVQGFWIKKLNKLHSRIAFQLNEMLEGKKDTPTWMTYGRTVLCQKDAAKGNAVDNFRPITCLPIMWKLMTGIISEEMYCFLESEKLLPEEQKGCKRKSRGTKDQLLIDKAILKDCKKRKTNLAMAWIDYKKAYDFVPHSWILECLEICGIAGNIRSFIELSMKGWKLLLTSNGSDLCELDVNRGIFQGDSLSPLIFVLCMIPLSLLLRKVKASYEWGQSKYKINHLLYMDDLKLFGKNENQIDSLVQTVYLFSEDIGMEFGLKKCAVVVLKRGKMITFEGIHLPNEEVMREVDKKGYTYLGILELNEIKEQEMKDKVIAEYKRRLRLVLKSKLNGKNKIKAINTWAVALLRYGAGIIGWKVEELKKIDRTTRKTLTMYGAFHPKSDVDRLYVKRRDGGRGLISIENCVRSEENNLGLYVRDSKEELLKGVKEVGIIEIGNLMGKEEFKRRNQNKAKMKWHDKRMYGQFDREMNDKIDKVLSWKWVVQSDLKVQTEALIFAAQEQALRTNYVKHKIDKTSENPLCRMCLEKGETVQHLICECKKLAQREYKRRHDNIAKLIHWKLCEKYGLDKKEKWYEHCPEGVVENDKVKLLWDMNIQCDNVIEARRPDLVLVEKKTKSCITIDVAVPRDNRVHDKENEKVEKYQNLKRELIRLWSLRKALVVPVVIGAMGCVSKDFNGWMEKLDIEVGVGVVQETALLGTARILGKVLEM

SEQ ID NO: 23438 - protein, 1137 aa, Morbakka virulenta
MNTNNIEHNGVNGTGADREGASPGRCPLVRQRGPGRHPMTVRTKWSNQVNKIVMECFFRSKAFDENEKPMRGYRQRMMYEWRERGVFGVTEQRLCDQARAIRKNGWLSDLEIENIQRKINLDSEEVNVNTEEVEDIPKGNNRVIGGEESDHMFHEPNENFGDVIPYIETLDEETQLIIAQLNDIVIEGRNTDGIKFKNVNMKSLNVATAKVNRVLDFIETKSITETNNLIKAAGVWVADRLGLRKYKGGKKKDPWWKRRIEGDIKQLIKDINILERVKKKQIGVAREGKAKLVKEKYRVERKGLTTVIEELKQRVLAKAAKVTRYEQRIDQYRINRLFRVDQKKVYHELNGNARKSNGDIPNAEESRTFWSEIWSVGKEHNKDADWLNGLKEEMVNVKQKNIIIDKDMVMKQCRKMPNWKAPGHDGVQGFWIKKLNRVHERIASQLNDILDGTKEIPAWMTYGRTVLCQKEPTKGNAVENFRPITCLPLMWKLLTGVISEEMYCFMESENLLPEEQKGCKRKSRGTKDQLLIDKAILKDCKKRKTNLAMAWIDYRKAYDFVPHSWILECLNMFGIANNIRSFMEKSMKRWKLLLTSNGSELCEVDVKRGIFQGDSLSPLIFVICMIPLSLVLRKVNASYEWSKKEFKLNHLLFMDDLKLFGKSEDQIDSLVQTVFVFSKDIGMEFGLKKCGVIILKRGKLITCDGIHLPTKDIMKEVDENGYTYLGILELDEIKEKEMKLKVVSEYKRRLRLVLKSKLNGKNKIQAINTWAVALLRYGAGIIEWKVDELKKLDRTTRKTLTMYGALHPKSDVDRLYLKRKDGGRGLIGIETCVRLEENNLGLYVRESDKFLLKAVRKMGIIKTVNLVEKEEFKRQSQTKLKSKWHEKRMCGQFDREMPEEVDRELSWYWIAQSDLKIQTEATIFAAQEQALRTNYIKHKIDKTTENLMCRMCGEKGETVQHIICECKKLAQRDYKRRHDNIAKLIHWKLCEKYDLERKEKWYEHCPEGVVENDDMKLIWDINIQCDNVIEARRPDLIVVNKKSKSCIIIDVAVPGDCRVHDKEQEKIEKYQNLKIELKRLWSLKNARVVPIVVGALRCVSKNFKRWTDMIKIELDIGIIQKTGLLGTARILRNVLEM

SEQ ID NO: 23439 - protein, 952 aa, Morbakka virulenta
MIQGQNTDGISFKKIDMKTLNRVTGKVNKVIDLIETCNITETNNLIKAAAVCVADELGLKKFKPRKKKDPWWKRRLEGDIKQLRKDIIFLERVKKGVLGFQKEAKGKCRMEKYRDKKKGLTTVIEELKQRILAKSAKINRYNQRIDQYRLNRLFKVDQKKVYNELNGNAGGSNDTPNAEESKTFWSNIWSVKKEHNKEAEWLNELKEETAAVEQNNVVITAEKIKNQCRKIPNWKAPGQDGVQGFWIKRFDAMHERIATQLNDMLNGRKTIPPWMTYGRTVLCQKDPAKGNAVDNFRPITCLPIMWKLLTGIIADDMYKFMERENLLPEEQKGCRRKSKGTKDQLLIDKTILRDCKRRKTNLAMAWIDYRKAYDLVPHSWILECLNMLGIADNIRAFIEKSMEKWKLLLTSNGSNLCEVEVNRGIFQGDSLSPLIFVICMIPLSVLLRKLSASYEWGKKEFKLNHLLFMDDLKLFGKNDDQIDSLVNTVYFFSKDIGMEFGLKKCGVIIMKRGKLARFDGIHLPNGEVMRHVDENGYMYLGVLELDQIKEKEMKSKVITEYKRRLRLILKSSLNGRNKIQAINTWAVALLRYGAGIIAWKVDELRKIDRTTRKILTMYGAFHPKGDIDRLYVKRKEGVGGLISIENCVWSEENNLGLYIRESNEMLLKGVRKGGVIQTDNLMEKDEFKRSSHNEIKTKWHEKRMYGQFVREMPEEIDKKLSWQWITRGDIKVQTEATIFAAQEQALRTNYIKNRIDKTSESPLCRMCGERAETVQHIVCECSKMAQREYKRRHDNIAKLIHWMLCGKYGLDRKEKWYEHCPEGVVEDENVKLIWDINIQCDNLIEARRPDIILLEKKTKDAIIIDVAVPGDCRAHEKENEKVEKYQDLKMELKRLWSLRKVKVVPVVVGALGCVSKRFNSWMEMLGLKVNVGIVQKTALLGSARIIRKVMDI

SEQ ID NO: 23440 - protein, 1113 aa, Morbakka virulenta
MNTNNIENNGVNGTGADREGASPGRCPLVRQRGPGRHPMTVRTKWSNQVNKIVMECFLRSKAFDENEKPVRGYRQRMMHEWRERGVFDVTEQRLCDQARAIRKNGWLSDLEIENIQRKINLDSEEVNVNTEEVEDIPKGNNRVIGGEESDHMFHEPNENFGDVIPYIETLDEETQLIIAQLNDIVIEGRNTDGIKFKNVNMKSLNVATAKVNRVLDFIETKSITETNNLIKAAGVWVADRLGLRKYKGGKKKDPWWKRRIEGDIKQLIKDINILERVKKKQIGVAREGKAKLVKEKYRVERKGLTTVIEELKQRVLAKAAKVTRYEQRIDQYRINRLFRVDQKKVYHELNGNARKSNGDIPNAEESRTFWSEIWSVGKEHNKDADWLNGLKEEMVNVKQKNIIIDKDMVMKQCRKMPNWKAPGHDGVQGFWIKKLNRVHERIASQLNDILDGTKEIPAWMTYGRTVLCQKEPTKGNAVENFRPITCLPLMWKLLTGVISEEMYCFMESENLLPEEQKGCKRKSRGTKDQLLIDKAILKDCKKRKTNLAMAWIDYRKAYDFVPHSWILECLNMFGIANNIRSFMEKSMKRWKLLLTSNGSELCEVDVKRGIFQGDSLSPLIFVICMIPLSLVLRKVNASYEWSKKEFKLNHLLFMDDLKLFGKSEDQIDSLVQTVFVFSKDIGMEFGLKKCGVIILKRGKLITCDGIHLPTKDIMKEVDENGYTYLGILELDEIKEKEMKLKVVSEYKRRLRLVLKSKLNGKNKIQAINTWAVALLRYGAGIIEWKVDELKKLDRTTRKTLTMYGALHPKSDVDRLYLKRKDGGRGLIGIETCVRLEENNLGLYVRESDKFLLKAVRKMGIIKTVNLVEKEEFKRQSQTKLKSKWHEKRMCGQFDREMPEEVDRELSWYWIAQSDLKIQTEATIFAAQEQALRTNYIKHKIDKTTENLMCRMCGEKGETVQHIICECKKLAQRDYKRRHDNIAKLIHWKLCEKYDLERKEKWYEHCPEGVVENDDMKLIWDINIQCDNVIEARRPDLIVVNKKSKSCIIIDVAVPGDCRVHDKEQEKIEKYQNLKIELKRLWSLKNARVVPIVVGALGCVCKNFKRWTDMIKIE

SEQ ID NO: 23441 - protein, 1173 aa, Morbakka virulenta
MGRGDSLALAGNPPSDGFTIKTPVVVHLKTQPRLSGMIKQIVKNNGVNGAGASGEGLSPGRCPPVRQRGPGRRPMTVRTKWSKEVNKVVMECFFRSKPFDMDGNPIRGYRQRLMHEWRERGIFHVTEQRLCDQARAIRKNGWLSKLELESIQRMIDADNKEENETVVEAEVEQSENVESGPDEGTDHILREAYEDIENPIPNVETFDEEAQLIFIQLQKIMIEGRGTSGISFKKVDTKSLNSLTAKVNRVIELIETTNITQTNNLIKAAGVWVADQLGLKAYKRGKKQEPWWKRRVESDIKQLKKDVSFLERLKRGEIRDHREGKAKFVKEKYRVERKGLTTVIEEIKQRILAKAAKITRYEQRIEQYRLNRLFDIDQKKVYNQLNGQTGNSDGHIPNAEESKTFWSKIWSVKKEHNREADWLKVMKREMGKVKQRNILIDENKVNKQSKKMPNWKAPGHDGVQGFWIKKLNKLHSRIAFQLNEMLEGKKDTPTWMTYGRTVLCQKDAAKGNAVDNFRPITCLPIMWKLMTGIISEEMYCFLESEKLLPEEQKGCKRKSRGTKDQLLIDKAILKDCKKRKTNLAMAWIDYKKAYDFVPHSWILECLEICGIAGNIRSFIELSMKGWKLLLTSNGSDLCELDVNRGIFQGDSLSPLIFVLCMIPLSLLLRKVKASYEWGQSKYKINHLLYMDDLKLFGKNENQIDSLVQTVYLFSEDIGMEFGLKKCAVVVLKRGKMITFEGIHLPNEEVMREVDKKGYTYLGILELNEIKEQEMKDKVIAEYKRRLRLVLKSKLNGKNKIKAINTWAVALLRYGAGIIGWKVEELKKIDRTTRKTLTMYGAFHPKSDVDRLYVKRRDGGRGLISIENCVRSEENNLGLYVRDSKEELLKGVKEVGIIEIGNLMGKEEFKRRNQNKAKMKWHDKRMYGQFDREMNDKIDKVLSWKWVVQSDLKVQTEALIFAAQEQALRTNYVKHKIDKTSENPLCRMCLEKGETVQHLICECKKLAQREYKRRHDNIAKLIHWKLCEKYGLDKKGKWYEHCPEGVVENDKVKLLWDMNIQCDNVIEARRPDLVLVEKKTKSCIIIDVAVPGDNRVHDKENEKVEKYQNLKRELIRLWSLRKALVVPVVIGAMGCVSKDFNGWMEKLDIEVGVGVVQKTALLGTARILRKVLEM

SEQ ID NO: 23442 - protein, 1137 aa, Morbakka virulenta
MSAMNNINITNNDVNGTGDYCEGPSSGRGRVEASQVVIQRNPRTNVRTKWSKEVNKVVIECFYRSRPFDGDGKPIRGYRQRLMKEWRERGVFEVTEQRLCDQARAIRTNKWLSDLELESIQRMISSTSDDGNNNMETVQEPQTRNDGLRVADVLSEENNDLGNMSVNFEGLEEEELVIITNLNEIMIQGRNTDGISFKKIDMKTLNRVTRKVNKVIDLIETSNITETNNLIKAAAVWVADELGLKKFKPGKKKDPWWKRRLEGDIKQLRKDISLLERVKKGVLGFQKEAKGKCLMEKYRVKKKGLTTVIEELKQRILAKSAKINRYNQRIDQYRLNRLFKVDQKKVYNELNGNAGGSNDTPNAEESKTFWSNIWSVKKEHNKEAEWLNELKEETAAVEQNNVVITAEKIKNQCRKIPNWKAPGQDGVQGFWIKRFDAMHERIATQLNDMLNGRKTIPPWMTYGRTVLCQKDPAKGNAVDNFRPITCLPIMWKLLTGIIADDMYKFMERENLLPEEQKGCRRKSKGTKDQLLIDKTILRDCKRRKTNLAMAWIDYRKAYDLVPHSWILECLNMLGIADNIRAFIEKSMEKWKLLLTSNGSNLCEVEVNRGIFQGDSLSPLIFVICMIPLSVLLRKLSASYEWGKKEFKLNHLLFMDDLKLFGKNDDQIDSLVNTVYFFSKDIGMEFGLKKCGVIIMKRGKLARFDGIHLPNGEVMRHVDENGYMYLGVLELDQIKEKEMKSKVITEYKRRLRLILKSSLNGRNKIQAINTWAVALLRYGAGIIAWKVDELRKIDRTTRKILTMYGAFHPKGDIDRLYVKRKEGGRGLISIENCVWSEENNLGLYIRESNEMLLKGVRKGGVIQTDNLMEKDEFKRSSHNEIKTKWHEKRMYGQFVREMPEEIDKKLSWQWITRGDIKVQTEATIFAAQEQALRTNYIKNRIDKTSESPLCRMCGERAETVQHIVCECSKMAQREYKRRHDNIAKLIHWMLCGKYGLDRKEKWYEHCPEGVVEDENVKLIWDINIQCDNLIEARRPDIILLEKKTKDAIIIDVAVPGDCRAHEKENEKVEKYQDLKMELKRLWSLRKVKVVPVVVGALGSVSKRFNSWMEMLGLKVNVEIVQKTALFGSARIIRKVMDI

SEQ ID NO: 23443 - protein, 1084 aa, Morbakka virulenta
MECFLRSKAFDENEKPIRGYRQRMMHEWRERGVFDVTEQRLCDQARAIRKNGWLSDLEIENIQRKINLDSEEVNVNTEEVEDIPKGNNRVIGGEESDHMFHEPNENFGDVIPYIETLDEETQLIIAQLNDIVIEGRNTDGIKFKNVNMKSLNVATAKVNRVLDFIETKSITETNNLIKAAGVWVADRLGLRKYKGGKKKDPWWKRRIEGDIKQLIKDINILERVKKKQIGVAREGKAKLVKEKYRVERKGLTTVIEELKQRVLAKAAKVTRYEQRIDQYRINRLFRVDQKKVYHELNGNARKSNGDIPNAEESRTFWSEIWSVGKEHNKDADWLNGLKEEMVNVKQKNIIIDKDMVMKQCRKMPNWKAPGHDGVQGFWIKKLNRVHERIASQLNDILDGTKEIPAWMTYGRTVLCQKEPTKGNAVENFRPITCLPLMWKLLTGVISEEMYCFMESENLLPEEQKGCKRKSRGTKDQLLIDKAILKDCKKRKTNLAMAWIDYRKAYDFVPHSWILECLNMFGIANNIRSFMEKSMKRWKLLLTSNGSELCEVDVKRGIFQGDSLSPLIFVICMIPLSLVLRKVNASYEWSKKEFKLNHLLFMDDLKLFGKSEDQIDSLVQTVFVFSKDIGMEFGLKKCGVIILKRGKLITCDGIHLPTKDIMKEVDENGYTYLGILELDEIKEKEMKLKVVSEYKRRLRLVLKSKLNGKNKIQAINTWAVALLRYGAGIIEWKVDELKKLDRTTRKTLTMYGALHPKSDVDRLYLKRKDGGRGLIGIETCVRLEENNLGLYVRESDKFLLKAVRKMGIIKTVNLVEKEEFKRQSQTKLKSKWHEKRMCGQFDREMPEEVDRELSWYWIAQSDLKIQTEATIFAAQEQALRTNYIKHKIDKTTENLMCRMCGEKGETVQHIICECKKLAQRDYKRRHDNIAKLIHWKLCEKYDLERKEKWYEHCPEGVVENDDMKLIWDINIQCDNVIEARRPDLIVVNKKSKSCIIIDVAVPGDCRVHDKEQEKIEKYQNLKIELKRLWSLKNARVVTIVVRALGCVSKNFKRWTDMIKIELDIGIIQKTALLGTARILRKVLEM

SEQ ID NO: 23444 - protein, 1137 aa, Morbakka virulenta
MIKQIVKNNGVNEAGASGEGLSPGRCPPVRQRGPGRRPMTVRTKWSKEVNKVVMECFFRSKPFDMDGNPIRGYRQRLMHEWRERGIFHVTEQRLCDQARAIRKNGWLSKLELESIQRMIDADNKEENETVVEAEVEQSENVESGPDEGTDHILREAYEDIENPIPNVETFDEEAQLIFIQLQKIMIEGRGTSGISFKKVDTKSLNSLTAKVNRVIELIETTNITQTNNLIKAAGVWVADQLGLKAYKRGKKQEPWWKRRVESDIKQLKKDVSFLERLKRGEIRDHREGKAKFVKEKYRVERKGLTTVIEEIKQRILAKAAKITRYEQRIEQYRLNRLFDIDQKKVYNQLNGQTGNSDGHIPNAEESKTFWSKIWSVKKEHNREADWLKVMKREMGKVKQRNILIDENKVNKQSKKMPNWKAPGHDGVQGFWIKKLNKLHSRIAFQLNEMLEGKKDTPTWMTYGRTVLCQKDAAKGNAVDNFRPITCLPIMWKLMTGIISEEMYCFLESEKLLPEEQKGCKRKSRGTKDQLLIDKAILKDCKKRKTNLAMAWIDYKKAYDFVPHSWILECLEICGIAGNIRSFIELSMKGWKLLLTSNGSDLCELDVNRGIFQGDSLSPLIFVLCMIPLSLLLRKVKASYEWGQSKYKINHLLYMDDLKLFGKNENQIDSLVQTVYLFSEDIGMEFGLKKCAVVVLKRGKMITFEGIHLPNEEVMREVDKKGYTYLGILELNEIKEQEMKDKVIAEYKRRLRLVLKSKLNGKNKIKAINTWAVALLRYGAGIIGWKVEELKKIDRTTRKTLTMYGAFHPKSDVDRLYVKRRDGGRGLISIENCVRSEENNLGLYVRDSKEELLKGVKEVGIIEIGNLMGKEEFKRRNQNKAKMKWHDKRMYGQFDREMNDKIDKVLSWKWVVQSDLKVQTEALIFAAQEQALRTNYVKHKIDKTSENPLCRMCLEKGETVQHLICECKKLAQREYKRRHDNIAKLIHWKLCEKYGLDKKEKWYEHCPEGVVENDKVKLLWDMNIQCDNVIEARRPDLVLVEKKTKSCIIIDVAVPGDNRVHDKENEKVEKYQNLKRELIRLWSLKKALVVPVVIGAMGCVSKDFNGRMEKLDIEVGVGVVQKTALLGTARILRKVLEM

SEQ ID NO: 23445 - protein, 1137 aa, Morbakka virulenta
MNTNNIENNGVNGTGADREGASPGRCPLVRQRGPGRHPMTVRTKWSNQVNKIVMECFLRSKAFDENEKPVRGYRQRMMHEWRERGVFDVTEQRLCDQARAIRKNGWLSDLEIENIQRKINLDSEEVNVNTEEVEDIPKGNNRVIGGEESDHMFHEPNENFGDVIPYIETLDEETQLIIAQLNDIVIEGRNTDGIKFKNVNMKSLNVATAKVNRVLDFIETKSITETNNLIKAAGVWVADRLGLRKYKGGKKKDPWWKRRIEGDIKQLIKDINILERVKKKQIGVAREGKAKLVKEKYRVERKGLTTVIEELKQRVLAKAAKVTRYEQRIDQYRINRLFRVDQKKVYHELNGNARKSNGDIPNAEESRTFWSEIWSVGKEHNKDADWLNGLKEEMVNVKQKNIIIDKDMVMKQCRKMPNWKAPGHDGVQGFWIKKLNRVHERIASQLNDILDGTKEIPAWMTYGRTVLCQKEPTKGNAVENFRPITCLPLMWKLLTGVISEEMYCFMESENLLPEEQKGCKRKSRGTKDQLLIDKAILKDCKKRKTNLAMAWIDYRKAYDFVPHSWILECLNMFGIANNIRSFMEKSMKRWKLLLTSNGSELCEVDVKRGIFQGDSLSPLIFVICMIPLSLVLRKVNASYEWSKKEFKLNHLLFMDDLKLFGKSEDQIDSLVQTVFVFSKDIGMEFGLKKCGVIILKRGKLITCDGIHLPTKDIMKEVDENGYTYLGILELDEIKEKEMKLKVVSEYKRRLRLVLKSKLNGKNKIQAINTWAVALLRYGAGIIEWKVDELKKLDRTTRKTLTMYGALHPKSDVDRLYLKRKDGGRGLIGIETCVRLEENNLGLYVRESDKFLLKAVRKMGIIKTVNLVEKEEFKRQSQTKLKSKWHEKRMCGQFDREMPEEVDRELSWYWIAQSDLKIQTEATIFAAQEQALRTNYIKHKIDKTTENLMCRMCGEKGETVQHIICECKKLAQRDYKRRHDNIAKLIHWKLCEKYDLERKEKWYEHCPEGVVENDDMKLIWDINIQCDNVIEARRPDLIVVNKKSKSCIIIDVAVPGDCRVHDKEQEKIEKYQNLKIELKRLWSLKNARVVPIIVGALGCVSKNFKRWTDMIKIELDIGIIQKTALLGMARILRKVLEM

SEQ ID NO: 23446 - protein, 1141 aa, Morbakka virulenta
MGRGDSLALAGNPPSDGVTIKTPVVVHLKTQPRLSGMIKQIVKNNGVNGAGASGEGLSPGRCPPVRQRGPGRRPMTVRTKWSKEVNKVVMECFFRSKPFDMDGNPIRGYRQRLMHEWRERGIFHVTEQRLCDQARAIRKNGWLSKLELESIQRMIDADNKEENETVVEAEVEQSENVESGPDEGTDHILREAYEDIENPIPNVETFDEEAQLIFIQLQKIMIEGRGTSGISFKKVDTKSLNSLTAKVNRVIELIETTNITQTNNLIKAAGVWVADQLGLKAYKRGKKQEPWWKRRVESDIKQLKKDVSFLERLKRGEIRDHREGKAKFVKEKYRVERKGLTTVIEEIKQRILAKAAKITRYEQRIEQYRLNRLFDIDQKKVYNQLNGQTGNSDGHIPNAEESKTFWSKIWSVKKEHNREADWLKVMKREMGKVKQRNILIDENKVNKQSKKMPNWKAPGHDGVQGFWIKKLNKLHSRIAFQLNEMLEGKKDTPTWMTYGRTVLCQKDAAKGNAVDNFRPITCLPIMWKLMTGIISEEMYCFLESEKLLPEEQKGCKRKSRGTKDQLLIDKAILKDCKKRKTNLAMAWIDYKKAYDFVPHSWILECLEICGIAGNIRSFIELSMKGWKLLLTSNGSDLCELDVNRGIFQGDSLSPLIFVLCMIPLSLLLRKVKASYEWGQSKYKINHLLYMDDLKLFGKNENQIDSLVQTVYLFSEDIGMEFGLKKCAVVVLKRGKMITFEGIHLPNEEVMREVDKKGYTYLGILELNEIKEQEMKDKVIAEYKRRLRLVLKSKLNGKNKIKAINTWAVALLRYGAGIIGWKVEELKKIDRTTRKTLTMYGAFHPKSDVDRLYVKRRDGGRGLISIENCVRSEENNLGLYVRDSKEELLKGVKEVGIIEIGNLMGKEEFKRSNQNKAKMKWHDKRMYGQFDREMNDKIDKVLSWKWVVQSDLKVQTEALIFAAQEQALRTNYVKHKIDKTSENPLCRMCLEKGETVQHLICECKKLAQREYKRRHDNIAKLIHWKLCEKYGLDKKGKWYEHCPEGVVENDKVKLLWDMNIQCDNVIEARRPDLVLVEKKTKSCIIIDVAVPGDNRVHDKENEKVEKYQNLKRELIRLWSLRKALVVPVVIGAMGCVSKDLNG

SEQ ID NO: 23447 - protein, 1173 aa, Morbakka virulenta
MGRGDSLALAGNPPSDGVTIKTPVVVHLKTQPRLSGMIKQIVKNNGVNGAGASGEGLSPGRCPPVRQRGPGRRPMTVRTKWSKEVNKVVMECFFRSKPFDMDGNPIRGYRQRLMHEWRERGIFHVTEQRLCDQARAIRKNGWLSKLELESIQRMIDADNKEENETVVEAEVEQSENVESGPDEGTDHILREAYEDIENPIPNVETFDEEAQLIFIQLQKIMIEGRGTSGISFKKVDTKSLNSLTAKVNRVIELIETTNITQTNNLIKAAGVWVADQLGLKAYKRGKKQEPWWKRRVESDIKQLKKDVSFLERLKRGEVRDHREGKAKFVKEKYRVERKGLTTVIEEIKQRILAKAAKITRYEQRIEQYRINRLFDIDQKKVYNQLNGQTGNSDGHIPNAEESKTFWSKIWSVKKEHNREADWLKVMKGEMGKVKQRNILIDENKVNNQCKKMPNWKAPGHDGVQGFWIKKLNKLHSRIAFQLNEMLEGKKDTPTWMTYGRTVLCQKDAAKGNAVDNFRPITCLPIMWKLMTGIISEEMYCFLESEKLLPEEQKGCKRKSRGTKDQLLIDKAILKDCKKRKTNLAMAWIDYKKAYDFVPHSWILECLEICGIAGNIRSFIELSMKGWKLLLTSNGSDLCELDVNRGIFQGDSLSPLIFVLCMIPLSLLLRKVKASYEWGQSKYKINHLLYMDDLKLFGKNENQIDSLVQTVYLFSEDIGMEFGLKKCAVVVLKRGKMITFEGIHLPNEEVMREVDEKGYTYLGILELNEIKEQEMKDKVIAEYKRRLRLVLKSKLNGKNKIKAINTWAVALLRYGAGIIGWKVEELKKIDRTTRKTLTMYGAFHPKSDVDRLYVKRRDGGRGLISIENCVRSEENNLGLYVRDSKEELLKGVKEVGIIEIGNLMGKEEFKRRNQNKAKMKWHDKRMYGQFDREMNDKIDKVLSWKWVVQSDLKVQTEALIFAAQEQALRTNYVKHKIDKTSENPLCRMCLEKGETVQHLICECKKLAQREYKRRHDNIAKLIHWKLCEKYGLDKKEKWYEHCPEGVVENDKVKLLWDMNIQCDNVIEARRPDLVLVEKKTKSCIIIDVAVPGDNRVHDKENEKVEKYQNLKRELIRLWSLRKALVVPVVIGAMGCVSKDFNGWMEKLDIEVGVGVVQKTALLGTARILRKVLEM

SEQ ID NO: 23448 - protein, 1173 aa, Morbakka virulenta
MGRGDSLALAGNPPSDGVTIKTPVVVHLKTQPRLSGMIKQIVKNNGVNGAGASGEGLSPGRCPPVRQRGPGRRPMTVRTKWSKEVNKVVMECFFRSKPFDMDGNPIRGYRQRLMHEWRERGIFHVTEQRLCDQARAIRKNGWLSKLELESIQRMIDADNKEENETVVEAEVEQSENVESGPDEGTDHILREAYEDIENPIPNVETFDEEAQLIFIQLQKIMIEGRGTSGISFKKVDTKSLNSLTAKVNRVIELIETTNITQTNNLIKAAGVWVADQLGLKAYKRGKKQEPWWKRRVESDIKQLKKDVSFLERLKRGEIRDHREGKAKFVKEKYRVERKGLTTVIEEIKQRILAKAAKITRYEQRIEQYRLNRLFDIDQKKVYNQLNGQTGNSDGHIPNAEESKTFWSKIWSVKKEHNREADWLKVMKREMGKVKQRNILIDENKVNKQSKKMPNWKAPGHDGVQGFWIKKLNKLHSRIAFQLNEMLEGKKDTPTWMTYGRTVLCQKDAAKGNAVDNFRPITCLPIMWKLMTGIISEEMYCFLESEKLLPEEQKGCKRKSRGTKDQLLIDKAILKDCKKRKTNLAMAWIDYKKAYDFVPHSWILECLEICGIAGNIRSFIELSMKGWKLLLTSNGSDLCELDVNRGIFQGDSLSPLIFVLCMIPLSLLLRKVKASYEWGQSKYKINHLLYMDDLKLFGKNENQIDSLVQTVYLFSEDIGMEFGLKKCAVVVLKRGKMITFEGIHLPNEEVMREVDKKGYTYLGILELNEIKEQEMKDKVIAEYKRRLRLVLKSKLNGKNKIKAINTWAVALLRYGAGIIGWKVEELKKIDRTTRKTLTMYGAFHPKSDVDRLYVKRRDGGRGLISIENCVRSEENNLGLYVRDSKEELLKGVKEVGIIEIGNLMGKEEFKRRNQNKAKMKWHDKRMYGQFDREMNDKIDKVLSWKWVVQSDLKVQTEALIFAAQEQALRTNYVKHKIDKTSENPLCRMCLEKGETVQHLICECKKLAQREYKRRHDNIAKLIHWKLCEKYGLDKKEKWYEHCPEGVVENDKVKLLWDMNIQCDNVIEARRPDLVLVEKKTKSCIIIDVAVPGDNRVHDKENEKVEKYQNLKRELIRLWSLRKALVVPVVIGAMGCVSKDFNGWMEKLDIEVGVGVVQKTALLGTARILGKVLEM

SEQ ID NO: 23449 - protein, 1020 aa, Morbakka virulenta
MIDADNKEENETVVEAEMEQSENVESGPDEGTDHILREAYEDIENPIPNVETFDEEAQLIFIQLQKIMIEGRGTSGISFKKVDTKSLNSLTAKVNRVIELIETTNITQTNNLIKAAGVWVADQLGLKAYKRGKKQEPWWKRRVESDIKQLKKDVSFLERLKRGEIRDHREGKAKFVKEKYRVERKGLTTVIEEIKQRILAKAAKITRYEQRIEQYRLNRLFDIDQKKVYNQLNGQTGNSDGHIPNAEESKTFWSKIWSVKKEHNREADWLKVMKREMGKVKQRNILIDENKVNKQSKKMPNWKAPGHDGVQGFWIKKLNKLHSRIAFQLNEMLEGKKDTPTWMTYGRTVLCQKDAAKGNAVDNFRPITCLPIMWKLMTGIISEEMYCFLESEKLLPEEQKGCKRKSRGTKDQLLIDKAILKDCKKRKTNLAMAWIDYKKAYDFVPHSWILECLEICGIAGNIRSFIELSMKGWKLLLTSNGSDLCELDVNRGIFQGDSLSPLIFVLCMIPLSLLLRKVKASYEWGQSKYKINHLLYMDDLKLFGKNENQIDSLVQTVYLFSEDIGMEFGLKKCAVVVLKRGKMITFEGIHLPNEEVMREVDKKGYTYLGILELNEIKEQEMKDKVIAEYKRRLRLVLKSKLNGKNKIKAINTWAVALLRYGAGIIGWKVEELKKIDRTTRKTLTMYGAFHPKSDVDRLYVKRRDGGRGLISIENCVRSEENNLGLYVRDSKEELLKGVKEVGIIEIGNLMGKEEFKRRNQNKAKMKWHDKRMYGQFDREMNDKIDKVLSWKWVVQSDLKVQTEALIFAAQEQALRTNYVKHKIDKTSENPLCRMCLEKGETVQHLICECKKLAQREYKRRHDNIAKLIHWKLCEKYGLDKKEKWYEHCPEGVVENDKVKLLWDMNIQCDNVIEARRPDLVLVEKKTKSCIIIDVAVPGDNRVHDKENEKVEKYQNLKRELIRLWSLRKALVVPVVIGAMGCVSKDFNGWMEKLDIEIGVGVVQKTALLGTARKLRKVLEM

SEQ ID NO: 23450 - protein, 953 aa, Morbakka virulenta
MIEGRGTSGISFKKVDTKSLNSLTAKVNRVIELIETTNITQTNNLIKAAGVWVADQLGLKAYKRGKKQEPWWKRRVESDIKQLKKDVSFLERLKRGEIRDHREGKAKFVKEKYRVERKGLTTVIEEIKQRILAKAAKITRYEQRIEQYRLNRLFDIDQKKVYNQLNGQTGNSDGHIPNAEESKTFWSKIWSVKKEHNREADWLKVMKREMGKVKQRNILIDENKVNKQSKKMPNWKAPGHDGVQGFWIKKLNKLHSRIAFQLNEMLEGKKDTPTWMTYGRTVLCQKDAAKGNAVDNFRPITCLPIMWKLMTGIISEEMYCFLESEKLLPEEQKGCKRKSRGTKDQLLIDKAILKDCKKRKTNLAMAWIDYKKAYDFVPHSWILECLEICGIAGNIRSFIELSMKGWKLLLTSNGSDLCELDVNRGIFQGDSLSPLIFVLCMIPLSLLLRKVKASYEWGQSKYKINHLLYMDDLKLFGKNENQIDSLVQTVYLFSEDIGMEFGLKKCAVVVLKRGKMITFEGIHLPNEEVMREVDKKGYTYLGILELNEIKEQEMKDKVIAEYKRRLRLVLKSKLNGKNKIKAINTWAVALLRYGAGIIGWKVEELKKIDRTTRKTLTMYGAFHPKSDVDRLYVKRRDGGRGLISIENCVRSEENNLGLYVRDSKEELLKGVKEVGIIEIGNLMGKEEFKRSNQNKAKMKWHDKRMYGQFDREMNDKIDKVLSWKWVVQSDLKVQTEALIFAAQEQALRTNYVKHKIDKTSENPLCRMCLEKGETVQHLICECKKLAQREYKRRHDNIAKLIHWKLCEKYGLDKKGKWYEHCPEGVVENDKVKLLWDMNIQCDNVIEARRPDLVLVEKKTKSCIIIDVAVPGDNRVHDKENEKVEKYQNLKRELIRLWSLRKALVVPVVIGAMGCVSKDFNGWMEKLDIEVGVGVVQKTALLGTARILRKVLEM

SEQ ID NO: 23451 - protein, 1137 aa, Morbakka virulenta
MSAMNNINITNNDVNGTGDYCEGPSSGRGRVEASQVVIQRNPRTNVRTKWSKEVNKVVIECFYRSRPFDGDGKPIRGYRQRLMKEWRERGVFEVTEQRLCDQARAIRTNKWLSDLELESIQRMISSTSDDGNNNMETVQEPQTRNDGLRVADVLSEENNDLGNMSVNFEGLEEEELVIITNLNEIMIQGRNTDGISFKKIDMKTLNRVTRKVNKVIDLIETSNITETNNLIKAAAVWVADELGLKKFKPGKKKDPWWKRRLEGDIKQLRKDISLLERVKKGVLGFQKEAKGKCLMEKYRVKKKGLTTVIEELKQRILAKSAKINRYNQRIDQYRLNRLFKVDQKKVYNELNGNAGGSNDTPNAEESKTFWSNIWSVKKEHNKEAEWLNELKEETAAVEQNNVVITAEKIKNQCRKIPNWKAPGQDGVQGFWIKRFDAMHERIATQLNDMLNGRKTIPPWMTYGRTVLCQKDPAKGNAVDNFRPITCLPIMWKLLTGIIADDMYKFMERENLLPEEQKGCRRKSKGTKDQLLIDKTILRDCKRRKTNLAMAWIDYRKAYDLVPHSWILECLNMLGIADNIRAFIEKSMEKWKLLLTSNGSNLCEVEVNRGIFQGDSLSPLIFVICMIPLSVLLRKLSASYEWGKKEFKLNHLLFMDDLKLFGKNDDQIDSLVNTVYFFSKDIGMEFGLKKCGVIIMKRGKLARFDGIHLPNGEVMRHVDENGYMYLGVLELDQIKEKEMKSKVITEYKRRLRLILKSSLNGRNKIQAINTWAVALLRYGAGIIAWKVDELRKIDRTTRKILTMYGAFHPKGDIDRLYVKRKEGGRGLISIENCVWSEENNLGLYIRESNEMLLKGVRKGGVIQTDNLMEKDEFKRSSHNEIKTKWHEKRMYGQFVREMPEEIDKKLSWQWITRGDIKVQTEATIFAAQEQALRTNYIKNRIDKTSESPLCRMCGERAETVQHIVCECSKMAQREYKRRHDNIAKLIHWMLCGKYGLDRKEKWYEHCPEGVVEDENVKLIWDINIQCDNLIEARRPDIILLEKKTKDAIIIDVAVPGDCRAHEKENEKVEKYQDLKMELKRLWSLRKVKVVPVVVGALGCVSKRFNSWIEMLGLEVNVGIVQKTALLGSARIIRKVMDI

SEQ ID NO: 23452 - protein, 1084 aa, Morbakka virulenta
MECFFRSKAFDENEKPVRGYRQRMMHEWRERGVFDVTEQRLCDQARAIRKNGWLSDLEIENIQRKINLDSEEVNVNTEEVEDIPKGNNRVIGGEESDHMFHEPNENFGDVIPYIETLDEETQLIIAQLNDIVIEGRNTDGIKFKNVNMKSLNVATAKVNRVLDFIETKSITETNNLIKAAGVWVADRLGLRKYKGGKKKDPWWKRRIEGDIKQLIKDINILERVKKKQIGVAREGKAKLVKEKYRVERKGLTTVIEELKQRVLAKAAKVTRYEQRIDQYRINRLFRVDQKKVYHELNGNARKSNGDIPNAEESRTFWSEIWSVGKEHNKDADWLNGLKEEMVNVKQKNIIIDKDMVMKQCRKMPNWKAPGHDGVQGFWIKKLNRVHERIASQLNDILDGTKEIPAWMTYGRTVLCQKEPTKGNAVENFRPITCLPLMWKLLTGVISEEMYCFMESENLLPEEQKGCKRKSRGTKDQLLIDKAILKDCKKRKTNLAMAWIDYRKAYDFVPHSWILECLNMFGIANNIRSFMEKSMKRWKLLLTSNGSELCEVDVKRGIFQGDSLSPLIFVICMIPLSLVLRKVNASYEWSKKEFKLNHLLFMDDLKLFGKSEDQIDSLVQTVFVFSKDIGMEFGLKKCGVIILKRGKLITCDGIHLPTKDIMKEVDENGYTYLGILELDEIKEKEMKLKVVSEYKRRLRLVLKSKLNGKNKIQAINTWAVALLRYGAGIIEWKVDELKKLDRTTRKTLTMYGALHPKSDVDRLYLKRKDGGRGLIGIETCVRLEENNLGLYVRESDKFLLKAVRKMGIIKTVNLVEKEEFKRQSQTKLKSKWHEKRMCGQFDREMPEEVDRELSWYWIAQSDLKIQTEATIFAAQEQALRTNYIKHKIDKTTENLMCRMCGEKGETVQHIICECKKLAQRDYKRRHDNIAKLIHWKLCEKYDLERKEKWYEHCPEGVVENDDMKLIWDINIQCDNVIEARRPDLIVVNKKSKSCIIIDVAVPGDCRVHDKEQEKIEKYQNLKIELKRLWSPKNARVVPIVVGALGCASKNFKRWTDMIKIELDIGIIQKTALLGTARILRKVLEM

SEQ ID NO: 23453 - protein, 1006 aa, Morbakka virulenta
MIDADNKEENETVVEAEVEQSENVESGPDEGTDHILREAYEDIENPIPNVETFDEEAQLIFIQLQKIMIEGRGTSGISFKKVDTKSLNSLTAKVNRVIELIETTNITQTNNLIKAAGVWVADQLGLKAYKRGKKQEPWWKRRVESDIKQLKKDVSFLERLKRGEVRDHREGKAKFVKEKYRVERKGLTTVIEEIKQRILAKAAKITRYEQRIEQYRINRLFDIDQKKVYNQLNGQTGNSDGHIPNAEESKTFWSKIWSVKKEHNREADWLKVMKGEMGKVKQRNILIDENKVNNQCKKMPNWKAPGHDGVQGFWIKKLNKLHSRIAFQLNEMLEGKKDTPTWMTYGRTVLCQKDAAKGNAVDNFRPITCLPIMWKLMTGIISEEMYCFLESEKLLPEEQKGCKRKSRGAKDQLLIDKAILKDCKKRKTNLAMAWIDYKKAYDFVPHSWILECLEICGIAGNIRSFIELSMKGWKLLLTSNGSDLCELDVNRGIFQGDSLSPLIFVLCMIPLSLLLRKVKASYEWGQSKYKINHLLYMDDLKLFGKNENQIDSLVQTVYLFSEDIGMEFGLKKCAVVVLKRGKMITFEGIHLPNEEVMREVDEKGYTYLGILELNEIKEQEMKDKVIAEYKRRLRLVLKSKLNGKNKIKAINTWAVALLRYGAGIIGWKVEELKKIDRTTRKTLTMYGAFHPKSDVDRLYVKRRDGGRGLISIENCVRSEENNLGLYVRDSKEELLKGVKEVGIIEIGNLMGKEEFKRRNQNKAKMKWHDKRMYGQFDREMNDKIDKVLSWKWVVQSDLKVQTEALIFAAQEQALRTNYVKHKIDKTSENPLCRMCLEKGETVQHLICECKKLAQREYKRRHDNIAKQIHWKLCEKHGLDRKGKWYEHCPEGVVENDKVKLLWDMNIQCDNVIEGRRSDLVLVEKKTKSCIIIDVAVPGDNWVHGKENEKVEKYQNLKRELIRLWSLRKALVVPVVIGVVGCVSKYFNGWVEKLDIKVGVGVVQKTA

SEQ ID NO: 23454 - protein, 1137 aa, Morbakka virulenta
MSAMNNINITNNDVNGTGDYCEGPSSGRGRVEASQVVIQRNPRTNVRTKWSKEVNKVVIECFYRSRPFDGDGKPIRGYRQRLMKEWRERGVFEVTEQRLCDQARAIRTNKWLSDLELESIQRMISSTSDDGNNNMETVQEPQTRNDGLRVADVLSEENNDLGNMSVNFEGLEEEELVIITNLNEIMIQGRNTDGISFKKIDMKTLNRVTGKVNKVIDLIETSNITETNNLIKAAAVWVADELGLKKFKPGKKKDPWWKRRLEGDIKQLRKDISLLERVKKGVLGFQKEAKGKCLMEKYRVKKKGLTTVIEELKQRILAKSAKINRYNQRIDQYRLNRLFKVDQKKVYNELNGNAGGSNDTPNAEESKTFWSNIWSVKKEHNKEAEWLNELKEETAAVEQNNVVITAEKIKNQCRKIPNWKAPGQDGVQGFWIKRFDAMHERIATQLNDMLNGRKTIPPWMTYGRTVLCQKDPAKGNAVDNFRPITCLPIMWKLLTGIIADDMYKFMERENLLPEEQKGCRRKSKGTKDQLLIDKTILRDCKRRKTNLAMAWIDYRKAYDLVPHSWILECLNMLGIADNIRAFIEKSMEKWKLLLTSNGSNLCEVEVNRGIFQGDSLSPLIFVICMIPLSVLLRKLSASYEWGKKEFKLNHLLFMDDLKLFGKNDDQIDSLVNTVYFFSKDIGMEFGLKKCGVIIMKRGKLARFDGIHLPNGEVMRHVDENGYMYLGVLELDQIKEKEMKSKVITEYKRRLRLILKSSLNGRNKIQAINTWAVALLRYGAGIIAWKVDELRKIDRTTRKILTMYGAFHPKGDIDRLYVKRKEGGRGLISIENCVWSEENNLGLYIRESNEMLLKGVRKGGVIQTDNLMEKDEFKRSSHNEIKTKWHEKRMYGQFVREMPEEIDKKLSWQWITRGDIKVQTEATIFAAQEQALRTNYIKNRIDKTSESPLCRMCGERAETVQHIVCECSKMAQREYKRRHDNIAKLIHWMLCGKYGLDRKEKWYEHCPEGVVEDENVKLIWDINIQCDNLIEARRPDIILLEKKTKDAIIIDVAVPGDCRAHEKENEKVEKYQDLKMELKRLWSLRKVKVVPVVVGALGCVSKRFNSWMEMLGLEVNVGIVQKTALLGSARVIRKVMDI

SEQ ID NO: 23455 - protein, 1173 aa, Morbakka virulenta
MGRGDSLALAGNPPSDGVTIKTPVVVHLKTQPRLSGMIKQIVKNNGVNGAGASGEGLSPGRCPPVRQRGPGRHPMTVRTKWSKEVNKVVMECFFRSKPFDMDGNPIRGYRQRLMHEWRERGIFHVTEQRLCDQARAIRKNGWLSKLELESIQRMIDADNKEENETVVEAEVEQSENVESGPDEGTDHILREAYEDIENPIPNVETFDEEAQLIFIQLQKIMIEGRGTSGISFKKVDTKSLNSLTAKVNRVIELIETTNITQTNNLIKAAGVWVADQLGLKAYKRGKKQEPWWKRRVESDIKQLKKDVSFLERLKRGEIRDHREGKAKFVKEKYRVERKGLTTVIEEIKQRILAKAAKITRYEQRIEQYRLNRLFDIDQKKVYNQLNGQTGNSDGHIPNAEESKTFWSKIWSVKKEHNREADWLKVMKREMGKVKQRNILIDENKVNKQSKKMPNWKAPGHDGVQGFWIKKLNKLHSRIAFQLNEMLEGKKDTPTWMTYGRTVLCQKDAAKGNAVDNFRPITCLPIMWKLMTGIISEEMYCFLESEKLLPEEQKGCKRKSRGTKDQLLIDKAILKDCKKRKTNLAMAWIDYKKAYDFVPHSWILECLEICGIAGNIRSFIELSMKGWKLLLTSNGSDLCELDVNRGIFQGDSLSPLIFVLCMIPLSLLLRKVKASYEWGQSKYKINHLLYMDDLKLFGKNENQIDSLVQTVYLFSEDIGMEFGLKKCAVVVLKRGKMITFEGIHLPNEEVMREVDKKGYTYLGILELNEIKEQEMKDKVIAEYKRRLRLVLKSKLNGKNKIKAINTWAVALLRYGAGIIGWKVEELKKIDRTTRKTLTMYGAFHPKSDVDRLYVKRRDGGRGLISIENCVRSEENNLGLYVRDSKEELLKGVKEVGIIEIGNLMGKEEFKRRNQNKAKMKWHDKRMYGQFDREMNDKIDKVLSWKWVVQSDLKVQTEALIFAAQEQALRTNYVKHKIDKTSENPLCRMCLEKGETVQHLICECKKLAQREYKRRHDNIAKLIHWKLCEKYGLDKKEKWYEHCPEGVVENDKVKLLWDMNIQCDNVIEARRPDLVLVEKKTKSCIIIDVAVPGDNRVHDKENEKVEKYQNLKRELIRLWSLRKALVVPVVIGAMGCVSKDFNGWMEKLDIEVGVGVVQKTALLGTTRILRKVLDM

SEQ ID NO: 23456 - protein, 1173 aa, Morbakka virulenta
MGRGDTLALAGNPPSDGVTIKTPVVVHLKTQPRLSEIIKQIVKNNGVNGGGASGEALSPGRCSPVRQRGSGRHPTTVRTTWAKEVNKVVMECLFRSKPFDMDGNPIRGYRQRLMHEWRERGIFHATEQRLCDQARAIRKNGWLSKLELESIQRMIDADNKEENETVVEAEVEQSENVESGPDEGTDHILREAYEDIENPIPNVETFDEEAQLIFIQLQKIMIEGRGTSGISFKKVDTKSLNSLTAKVNRVIELIETTNITQTNNLIKAAGVWVADQLGLKAYKRGKKQEPWWKRRVESDIKQLKKDVSFLERLKRGEVRDHREGKAKFVKEKYRVERKGLTTVIEEIKQRILAKAAKITRYEQRIEQYRINRLFDIDQKKVYNQLNGQTGNSDGHIPNAEESKTFWSKIWSVKKEHNREADWLKVMKGEMGKVKQRNILIDENKVNNQCKKMPNWKAPGHDGVQGFWIKKLNKLHSRIAFQLNEMLEGKKDTPTWMTYGRTVLCQKDAAKGNAVDNFRPITCLPIMWKLMTGIISEEMYCFLESEKLLPEEQKGCKRKSRGAKDQLLIDKAILKDCKKRKTNLAMAWIDYKKAYDFVPHSWILECLEICGIAGNIRSFIELSMKGWKLLLTSNGSDLCELDVNRGIFQGDSLSPLIFVLCMIPLSLLLRKVKASYEWGQSKYKINHLLYMDDLKLFGKNENQIDSLVQTVYLFSEDIGMEFGLKKCAVVVLKRGKMITFEGIHLPNEEVMREVDEKGYTYLGILELNEIKEQEMKDKVIAEYKRRLRLVLKSKLNGKNKIKAINTWAVALLRYGAGIIGWKVEELKKIDRTTRKTLTMYGAFHPKSDVDRLYVKRRDGGRGLISIENCVRSEENNLGLYVRDSKEELLKGVKEVGIIEIGNLMGKEEFKRSNQNKAKMKWHDKRMYGQFDREMNDKIDKVLSWKWVVQSDLKVQTEALIFAAQEQALRTNYVKHKIDKTSENPLCRMCLEKGETVQHLICECKKLAQREYKRRHDNIAKLIHWKLCEKYGLDKKGKWYEHCPEGVVENDKVKLLWDMNIQCDNVIEARRPDLVLVEKKTKSCIIIDVAVPGDNRVHDKENEKVEQYQNLMRELIRLWSLKKALVVPVVIGAMGCVSKDFNGWMEKLDIEVGVGVVQKTSLLGTARILRKVLEM

SEQ ID NO: 23457 - protein, 1055 aa, Bradysia odoriphaga
MGNNLETFSAEGDETAPTDHELTEEGDNVAVQSSPNEFVCNICDRCFDTNKGLKIHLSYHDRLSRKVNLENFNRSRRSRQEAFLVDRIDSSQQGWNLPVINENSTDSNLNAASNSNDHENVPSSLICTLCGFTAKSKGGLKCHQRKHKRSDQTNAPNSSDHRALHEIIAFHKRHSRRLNQIPKGARATAADKLSKLIDLCLTNNDLASWSNLFLFSYTSLVVPERDSNTSLTSAVKRNILSNQPRTQLSVPRQNCRVDSSDPLKNFSKRIEAKVADGDVKNAFRLLTSEDCLAPDNEETYNILLTKHPSPSREVNSTSAPVGSEPLSVDERSVLKAIKNFKKGSAAGPDGIKPQFLKDMLSKSCGEAASRLGKSITALMNFMLAGKLCPEICKYMYGAILIALKKKTGGIRPIAIGNTFRRLCARLCCVAVSDRMANYFSPKQVGFSVKGGCEAAVHSARKFISTISSPGTVMLKVDMENAFNTVERDVILSSIKEKLPEIFSFIWQAYSQPSLLLYGSRIINSNVGCQQGDPLGPLCFSLAIHPLVERIKSAFNVFYLDDGTIGDDYKIVLKDFKDFMSNCKNLGLSVNQSKCELFIPHDLHKEEIIATFREVAPDIKIIEQDELSLLGSPLTDLAADSILTSKINTYQLLSDRLKSIHQHTALFLLRNCMAVPMMSYLIRSAPIFQNNLLRNLDNILKSSLEHILNSTLDEENWNQATLPITLGGIGVRKLDSIAIPAYCSSIYSTKELVNQIFDPSTNVNNQQLELAENIWKNLAVVNDIPSEPTHQKSWDIPIATKEFNSLNRNNLVDKARLIAVSEKESGDWLRAVPSPNLGTLLDPESLRIAVALRLGTKIYKAHTCRCGQQADEFGRHGLKCRKSAGRFSRHSALNDLIKRALHTAEIPSMLEPVDISRDDNLKRVDGVTIVPWSRGRQLAWDATCVDPVCASYLRGSASQPCFAANRAAVNKRNDYRTVCNMYHFVAFAVDCLGGWSKEAQTFGYELGRKLSLSTGEPKSFSYFRQRVSIAIQRGNSASVLGTIPSGSSLNEVYYFR

SEQ ID NO: 23458 - protein, 697 aa, Bradysia odoriphaga
MLSKSCGEAASRLGKSITALMNFMLAGKLCPEICKYMYGAILIALKKKTGGILPIAIGNTFRRLCARLCCVAVSDRMANYFSPKQVGFSVKGGCEAAVHSARKFISTISSPGTVMLKVDMENAFNTVERDVILSSIKEKLPEIFSFIWQAYSQPSLLLYGSRIINSNVGCQQGDPLGPLCFSLAIHPLVERIKSAFNVFYLDDGTIGDDYKIVLKDFKDFMSNCKNLGLSVNQSKCELFISHDLHKEEIIATFREVAPDIKIIEQDELSLLGSPLTDLAADSILTSKINTYQLLSDRLKSIHQHTALFLLRNCMAVPMMSYLIRSAPIFQNNLLRNLDNILKSSLEHILNSTLDEENWNQATLPITLGGIGVRKLDSIAIPAYCSSIYSTKELVNQIFDPSTNVNNQQLELAENIWKNLAVVNDIPSEPTHQKSWDIPIATKEFNSLNRNNLVDKARLIAVSEKESGDWLRAVPSPNLGTLLDPESLRIAVALRLGTKIYKAHTCRCGQQADEFGRHGLKCRKSAGRFSRHSALNDLIKRALHTAEIPSMLEPVDISRDDNLKRVDGVTIVPWSRGRQLAWDATCVDPVCASYLRGSASQPCFAANRAAVNKRNDYRTVCNMYHFVAFAVDCLGGWSKEAQTFGFELGRKLSLSTGEPKSFSYFRQRVGIAIQRGNSASVLGTIPSGSSLNEVYYFR

SEQ ID NO: 23459 - protein, 1273 aa, Pterostichus madidus
MVRTRRQDRSESQDSDRERHDAVPADKSDVQEQRDRNTRTMMRTQQPLTPSRKGNQRTQPPSGLAAQKACIAIAPVTRSMRQGGPGEQGPDRNRPKDRPATGNCNVIGRRINRGNNNSSTTSQDCVRVAEVSPQPTAQTTVKRRTKWTQEMNIFIYRCYLIITEMESKKIRYSAELHRRVTEKFPELRQKTIQNILDQRRILFTTTMLPVEVTDTIRNEVSNELGLRTHEEQHQDEIVDIEHETQEKPETASNKNRNYHFERNFILYSGMSPTKRPRLPKLKFNKHSTDTITYVNEIINNKINDQTTMEDLHDLLYIGAATVLTLNKQEINIEQSGLDKEKENNKNKDPQWMKRLKLKINDLRTKIAYLTMLKKDKASKKITKKCQAIIKENLDQENKTGTEVLDKLKQRLMVISSRLKRYTESSNRRYQNSSFTTNQKKFYRNIEQGGETRREEGETPNNESVRDYWSNIWSNKTKHNKKAKWIEDEKKAAKKIQVMHSHTISVEEVSNAVKKLQNWKTPGIDNLQNFWLKKFSSTHEKIADLLTRIIINPDTIPAFFTQGITYLIPKTIPTSDNPSKYRPITCLPTIYKLLTSIITNKIYQHLTSQNILTEEQKGCKRGSKGCKEQLIIDSIIMEDTKKTKKNLYTCYIDYQKAFDSVPHTWLREVLSIYKIDAQIQEFLKTIMEKWTTTLKLKNSVSIDNIKIQSGIFQGDSLSALWFCLALNPLSNLLQRTKIGYSFPETKTTINHLVYMDDIKLISANKRDLDALIRKTDSFSKDIKMKFGLDKCRRHALEKGKWTDIEEYAIKNIDEEGEIAGMEKDETYKYLGFNQATGIKQKESKEAVTEKLIERTKKLLKTELSGANLVNAINTFAIPVVSYTFGILKWTATDLERLNRKIRTLFTKYRAHHPKSSIERFHLPRSEGGRGILDLREQHHNQINNLRKFFFKKQEQSKLHEAVVINDRNYTPLNLRNNAEEETPAGIRREDKIENWRKKVIHGRYPEILQSTNIDKKGSQAWLTKGNLFKETEGFLMSIQDQVVPTLNYRKYIIKDNTVQNDQCRMCHKKPESIDHLVSACETLASRQYTKRHDDVGKIIHQHICMQHKLLVEETPYYKYKPQPVMENNNVKIYWNRSIITDHYTPSNRPDIVYNLKEKKITYLIDIAIPAAKNIDNTQSKKIEKYLDLAQEIKSLWGQQRVEIIPVIIGATCEIPFKLYEGLKTLNIPEKTYLIMQKSVALNTCNIVRKVLNRSTSEDSSLDVAEEVTTTDADE

SEQ ID NO: 23460 - protein, 674 aa, Pammene fasciana
MLAGSVNPDVTEVLYGANLCALEKKDGGIRPIAVGTTYRRLTAKCCCTAVSSKLTGYFQPTQLGFGSRGGCEAAVHALRTFIEQKECEVLVKVDVANAFNSVDRSTLLNQVKEKTPELFNFVWQCYSAPSKLLYKNNSLLSSVGCQQGDPLGPALFSLAIHPVIQTLKSCFNVWYLDDGTLGGKADMVLDDLKILTEKFANIGLQFNFSKFELYFHDEFPQKDLTLSKFVNVAPNIKVVDSSSLYLLGSPVLDESFSDFINQNCQKFTAFSDRLLQINAHMAYTIIKYCLFVPKFTYALRCSNLWMYPELLEKLDILIKNTLSSVININLGYNQWAQASLPIRHGGIGIRKISIVSLPAFLSSIHSTRNLTAKILKDSDDLVIPLSKDAVDFWRLNCPNSDLPTALHSQRQWDEPLCELVRNHLYETSTSPTERARLLACSEWESGSWLRALPSKNLGTLLSNDTFRLSIALRLGAPCVAPHRCQCGASVNSTGLHGLSCSRSAGRIARHASINDILRRAFTTAGAPAILEPTGLATDDGKRPDGMTLVPWELGRPLVWDATCVDTLAPSHLPKTSSKAGAAADAAERLKRRKYAAIDSSCMFVPFGVETLGPWGPGARIIFKQLSKRLKDATGDQRAGAFLAQRIGIAIQRGNSASLLGTLPFGLELEPVFYL

SEQ ID NO: 23461 - protein, 1000 aa, Notocelia uddmanniana
MYIGTLCSPSYILVPFYNLFVFIAVTFSLFCSYIVFRLMGSNADSPTNVAPQSLSLESSVQCPQCSQARFFKGQRGLNIHISRVHHNAAATNTVPPDANLVTNPPQTCQTRSFSQRLSELKNSIPVIKRIPRSARIQVAQKLTEDIKSALNQNTQESWEHLLTFPYRVLHVRELSLKGTSLTSRIKNNCLNPHDVKDLQRSILKQDFSLTRYVESKVGEGNIKGAARLLFSSDAIAPNTADTLAALRSKHPTPAANLSLPDSPDPFSPCLQVCSGEVLKAVSSFPNGSAGGLDGLSPQHLKDLLSHTCGEAGESLLRELTALANLMLSGKVNLGIINVLYGANLCALVKKDGGIRPIAVGSTYRRLAAKCCCSAVSSKITAYFQPNQLGFGSKGGCEAAVHALRSFIGGKECEVLLKVDVKNAFNSVDRGSLLTELKEKAPELFNFIWQCYSTPTNLMFKNNLLFSSVGCQQGDPLGPALFSLAIHPIIKNLNSKFNVWYLDDGTLGGDVDVVLKDLQVLTEKFANIGLELNFSKCEIFFPEEYSQKETALSKFRTIAPNIKVIDTTSLHLLGSPILEESFPEFINEKYIFFSTFSDRLLKINAHMAYTLIKYCLFIPKFTYSLRCSHLWKHPILLDKLDNLIKTTISSVINIHLEDNQWSQATLPIRHGGIGIRKISSISLPAFLSSIHSTQNLIAKILKQNPSNLEIPFLKEALDFWRVTCPNADLPTTPRSQRLWDEPLCVLVRDNIYETSTSTVERARLLACRRWESGAWLQALPSKNLGTLLNNNTFRSAVSLRLGSTCVAPHQCHCGSTVTRTGLHGLSCSRSAGRISRHASINDILRRALASAGTPAILEPTGLARDDGKRPDGMTLVPWKLGRPLVWDATCVDTLAPTHLPGTSSRAGAAADAAEHLKRRKYAAIDPGYMFEPFGVETLGPWGPGAHSIYKELSKRLIDATGDQRAGLYLAQRIGIAVQRGNAASFLGTLPPGSELEPIFYL

SEQ ID NO: 23462 - protein, 1000 aa, Notocelia uddmanniana
MYIGTLCSPSYILVPVYNLFVFIAVTFSLFCSYIVFRLMGSNADSPTNVAPQSLSLESSVQCPQCSQARFFKGQRGLNIHISRVHHNAAATNTVPPDANLVTNPPQTCQTRSFSQRLSELKNSIPVIKRISRSARIQVAQKLTEDIKSALNQNTQESWEHLLTFPYRVLHVRELSLKGTSLTSRIKNNCLNPHDVKDLQRSILKQDFSLTRYVESKVGEGNIKGAARLLFSSDAIAPNTADTLAALRSKHPTPAANLSLPDSPDPSSPCLQVCSGEVLKAVSSFPNGSAGGLDGLSPQHLKDLLSHTCGEAGESLLRELTALANLMLSGKVNLGIINVLYGANLCALVKKDGGIRPIAVGSTYRRLAAKCCCSAVSSKITAYFQPNQLGFGSKGGCEAAVHALRSFIGGKECEVLLKVDVKNAFNSVDRGSLLTELKEKAPELFNFIWQCYSTPTNLMFKNNLLFSSVGCQQGDPLGPALFSLAIHPIIKNLNSKFNVWYLDDGTLGGDVDVVLKDLQVLTEKFANIGLELNFSKCEIFFPEEYSQKETALSKFRTIAPNIKVIDTTSLHLLGSPVLEESFPEFINEKYIFFSTFSDRLLKINAHMAYTLIKYCLFIPKFTYSLRCSHLWKHPILLDKLDNLIKTTISSVINIHLEDNQWSQATLPIRHGGIGIRKISSISLPAFLSSIHSTQNLIAKILKQNPSNLEIPFLKEALDFWRVTCPNADLPTTPRSQRLWDEPLCVLVRDNIYETSTSTVERARLLACRRWESGAWLQALPSKNLGTLLNNNTFRSAVSLRLGSTCVAPHQCHCGSTVTRTGLHGLSCSRSAGRISRHASINDILRRALASAGTPAILEPTGLARDDGKRPDGMTLVPWKLGRPLVWDATCVDTLAPTHLPGTSSRAGPAADAAEHLKRRKYAAIDPGYMFEPFGLETLGPWGPGAHSIYKELSKRLTDATGDQRAGLYLAQRIGIAVQRGNAASLLGTLPPGSELEPIFYL

SEQ ID NO: 23463 - protein, 675 aa, Notocelia uddmanniana
MLSGKVNLGIINVLYGANLCALVKKDGGIRPIAVGSTYRRLAAKCCCSAVSSKITAYFQPNQLGFGSKGGCEAAVHALRSFIGGKECEVLLKVDVKNAFNSVDRGSLLTELKEKAPELFNFIWQCYSTPTNLMFKNNLLFSSVGCQQGDPLGPALFSLAIHPIIKNLNSKFNVWYLDDGTLGGDVDVVLKDLQVLTEKFANIGLELNFSKCEIFFPEEYSQKETALSKFRTIAPNIKVIDTTSLHLLGSPVLEESFPEFINEKYIFFSTFSDRLLKINAHMAYTLIKYCLFFPKFTYSLRCSHLWKHPILLDKLDNLIKTTISSVINIHLEDNQWSQATLPIRHGGIGIRKISSISLPAFLSSIHSTQNLIAKILKQNPSNLEIPFLKEALDFWRVTCPNADLPTTPRSQRLWDEPLCVLVRDNIYETSTSTVERARLLACRRWESGAWLQALPSKNLGTLLNNNTFRSAVSLRLGSTCVAPHQCHCGSTVTRTGLHGLSCSRSAGRISRHASINDILRRALASAGTPAILEPTGLARDDGKRPDGMTLVPWKLGRPLVWDATCVDTLAPTHLPGTSSRAGAAADAAEHLKRRKYAAIDPGYMFEPFGLETLGPWGPGAHSIYKELSKRLTDATGDQRAGLYLAQRIGIAVQRGNAASLLGTLPPGSELEPIFYL

SEQ ID NO: 23464 - protein, 675 aa, Notocelia uddmanniana
MLSGKVNLGIINVLYGANLCALVKKDGGIRPIAIGSTYRRLAAKCCCSAVSSKITAYFQPNQLGFGSKGGCEAAVHALRSFIGGKECEVLLKVDVKNAFNSVDRGSLLTELKEKAPELFNFIWQCYSTPTNLMFKNNLLFSSVGCQQGDPLGPALFSLAIHPIIKNLNSKFNVWYLDDGTLGGDVDVVLKDLQVLTEKFAYIGLELNFSKCEIFFPEEYSQKETALSKFRTIAPNIKVIDTTSLHLLGSPVLEESFPEFINEKYIFFSTFSDRLLKINAHMAYTLIKYCLFIPKFTYSLRCSHLWQHPILLDKLDNLIKTTISSVINIHLEDNHWSQATLPIRHGGIGIRKISSISLPAFLSSIHSTQNLIAKILKQNPSNLEIPFLKEALDFWRVTCPNADLPTTPRSQRLWDEPLCVLVRDNIYETSTSTVERARLLACRRWESGAWLQALPSKNLGTLLNNNTFRSAVSLRLGSTCVAPHQCHCGSTVTRTGLHGLSCSRSAGRISRHASINDILRRALASAGTPAILEPTGLARDDGKRPDGMTLVPWKLGRPLVWDATCVDTLAPTHLPGTSSRAGAAADAAEHLKRRKYAAIDPGYMFEPFGVETLGPWGPGAHSIYKELSKRLIDATGDQRAGLYLAQRIGIAVQRGNAASLLGTLPPGSELEPIFYL

SEQ ID NO: 23465 - protein, 1000 aa, Notocelia uddmanniana
MYIGTLCSLSYILVPFYNLFVLIAVTFSLFCSYIVFRLMGSNADSPTNVAPQSLSLESSVQCPQCSQARFFKGQRGLNIHISRVHHNAAATNTVPPDANLVTNPPQTCQTRSFSQRLSELKNSIPVIKRVPRSARIQVAQKLTEDIKSALNQNTQESWEHLLTFPYRVLHVRELSLMGTSLTSRIKNNCLNPHDVKDLQRSILKQDFSLTRYVESKVGEGNIKGAARLLFSSDAIAPNTADTLAALRSKHPTPAANLSLPDSPDPSSPCLQVCSGEVLKAVSSFPNGSAGGLDGLSSQHLKDLLSHTCGEAGESLLRELTALANLMLSGKVNLGIINVLYGANLCALVKKDGGIRPIAVGSTYRRLAAKCCCSAVSSKITAYFQPNQLGFGSKGGCEAAVHALRSFIGGKECEVLLKVDVKNAFNSVDRGSLLTELKEKAPELFNFIWQCYSKPTNLMFKNNLLFSSVGCQQGDPLGPALFSLAIHPIIKNLNSKFNVWYLDDGTLGGDVDVVLKDLQVLTEKFANIGLELNFSKCEIFFPEEYSQKETALSKFRTIAPNIKVIDTTSLHLLGSPVLEESFPEFINEKYIFFSTFSDRLLKINAHMAYTLIKYCLFIPKFTYSLRCSHLWKHPILLDKLDNLIKTTISSVINIHLEDNQWSQATLPIRHGGIGIRKISSISLPAFLSSIHSTQNLIAKILKQNPSNLEIPFLKEALDFWRVTCPNADLPTTPRSQRLWDEPLCVLVRDNIYETSTSTVERARLLACRRWESGAWLQALPSKNLGTLLNNNTFRSAVSLRLGSTCVAPHQCHCGSTVTRTGLHGLSCSRSAGRISRHASINDILRRALASAGTPAILEPTGLARDDGKRPDGMTLVPWKLGRPLVWDATCVDTLAPTHLPGTSSRAGAAADAAEHLKRRKYAAIDPGYMFEPFGVETLGPWGPGAHSIYKELSKRLIDATGDQRAGLYLAQRIGIAVQRGNAASLLGTLPPGSEFEPIFYL

SEQ ID NO: 23466 - protein, 1000 aa, Notocelia uddmanniana
MYIGTLCSPSYILVPFYNLFVFIAVTFSLFCSYIVFRLMGSNADSPTNVAPQSLSLESSVQCPQCSQARFFKGQRGLNIHISRVHHNAAATNTVPPDANLVTNPPQTCQTRSFSQRLSELKNSIPVIKRIPRSARIQVAQKLTEDIKSALNQNTQESWEHLLTFPYRVLHVRELSLKGTSLTSRIKNNCLNPHDVKDLQRSILKQDFSLTRYVESKVGEGNIKGAARLLFSSDAIAPNTADTLAALRSKHPTPAANLSLPDSPDPFSPCLQLCSGEVLKAVSSFPNGSAGGLDGLSPQHLKDLLSHTCGEAGESLLRELTALANLMLSGKVNLGIINVLYGANLCALVKKDGGIRPIAVGSTYRRLAAKCCCSAVSSKITAYFQPNQLGFGSKGGCEAAVHALRSFIGGKECEVLLKVDVKNAFNSVDRGSLLTELKEKAPELFNFIWQCYSTPTNLMFKNNLLFSSVGCQQGDPLGPALFSLAIHPIIKNLNSKFNVWYLDDGTLGGDVDVVLKDLQVLTEKFANIGLELNFSKCEIFFPEEYSQKETALSKFRTIAPNIKVIDTTSLHLLGSPVLEESFPEFINEKYIFFSTFSDRLLKINAHMAYTLIKYCLFIPKFTYSLRCSHLWKHPILLDKLDNLIKTTISSVINIHLEDNQWSQATLPIRHGGIGIRKISSISLPAFLSSIHSTQNLIAKILKQNPSNLEIPFLKEALDFWRVTCPNADLPTTPRSQRLWDEPLCVLVRDNIYETSTSTVERARLLACRRWESGAWLQALPSKNLGTLLNNNTFRSAVSLRLGSTCVAPHQCHCGSTVTRTGLHGLSCSRSAGRISRHASINDILRRALASAGTPAILEPTGLARDDGKRPDGMTLVPWKLGRPLVWDATCVDTLAPTHLPGTSSRAGAAADAAEHLKRRKYAAIDPGYMFEPFGVETLGPWGPGAHSIYKELSKRLIDATGDQRAGLYLAQRIGIAVQRGNAASLLGTLPPGSELEPIFYL

SEQ ID NO: 23467 - protein, 997 aa, Cydia splendana
MHDFVKSEICSVLIIFLYLCILFIFGLSILLGKFFMSCTANTLNAAPTTSPAEPLTQCPQCPQGCVFKGQRGLNIHIGKIHNNRAVGCTPTDSLPAPSTSSSSHISKPPFSETLGNLKNSIPIIKRIPRSARITVAQKLTADVKAAVSQNSPESWEHLLTFPYRVLHVKADAQKGISLTSRIKQNCSHPHDITNLARPAFKQSLSFRRHVETKIGEGNIKGAARLLFSSDAIAPDTPETLAALLSKHPSPDTNAILPDPPGPSDPCLQVTPDEILAAICSFPNGSAGGLDGLSPQHLKDLLGHCCGEAGEALLIGLTTLVNHMLQGKVNPDVINILYGANLCALTKKDSGIRPIAVGTTYRRLAAKTCCKAVSDTLRNYFQPLQLGFGSKGGCEAAVHSLRAFTTRKEGEVLLKVDVRNAFNSVDRGALLTQVKEKIPELYNFIWQCYSNPSKLLFKNNLLFSSVGCQQGDPLGPALFSLAIQPIIERLNSKFNVWYLDDGTLGGKVDEVVKDLESLTTEFSKIGLTLNFSKCELYFLDNFQKDTAIPKFQNFAPDIKILDSSSLFLLGSPILDEAFPGYINDKHQNFSFFSDRLLQINPHMAYTIIKFCLFVPKFTYALRCSHFWKYPQLLAKLDELIKNTVISIMNIHLDNRQWTQATLPIRHGGIGIRPISSIALPAFLSSVHSIQNLFFKILKINTVNSSDLPFLSEAVDSWKAACPNKDLPEMRHSQHQWDEPLCVLVRDNLYETATSPAERARLLAGTKWESGAWLQALPSSNLGTLLTSSTFRLAVSLRLGAACVAPHRCHCGTDVSKFGTHGLSCTKSAGRMARHASLNDILRRALVTAGAPSVLEPTGLARDDGKRPDGMTLVPWKLGRPLVWDATCVDTLAPSHLPGTSSRAGATADAAEHLKRRKYAAIDTGCMFEPFGVETLGPWGQGAHSIYKELAKRLIDATGDRKAGAYLAQRIGVAVQRGNAASLLGTLPEGTDLGPIFYL

SEQ ID NO: 23468 - protein, 997 aa, Cydia splendana
MHDFVKSEICSVLIIFLYLCILFIFGLSILLGKFFMSCTANTLNAAPTTSPAEPLTQCPQCPQGCVFKGQRGLNIHIGKIHNNRAVGCTPTDSLPAPSTSSSSHISKPPFSETLGNLKNSIPIIKRIPRSARITVAQKLTADVKAAVSQNSPESWEHLLTFPYRVLHVKADAQKGISLTSRIKQNCSNPHDITNLARPAFKQSLSFRRHVETKIGEGNIKGAARLLFSSDAIAPDTPETLAALLSKHPSPDTNAILPDPPGPSDPCLQVTPDEILAAICSFPNGSAGGLDGLSPQHLKDLLGHCCGEAGEALLIGLTTLVNHMLQGKVNPDVINILYGANLCALTKKDGGIRPIAVGTTYRRLAAKTCCKAVSDTLRNYFQPLQLGFGSKGGCEAAVHSLRAFTTRKEGEVLLKVDVRNAFNSVDRGALLTQVKEKIPELYNFIWQCYSNPSKLLFKNNLLFSSVGCQQGDPLGPALFSLAIQPIIERLNSKFNVWYLDDGTLGGKVDEVVKDLESLTTEFSKIGLTLNFSKCELYFLDNFQKDTAIPKFQNFAPDIKILDSSSLFLLGSPILDEAFPGYINDKHQNFSFFSDRLLQINPHMAYTIIKFCLFVPKFTYALRCSHFWKYPQLLAKLDELIKNTVFSIMNIHLDNRQWTQATLPIRHGGIGIRPISSIALPAFLSSVHSIQNLFFKILKINTVNSSDLPFLSEAVDSWKAACPNKDLPEMRHSQHQWDEPLCVLVRDNLYETATSPAERARLLAGTKWESGAWLQALPSSNLGTLLTSSTFRLAVSLRLGAACVAPHRCHCGTDVSKFGTHGLSCTKSAGRMARHASLNDILRRALVTAGAPSVLEPTGLARDDGKRPDGMTLVPWKLGRPLVWDATCVDTLAPSHLPGTSSRAGAAADAAEHLKRRKYAAIDTGCMFEPFGVETLGPWGQGAHSIYKELAKRLIDATGDRKAGAYLAQRIGVAVQRGNAASLLGTLPEGTDLGPIFYL

SEQ ID NO: 23469 - protein, 997 aa, Cydia splendana
MHDFVKSEICSVLIIFLYLCILFIFGLSILLGKFFMSCTANTLNAAPTTSPAEPLTQCPQCPQGCVFKGQRGLNIHIGKIHNNRAVGCTPTDSLPAPSTSSSYHISKPPFSETLGNLKNSIPIIKRIPRSARITVAQKLTADVKAAVSQNSPESWEHLLTFPYRVLHVKADAQKGISLTSRIKQNCSNPHDITNLARPAFKQSLSFRRHVETKIGEGNIKGAARLLFSSDAIAPDTPETLAALLSKHPSPDTNAILPDPPGPSDPCLQVTPDEILAAICSFPNGSAGGLDGLSPQHLKDLLGHCCGEAGEALLIGLTTLVNHMLQGKVNPDVINILYGANLCALTKKDGGIRPIAVGTTYRRLAAKTCCKAVSDTLRNYFQPLQLGFGSKGGCEAAVHSLRAFTTRKEGEVLLKVDVRNAFNSVDRGALLTQVKEKIPELYNFIWQCYSNPSKLLFKNNLLFSSVGCQQGDPLGPALFSLAIQPIIERLNSKFNVWYLDDGTLGGKVDEVVKDLESLTTEFSKIGLTLNFSKCELYFLDIFQKDTAIPKFQNVAPDIKILDSSSLFLLGSPILDEAFPGYINDKHQNFSFFSDRLLQINPHMAYTIIKFCLFVPKFTYALRCSHFWKYPQLLAKLDELIKNTVFSIMNIHLDNRQWTQATLPIRHGGIGIRPISSIALPAFLSSVHSIQNLFFKILKINTVNSSDLPFLSEAVDSWKAACPNKDLPEMRHSQHQWDEPLCVLVRDNLYETATSPAERARLLAGTKWESGAWLQALPSSNLGTLLTSSTFRLAVSLRLGAACVAPHRCHCGTDVSKFGTHGLSCTKSAGRMARHASLNDILRRALVTAGAPSVLEPTGLARDDGKRPDGMTLVPWKLGRPLVWDATCVDTLAPSHLPGTSSRAGAAADAAEHLKRRKYAAIDTGCMFEPFGVETLGPWGQGAHSIYKELAKRLIDATGDRKAGAYLAQRIGVAVQRGNAASLLGTLPEGTDLGPIFYL

SEQ ID NO: 23470 - protein, 997 aa, Cydia splendana
MHDFVKSEICSVLIIFLYLCILFIFGLSILLGKFFMSCTANTLNAAPTTSPAEPLTQCPQCPQGCVFKGQRGLNIHIGKIHNNRAVGCTPTDSLPAPSTSSSSHISKPPFSETLGNLKNSIPIIKRIPRSARITVAQKLTADVKAAVSQNSPESWEHLLTFPYRVLHIKADAQKGISLTSRIKQNCSNPHDITNLARPAFKQSLSFRRHVETKIGEGNIKGAARLLFSSDAIAPDTPETLAALLSKHPSPDTNAILPDPPGPSDPCLQVTPDEILAAICSFPNSSAGGLDGLSPQHLKDLLAHCCGEAGEALLIGLTTLVNHMLQGKVNPDVINILYGANLCALTKKDGGIRPIAVGTTYRRLAAKTCCKAVSDTLRNYFQPLQLGFGSKGGCEAAVHSLRAFTTRKEGEVLLKVDVRNAFNSVDRGALLTQVKEKIPELYNFIWQCYCNPSKLLFKNNLLFSSVGCQQGDPLGPALFSLAIQPIIERLNSKFNVWYLDDGTLGGKVDEVVKDLESLTTEFSKIGLTLNFSKCELYFLDNFQKDTAIPKFQNFAPDIKILDSSSLFLLGSPILDEAFPGYINDKHQNFSFFSDRLLQINPHMAYTIIKFCLFVPKFTYALRCSHFWKYPQLLAKLDELIKNTVFSIMNIHLDNRQWTQATLPIRHGGIGIRPISSIALPAFLSSVHSMQNLFFKILKINTVNSSDLPFLSEAVDSWKAACPNKDLPEMRHSQHQWDEPLCVLVRDNLYETATSPAERARLLAGTKWESGAWLQALPSSNLGTLLTSSTFRLAVSLRLGAACVAPHRCHCGTDVSKFGTHGLSCTKSAGRMARHASLNDILRRALVTAGAPSVLEPTGLARDDGKRPDGMTLVPWKLGRPLVWDATCVDTLAPSHLPGTSSRAGAAADAAEHLKRRKYAAIDTGCMFEPFGVETLGPWGQGAHSIYKELAKRLIDATGDRKAGAYLAQRIGVAVQRGNAASLLGTLPEGTDLGPIFYL

SEQ ID NO: 23471 - protein, 995 aa, Cydia splendana
MHDFVKSEICSVLIIFLYLCILFIFGLSILLGKFFMSCTANTLNAAPTTSPAEPLTQCPQCPQGCVFKGQRGLNIHIGKIHNNRAVGCTPTDSLPAPSTSSSSHISKPPFSETLGNLKNSIPIIKRIPRSARITVAQKLTADVKAAVSQNSPESWEHLLTFPYRVLHVKADAQKGISLTSRIKQNCSHPHDITNLARPAFKQSLSFRRHVETKIGEGNIKGAARLLFSSDAIAPDTPETLAALLSKHPSPDTNAILPDPPGPSDPCLQVTPDEILAAICSFPNGSAGGLDGLSPQHLKDLLGHCCGEAGEALLIGLTTLVNHMLQGKVNPDVINILYGANLCALTKKDGGIRPIAVGTTYRRLAAKTCCKAVSDTLRNYFQPLQLGFGSKGGCEAAVHSLRAFTTRKEGEVLLKVRNAFNSVDRGALLTQVKKKIPELYNFIWQCYNNPSKLLFNNNLLFSSVGCQQGDPLGPALFSLAIQPIIERLNSKFNVWYLDDGTLGGKVDEVVKDLESLTTEFSKIGLTLNFSKCELYFLDNFQKDTAIPKFQNFAPDIKILDSSSLFLLGSPILDEAFPGYINDKHQNFSFFSDRLLQINPHMAYTIIKFCLFVPKFTYALRCSHFWKYPQLLAKLDELIKNTVFSIMNIHLDNRQWTQATLPIRHGGIGIRPISSIALPAFLSSVHSIQNLFFKILKINTVNSSDLPFLSEAVDSWKAACPNKDLPEMRHSQHQWDEPLCVLVRDNLYETATSPAERARLLAGTKWESGAWLQALPSSNLGTLLTSSTFRLAVSLRLGAACVAPHRCHCGTDVSKFGTHGLSCTKSAGRMARHASLNDILRRALVTAGAPSVLEPTGLARDDGKRPDGMTLVPWKLGRPLVWDATCVDTLAPSHLPGTSSRAGAAADAAEHLKRRKYAAIDTGCMFEPFGVETLGPWGQGAHSIYKELAKRLIDATGDRKAGAYLAQRIGVAVQRGNAASLLGTLPEGTDLGPIFYL

SEQ ID NO: 23472 - protein, 963 aa, Pammene fasciana
MSCAQNASNAASTTTPPEPLLQCPFCPQGRVYKGQRGLSIHIGKTHKNRVASCTPPIYSLPVPSASSSSHINKPPLSDILSSLKNSIPIIKRIPRSARIQVAQKLTADIKAAVSQNSPEAWEHVLTFPYRILHVKEDALRDISLTSRIKQNCANPHVITDLSRPAFTQSISFRRHVESKIGEGNIKGAARLLFCSDSIAPDTPDTLASLLNKHPNPNINTILPDPPGPSDPCLQVTPEEVLGAIYSFPNGSAGSFDGLTPQHLKDLVAYTCGEAGEALLKELTALVNHMLHGKINPDITNILYGANLCALTKKDGGIRPIAVGTTYRRLAAKTCCKAISETLKKYFQPLQLGFGSKGGCEAAVHSLRAYVKRKEGEVLLKVDVRNAFNSVDRGALLTQVKDKIPELYHFVWQCYSTPSKLLFKNNLIFSSVGCQQGDPLGPALFSLAIHPIIERLNSKFNVWYLDDGILGGNVDEVIGDMETLTRDFAKIGLSLNFSKCELYFSDDYTQKDTAISKFHCFAPDLKVLDSSTLFLLGSPILDEAFPGYIDDKHQNFSNFSDRLLKINPNMAYTIIKFCLFVPKFTYALRCSHLWKYPPLLEKLDEIIRSTVSSVINIYLDNRQWTQATLPIRHGGIGIRKISSIALPAFLSSVHSIQNLSSKILKLHADNLDLPFLTEAVDTWKAACPNKDLPEVRHSQHQWDEPLCTLVRDNLYETATSPAERARLLAGAKWESGAWLQALPSKNLGTLLTSSTFRLAVSLRLGAACVAPHQCHCGASVTKFGLHGLSCYKSAGRTARHASLNDILRRALVTAGAPSVLEPTGLARDDGKRPDGMTLVPWKLGRPLVWDATCVDTLAPSHLPGTSARAGAAADTTENLKRRKYAAIDTGCMFEPFGVETLGPWGPGAHGIYKDLAKRLIDATGDQKAGAYFVQRIGIAVQRGNAASLLGTLPFGTDLEPIFYL

SEQ ID NO: 23473 - protein, 989 aa, Cydia splendana
MHVFILILVSIILISFYFLCDKFSMSLQPSANNAVPTTSSLESTETQCPLCPEVRFFKGQRGLNIHIGRVHGNPTPRNTPPVNSSVVSDPTSSPLNNYPPISETLSKLKQSIPVIKRIPRGARISVAQKLADDLRATVNQNSKESWENLLTFPYRVLYAKQAAQRGVSLTSRIKQNCSNPHDVSELSRSAFKHNYSLARNVENKIGEGNIKGAAHLLFSSDAIAPDTSDTLNALLSKHPNPDDNLLLPDPPGPTDPCLQVTSDEVFRSICAFPNGSAGGLDGLTPQHLKDLLGHSCGEAGDTLLKDLTVLVNFMLQGKVNTEVTNILYGANLCALIKKDGGIRPIAVGTTYRRLAAKSCCKAVSDKLSTYFQPVQLGFGSRCGCEAAVHALRSFVTKKEGEVVLKVDVRNAFNSVDRAALLTQVKEKTPELYNFVWQCYGTNSKLLFKNNLLYSSVGCQQGDPLGPALFSLAIHPILESLNSKFNAWYLDDGTLGGTVDEVFEDMRILIEKFSEIGLCLNFSKCEVFFSDRCMHKDAALSKFNTLAPGIKVLDESSLYLLGSPILDEAFPNYINNQLQNFKNYSDRLLTINPHMAYTIIKFCLFVPKFTYVLRCSHFWKYPNLLEILDQEIKFTVSSIFNITFDNSQWSQASLPIRHGGIGIRQTSAVALPAFLSSAHNIEKLFRKILKTDPLINLDVPFLPEAIDSWKAACPNTDLPITRHSQHQWDEPLCLLVRDNLYETSTSTTERARLLAATRWESGAWLQALPSKNLGTLLSTNTFRISLCLRLGVACVAPHLCQCGANVTRFGFHGLSCARSVGRLSRHASLNDILRRALVTAGVPAVLEPSGLARDDGKRPDGMTLVPWKIGRPLVWDATCVDTLAPSHLSGTSNRAGAAANAAEHLKRRKYAAIDSGCMFEPFGVETLGPWGPGAHGIFSELAKRLVEATGDKRAGSYLAQRIGIAVQRGNAASLLGTLPTGTELEPVFYL

SEQ ID NO: 23474 - protein, 989 aa, Cydia splendana
MHVFILILVSIILISFYFLCDKFSMSLQPSANNVVPTTSSLESTETQCPLCPEVRFFKGQRGLNIHIGRVHGNPTPRNTPPVNSSVVSDPTSSPLNNYPPISETLSKLKQSIPVIKRIPRGARISVAQKLADDLRATVNRNSKESWENLLTFPYRVLYAKQAAQRGVSLTSRIKQNCSNPHDVSELSRSAFKHNYSLARNVENKIGEGNIKGAAHLLFSSDAIAPDTSDTLNALLSKHPNPDDNLLLPDPPGPTDPCLQVTSDEVFRSICAFPNGSAGGLDGLTPQHLKDLLGHSCGEAGDTLLKDLTVLVNFMLQGKVNTEVTNILYGANLCALIKKDGGIRPIAVGTTYRRLAAKSCCKAVSDKLSAYFQPVQLGFGSRCGCEAAVHALRSFVTKKEGEVVLKVDVRNAFNSVDRGALLTQVKEKTPELYNFVWQCYGTNSKLLFKNNLLYSSVGCQQGDPLGPALFSLAIHPILESLNSKFNAWYLDDGTLGGTVDEVFEDMRILIEKFSEIGLCLNFSKCEVFFSDRCMHKDAALSKFNTLAPGIKVLDESSLYLLGSPILDEAFPNYINNQLQNFKNYSDRLLTINPHMAYTIIKFCLFVPKFTYVLRCSHFWKYPNLLEILDQEIKFTISSIFNITFDNSQWSQASLPIRHGGIGIRQTSAVALPAFLSSAHNIVKLFRKILKTDPLINLDVPFLPEAIDSWKAACPNTDLPITRHSQHQWDEPLCLLVRDNLYETSTSTTERARLLAATRWESGAWLQALPSKNLGTLLSTNTFRISLCLRLGVACVAPHLCQCGANVTRFGFHGLSCARSVGRLSRHASLNDILRRALVTAGVPAVLEPSGLARDDGKRPDGMTLVPWKIGRPLVWDATCVDTLAPSHLSGTSNRAGAAANAAEHLKRRKYAAIDSGCMFEPFGVETLGPWGPGAHGIFSELAKRLVEATGDKRAGSYLAQRIGIAVQRGNAASLLGTLPTGTELEPVFYL

SEQ ID NO: 23475 - protein, 989 aa, Cydia splendana
MHVFILILVSIILISFYFLCDKFSMSLQPSANNAVPTTSSLESTETQCPLCPEVRFFKGQRGLNIHIGRVHGNPTPRNTPPVNSSVVSDPTSSPLNNYPPILETLSKLKQSIPVIKRIPRGARISVAQKLADDLRATVNQNSKESWENLLTFPYRVLYAKQAAQRGVSLTSRIKQNCSNPHDVSELSRSAFKHNYSLARNVENKIGEGNIKGAAHLLFSSDAIAPDTSDTLNALLSKHPNPDDNLLLPDPPGPTDPCLQVTSDEVFRSICAFPNGSAGGLDGLTPQHLKDLLGHSCGEAGDTLLKDLTVLVNFMLQGKVNTEVTNILYGANLCALIKKDGGIRPIAVGTTYRRLAAKSCCKAVSDKLSTYFQPVQLGFGSRCGCEAAVHALRSFVTKKEGEVVLKVDVRNAFNSVDRGALLTQVKEKTPELYNFVWQCYGTNSKLLFKNNLLYSSVGCQQGDPLGPALFSLAIHPILESLNSKFNAWYLDDGTLGGTVDEVFEDMRILIEKFSEIGLCLNFSKCEVFFSDRCMHKDAALSKFNTLAPGIKVLDESSLYLLGSPILDEAFPNYINNQLQNFKNYSDRLLTINPHMAYTIIKFCLFVPKFTYVLRCSHFWKYPNLLEILDQEIKFTVSSIFNITFDNSQWSQASLPIRHGGIGIRQTYAVALPAFLSSAHNIEKLFRKILKTDPLINLDVPFLPEAIDSWKAACPNTDLPITRQSQHQWDEPLCLLVRDNLYETSTSTTERARLLAATRWESGAWLQALPSKNLGTLLSTNTFRISLCLRLGVACVAPHLCQCGANVTRFGFHGLSCARSVGRLSRHASLNDILRRALVTAGVPAVLEPSGLARDDGKRPDGMTLVPWKIGRPLVWDATCVDTLAPSHLSGTSNRAGAAANAAEHLKRRKYAAIDSGCMFEPFGVETLGPWGPGAHGIFSELAKRLVEATGDKRAGSYLAQRIGIAVQRGNAASLLGTLPTGTELEPVFYL

SEQ ID NO: 23476 - protein, 951 aa, Pammene fasciana
MSHVRNNLNAAPTTTPLEPIVQCPHCPQGRGFKGQRGLSIHIGKFHKNRLAQSTPPINPSPVPTTPNPSNINTPSFSEALSTLKHSIPIVKRIPRSARIPVAQKLTADVKAAVIQNTLEAWETLLTFPYRVLHVKAEVQRDISLTARIKQNCCNPHDINNLTRPAFSQSFSFTRHVETKIGEGNIKGAARLLFSSDAIAPDTPDTLASLLSKHPNSNNNAILPDPPGPSDPCLQATPEEVFGAICSFPNGSAGGLDGLSPQHLKDLLGHSCGEAGETLLKELTSLINHMLLGKVNPDVTNILYGANLCALAKKDGGIRPIAVGTTYRRLAAKTCCKAVSDTLKNYFQPVQLGFGSKGGCEAAIHSLRAFVKRKDGEVLLKVDVRNAFNSVDRGALLTQVKEKVPELFKFIWQCYSSPSKLLFKNNPLLSSVGCQQGDPLGPALFGLAIQPIIERLNSKFNVWYLDDGTLGGNVEEVVGDLETLEVTEFSKIGLSLNFSKCEIYFSDNYTQRDTALAKFHSFAPDIKVLDSSTLYLLGSPILDEAFPGYINDKHQNFSYFSDRLLQINPHMAYTIIKFCLFIPKFTYNLRCSHLWKHPNLLAKLDEIINTVCSVFNIYLDNRQWTQATLPIRHGGIGTRQIASIALPAFLSLGHSIQNLFSKILKLNPIISDIPFLSEAVESWKAACPSKNLPEMRHSQHQWDEPLCALVRDNLYETATSPAERARLLAGTKWESGSWLQALPSRNLGTLLTSHTFRFAVSLRLGAACVAPHQCHCGASVTKFGLHGLSCSRSAGRMSRHASLNDILRRALVTAGAPSVLEPTGLARDDGKRPDGMTLVPWKLGRPLVWDATCVDTFAPSHLPGTSARAAAAADAAEHLKRRKYVDIDSGYMFEPFGVETLGPWGPGAHKIYKELAKRLINATGDQRRVVLIWSPFFICKYILGFSISLVYM

SEQ ID NO: 23477 - protein, 1040 aa, Callosobruchus maculatus
MNDLATSEDNTPNNLKDTEHIDNDNGRVIEGVDQDCTLYNKLNHELETNLVKYIDTDPNSRPLLPKIHPNKYVFQLLKIINQILQTKTIASVEDIQLHTYCSAMTIISHLKIPLRKREGGDRERPSQETPAWKKRIENKINQFRSDLSKIHIWKMRRNETKQKLRDRVYNIFRNNKIRLGDSNFEERLDLHIDTLKQKIAAYGKRLRRYNTSNKRKVDNSKFTSNQKQFYNSMTEEQIEGKPPTLQEIDNFWRTLWSTPAQYNTEATWIKDEADKYNIEMSTPVVTTKDIESITQKLQNWKAAGPDGVHNFWWKYLTALHPSLADIVTKLIDEPNSCPTFLTQAVTYLKPKNKNTQDPKNYRPITCLNTIYKIVSSVINEKITNHVTQHNIMVEEQKGCRRNAKGCKEQLTIDAVITGQAKKAKRNLSLAWIDYQKAYDAVPHPWLQKVLEIYKIHPKVITLLKTLMLSWRTQIILRMNQCTIKTDHIPINRGIFQGDTLSPLWFCMALNPLSNLLKRTNAGFKITSKKETLYTINHLLYIDDLKLYASDKKELKTLLNITAQFSTDIRMNFGMEKCACLNIIRGEIQESESISLMLSQVNFPSIDPQDTYKYLGFSQLLTKNHKELKQQVEAKFKRRLHRILRTELTAKNKIKAINTWSIPALTYSFGILKWSQTDLDALNRLVRTTLSKYRMHHPKAAMERLYLPRKEGGRGLLDIRNLCNKQVAALKRYFSEKAQESPLHNAILKSDLSYTPLNLSQPDVIPAIITSKDRVAAWRSKALHGRFPHSLDEADKEASLRWLRDGYLFGETEGFIQAIQDQVIATNNYKKYIEKINVVDKCRRCHRASETIDHLISGCPNLANTEYTHRHNLTANILHQALARKHNLLVEEEEVPYYHYKARPVIENETFKLYYDLPIHTDKTITANKPDIVVHNIRDKTAFFIDITHPNDHNMNKADEEKVKKYIPLSIEYKEIHKLKSVMIVPIVISATGLIHKNLAQSIMKLQLEPNTLISKMQKNVILETCRIVRTVLNMPNQEME

SEQ ID NO: 23478 - protein, 1278 aa, Rotaria macrura
MSNFGGTGNVRELRSVRLNLQNAVARQTSSASRDRAVLPAVSAGASSGEGQDPTAGVHAAHSHTHQFAQSSSEQDGPGIGAPASQVRASLWKDSEIEALKQLVSIHTDPKGKISWVKIEEAWINQGLSKRSKSGLSCKWADIKKSASSQARDDSNRTQDSESNSVNTVTELVLNAVTTGDTTHQPSIGSTSKQDVNPTVAKEEKEKDKVSVVENFDAVIHSTFKIKLKKARRIGCQMTLRKPPIRVSGNHIKPIVCVVDKLIKDEMEKRVGEPSWEQLSILVYAGAMTVSEIGNRKGTDRGNRSKEWFRLSYGEVDSLRRTIGKATAELNRRKQIAEVAPTKKQQANIRMLLKKYKVKTSADIICLVEKLKCRLNLLQSRIQLRKADEGRARVRRMPARLAMRSLEVKEEKEATDVNQIRRFWKSIVGVKKSFNSKNEQLLAWERSMSEISGDDNFKNDLTLELWQKVVQKVKPWKAPGPDGLQGYWWKVFDSASAVLYQLIYQHITSGDTLPQRWISDGRVVLIYKSGPRSDPANFRPIACLNTCYKLLTGYVAAYLTKFVRERNILPGEQVALRSGMWGCTHAHILDQTLIADAQYQKQRPISVAWIDYAKAFDSLPHSYLKWLLYAVRVPDPLIKFIKSVMKQWRVRYEVKSPRGKIERSSFLRIRSGVLQGDSFSPLLFCLSMAPISHAINSTNRGYVTASGKMKKLQTSLSHLFYMDDLKLYADSSMSLSEQIKVVSSVSNDISMKLNVKKCAVAHFIPTRLRNEESNVEANSTTERNISFPMLDGEAIYKYLGMEQKIGLKESDAWDRVEDKCYQIVQKLWNSDLTCRQKVNFYNSTVIPAFSYVMSNIIKGSGKYSSALERMEKVDKKFRKTLVELKARYRSSCVPRLYLPTGQGGYGLRSVKDAVEETTIYSWAYLCTKAQLRSSLNLFVNMVNRGKRCVVSDADSVLKKYSIKYELDQDRSIVIINEVEFDDAKTLARHVVELMRTDNGTSRYKAWEELPLAGRVLRSASNIDLINSFIWLRQGKLSSIAVRNVLAAQEGCLLTKAHPSHTKTSNDTSCRACGFPLETIEHIIAHCPKWLPNLYIDRHDSVARNIHYKLCEKFSLTSRHYSQKVDPVLENESIKLYWNQPVQTKAIIRHNKPDIIVFDKIRKTALVIEVAVSWFTGIEKQVDIKTNRYCVNGNHPEELKTPYPRGDNLLRELQTEGWKTTFLPIVIGATGEVLSNLSSEVQVVLGFSREATEQCIERMQRSAVLGTSRIIKNHLAGNSR

SEQ ID NO: 23479 - protein, 1037 aa, Rotaria sp.
MTLRKTPLRVSGKHIKLIICEVNRLIKSELDLVVGGISWNQLSNLVYAGAMTVSKIGNRKCLEKQQRSREWFKITYSECENLRRVIGKATSELNRRVRSAEVALTSKQLSIIKMLKKKYKVESRAEITSLVERLKCRLQLLQSRIALRKADEERVRVRQMPAKMLFRGTCTDSEPVDIHQIRKFWKEIVGVKKSFNSKSPRLVAWEQSMSNIQGETDLKGRLNPELWQKVVQKIKPWKAHGPDKLQGYWWKVFDSANATLYDLTLHHILSGEPLPQRWITDGHIVLIHKSGSRSDPANFRPIACLNICYKLVTGFIAAYLDQYVRGRDILNNEQIALRRGVWACSHALTLDQTLIADAQDQKQRPISVAWIDYAKAFDSLPHSYIKWLLKVMQVPDLLRKFLKSVMNNWRVRYEARSPRGKIEHSNYLRIRSGVLQGDSFSPLLFCLAMAPISHAINSVKGGYNTASGKFKKVQISLSHLFYMDDLKLYANSPESLMEQIKVVASISEDINMKLNVKKCAVTHFIPKRMRSEQADVDDDTSTDRSISFPMLDGEAVYKYLGMEQKLGLKESEAWDRANDRCYDKARRLWDSDLTFRQKVNSYNTTIIPVFKYIASCIIKGSGTYASVLKRGEDLDKKYRKLLVELKARQKSSCVARLYLPAEMGGYGLKSIKDAIEESTIYLWAYLCTKAELKGSLNLFLGMVNRGKRCVVSDAGSIIKAYDIDYKLEEVRSTVIIDGASFNDARTLARHVVGLMRTVNNNGRYKTWKELELAGRVLRSNSSMDMIESFTWLKQGKLSSVAVRNALAAQEGCLITRTHPSQANSNDKSCRACGCHLETIEHVLSSCSKWLSNLYTDRHDSVARNIHYRICQKYGFTPAHYSQKVESVLENERIKLYWNQPVQTKTIIRHNKPDLIIFDKPGKTALIIEVAISWFTGIERQVQIKTNRYCVNGNWEEVTKLPYPVGDNLLRELQTAGWKVSFLPVVLGTCGEVLSNLKGDLMEKIGLTQVATADCLERMQRSAVLGTSRIIKNHLAVR

SEQ ID NO: 23480 - protein, 1207 aa, Rotaria sp.
MAERSSAESRQPIATRSRRAVAPAVIVDTSSQDQGPSAGIHVAPTPTRRFENSTPHGGKGPSGDKPAGSGKASVWSEEEIEKLKRLVPSNVTPSGTISWNDVEKAWIDLNLPKRTQAGLSSKWRDIKTKSASVSVSDSSLIQNKTKLHLKVVTIPSDTTVDVNHNAGSNNNDVNPTVVKPDQCVPADLADDVVKSTFRKEYKKAQKIGCRMTLRKTPLRVSGKHIKPIICEVNRLIKSELDLVVGGISWNQLSNLVYAGAMTVSKIGNRKCLEKQQRSREWFKITYSECENLRRVIGKATSELNRRVRSAEVALTNKQFHNIRMLKKKYKVESRAEITSLVERLKCRLQLLQSRIALRKADEERVRVRQMPAKMLFRGTCTDSEPVDIHQIRKFWKEIVGVKKSFNSKSPRLVAWEQSMSNIQGETDLKGRLNPELWQKVVQKIKPWKAHGPDKLQGYWWKVFDSANATLYDLTLHHILSGEPLPQRWITDGRIVLIHKSGSRSDPANFRPIACLNICYKLVTGFIAAYLDQYVRGRDILNNEQIALRRGVWACSHALTLDQTLIADAQDQKQRPISVAWIDYAKAFDSLPHSYIKWLLKVMQVPDLLRKFLKSVMNNWRVRYEARSPRGKIEHSNYLRIRSGVLQGDSFSPLLFCLAMAPISHAINSVKGGYTTASGKFKKVQISLSHLFYMDDLKLYANSPESLMEQIKVVASISEDINMKLNVKKCAVTHFIPKRMRSEQTDVDDDTSTDRSISFPMLDGEAVYKYLGMEQKLGLKESEAWDRANDRCYDKARRLWDSDLTFRQKVNSYNTTIIPVFKYIASCIIKGSGTYASVLKRGEDLDKKYRKLLVELKARQKSSCVARLYLPAEMGGYGLKSIKDAIEESTIYLWAYLCTKAELKGSLNLFLGMVNRGKRCVVSDAGSIIKAYDIDYKLEEVRSTVIIDGASFNDARTLARHVVGLMRTVNNNGRYKTWKELELAGRVLRSNSSMDMIESFTWLKQGKLSSVAVRNALAAQEGCLITRTHPSQANSNDKSCRACGCHLETIEHVLSSCSKWLSNLYIDRHDSVARNIHYRICQKYGFTPAHYSQKVESVLENERIKLYWNQPVQTKTIIRHNKPDLIIFDKPGKTALIIEVAISWFTGIERQVQIKTNRYCVNGNWEEVTKLPYPVGDNLLRELQTAGWKVSFLPVVLGTCGEVLSNLK

SEQ ID NO: 23481 - protein, 1152 aa, Rotaria sp.
MISWNDVEKAWIDLNLPKRTKAGLSGKWRDIKTKSASVSVSDSSLKQKKTKLHLKVVTVPSDTTVDVNHNAGSNSNDVNPTVIKPDQCVPADLADDVVKSTFRKEYKKAQKIGCRMTLRKTPLRVSGKHIKPIICEVNRLIKSELDLVVGGISWNQLSNLVYAGAMTVSKVGNRKCLEKQQQSREWFKITYSECENLRRVIGKATSELNRRVRSAEVALTNKQFHNIRMLKKKYKVESRAEITSLVERLKCRLQLLQSRIALRKADEERIRVRQMPTKMLFQGTCTDSEPVDIHQIRKFWKEIVGVKKSFNSKSPRLVAWEQSMSNIQGETDLKGQLNPELWQKVVQKIKPWKAHGPDKLQGYWWKVFDSANATLYDLTLHHILSGEPLPQRWITDGRIVLIHKSGSRSEPANFRPIACLNICYKLVTGFIAAYLDQYVRGRDILNNEQIALRRGVWACSHALTLDQTLIADAQDQKQRPISVAWIDYAKAFDSLPHSYIKWLLKVMQVPDLLRKFLKSVMNNWRVRYEARSPRGKIEHSNYLRIRSGVLQGDSFSPLLFCLAMAPISHAINSVKGGYTTASGKFKKVQISLSHLFYMDDLKLYANSPESLMEQIKVVASISEDINMKLNVKKCAVTHFIPKRMRSEQTDVDDDTSTDRSISFPMLDGEAVYKYLGMEQKLGLKESEAWDRANDRCYDKARRLWDSDLTFRQKVNSYNTTIIPVFKYIASCIIKGSGTYASVLKRGEDLDKKYRKLLVELKARQKSSCVARLYLPAEMGGYGLKSIKDAIEESTIYLWAYLCTKAELKGSLNLFLGMVNRGKRCVVSDAGSILKAYDIDYKLEEVRSTVIIDGASFNDARTLARHVVGLMRTVNNNGRYKTWKELELAGRVLRSNSSMDMIESFTWLKQGKLSSIAVRNALAAQEGCLITRTHPSQANSNDKSCRACGCHLETIEHVLSSCSKWLSNLYVDRHDSVARNIHYRICQKYGLTPPHYSQKVESVLENERIKLYWNQPVQTKTIIRHNKPDLIIFDKPGKTALIIEVAISWFTGIERQVQIKTNRYCVNGNWEEVTKLPYPIGDNLLRELQTAGWKVSFLPVVLGTCGEVLSNLKGDLMEKIGLNQVATGDCLERMQRSAILGTSRIIKNHLAVR

SEQ ID NO: 23482 - protein, 1037 aa, Rotaria sp.
MTLRKTPLRVSGKHIKPIICEVNRLIKSELDLVVGGISWNQLSNLVYAGAMTVSKIGNRKCLEKQQRSREWFKITYSECENLRRVIGKATSELNRRVRSAEVALTSKQLSNIKMLKKKYKVESRAEITSLVERLKCRLQLLQSRIALRKADEERVRVRQMPAKMLFRGTCTDSEPVDIHQIRKFWKEIVGVKKSFNSKSPRLVAWEQSMSNIQGETDLKGRLNPELWQKVVQKIKPWKAHGPDKLQGYWWKVFDSANATLYDLTLHHILSGEPLPQRWITDGRIVLIHKSGSRSDPANFRPIACLNICYKLVTGFIAAYLDQYVRGRDILNNEQIALRRGVWACSHALTLDQTLIADAQDQKQRPISVAWIDYAKAFDSLPHSYIKWLLKVMQVPDLLRKFLKSVMNNWRVRYEARSPRGKIEHSNYLRIRSGVLQGDSFSPLLFCLAMAPISHAINSVKGGYTTASGKFKKVQISLSHLFYMDDLKLYANSPESLMEQIKVVASISEDINMKLNVKKCAVTHFIPKRMRSEQTDVDDDTSTDRSISFPMLDGEAVYKYLGMEQKLGLKESEAWDRANDRCYDKARRLWDSDLTFRQKVNSYNTTIIPVFKYIASCIIKGSGTYASVLKRGEDLDKKYRKLLVELKARQKSSCVARLYLPAEMGGYGLKSIKDAIEESTIYLWAYLCTKAELKGSLNLFLGMVNRGKRCVVSDAGSIIKAYDIDYKLEEVRSTVIIDGASFNDARTLARHVVGLMRTVNNNGRYKTWKELELAGRVLRSNSSMDMIESFTWLKQGKLSSVAVRNALAAQEGCLITRTHPSQANSNDKSCRACGCHLETIEHVLSSCSKWLSNLYIDRHDSVARNIHYRICQKYGFTPAHYSQKVESVLENERIKLYWNQPVQTKTIIRHNKPDLIIFDKPGKTALIIEVAISWFTGIERQVQIKTNRYCVNGNWEEVTKLPYPVGDNLLRELQTAGWKVSFLPVVLGTCGEVLSNLKGDLMEKIGLTQVATADCLERMQRSAVLGTSRIIKNHLAVR

SEQ ID NO: 23483 - protein, 1037 aa, Rotaria sp.
MTLRKTPLRVSGKHIKPIICEVNRLIKSELDLVVGGISWNQLSNLVYAGAMTVSKIGNRKCLEKQQRSREWFKITYSECENLRRVIGKATSELNRRVRSAEVALTSKQLSIIKMLKKKYKVESRAEITSLVERLKCRLQLLQSRIALRKADEERVRVRQMPAKMLFRGTCTDSEPVDIHQIRKFWKEIVGVKKSFNSKSPRLVAWEQSMSNIQGETDLKGRLNPELWQKVVQKIKPWKAHGPDKLQGYWWKVFDSANATLYDLTLHHILSGEPLPQRWITDGRIVLIHKSGSRSDPANFRPIACLNICYKLVTGFIAAYLDQYVRGRDILNNEQIALRRGVWACSHALTLDQTLIADAQDQKQRPISVAWIDYAKAFDSLPHSYIKWLLKVMQVPDLLRKFLKSVMNNWRVRYEARSPRGKIEHSNYLRIRSGVLQGHSFSPLLFCLAMAPISHAINSVKGGYTTASGKFKKVQISLSHLFYMDDLKLYANSPESLMEQIKVVASISEDINMKLNVKKCAVTHFIPKRMRSEQTDVDDDTSTDRSISFPMLDGEAVYRYLGMEQKLGLKESEAWDRANDRCYDKARRLWDSDLTFRQKVNSYNTTIIPVFKYIASCIIKGSGTYASALKRGEDLDKKYRKLLVELKARQKSSCVARLYLPAEMGGYGLKSIKDAIEESTIYLWAYLCTKAELKGSLNLFLGMVNRGKRCVVSDAGSIIKAYDIDYKLEEVRSTVIIDGASFNDARTLARHVVGLMRTVNNNGRYKTWKELELAGRVLRSNSSMDMIESFTWLKQGKLSSVAVRNALAAQEGCLITRTHPSQANSNDKSCRACGCHLETIEHVLSSCSKWLSNLYIDRHDSVARNIHYRICQKYGFTPAHYSQKVESVLENERIKLYWNQPVQTKTIIRHNKPDLIIFDKPGKTALIIEVAISWFTGIERQVQIKTNRYCVNGNWEEVTKLPYPVGDNLLRELQTAGWKVSFLPVVLGTCGEVLSNLKGDLMEKIGLTQVATADCLERMQRSAVLGTSRIIKNHLAVR

SEQ ID NO: 23484 - protein, 1247 aa, Rotaria sp.
MAERSSAESRQPIATRSRRAVAPAVIVDTSSQDQGPSAGIHVAPTPTRRFENSTPHGGKGPSGDKPAGSGKASVWSEEEIEKLKRLVPSNVTPSGTISWNDVEKAWIDLNLPKRTKAGLSSKWRDIKTKSASVSVSDSSLIQNKTKLHLKVVTIPSDTTVDVNHNAGSNNNDVNPTVVKPDQCVPADLADDVVKSTFRKEYKKAQKIGCRMTLRKTPLRVSGKHIKPITCEVNRLIKSELDLVVGGISWNQLSNLVYAGAMTVSKIGNRKCLEKQQRSREWFKITYSECENLRRVIGKATSELNRRVRSAEVALTNKQFHNIRMLKKKYKVESRAEITSLVERLKCRLQLLQSRIALRKADEERVRVRQMPAKMLFRGTCTDSEPVDIHQIRKFWKEIVGVKKSFNSKSPRLVAWEQSMSNIQGETDLKGRLNPELWQKVVQKIKPWKAHGPDKLQGYWWKVFDSANATLYDLTLHHILSGEPLPQRWITDGRIVLIHKSGSRSDPANFRPIACLNICYKLVTGFIAAYLDQYVRGRDILNNEQIALRRGVWACSHALTLDQTLIADAQDQKQRPISVAWIDYAKAFDSLPHSYIKWLLKVMQVPDLLRKFLKSVMNNWRVRYEARSPRGKIEHSNYLRIRSGVLQGDSFSPLLFCLAMAPISHAINSVKGGYTTASGKFKKVQISLSHLFYMDDLKLYANSPESLMEQIKVVASISEDINMKLNVKKCAVTHFIPKRMRSEQTDVDDDTSTDRSISFPMLDGEAVYKYLGMEQKLGLKESEAWDRANDRCYDKARRLWDSDLTFRQKVNSYNTTIIPVFKYIASCIIKGSGTYASVLKRGEDLDKKYRKLLVELKARQKSSCVARLYLPAEMGGYGLKSIKDAIEESTIYLWAYLCTKAELKGSLNLFLGMVNRGKRCVVSDAGSIIKAYDIDYKLEEVRSTVIIDGASFNDARTLARHVVGLMRTVNNNGRYKTWKELELAGRVLRSNSSMDMIESFTWLKQGKLSSVAVRNALAAQEGCLIMRTHPSQANSNDKSCRACGCHLETIEHVLSSCSKWLSNLYIDRHDSVARNIHYRICQKYGFTPAHYSQKVESVLENERIKLYWNQPVQTKTIIRHNKPDLIIFDKPGKTALIIEVAISWFTGIERQVQIKTNRYCVNGNWEEVTKLPYPVGDNLLRELQTAGWKVSFLPVVLGTCGEVLSNLKGDLMEKIGLTQVATADCLERMQRSAVLGTSRIIKNHLAVR

SEQ ID NO: 23485 - protein, 1247 aa, Rotaria sp.
MAERSSAESRQPIATRSRRAVAPAVIVDTSSQDQGPSAGIHVAPTPTRRFENSTPQGEKGPSGDKPAGSGKASVWSEEEIEKLKRLVPSNVTPSGTISWNDVEKAWIDLNLPKRTKAGLSSKWRDIKTKSASVSVSDSSLTQKKTKLHLKVVTIPSDTTVDVNHNAGSNNNDVNPTVVKPDQCVPADLADDVVNSTFRKEYKKAQKIGCRMTLRKTPLRVSGKHIKPIICEVNRLIKSELDLVVGGISWNQLSNLVYAGAMTVSKVGNRKCLEKQQRSREWFKITYSECENLRRVIGKATSELNRRVRSAEVALTNKQFHNIRMLKKKYKVESRAEITSLVERLKCRLQLLQSRIALRKADEERVRVRQMPAKMLFRGTCTDSEPVDIHQIRKFWKEIVGVKKSFNSKSPRLVAWEQSLSNIQGETDLKGRLNPELWQKVVQKIKPWKAHGPDKLQGYWWKVFDSANATLYDLTLHHILSGEPLPQRWITDGRIVLIHKSGSRSDPANFRPIACLNICYKLVTGFIAAYLDQYVRGRDILNNEQIALRRGVWACSHALTLDQTLIADAQDQKQRPISVAWIDYAKAFDSLPHSYIKWLLKVMQVPDLLRKFLKSVMNNWRVRYEARSPRGKIEHSNYLRIRSGVLQGDSFSPLLFCLAMAPISHAINSVKGGYTTASGKFKKVQISLSHLFYMDDLKLYANSPESLMEQIKVVASISEDINMKLNVKKCAVTHFIPKRMRSEQTDVDDDTSTDRSISFPMLDGEAVYKYLGMEQKLGLKESEAWDRANDRCYDKARRLWDSDLTFRQKVNSYNTTIIPVFKYIASCIIKGSGTYASVLKRGEDLDKKYRKLLVELKARQKSSCVARLYLPAEMGGYGLKSIKDAIEESTIYLWAYLCTKAELKGSLNLFLGMVNRGKRCVVSDAGSIIKAYDIDYKLEEVRSTVIIDGASFNDARTLARHVVGLMRTVNNNGRYKTWKEVELAGRVLRSNSSMDMIESFTWLKQGKLSSVAVRNALAAQEGCLITRTHPSQANSNDKSCRACGCHLETIEHVLSSCSKWLSNLYIDRHDSVARNIHYRICQKYGFTPAHYSQKVESVLENERIKLYWNQPVQTKTIIRHNKPDLIIFDKPGKTALIIEVAISWFTGIERQVQIKTNRYCVNGNWEEVTKLPYPVGDNLLRELQTAGWKVSFLPVVLGTCGEVLSNLKGDLMEKIGLTQVATADCLERMQRSAILGTSRIIKNHLAVR

SEQ ID NO: 23486 - protein, 1262 aa, Rotaria sp.
MSDSNEAVARQTRAARRARAVFPTLSADASSSVTKDSGKAGIHAAQAPAHPSEEKSNSAKGPRGANSAGRGKAEAWAEEEIEELKRLVPQHVKPTGMISWNEVEAAWKNLNLSVRTKASLSSKWLDIKRKENNRKRKRKSATVVQSDLTPSQSQTKVQRKIVTVRPGTPVNADIGDRGSSSEVNPTVKEKPSQCVPAGLAEDVVQIETTFRREYKKTQKIGCQMTLRKTPKRVSGKHINPIVCEVDRFIKGELEKKGGRISWNRLSNLVYAGAMTVSKIGNLRNEAKEQRRKEWFKNTYRECDNLRRVIGIATSELNRRIENAEVAPTLKQAINIRKLKKKHGVQTGAEITSLVEKLKCRLKILQSRIALRKADEGRQRVRQKPTKMLLRGIGAEGEPEKTDVHQIRRFWKNIVGVKKSFNSNGAELVAWEHSMSEIQGDDDLISRLTFELWQKVVQKIKPWKAHGPDRLQGYWWKVFVSANAALHRLVVYHIKSGKPLPQRWITDGRIVLIHKSGPRSDPANFRPIACLNTCYKLVTGFIAAYLDQYVRERNILTDEQIALRGGVWACSHAHTLDQTLIADALNQKQRPISVAWIDYAKAFDSVPHSYIKWLFKVMQVPDLLRKFIKSVMNQWRVQYEAKSPGGRIERSNYLRIRSGVLQGDSFSPLLFCLAMVPISHAINSVNGGYTTASGKQKGLQISSSHIFYMDDLKLYASSPENLSKQIKVVTSISEDINMKLNVKKCAVTHFKPKWMQSEQVAVDDSASTDRSISFPMLDGEAHYKYLGMEQKLGLKESEAWDRADDRCSQIAHCLWDSDLTFRQKVNSYNTTIIPVFRYIVSCVIKGSGTYASVLKRGDDLDKKFRKLLVKLKSRQKASCVARVYLPAEMGGYGLKSVRDAIEESTIYLWAYLCSKVELKGSLNLFVSMANRGKRCVISDAGSVLKTHNIKYEIDETTSTVIVEGVSFNDPRTLARHVVELMRTVNNTRRYEEWKNLVLAGRVLRSTSNLDMVGSFIWLKQGKLSSVAVRNVLAAQEGCLITRSHPSQNSSNDKSCRTCGSTLETIEHVLSSCSRWLPNLYVDRHDSVARNIYYRLCTKNGLSPPHYSQKVESVLENDCIKLYWNQPVQTKTIIRHNKPDIIVFNKPQKTALIIEVAVSWFTGIEKQVEIKTNRYCVNGNWEEDTKLPYPRGANLLRELQTEGWKVTFVPVVIGTNGEILSNLKGDLMEKVGLDGVATNDCIERMQRSAVLGSSRIIKNHLAVG

SEQ ID NO: 23487 - protein, 1037 aa, Rotaria sp.
MTLRKTPLRVSGKHIKPIICEVNRLIKSELDLVVGGISWNQLSNLVYAGAMTVSKIGNRKCLEKQQRSREWFKITYSECENLRRVIGKATSELNRRVRSAEVALTSKQLSIIKMLKKKYKVESRAEITSLVERLKCRLQLLQSRIALRKADEERVRVRQMPAKMLFRGTCTDSEPVDIHQIRKFWKEIVGVKKSFNSKSPRLVAWEQSMSNIQGETDLKGRLNPELWQKVVQKIKPWKAHGPDKLQGYWWKVFDSANATLYDLTLHHILSGEPLPQRWITDGRIVLIHKSGSRSDPANFRPIACLNICYKLVTGFIAAYLDQYVRGRDILNNEQIALRRGVWACSHALTLDQTLIADAQDQKQRPISVAWIDYAKAFDSLPHSYIKWLLKVMQVPDLLRKFLKSVMNNWRVRYEARSPRGKIEHSNYLRIRSGVLQGDSFSPLLFCLAMAPISHAINSVKGGYTTASGKFKKVQISLSHLFYMDDLKLYANSPESLMEQIKVVASISEDINMKLNVKKCAVTHFIPKRMRSEQTDVDDDTSTDRSISFPMLDGEAVYKYLGMEQKLGLKESEAWDRANDRCYDKARRLWDSDLTFRQKVNSYNTTIIPVFKYIASCIIKGSGTYASVLKRGEDLDKKYRKLLVELKARQKSSCVARLYLPAEMGGYGLKSIKDAIEESTIYLWAYLCTKAELKGSLNLFLGMVNRGKRCVVSDAGSIIKAYDIDYKLEEVRSTVIIDGASFNDARTLARHVVGLMRTANNNGRYKTWKELELAGRVLRSNSSMDMIESFTWLKQGKLSSVAVRNALAAQEGCLITRTHPSQANSNDKSCRACGCHLETIEHVLSSCSKWLSNLYIDRHDSVARNIHYRICQKYGFTPAHYSQKVESVLENERIKLYWNQPVQTKTIIRHNKPDLIIFDKPGKTALIIEVAISWFTGIERQVQIKTNRYCVNGNWEEVTKLPYPVGDNLLRELQTAGWKVSFLPVVLGTCGEVLSNLKGDLMEKIGLTQVATADCLERMQRSAVLGTSRIIKNHLAVR

SEQ ID NO: 23488 - protein, 1247 aa, Rotaria sp.
MAERSSAESRQPIATRSRRAVAPAVIVDTSSQDQGPSAGIHVAPTPTRRFENSTPHGGKGPSGDKPAGSGKASVWSEEEIEKLKRLVPSNVTPSGTISWNDVEKAWIDLNLPKRTKAGLSSKWRDIKTKSASVSVSDSSLIQNKTKLHLKVVTIPSDTTVDVNHNAGSNNNDVNPTVVKPDQCVPADLADDVVKSTFRKEYKKAQKIGCRMTLRKTPLRVSGKHIKPIICEVNRLIKSELDLVVGGISWNQLSNLVYAGAMTVSKIGNRKCLEKQQRSREWFKITYSECENLRRVIGKATSELNRRVRSAEVALTNKQFHNIRMLKKKYKVESRAEITSLVERLKCRLQLLQSRIALRKADEERVRVRQMPAKMLFRGTCTDSEPVDIHQIRKFWKEIVGVKKSFNSKSPRLVAWEQSMSNIQGETDLKGRLNPELWQKVVQKIKPWKAHGPDKLQGYWWKVFDSANATLYDLTLHHILSGEPLPQRWITDGRIVLIHKSGSRSDPANFRPIACLNICYKLVTGFIAAYLDQYVRGRDILNNEQIALRRGVWACSHALTLDQTLIADAQDQKQRPISVAWIDYAKAFDSLPHSYIKWLLKVMQVPDLLRKFLKSVMNNWRVRYEARSPRGKIEHSNYLRIRSGVLQGDSFSPLLFCLAMAPISHAINSVKGGYTTASGKFKKVQISLSHLFYMDDLKLYANSPESLMEQIKVVASISEDINMKLNVKKCAVTHFIPKRMRSEQTEVDDDTSTDRSISFPMLDGEAVYKYLGMEQKLGLKESEAWDRANDRCYDKARRLWDSDLTFRQKVNSYNTTIIPVFKYIASCIIKGSGTYASVLKRGEDLDKKYRKLLVELKARQKSSCVARLYLPAEMGGYGLKSIKDAIEESTIYLWAYLCTKAELKGSLNLFLGMVNRGKRCVVSDAGSIIKAYDIDYKLEEVRSTVIIDGASFNDARTLARHVVGLMRTVNNNGRYKTWKELELAGRVLRSNSSMDMIESFTWLKQGKLSSVAVRNALAAQEGCLITRTHPSQANSNDKSCRACGCHLETIEHVLSSCSKWLSNLYIDRHDSVARNIHYRICQKYGFTPAHYSQKVESVLENERIKLYWNQPVQTKTIIRHNKPDLIIFDKPGKTALIIEVAISWFTGIERQVQIKTNRYCVNGNWEEVTKLPYPVGDNLLRELQTAGWKVSFLPVVLGTCGEVLSNLKGDLMEKIGLTQVATADCLERMQRSAVLGTSRIIKNHLAVR

SEQ ID NO: 23489 - protein, 1037 aa, Rotaria sp.
MALRKTPLRVSGKHIKPIICEVNRLIKSELDLVVGGISWNQLSNLVYAGAMTVSKIGNRKCLEKQQRSREWFKITYSECENLRRVIGKATSELNRRVRSAEVALTSKQLSIIKMLKKKYKVESRAEITSLVERLKCRLQLLQSRIALRKADEERVRVRQMPAKMLFRGTCTDSEPVDIHQIRKFWKEIVGVKKSFNSKSPRLVAWEQSMSNIQGETDLKGRLNPELWQKVVQTIKPWKAHGPDKLQGYWWKVFDSANATLYDLTLHHILSGEPLPQRWITDGRIVLIHKSGSRSDPANFRPIACLNICYKLVTGFIAAYLDQYVRGRDILNNEQIALRRGVWACSHALTLDQTLIADAQDQKQRPISVAWIDYAKAFDSLPHSYIKWLLKVMQVPDLLRKFLKSVMNNWRVRYEAKSPRGKIEHSNYLRIRSGVLQGDSFSPLLFCLAMAPISHAINSVKGGYTTASGKFKKVQISLSHLFYMDDLKLYANSPESLMEQIKVVASISEDINMKLNVKKCAVTHFIPKRMRSEQTDVDDDTSTDRSISFPMLDGEAVYKYLGMEQKLGLKESEAWDRANDRCYDKARRLWDSDLTFRQKVNSYNTTIIPVFKYIASCIIKGSGTYASVLKRGEDLDKKYRKLLVELKARQKSSCVARLYLPAEMGGYGLKSIKDAIEESTIYLWAYLCTKAELKGSLNLFLGMVNRGKRCVVSDAGSIIKAYDIDYKLEEVRSTVIIDGASFNDARTLARHVVGLMRTVNNNGRYKTWKELELAGCVLRSNSSMDMIESFTWLKQGKLSSVAVRNALAAQEGCLITRTHPSQANSNDKSCRACGCHLETIEHVLSSCSKRLSNLYIDRHDSVARNIHYRICQKYGFTPAHYSQKVESVLENERIKLYWNQPVQTKTIIRHNKPDLIIFDKPGKTALIIEVAISWFTGIERQVQIKTNRYCVNGNWEEVTKLPYPVGDNLLRELQTAGWKVSFLPVVLGTCGEVLSNLKGDLMEKIGLTQVATADCLERMQRSAVLGTSRIIKNHLAVR

SEQ ID NO: 23490 - protein, 1037 aa, Rotaria sp.
MTLRKTPLRVSGKHIKPIICEVNRLIKSELDLVVGGISWNQLSNLVYAGAMTVSKVGNRKCLEKQQRSREWFKITYSECENLRRVIGKATSELNRRVRSAEVALTNKQFHNIRMLKKKYKVESRAEITSLVERLKCRLQLLQSRIALRKADEERVRVRQMPAKMLFRGTCTDSEPVDIHQIRKFWKEIVGVKKSFNSKSPRLVAWEQSMSNIQGETDLKGRLNPELWQKVVQKIKPWKAHGPDKLQGYWWKVFDSANATLYDLTLHHILSGEPLPQRWITDGRIVLIHKSGSRSDPANFRPIACLNICYKLVTGFIAAYLDQYVRGRDILNNEQIALRRGVWACSHALTLDQTLIADAQDQKQRPISVAWIDYAKAFDSLPHSYIKWLLKVMQVPDLLRKFLKSVMNNWRVRYEARSPRGKIEHSNYLRIRSGVLQGDSFSPLLFCLAMAPISHAINSVKGGYTTASGKFKKVQISLSHLFYMDDLKLYANSPESLMEQIKVVASISEDINMKLNVKKCAVTHFIPKRMRSEQTDVDDDTSTDRSISFPMLDGEAVYKYLGMEQKLGLKESEAWDRANDRCYDKARRLWDSDLTFRQKVNSYNTTIIPVFKYIASCIIKGSGTYASVLKRGEDLDKKYRKLLVELKARQKSSCVARLYLPAEMGGYGLKSIKDAIEESTIYLWAYLCTKAELKGSLNLFLGMVNRGKRCVVSDAGSIIKAYDIDYKLEEVRSTVIIDGASFNDARTLARHVVGLMRTVNNNGRYKTWKELELAGRVLRSNSSMDMIESFTWLKQGKLSSVAVRNALAAQEGCLITRTHPSQANSNDKSCRACGCHLETIEHVLSSCSKWLSNLYIDRHDSVARNIHYRICQKYGFTPAHYSQKVESVLENERIKLYWNQPVQTKTIIRHNKPDLIIFDKPGKTALIIEVAISWFTGIERQVQIKTNRYCVNGNWEEVTKLPYPVGDNLLRELQTAGWKVSFLPVVLGTCGEVLSNLKGDLMEKIGLTQVATADCLERMQRSAVLGTSRIIKNHLAVR

SEQ ID NO: 23491 - protein, 1264 aa, Rotaria sordida
MSNLGDPGNVQKKTSVRRNLREAGARQPYATRSTRAVSPVVSADASSQEGEHSTAGALSAPTPTRRSEKIRPGRQKGPSGEKPARSGKASVWSEEEIEKLKRLVSSNVIPSGMISWNDVEKAWIDLNLPKRTKAGLSSKWRDIKIKSAAVSVNDSSLTQKKTKLHSKVVTAPSDTTVDVNHNTGSSSSDVNPTVVKPDQCVPADLADDVVKSTFRGEYKKTQKIGCRMTMRNTPQRVSGNHIKPIICEVNRLIKNELDRKVGRASWNQLSNLVYAGAMTVSKIGNRKCLKRQQRSREWFKNAYSECENLRRVIGKATSELNRRVRNAEVAPTNKQLANIRMLKKKYKVESRSEITSLVERLKCRLQLLQSRIALRKADEERTRVRHMPTKMLFRETCTDSEPTNIHQIRKFWKDIVGKKKSFNSKSPRLVAWEHSMSKIQGETDLKGRLNPELWQKIVQRIKPWKAHGPDKLHGYWWKVFGSANATLYDLTLHHILSGEPLPQRWITDGRIVLIHKSGSRSDPANFRPIACLNTCYKLVTGFIAAYLDQYVRERSILPNEQIALRAGVWACSHAHTLDQTLIADAMNQNQRPISVAWIDYAKAFDSVPHSYIKWVFKVVQVPDLLRKFLKGIMNNWRVRYEARGLGGKTERSNYLRIRSGVLQGDSFSPLLFCLAMAPISHAINSVNSRYTTTSGKQKGLQISLSHLFYMDDLKLYANSPGSLTDQIKVVASISKDISMKLNVKKCAVAHFTPKRMQSEQIGIDTDTSTDRSINFPMLDGEAVYKYLGMEQKLGLKESEAWDRAENRCYQKAHQLWDSDLNFRQKVNTYNATIIPVFKYISSCIVKGSGTYASVLKRGEDLDKKFRKLLVELKARQKSSCVARLYLPAEMGGYGLKSIKDAIEESTIYLWAYLCTKAELKGSLNLFLSMVNRGKRCVVSDAGSILKPYDIDYELEEVRSTVIIDGASFKDAKTLARHVVGLMRTVNNTRRYKTWQELELAGRVLRSNSSMDMIESFTWLKEGKLSSIAVRNALAAQEGCLITRIHRSQEHLSDKSCRMCGCHLETIKHVLSNCSKWLSNLYIDRHDSVARNIHYTLCQKYGLTPAHYSQKVESVLENDSIKLYWNQPVQTKTIIHDNKPYLIVFNKPEKTALIIEVAISWFTGIERQVQIKTNRYCVNGNWEQDTEPPYPRGDNLQRDLQTVGWKVAFLPVVLGTCGEVLSNLKGDLMEKTGLDQVATDDCLEKMQRSAVLGTSRIIKNHLAVR

SEQ ID NO: 23492 - protein, 1247 aa, Rotaria sp.
MAERSSAESRQPIATRSRRAVAPAVIVDTSSQDQGPSAGIHVAPTPTRRFENSTPHGGKGPSGDKPAGSGKASVWSEEEIEKLKRLVPSNVTPSGTISWNDVEKAWIDLNLPKRTKAGLSSKWRDIKTKSASVSVSDSSLIQNKTKLHLKVVTIPSDTTVDVNHNAGSNNNDVNPTVVKPDQCVPADLADDVVKSTFRKEYKKAQKIGCRMTLRKTPLRVSGKHIKPIICEVNRLIKSELDLVVGGISWNQLSNLVYAGAMTVSKIGNRKCLEKQQRSREWFKITYSECENLRRVIGKATSELNRRVRSAEVALTNKQFHNIRMLKKKYKVESRAEITSLVERLKCRLQLLQSRIALRKADEERVRVRQMPAKMLFRGTCTDSEPVDIHQIRKFWKEIVGVKKSFNSKSPRLVAWEQSMSNIQGETDLKGQLNPELWQKVVQKIKPWKAHGPDKLQGYWWKVFDSANATLYDLTLHHILSGEPLPQRWITDGRIVLIHKSGSRSDPANFRPIACLNICYKLVTGFIAAYLDQYVRGRDILNNEQIALRRGVWACSHALTLDQTLIADAQDQKQRPISVAWIDYAKAFDSLPHSYIKWLLKVMQVPDLLRKFLKSVMNNWRVRYEARSPRGKIEHSNYLRIRSGVLQGDSFSPLLFCLAMAPISHAINSVKGGYTTASGKFKKVQISLSHLFYMDDLKLYANSPESLMEQIKVVASISEDINMKLNVKKCAVTHFIPKRMRSEQTDVDDDTSTDRSISFPMLDGEAVYKYLGMEQKLGLKESEAWDRANDRCYDKARRLWDSDLTFRQKVNSYNTTIIPVFKYIASCIIKGSGTYASVLKRGEDLDKKYRKLLVELKARQKSSCVARLYLPAEMGGYGLKSIKDAIEESTIYLWAYLCTKAELKGSLNLFLGMVNRGKRCVVSDAGSIIKAYDIDYKLEEVRSTVIIDGASFNDARTLARHVVGLMRTVNNNGRYKTWKELELAGRVLRSNSSMDMIESFTWLKQGKLSSVAVRNALAAQEGCLITRTHPSQANSNDKSCRACGCHLETIEHVLSSCSKWLSNLYIDRHDSVARNIHYRICQKYGFTPAHYSQKVESVLENERIKLYWNQPVQTKTIIRHNKPDLIIFDKPGKTALIIEVAISWFTGIERQVQIKTNRYCVNGNWEEVMKLPYPVGDNLLRELQTAGWKVSFLPVVLGTCGEVLSNLKGDLMKKIGLTQVATADCLERMQRSAVLGTSRIIKNHLAVR

SEQ ID NO: 23493 - protein, 884 aa, Rotaria sp.
MTVSKIGNLRNEAKQQRAKEWSKNSYRECENLRRVIGKATSELNRRKQNAEVAPTLKQAINIRMLKKKYGIQTGAEIISLVEKLKCRLKILQSRIALRKADEERQRVRQKPTKRLLRGIGTEAEPEKTDIHQIRRFWKSIVGVKKSFNSNGTELVAWERSMSEIQGDDDLISRLTFELWQKVVQKKKPWKAHGPDRLQGYWWKVFVSANAALYRLVVHHIKSGKPLPQRWITDGRIVLIHKCGSRSDPANYRPIACLNTCYKLVTGFIAAYLDQYVRERKILSNEQIALRGDVWACSRAHTLDQTLIADAQNQKERHISVAWIDYAKAFDSVPHSYIKWLFKVMQVPALFRKFLKSVMSQWRVQYEAKGLGGKIERSKYLRIRSGVLQGDSFNPLLFCLAMVPISHAINSVNGGYTTPSGKQKRLQISSSHIFYVDDLKLYASSPENLTKQIKIVASISKNINMKLNVKKRAVTHFKPKWMQNEQVVVDDDTSTDRSISFPMLDGEALYKYLGMEEKLGLKESEAWDRAEDRCYRVAYGLWDSDLTFRQKVNSYNTTIISVFKYIVSCVIKGSGKYASVLERGDKLDKKFRKLLVELKSRSKASCVERVYLPAEMGGYGLKSIKDAIEESTIYLWAYLCSKVELKGSLNLFVSMANRGKRCVVSDAGSVLKTYNIKYEIDEAKSTVTVEGVSFNDPRTLARHVVELIRTVNNTRRYEEWKNLELAGCVLRSTPSLDVVGSFAWLKQGKLSSVVVRNALTAQEGCLITRSHPSQNDLNDKSCRTCGTTLETIEHVLSSCSRWFPNLYVDRHDSVARNIYYRLCTKFGLIPPHYSQKVESVLENDSIKLYWNQPVQTKTIIRHNKPDIIVFNKPQKTALIIEVAIS

SEQ ID NO: 23494 - protein, 1020 aa, Andricus curvator
MEKGRPSGRPSTSAGITAEQLQFPCEYPECGMSFGTKRGLGVHRRAKHPEFADQLADTSRKNQIWSDEENLIMARREAEMTVSGERYLNRELAKEFRLRTKDSIKSHRKDEKYKELVRNAIDIVQQEQEQRQPEPRAQGRRSLTPELELEELPDAFLEFFGSIEKPTANKINNHYKMQELYQICIDATRESKEHIATRVALYISHITPPAKPGFMNIRKQKVLNQVSKRKQRRREYAIFQTLYKKNRKRGIESILNGSNEAAQPSREIMEPFWTNLLSQDSDESPTFQAPENMLKDFWQPITLNEVDKTKVKTKSAPGPDGLTGRDYGKIPNGILLYIFNLIMWTEKLPECLLASRTIFIPKKGSEDQPDKYRPITIPSVIVRGLHRILANRLEQTIPIDQRQRGFRSNVDGCRDNIFQLDFILKQCHQSFKPLYMASVDVAKAFPSVSHPALIQALRSFGIPAQFVNYINYVYRNGFTILQGQGWVSNKIYPKRGVRQGDPLSSPMFNILTHRLLEALPKEVGVKIGDHTVNASAFVDDLNLYATTPRGLQMMLDCLGKFLARCGLSINIDKSFTLGFKPSPRDKISTMDVITTFKVDNRELRKMSRTDAWTYLGISFTWAGRKKIDLGEILEKDVENLTKGPLKPQQRLFALRTYVLPKLFHQLALGNVMLGTLKSADKKVRKAVRKWLNLPHDIPNAYIHARILDGGLQIPANRWLAPLLRKERLNSLKNKINSATHGFLQKEIDICDRRLMDNGIIFNSHEDINKWWANKLHNSVDGGGLTHSKETPGQHMWIQDGTSFLNGKDFINSCRFRISAMPTRSRTSRGRFKDRSCRAGCDANETLNHVVQRCFRSHASRVKRHNAISSYVAMKLQNQGFVVKEEPHIKTDEGLRKPDIVAFKDQSVLIVDSQIVNEQFDLRRAHRNKVNYYGQNTGIAAYVHNTLNLPEANITYTTATLNWKGIWSPDAAEELCGWGFQKKDLKIISSRVLIGGLAAFRMFNNVTSTKRNSRTSRQGIG

SEQ ID NO: 23495 - protein, 954 aa, Pollicipes pollicipes
MCTRAAALNEEFHGRQRARRPPAARGSDSASRGGGSASRADGSAPAAGGPAIRAGGRAAPAGEPTDGDAAPAAEDHRRPWHAPRHEPEEASRLQRLYRANRDCAVRRILAEESPRCEVAFADLAAHFAPDEVPLFSWDERPSCVPDLPPAPEHPHLTAPITHGEVELRLRRAANTAPGDDGLRYAAWRALDPGCLLLREAFELCRRACRVPEAWKASQTVLLHEGGDPTLATSWRPIALARTVAKLYAGVWADRLAAWADAGDVLSAQQKAFRSFDGVLEHNFVLQCAVNDARRAGEECHIVFVDLTNAFGSVPHALLWEALERFGLSPEALRAVRDLYEGSCTQYRLAAGLSDPVQTRCGVRQGCPLSGLLFNIAMEPVLRALRQSDVRCLAYADDLALIVPSAAAVAPALRVLEAVCGWCSLEPNPRKSGLLSVGAAPPAVTLSGAPLPVVERACSYRYLGRPVGHTRLSEPPLDVLAATRRDAFRLLDSALAPWQKLDAVRTFIVPRLTHCLRLGVLPKTPLRAFDKALRWRVKGVLGVPLSATNGYLYAPSSTGGVGLTELGSEADVLLLAASVQLLRSRDPLVAELAAAELTRVVRRRVGRPPTPADMAAYLNGERMRDGGDVSSRFSRARVATRALASSVPVAWHAAHPVPELRVGPTAVEARGESKALRNALRMRALSDLVAKPHQGRVMECVASQPVSSHYMYNGSFTRFAEWRFVHRARLGLVPLNGYRRGAGDRRCRRCGYAKETLPHVLNHCRPHSAALQRSHNAILARLEKAVPRFAGTDVRVNRRVPGTESALRPDLVVTRGAHVSLVDVTVSFENRLAALRAAGDEKVAKYAGLVTELRRQGKHASVHALVIDSLGTWYRGNEETLRHLRVSRVYARLMRKLMVSDTLRWSRDVYVEHVTGVRQYEWSVATARGRCDVRVPAFTTSTSTAFSSAASLSTS

SEQ ID NO: 23496 - protein, 1864 aa, Pollicipes pollicipes
MATPAFRSAVEAVRGQPVLRDEELVLPYPLPAHARCPIASCRTQYSGTGSVQQRASLCRHLARSHDLRPRRTTWVCVGCRACLPRRPSTHHCWAAPPEEMRPDLPHRCAGCGRSFTTNIGLRNHRARCRSDGGRSRAGDGSGDRRLRDIEDVDAPHRPSAADFVTPRHAARARRRRLASSSPDSPAAGSPGGAPALPTPPVMPDESPAAAGFADDVSLISEIPDGQLSRGASPPPSPLTQRSPCARLSPAVSEPAWNLELPPLTPPPPPGLLRFDRPWEDTPLAALDPTPAPGSSPSSAHSASVSPAPATLPALLSPALVGAVARSGVLASVAGAVRRPPVAVAGASGAAVPSTAGGSVPPARAALRCAAPRVVPPAPLSVVCARPTPAPRSPELVAASPVPTPAPRSPGAAVVSPAPAATVSRLPTPSPRSPGLPTPVTTCGPPAPMPASRSPGAVAASPAPDATVSQRPTPSPRSPGLPMPNVSAHCPAPAPGRRVRSYAEALRSAPAGDALWPDGTPVRRGVRDHVSCPCTVTPNPCPVAAADAPSFAAGAPSQRQGRRGRACPARRRVPAQREGMSASREPLAPSPAARAGADRRTPPPASPQARGVFGHRWRGRGPLPPPPRILPRRPVTPLSGLVGSQPPCPRRRTCDAGVQTEPACLAPAGGPGGPPDGPPAPAPAPTPVADPAWTVVGARRRGPRALAPVPPGGRAPFRCPARAPARPSAPAAAPPSGAARAPARVAAPARAPARGPTPAPSGGRAGAPSRGPARAPARPLAPAAAPPPGAARAPARAAAPARAPARAPAPAPPRGRAGAPSCGRARTPARPLAPAPAPPPAAASARAPSRAPAAACDPVRALARVPAAAPAPVPVPAPRGRVRTPAASPAPAPVPTPRGRARTSPTPAPADGSARGRGGPGRGGGSGGAGRGSGRGSGRGARGSGRGRGARGGRGGGRGRDPSPPPSPPPSPPVPGTGDTPPTAPPSQRRRSPLQEEFLEELEALRDSGADWPLVEAAVEAMCTRAAALNEEFHGRQRARRPPAAGGSDSASRAGGSASRAGGSAPAAGGPAIRAGGRAAPAGEPADGDAAPAAEDHRRPWRAPRHEPEEASRLQRLYRANRDRAVRHILGEESPRCGVAFADLAAHFAPDEVPLFSWDERPSCVPDLPPAPEHPHLTAPITHGEVELRLRRAANTAPGDDGLRYAAWRALDPGCLLLREAFELCRRACRVPEAWKASQTVLLHKGGDPTLATSWRPIALARTVAKLYAGVWADRLAAWAEAGDVLSAQQKGFRSFDGVLEHNFVLQCAVNDARRAGEECHIVFVDLTNAFGSVPHALLWEALERFGLSPEALRAVRDLYEGSCTQYRLAAGLSDPVQTRCGVRQGCPLSGLLFNIAMEPVLRALRQSDVRCLAYADDLALIVPSAAAVAPALRVLEAVCGWCSLEPNPRKSGLLSVGAAPPAVTLSGAPLPVVERACSYRYLGRPVGHTRLSEPPLDVLAATRRDAFRLLDSALAPWQKLDAVRTFIVPRLTHCLRLGVLPKTPLRAFDKALRWRVKGVLGVPLSATNGYLYAPSSTGGVGLTELGSEADVLLLAASVQLLRSRDPLVAELAAAELTRVVRRRVGRPPTPADMAAYLNGERMRDGGDVSSRFSRARVATRALASSVPVAWHAAHPVPELRVGPTPVEARGESKALRNALRMRALSDLVAKPHQGRVMECVASQPVSSHYMYNGSFTRFAEWRFVHRARLGLVPLNGYRRGAGDRRCRRCGYAKETLPHVLNHCRPHSAALQRRHNAILTRLEKAVPRFAGTDVRVNRRVPGTESALRPDLVVTRGAHVPLVDVTVSFEYRLAALRAAGDEKVAK

SEQ ID NO: 23497 - protein, 1145 aa, Pollicipes pollicipes
MARPALASRLALPPAPWPPLPRRLRARLRLGLRPALRPRPVPRLGLRLVVRPLPRPRLRSRPLLVGSALRTLLRPRLRPQPLVVGPAIRPRLRPWSHAVGLALRLLPARRPVSPAVPSVAGLPVDGAAPAVVVVGPAVPGDGSGRGSGRGARGCGRGRGARGAGRGGGDPSPPPSPSLSPPVPGTADTPPTAPASERRRSPLQEEFLEELEALRESGADWPLVEAAVSAMCTRAAALNEQFYGRQRARRPPAARGSDSAPRAGGSAPAAGGPAMRTGGRAAPADGPAAGADDDAAPAAEDHRRPWRAPRHEPEEASRLQRLYRANRDRAVRSLLGEESPRCEVAFADLAAHFAPDEVPPFSWDDRPPCVPDLPPAPEHPHLTAPITHGEVELRLRRAANTAPGDDGLRYAAWRALDPGCLLLREAFELCRRACRVPEAWKASQTVLIHKGGDPSAATSWRPIALARTVAKLYAGVWADRLTAWAEAGEVLSAQQKGFRSFDGVLEHNFVLQCAVNDARRAGEECHIIFVDLTNAFGSVPHALLWEALARFGLSPEALGAVRDLYEGSSTQYRHAAGLSDPVQTRCGVRQGCPLSGLLFNIAMEPVLRTLRQADVRCLAYADDLALIVPSAAAVAPALRVLEAVCGWCCLQPNPRKSGLLSVGAAPPAVTLSGAPLPVVERACSYRYLGRPVGHTRLSEPPLDVLAATRRDAFRLLDSALAPWQKLDAVRTFIVPRLTHCLRLGVLPKTPLRAFDKALRWRVKGVLGVPLSATNGYLYAPSSTGGVGLTELGSEADVLLLAASVQLLRSRDPLVAELAAAELTRVVRRRVGRPPTPADMAAYLNGERMRDGGDVSSRFSRARVATRALASSVPVAWHAAHPVPELRVGPTAVEARGESKALRNALRMRALSDLVAKPHQGRVMECVASQPVSSHYMYNGSFTRFAEWRFVHRARLGLVPLNGYRRGAGDRRCRRCGYAKETLPHVLNHCRPHSAALQRRHNAILTRLEKAVPRFAGTDVRVNRRVPGTESALRPDLVVTRGAHVSLVDVTVSFENRLAALRAAGDEKVAKYAGLVAELRRQGKHASVHALVIGSLGTWYRGNEETLRHLRVSRVYARLMRKLMVSDTLRWSRDVYVEHVTGVRQYE

SEQ ID NO: 23498 - protein, 1889 aa, Pollicipes pollicipes
MATPAFRSAVEAVRGQPVLRDEELVLPYPLPAHARCPIAGCRTQYSGTGSVQQRASLCRHLARSHDLRPRRTTWVCVGCRACLPRRPSTHHCWAAPPEEVRPDLPHRCAGCGRSFTTDIGLRNHRARCRSDGGRSRAGDGSGDRRLRDIEDVDAPHRPSAADFVTPRHAARARRRRLASSSPDSPAAGSPGGASALPTPPVMPDESPAAAGLADDVSLVSEVPDGQLSRGASPSPSPLTQRSPYARLSPAVPEPAWDLELSPLTPPPPPGLLRFDRPWEDTPLAALDPTPAPRSSPSSARSAWVSPAPATLPALLSPALVGAVARGGVLASMAGAVRRPPVAVSGASGAAVPSTAGGSVPPARAALRCAAPRVVPPAPLSVVCARPTPAPRSPELVAASPVPTPAPRSPGAAAVSPAPAATVNRLPTPSPRSPGLPTPVTTCGPPAPMPASRSPGAVAASPAPDASMSQRPTPSPRSPGLPMPNVSAHCPAPAPGCRVRSYAEALRSAPAGDALWPDGTRVRRGVRQHDVSCPCPGTPNPCPVAAADAPSFAAGAPSQRQGRRGRACPARRRVPAQREGMSASREPLAPSPAARAGADRRTPPPASPQARGVFGHRWRGRGPLPPPPRIQPRRPVTPLSGLVGSQPPCSRRRTCDAGVQTEPACLAPAGGPGGPPDRPPAPAPAPTPVADPAWTVVGARRRGPRALAPVPPGGRAPFRCLARAPARPPAPAAAPPSGAARAPARVATPARAPARTLTPAPSGGRAGAPSCGRARTPARPLAPAPAPPPAAASARAPSRDPAAACAPVRALARVPAAALAPVPVPAPRGRVRTPAAAPAPAPVPAPRGRVRASPTPAPADRSARGRGGPGRGGGSGGAGRGSGRGSGRGARGSGRGRGARGGRGGGRGRDPSPPPSPPPSPPVPGTGDTPPTAPPSQRRRSPLQEEFLEELEALRDSGADWPLVEAAVGAMCTRAAALNEEFHGRQRARRPPAARGSGSASRAGGSASRAGGSAPAAGGPAIRAGGRAAPAGEPADGDAVPAAEDHRRPWHAPRHEPEEASRLQRLYRANRDRAVRRILAEESPRCEVAFADLAAHFAPDEVPLFSWDERPSCVPDLPPAPEHPHLTAPITHGEVELRLRRAANTAPGDDGLRYAAWRALDPGCLLLREAFELCRRACRVPEAWKASQTVLLHKGGDPTLATSWRPIALARTVAKLYAGVWADRLAAWAEAGDVMSAQQKAFRSFDGVLEHNFVLQCAVNDARRAGGECHIVFVDLTNAFGSVPHALLWEALERFGLSPEALRAVRDLYEGSCTQYRLAAELSDPVQTRCGVRQGCPLSGLLFNIAMEPVLRALRQSDVRCPAYADDLALIVPSAAAVAPALRVLEAVCGWCSLEPNPRKSGLLSVGAAPPAVTLSGAPLPVVERACSYRYLGRPVGHTRLSEPPLDVLAATRRDAFRLLDSALAPWQKLDAMRTFIVPRLTHCLRLGVLPKTPLRVFDKALRWRVKGVLGVPLSATNGYLYAPSSTGGVGLTELGSEADVLLLAASVQLLRSRDPLVAELAAAELTRVVRRRVGRPPTPADMTAYLNGERMRDGGDVSSRFSRARVATRALASSVPVAWHAAHPVPELRVGPTAVEARGESKALRNALRMRALSDLVAKPHQGRVMECVASQPVSSHYMYNGSFTRFAEWRFVHRARLGLVPLNGYRRGAGDRRCRRCGYAKETLPHVLNHCRPHSAALQRRHNAILARLERAVPRFAGTDVRVNRRVPGTESALRPDLVVTRGAHVSLVDVTVSFENRLAALRAAGDEKVAKYAGLVAELRRQGKHASVHALVIGSLGTWYRGNEETLRHLRVSRVYARLMRKLMVSDTLRWSRDVYVEHVTGVRQYE

SEQ ID NO: 23499 - protein, 1182 aa, Teleogryllus occipitalis
MVRTRKGKTYNVPCSTDVPTLLSDRANNTVFESGHSSDVSQRNPDQAEARRNRIRWTEDEMKEVIWCFYYAKANGASSEAEVYKIWRERNPNLRPNFDSKKLASQRRYILRSGKFSTENLGGIRSDAEQSDSYNVTQQQDTPEKFMFGDQCKAKCSSPNSNTDLIDPKDVDHMMKTALHQEIEKVMQTPMEMRRPLRKIFDDNRTKKILDSVNHALSEVVKERESPPNITEINSFFYAAGSVVADMVLGKMKNVPPTGTGNRNPNTQPAWIKRIERRIAITRQELSLLSEAMKSNRHTRKVRNKITAIERKHRIEDGISREIVVEKLKEKILLYAQRIKRYKKRVAFRCQNQLFERNAKVFYRSINHKELTEPQLPPLDEIESFWSGIWEDPKHFNKNSMWLQEECDAASNISMASELMGEITQDDLQQVIRGTANWKAAGVDRVQNFWIKKFTSMHPYLKMTVNNILNKNEEMPVWMTRGITYLLPKRGDGKLPKNYRPITCLPTVYKIITAVIAGKIYKHLQLNDLLPIEQKGCRKGSYGCKELLLLNKIILKNAKQSRRHLSVAWIDYQKAYDSVPHDWIVRALELYKIHPKLIEFRKCSMKQWSTMLFLRNGQKQLQSRVIQIKNGIFQGDSLSPLLFCICLIPLSRQLNHPSFGYKLDKREKPISHLFYMDDLKLFAKNEKALFEMLTVVKAFSKDICMQFGLDKCAKANIVRGKLAKSENIQLEDGNIIKDLEPGRTYKYLGIEESSDISHNVMKERILKEYYRRVRMILETELSAKNRISAIGSLAVPVLEYSFGLIDWTQQDILSMDRKTRKLLMMYGALHPKADIDRLYVARRDGGRGLRQVESAYRNAIVGMAKYVTQQADDPLMKQIILIEAKNEGKGIVKLAKKIASKDLQAVDQANMDLLTKFNTRTESQKLLKQAWRNKPLHGQYLARLDNGNVNDELTHAWLKRGKMKIESEAFLIAAQDQALRTRHYEKVILKTIQEDRCRLCGEKSETVDHIVSGCPILAKHEYLKRHNKVCSYLHWHISKAMNVPEISNKWYNHTPKPVTTAGHNTILYDQQIHTDRTIMANKPDIVIRSKAEKTCLLIDVSIPCDGNVTAKAAEKFLKYKDLAIEVSRVWNVRTEIVPVIIGALGAIPKDLTKHLTKIPGCSKHYEIQDIVLYGTAHILRKVL

SEQ ID NO: 23500 - protein, 1043 aa, Teleogryllus occipitalis
MGIIVNNNNNNNNNNNNNNNNNTDLIDPKDVDHHMMKTALHQEIEKVMQTPMEMRRPLRKIFDDNRTKKIIDSVNHALSEVVKERESPPNITEINSFFYAAGSVVADMVLGKMKNVPPTGTGNRNPNTQPAWIKRIERRIAITRQELSLLSEAMKSNRHTRKVRNKITAIERKHRIEDGISREIVVEKLKEKILLYAQRIKRYKKRVAFRCQNQLFERNAKVFYRSINHKELTEPQLPPLDEIESFWSGIWEDPKHFNKNSMWLQEECDAASNISMASELMGEITQDDLQQVIRGTANWKAAGVDRVQNFWIKKFTSMHPYLKMTVNNILNKNEEMPVWMTRGITYLLPKRGDGKLPKSYRPITCLPTVYKIITAVIAGKIYKHLQLNDLLPIEQKGCRKGSYGCKELLLLNKIILKNAKQSRRHLSVAWIDYQKAYDSVPHDWIVRALELYKIHPKLIEFCKCSMKQWSTTLFLKNGQKQLQSRVIQIKNGIFQGDSLSPLLFCICLIPLSRQLNHPSFGYKLDKREKPISHLFYMDDLKLFAKNEKALFEMLTVVKDFSKDICMQFGLDKCAKANIVRGKLAKSENIQLEDGNIIKDLEPGRTYKYLGIEESSDISHNVMKERILKEYYRRVRMILETELSAKNRISAIGSLAVPVLEYSFGLIDWTQQDILSMDRKTRKLLMMYGALHPKADIDRLYVARRDGGRGLRQVESAYRNAIVGMAKYVTQQADDPLMKQIILIEAKNEGRGIVKLAKKIASKDLQAVDQANTDLLTKFNTRTESQKLLKQAWRNKPLHGQYLARLDNVNVNDELTHAWLKRGKMKIESEAFLIAAQDQALRTRHYEVILKTIQEDRCRLCGEKSETVDHIVSGCPILAKHEYLKRHNKVCSYLHWHISKAMNVPEISNKWYNHTPKPVTTAGHNTILYDQQIHTDRTVMANKPDIVIRSKAEKTCLLIDVSIPCDGNVTAKSAEKFLKYKDLAIEVSRMWNVRTEIVPVIIGALGAIPKDLTKHLTKIPGCSKHYEIQDIVLYGTAHILRKVL

SEQ ID NO: 23501 - protein, 1010 aa, Teleogryllus occipitalis
MMKTALHQEIEKVMQTPMEMRRPLRKIFDDNRTKKIIDSVNHALSEVVKERESPPNITEINSFFYAAGSVVADMVLGKMKNVPPIGTGNRNPNTQPAWIKRIERRIAITRQELSLLSEAMKSNRHTRKVRNKITAIERKHRIEDGISREIVVEKLKEKILLYAQRIKRYKKRVAFRCQNQLFERNAKVFYRSINHKELTEPQLPPLDEIESFWSGIWEDPKHFNKNSMWLQEECDAASNISMASELMGEITQDDLQQVIRGTANWKAAGVDRVQNFWIKKFTSMHPYLKMTVNNILNKNEEMPVWMTRGITYLLPKRGDGKLPKNYRPITCLPTVYKIITAVIAGKIYKHLQLNDLLPIEQKGCRKGSYGCKELLLLNKIILKNAKQSRRHLSVAWIDYQKAYDSVPHDWIVRALELYKIHPKLIEFCKCSMKQWSTTLFLRNGQKQLQSRVIQIKNGIFQGDSLSPLLFCICLIPLSRQLNHPSFGYKLDKREKPISHLFYMDDLKLFAKNEKALFEMLTVVKDFSKDICMQFGLDKCAKANIVRGKLAKSENIQLEDGNIIKDLEPGRTYKYLGIEESSDISHNVMKERILKEYYRRVRMILETELSAKNRISAIGSLAVPVLEYSFGLIDWTQQDILSMDRKTRKLLMMYGALHPKADIDRLYVARRDGGRGLRQVESAYRNAIVGMAKYVTQQADDPLMKQIILIEARNEGRGIVKLAKKIASKDLQAMDQANTDLLTKFNTRTESQKLLKQAWRNKPLHGQYLARLDNVNVNDELTHAWLKRGKMKIETEAFLIAAQDQALRTRHYEKVILKTIQEDRCRLCGEKSETVDHIVSGCPILAKHEYLKRHNKVCSYLHWHISKAMNVPEISNKWYNHTPKPVTTAGNNTILYDQQIHTDRTIMANKPDIVIRSKAEKTCLLIDVSIPCDGNVTAKAAEKFLKYKDLAIEVSRVWNVRTEIVPVIIGALGAIPKDLTKHLTKIPGCSKHYEIQDIVLYGTAHILRKVL

SEQ ID NO: 23502 - protein, 918 aa, Hasora badra
MGELEAVSSPTELNELARKVAVFFGRLMNRPATQHAPRPVPRRRAHNTRRAADWVTEATRVQRLYRRNRKRAVRQILSTGAKGCRADFPIVEEHFLALAAARDGEEEWPDVFNRDAPTSESNTTLTLPLNRGSVVNKLKSRSNTSPGPDGLTYADLKRADPGAYVVTALFNAVWRVEAIPDCWKESTTVLLHKKGDESLIANWRPIAMGDTCPKLFAALLADRLKRWAVANGRYSAAQKGFLEYEGCYEHNFVLQEAIRDAKRRGKELAIAWLDIASAFTSVPHSSIVRALRGHGLPAKMIKIVEALYDGSRTRIRTMQGTTEPIVLRAGVRQGCPLSPGIFNLTLEVILREIESTTEGYELDGSRVSALAYADDIALMADSEAGMRVLLQAAERAARAVGLLFNPPKCAILHIDGGGGGAIRRAQYSIQGEPIQTLGPGDEYLHLGIPTGLNIKQTPVCTIAEVVADVRSINESLLAPWQKLDAVRTFVLPCVEFLMQGAHMEKEYLVEADKIIRRLAKSWMHLPQRASAEVVFLPTSQGGGGIMPMADLCDLYTVAHAYKMLYASDDAVRAVAGGGLKRTVAERLRRMPSEVDVARYLSGDLDMPRSTTGSTFWTRVRAAIIRLRPKVALQWVWCPEGGHYEIHWGDVGGVGPRAKKTLYRQLRQLLIEHYAQRLLQKNDQGRVFEVIRASGHSNHFLGTGRNTRFCDWRFIHRARLGVLPLNGTKRWQTGVDKRCRRCGHELETAPHVLGHCGIHAAARQLRHNKIQDRLVKAARCTGSSVTVNQTVRGTAGEAAMLRPDIVVRDDGKKTITIVDVAVPYENRRRAFAAARHEKLIKYEPLAAQLRRQGYRVQVRAFLVGALGGWDRANEGVLSLLNISPFYAAMMRRFMVSDNVRWSRDIYVEHVTGKRQYQLS

SEQ ID NO: 23503 - protein, 1359 aa, Abisara bifasciata
MDSTRNRYNLRPLPGGRRGASGADAGCYSMRTVGDEGLNRRAPIEEYTTADQLSSSSYLSSPIDSPFITPISSKPSSPDSITYHNRHSYYPSDVVQETFAASQTAPTVGYKRARQKWTEEMNIYILRTYLIITRLEQNKKAYLDPLYKKFCESFPNVNVSKQRIGDQRRAIVRNKLLSTSKINSIQNEVQQYLKTTRENPMHDYNVQHQIGQRLRWSDDMNEAIIYIYYKITKLETNKTGYRQTLYEKVLSEYPQLVNVSEQRVADQRRAIINNKMLPINKLNEIRSRVATELQEENSQNITQDNSVTPHYDVSPVTASNDILTDFSQQENLAEDINRYLEQDNSSVSTQTYTHKDAEYIEKTYADVWKKYKVVIPQKRPFIPKQKISKKFYATIQYINEKILNKYLNLDTDFESVHLAIYSAALTAAMYNGYKVKDLSESNNRTTQLREPLWQKRLKDKIEALRIKIGRLTEYKNGNRSPTLQIRVKRIMEQHRIHAQYEAENSNIEQFLDTLKQKLNVYANRLRRYKNTTLRKLQNKQFVTNEKLFYKTLTNEQTSTDININTPPIEQLHTYWSSIWSEPVQHNTSDFPNCDSISHVTGMEFEEVNMDTFKKILGKTHNWKTAGTDKIQNFWYKSFTYTHTILLSNINKFINDPKTMPHFLTEGVTYMLPKDRTDIGCPSKYRPITCLQTFYKILTACIADVIYIYTENNCILAEEQKGCRRGSQGCKEQLIIDSVVLRQSFFTKDDIYTMFIDYKKAYDSIPHSWLLHVLHYYKIHSKLINFLQITMEKWSTKLQVKNYGSVIETDNIRIRRGIYQGDSLSPLWFCLALNPLSKILNNSNIGYNISYNNSFHKISHLMFMDDIKLYSDNYEQICKLADIVQNFSADIKMAFGIDKCKIQSVHRGKVVENSYTLTSGEIIEPVDSDDGYKYLGYQQTRQIKHKHIKLQLIEKFKSRLHKILGTQLNSRNTVKAINTFAIPILTYSFAIIHWSQSDLSNLQRIIRTTLTRHRKHHPRSCIQRVTLPTVEGGRGIIDVQNLHNKLITNFRCFFYNQITRSQLHRAIVNADNKFTPLNLKDQSIQSNEKITDNNQKINTWLQKSLHGRHRHELMNNQIDKTASNVWLKYGDLFPETQGFMIAIQDQVIETRNYRKYIIRDQKQESDLCRHCHSSSETIQHITGACRSITQTDYKHRHDQVAAIVHQNLALKYKLISEKVCYYKYKPQPVLENINFKLYWDRTILTDRTVHYNRPDITLHHKTNKTVYLIDIAVPNTHNLSTTFTEKITKYSDLTVEIKSQWRVDSVKTIPVTISATGVVPKSLHNSLKLLNLYPNIYILLQKAAILNTCRIVRKFLSLDQ

SEQ ID NO: 23504 - protein, 1151 aa, Phanerotoma sp.
MAPHNRPSSDEGHGTVGRGLTDSSNDDHCFHKRLKWTEELRRDVIEIWERSEPHVSGYRRRLHALWREKYPEASVSEQALVSQVRYIQSRLRSDEESSSDSDLSDASDSDEDLDEQPSQILDVTLPRLSPTSDQSSVVEIPLTAPPEDANDLNDRQGHFLRKVALTQQELCEANQRLDRLAPSGVDLFALNTAVFQVARGYTQEKAQQPNREVSLEWRIRKIADKIKRNRQGASRIQSVMDYVRSGRPYTSKIRRIVTGLRREHHTLNNAKLLVIKEKHIGKIRALVTVKRSLERRYKRVRDNRLFKSHPTRFLEPQAPAEYKPPSAEQVESYWTDLYGQVPLVNVDTPALQAFREFCAEQNVESPEGFQQVSCEEVRNALRGAKNWAAPGPDAIPTFWWKKLTSAHKHLARIFSSFLTGDTDIPHWLVEGRTVLIPKTGDLSDPKNYRPIACLNSLYKIFTKILNERVLIAMGPVWRQIYEQRGSKRGMAGCKENLLVDKCVTTDAYYYKRNLSMAWVDYRKAFDTTSHELLLHLLECLAVPPQVVGCIQRLMPLWRTKFTVTSGRTKVTSGVVQFKRGVYQGDTLSPLLFCISLLPLSVALRRLPGYKAGRTSNRVHKITHLFYMDDLKVYAASQTKLQAALEVVAEYTEAIGMEFGLDKCAVANLVKGRSREMGDDVELADGSIIKHLDAGEAYKYLGQSQTPLQNAATVKEALRSEYKRRLKRIWGSELSGPNKVNATNMLAVPVLLYSFGVLNWRRSELQNLDIVTRKVMTTFRSLHPRSSVQRLYLPRNMGGRGLLGLECLHDRLVLGVAYDICDEQDPLMKFVKSFELLGRGAFLFRAARKAAESFGSEFDLSSPNGLPFRQMTRGQRKTTIRASEQMQLLERHVTKPMHGLFYRHLDAHGLSHQLTFQFLESAALFSETEGFILACQDGVYNTLVYRRSVMGEQVLDDSCRTCHQSPETLMHILSACPVLARSGYIHRHNAALRVLYYHLRHSYGIDETPVLPYLPGEIESVVENSRAKILWNVGFTTPQRLDHNKPDVVLFDKTTQEMVVIEFSAPAEYNVTAKEQDKRDRYAPFLATMRRVYPELKCRLVVLIIGVLGGMKDTFVSELQGIPACARQAHSIAARMQKAVLLGSLRLLRQHE

SEQ ID NO: 23505 - protein, 1128 aa, Chelonus insularis
MAIDHGPPLQRLRWTEELRRDLMQCWERCEPQTSGYARRLHTLWCERHPELQQLTQAALASQVRYTQSRRRIEEESDSDSSVSNASETEGEVSLTPETAAPRWSILPFHPSLTAEPPSPPPEGTNHQDFTSREGNFLRKITLSAEHLASANQDLDHRVPDSVDLFALNNAVYDVARGFTQDRRTPVNPELSLKRRIEQIAIKIKKARQGASRIQSVMDHVNTHRPYTPRIRRIVASIRREHHTLNTAVLLILKERYTGKIRSLMVIKKSLAKRYKRRRDNRLFQSDPSRFLKPQAPVTYEPPSAERVETYWTEIYGRASALDVDTPALQLFREFCDEHLSRIPEEFQRVSMDEIRNALRGTKNWAAPGPDAIPTFWWKKLTSSHQHLARIFSEYLGGDTPIPGWLVEGRTVLIPKSGDLSNPKNYRPIACLNTLYKLFTKILNERILTAIEPVWRQINEQRGSKRGLTGCKENLLVDRCVTMDAYYYKRNLSMAWVDYRKAFDTTSHELLLYLLECLSVPPQIVRCIEHLMPLWRTRFTVTSGETRVSTRAVPFRRGVYQGDTLSPLLFCISLLPLSVTLRRTPGYKAGRVSNRVHKVTHLFYMDDLKVYAASPERLRTALEAVSEYTSAIGMEFGLDKCAVAHLVKGRSPNWSDNVELIDGSIIKHLDAGESYRYLGQAQSPLQDVSVIKDTLRSEYKWRLKRIWGSELSGPNKVKATNMLAVPVLLYSFGVLKWLRKELKDLDIITRKVMTLYRSHHPRSSVQRLYFPRDLGGRGLLSLECLHDRLVIGLAYDIYESSDPLLKFVNSFELLGRDAFLYRAAYQAAQNLGSVFDPSSPDGLRLLQLTRGQRKVDIKTTEQLKLLDEHVAKSLHGVFYRHLETQDLSHQLTFQYLKSAGLFSETEGFIMACQDGVFSTLAYRRDVMHEQLEDTRCRVCHGDVDETLFHVLSACPILARSAYIHRHNAALRVLYYHLRHSYGIDETPVLPYVPGEIESVVENGRAKILWNYPLSTPQRIEHNKPDITLFDHTTKHVYYIEFSAPAETNIRAKEESKQERYRELMEVMRNVYHEYTAHVIVLVIGALGGMRDRFLTELRTIPVCRSPAEILAARMQKAVILGSLRILRRL

SEQ ID NO: 23506 - protein, 1128 aa, Chelonus insularis
MAIDHGPPLQRLRWTEELRRDLMQCWERCEPQTSGYARRLHTLWCERHPELQQLTQAALASQVRYTQSRRRIEEESDSDSSVSNASETEGEVSLTPETAAPRWGILPFHPSLTAEPPSPPPEGTNHQDFTGREGNFLRKITLSAEHLASANQDLDHRVPDSVDLFALNNAVYDVARGFTQDRRTPVNPELSLKRRIEQIAIKIKKARQGASRIQSVMDHVNTHRPYTPRIRRIVASIRREHHTLNTAVLLILKERYTGKIRSLMAVKKSLAKRYKRRRDNRLFQSDPSRFLKPQAPVTYEPPSAERVETYWTEIYGRASALDVDTPALQLFREFCDEHLSRIPEEFQRVSMDEIRNALRGTKNWAAPGPDAIPTFWWKKLTSSHQHLARIFSEYLGGDTPIPGWLVEGRTVLIPKSGDLSNPKNYRPIACLNTLYKLFTKILNERILTAIEPVWRQINEQRGSKRGLTGCKENLLVDRCVTMDAYYYKRNLSMAWVDYRKAFDTTSHELLLYLLECLSVPPQIVRCIEHLMPLWRTRFTVTSGETRVSTRAVPFRRGVYQGDTLSPLLFCISLLPLSVTLRRTPGYKAGRVSNRVHKVTHLFYMDDLKVYAASPERLRTALEVVSEYTSAIGMEFGLDKCAVAHLVKGRSPNWSDNVELIDGSIIKHLDAGESYRYLGQAQSPLQDVSVIKDTLRSEYKWRLKRIWGSELSGPNKVKATNMLAVPVLLYSFGVLKWLRKELKDLDIITRKVMTLYRSHHPRSSVQRLYFPRDLGGRGLLSLECLHDRLVIGLAYDIYESSDPLLKFVNSFELLGRDAFLYRAAYQAAQNLGSVFDPSSSDGLRLLQLTRGQRKVDIKTTEQLKLLDEHVAKSLHGVFYRHLETQDLSHQLTFQCLKSAGLFSETEGFIMACQDGVFSTLAYRRDVMHEQLEDTRCRVCHGDVDETLFHVLSACPILARSAYIHRHNAALRVLYYHLRHSYGIDETPVLPYVPGEIESVVENGRAKILWNYPLSTPQRIEHNKPDITLFDHTTKHVYYIEFSAPAETNIRAKEESKQERYRELMEVMRNVYHEYTAHVIVLVIGALGGMRDRFLTELRTIPVCRSQAEILAARMQKAVILGSLRILRRL

SEQ ID NO: 23507 - protein, 996 aa, Chelonus insularis
MQCWERCEPQTSGYARRLHTLWCEMHPELQHLTQAALASQVRYTQSRRRIEEESDSDSSVSNASETEGEVSLTPETAAPRWSILPFHPSLTAEPPSPPPEGTNHQDFTSREGNFLRKITLSAEHLASANEDLDHRVPDSVDLFALNNAVYDVARGFTQVRRTPVNPELSLKRRIEQIAIKIKKARQGASRIHSVMDHLNTHRPYTPRIRRIVASIRREHHTVNTAVLLILKERYTGKIRSLMAVKKSLAKRYKRRRDNRLFQSDPSRFLKPQAPVTYEPPSAERVETYWTEIYGRASALDVDTPALQLFREFCDEHLSRIPEEFQRVSMDEIRNALRGTKNWAAPGPDAIPTFWWKKLTSSHQHLARIFSEYLGGDTPIPGWLVEGRTVLIPKSGDLSNPKNYRPIACLNTLYKLFTKILNERILTAIEPVWRQINEQRGSKRGLTGCKENLLVDRCVTMDAYYYKRNLSMAWVDYRKAFDTTSHELLLYLLECLSVPPQIVRCIEHLMPLWRTRFTVTSGETKVSTRAVPFRRGVYQGDTLSPLLFCISLEPLSVTLRRTPGYKAGRVSNRVHKVTHLFYMDDLKVYAASPERLRTALEVVSEYTSAIGMEFGLDKCAVAHLVKGRSPNWSDNVELIDGSIIKHLDAGESYRYLGQAQSPLQDVSVIKDTLRSEYKWRLKRIWGSELSGPNKVKATNMLAVPVLLYSFGVLKWLRKELKDLDIITRKVMTLYRSHHPRSSVQRLYFPRDLGGRGLLSLECLHDRLVIGLAYDIYESSEPLLKFVNSFELLGRDAFLYRAAYQAAQNLGSVFDPSSPDGLKLLQLTRGQRKVDIKTTEQLKLLDEHVAKSLHGVFYRHLDTQDLSHQLTFQYLKSAGLFSETEGFIMACQDGVFSTLAYRRDVMHEQLEDTRCRVCHGDVDETLFHVLSACPILARSAYIHRHNAALRVLYYHLRHSYGIDETPVLPYVPGEIESVVENERAKILWNYPLSTPPTY

SEQ ID NO: 23508 - protein, 1128 aa, Chelonus insularis
MAIDHGPPLQRLRWTEELRRDLMQCWERCEPQTSGYARRLHTLWCERHPELQQLTQAALASQVRYTQSRRRIEEESDSDSSVSNASETEGEVSLTPETAAPRWSILPFHPSLTAEPPTPPPEGTNHQDFTGREGNFLRKITLSAEHLASANQDLDHRVPDSVDLFALNNAVYDVARGFTQDRRTPVNPELSLKRRIEQIAIKIKKARQGASRIQSVMDHVNTHRPYTPRIRRIVASIRREHHTLNTAVLLILKERYTGKIRSLMAVKKSLAKRYKRRRDNRLFQSDPSRFLKPQAPVTYEPPSAERVETYWTEIYGRASALDVDTPALQLFREFCDEHLSRIPEEFQRVSMDEIRNALRGTKNWAAPGPDAIPTFWWKKLTSSHQHLARIFSEYLGGDTPIPGWLVEGRTVLIPKSGDLSNPKNYRPIACLNTLYKLFTKILNERILTAIEPVWRQINEQRGSKRGLTGCKENLLVDRCVTMDAYYYKRNLSMAWVDYRKAFDTTSHELLLYLLECLSVPPQIVRCIEHLMPLWRTRFTVTSGETRVSTRAVPFRRGVYQGDTLSPLLFCISLLPLSVTLRRTPGYKAGRVSNRVHKVTHLFYMDDLKVYAASPERLRTALEVVSEYTSAIGMEFGLDKCAVAHLVKGRSPNSSDNVELIDGSIIKHLDAGESYRYLGQAQSPLQDVSVIKDTLRSEYKWRLKRIWGSELSGPNKVKATNMLAVPVLLYSFGVLKWLRKELKDLDIITRKVMTLYRSHHPRSSVQRLYFPRDLGGRGLLSLECLHDRLVIGLAYDIYESSDPLLKFVNSFELLGRDAFLYRAAYQAAQNLGSVFDPSSSDGLRLLQLTRGQRKVDIKTTEQLKLLDEHVAKSLHGVFYRHLETQDLSHQLTFQYLKSAGLFSETEGFIMACQDGVFSTLAYRRDVMHEQLEDTRCRVCHGDVDETLFHVLSACPILARSAYIHRHNAALRVLYYHPRHSYGIDETPVLPYVPGEIESVVENGRAKILWNYPLSTPQRIEHNKPDITLFDHTTKHVYYIEFSAPAETNIRAKEESKQERYRELMEVMRNVYHEYTAHVIVLVIGALGGMRDRFLTELRTIPVCRSQAEILAARMQKAVILGSLRILRRL

SEQ ID NO: 23509 - protein, 1106 aa, Chelonus insularis
MQCWERCEPQTSGYARRLHTLWCERHPELQHLTQAALASQVRYTQSRRRIEVESDSDSSVSNASETEGEVSLTPETAAPRWSILPFHPSHTAEPPSPSPEGTNHQDFTSREGNFLRKITLSAEHLASANQDLDHRVPDSVDLFALNNAVYDVARGFTQGRRTPVNPELSLKRRIEQIAIKIKKARQGASRIQSVMDHLNTHRPYTPRIRRIVASIRREHHTVNTAVLLILKERYTCKIRSLMAVKKSLAKRYKRRRDNRLFQSDPSRFLQPQAPVTYEPPSAERVETYWTKIYGRASALDVDTPALQLFREFCDEHLSRIPEEFQRVSMDEIRNALRGTKNWAAPGPDAIPTFWWKKLISSHQHLARIFSEYLGGDTPIPGWLVEGRTVLIPKSGDLSNPKNYRPIACLNTLYKLFTKILNERFLTAIEPVWRQINEQRGSKRGLTGYKENLLVDRCVTMDAYYYKRNLSMAWVDYRKAFDTTSHELLLYLLECLSVPPQIVRCIEHLMPLWRTRFTVTSGETKVSTRAVPFRRGVYQGDTLSPLLFCISLLPLSVTLRRTPGYKAGRVSNRVHKVTHLFYMDDLKVYAASPERLRTLLEVVSEYTSAIGMEFGLDKCAVAHLVKGRSPNWSDNVELIDGSIIKHLDAGESYRYLGQAQSPLQDVSVIKDTLRSEYKWRLERIWGSELSGPNKVKATNMLAVPVLLYSFGVLKWLRKELKDLDIITRKVMALYRSHHPRSSVQRLYFPRDLGGRGLLSLECLHDSLVIGLAYDIYESSDPLLKFVNSFELLERDAFLYRAAYQAAQNLGSVFDPSSPDGLRLLQLTRGQRKVDIKTTEQLKLLDKHVAKSLHGVFYRHLETQDLSHQLTFQYLKSAGLFSETEGFIMACQDGVFSTLAYRRDVMHEQLEDTRCRVCHGDVDETLFRVLSACPILARSADIHRPNAALRMLYYHLRHSYGIDETPVLPYVPGKIESVVENGRAKILWNYPLSTPQRIEHNKPDITLFDHTTKHVYYIEFSAPAETNIRAKEESKQERYRELMEVMRTVYPEHTAHVIVLVIGALGGMRDRFLTELRTIPVCRSQAEILAARMQKAVILGSLRILRRL

SEQ ID NO: 23510 - protein, 837 aa, Chelonus insularis
MDHLNTHRPYTPRIRRIVASIRREHHTVNTAVLLILKEMYTGKMRSLMAVKKSLAKRYKRRRDNRLFQSDPSRFLKPQAPVTYEPPSAERVETYWTEIYGRASALDGDIPALQLFREFCDEHLSRIPEEFQRVSMDEIRNALRGTKNWAAPGPDAIPSFWWKKLTSSHQHLARIFSEYLGGDTPIPGWLVEGRTVLIPKSGDLSNPENYRPIACLNTLYKLFTKILNERILTAIEPVWKQINEQRGSKRGLTGCKENLLVDRCVTMDAYYYKRNLSMAWVDYRKAFDTTSHELLLYLLECLSVPPQIVRCIEHLMPHWRTRFTVTSGETKVSTRAVPFRRGVYQGDTLKPLLFCISLLPLSVTLRRTPAYKAGRVSNRVHKVTHLFYMDDLKVYAASPKRLRTALEVVSEYTSAIGMEFGLDKCAVAHLVKGRSPNWSDNVELIDGSIIKHLDAGESYRYLGQAQSPLQDVSVIKDTLRSEYKWRLKRIWGSELSGPNKVKATNMLAVPVLLYSFGVLKWLRKELKDLDIITRKVMTLYRSHHPRSSVQRLYFPRDLGGRGLLSLECLHDRLVIGLAYDSYESSDPLLKFVNSFELLGRDAFLYRAAYQAAQNLGSVFDPSNPDGLRLLQLTKGQRKVDIKTTEQLKLLDEHVAKSLHGVFYRHLDTQDLSHQLTFQYLKSAGLFSETEGFIMACQDGVFSTLAYRRDVMHEQLEDTRCRVCHGDVDETLFHVLSACPISVRSAYIHRYDTALRVLYYHLRHSYRIDETLVLPNVPGEIESVVENGRAKILWNYPLSTPQRVEHNKPDITLFDHTTEHVYYIEFSAPAETNIRGKEE

SEQ ID NO: 23511 - protein, 1128 aa, Chelonus insularis
MTIAHGPPLQRLRWTEELRRDLMQCWERCEPQTSGYARRLHTLWCEMHPELQHLTQAALASQVRYTQSRRRIEDESDSDSSVSNASETEGEVLLTPETAAPRWSILPLHPSLTAEPPSPPPEGANQQDFTSREGSFLRKITLSAEHLASANQDLDHRVPDSVDLFALNNAVYDVARGFTQDRRTPVNPELSLKRRIEQIAIKIKKARQGASRIQSVMDHLNTHRPYTPRIRRIVASIRREHHTVNTAVLLILKERYTGKIRSLMAVKKSLAKRYKRRRDNRLFQSDPSRFLKPQAPVTYEPPSAERVETYWTEIYGRASALDVDTPALQLFREFCDEHLSRIPEEFQRVSMDEIRNALRGTKNWAAPGPDAIPTFWWKKLTSSHQHLARIFSEYLGGDTPIPGWLVEGRTVLIPKSGDLSNPKNYRPIACLNTLYKLFTKIMNERILTAIEPVWRQINEQRGSKRGLTGCKENLLVDRCVTMDAYYCKRDLSMAWVDYRKAFDTTSHELLLYLLECLSVPPQIVRCIEHLMPLWRTRFTVTSGETRVSTRAVPFRRGVYQGNTLSPLLFCISLLPLSVTLRRTPGYKAGRVSNRVHKVTHLFYMDDLKEYAASPERLRTALEVVSEYTSALGMEFGLDKCAVAHLVKGRSPNWSDNVELIDGSIIKYLDAGESYRYLGQAQSPLQDVSVIKDTLRSEYKWRLKRIWGSELSGPNKVKATNMLAVPVLLYSFGVLKWLRKELKDLDIITRKVMTLYRSHHPQSSVQCLYFPRELGGRGLLSLECLHDRLVIGLAYDIYESFDPLLKFVNSFELLGRDAFLYRAAYQAAQNLGSVFDPSSPDGLRLLQLTRGQRKVDIKTTEQLKLLDEHVAKSLHGVFYRHLETQDLSHQLTFQYLKSAGLFSETEGFIMACPDGVFSTLAYRRDVMPEQLEDTRCRVCHGDVDETLFYVLSACPILARSAYIHRHNAALRVLYYHLRHSYGIDETPVLPYVPGEIESVVENGRAKILWNYPLSTPQRIEHNKPDITLFDHTTKHVYYIEFSAPAETNIRVKEESKQERYRELMEVMRTVYHENTAHVIVLVIGALGGMRDRFLTELRTIPVCRSQAEILAARMQKAVILGSLRILRRL

SEQ ID NO: 23512 - protein, 912 aa, Chelonus insularis
MDHVNTHRPYTPRIRRIVASIRREHHTLNTAVLLILKERYTGKIRSLMAVKKSLAKRYKRRRDNRLFQSDPSRFLKPQAPVTYEPPSAERVETYWTEIYGRASALDVDTPALQLFREFCDEHLSRIPEEFQRVSMDEIRNALRGTKNWAAPGPDAIPTFWWKKLTSSHQHLARIFSEYLGGDTPIPGWLVEGRTVLIPKSGDLSNPKNYRPIACLNTLYKLFTKILNERILTAIEPVWRQINEQRGSKRGLTGCKENLLVDRCVTMDAYYYKRNLSMAWVDYRKAFDTTSHELLLYLLECLSVPPQIVRCIEHLMPLWRTRFTVTSGETKVSTRAVPFRRGVYQGDTLSPLLFCISLLPLSVTLRRTPGYKAGRVSNRVHKVTHLFYMDDLEVYAASPERLRTALEVVSEYTSAIGMEFGLDKCAVAHLVKGRSPNWSDNVELIDGSIIKHLDAGESYRYLGQAQSPLQDVSVIKDTLRSEYKWRLKRIWGSELSGPNKVKATNMLAVPVLLYSFGVLKWLRKELKDLDIITRKVMTLYRSHHPRSSVQRLYFPRDLGGRGLLSLECLHDRLVIGLAYDIYESSDPLLKFVNSFELLGRDAFLYRAAYQAAQNLGSVFDPSSLDGLRLLQLTRGQRKVDIKTTEQLKLLDEHVAKSLHGVFYRHLETQDLSHQLTFQYLKSAGLFSETEGFIMACQDGVFSTLAYRRDVMHEQLEDTRCRVCHGDVDETLFHVLSACPILARSAYIHRHNAALRVLYYHLRHSYGIDETPVLPYVPGEIESVVENGRAKILWNYPLSTPQRIEHNKPDITLFDHTTKHVYYIEFSAPAKTNIRAKEESKQERYRELMEVMRTVYPEHTAHVIVLVIGALGGMRDRFLTELRIIPVCRSQAEILAARMQKAVILGSLRILRRL

SEQ ID NO: 23513 - protein, 1128 aa, Chelonus insularis
MAIDHGPPLQRLRWTEELRRDLMQCWERCEPQTSGYARRLHTLWCERHPELQQLTQAALASQVRYTQSRRWIEEESDSDSSVSNASETEGEVSLTPETAAPRWSILPFHPSLTAEPPSPPPEGTNHQDFTSREGNLLRKITLSAEHLASANQDLDHRVPDSVDLFALNNAVYDVARGFTQDRRTPVNPELSLKRRIEQIAIKIKKARQGASRIQSVMDHVNTHRPYTPRIRRIVASIRREHHTVNTAVLLILKERYTGKIRSLMAVKKSLAKRYKRRRDKRLFQSDPSRFLKPQAPVTYEPPSAERVETYWTEIYGRASALDVDTPALQLFREFCDEHLSRIPEEFQRVSMDEIRNALRGTKNWAAPGPDAIPTFWWKKLTSSHQHLARIFSEYLGGDTPIPGWLVEGRTVLIPKSGDLSNPKNYRPIACLNTLYKLFTKILNERILTAIEPVWRQINEQRGSKRGLTGCKENLRVDRCVTMDAYYYKRNLSMAWVDYRKAFDTTSHELLLYLLECLSVPPQIVRCIEHLMPLWRTRFTVTSGETRVSTRAVPFRRGVYQGDTLSPLLFCISLLPLSVTLRRTPGYKAGRVSNRVHKVTHLFYMDDLKVYAASPERLRTALEVVSEYTSAIGMEFGLDKCAVAHLVKGRSPNWSDNVELIDGSIIKHLDAGESYRYLGQAQSPLQDVSVIKDTLRSEYKWRLKRIWGSELSGPNKVKATNMLAVPVLLYSFGVLKWLRKELKDLDIITRKVMTLYRSHHPRSSVQRLYFPRDLGGRGLLSLECLHDRLVIGLAYDIYESSDPLLKFVNSFELLGRDAFLYRAAYQAAQNLGSVFDPSSSDGLRLLQLTRGQRKVDIKTTEQLKLLDEHVAKSLHGVFYRHLETQDLSHQLTFQYLKSAGLFSETEGFIMACQDGVVSTLAYRRDVMHEQLEDTRCRVCHGDVDETLFHVLSACPILARSAYIHRHNAALRVLYYHLRHSYGIDETPVLPYMPGEIESVVENGRAKILWNYPLSTPQRIEHNKPDITLFDHTTKHVYYIEFSAPAETNIRAKEESKQERYRELMEVMRNVYHEYTAHVIVLVIGALGGMRDRFLTELRTIPVCRSQAEILAARMQKAVILGSLRILRRL

SEQ ID NO: 23514 - protein, 1128 aa, Chelonus insularis
MAIDHGPPLQRLRWTEELRRDLMQCWERCEPQTSGYARRLHTLWCERHPELQQLTQAALASQVRYTQSRRRIEEESDSDSSVSNASETEGEVSLTPETAAPRWSILPFHPTLTAEPPSPPPEGTNHQDFTSREGNFLRKITLSAEHLASANQDLDHRVPDSVDLFALNNAVYDVARGFTQDRRTPVNPELSLKRRIEQIAIKIKKARQGASRIQSVMDHVNTHRPYTPRIRRIVASIRREHHTLNTAVLLILKERYTGKIRSLMAVKKSLAKRYKRRRDNRLFQSDPSRFLKPQAPVTYEPPSAERVETYWTEIYGRASALDVDTPALQLFREFCDEHLSRIPEEFQRVSMDEIRNALRGTKNWAAPGPDAIPTFWWKKLTSSHQHLARIFSEYLGGDTPIPGWLVEGRTVLIPKSGDLSNPKNYRPIACLNTLYKLFTKILNERILTAIEPVWRQINEQRGSKRGLTGCKENLLVDRCVTMDAYYYKRNLSMAWVDYRKAFDTTSHELLLYLLECLSVPQQIVRCIEHLMPLWRTRFTVTSGETRVSTRAVPFRRGVYQGDTLSPLLFCISLLPLSVTLRRTPGYKAGRVSNRVHKVTHLFYMDDLKVYAASPERLRTALEVVSEYTSAIGMEFGLDKCAVAHLVKGRSPNWSDNVELTDGSIIKHLDAGESYRYLGQAQSPLQDVSVIKDTLRSEYKWRLKRIWGSELSGPNKVKATNMLAVPVLLYSFGVLKWLRKELKDLDIITRKVMTLYRSHHPRSSVQRLYFPRDLGGRGLLSLECLHDRLVIGLAYDIYESSDPLLKFVNSFELLGRDAFLYRAAYQAAQNLGSVFDPSSSDGLRLLQLTRGQRKVDIKTTEQLKLLDEHVAKSLHGVFYRHLETQDLSHQLTFQYLKSAGLFSETEGFIMACQDGVFSTLAYRRDVMHEQLEDTRCRVCHGDVDETLFHVLSACPILARSAYIHRHNAALRVLYYHLRHSYGIDETPVLPYMPGEIESVVENERAKILWNHPLSTPQRIEHNKPDITLFDHTTKHVYYIEFSAPAETNIRAKEESKQERYRELMEVMRNVYHEYTAHVIVLVIGALGGMRDRFLTELRTIPVCRSPAEILAARMQKAVILGSLRILRRL

SEQ ID NO: 23515 - protein, 1128 aa, Chelonus insularis
MTIDHGPPLQRLRWTEELRRDLMQCWERCEPQTLGYARRLHTLWCEMHPELQHLTQAALASQVRYTQSRRRIEEESDSDSSISNASETEGEVSLTPETAAPRWSILPFHPSLTAEPPSPPPEGTNQQDFTSREGSFLRKITLSAGHLASANQDLDHRVPDSVDLFALNNAVYDVARGFTQGRRTPVNPELSLKRRIGQIAIKIKKARQGASRIQSVMDHLNTHRPYTPRIRRIVASIRREHHTVNTAVLLILKERYTGKIRSLMAVKKSLAKRYKRRRDNRLFQSDPSRFLKPQASVTYEPPSAERVETYWTEIYGRASALDVDTPALQLFREFCDEHLSRIPEEFQRVSMDEIRNALRGTKNWAAPGPDAIPTFWWKKLTSSHQHLARIFSEYLGGDTPIPGWLVEGCTVLIPKSGDLSNPKNYRPIACLNTLYKLFTKILNERILTAIEPVWRQINEQRGSKRGLTGCKENLLVDRCVTMDAYYYKRNLSMAWVDYRKAFDTTSHELLLYLLKCLSVSPQIVRCIEHLMPLWRTRFTVTSGGTKVSTRAVPFRRGVYQGDTLSPLLFCISLLPLSVTLRRTPGYKAGRVSNRVHKVTHLFYMDDLKVYAASPERLRTALEVVSEYTSAIGMEFGLDKCAVAHLVKGRSPNWSDNVELIDGSIIKHLDAGDSYRYLGQAQSPLQDVSVIKDTLRSEYKWRLKRIWGSELSGPNKVKATNMLAVPVLLYSFGVLKWLRKELKNLDIITRKVMTLYRSHHPRSSVQRLYFPRDLGGRGLLSLECLHDRLVIGLAYDIYESSDPLLKFVNSFELLGRDAFLYRAAYQAAQNLGSVFDPSSPDGLRLLQLTRGQRKVDIKTTEQSKLLDEHVAKSLHGVFYRHLETQDLSHQLTFQYLKSAGLFSETEGFIMACQDGVFSTLAYRRDVMHEQLEDTRCRVCHGDVDETLFHVLSACPILARSAYIHRHNAALRVLYYHLRHSYGIDETPVLPYVPGEIESVVENGRAKILWNYPLSTPQRIEHNKPDITLFDHTTKHVYYIEFSAPAETNIRAKEESKQERYRELMEVMRNVYHEYTAHVIVLVIGALGGMRDRFLTELRTIPVCRSQAEILAARMQKAVILGSLRILRRL

SEQ ID NO: 23516 - protein, 1128 aa, Chelonus insularis
MAIDHGPPLQRLRWTEELRRDLMQCWERCEPQTSGYARRLHTLWCERHPELQQLTQAALASQVRYTQSRRRIEEESDSDSSVSNALETEGEVSLTPETAAPRWSILPFHPSLTAEPPSPPPEGTNHQDFTGREGNFLRKITLSAEHLASANQDLDHRVPDSVDLFALNNAVYDVARGFTQNRRTPVNPELSLKRRIEQIAIKIKKARQGASRIQSVMDHVNTHRPYTPRIRRIVASIRREHHTLNTAVLLILKERYTGKIRSLMAVKKSLAKRYKRRRDKRLFQSDPSRFLKPQAPVTYEPPSAERVETYWTEIYGRASALDVDTPALQLFREFCDEHLSRIPEEFQRVSMDEIRNALRGTKNWAAPGPDAIPTFWWKKLTSSHQHLARIFSEYLGGDTPIPGWLVEGRTVLIPKSGDLSNPKNYRPIACLNTLYKLFTKILNERILTAIEPVWRQINEQRGSKRGLTGCKENLLVDRCVTMDAYYYKRNLSMAWVDYRKAFDTTSHELLLYLLECLSVPPQIVRCIEHLMPLWRTRFTVTSGETRVSTRAVPFRRGVYQGDTLSPLLFCISLLPLSVTLRRTPGYKAGRVSNRVHKVTHLFYMDDLKVYAASPERLRTALEVVSEYTSAIGMEFGLDKCAVAHLVKGRSPNWSDNVELIDGSIIKHLDAGESYRYLGQAQSPLQDVSDIKDTLRSEYKWRLKRIWGSELSGPNKVKATNMLAVPVLLYSFGVLKWLRKELKDLDIITRKVMTLYRSHHPRSSVQRLYFPRDLGGRGLLSLECLHDRLVIGLAYDIYESSDPLLKFVNSFELLGRDAFLYRAAYQAAQNLGSVFDPSSSDGLRLLQLTRGQRKVDIKTTEQLKLLDEHVAKSLHGVFYRHLETQDLSHQLTFQYLKSAGLFSETEGFIMACQDGVFSTLAYRRDVMHEQLEDTRCRVCHGDVDETLFHVLSACPILARSAYIHRHNAALRVLYYHLRHSYGIDETPVLPYVPGEIESVVENGRAKILWNYPLSTPQRIEHNKPDITLFDHTTKHVYYIEFSAPAETNIRAKEESKQERYRELMEVMRNVYHEYTAHVIVLVIGALGGMRDRFLTELRTIPVCRSPAEILAARMQKAVILGSLRILRRL

SEQ ID NO: 23517 - protein, 1106 aa, Chelonus insularis
MQCWERCEPQTSGYARRLHTLWCERHPELQHLTQAALASQVRYTQSRRRIEEESDSDSSVSNASETEGEVSLTPETAAPRWSILPFHPSLTAEPPSPAPEGTNHQDFTSREGNFLRKITLSAEHLASANQDLDHRVPDSVDLFALNNAVYDVARGFTQDRRTPVNPELSLKRRIEQTAIKIKKARQGASRIQNVMDHLNTHRPYTPRIRRIVASIRREHHTVNTAVLLILKERYTGKIRSLMAVKKSLAKRYKRRRDNRLFQSDPSRFLKPQAPVTYEPPSAERVETYWTEIYGRASALDVDTPALQLFREFCDEHLSRIPEEFQRVSMDEIRNALRGTKNWAAPGPDAIPTFWWKKLTSSHKHLARIFSEYLGRDTPIPGWLVEGRTVLIPKSGDLSNPKNYRPIACLNTLYKLFTKILNERILTAIEPVWRQINEQRGSKRGLTGCKENLLVDRCVTMDAYYYKRNLSMAWVDYKKAFDTTSYELLLYLLECLSVPPQIVRCIEHLMPLWRTRFTVTSGETRVSTRAVPFRRGVYQGDTLSPLLFCISLLPLSVTLRRTPGYKAGRVSNRVHKVTHLFYMDDLKVYAASPERLRTALEVVSEYTSAIGMEFGLDKCAVAHLVKGRSPNWNDNVELIDGSIIKHLDAGESYRYLGQAQSPLQDVSVIKDTLRSEYKWRLKRIWGSELSGPNKVKATNMLAVPVLLYSFGVLKWLRKELKDLDIITRKVMTLYRSHHPRSSVQRLYFPRDLGGRGLLSLECLHDRLVIGLAYDIYESSDPLLKFVNSFELLGRDAFLYRAAYQAAQNLGSVFDPSNPDGLRLLQLTRGQQKVDIKTTEQLKLLDEHVAKSLHGVFYRHLETQDLSHQLTFQYLKSAGLFSETEGFIMACQDGVFSTLAYRRDVMHEQLEDTRCRVCHGDVDETLFHVLSACPILARSAYIHRHNAALRVLYYHLRHSYGIDETPVLPYVPGEIESVVENGRAKILWNYPLSTPQRIEHNKPDITLFDHTTKHVYYIEFSAPAETNIRAKEESKQERYRELMEVMRNVYHEYTAHVIVLVIGALGGMRDRFLTELRTIPVCRSQAEILAARMQKAVILGSLRILRRL

SEQ ID NO: 23518 - protein, 1186 aa, Emesis temesa
MSRTKIFRIIIITRTSRLRSVLQELCPATTLAGRNRQRMKWTDVINRQLLRCYYIVTNNETNLTGYRTSLHQKFCEIYPELSFITPQRLSDQVRVIHRNNRIPQSEREEIKKELMEETVEVAPADARNFLSDQNFNNSQISTNEPRVNLHTDNEIINSYTHLDTITQTACSTTQEGITYNPSNENEDTLQEQNKLNETFQEMLTKYTGTDPSARPFIPKPKITSKFFQKLHNINSIIHNSIINNHEYTLNDIHNIIYAAALTAVSSENMTIKQPQQKVIRKSKTDLPAWERRLETNISKLRKQIGQLTQYLNGSLKENKRKKVNPNNKSQEDLKEELDKKKQILQAKAKRLKRYRKSNKRQNDNNNFKNNQKLFYRKLDEEIPINEPPEIDTITKFWSNIWENSIGYNKEATWISEENERTRKIVPMAKIEVRVEDISESLKRAHNWTAPGPDKVQNFWFKFFTSVHHPLAKIFNDLINNPEDIPQFLTFGVTYLKPKDNDTKNPAKYRPITCLPTVYKLLTSIISNKIYTHIKENHIISEEQKGCYKGGRGCKEQLIIDSEIHAQARLKHRNLHYAYIDYQKAFDSVPHAWLLHVLKIYKIDINVVHFLQKAMANWTTTLNIKTDAISLKTRNIQIKRGIFQGDSLSPLWFCLALNPLSFMLNNSKYGYVIQKDGKAKITHLLYMDDIKLYGASRHQLNYLLKITETFSKDINMKFGISKCKINSILKGEHANQEPYDLNHQEDCIEPLTIIDTYKYLGFHQNREINHTQIKQELKNKYHHRLVTVLKTGLSAINKIKAINTFAIPTLTYSFGIIRWTDTDLDALNTLTRTTSNKYNIHHIHSATERFTLKRYVGGRGVIDIKNHHYQQVHNLRDYFIKRSTDSPLHKAVCSLNTSGTPLNLNDKGYTPYDKIETEDKKIETWRQKALHGKHPYELKQDYVDYKASNEWLCKGNLFAETEGFMFAIQDRVIPTKNYRKYIIKDPTITTDSCRLCHLRQETIEHITAGCPFLASKQYTDRHNNVARQVHIYLAKKYKLINNIEPYYKYKPKQILENDLAKLYWDRDIVTDKTTINNRPDITLTNKLTKITYLIDVSVPNTENIKKKHVEKIQKYIPLAEEIKEMWHQTQVRIIPIIISSTGVIPRSLHTSLSELELPKFLYTNLQKSIIIDTCSIVRKFTNTPPEN

SEQ ID NO: 23519 - protein, 764 aa, Apodemia duryi
MDEFEITIEDISESVKRIHNWTPGPDRLQNFWIKSFTSVHNPLVKIFNNLVGNPEDIPQFLTLGITYLKPKDSDTKNPAKYRPITCLPTIYKLLTSIISNKIYTHIRQNNIINEEQRGCYKGGWGCKEQLIIDSEIHTQAKLKHRNLHYAYIDYQKAFDSVPHDWLIHVLKLYKVNSKIVHFLQKAMTNWTTTLNIKTAAINLPTRNIHIQRGIFQGDSLSPLWFCLALNPLSHILNNSKYGYSIQKENKTIINHLLYMDDIKLYATSRHQLNYLLKITEIFSDDIKMAFGITKCKINSIIKGKHVDPEPYNLNYQEDLIQPLTINDSYKYLGFYQSNEINHTKIKQELKNKYHQRLVTVLKTGLSAINKTKAINTFAIPILTYSFGVIRWTDTDLDALNTLTRTTSNKYNIHHIHSATERFTLKRDSGGRGIIDIKNLHYQQVNYLRDYFIKRSIDSPLHKAICSFNTSGSPLQLNNKEYTPYDKIETEDKKKETWKQKALHGKHPYDLQQDFIDYKGSNMWLCKGNLFGETEGFMIAIQDRVIRTRNYQKYIIKDPTITSDTCRLCHLRQETIEHITAGCSFLASKQYTDRHNNVAKQVHIYLAKKYKLVDKIEPYYKYKPKQILENELAKLYWDRDIITDKTTLNNRPDITLTNKLKKTTYLIDISVPNTENIKKKQVEKIQKYTPLAEEIKEMWHQRRVRIIPIVISATGVIPKTLHTSLSELELPHFLYINLQKSIIIDTCSIVRKFTNTSIETQASTK

SEQ ID NO: 23520 - protein, 915 aa, Apodemia duryi
MNTKQDMGKTTKPEIPAWERRLENNITKLRKEIGQLTQYLHGNLNEKKRNQIIPDNKGRDKIEEKLDRQKQVLHAKAKRLKRYRKSNRRKNDNKHFNKNERLFYRKLEQEVVIKDPPEIDDVAMFWSNIWENHIEHNREAIWISDEEKRIIEIDPMEEHEVTVNDVTEAIKRTHSWKAPGPDKIQNFWIKSFTSVHIPLAKVFNDVIQNSEELPQFLTHGITYLKPKDSDTRNPAKYRPITCLPTIYKILTSIISDKIYNHTKKYKIIDEEQKGCYKGGKGCKEQLIIDSEIHTQAKLKRRNLHYAYIDYQKAFDSVPHTWLLHVLKLYKIDTKIVQFLGKVMTKWATTLNIKTDTKTLQTRTIHINRGIFQGDSLSPLWFCLALNPLSHILNNTKYGYTIKKLNNTKINHLLYMDDIKLYATSRHQLNYLLKLTESFSKDVKMEFGIGKCKINSIIRGKHADQGPYSLNYNEEYIQPLKFNDTYKYLGFHQSSEINHSKIKQELRNHYYHRLVKVLKTGLSARNKIKAINTFAIPILMYSFGIIKWTDSDLDALNTLTRTTSNKYNIHHIHSAVERFTLKRDIGGRGVVDIKNLHYNQVQNLRDYFIKKSMDSPIHKAICAFDTSGTPLNLNDKYYTPSDKIESEHKKKETWKQKALHGKHPHDLQQAHVDYKASNMWLRKGSLYGESEGFMVAIQDRVIQTKNYMKYIIKDPSVKSDSCRLCHSQQETIEHITAGCSFLASKQYTDRHNNVAKQIHLQLAKTYRLIDKVEPYYKYTPKQILENELAKLYWDRNITTDKTTINNRPDITLTNKQTKVTYLIDISVPNTDNIKKKHTEKIQKYIPLAEEIKEMWHQKQVRIIPIIISATGVIPKTLHTSLTELELPHFLYINLQKSIILDTCSIVRKFINNSPGN

SEQ ID NO: 23521 - protein, 1249 aa, Apodemia duryi
MEQSSNSKTRQGSLPGERRGTSGAGAGRGSMRTASGRALNRRVTTNQNATAESIARDENNIEILTDNHTQAARSVLQDMCPATTLAGRNRQRMRWTDDINRQLLRCYYIVTNLEQNLIGYRQLLHQKFCEVYPELSFLTEQRLSDQVRTIYRNNRIPPSERDNIKKQIIEESPEQVSIQEGNYGPEQNSDNVLVARNEVDINLQAYNQQMDPHTHTDVISETTLPPSRLQTTHDFRTNQPTNENNYKEEKHIQEYNKLRDIFTELLIKYTGMDPTSRPSIPKPKITPKFYHTLEKINTIIHDTLLKYNEYTLTDIHTIIYVAALTAVTHHKMKIINTQNEIDKKIKPEIPAWERRLENNISKLRKEIGQLTQYLNGNLTENKRNKINPQNKSNEEIEEKLDRQKQVLQAKAKRLKRYRKSNKRQNDNKNFNNNQRLFYRKLEQEVIIKNPPKVEDITNFWSNIWENHIEHNSEAMWISDIGKRTIEIDPMEEFEITVNDVTESIKRTHSWKAPGPEKIQNFWIKSFTSVHNPLTKIFNNTIQNPEEIPQFLTLGITYLKPKDSDTENPAKYRPITCLPTIYKLLTSIISNKIYCHTKKYKIIGEEQKGCHKGGRGCKEQLIIDSEIHTQVKLKNRNLYYAYIDYKKAFDSVPHTWLLQVLKLYKIDAKVVQFLEKAMTKWATMLHIKTDTKHLQTRIMHIKRGIFQGDSLSPLWFCLALNPLSEILNNTKYGYTIQKLSNTKINHLLYMDDIKLYATSRHQLNYLLKLTESFSNDINMEFGIEKCKVNSIIRGKHADQGPYNLNHNKEYIQPLTFNDTYKYLGFHQSIEINHSKIKQDLKNNYYHRLVKVLKTGLSARNKIKAINTFAIPILTYSFGIIKWTDSDLDALNTLTRTTSNKHNIHHIHSAVERFSLKRDIGGRGVVDIKNLHYNQVQNLRDYFIKKSTDSPIHKAICMFDTSGTPLNLNDKDYKPGDKIETDNKKKETWKQKALHGKHPHDLQQAHVDYKASNMWLCKGNLFGETEGFMVAIQDRVIQTKNYMKFIIKEPNIKSDSCRLCHSQQETIEHITAGCSFLASKQYTDRHNNVAKQIHLQLAKTYRLIDKTEPYYKYTPKQILETELAKLYWDRNITTDKTTINNRPDITLTNKQTKITYLIDIAVPNTDNVKKKHTEKIQKYIPLAEEIKEMWHQQHVRIIPIIISATGIIPKTLHASLSELELPPLLYINLQKSVILDTCSTVRKFINTSPEN

SEQ ID NO: 23522 - protein, 1397 aa, Duroca duroca
MRLRSGNKLPQAGTSTIRDGESRLAPSGPSCPTYSGGDTVLQSTAQSPTAAGSHHHPLSSAHTTSSFSIFPSIPSTNPYSRSPTHSISSTSNSRQPEDVVQETDLVGSLAPTTTSQTKRRKWSKEMNEFILRTYYQLTFMETDTNGYLPSLHTKFIERFPEMHMITRQRIGDQRRAIINRKLLTQKTIDTIYGEVSEEINNMQINIDTHKTHIPITFTDNSVTAPSNNSQAPNTQQTRTRQVGQRMRWAKEHNEAIMRAYYKITLLEANTSAYRGLLHQAFIAAFPSLNHITEQRVADQRRLIILNKYLSEERLQQIRDEIRNELVPQIRSNIQTHTIPQDIVTDVDPVSIPEPEQANAFTMDSEIDSHTRNIEIERTFKAAYNYFININPTQRSYIPKQKSSRKLGSIVSYINNNILPKYLSSNTEFSTMQTVVYCAAWAAAKTNGAKIEIPPRADHDWRHKAKKARWQIRLERRIDELRVQIGRLTQYIRGNRSEKLLKHVKYIQNQYKIHATHENPNTQLAEFLDTLKQKLTTYSNRLKRYKKCTIRKIHNKQFASNEKQFYRQLKPHEAEPEDRVHNNSTPSPDELRRFWANIWENPVHHNKEADWIQNERNRHSNVEPMDFQCISLEVFHEVIKRLHNWKSPGSDNIHNFWYKKFTYIHPLLYTHINKFITMPQTLPDYVTEGKTYMLPKDPSCLSNPSKYRPITCLQTIYKIITSCITHIIYKHVDKNYILAEEQKGCRKDSQGCKEQLIIDAIVLKQTHSRKSDLYSMYIDYRKAFDSVPHTWLVKILEIYNIHPQIISFLQNTMTKWTTRLRLTTDTNTFETEHIKIRRGIFQGDALSPLWFCLAMNPLSNLLNSLKVGYNLDYKTTTDLPTDYSTHKLNHLLYMDDIKLYASTEKDLQQLAQCTEKFSQDICMEFGIDKCKINSIKAGQRYEHQYSTQTGETVMALSENEVYKYLGYSQAQQIEHKYIKNSLTQKFKHRLNTVLRSELYSKNTFKAINTFAVPILTYSFGVINWNKTELKALQRVINTTMTRHRKHHPRSSILRLTLPRNDGGRGLIDISNLHSKQITNLRTYFHNKANCSTLHNAIVQADEKFTPLNLKDRTQQKNERQTDRQTKLNEWNRKTLHGRHLHDLNQANVDKTASNEWLKRGELFPETEGFMLAIQDQVIETKNYNKHIIKLPNSFNDSCRKCKSSPETIQHITGACRAIVQTDYKHRHDQVAAIIHQNLAFKYKLIPKKVAYYKYSPKTVIDTVNCKLYWDRTILTDKTVHYNRPDITLHDKKNQVVYLIDIAVPNTHNLSTTHTEKLTKYTDLAIELRSQWKVKTVKTIPIVLSATGVIPHTLHTSLKLLDIHSLTYITLQKAVILNTCRIVRKFLSMDTTTPTFMLG

SEQ ID NO: 23523 - protein, 898 aa, Lymantria dispar
MHLSEFLDTMKQKLGSISNRLKRYKTCSLRKVQNKQFICNEKQCYRGLKVPITNANSTIPTLNLSTTSPTNSHNNISYISNKPPPAEELRNFWARIWENPVQHNIRADWIRQEQSYYLNSEPMAFQCISPEIFHQVINKLHNWKTPGSDNIHNYWYKKFTHIHPFIHKYINEFIEQPHTLPDYITMGTTYMLPKDPNDLSNAAKYRPITCLQTIYKIITSCLTQIISNHIDKNNVLAEQQKGCRKYSQGCKEQLTIDSILLKQTQLKKADMYSMYIDYKKAFDSVPHTWLLKILEIYRIHPQIISFLTSAMTKWTTRLRLTTDENTFTTEPIKVQRGIFQGDALSPLWFCLALNPLSNMLNSSNTGYSLVYKENDTEMQNDPLTYKLNHLLYMDDIKLYGTTEKELQQLVQITENFSQDICMEFGIDKCKINSIKNGQHYEHQHLTKSGHVIEALTNNEVYKYLGYNQSKQILHTYIKQSLGKQFRQRLNIILRSQLNSKNTSKAINSYAIPILTYSFAIINWTNTELKALQRIINTNMTQHRKHHPRSCIQRLTFPRSAGGRGIIDILNLHNKQITNLRTYFHNKALTSSLHKAVVQTDKKITPLNLSDRTPQKNESLVDRLTKLHEWAQKTLHGRHLNDLNQPTVDRVASNEWLRQGELFPETEGFMLAIQDQVIETMNYKKHIMKLPNSSNDSCRKCKGAPETIQHITGGCRAIAQTDYKHRHDQIAALIHQSLALKYKLITEKTAYYKYTPRTILDTSDYKLYWDRTILTDKTVHFNRPDITLHDKKNEIVYLIDIAIPNTHNLSSTHTEKLTKYTDLVTEIKSQWKVKTVKIIPIVLSSTGVIPHTLHTSLQLLHIQPLTYITLQKAAILNTCRIVRKFLSIDTHRNTTPVLD

SEQ ID NO: 23524 - protein, 1342 aa, Lymantria dispar
MLPEDVVQETVSANKLAPTTSTLNMRKKWNKAMNEFILRTYLQLTLMETDTNGYLPLLHIKFIEKFPEMNMISRQRVGDQRRAIVNKKLLTQTDIDRIYQDVQNEINHIKINTQTQDTQSQNTQIQNIQTTLPIVQPCNSSKPSKKQPEFINQRMRWTTEHNEVIIRNYYRITHLETNLSAYRGPLHQKFVATFPHLLHINEQRVADQRRLIICNKYLSEERLQAIKDEVRNELLHQRNCEHQVQNDTDTPSIQLEFNSYHDNNYINNIATRAHETDTHNTNNAQEIIIPYSEQQTIEIERIFKEVFSYFKNTDPIQRTYIPKQKSSKKLASTVHYINNNILPKYIKDDTEFITLQTILYSAAWTAAKINGTKIDIPPKLLNNCVFKRNKPKWQLRLENRIKELRAQIGRLTQYIRGNRSNKLIKHVNYIQTHYKVHATHEEHNMHLSEFLDTMKQKLGSISNRLKRYKTCSLRKVQNKQFICNEKQFYRGLKVPITNANSTIPTLNLSTTSPTNSHNNISYISNKPPPAEELRNFWARIWENPVQHNIRADWIRQEQSYYLNSEPMAFQCISPEIFHQVINKLHNWKTPGSDNIHNYWYKKFTHIHPFIHKYINEFIEQPHTLPDYITMGTTYMLPKDPNDLSNAAKYRPITCLQTIYKIITSCLTQIISNHIDKNNVLAEQQKGCRKYSQGCKEQLTIDSILLKQTQLKKADMYSMYIDYKKAFDSVPHTWLLKILEIYRIHPQIISFLTSAMTKWTTRLRLTTDENTFTTEPIKVQRGIFQGDALSPLWFCLALNPLSNMLNSSNTGYSLVYKENDTEMQNDPLTYKLNHLLYMDDIKLYGTTEKELQQLVQITENFSQDICMEFGIDKCKINSIKNGQHYEHQHLTKSGHVIEALTNNEVYKYLGYNQSKQILHTDIKQSLGKQFRQRLNIILRSQLNSKNTSKAINSYAIPILTYSFAIINWTNTELKALQRIINTNMTQHRKHHPRSCIQRLTFPRSAGGRGIIDILNLHNKQITNLRTYFHNKALTSSLHKAVVQTDKKITPLNLSDRTPQKNESLVDRLTKLNEWAQKTLHGRHLNDLNQPTVDRVASNEWLRQGELFPETEGFMLAIQDQVIETMNYKKHIMKLPNSSNDSCRKCKGAPETIQHITGGCRAIAQTDYKHRHDQIAAIIHQSLALKYKLITEKTAYYKYTPRTILDTSDYKLYWDRTILTDKTVHFNRPDITLHDKKNEIVYLIDIAIPNTHNLSSTHTEKLTKYTDLVTEIKSQWKVKTVKIIPIVLSSTGVIPHTLHTSLQLLHIQPLTYITLQKAAILNTCRIVRKFLSIDTHRNTTPVLD

SEQ ID NO: 23525 - protein, 1328 aa, Lymantria monacha
MLLEDAVQETVSVNKSAPTTSILTIRKKWNSTMNEFILRTYLQLTLMETDTNGYLPLLHSKFIEKFPEMNMISRQRVGDQRRAIVNKNLLARTDIDRIYKDVQNEISSLKLNTQTQDTQTQNIQTNLPLLQSRIASAQTKNQPEFVNQRMRWTKEHNETIMRNYYRITNLETNISAYRGPLHQEFIVAFPHLVHINEQRVADQRRLIICNKYLSEERLQTIKDEVANELLQQKHCENQGRANTNISSTQLEVNRHYDNNYLSSTAKNTYLTETNNTNSSQEIVVPYSEEQPVEIDIIFMEVFNYFKNTDPTQRSYIPKQKSSKKLASTVLYINNNILLKYIKMDTEFITLQTILYSAAWTAAKINGAKIEIPHTLINNCGFKRKKPKWQLRLECRVKELRAQIGRLTQYIRGNRSNKLVKHVNYIQTYYKIHATHEEPNKHLIELLDTMKQKLGSISNRLKRYKTCTLRKVQNKQFVCNEKQFYRGLRTPIANTNSTTPILNQSTSTHINSHNNSIYAGNSPPTAEELRSFWATIWENPMQHNISADWIRQEQNNYLNSEPLIFQSVPSEIFHLVINKLHNWKTPGSDNIHNYWYKKFTHIHPFIHKYINEFIEQPHTLPDYITVGTTYMLPKDPKDLSNASKYRPITCLQTIYKIITSCLTQIIANHIDKNNILAEQQKGCRKYSQGCKEQLTIDSILLKHTQLKKADMYSMYIDYKKPFDSVPHTWLLKILEIYRIHPQIISFLKSTMTKWTTRLRLQTDQNTLTTEPIKIQRGIFQGDGLSPIWFCLALNPLSNMLNTSNIGYSLDYKENDVELLTDSLTYKLNHLLYMDDIKLYGTTEEELRQLVQITENFSQDICMEFGIDKCKINSIKKGKHYEHQHLTKSGQIIEALTHNEAYKYLGYNQSQQIIHKDIKQSLDKQFRQRLNIILRSHLNSKNTSKAINSFAIPVLTYSFAIINWNNTELKSPQRTINTNMTQHRKHHPRSCIQRLTFPRTDGGRGIIDILNLHNKQITNLRRYFHNKSLTSSLHKAVVQNDKKITPLNLSDRAPQKNETIIDRLTKVNEWAQKTLHGRHLNDLNQPTVDKLASNEWLRQGELFPETEGFMLAIQDQVIETMNYKKHIMKLSNCSNDSCRKCKGAPETIQHITGACRAIAQTDYKHRHDQVAAIIHQSLALKYKLITEKTVYYKYTPRTILDTTDYKLYWDRTILTDKTVHFNRPDITLHDKKSEIVYLIDIAIPNTHNLSSTHTEKLTKYTDLVIEIKSQWKVKTVKIIPIVLSSTGVVPHTLHTSLKLLHIHPLIYITLQKAVILNTCRIVRKFLSIDT

SEQ ID NO: 23526 - protein, 840 aa, Lymantria dispar
MTHNDSRPRATSTSQTTSQNNRVNISAPNANDLRKFWARVWENPVHHDDNANWLQIEQTRYVNLEPMNFQGIPVEVFHDVLKNLQNWKAPGSDNIHNFWYKKFTYIHPVIYKYINKFIEYPHTLPDYIATGTTFMIPKDANRLSDPAKYRPITCLQTIYKIITSCLSRIILGYIDKNNMLAEQQKGCRKYSQGCKEQLTIDSVLLKQTLKKKSDIYTMYIDYKKAFDSVPHSWLIKTLEIHCIHPQIISFLKNTMTKWTTRLRLTQNTNTIITEPIHVQRGIFQGDALSPLWFCLALNPLSHMLNSLNKGYNLPYKENNTEIRTEFSNYKLNHLLYMDDIKLYGSTQQELQDLVKVTENFSQDICMEFGIDKCKTNSIKNGQRYQHQYHMQTGSLIEALSEGEVYKYLGYNQALEIAHKDVKDSLTKDFKHRLNTILKNYLNSKNTSKAINTFAIPILTYSFGILNWRKNELKSLQRTINTTMTQYRKHHPRSCIQRMTLTRKDGGRGLIDILNLHNKQITNLRSYFHRKALTSSLHKAIVFNDNKITPLNLTDKVQQRNEIQINNQIKLNEWTQKALHGRHIHDLNQPNVDKIASNEWLKRGELFPETEGFMLAIQDQIIETKNYRKYIMKLGNSSDDSCRKCKSSAETIQHVTGACRAIVQTDYKHRHDQVAAIIHQTLALKYKLISEKVAYYKYTPQTVLDTAEYKLYWDRTILTDKTVHCNRPDITLHDKKQEIVYLIDIAIPNTHNLSTSHTEKITKYTDLAIELKTQWKVKAVKTIPIILSTTGVIPYTLHTSLKLLDIHPLTYINLQKAVILNTCRIVRKFLSIDAPTTIVLG

SEQ ID NO: 23527 - protein, 1398 aa, Ctenoptilum multiguttatum
MLLRNGKNIPQASTGANSDGESRPVQLSAGCPTYSGGDTVSQTSVQFKTAADHNYDLTSVDSTPSTSIFPSVPSTHSYCTYSPTHSVSATNCEPMEDVVQETSTATSLAPTARGFKTRRKWSKTMNEFILRTYLQLTLMETDTSGYLAPLHTKFLESFPEMDMISRQRIGDQRRAIINKKLLTQNDIDRIYKEAQNYINTLPPTTQTENSIIHSHNSQRHQINSYQKTQRIRWTQQHNEAIMRAYYKITLLEKHTSAYREQLHKSFITSFPHLQHVTEQRIADQRRLIIHNRYISIERLQAIKDEVANELFLEKNLITSNNNSTTNNNEQDNNCLINIDIDLFNDTDNNTSISPNTPLSHRNQQNTKEIEELFNMAYEYFKNTDPTQRSYIPKQKSSKKLALIVNYINNNILPKYMDCNTEFITMQTALYCAAWAAAKCNGAKLEIPPNEKSNCKYKKNKPAWQIRLEHRIEELRAQIGRLTQYIKGNKSKKIEKHIKYIKKRYKIHATFENPNTQLPEFLDTLKQKLTTFSNRLKRYMACTLRKKQNNLFSFNEKQFYRELKMPKNNPERNVHNSYPPTASQNTLQTDIDQSIPPVDELRSYWANIWENPIQHNIESDWIKNEQNKYTNSEPMEFQSIPAEVFRDVITKLHNWKSPGSDNLHNFWYKKFTTAHPFIYRYINQFIAMPHTIPEYITTGTTYMLPKDPNNLSNPAKYRPITCLQTFYKIITSCITQIIYNHVDKNNILAEQQKGCRKYSRGCKEQLTIDSVVLKQTQQRKSNLYSMYIDYKKAFDSVPHTWLVQILEMYHIHPVVISFLQNIMAKWTTRLRLTTHTNIVVTDPIKIQRGIFQGDALSPLWFCLALNPLSNLLNSLNAGYNLKYNENETDSLTDHSAYKLNHLLYMDDIKIYGSTEKELQQMALITEKFSNDICMEFGIDKCRTNSVKAGKSCNYQYHMQTGDIVEALTEDGVYKYLGYNQAQQIQHKDIKDSLTKQFKHRLNNVLRSKLNSKNTVKAVNSYAIPVLTYSFGILNWTKTELKSIQRLINTTMTRHRKHHPRSCIQRLTLPRKEGGRGFIDILNLYSKQITNLRNFFHSKSLKSLLHRAIIQNDKKLTPLNLYDKNQQKCEIQTDSQTKLNEWSRKPLHGRHLHDLNQPTVDKTASNEWIKRGELFPETEGFILAIQDQVVETNNYKKYIMKLPNYSDDSCRKCKASSETIQHITGSCRTIAQTDYKHRHDQVAAIIHQNLAFKHKLITEKTVYYKYTPQTVLDSKDFKLYWDRTILTDKTLHYNRPDITLYDKKNQTVYLIDIAIPNTHNLTATHTEKLTKYTDLAIEIKTQWKVKSVVTVPILLSSTGVIPLTLHTSLKALDINPYIYITLQKAAILNTCRIVRKFLSM

SEQ ID NO: 23528 - protein, 880 aa, Lymantria monacha
MKQKLGSISNRLKRYKTCTLRKVQNKQFVCNEKQFYRGLRTPIVNTNSTTPILNQSTSTHINSHNNSIYAGNNPPTTEELRSFLATIWENPMQHNISADWIRQEQNNYLNSEPMIFQSVPSEIFHLVINKLHNWKTPGSDNIHNYWYKKFTHIHPFIHKYINEFIEQPHTLPDYITVGTTYMLPKDPKDLSNASKYRPITCLQTIYKIITSCLTQIIANHIDKNNILAEQQKGCRKYSQGCKEQLTIDSILLKHTQIKKADMYSMYIDYKKTFDSVPHTWLLKILEIYRIHPQIISFLKSTMTKWTTRLRLQTDQNTLTTEPIKIQRGIFQGDALSPIWFCLALNPLSNMLNTSNIGYSLDYKENDVELLTDSLTYKLNHLLYMDDIKLYGTTEEELRQLVQITENFPQDICMEFGIDKCKINSIKKGKHYEHQHLTKSGQIIEALTHNEAYKYLGYNQSQQIIHKDIKQSLDKQFRQRLNIILRSHLNSKNTSKAINSFAIPVLTYSFAIINWNNTELKSLQRTINTNMTQHRKHHPRSCIQRLTFPRTDGGRGIIDILNLHNKQITNLRRYFHNKSLTSSLHKAVVQNDKKITPLNLSDRAPQKNETIIDRLTKVNEWAQKTLHGRHLNDLNQPTVDKLASNEWLRQGELFPETEGFMLAIQDQVIETMNYKKHIMKLSNCSNDSCRKCKGAPETIQHITGACRAIAQTDYKHRHDQVAAIIHQSLALKYKLITEKTVYYKYTPRTILDTTDYKLYWDRTILTDKTVHFNRPDITLHDKKSEIVYLIDIAIPNTHNLSSTHTEKLTKYTDLVIEIKSQWKVKTVKIIPIVLSSTGVVPHTLHTSLKLLHIHPLIYITLQKAVILNTCRIVRKFLSIDT

SEQ ID NO: 23529 - protein, 1404 aa, Lymantria dispar
MRLRSGYQLPQAGTGVNHDGESRLELPSSSCPTYSGGDTVSQTSTSAQPQAVADHHHHESSSITSFPSVTSSNTYSCQPSDSSSTVSSMLLRDVVQETESVAILAPTTSSLKMRKKWSQEMNEFILRTYLQLTLMETDTNGYLPPLHIKFIERFPDMNTISRQRVGDQRRAIINKKLLPQATIKHIYNEVRKEIHSMKNDIHNNSQTDTPTHNFSHHNSMQSKNQTNQRIHWTAEHNETIIRNYYKITQLESNISGYRGPLHETFITTFPHLNHITEQRIADQRRLIIRNKYINEERLQAIRDEVSSEFHYNNNREYINLVPTQIEHNDTQNTYYNNIETGVPTNNAQESPILHASQEPTNIERIYTEAYAYFVNIDPTLRCYIPKQKSSRKLAIIIQYINHNILPKHVNDDTEFSTLQTVLYCAAWTVAKCNGSNIEISPGVESNNNNKKIKPKWQTRLENKISVLRAQIGRLTHYIKGNRSLKLLKHITLIQKQYKIHATHETPNTHLYEFLDTLKQKLTSVSNRLKRYKTSTLRQTQNKQFVSNEKQFYRTLKSATLNPYDITRSDSRPRATSTSQTTSQNNRVNISAPNANNLRKFWARVWENPVHHDDNANWLQIEQTRYLNLEPMNFQGIPIEVFHDVLKNLQNWKAPGSDNIHNFWYKKFTYIHPVIYKYINKFIEYPDTLPDYIATGTTFMIPKDANRLSDPAKYRPITCLQTIYKIITSCLSRIILGYIDKNNMLAEQQKGCRKYSQGCKEQLTIDSVLLKQTLQKKSDIYTMYIDYKKAFDSVPHSWLIKTLEIHCIHLQIISFLKNTMTKWTTWLRLTQNTNTIITEPIHVQRGIFQGDALSPLWFCLALNPLSHMLNSLNKGYNLPYKENNTEIRTEFSNYKLNHLLYMDDIKLYGSTQQELQDLVKVTENFSQDICMEFGIDKCKTNSIKKGQRYQHQYHMQTGSLIEALSEGEVYKYLGYNQALEIAHKDVKDSLTKDFKHRLNTILKNYLNSKNTSKAINTFAIPILTYSFGILNWRKNELKSLQRTINTTMTRYRKHHPRSCIQRMTLTRKDGGRGLIDILNLHNKQITNLRFYFHRKALTSSLHKAIVFNDNKITPLNLTDKVQQRNEIQINNQIKLNEWTQKALHGRYIHDLNQPNVDKIASNEWLKRGELFPETEGFMLAIQDQIIETKNYRKYIMKLGNSSDDSCRKCKSSAETIQHVTGACRAIVQTDYKHRHDQVAAIIHQTLALKYKLISEKVAYYKYTPQTVLDTAEYKLYWDRTILTDKTVHCNRPDITLHDKKQEIVYLIDIAIPNTHNLSTSHTEKITKYTDLAIELKTQWKVKAVKTIPIILSTTGVIPYTLHTSLKLLDIHPLTYINLQKAVILNTYRIVRKFLSIDAPTTIVLG

SEQ ID NO: 23530 - protein, 840 aa, Lymantria dispar
MTHNDSRPRATSTSQTTSQNNRVNISAPNANDLRKFWARVWENPVHHDDNANWLQIEQTRYLNLEPMNFQGIPVEVFHDALKNLQNWKAPGSDNIHNFWYKKFTYIHPVIYKYINKFIEYPHTLPDYIATGTTFMIPKDANRLSDPAKYRPITCLQTIYKIITSCLSRIILGYIDKNNMLAEQQKGCRKYSQGCKEQLTIDSVLLKQTLKKKSDIYTMYIDYKKAFDSVPHSWLIKTLEIHCIHPQIISFLKNTMTKWTTRLRLTQNTNTIITEPIQVQRGIFQGDALSPLWFCLALNPLSHMLNSLNKGYNLPYKENNTEIRTEFSNYKLNHLLYMDDIKLYGSTQQELQDLVKVTENFSQDICMEFGIDKCKTNSIKNGQRYEHQYHMQTGSLIEALSEGEVYKYLGYNQALEIAHKDVKDSLTKDFKHRLNTILKNYLNSKNTSKAINTFAIPILTYSFGILNWRKNELKSLQRTINTTMTQYRKHHPRSCIQRMTLTRKDGGRGLIDILNLHNKQITNLRSYFHRKALTSSLHKAIVFNDNKITPLNLTDKVQQRNEIQINNQIKLNEWTQKALHGRHIHDLNQPNVDKIASNEWLKRGELFPETEGFMLAIQDQIIETKNYRKYIMKLGNSSDDSCRKCKSSAETIQHVTGACRAIVQTDYKHRHDQVAAIIHQTLALKYKLISEKVAYYKYTPQTVLDTAEYKLYWDRTILTDKTVHCNRPDITLHDKKQEIVYLIDIAIPNTHNLSTSHTEKITKYTDLAIELKTQWKVKAVKTIPIILSTTGVIPYTLHTSLKLLDIHPLTYINLQKAVILNTCRIVRKFLSIDAPTTIVLG

SEQ ID NO: 23531 - protein, 898 aa, Lymantria dispar
MHLSEFLDTMKQKLGSISNRLKRYKTCSLRKVQNKQFICNEKQFYRGLKVPITNANSTIPTLNLSTTSPTNSHNNISYISNKPPPAEELRNFWARIWENPVQHNIRADWIRQEQSYYLNSEPMAFQCISPEIFHQVINKLHNWKTPGSDNIHNYWYKKFTHIHPFIHKYINEFIEQPHTLPDYITMGTTYMLPKDPNDLSNAAKYRPITCLQTIYKIITSCLTQIISNHIDKNNVLAEQQKGCRKYSQGCKEQLTIDSILLKQTQLKKADMYSMYIDYKIAFDSVPHTWLLKILEIYRIHPQIISFLTSAMTKWTTRLRLTTDENTFTTEPIKVQRGIFQGDALSPLWFCLALNPLSNMLNSSNTGYSLVYKENDTEMQNDPLTYKLNHLLYMDDIKLYGTTEKELQQLVQITENFSQDICMEFGIDKCKINSIKNGQHYEHQHLTKSGHVIEALTNNEVYKYLGYNQSKQILHTDIKQSLGKQFRQRLNIILLSQLNSKNTSKAINSYAIPFLTYSFAIINWTNTELKALQRIINTNMTQHRKHHPRSCIQRLTFPRSAGGRGIIDILNLHNKQITNLRTYFHNKALTSSLHKAVVQTDKKITPLNLSDRTPQKNETLVDRLTKLNEWAQKTLHGRHLNDLNQPTVDRVASNEWLRQGELFPETEGFMLAIQDQVIETMNYKKHIMKLPNSSNDSCRKCKGAPETIQHITGGCRAIAQTDYKHRHDQIAAIIHQSLALKYKLITEKTAYYKYIPRTILDTSDYKLYWDRTILTDKTVHFNRPDITLHDKKNEIVYLIDIAIPNTHNLSSTHTEKLTKYTDLVTEIKSQWKVKTVKIIPIVLSSTGVIPHTLHTSLQLLHIQPLTYITLQKAAILNTCRIVRKFLSIDTHRNTTPVLD

SEQ ID NO: 23532 - protein, 1342 aa, Lymantria dispar
MLPEDVVQETVSANKLAPTTSTLNMRKKWNKAMNEFILRTYLQLTLMETDTNGYLPLVHIKFIEKFPEMNMISRQRVGDQRRAIVNKKLLTQTDIDRIYQDVQNEINRIKINTQTQDTQSQNTQIQNIQTTLPIVQPCNSSKPSKKQPEFINQRMRWTTEHNEVIIRNYYRITHLETNLSAYRGPLHQKFVATFPHLLHINEQRVADQRRLIICNKYLSEERLQAIKDEVRNELLHQRNCEHQVQNDTDTPSIQLEFNSYHDNNYINNIATRAHETDTHNTNNAQEIIIPYSEQQTIEIERIFKEVFSYFKNTDPIQRTYIPKQKSSKKLASTVHYINNNILPKYIKDDTEFITLQTILYSAAWTAAKINGTKIDIPPKLLNNCVFKRNKPKWQLRLENRIKELRAQIGRLTQYIRGNRSNKLIKHVNYIQTHYKVHATHEEHNMHLSEFLDTMKQKLGSISNRLKRYKTCSLRKVQNKQFICNEKQFYRGLKVPITNANSTIPTLNLSTTSLTNSHNNISFISNKPPPAEELRNFWARIWENPVQHNIRADWICQEQSYYLNSEPMAFQCISPEIFHQVINKLHNWKTSGSDNIHNYWYKKFTHIHPFIHKYINEFIEQPHTLPDYITMGTTYMLPKDPNDLSNAAKYRPITCLQTIYKIITSCLTQIISNHIDKNNVLAEQQKGCRKYSQGCKEQLTIDSILLKQTQLKKADMYSMYIDYKKAFDSVPHTWLLKIIEIYRIHPQIISFLTSAMTKWTTRLRLTTDENTFTTEPIKVQRGIFQGDALSPLWFCLALNPLSNMLNSSNTGYSLVYKENDTEMQNDPLTYKLNHLLYMDDIKLYGTTEQELQQLVQITENFTQDICMEFGIDKCKINSIKNGQHYEHQHLTKSGHVIEALTNNEVYKYLGYNQSKQILHTDIKQLLGKQFRQRLNIILRSQLNSKNTSKAINSYAIPILTYSFAIINWTNTELKALQRIINTNMTQHRKHHPRSCIQRLTFPRSAGGRGIIDILNLHNKQITNLRTYFHNEALTSSLHKAVVQTDKKITPLNLSDRTPQKNETLVDRLTKLNEWAQKTLHGRHLNDLNQPTVDRVASNEWLKQGELFPETEGFMLAIQDQVIETMNYKKHIMKLPISSNDSCRKCKGAPETIQHITGGCRAIAQTDYKHRHDQIAAIIHQSLALKYKLITEKTAYYKYTPRTILDTSDYKLYWDRTILTDKTVHFNRPDITLHDKKNEIVYLIDIAIPNTHNLSSTHTEKLTKYTDLVTEIKSQWKVKTVKIIPIVLSSTGVIPHTLHTSLQLLHIQPLTYITLQKAAILNTCRIVRKFLSIDTHRNTTPVLD

SEQ ID NO: 23533 - protein, 1189 aa, Lymantria dispar
MNALETTEHNEVIIRNYYRITHLETNLSAYRGPLHQKFVATFPHLLHINEQRVADQRRLIICNKYLSEERLQAIKDEVRNELLHQRNCEHQVQNDTDTPSIQLEFNSYHDNNYINNIATRAHETDTHNTNNAQEIIIPYSEQQTIEIERIFKEIFSYFKNTDPIQRTYIPKQKSSKKLASTVHYINNNILPKYIKDDTEFITLQTILYSAAWTAAKINGTKIDIPPKLLNNCVFKRNKPKWQLRLENRIKELRAQIGRLTQYIRGNRSNKLIKHVNYIQTHYKLHATHEEHNMHVSEFLDTMKQKLGSISNRLKRYKICSLRKVQNKQFIYNEKQFYRGLKVPITNANSTIPTLNLSTTSPTNSHNNISYISNKPPPAEELRNFWARIWENPVQHNIRADWIRQEQSYYLNSEPMAFQCISPEIFHQVINKLHNWKTPGSDNIHNYWYKKFTHIHPFIHKYINEFIEQPHTLPDYITMGTTYMLPKDPNDLSNAAKYRPITCLQTIYKIITSCLTQIISNHIDKNNVLAEQQKGCRKYSQGCKEQLTIDSILLKQTQLKKADMYSMYIDYKKAFDSVPYTWLLKILEIYRIHPQIISFLTSAMTKWTTRLRLTTDENTFTTEPIKVQRGIFQGDALSPLWFCLALNPLSNMLNLSNTGYSLVYKENDTEMQNDPLTYKLNHLLYMDDIKLYGTTEKELQQLVQITENFSQDICMEFGIDKCKINSIKNGQHYEHQHLTKSGHVIEALTNNEVYKYLGYNQSKQILHTDIKQSLGKQFRQRLNIILRSQLNSKNTSKAINSYAIPILTYSFAIINWTNTELKALQRIINTNMTQHRKHHPRSCIRRLTFPRSAGGRGIIDILNLHNKQITNLRTYFHNKALTSSLHKAVVQTDKKITPLNLSDRTPQKNETLVDRLTKLNEWAQKTLHGRHLNDLNQPTVDRVASNEWLRQGELFPETEGFMLAIQDQVIETMNYKKHIMKLPNSSNDSCRKCKGAPETIQHITGGCRAIAQTNYKHRHDQIAAIIHQSLALKYKLITEKTAYYKYTPRTILDTSDYKLYWDRTILTDKTVYFNRPDITLHDKKNEIVYLIDIAIPNTHNLSSTHTEKLTKYTDLVTEIKSQWKVKTVKIIPIVLSCTGVIPHTLHTSLQLLHIQPLTYITLQKAAILNTCKIVRKFLSIDTHRNTTPAA

SEQ ID NO: 23534 - protein, 1342 aa, Lymantria dispar
MLPEDVVQETVSANKLAPTTSTLNMRKKWNKAMNEFILRTYLQLTLMETDTNGYLPLLHIKFIEKFPEMNMISRQRVGDQRRAIVNKKLLTQTDIDRIYQDVQNEINRIKINTQTQDTQSQNTQIQNIQTTLPIVQPCNSSKPSKKQPEFINQRMRWTTEHNEVIIRNYYRITHLETNLSAYRGPLHQKFVATFPHLLHINEQRVANQRRLIICNKYLSEERLQAIKDEVRNELLHQRNCEHQVQNDTDTPSIQLEFNSYHDNNYINNIATRAHETDTHNTNNAQEIIIPYSEQQTIEIERIFKEVFSYFKNTDPIQRTYIPKQKSSKKQASTVHYINNNILPKYIKDDTEFITLQTILYSAAWTAAKINGTKIDIPPKLLNNCVFKRNKPKWQLRLENRIKELRAQIGRLTQYIRGNRSNKLIKHVNYIQTHYKLHATHEEHNMHLSEFLDTMKQKLGSISNRLKRCKICSLRKVQNKQFICNEKQFYRGLKVPITNANSTIPTLNLSTTSPTNSHNNISYISNKPPPAEELRNFLAGIWENPVQHNIRADWIRQEQSYYLNSEPMAFQCISPEIFHQVINKLHNWKTPGSDNIHNYWYKKFTHIHPFIHKYINEFIEQPHTLPDYITMGTTYMLPKDPNDLSNAAKYRPITCLQTIYKIITSCLTQIISNHIDKNNVLAEQQKGCRKYSQGCKEQLTIDSILLKQTQLKKADMYSMYIDYKKAFDSVPHTWLLKILEIYRIHPQIISFLTSAMTKWTTRLRLTTDENTFTTEPIKVQRGIFQGDALSPLWFCLALNPLSNMLNLSNTGYSLVYKENDIEMQNDPLTYKLNHLLYMDDIKLYGTTEKELQQLVQITENFSQDICMEFGIDKCKINSIKNGQHYEHQHLTKSGHVIEALTNNEVYKYLGYNQSKQILHTDIKQSLGKQFRQRLNIILRSQLNFKNTSKAINSYAIPILTYSFAIINWTNTELKALQRIINTNMTQHRKHHPRSCIQRLTFPRSAGGRGIIDILNLHNKQITNLRTYFHNKALTSSLHKAVVQTHKKITPLNLSDRTPQKNETLVDRLTKLNEWAQKTLHGCHLNDLNQPTVDRVASNEWLRQGELFPETEGFMLGIQDQVIETMNYKKHIMKLPNSSNDSCRKCKGAPETIQHITGGCRAIAQTDYKHRHDQIAAIIHQSLALKYKLITEKTAYYKYTPRTILDTSDYKLYWDRTILTDKTVHFNRPDITLHDKKNEIVYLIDIAIPNTHNLSSTHTEKLTKYTDLVTEIKSQWKVKTVKIIPIVLSCTGVIPHTLHTSLQLLHIQPLTYITLQKAAILNTCRIVRKFLSIDTHRNTIPVLD

SEQ ID NO: 23535 - protein, 898 aa, Lymantria dispar
MHLSEFLDTMKQKLGSISNRLKRYKTCSLRKVQNKQFICNEKQFYRGLKVPITNANSTIPTLNLSTTSPTNSHNNISYISNKPPPAEELRNFWARIWENPVQHNIRADWIRQEQSYYLNSEPMAFQCISPAIFHQVINKLHNWKTPGSDNIHNYWYKKFTHIHPFIHKYINEFIEQPHTLPDYITMGTTYMLPKDPNDLSNAAKYRPITCLQTIYKIITSCLTQIISNHIDKNNVLAEQQKGCRKYSQGCKEQLTIDSILLKQTQLKKADMYSMYIDYKKAFDSVPHTWLLKILEIYRIHPQIISFLTSAMTKWTTRLRLTTDENTFTTEPIKVQRGIFQGDALSPLWFCLALNPLSNMLNSSNTGYSLVYKENDTEMQNDPLTYKLNHLLYMDDIKLYGTTEKELQQLVQITENFSQDICMEFGIDKCKINSIKNGQHYEHQHLTKSGHVIEALTNNEVYKYLGYNQSKQILHTDIKQSLGKQFRQRLNIILRSQLNSKNTSKAINSYAIPILTYSFAIINWTNTELKALQRIINTNMTQHRKHHPRSCIQRLTFPRSAGGRGIIDILNLHNKQITNLRTYFHNKALTSSLHKAVVQTDKKITPLNLSDRTPQKNETLVDRLTKLNEWAQKTLHGRHLNDLNQPTVDRVASNEWLRQGELFPETEGFMLAIQDQVIETMNYKKHIMKLPNSSNDSCRKCKGAPETIQHITGGCRAIAQTDYKHRHDQIAAIIHQSLALKYKLITEKTAYYKYTPRTILDTSDYKLYWDRTILTDKTVHFNRPDITLHDKKNEIVYLIDIAIPNTHNLSSTHTEKLTKYTDLVTEIKSQWKVKTVKIIPIVLSSTGVIPHTLHTSLQLLHIQPLTYITLQKAAILNTCRIVRKFLSIDTHRNTTPVLD

SEQ ID NO: 23536 - protein, 1416 aa, Lymantria monacha
MRLRSGYKLPQAGTGVNHDGESRPECQNLGCPTYSGGGTESQIVNFVQSQTVSERQHRLSSVNSFSSLTSTISFSRISPNSTPIASSNMLLEDAVQETVSVNKSAPTTSTLTMRKKWNSTMNEFILHTYLQLTLMETDTNGYLPLLHSKFIEKFPEMNMISRQRVGDQRRAIVNKNLLARTDMDRIYKDVQNEISSLKLNTQTQDTQTQNIQTNLPLLQSRIASAQTKNQPEFVNQRMRWTKEHNETIMRNYYRITNLETNISAYRGPLHQEFIVAFPHLVHINEQRVADQRRLIICNKYLSEERLQTIKDEVANELLQQKHCENQGRANTNISSTQLEVNRHYDNNYLSSTAKNTYLTEINNTNSSQEIVVPYSEEQPVEIDIIFMEVFNYFKNTDPTQRSYIPKQKSSKKLASTVLYINNNILPKYIKMDTEFITLQTILYSAAWTAAKINGAKIEIPHTLINNCGFKRKKPKWQLRLECRVKELRAQIGRLTQYIRGNRSNKLVKHVNYIQTYYKIHATHEEPNKHLIEFLDTMKQKLGSISNRLKRYKTCTLRKVQNKQFVCNEKQFYRGLRTPIANTNSTTPILNQSTSTHINSHNNSIYAGNSPPTAEELRTFWATIWENPMQHNISADWIRQEQNNYLNSEPMIFQSVPSEIFHLVINKLYNWKTPGSDNIHNYWYKKFTHIHPFIHKYINEFIEQPHTLPDYITVGTTYMLPKDPKDLSNASKYRPITCLQTIYKIITSCLTQIIANHIDKNNILAEQQKGCRKYSQGCKEQLTIDSILLKHTQLKKADMYSMYIDYKKAFDSVPHTWLLKILDIYRIHPQIISFLNSTMTKWTTRLRLQTDQNTLTTEPIKIQRGIFQGDALSPIWFCLALNPLSNMLNTSNIGYSLDYKENDVELLTDSLTCKLNHLLYMDDIKLYGTTEEELRQLVQITENFSQDICMEFGIDKCKINSIKKGKHYEHQHLTKSGQIIETLTHNEAYKYLGYNQSQQIIHKDIKQSLDKQFRQRLNIILRSHLNSKNTSKAINSFAIPVLTYSFAIINWNNTELKSLQRTINTNMTQHRKHHPRSCIQRLTFPRTDGGRGIIDILNLHNKQITNLRRYFHNKSLTSSLHKAVVQNDKKITPLNLSDRAPQKNETIIDRLTKVNEWAQKTLHGRHLNDLNQPTVDKLASNEWLRQGELFPETEGFMLAIQDQVIETMNYKKHIMKLSNCSNDSCRKCKGAPETIQHITGACRAIAQTDYKHRHDQVAAIIHQSLALKYKLITEKTVYYKYTPRTILDTTDYKLYWDRTILTDKTVHFNRPDITLHDKKSEIVYLIDIAIPNTHNLSSTHTEKLTKYTDLVIEIKSQWKVKTVKIIPIVLSSTGVVPHTLHTSLKLLHIHPLIYITLQKAVILNTCRIVRKFLSIDT

SEQ ID NO: 23537 - protein, 1429 aa, Lymantria dispar
MRLRSGYKLPQTGTGVNHDGESRPERLSLGCPTYSGGGNGSQIVTSAQSQTAAERQQELSSPNSFPSLISTNSFSCLSSNSTSIVSSMLPEDVVQETVSANKLAPTTSTLNMRKKWNKAMNEFILRTYLQLTLMETDTNGYLPLLHIKFIEKFPEMNMISRQRVGDQRRAIVNKKLLTQTDIDRIYQDVQNEINHIKINTQTQDTQSQNTQIQNIQTTLPIVQPCNSSKPSKKQPEFINQRMRWTTEHNEVIIRNYYRITHLETNLSAYRGPLHQKFVATFPHLLHINEQRVADQRRLIICNKYLSEERLQAIKDEVRNELLHQRNCEHQVQNDTDTPSIQLEFNSYHDNNYINNIATRAHETDTHNTNNAQEIIIPYSEQQTIEIERIFKEVFSYFKNTDPIQRTYIPKQKSSKKLASTVHYINNNILPKYIKDDTEFITLQTILYSAAWTAAKINGTKIDIPPKLLNNCVFKRNKPKWQLRLENKIKELRAQIGRLTQYIRGNRSNKLIKHVNYIQTHYKVHATHEEHNMYLSEFLDTMKQKLGSISNRLKRYKTCSLRKVQNKQFICNEKQFYRGLKVPITNANSTIPTLNLSTTSPTNSHNNISYISNKPPPAEELRNFWARIWENPVQHNIRADWIRQEQSYYLNSEPMAFQCISPEIFHQVINKLHNWKTPGSDNIHNYWYKKFTHIHPFIHKYINEFIEQPHTLPDYITMGTTYMLPKDPNDLSNAAKYRPITCLQTIYKIITSCLTQIISNHIDKNNVLAEQQKGCRKYSQGCKEQLTIDSILLKQTQLKKADMYSMYIDYKKAFDSVPHTWLLKILEIYRIHPQIISFLTSAMTKWTTRLRLTTDENTFTTEPIKVQRGIFQGDALSPLWFCLALNPLSNMLNSSNTGYSLVYKENDTEMQNDPLTYKLNHLLYMDDIKLYGTTEKELQQLVQITENFSQDICMEFGIDKCKINSIKNGQHYEHQHLTKSGHVIEALTNNEVYKYLGYNQSKQILHTYIKQSLGKQFRQRLNIILRSQLNSKNTSKAINSYAIPILTYSFAIINWTNTELKALQRIINTNMTQHRKHHPRSCIQRLTFPRSAGGRGIIDILNLHNKQITNLRTYFHNKALTSSLHKAVVQTDKKITPLNLSDRTPQKNESLVDRLTKLNEWAQKTLHGRHLNDLNQPTVDRVASNEWLRQGELFPETEGFMLAIQDQVIETMNYKKHIMKLPNSSNDSCRKCKGAPETIQHITGGCRAIAQTDYKHRHDQIAALIHQSLALKYKLITEKTAYYKYTPRTILDTSDYKLYWDRTILTDKTVHFNRPDITLHDKKNEIVYLIDIAIPNTHNLSSTHTEKLTKYTDLVTEIKSQWKVKTVKIIPIVLSSTGVIPHTLHTSLQLLHIQPLTYITLQKAAILNTCRIVRKFLSIDTHRNTTPVLD

SEQ ID NO: 23538 - protein, 1405 aa, Lymantria dispar
MQLRSGYQLPQAGTGVNHDGESRLELPSSSCPTYSGGDTVSQTSTSAQPQAVADHHHHHESSSITSFPSVTSSNTYSCQPSDSSSTVSSMLLRDVVQETESVAILAPTTSSLKMRKKWSQEMNEFILRTYLQLTLMETDTNGYLPPLHIKFIERFPDMNTISRQRVGDQRRAIINKKLLPQATIKHIYNEVRKEIHSMKNDIYNNSQTDTPTHNFSHHNSMQSKNQTNQRIRWTAEHNETIIRNYYKITQLESNISGYRGPLHETFITTFPHLNHITEQRIADQRRLIIRNKYINEERLQAIRDEVASESHYNNNREYINLVPTQIEHNDTQNTYFNNIETRVPTNNAQESPILHASQEPTNIERFYTEAYAYFVNIDPTLRCYIPKQKSSRKLAIIIQYINHNILPKHVNDDTEFSTLQTVLYCAAWTAAKCNGSNIEISPGVESNNNNKKIKPKWQTRLENKISVLRAQIGRLTHYIKGNRSLKLLKHITLIQKQYKIHATHETPNTHLYEFLDTLKQKLTSVSNRLRRYKTSTLRQTQNKQFVSNEKQFYRTLKSATLNPYDMTHNDSRPRATSTSQTTSQNNRVNISAPNANDLRKFWARVWENPVHHDDNANWLQIEQTRYLNLEPMNFQGIPVEVFHDALKNLQNWKAPGSDNIHNFWYKKFTYIHPVIYKYINKFIEYPHTLPDYIATGTTFMIPKDANRLSDPAKYRPITCLQTIYKIITSCLSRIILGYIDKNNMLAEQQKGCRKYSQGCKEQLTIDSVLLKQTLKKKSDIYTMYIDYKKAFDSVPHSWLIKTLEIHCIHPQIISFLKNTMTKWTTRLRLTQNTNTIITEPIHVQRGIFQGDALSPLWFCLALNPLSHMLNSLNKGYNLPYKENNTEIRTEFSNYKLNHLLYMDDIKLYGSTQQELQDLVKLTENFSQDICMEFGIDKCKTNSIKNGQRYEHQYHMQTGSLIEALSEGEVYKYLGYNQALEIAHKDVKDSLTKDFKHRLNTILKNYLNSKNTSKAINTFAIPILTYSFGILNWRKNELKSLQRTINTTMTQYRKHHPRSCIQRMTLTRKDGGRGLIDILNLHNKQITNLRSYFHRKALTSSLHKAIVFNDNKITPLNLTDKVQQRNEIQINNQIKLNEWTQKALHGRHIHDLNQPNVDKIASNEWLKRGELFPETEGFMLAIQDQIIETKNYRKYIMKLGNSSDDSCRKCKSSAETIQHVTGACRAIVQTDYKHRHDQVAAIIHQTLALKYKLISEKVAYYKYTPQTVLDTAEYKLYWDRTILTDKTVHCNRPDITLHDKKQEIVYLIDIAIPNTHNLSTSHTEKITKYTDLAIELKTQWKVKAVKTIPIILSTTGVIPYTLHTSLKLLDIHPLTYINLQKAVILNTCRIVRKFLSIDAPTTIVLG

SEQ ID NO: 23539 - protein, 1405 aa, Lymantria dispar
MQLRSGYQLPQAGTGVNHDGESRLELPSSSCPTYSGGDTVSQTSTSAQPQAAADHHHHHESSSITSFPSVTSSNTYSCQPSDSSSTVSSMLLRDVVQETESVAILAPTTSSLKMRKKWSQEMNEFILRTYLQLTLMETDTNGYLPPLHIKFIERFPDMNTISRQRVGDQRRAIINKKLLSQATIKHIYNEVRKEIHSMKNDIYNNSQTDTPTHNFSHHNSMQSKNQTNQRIRWTAEHNETIIRNYYKITQLESNISGYRGPLHETFITTFPHLNHITEQRIADQRRLIIRNKYINEERLQAIRDEVASESHYNNNREYINLVPTQIEHNDTQNTYFNNIETRVPTNNAQESPILHASQEPTNIERFYTEAYAYFVNIDPTLRCYIPKQKSSRKLAIIIQYINHNILPKHVNDDTEFSTLQTVLYCAAWTAAKCNGSNIEISPGVESNNNNKKIKPKWQTRLENKISVLRAQIGRLTHYIKGNRSLKLLKHITLIQKQYKIHATHETPNTHLYEFLDTLKQKLTSVSNRLRRYKTYTLRQTQNKQFVSNEKQFYRTLKSATLNPYDMTHNDSRPRATSTSQTTSQNNRVNISAPNANDLRKFWARVWENPVHHDDNANWLQIEQTRYLNLEPMNFQGIPVEVFHDVLKNLQNWKAPGSDNIHNFWYKKFTYIHPVIYKYINKFIEYPHTLPDYIATGTTFMIPKDANRFSDPAKYRPITCLQTIYKIITSCLSRIILGYIDKNNMLAEQQKGCRKYSQGCKEQLTIDSVLLKQTLKKKSDIYTMYIDYKKAFDSVPHSWLIKTLEIHCIHPQIISFLKNTMTKWTTRLRLTQNTNTIITEPIHVQRGIFQGDALSPLWFCLALNPLSHMLNSLNKGYNLPYKENNTEIRTEFSNYKLNHLLYMDDIKLYGSTQQELQDLVKVTENFSQDICMEFGIDKCKTNSIKNGQRYQHQYHMQTGSLIEALSEGEVYKYLGYNQALEIAHKDVKDSLTKDFKHRLNTILKNYLNSKNTSKAINTFAIPILTYSFGILNWRKNELKSLQRTINTTMTQYRKHHPRSCIQRMTLTRKDGGRGLIDILNLHNKQITNLRSYFHRKVLTSSLHKAIVFNDNKITPLNLTDKVQQRNEIQINNQIKLNEWTQKALHGRHIHDLNQPNVDKIASNEWLKRGELFPETEGFMLAIQDQIIETKNYRKYIMKLGNSSDDSCRKCKSSAETIQHVTGACRAIVQTDYKHRHDQVAAIIHQTLALKYKLISEKVAYYKYTPQTVLDTAEYKLYWDRTILTDKTVHCNRPDITLHDKKQEIVYLIDIAIPNTHNLSTSHTEKITKYTDLAIELKTQWKVKAVKTIPIILSTTGVIPYTLHTSLKLLDIHPLTYINLQKAVILNTCRIVRKFLSIDAPTTIVLG

SEQ ID NO: 23540 - protein, 1365 aa, Lymantria dispar
MRLRSGYKLPQTGTGVNHDGESRPERLSLGCPTYSGGGNGSQIVTSAQSQTAAERQQELSSPNSFPSLISTNSFSCLSSNSTSIVSSMLPEDVVQETVSANKLAPTTSTLNMRKKWNKAMNEFILRTYLQLTLMETDTNGYLPLLHIKFIEKFPEMNMISRQRVGDQRRAIVNKKLLTQTDIDRIYQDVQNEINHIKINTQTQDTQSQNTQIQNMQTTLPIVQPCNSSKPSKKQPEFINQRMRWTTEHNEVIIRNYYRITHLETNLSAYRGPLHQKFVATFPHLLHINEQRVADQRRLIICNKYLSEERLQAIKDEVRNELLHQRNCEHQVQNDTDTPSIQLEFNSYHDNNYINNIETRAHETDTHNTNNAQEIIIPYSEQQTIEIERIFKEVFSYFKNTDPIQRTYITKQKSSKKLASTVHYINNYITQIGRLTQYIRGNRSNKLIKHVNYIQTHYKVHATHEEHNMHLSEFLDTMKQKLGSISNRLKRYKTCSLRKVQNKQFICNEKQFYRGLKVPITNANSTIPTLNLSTTSPTNSHNNISYISNKPPPAEELRNFWARIWENPVQHNIRVDWIRQEQSYYLNSEPMAFQCISTAIFHQVINKLHNWKTPGSDNIHNYWYKKFTHIHPFIHKYINEFIEQPHTLPDYITMGTTYMLPKDPNDLSNAAKYRPITCLQTIYKIITSCLTQIISNHIDKNNVLAEQQKGCRKYSQGCKEQLTIDSILLKQTQLKKADMYSMYIDYKKAFDSVPHTWLLKILEIYRIHPQIISFLTSAMTKWTTRLRLTTDENTFTTEPIKVQRGIFQGDALSPLWFCLALNPLSNMLNSSNTGYSLVYKENDTEMQNDPLTYKLNHLLYMDDIKLYGTTEKELQQLVQITENFSQDICMEFGIDKCKINSIKNGQHYEHQHLTKSGHVIEALTNNEVYKYLGYNQSKQILHTYIKQSLGKQFRQRLNIILRSQLNSKNTSKAINSYAIPILTYSFAIINWTNTELKALQRIINTNMTQHRKHHPRSCIQRLTFPRSAGGRGIIDILNLHNKQITNLRTYFHNKALTSSLHKAVVQTDKKITPLNLSDRTPQKNESLVDRLTKLNEWAQKTLHGRHLNDLNQPTVDRVASNEWLRQGELFPETEGFMLAIQDQVIETMNYKKHIMKLPNSSNDSCRKCKGAPETIQHITGGCRAIAQTDYKHRHDQIAALIHQSLALKYKLITEKTAYYKYTPRTILDTSDYKLYWDRTILTDKTVHFNRPDITLHDKKNEIVYLIDIAIPNTHNLSSTHTEKLTKYTDLVTEIKSQWKVKTVKIIPIVLSSTGVIPHTLHTSLQLLHIQPLTYITLQKAAILNTCRIVRKFLSIDTHRNTTPVLD

SEQ ID NO: 23541 - protein, 952 aa, Lymantria monacha
MLFGQQLHSQGGVNPPGRRPVIKLLPITFTICTMKEEYIFYRPQVIGIRVGELNKHATHEEPNKHLIEFLDTMKQKLGSISNRLKRYKTCTLRKVQNKQFVCNEKQFYRGLRTPIANTNSTTPILNQSTSTHINSHNSSIYAGNSPPTAEELRSFWATIWENQLQHNTSADWIRQEQNNYLNSEPMIFQSVPSEIFHLVINKLHNWKTPGSDNIHNYWYKKFTHIHPFIHKYINEFIEQPHTLPDYITVGTTYMLPKDPKDLSNASKYRPITCLQTIYKIITSCLTQIISNHIDKNNILAEQQKGCRKYSQGCKEQLTIDSILLKHTQLKKADMYSMYIDYKNAFDSVPHTWLLKILEIYRIHPRIISFLKSTMTKWKTRLRLQTDQNTLTTEPIKIQRGIFQGDALSPIWFCLALNPLSNMLNTSNIGYSLDYKENDVELLTDSLTYKLNHLLYMDDIKLYGTTEEELRQLVQITENFSQDICMEFGIDKCKINSIKKGKHYEHQHHTKSGQIIEALTHNEAYKYLGYNQSQQIIHKDIKQSLDKQFRQRLNIILRSHLNSKNTSKAINSFAIPVLTYSFAIIKWNNTELKSLQRTINTNMTQHRKHHPRSCIQRLTFSRTDGGRGIIDILNLHNKQITNLRRYFHNKSLTSSLHKAVVQNDKKITPLNLSDRAPQKNETIIDRLTKVNEWAQKTLHGRHLNDLNQPTVDKLASNEWLRQGELFPETEGFMLAIQDQVIETMNYKKHIMKLSNCSNDSCRKCKGAPEIIQHITGACRAIAQTDYKHRHDQVAAIIHQSLALKYKLITEKTVYYKYTPRTILDTTDYKLYWDRTILTDKTVHFNRPDITLHDKKSEIVYLIDIAIPNTHNLSSTHTEKLTKYTDLVIEIKSQWKVKTVKIIPIVLSSTGVIPHTLHTSLKLLHIHPLIYIALQKAVILNTCRIVRKFLSIDT

SEQ ID NO: 23542 - protein, 1381 aa, Epargyreus clarus
MRLRSGYKLPQAGTGANRDGESRPEQSSSGCPTYSGGDAVSQTSAQSNTVADHHHDSESVASFSSVPSTNPYSHSPSCSTTTGNSMLTEDVVQEADPVENLAPTTASLNKRRKWSKPMNEFILRTYLQLTLMETDISGYLPSLHTKFIEKFPEMHTISRQRVGDQRRAIVNKKLLTQNDINRIYEEIREDINKSQTNAQIKNLQTIQSQLTDINDTRHRMRWTTEHNITIMRSYYKITLLETNISAYRGQIHKEFILKYPHLSHVTEQRIADQKRLILQNKYLSEERLQIIKDEVASELLLQKNNHTQIPISTPEHINEQNTINNIDSEIFTNMHNTNNSPTIKTLHLDQQKTTEIEEIFNTAYNYFKDTNPTQRSYIPKQKSSTKLAAIVNYINSYILPKCIDNDTEFTTLQTILYCGAWAAAKSNGSKLSIPPKLESHNTYNPKKPNWQIRLERRLDKLRAQIGQLTQFIKGNRSSKIEKEVRFIKTKYKIHATHENPNTCLTEFLDTLKQKLCTISNRLKRYKTCTLRKTQNNTFTTNEKQFYRGLKPTSPHNPQNHNQINNSPPSAHELRTFWATIWESPVQHNKMANWILQEEHRYTKVEPMVFQYIPAQVFDNIIKKLHNWKAPGSDNIHNFWYKKFTYIHPFILKYINKFIEMPHTLPSFITEGITYMLQKDQNDICNPAKYRPITCLQTLYKIMTSCLTHIIYNHVDENKILAEQQKGCRKYSQGCKEQLTIDSIVLKQSQKQKTDLYSMYIDYKKAFDSVPHSWLLQILEIYHIHPKIISFLQNTMTQWITRLKLTTGANTIITEPIKIQRGIFQGDALSPLWFCLALNPLSNMLNSSSTGYDLGIAENNIDSLSDFSVYKLNHLLYMDDIKLYGSTEEELHILAQTTERFSEDICMEFGIDKCKINSVRAGQTYQHQYQMQTGEVVEALNEGEVYKYLGYNQVQQIHHKGIKDSLTKQFKRRLNTILRSHLYSKNIFKAINTYAIPILTYSFGIINWNKAELKSLQRTINTTMTQHRKHHPRSCVQRMTLPRHEGGRGLIDILNLHNKQITNLRTYFHHKAQISSLHKAIVKNDKNLTPLNLLDKTLQKNEAQTDRQTKLNEWIRKALHGRHLHDLNLPNVDKIASNEWLKRGELFPETEGFMIAIQDQIIETKNYRKHIMKLPNASDDSCRKCKGAPETVQHITGACRAIAQTDYKHRHDQIAAIIHQNLAFKYKLIPEQTAYYKYTPQTVLDTTDYKLYWDRTILTDKTVHYNRPDITLHDKKNKIVYLIDIAIPNTHNLTSTHTEKITKYTDLAIELKTQWKVEKVKTVPIVLSTTGVIPNTLHSSLKLLNIHPLTYITLQKASILNTCRIVRKFLSMNTTSPAFMLG

SEQ ID NO: 23543 - protein, 1405 aa, Lymantria dispar
MQLRSGYQLPQAGTGVNHDGESCLELPSSSCPTYSGGDTVSQTSTSAQPQAVADHHHHHESSSITSFPSVTSSNTYSCQPSDSSSTVSSMLLRDVVQETESVAILAPTTSSLKMRKKWSQEMNEFILRTYLQLTLMETDTNGYLPPLHIKFIERFPDMNTISRQRVGDQRRAIINKKLLPQATIKHIYNEVRKEIHSMKNDIYNNSQTDTPTHNFSHHNSMQSKNQTNQRIRWTAEHNETIIRNYYKITQLESNISGYRGPLQETFITTFPHLNHITEQRIADQRRLIIRNKYINEERLQAIRDEVASESHYNNNREYINLVPTQIEHNDTQNTYFNNIETRVPTNNAQESPILHASQEPTNIERFYTEAYAYFVNIDPTLRCYIPKQKSSRKLAIIIQYINHNILPKHVNDDTEFSTLQTVLYCAAWTAAKCNGSNIEISPGVESNSNNKKIKPKWQTRLENKISVLRAQIGRLTHYIKGNRSLKLLKHITLIQKQYKIHATHQTPNTHLYEFLDTLKQKLTSVSNRLRRYKTSTLRQTQNKQFVSNEKQFYRTLKSATLNPYDMTHNDSRPRATSTSQTTSQNNRVNISVPNANDLRKFWARVWENPVHHDDNANWLQIEQTRYLNLEPMNFQGIPVEVFHDVLKNLQNWKAPGSDNIHNFWYKKFTYIHPVIYKYINKFIEYPHTLPDYIATGTTFMIPKDANRLSDPAKYRPITCLQTIYKIIASCLSRIILGYIDKNNMLAEQQKGCRKYSQGCKEQLTIDSVLLKQTLKKKSDIYTMYIDYKKAFDSVPHSWLIKTLEIHCIHPQIISFLKNTMTKWTTRLRLTQNTNTIITEPIHVQRGIFQGDALSPLWFCLALNPLSHMLNSLNKGYNLPYKENNTEIRTEFSNYKLNHLLYMDDIKLYGSTQQELQDLVKVTENFSQDICMEFGIDKCKTNSIKNGQRYQHQYHMQTGSLIEALSEGEVYKYLGYNQALEISHKDVKDSLTKDFKHRLNTILKNYLNSKNTSKAINTFAIPILTYSFGILNWRKNELKSLQRTINTTMTQYRKHHPRSCIQRMTLTRKDGGRGLIDILNLHNKQITNLRSYFHRKALTSSLHKAIVFNDNKITPLNLTDKVQQRNEIQINNQIKLNEWTQKALHGRHIHDLNQPNVDKIASNEWLKRGELFPETEGFMLAIQDQIIETKNYRKYIMKLGNSSDDSCRKCKSSAETIQHVTGACRAIVQTDYKHRHDQVAAIIHQTLALKYKLISEKVAYYKYTPQTVLDTAGYKLYWDRTILTDKTVHCIRPDITLHDKKQEIVYLIDIAIPNTHNLSTSHTEKITKYTDLAIELKTQWKVKAVKTIPIILSTTGVIPYTLHTSLKLLDIHPLTYINLQKAVILNTCRIVRKFLSIDAPTTIVLG

SEQ ID NO: 23544 - protein, 840 aa, Lymantria dispar
MTHNDSRPRATSTSQTTSQNNRVNISVPNANDLRKFWARVWENPVHHDDNANWLQIEQTRYLNLEPMNFQGIPVEVFHDVLKNLQNWKAPGSDNIHNFWYKKFTYIHPVIYKYINKFIEYPHTLPDYIATGTTFMIPKDANRLSDPAKYRPITCLQTIYKIIASCLSRIILGYIDKNNMLAEQQKGCRKYSQGCKEQLTIDSVLLKQTLKKKSDIYTMYIDYKKAFDSVPHSWLIKTLEIHCIHPQIISFLKNTMTKWTTRLRLTQNTNTIITEPIHVQRGIFQGDALSPLWFCLALNPLSHMLNSLNKGYNLPYKENNTEIRTEFSNYKLNHLLYMDDIKLYGSTQQELQDLVKVTENFSQDICMEFGIDKCKTNSIKNGQRYQHQYHMQTGSLIEALSEGEVYKYLGYNQALEISHKDVKDSLTKDFKHRLNTILKNYLNSKNTSKAINTFAIPILTYSFGILNWRKNELKSLQRTINTTMTQYRKHHPRSCIQRMTLTRKDGGRGLIDILNLHNKQITNLRSYFHRKALTSSLHKAIVFNDNKITPLNLTDKVQQRNEIQINNQIKLNEWTQKALHGRHIHDLNQPNVDKIASNEWLKRGELFPETEGFMLAIQDQIIETKNYRKYIMKLGNSSDDSCRKCKSSAETIQHVTGACRAIVQTDYKHRHDQVAAIIHQTLALKYKLISEKVAYYKYTPQTVLDTAGYKLYWDRTILTDKTVHCIRPDITLHDKKQEIVYLIDIAIPNTHNLSTSHTEKITKYTDLAIELKTQWKVKAVKTIPIILSTTGVIPYTLHTSLKLLDIHPLTYINLQKAVILNTCRIVRKFLSIDAPTTIVLG

SEQ ID NO: 23545 - protein, 1405 aa, Lymantria dispar
MQLRSGYQLPQAGTGVNHDGESRLELPSSSCPTYSGGDTVSQTSTSAQPQAVADHHHHHESSSITSCPSVTSSHTYSCQPSDSSSTVSSMLLRDVVQETESVAILAPTTSSLKMRKKWSQEMNEFILRTYLQLTLMETDTNGYLPPLHIKFIERFPDMNTVSRQRIGDQRRAIINKKLLPQATIKHIYNEVRKEIHSMKNDIYNNSQTDTPTHNFSHHNSMQSKNQTNHRIRWTAEHNETIIRNYYKITQLESNISGYRGPLHETFITTFPHLNHITEQRIADQRRLIIRNKYINEERLQAIRDEVASESHYNNNREYINLVPTQIEHNDTQNTYFNNIETRVPTNNAQESPILHASQEPTNIERFYTEAYAYFVNIDPTLRCYIPKQKSSRKLAIIIQYINHNILPKHVNDDTEFSTLQTVLYCAAWTAAKCNGSNIEISPGVESNNNNKKIKPKWQTRLENKISVLRAQIGRLTHYIKGNRSLKLLKHITLIQKQYKIHATHETPNTHLYEFLDTLKQKLTSVSNRLRRYKTSTLRQTQNKQFVSNEKQFYRTLKSATLNPYDMTHNDSRPRATSTSQTTSQNNRVNISAPNANDLRKFWARVWENPVHHDDNANWLQIEQTRYVNLEPMNFQGIPVEVFHDVLKNLQNWKAPGSDNIHNFWYKKFTYIHPVIYKYINKFIEYPHTLPDYIATGTTFMIPKDANRLSDPAKYRPITCLQTIYKIITSCLSRIILGYIDKNNMLAEQQKGCRKYSQGCKEQLTIDSVLLKQTLKKKSDIYTMYIDYKKAFDSVPHSWLIKTLEIHCIHPQIISFLKNTMTKWTTRLRLTQNTNTIITEPIHVQRGIFQGDALSPLWFCLALNPLSHMLNSLNKGYNLPYKENNTEIRTEFSNYKLNHLLYMDDIKLYGSTQQELQDLVKVTENFSQDICMEFGIDKCKTNSIKNGQRYQHQYHMQTGSLIEALSEGEVYKYLGYNQALEIAHKDVKDSLTKDFKHRLNTILKNYLNSKNTSKAINTFAIPILTYSFGILNWRKNELKSLQRTINTTMTQYRKHHPRSCIQRMTLTRKDGGRGLIDILNLHNKQITNLRSYFHRKALTSSLHKAIVFNDNKITPLNLTDKVQQRNEIQINNQIKLNEWTQKALHGRHIHDLNQPNVDKIASNEWLKRGELFPETEGFMLAIQDQIIETKNYRKYIMKLGNSSDDSCRKCKSSAETIQHVTGACRAIVQTDYKHRHDQVAAIIHQTLALKYKLISEKVAYYKYTPQTVLDTAEYKLYWDRTILIDKTVHCNRPDITLHDKKQEIVYLIDIAIPNTHNLSTSHTEKITKYTDLAIELKTQWKVKAVKTIPIILSTTGVIPYTLHTSLKLLDIHPLTYINLQKAVILNTCRIVRKFLSIDAPTTIVLG

SEQ ID NO: 23546 - protein, 840 aa, Lymantria dispar
MTHNDSRPRATSTSQTTSQNNRVNISAPNANDLRKFWARVWENPVHHDDNANWLQIEQTRYLNLEPMNFQGIPVEVFHDVLKNLQNWKAPGSDNIHNFWYKKFTYIHPVIYKYINKFIEYPHTLPDYIATGTTFMIPKDANRLSDPAKYRPITCLQTIYKIIASCLSRIILGYIDKNNMLAEQQKGCRKYSQGCKEQLTIDSVLLKQTLKKKSDIYTMYIDYKKAFDSVPHSWLIKTLEIHCIHPQIISFLKNTMTKWTTRLRLTQNTNTIITEPIHVQRGIFQGDALSPLWFCLALNPLSHMLNSLNKGYNLPYKENNTEIRTEFSNYKLNHLLYMDDIKLYGSTQQELQDLVKVTENFSQDICMEFGIDKCKTNSIKNGQRYQHQYHMQTGSLIEALSEGEVYKYLGYNQALEISHKDVKDSLTKDFKHRLNTILKNYLNSKNTSKAINTFAIPILTYSFGILNWRKNELKSLQRTINTTMTQYRKHHPRSCIQRMTLTRKDGGRGLIDILNLHNKQITNLRSYFHRKALTSSLHKAIVFNDNKITPLNLTDKVQQRNEIQINNQIKLNEWTQKALHGRHIHDLNQPNVDKIASNEWLKRGELFPETEGFMLAIQDQIIETKNYRKYIMKLGNSSDDSCRKCKSSAETIQHVTGACRAIVQTDYKHRHDQVAAIIHQTLALKYKLISEKVAYYKYTPQTVLDTAGYKLYWDRTILTDKTVHCIRPDITLHDKKQEIVYLIDIAIPNTHNLSTSHTEKITKYTDLAIELKTQWKVKAVKTIPIILSTTGVIPYTLHTSLKLLDIHPLTYINLQKAVILNTCRIVRKFLSIDAPTTIVLG

SEQ ID NO: 23547 - protein, 840 aa, Lymantria dispar
MTHNDSRPRATSTSQTTSQNNRVNISAPNANDLRKFWARVWENPVHHDDNANWLQIEQTRYLNLEPMNFQGIPVEVFHDVLKNLQNWKAPGSDNIHNFWYKKFTYIHPVIYKYINKFIEYPHTLPDYIATGTTFMIPKDANRLSDPAKYRPITCLQTIYKIIASCLSRIILGYIDKNNMLAEQQKGCRKYSQGCKEQLTIDSVLLKQTLKKKSDIYTMYIDYKKAFDSVPHSWLIKTLEIHCIHPQIISFLKNTMTKWTTRLRLTQNTNTIITEPIHVQRGIFQGDALSPLWFCLALNPLSHMLNSLNKGYNLPYKENNTEIRTEFSNYKLNHLLYMDDIKLYGSTQQELQDLVKVTENFSQDICMEFGIDKCKTNSIKNGQRYQHQYHMQTGSLIEALSEGEVYKYLGYNQALEIAHKDVKDSLTKDFKHRLNTILKNYLNSKNTSKAINTFAIPILTYSFGILNWRKNELKSLQRTINTTMTQYRKHHPRSCIQRMTLTRKDGGRGLIDILNLHNKQITNLRSYFHRKALTSSLHKAIVFNDNKITPLNLTDKVQQRNEIQINNQIKLNEWTQKALHGRHIHDLNQPNVDKIASNEWLKRGELFPETEGFMLAIQDQIIETKNYRKYIMKLGNSSDDSCRKCKSSAETIQHVTGACRAIVQTDYKHRHDQVAAIIHQTLALKYKLISEKVAYYKYTPQTVLDTAEYKLYWDRTILTDKTVHCNRPDITLHNKKQEIVYLIDIAIPNTHNLSTSHTEKITKYTDLAIELKTQWKVKAVKTIPIILSTTGVIPYTLHTSLKLLDIHPLTYINLQKAVILNTCRIVRKFLSIDAPTTIVLG

SEQ ID NO: 23548 - protein, 1429 aa, Lymantria dispar
MRLRSGYKLPQTGTGVNHDGESRPERLSLGCPTYSGGGNGSQIVTSAQSQTAAERQQELSSPNSFPSLISTNSFSCLSSNSTSIVSSMLPEDVVQETVSANKLAPTTSTINMRKKWNKAMNEFILRTYLQLTLMETDTNGYLPLLHIKFIEKFPEMNMISRQRVGDQRRAIVNKKLLTQTDIDRIYQDVQNEINRIKINTQTQDTQSQNTQIQNIQTTLPIVQPCNSSKPSKKQPEFINQRMRWTTEHNEVIIRNYYRITHLETNLSAYRGPLHQKFVATFPHLLHINEQRVADQRRLIICNKYLSEERLQAIKDEVRNELLHQRNCEHQVQNDTDTPSIQLEFNSYHDNNYINNIATRAHETDTHNTNNAQEIIIPYSEQQTIEIERIFKEVFSYFKNTDPIQRTYIPKQKSSKKLASTVHYINNNILPKYIKDDTEFITLQTILYSAAWTAAKINGTKIDIPPKLLNNCVFKRNIPKWQLRLENRIKELRAQIGRLTQYIRGNRSNKLIKHVNYIQTHYKVHATHEEHNMHLSEFLDTMKQKLGSISNRLKRYKTCSLRKVQNKQFICNEKQFYRGLKVPITNANSTIPTLNLSTTSPTNSHNNISYISNKPPPAEELRNFWARIWENPVQHNIRADWIRQEQSYYLNSEPMAFQCISPEIFHQVINKLHNWKTPGSDNIHNYWYKKFTHIHPFIHKYINEFIEQPHTLPDYITMGTTYMLPKDPNDLSNAAKYRPITCLQTIYKIITSCLTQIISNHIDKNNVLAEQQKGCRKYSQGCKEQLTIDSILLKQTQLKKADMYSMYIDYKKAFDSVPHTWLLKILEIYRIHPQIISFLTSAMTKWTTRLRLTTDENTFTTEPIKVQRGIFQGDALSPLWFCLALNPLSNMLNSSNTGYSLVYKENDTEMQNDPLTYKLNHLLYMDDIKLYGTTEKELQQLVQITENFSQDICMEFGIDKCKINSIKNGQHYEHQHLTKSGHVIEALTNNEVYKYLGYNQSKQILHTDIKQSLGKQFRQRLNIILRSQLNSKNTSKAINSYAIPILTYSFAIINWTNTELKALQRIINTNMTQHRKHHPRSCIQRLTFPRSAGGRGIIDILNLHNKQITNLRTYFHNKALTSSLHKAVVQTDKKITPLNLSDRTPQKNETLVDRLTKLNEWAQKTLHGRHLNDLNQPTVDRVASNEWLRQGELFPETEGFMLAIQDQVIETMNYKKHIMKLPNSSNDSCRKCKGAPETIQHITGGCRAIAQTDYKHRHDQIAAIIHQSLALKYKLITEKTAYYKYTPRTILDTSDYKLYWDRTILTDKTVHFNRPDITLHDKKNEIVYLIDIAIPNTHNLSSTHTEKLTKYTDLVTEIKSQWKVKTVKIIPIVLSSTGVIPHTLHTSLQLLHIQPLTYITLQKAAILNTCRIVRKFLSIDTHRNTTPVLD

SEQ ID NO: 23549 - protein, 1278 aa, Urbanus velinus
MRLRSGYKLPQAGTGANRNGESRPEPSNSGCPTYSGGDAVSQTSAQSDTVADNSHDSESVASFPSVPSTNPYSHSPTCSTTTTNTMRTEDVVQEADPVENFAPTTASLNTRRKWSNAMNEFILRTYLQLTLMETDIAGYVPPLHTKFIEKFPEMHMISRQRVGDQRRAIINKKLLTQNDIDRIYRETREEINSTQSNTQIHNTKHKNTQIDKSVAHINDTSKRMRWATEHNITIMHAYYKITLLETNISAYRGQLHKEFITKYPHLQHITEQRVADQRRLIVQNKYLSEEKLQNIKDEVASELLLQNTNNTQASRSKQLTSELINQQSNTNYNDPENFANINDTNDPSNAKISHLDQQLIADIQQNFDAAFNYFKNTNPTQRSYIPKQKSSKKLVTIVNYINNTLLPKHVDKDTEFINLQTVLYCGAWAAAKSNGSNIAIPPRIETYDIYKIKTPNWQIRLEKRVEKLRVEIGQLTQYIKGNKSIKIAKRVELIKTKYKIHATHENPNTHLSEFLDTLKQKLSTISNRLKRYKMCTQRKVQNNTFSNNEKQFYRVLKSNNSHNSHNNNHITNTAPPSVEELRNFWAAIWENPVQHDKMAKWILHEQNTYSKSEPMIFQCIPSEVFANVIKKLHNWKAPGSDNIHNFWYKKFTFVHPFIYKYINKFIETPHSLPEYITEGITYMLPKDLNDTSNPAKYRPITCLQTIYKIITSCVTQIIYNYIDNNSILAEQQKGCRKYSRGCKEQLTIDSVVLKQAQKRKTDLYSMYIDYKKAFDSVPHTWLLHILEIYHIHPQIVSFLQNTMTKWNTRLRLTNIKNTIITEPIKIQRGIFQGDALSPLWFCLALNPLSNMLNSSNTGYDLKLQNFPNLPSDCPIYKLNHLLYMDDIKLYGSTEEELQKLAQITENFSKDICMEFGIDKCKINSIRTGQIYQHQYQMQTGEIVEALQENEVYKYLGYNQAHQILHKDIKDSLTQQFRCRLNAILRSHLYSKNTIKAINTYAIPILTYSFGLINWNKTQLKSLQRIINTSMTKNRKHHPRSCVQRMTLPRQDGGRGLIDIINLHNKQITNLRTYFHIKAQTSSLHNAVVQNDTKLTPLNLFDKTLQKSETQTDRLTKLHEWNQKALHGRHLHDLNHPNVDKIASNEWLRRGELFPETEGFMIAVQDQIIETKNYKKHIMKLPNASDDSCRKCKAAPETIQHITGACRAIAQTDYKHRHDQIASIIHQSLAFKCKLINEQTAYYKYNPQTVLDSTDYKLYWDRTILTDKTTLQPTRYNPT

SEQ ID NO: 23550 - protein, 1442 aa, Astraptes talus
MRLRSGYKLPQAGTGANRNGESRPEASNSGCPMYSGGDIVSQTSAQFNTAADYHHDSESVVSFPSISSTNPYSHSSTNQTTTNNSTLTEDVVHEADPVDYLVPTTANLNMRRKWSKAMNEFILRTYLQLTLMETDTSGYLLPLHTKFIENFPEMHMITRQRIGDQRRAIVNKKLLKQNEIDKIYRETREEINNTQTNKQIHNLQIIQSQLIHRNDKSQRMRWTTEHNITIMRSYYKITQLEANISAYRGPLYKEFITKYPHLKHVTEQRVADQRRLIVQNKYLNEERLQTIRDEIASELLLQKNKNTQSFNHTPPTREFINEQGNATSSSEILTNVHTINDSPKSKTRLLNQQKITEIVQNFNTAYNYFKNTNPTERTYIPKQRSSIKLAAIVNYINSDILPKYIDNNTEFNIIQTVLYCGAWTAAKSNGSKITIPPKIQAYNVSDAKKPKWQIRLEGRVETLRAHIGQLTQYIKGNKSNKIEKQVKLIKTKYKIHATHENPNTCMSEFLDTLKQKLTTISNRLKRYKICTLRKTQNNIFTTNEKQFYRGLKSASSHNLLNNTHVNRSPPTASHLHTFWAAVWENPLQHNKTADWIIQEQNKYSKSEPMVFQSISAEVFQNVIKKLHNWKAPGSDNIHNFWYKKFTFIHPYIHKYINKFIEMPHSLPNYITEGITYMLPKDQNDVINPAKYRPITCLQTIYKIMTSCLTHIIYKHIDENKILAEQQKGCRKYSQGCKEQLTIDSIVLKQNQKQKANLYSMYIDYKKAFDSVPHTWLLQILEIYHVHPQIISFLQNTMTKWITRLRLTYGTNTVITEPIKIQRGIFQGDALSPLWFCLALNPLSNILNSSNLGYDLKFQKDVAITDFITNFSCYKLNHLLYMDDIKLYGSTEEELHKLAEITEKYSKDICMEFGTDKCRVNSVKAGQCYQHQYQMQTGELVEALHENEVYKYLGYNQGQLILHKDIKESLTKQFRSRLNTILRSHLYSKNIIKAINTYAIPTLTYSFGIINWNKSELKSLQRIINTTMTQNRKHHPRSCVQRLTLPRHDGGRGLIDILNLHNKQINNLRTYFHDKVQISPLHSAIVQNDKKLTPLNLFDTTLQRNETQTDRQTKLDEWIRKALHGRHLHDLNLPYVDKLASNEWLRRGELFPETEGFMIAIQDQILDTKNYKKHIMKLPSASDDSCRKCKGASETIQHITGACRAIAQTDYKHRHDQIASIIHQNLALKCKLISDQTAYYKYSPQTVLDTIDYKLYWDRTILTDKTVHYNRPDITLHDKKNKIVYLIDIAIPNTHNLQSTHTEKITKYTDLAIEIKCQWKVEKVITVPIVLSTTGVIPKALHESLKTINISPYTYITLQKAVVLNTCRIVRKFLQTDATTFIIYTQMYPPYLFYYNALFIGKLQRVIYGHELSAYLPTCDKNMQNHCSVSIATIELSSLIRLF

SEQ ID NO: 23551 - protein, 1376 aa, Urbanus velinus
MRLRSGYKLPQAGTGANRNGESRPEPPNSGCPTYSGGDTVSQTSAQSNTAADYRHDSESVVSFPSIPSTNPYSDSPNSPTTSGSTLAEDVVQEADPVEQLAPTTANLNMRRKWSKAMNEFILRTYLQLTLMETDISGYLPPLHTKFIERFPEMHMTTRQRVGDQRRAIVNKKLLTQNVIDRIYRETREEINNTQKNKQTHNLQTTQSQLMYNNDKSQRMRWTTEHNITIMRSYYKITQLEANISAYRGLLYKEFITKYPHLKHVTEQRVADQRRLIIQNKYLNEERLQTIREEVARELLFQKNNNTQTSNHVPQTLSLINEQGNTNSNCEIFTNIHTVNDSAKTLVINQNKSTEIEQNFNTAYNYFKNTNPTERTYIPKQKSSIKLAAIVDYINRNILPKYIDNNTEFITLQTVLYCGAWAAAKSNGSKITIPPKIQAYNISTTKKPKWQIRLERRVEKLRAQIGQLTQYIKGNKSTKVEKQVRFILTTYKIHATHENPNSSMSEYLDTLKQKLTTISNRLKRYKTCTLRKTQNNTFTSNEKQFYRGLKSATTHNPQNHSHINSSPPVAYDLRTFWSNIWENPVQHNKMANWILQEQNKYSKIEPMVFQSITTEVFQNVIKKLQNWKAPGSDNIHNFWYKKYTYIHPFIHKYINLFIEIPHSLPHYITEGITYMLPKDQNDISNPAKYRPITCLQTIYKIMTSCLTHVIYNYIDERKILADQQKGCRKYSQGCKEQLTIDSIILKQIRKHQADLYSMYVDYKKAFDSVPHTWLLQILELYHIHPQIISFLQNTMTNWITRLKLTNGTNTVITEPIKIQRGIFQGDALSPLWFCLALNPLSNMLNLSNTGYNLEYEENNTVTDLFPDCSFYKLNHLLYMDDIKLYGSTEEELQKLAQITEKFSKDICMEFGIDKCRVNSIRAGQAYQHQYQMQSGAIIEALHENEVYKYLGYNQGQQLLHKDIKNSLTTQFRSRLNTILRTHLYSKNIIKAINTYAIPILTYSFGIINWNKSELKSLQRIINTTMTQNRKHHPRSCVQRMTLPRHDGGRGLIDILNLHNKQISNLRTYFHNKAQVSPLHRAIMKNDTNLTPLNLLDKTLQKNETQTDRQTKLNEWIQKALHGRHLHDLSLPNVDKIASNEWLRRGELFPETEGFMIAIQDQIIETKNYKKHIMKLSNASDDSCRRCKGASETIQHITGACRVIAQTDYKHRHDQTAAIIHQSLALKYKLISEQTAYYKYNPQTVLDTTDYKLYWDRTILTDKTVHYNRPDITLHDKSNKIVYLIDIAIPNTHNLQSTHTEKITKYTDLAIELKTQWKVEKVITVPIVLSTTGVIPKTLHQSLKTINISPYTYITLQKAVVLNTCRIVRKFLQTDTFT

SEQ ID NO: 23552 - protein, 1262 aa, Urbanus sp.
MNEFILRTYLQLTLMETDISGYLPPLHTKFIEKFPEMHMIARQRVGDQRRAIVNKKLLTQNEIDRIYRETREEINNTQASKQIHNLQITQSQLIHSNDRSQRMRWTTEQNITIMRAYYKITQLEANISAYRGLLYKEFITKYPHLKHVTEQRVADQRRLIIHNKYLNEERLQAIREEVASELLLQKNNNTQTSNHVPPTPDLINEQGNTNSNCEIFTNIHTVSDPPRTETLIINQNKSAEIEQNFNTAYKYFKDTNPTERTYIPKQKSSTKLAAIVNYINSNILPKYIDNNTEFNTLQTVLYCGAWAAAKSNGSKITIPPKIQAYNINTTRKPKWQIRLERRVEKLRAQIGQLTQYIKGNKSTKIEEQVKIITTTYKIHATHENPNISMSEFLDTLKQKLTTYSNRLKRYKTCTLRKTQNNTFSSNEKQFYRGLKSATSHNPQNYSHINTSPPVAYDLRTFWSNIWENPVQHNKMANWILQEQNKYSKIEPMVFQSVTTEVFQNVIKKLQNWKAPGSDNIHNFWYKKFTYIHPFIHKYINSFIEIPHSLPHYITEGITYMLPKDQNDISNPAKYRPITCLQTIYKIMTSCLTHVIYNYIDESKILAEQQKGCRKYSQGCKEQLTIDSIILKQNRKQKADLYSMYIDYKKAFDSVPHSWLLQILELYHIHPQIISFLQNTMTNWITRLKLTNGTNTVITEPIKIQRGIFQGDALSPLWFCLALNPLSNMLNLSNAGFNLKYEENDIVTDLLPDCSVYKLNHLLYMDDIKLYGSTEEELQKLTQIAEKFSKDICMEFGIDKCRVNSIRAGQIYQHQYQMQSGEIIEALHENEVYKYLGYNQGQQILHKDIKKSLTTQFRSRLNTILRSHLYSKYIIKAINTYAIPILTYSFGIINWNKTELKSLQRIINTTMTQNRKHHPRSCVQRMTLPRHDGGRGLIDILNLHNKQISNLRTYFHNKAQISPLHRAITKNDPNLTPLNLLDKTLQKNETQTDRQTKLNEWIQKALHGRHLHDLSLPNVDKMASNEWLRRGELFPETEGFMIAIQDQIIETKNYKKHIMKLQNASDDSCRRCKGASETIQHITGACRTIAQTDYKHRHDQTAAIIHQSLAFKYKLISEQMAYYKYNPQTVLDTTDYKLYWDRTILTDKTVHYNRPDITLHDKKNKIVYLIDIAIPNTHNLQSTHTEKITKYTDLAIEIKTQWKVEKVITVPIVLSTTGVIPKTLHQSLKTINISPYTYITLQKAVVLNTCRIVRKFLQPDTFT

SEQ ID NO: 23553 - protein, 1380 aa, Astraptes apastus
MRLRSGYKLPQAGTGANRNGESRPEPSNSGRPTYSGGDTVSQTSAQFNTAADYHHDSESVVSFPSIPSTNPYSNSQYNQTTTNNSTLTEDVVQETDPVENLAPTTTNLSTRRKWSKAMNEFILRTYLQLTLMETDISGYLLPLHTKFIEKFPEMHMITRQRVGDQRRAIVNKKLLTQNEIDKIYKETREEINNTQKNTHIHNLQIIQSQLSYRNDKSQRMRWTTEHNITIMRAYYKITQLETNISAYRGLLYKEFITKYPHLKHVTEQRVADQRRLIVQNKYLNEERLQTIKDEIASELLIQKSNNIQTFNHVLPTLDFINEPDNTNSNSDIVTNIHITNDSPKTKTSLLNQQKTAEIVQNFNEAYNYFKNTHPTKRSYIPKQRSSMKLTAIVNFINNDILPEYIDINTEFNIVQTVLYCGAWAAAKSNGSKITIPPKIQAYNITTTKKPNWQIRLERRVETIRAHIGQLTQYIKGNKSTRIEKRVKLIKNRYKIHAIHENPNTCMSEFLDTLKQKLTTISNRLKRYKTCTLRKTQNNTFTSNEKQFYRGLKSASSKNPPNTHINNSPPTAYDLRTFWATVWENPVQHNKMANWIIQEQNKYSKSEPMVFQSISAEVFQNVIKKLHNWKAPGSDNIHNFWYKKFTFIHSHIHKYINKFIEMPHSLPYYITEGITYMLPKDQNDITNPAKYRPITCLQTIYKIMTSCLTHIIYNYIDENKILAEQQKGCRKYSQGCKEQLTIDSIVLKQNQKRKADLYSMYIDYKKAFDSVPHTWLLHILELYNIHPQIISFLQNTMTKWTTRLRLTNGTSVVITEPVKIQRGIFQGDALSPLWFCLALNPLSNMLNSSNVGYDLKFEENDAITDPLTDFSFYKLNHLLYMDDIKLYGSTEEELQKLAQITENFSKDICMEFGIDKCRINSVRAGQCYQHQYQMQSGEFVEALNENEVYKYLGCNQGQQILHKDIKKSLTKQFRSRLNTILRSYLYSKNIIKAINTYAIPILTYSFGIINWNKTELKSLQRIINTTMTQNRKHHPRSCVQRLTLPRQDGGRGLIDILNLHNKQINNLRTYFHDKAQISHLHNAIIKNDKKLTPLNLFDKTLQKNETHTDRQTKLNEWIRKALHGRHLHDLNLPNVDKSASNEWLRRGQLFPETEGFMIAIQDQIVETKNYKKHIMKLPNTSDDSCRKCKGASETIQHITGACRAIAQTDYKHRHDQIASIIHQSLAFKCKLISEQTAYYKYSPQTVLDTTDYKLYWDRTILTDKTVHYNRPDITLHDKKNRIVYLIDIAIPNTHNLQSTHTEKITKYTDLAIEIKSQWKVERVITVPIVLSTTGVIPKALHQSLKTINISPYTYVTLQKAVVLNTCRIVRKFLQTETTTYT

SEQ ID NO: 23554 - protein, 786 aa, Astraptes hopfferi
MANWILQEQNKYSTSEPMVFQSISAEVFQNVIKKLHNWKAPGSDNIHNFWYKKFTFIHPHIHKYINKFIEMPHTLPYYITEGITYMLPKDQNDVTNPAKYRPITCLQTIYKLMTSCLTHIIYNYIDENKILAEQQKGCRKYSQGCKEQLTIDSIVLKQNRKQKADLYCMYVDYKKAFDSVPHTWLLQILELYHIHPQIISFLQNTMTKWITRLRLTNGINSVITEPIRIQRGIFQGDALSPLWFCLSLNPLSNMLNSSSIGYNLKLEEHANITDLLTDFSFYKLNHLLYMDDIKLYGSTEDELQKLAQITENFSKDICMEFGIDKCRVNSVRAGQTYQHQYKMQTGEVVEALNENEVYKYLGYNQGQQILHREIKDSLTKQFRIRLNTILRSHLYSKNMIKAINTYAIPILTYSFGIINWNKTELKSLQRIINTTMTQNRKHHPRSCVQRLTLPRHDGGRGLIDILNLHNKQINNLRIYFHNKAQMSPLYNAIINIDKKLTPLNLFDKTQQRNETQTDRQTKLNEWTQKALHGRHLHDLSLPNVDKIASNEWIRRGELFPETEGFMIAIQDQIVETKNYKKHIMKLPNASDDSCRKCKGASETIQHITGACRAIAQTDYKHRHDQIASIIHQNLAFKYKLISEQTAYYKYSPQTVLDTTDYKLYWDRTILTDKTVHYNRPDITLHDKKNKIVYLIDIAIPNTHNLQSTHTEKITKYTDLAIEIKTQWKVEKVITVPIVISTTGVIPKSLHHSLRIISISPYTYITLQKAVVLNTCRIVRKFLQSDT

SEQ ID NO: 23555 - protein, 1259 aa, Urbanus esmeraldus
MNEFILRTYLQLTLMETDINGYLLPLHTKFIEKFPEMHMTTRQRVGDQRRAIVNKKLLPQNEIGRIYKETQEEINNTQANKQIQNTQSQLIHSIDKSQRMKWTTQHNITIMHAYYKITQLETNISAYRGLLYKEFITKYPHLKHVTEQRVADQRRLIIQNKYLNEERLQTIRDEVASELFLQKSNSTQTSNHVHPTPDLVNEQGNNNSNSEIFTNMYTATDSPRTKSLINQNKTTEIEQNFNTAYNYFKNTNPTERSYIPKQKSSIKLAAIVNYINSDILPNYIDNNTEFNTLQTVLYCGAWAAAKSNGSKITVPPKIQAYNINTKRKPKWQIRLERRVEKLRAQIGQLTQYIKGNKSSKIEKQVRFITTKYKIHATHENFNTSMSEFLDTLKQKLSTISNRLKRYKTCTLRKTQNNTFVNNEKQFYRGLKSVTSLNSQNHTHINSSPPAAYDLRTFWSNIWENPVQHNKTANWILQEQDKYAKFEPMVFQSITTEIFQNVIKKLQNWKAPGSDNIHNYWYKKFTYIHPFIHKYINKFIEMPHSLPYYITEGITYMLPKDQNDISNPAKYRPITCLQTIYKIMTSCLTHVIYNYIDESKILAEQQKGCRKYSQGCKEQLTIDSIVLKQNRKQKGDLYSMYIDYKKAFDSVPHTWLLQVLELYHIHPQIISFLQNTMTNWITKLKLINGTNTVITEPIKIQRGIFQGDALSPLWFCLALNPLSNMLNLSNTGYNLKCEENDAMTDLFPDCSFYKLNHLLYMDDIKLYGSTEEELQKLAQVTEKFSNDICMEFGIDKCRVNSIRAGQTYQHQYHMQSGEIIDALHENEVYKYLGYNQGQQILHKDIKNSLTKQFRSRLNTILRSHLYSKNIIKAINTYAIPILTYSFGIIKWNKTELKSLQRIINTTMTQNRKHHPRSCIQRMTLPRHDGGRGLIDILNLHNKQINNLRTYFHNKTQISPLHRAIINNDTNLTPLNLLDKTPQKNETQTDRQTKLNEWIQKALHGRHLHDLSLPNVDKIASNEWLRRGDLFPETEGFMIAIQDQIIETKNYKKHIMKLPNASDDSCRKCKGASETIQHITGACRAIAQTDYKHRHDQIAAIIHQSLAVKYKLISEQTAYYKYSPQTVLDTSDYKLYWDRTILTDKTVHYNRPDITLHDKKNKIVYLIDIAIPNTHNLQSTHTEKITKYTDLAIEIKTQWKVDRVITVPIVLSTTGVIPKTLQQSLKTINISPYTYINLQKAVVLNTCRIVRKFLQTDTTFT

SEQ ID NO: 23556 - protein, 1410 aa, Pyrgus malvae
MRLRSGVTLPQAGTGANCDGESRPGPSGSGSPTYSGGDTVSQTSAQFSTVAELNDCTSVESCYPSIPSTNPYSNSPSHSTSEANSMLTENVAQEADSSESLVPTTVSFMRRKWTKQMNEFILRTYLQLTLMETDISGYLPPLHTKFIEKFPEMHAVSRQRVGDQRRAIINRKLLTQKNIDRIYRETRRELSSIQPNKDTSITHTQNLLQHTITQSRSQLANSQTSQRMRWTNEHNEAIMRAYYKITHLESNISAYRPELHRAFVTTFPHLQHVTEQRVADQRRLIIHNRYIRKERLQEIKDEVASELFLQNNIDTHTLSSVNLSTNQLDSIAEQENNLLHINVNNEGGLQNANEGQETQTSTSYLNEQEIAKIEQNFNQAYNHFKNTDPTKRSYIPKQRCSKNLAVIVEYINKNILPKYIDLNTEFITLQTVVYCGAWTAAKSNGARIDMPREESGNGHRKKKPKWQVRLEKRVEELRAQIARLTQYINGNRSIKIIRHVNYIQTKYKIHAVHENPNTNLSEFLDTLKQRLTSLSNRLKRYKACTMRKTQNKLFAMNEKQFYRGLKISINNSSTSTQNIESSHPSSTSPINQTINSPTPESLHSFWANVWENPVQHNEEAQWILAEKNKYSKYEPMGYTHIPGEVFLDVVKKLHNWKAPGSDNIHNFWYKKFTHIHPFIHNYINKFIESPHTLPSYLTVGITYMLPKDLKNSSDPAKYRPITCLQTLYKIITSCLTHLIYNHIDTNKILTEQQKGCRKYSQGCKEQLTIDSIVLKQTQRQKSDLYSMYIDYKKAFDSVPHSWLLQILDIYNIHPQIISFLHNSMNKWTTRLKLTTDTNIVLTEPINIQRGIFQGDALSPLWFCLALNPLSNMLNSACIGYILGAHSTENDTVQPDSSFIPKLNHLLYMDDIKLYGSTEDDLNTLAEITETFSKDVCMDFGIDKCKINSSKAGKFYEHQYHTQIGEIIEPLNENGVYKYLGFQQAKQILHKDIKNHLTNQFKSRLNTILHSHLYSKNIFKAINTYAIPILTYSFGVINWNKTELKALQRTINTSMTKSRKHHPRSCLQRVTLPRHLGGRGLIDIENLHNKQIANMRKYFHIKAQASPLHNAIVQIDQKLTPLNLSDTTQQKNEIQMDRQTKLQQWSLKALHGRHLHDLNQPNVDKGASNEWLKRGELFPETEGFMVAIQDQIIETKNYKKHIMKLPNSSDDSCRKCKGPSETIQHITGACRAIVQSDYKHRHDQVAAIIHQILALKHKLITEKLPYYKYTPQTVIDTKEIKLYWDRTILTDKTVHFNRPDITLHDKKNKLVYLIDIAIPNTHNLTSTHTDKISKYTDLSIELKTQWKIEKVIVVPIILSTTGVIPKSLHTSLKLLNIHPKTYITLQKAVILNTCRIVRKFLALDSPALVLG

SEQ ID NO: 23557 - protein, 1383 aa, Telegonus cellus
MQLRSGYKLPQAGTGANRNGESRPEPINSGCPTYSGGDTVSQTSAQFNTAADDYHDSESVLSFPSIPSTNPYSLSPSNQTTTNNSTLTEDVVHEADPVENLAPTTANLNTRRKWSKAMNEFILRTYLQLTLMETDISGYLLPLHTKFIEKFPEMHLITRQRVGDQRRAIVNKKLLTQNEIDRIYKETREEINNTQTNTQIDNLQIIQPHLIHRNDKSRRMRWTTEHNITIMRAYYKITQLETNISAYRGLLYKEFITKYPHLKHVTEQRVADQRRLITQNKYLNEERLQTIRDEIASELILQKSNNTQTFNRIPPTPGLINEQDNTNSNSEIFTNIHTSNDSLKTNARLLNQQKTTEIVQNFNAAYNYFKHTNPTERSYIPKQRSSVKLAAILNYINSDILPKYIDNNTEFNIIQTVLYCGAWAAAKSNGSKITIPPKIQAYNINTIKKPKWQIRLERRVETLRAHIGQLTQFIKGNKSTKVEKQVRFIKTRYKIHATYENPNTCMSEFLDTLKQKLTTTSNRLKRYKTCTLRKTQNNTFATNEKQFYRGLKSVSPHNPQNTTYIRSSPPTAYDLRTFWATIWENSVEHNKMANWILQEQNKYSKSEPMVFQSISAEVFQNVIKKLHNWKAPGSDNIHNFWYKKFTCIHPHILKYINKFIEMPHSLPHYITEGITYMLPKDQDDVANPAKYRPITCLQTIYKIMTSCLTHIIYNYIDENKILAEQQKGCRKYSQGCKEQLTIDSIVLKQNQKQKADLYSMYIDYKKAFDSVPHTWLLKILELYNIHPQIISFLQNTMTKWITRLRLTNGTNTVITEPIKIQRGIFQGDALSPLWFCLALNPLSNMLNLSNVGYNLKFEEDDGITDLLTDFSFYKLNHLLYMDDIKLYGSTEEELQKLAQITENFSRDICMEFGIDKCRVNSVRAGQTYQHQYQMQTGELVEALNENEVYKYLGYSQGQQILHKDIKDSLTKQFRSRLNTILRSHLYSKNIIKAVNTYAIPILTYSFGIINWNKTDLKSLQRIINTTMTQNRKHHPRSCVQRLTLPRHDGGRGLIDILNLHNKQINNLRTYFHNKAQHSLLHNAIIKNDKKLTPLNLFDKTLQKNETQTDRQTKLNEWNRKALHGRHLHDLSLPNVDKIASNEWLRRGELFPETEGFMIAIQDQIIETKNYKKHIMKLPNAADDFCRKCKGASETVQHITGACRAIAQTDYKHRHDQIAAIIHQSLAFKYKLISEQTPYYKYSPQTVLDTINYKLYWDRTILTDKTVHYNRPDITLHDKKNKIVYLIDIAIPNTHNLSSTHTEKITKYTDLAIELKTQWKVERVKTIPIVLSTTGVIAKALQQSLKLINMSPYTYKQLFSIHVELLGIFTVKYYISYFLICLKP

SEQ ID NO: 23558 - protein, 1410 aa, Pyrgus malvae
MRLRSGVTLPQAGTGANCDGESRPGPSGSGSPTYSGGDTVSQTSAQFSTVAELNDCTSVESYPSIPSTNPYSNSPSHLTSETNSMLTEDVAQEADTSENLVPTTVSFMRRKWTKQMNEFILRTYLQLTLMETDISGYLPSLHTKFIEKFPEMHAVSRQRVGDQRRAIINRKLLTQKNIDRIYKETRRELSSIQPNKDTSITHTQNLLQHTITQSRSQLANSQTSQRMRWTNEHNEAIMRAYYKITHLESNISAYRPELHRAFVTTFPHLQHVTEQRVADQRRLIIHNRYIRKERLQEIKDEVASELFVQNNIDTHTLSSVNLSTNQLDSIAEQENNLLHINVNNEGGLQNANEGQETQTSTSYLNEQEIAKIEQNFNQAYNHFKNTDPTKRSYIPKQRCSKNLAVIVEYINKNILPKYIDLNTEFTTLQTVVYCGAWTAAKSNGARIDIPPREESGNGHRKKKPKWQVRLEKRVEELRAQIARLTQYINGNRSIKIIRHVNYIQTKYKIHAVHENPNTNLSEFLDTLKQRLTSLSNRLKRYKACTMRKTQNKLFAMNEKQFYRGLKISINNSSTSTQNIQSSHPSSTSPINQTINSPSPESLHSFWANIWENPVQHNEEAQWILAEKNKYSKYKPMGYTHIPGEVFLDVVKKLHNWKAPGSDNIHNFWYKKFTHTHPFIHNHINKFIESPHTLPSYLTVGITYMLPKDLKNSSDPAKYRPITCLQTLYKIITSCLTHLIYNHIDTNKILTEQQKGCRKYSQGCKEQLTIDSIVLKQTQRQKSDLYSMYIDYKKAFDSVPHSWLLQILDIYNIHPQIISFLHISMNKWTTRLKLTTDTNIVLTEPINIQRGIFQGDALSPLWFCLALNPLSNMLNSACIGYNLGAHSTENDTVQPDSSFIPKLNHLLYMDDIKLYGSTEDDLNTLAEITETFSKDVCMDFGIDKCKINSSKAGKFYEHQYHTQIGEIIEPLDENGVYKYLGFQQSKQILHKDIKNYLTNQFKSRLNTILHSHLYSKNIFKAINTYAIPILTYSFGVINWNKTELKALQRTINTSMTKSRKHHPRSCLQRVTLPRHLGGRGLIDIENLHNKQIANMRKYFHSKAQASPLHNAIVQIDQKLTPLNLSDTTQQKNEIQMDRQTKLQQWSLKALHGRHLHDLNQPNVDKGASNEWLKRGELFPETEGFMVAIQDQIIETKNYKKHIMKLPNSSDDSCRKCKGPSETIQHITGACRAIVQSDYKHRHDQVAAIIHQILALKHKLITEKLPYYKYTPQTVIDTKEIKLYWDRTILTDKTVHFNRPDITLHDKKNKLVYLIDIAIPNTHNLTSTHTDKISKYTDLSTELKTQWKIEKVIVVPIILSTTGVIPKSLHTSLKLLNIHPKTYITLQKAVILNTCRIVRKFLALDSPALVLG

SEQ ID NO: 23559 - protein, 1410 aa, Pyrgus malvae
MRLRSGVTLPQAGTGVNCDGESRPGPSGSGSPTYSGGDTVSQTSAQFSTVAELNNCTSVESYPSIPSTNPYSNSPSHSTSDTNSMLTEDVAQEADTSEDLVPTTVSFMRRKWTKQMNEFILRTYLQLTLMETDISGYLPPLHTKFIEKFPEMHAVSRQRVGDQRRAIINRKLLTQKNIDRIYRETRRELSSIQPNKDTSITHTQNLLQHTITQSRSQLANSQTSQRMRWTNEHNEAIMRAYYKITHLESNISAYRPELHRAFVTTFPHLQHVTEQRVADQRRLIIHNRYIRKERLQEIKDEVASELFVENNIDTHTLSSVNLSTNQLDSIAEQENNLLHINVNNEGGLQNANEGQETQTSTSYLNEQEIAKIEQNFNQAYNHFKNTDPTKRSYIPKQRCSKNLAVIVEYINKNILPKYIDLNTEFITLQTVVYCGAWTAAKSNGARIDIPPREESGNGHRKKKPKWQVRLEKRVEELRAQIARLTQYINGNRSIKIIRHVNYIQTKYKIHAVHENPNTNLSEFLDTLKQRLTSLSNRLKRYKACTMRKTQNKLFAMNEKQFYRGLKISINNSSTSTQNSQSSHPSSTSPINQTINSPTPESLHSFWANIWENPVQHNEEAQWILAEKNKYSKYEPMGYTHIPGEVFLDVVKKLHNWKAPGSDNIHNFWYKKFTHTHPFIHNYINKFIESPHTLPSYLTVGITYMLPKDLKNSSDPAKYRPITCLQTLYKIITSCLTHLIYNHIDTNKILTEQQKGCRKYSQGCKEQLTIDSIVLKQTQRQKSDLYSMYIDYKKAFDSVPHSWLLQILDIYNIHPQIISFLHNSMNKWTTRLKLTTDTNIVLTEPINIQRGIFQGDALSPLWFCLALNPLSNILNSACIGYNLGAHSTENDTVQPDSSFIPKLNHLLYMDDIKLYGSTEADLNTLAEITETFSKDVCMDFGTDKCKINSSKAGKFYEHQYHTHIGEIIEPLNENEVYKYLGFQQAKQMLHKDIKNYLTNQFKSRLNTILHSHLYSKNIFKAINTYAIPILTYSFGVINWNKTELKALQRTINTSMTKSRKHHPRSCLQRVTLPRHLGGRGLIDIENLHNKQIANMRKYFHSKAQASPLHNAIVQIDQKLTPLNLSDTTQQKNEIQMDRQTKLQQWSLKALHGRHLHDLNQPNVDKGASNEWLKRGELFPETEGFMVAIQDQIIETKNYKKHIMKLPNSSDDSCRKCKGPSETIQHITGACRAIVQSDYKHRHDQVAAIIHQILALKHKLITEKLPYYKYTPQTVIDTKEIKLYWDRTILTDKTVHFNRPDITLHDKKNKLVYLIDIAIPNTHNLTSTHTDKISKYTDLSIELKTQWKIEKVIVVPIILSTTGVIPKSLHTSLKLLNIHPKTYITLQKAVILNTCRIVRKFLALDSPALVLG

SEQ ID NO: 23560 - protein, 865 aa, Pyrgus malvae
MRKTQNKLFTTNEKRFFRGLKTSINNSSTSTQNNQSSHPPATSLINQNINSPTRESLHSFWANVWENPVHHNKEAQWIVEEKNKFSKLEPMDYTLIPAEVFLDVVKRLHNWKAPGSDNIHNFWYKKFTYIHPFIHNCINKFIESPHTLPSYLTAGITYMLPKDLNNTSNPVNYRPITCLQTLYKIITSCLTHLIYNHIHNNKILTEQQKGCRKYSQGCKEQLTIDSIVLQQIQRQKSDLYSMYIDYKKAFDSVPHSWLLQIFDIYNIHPQIISFLYNSMNKWNTQLKLTTDTNIVLTVPISIQRGIFQGDTLSPLWFCLALNPLSNMLNSACVGYDLRDYTTQNYTVRSASNLIPKLNHLLYMDDIKLYGSTEDDLNTLVEITETFSKDVRMDFGIDKCKINSLKAGKLYEHHYHTQTGEVIEPLNENEVYKYLGFQQAKQILHKDIKNYLTKHFKSRLNTILHSHLYSKNIVKAINTYAIPILTYSFGVINWNKTELISLQRTINTSMTKNRKHHPRSCVQRITLPRHLGGRGLIDIENLHNKQITNMRKYFHSKAQTSPLHNTIVQIDKKLTPLNLSDITQQKNEIQTDRQTKLHQWSLKALHGRHLHDLSQPHVDKEASNEWLKRGELFPETEGFMIAIQDQIIETKNYKKHIIKLPNSSDDSCRKCKGPSETIQHITGACRAIVQSDYKHRHDQVAAIIHQILALKHKLVSEKLPYYKYAPQTVIDTKEFRLYWDRTILTDKTVHFNRPDITLHDKKNKLVYLIDIAIPNTHNLTSTHTDKISKYTDLCIELKTQWKIEKVIVVPIILSTTGVIPKSLHTSLKLLKIHRKTYITLQKAVILNTCRIVRKFLTLDSPAVVLG

SEQ ID NO: 23561 - protein, 1375 aa, Urbanus proteus
MRLRGGYKLPQAGTGANRNGESRPEPSNSGCPTYSGGDTVSQTSAQSNTAADSRHDSESVVSFPSIPSTNPYSDSPNSPTTSGSTLTEDVVQEADPVEQLAPTTANLNKRKKWSNAMNEFILRTYLQLTLMETDISGYLPPLHTKFIERFPEMHMTTRQRVGDQRRAIVNKKLLKQNVIDRIYRETQEEINNTQENKQTYNVQITQSQLMHNNDKSQRMRWTTEHNITIMRSYYKITQLEANISAYRGLLYKEFITKYPHLKHVTEQRVADQRRLIIHNKYLNEERLQTIREEVASELLLQKKNNTQTFNHVPLTPDLINEQGNTNSNCEIFTNTHTVNDSAKTLIINQNKCTEIEQNFNTAYNYFKNTNPTERTYIPKQKSSLKLAAIVNYINRNILPKYIDNNTEFITLQTVLYCGAWAAAKSNGSKITIPPKIQAYNISNTRKPKWQIRLERRVEKLRAQIGQLTQYIKGNKSSKVEKQVKFITTRYKIHATHENPNTSMSEFLDTLKQKLTTISNRLKRYKTCTLRKTQNNTFSSNEKQFYRGLKSITSHNPQNHSHINSSPVAYDLRTFWSNIWENPVQHNKMANWILQEQNKYSKIEPMVFQSITTEVFQNVIKKLQNWKAPGSDNIHNFWYKKFTYIHPFVHKYINLFIEIPHSLPHYITEGITYMLPKDQNDISNPAKYRPITCLQTIYKIMTSCLSHVIYNYVDERKILADQQKGCRKYSQGCKEQLTIDSIILKQIRKQKADLYSMYIDYKKAFDSVPHTWLLQILELYHIHPQIIYFLQNTMTNWITRLKLTNGTNIVITEPIKIQRGIFQGDALSPLWFCLALNPLSNMLNLSNTGYNLENEKTDSVTDLFPDCSFYKLNHLLYMDDIKIYGSTEEELQKLAQITEKFSKDICMEFGIDKCRVNSIRAGQAYQHQYQMESGEIIEALHENEVYKYLGYNQGQQILHKDIKNSLTTQFRSRLNIILRTHLYSKNIIKAINTYAIPILTYSFGIINWNKTELKSLQRIINTTMTQNRKHHPRSCVQRMTLPRHDGGRGLIDILNLHNKQIKNLRTYFHNKAQISPLHRAIIKNDTNLTPLNLLDKTLQKNETQTDRQTKLNEWTQKALHGRHLHDLSLPNVDKIASNEWLRRGELFPETEGFMIAIQDQIIETKNYKKHIMKLPNASDDSCRRCKGASETIQHITGACRVIAQTDYKHRHDQTAAIIHQSLAFKYKLISEQTAYYKYNPQTVLDTTDYKLYWDRTILTDKTVHYNRPDITLHDKSNKIVYLIDIAIPNTHNLQSTHTEKITKYTDLAIEIKTQWKVEKVITVPIVLSTTGVIPKTLHQSLKTINISPYTYITLQKAVVLNTCRIVRKFLQTDTFT

SEQ ID NO: 23562 - protein, 1410 aa, Pyrgus malvae
MRLRSGVTLPQAGTGVNCDGESRPGPSGSGSPTYSGGDTVSQTSAQFSTVAELNNCTSVESYPSIPSTNPYSNSPSHSTSDTNSMLTEDVAQEADTSEDLVPTTVSFMRRKWTKQMNEFILRTYLQLTLMETDISGYLPPLHTKFIEKFPEMHAVSRQRVGDQRRAIINRKLLTQKNIDRIYRETRRELSSIQPNKDTSITHTQNLLQHTITQSRSQLANSQTSQRMRWTNEHNEAIMRAYYKITHLESNISAYRPELHRAFVTTFPHLQHVTEQRVADQRRLIIHNRYIRKERLQEIKDEVASELFVENNIDTHTLSSVNLSTNQLDSIAEQENNLLHINVNNEGGLQNANEGQETQTSTSYLNEQEIAKIEQNFNQAYNHFKNTDPTKRSYIPKQRCSKNLAVIVEYINKNILPKYIDLNTEFITLQTVVYCGAWTAAKSNGARIDIPPREESGNGHRKKKPKWQVRLEKRVEELRAQIARLTQYINGNRSIKIIRHVNYIQTKYKIHAVHENLNTNLSEFLDTLKQRLTSLSNRLKRYKACTMRKTQNKLFAMNEKQFYRGLKISINNSSTSTQNSQSSHPSSTSPINQTINSPTPESLHSFWANIWENPVQHNEEAQWILAEKNKYSKYEPMGYTHIPGEVFLDVVKKLHNWKAPGSDNIHNFWYKKFTHTHPFIHNYINKFIESPHTLPSYLTVGITYMLPKDLKNSSDPAKYRPITCLQTLYKIITSCLTHLIYNHIDTNKILTEQQKGCRKYSQGCKEQLTIDSIVLKQTQRQKSDLYSMYIDYKKAFDSVPHSWLLQILDIYNIHPQIISFLHNSMNKWTTRLKLTTDTNIVLTEPINIQRGIFQGDALSPLWFCLALNPLSNILNSACIGYNLGAHSTENDTVQPDSSFIPKLNHLLYMDDIKLYGSTEADLNTLAEITETFSKDVCMDFGTDKCKINSSKAGKFYEHQYHTHIGEIIEPLNENEVYKYLGFQQAKQMLHKDIKNYLTNQFKSRLNTILHSHLYSKNIFKAINTYAIPILTYSFGVINWNKTELKALQRTINTSMTKSRKHHPRSCLQRVTLPRHLGGRGLIDIENLHNKQIANMRKYFHSKAQASPLHNAIVQIDQKLTPLNLSDTTQQKNEIQMDRQTKLQQWSLKALHGRHLHDLNQPNVDKGASNEWLKRGELFPETEGFMVAIQDQIIETKNYKKHIMKLPNSSDDSCRKCKGPSETIQHITGACRAIVQSDYKHRHDQVAAIIHQILALKHKLITEKLPYYKYTPQTVIDTKEIKLYWDRTILTDKTVHFNRPDITLHDKKNKLVYLIDIAIPNTHNLTSTHTDKISKYTDLSIELKTQWKIEKVIVVPIILSTTGVIPKSLHTSLKLLNIHPKTYITLQKAVILNTCRIVRKFLALDSPALVLG

SEQ ID NO: 23563 - protein, 1263 aa, Urbanus evona
MNEFILRTYLQLTLMETDINGYLLPLHTKFIEKFPEMHMTTRQRVGDQRRAIVNKKLLPQNEIDRIYKETQEEINNTQANKQIHNIQITQSQLIHSNDKSQRMKWTTQHNITIMHAYYKITQLEANISAYRGLLYKEFITKYPHLKHVTEQRVADQRRLIIQNKYLNDERLQTIRDEVASELFLQKSNSTQTSNHVPPTPDLVNGQGNTNSNSEIFTNMYTATDSPRTKSLIINQNKITEIEENFNTAYNYFKNTNPTERSYIPKQKSSIKLAAIVNYINSDILPNYIDNNTEFNTLQTVLYCGAWAAAKSNGSKIAVPPKIQAYNINTTRKPKWQIRLERRVEKLRAQIGQLTQYIKGNKSSKIEKQVRFITTKYKIHATHENLNTSMSEFLDTLKQKLSTISNRLKRYKTCTLRKTQNNTFLNNEKQFYRGLKSITSLNSQNHTHINSSPPAAYDLRTFWSNIWENPVQHNKMANWILQEQDKYSKFEPMVFQSITTEVFQNVIKKLQNWKAPGSDNIHNFWYKKFTYIHPFIHKYINKFIEMPHSLPYYITEGITYMLPKDQNDISNPAKYRPITCLQTIYKIMTSCLTHVIYNYVEESKILAEQQKGCRKYSQGCKEQLTIDSIVLKQNRKQKGDLYSMYIDYKKAFDSVPHTWLLQILELYHIHPQIISFLQNTMTNWFTKLKLINGTNTVITEPIKIQRGIFQGDALSPLWFCLALNPLSNMLNLSNTGYNLKCEENDAMTDLFPDCSFYKLNHLLYMDDIKLYGSTEEELQKLAQITEKFSNDIGMEFGIDKCRVNSIRAGQIYQHQYQMQSGEIIDALNENEVYKYLGYNQGQQILHKDIKNSLTKQFRSRLNTILRSHLYSKNIIKAINTYAIPILTYSFGIINWNKTELKSLQRIINTTMTQNRKHHPRSCVQRMTLPRHDGGRGLIDILNLHNKQINNLRTYFHNKTQISPLHRAIINNDTNLTPLNLLDKTPQRNETQTDRQTKLNEWIQKALHGRHLHDLSLPNVDKIASNEWLRRGELFPETEGFMIAIQDQIIETKNYKKHIMKLPNASDDSCRKCKGASETIQHITGACRAIAQTDYKHRHDQIAAIIHQSLAVKYKLISEQTAYYKYSPQTVLDTTDYKLYWDRTILTDKTVHYNRPDITLHDKNNKIVYLIDIAIPNTHNLQSTHTEKITKYTDLAIEIKTQWKVDRVITVPIVLSTTGVIPKTLHQSLKTINISPYTYINLQKAVVLNTCRIVRKFLQTDTTFT

SEQ ID NO: 23564 - protein, 1407 aa, Passova gellias
MRLRSGCTLPQAGTGAHRDGESRPELASSGSPTYSGGDTVSQTSAQLTVADHDSVENFPSVPITNPNPLSPSTTSTNSMLTEDVVQEAEPAVNLAPTTASFKTRRKWSKAMNEYILRTYLQLTFMETDTSSYLSPLHTKFIEKFPEMHMVSRQRVGDQRRAINNKKLLKQEDIDRIYKEVDEEIRNAQPNTSTHNTPVLCSTSQTDVYTTHTPPLIRHKIIHPKSINSKEVSQRMRWTKEYNETIMRAYYKITLLEANTSAYRSQLHKAFVTTYPHLEHITEQRVADQRRLIIANRYINEERLQAIKDEVSSELLTQNLNGRDVSNSIHPIVSQPELMTEPGSNFINNITSEPSQNKNSSNISTSHSDRQTFLEIEQHFQAAYNFFKNTDPTQRTYIPKQKSSRKLAITVDYINNKILPNYIAADTDFNIVQTVLYCGAWAAAKNNGAKIDIPPKEETNYRYNKNKPKWQIRLERRVEGLRADIGRLTQHIKGNKSNKILKHVQYIKKKYKTHATYENPNKDLSEFLDTLKQKLCTISNRLKRYKTCTLRKTQNKIFTSNEKQFYRGLKTPLTLTSTCNIQPTRPSVTSCSDSGSHHTSQPSANELHRFWANIWEHSVQHNEMAEWIADEQIKFSNSEPMDFECIPADVFHSVIKKLHNWKAPGSDNIHNFWYKKFTYIHPFILKHINKFIEMPHTLPDYVSTGITYMLPKNINDITNPEQYRPITCLQTIYKIMTSCLTEVIYKHLDNNKILAEQQKGCRKNSQGCKEQLTIDSVILKQAQKQKADLYSMYIDYKKAFDSVPHSWLLQILEIYRIHPKIISFLQNAMTKWSTRLRLTTDTNTVITDPIRIQRGIFQGDGLSPLWFCLALNPLSNMLNSSNVGYSLDYKETASDRPTDQLTHGSVHKLNHLLYMDDIKLYGASEEELQHLAQMTELFSKDICMDFGIDKCKINSIKAGQIYKHQYHTQTGALIESIDENEVYKYLGYNQAQQVLHKNTKNSLRNQFRCRLNSILRCHLYSKNTFKAINTYAIPILTYSFGIINWNKTELKSLQRTINTTLTKNRKHHPRSCVQRMTLPRIDGGRGLIDITNLHNKQITNLRTYFHKKANTSSLHNAIVQNDKHLTPLNLVDKTRQRNEIQTDRQTKFNEWTRKALHGRHLQDLNQPNVDKIASNEWLKRGELFPETEGFMIAIQDQIIETKNYKKHIMKLPNASDDACRKCKGPPETIQHITGACRAIAQTDYKHRHDQVAAIIHQNLAYQYKLIPEKIPYYKYTAQTVLDTTNYKLYWDRTILTDKTVHFNRPDITLHDKRNKVIYLIDIAIPNTHNLSSTHTEKINKYAELAIELKTQWKVEKVRIVPIILSTTGVIPDSLHSNLKLLNMHSHTYITLQKATILNTCRIVRKFLS

SEQ ID NO: 23565 - protein, 1398 aa, Myscelus epimachia
MRLRSGCTLPQAGTGANCDGESRPEQSSSGSPTYSGGDTVPQTSAQLRTVADQDLVENFSSVPITNPNSLSPSTTSTDSMLTEDVVQEAEPAVNLAPTTASFKKRRKWSKAMNEYILRTYLQLTLMETDTSSYLSPLHIKFIEKFPEMHMVARQRVGDQRRAINNKKLLKQEDIDRIYKEVDEEIRNAQLNTPKHNTPVLCSTTQTDAHTSHTLPLIRHKIIQTKTINSREVTQRMRWTKEYNETIMRAYYKITLLEANTSAYRSQLHKAFVTTYPHLEHITEQRVADQRRLIIANRYINEERLQTIKDEVSSELLTQNLNGRDVSNIIYPTVSQSQIMTETGSSFNNNINSKKSQNKDSSNISISHIDRQTFSEIEKHFEAAYNFFKNTDPTQRTYIPKQKSSRKLAITVNHINNKILPNYIDADTDFNTVQTVLYCGAWAAAKNNGAKIDIPPKEETNYRYKKNKPKWQIRLERRLEGLRAHIGRLTQYIKGNRSNKIVKHVQYIQKKYKTHATYENPNKHLTEFLDTLKQKLCTISNRLKRYKTCTLRKTQNKIFTSNEKQFYRGLKTPLTLTSTCNIHTTQPTVTSYSDRGTHHTSQPHSNELHRFWANIWENSVQHNEMAEWIVDEQSKFSNSEPMDFECIPADVFHSVIKKLHNWKAPGSDNIHNFWYKKFTYIHTFILKHINKFIEMPHTLPGFVSTGITYMLPKKLNDLTNPEQYRPITCLQTIYKIMTSCLTEVIYKHLDNNKILAEQQKGCRKNSQGCKEQLTIDSVILKQTQKRKADLYSMYIDYKKAFDSVPHSWLLQILEIYRIHPKIISFLQNAMTKWSTRLRLTTDTNTVYTDPIRIQRGIFQGDGLSPLWFCLALNPLSNMLNSSNVGYNLDYKETASDRPTDQLTHGSVHKLNHLLYMDDIKLYGSSEEELQRLAEMTEMFSKDICMDFGIDKCKINSIKAGQIYKHEYHTQTGALIESIDENEVYKYLGYNQAQQVLHKDIKNTLGNQFRRRLNSILRCHLYSKNTFKAINTYAIPILTYSFGIINWNKTELKSLQRSINITLTNNRKHHPRSCIQRMTLPRIDGGRGLIDITNLHNKQITNLRTYFHKKADTSSLHNAIVQNDKNLTPLNLVNKTRQRNEIQTDRQTKFSEWSRKALHGRHLQDLNQPNVDKIASNEWLKRGELFPETEGFMIAIQDQIIETKNYQKHIMKLLNASDDSCRKCKGSSETIQHITGACRAIAQTDYKHRHDQVAAIIHQNLAYQYKLIPEKTPYYKYTAQSVLDTTNYKLYWDRTILTDKTVHFNRPDITLHDKKNKVVYLIDIAIPNTHNLSSTHTEKINKYAELAIELKAQWKVEKVRIVPIILSATGVIPESLHSNLKLLNMHSHTYITLQKATILN

SEQ ID NO: 23566 - protein, 1395 aa, Myscelus amystis
MRLRSGCTLPQAGTGANRDGESRPEPSGSGSPTYSGGGTVSQTSAQLRTVADYDSAERYPSASTTNPNSLSPSTTSTISMLTEDVVQEAESAANLAPTTASLNMRRKWSKAMNEYILRTYLQLTLMETDTNGYLSPLHTKFIEKFPEMHMVSRQRVGDQRRAINNKKLLKQEEIDSIYKEVSEEIKNTQPNTPTHNTPALRCTSQTDVTKTKLTNSSEISQRMRWTKEHNETIIRAYYKITLLETNTTAYRSQLHKAFVTTYPHFEHITEQRIADQRRLIIANRYITEERLRAIKEEVSRELPMRNLNDRDVPNSIYPTVSQPELMTEPSSSFINNISFDPLANQNESNISTLHLDRQNCSEIEQHFQVAYNYFKKIEPTQRTYIPKQKSSRKLAITINYMNDKILPNYIDVDTDFNTIQTVLYCGAWAVAKSNGAKIDIPPKEETSYRYTKKKPKWQLRLERRLEELRAHIGRLTQYIKGNRSTKLVKQIQYIQRKYKTHATYENPNTHLSEFLDTLKQKLCTITNRLKRYKTCTLRKTQNKVFTANEKQFYRGLKTPLTFTSTCNTQTTEPSVTSYIDNATHHNNQPPANELRSFWANIWENPVQHNEMAEWIVHEQIKYSNSEPMDFECITAEVFHSVIKKLHNWKAPGSDNIHNFWYKKFTYIYPFILKHINKFIEMPHTLPDYISLGTTYMLPKNPNNITNPEQYRPITCLQTIYKIMTSCLTEVIYKHLDTNKILAEQQKGCRKNSQGCKEQLTIDSVILKQTQKRKADLYSMYIDYKKAFDSVPHSWLLHILEIYRIHPKIISFLQSAMTKWSTRLRLTTDTNTVITEPIKIQRGIFQGDGLSPLWFCLALNPLSNMLNSSNIGYNLDYKETAPDRPTDQLTHGSIQKLNHLLYMDDIKLYGSSEEELQHLAEITERFSKDICMDFGIDKCKINSIKAGQIYKHQYQMQTGALIESIDENEVYKYLGYNQAQQVLHKDTKNSLINQFRRRLNTILRCHLYSKNTFKAINTYAIPILTYSFGIINWNKTELKSLQRTINTTLTKNRKHHPRSCIQRMTLPRVDGGRGLIDITNLHNKQITNLRTYFHKKAETSSLHNAIIHNDKNLTPLNLVDKTRQRNEIQTDRQTKVDEWSRKALHGRHLQDLNQPNVDKIASNEWLKRGELFPETEGFMIAIQDQVVETKNYRKHIMKIPNASDDSCRKCMGCPETIQHITGACRAIAQTDYKHRHDQVAAIIHQNLAYQYKLIPEKIPYYKYTPQTVLDTTNYKLYWDRTILTDKTIHFNRPDITLHDKKNKVVYLIDIAIPNTHNLSSTHTEKLNKYAELAIELKAQWKVEKVRIVPIVLSTTGVIPESLSSNLKLLHMHPHTYITLQKAAILNTCRIVRKFLS

SEQ ID NO: 23567 - protein, 1388 aa, Chioides albofasciatus
MRLRSGYKLPQAGTGANRNGESRPEQSNSGCPTYSGGDTVSQTSAQSDTVADHHHDTESVVSFPSVPSTNPYSLPPSCSTTTGTSILTEDVVQEADPVENLAPTTACLNTRRKWSKTMNEFILRTYLQLTLMETDISGYLPSLHIKFIEKFPEMHMISRQRVGDQRRAIVNKKLLTQKDIDRIYEETREELNSTQINLQTHNLQFAQSQLTNRDDKRQRMRWTTEHNITIMRAYYKITLLETNISAYRGQLHEEFILKYPHLKHITEQRVADQRRLIIQNKYLNEEKLQAIKDEVASELLLQKNNHTQTPTFVSPEPENMNEQGDINCTDSEILTNIHTTNNSSTINTLHLDQQKTSEIEQNFNAAYNYFNNTNPTQRSYIPKQKPSRKLAAIVNYINSYILPKHINNGTEFMALQTILYCGAWAAAKTNGSKITIPPKIETHNTYNTRKPKWQIRLERRVEELRAQIGKLTQYIKGNKRTKIEEEVRFIKTKYKIHATHENPNTCLTEFLDTLKQKLTTISNRLKRYKNCTLRKTQNNTFVNNEKQFYRGLKSASTHNAQNNDQNNTQINNSLPSADELRAFWATIWENPVQHNRMANWIEKEQSKYTNVEPMVFQCIPTEVFHDVIKKLHNWKAPGSDNIHNFWYKKFTFTHPFILNYINKFIEMPDTIPYYITEGITYMLQKDQNDMSNPAKYRPITCLQTIYKIMTSCLTHIIYNHIDDNKILAEQQKGCRKYSQGCKEQLTIDSIVLKQTRNLKSDVYSMYIDYRKAFDSVPHTWLLHILEIYHIHPQIISFLQNTMTKWITRLKLTNGTNTVITDPIKIQRGIFQGDALSPLWFCLALNPLSNMLNSSNTGYNLRNEENDTDLLTDNPTYKLNHLLYMDDIKLYGSTEEELQTLAQTTEKFSEDICMEFGIDKCKINSIRAGQTYQHQYQMQTGELVESLHESEVYKYLGYNQDKQILHKDIKDSLTKQFKRRLNSILRSHLYSKNIFKAINTYAIPILTYSFGIINWNKTELKSLQRIVNTTMTQHRKHHPRSCVQRMTLPRNDGGRGLIDILNLHNKQITNLRNYFHNKAHTSSLHNVIVQSDKKLTPLNLFDKTLQKNETQTDRQTKINDWIRKALHGRHLHDLNLPNVDKIASNEWLRRGELFPETEGFMIAIQDQIIETKNYRKHIMKLPNASDDSCRKCKGAPETVQHITGACRAIAQTDYKHRHDQIAAIIHQSLAFKYKLITEQTAYYKYTPQTVLDTTDYKLYWDRTILTDKTVHYNRPDITLHDKKNKTVYLIDIAIPNTHNLSSTHTEKITKYTDLAIEIKNQWKVEKVKTVPIVLSTTGVIPNTLHSSLKLLNIHPKTYITLQKASILNTCRIVRKFLSMDTSPPALMLG

SEQ ID NO: 23568 - protein, 1157 aa, Trapezites symmomus
MGQRMSWTKQHNETIMRAYYKLTLLEANTSAYIVQLHEAFITAFPNLKHITEQRVVDQRRLIIHNRYLTEENLQAIKDEVASELLLQSNSHAQTHNKITQQHPPQTIHIASTTEQNNTHSTDSDIHNHIQKLEIEKTFQTAYNYFKNTDPTHRSYIPKQKSSRKLAVIVNYINLNILPKYIDKDIEFTTLQTILYCAAWASAKSNGAKIEIPPQAKVNYRHKTNKPKWQIRLERRIEELRAQIGRLTQYIKGNRTNVRILKHIVYIKKQYKIHSTHENPNTNLSEFLDTLKQKLTTYSNRLKRYKTCTLRKTQNKQFTFNEKQFYRELRTQTTQNDRSTLPPGTSRDNFNNSSPSADELHRFWATIWEKPVQHNKGAEWIQIEQDRYLTSDLMNFQCIPLKVFLGVIQNLHNWKSPGSDNIHNYWYKKFTYIHPHIFNHINKFIEMPHTLPDYISEGITYMLPKDRNSLSNPAKYRPITCLQTIYKIITSCLTQLIYTHVNNNNILAEQQKGCRKYSQGCKEQLIIDSILLKQTQLRRSDLYSMYIDYKKAFDSVPHSWLLKILEIYRIHPQIISFLQNTMTRWTTKLRLATDISTIDTQPIKVQRGIFQGDALSPLWFCLAMNPLSNLLNYSKSGLDLDYKNDTDLLTNYTTHKLNHLLYMDDIKLYGSNEKDLHELAHITERFSQDICMEFGIDKCKINSVKAGQHYEHQYHLQNGEIVEALSENEVYKYLGYSQTQQILHKEIKTSLIKQFKHRLNSILRSQLNSKNTIKAINTYAIPILTYSFGVINWTQTELKSLQRMINTTMTRHRKHHPRSSVQRMTLPRNEGGRGLIDITNLHNRQITNLRTYFHNKTLTSLLHNAIVQNDKKLTPLNLSDKIKQRNETQTSKQTKFNEWIRKTLHGRHLQDLNHPHVDKLASNEWLRRGEMFPETEGFMLAIQDQVVETKNHKKHILKLPNSSDDICRKCKGSPETIQHITSACRAIAQTDYKHRHDQVAAIIHQNLAYKYKLIQEKTAYYKYTPRTVLDTTDYKLYWDRTILTDKTLHYNRPDITLHDKKNQTVYLIDITIPNTHNLSSSHTEKIAKYTDLSIELKSQWKVKTVKTVPIIISSTGIIPHSLHTSLKLLKIHPTMYILLQKAVILNTCRIVRKFLSSD

SEQ ID NO: 23569 - protein, 1371 aa, Taractrocera maevius
MQLRSGNKLPQAGTGVICDGESRLEPSSLGCPTYSGGDNVSQSSAQVRTAADDRNYHLPSIDSLPSSSNLTSMSNSSTYSTSSSSRPEDVVQETDPVANLAPTSSSPKKRRKWSKTMNEFILRTYLQLTSMETDVRGYLLPLHTKFIEKFPEMHMVSRQRVGDQRRAIINRKLFKQHEIDRIHQEVREEINNMQTNTDIRNLHIPNTSTHKPTHLQTSLSPHRSQRMNWTKEHNETIIRAYYKHTQLEANTSAYRIPLHQAFITAFPDLKHVTEQRVADQRRLIILNKYLTEENLQAIKDEVARELHIQISSHTETHNNISQQSQTQTVHLAPTNVQDNNHNSHPYIERLQIEKTFETAFNYYKNTDPTHRSYIPKQSSSRKLTAIVNYINLHILPKHIDKDTEYTTLQTILYCAAWASAKSNGAKIDILPQEKVYRKCKKMKPKWQMRLEHKVEELRAQIGRLTQYIKGNRTKKIIKQVESIKKHYKIHSSHEKPNTNLNEFLDTLKQKLATYSHRLKRYKTCTLRKTQNKQFTLNEKQFYRQLNTQTKPNTDTSQDNSNNNNSNSSPAVDELHKFWASIWQNPVQHNLNAEWIQKELDKHTPTEHMNFQNISLEVFNDVIKNLHNWKSPGSDNIHNYWYKKFTYIHPYILHYINKFIQMPHTLPLYISEGITYMVPKDPNDLSNPAKYRPITCLQTIYKIITSCLTHLIYTHVDNNNILAEQQKGCRKYSQGCKEQLIIDSILLKQTQQKHLDLYSMYIDYKKAFDSVPHTWLIQVLEIYRIHPQIISFLQTTMRTWTTRLRLSSDTNTIETQSIKIQRGIFQGDSLSPLWFCLALNPLSNLLNSTESGFILDYKNDTDMQTNFTAHKLNHLLYMDDIKLYSSNEKDLHELANTTDTFSQDICMEFGIDKCKINSAKAGQYYEHQHHLHNGKIVEALTESEVYKYLGFSQARQILHKDIKTTLSGQFRRRLNSILCSHLNSKNTIKAINTYAIPILTYSFGVINWTQTELKSLQRTINTTMTKHRKHHPRSSVQRMTLPRNDAGRGLIDIINLHNKQITNLRTYFHNKALTSQLHNAIAQNDKKLTPLNLNVKSKQRNEIQTDKQTKFNEWIRKTLHGRHLHDLNHPHVDKRASNEWLKRGEMFPETEGFILAIQDQVVETKNYRKHILKLPNTADDSCRKCKGSPETIQHIISACKSIAQTDYKHRHDQVAAIIHQNLAFKHNLIQEKTAYYKYCPQSVIDTADYKLYWDRTILTDKTLHCNRPDITFHDKKNQTVYLIDITIPNTHNLSSSHTEKISKYTDLAIELKTQWKVKTVKTIPIIISATGIIPHTLHTSLKVLDIHSSTYILLQKAVLLNTCRIVRKFLSS

SEQ ID NO: 23570 - protein, 1397 aa, Haemactis sanguinalis
MRLRSGMQLPQAGTRANRNGESRLEPVSSGRPTYSGGDAVSQASAQLNTAAENDSVGSPTSSSYSYSPTNSYSLSKLSTNTIETEDVAQETDRVTDLVPTTANLNVRKKWSTEMNEFILRTFLQLTFMETDVNGYLPPLHAKFIEKFPEMHMVTRQRVGDQRRAIVNKKLLTQENINRIYEEVRLKLINIPTNIPTSTSLTNSSIHQNYTQEKFYDNNCRITTTQRIKWTNEYNESIMRAYYKITKLEENVSAYRPQLHKIFISTHPHLKHITEQRIADQRRLIVHHKYLSDERIQFIKDQVAIELLQERSSNTSTLRNTYHVDSEVEHAYKASTITCDTIGSQESTVILNGSQLKSTELEQNFKAAYKHFRNTDPTQRNYIPKQKCSTKLASIVNYINKNILPKYINIDTDFITLQTVLYCGAWTAAKSNGAKICMPPKENTNHTHLKNKPKWQLRLERKIEDLRAQIGRLTQYINGNKSIKIKKHVNYIFRQYKSHAAHEHNNTQLAEFLDTLKQKLTTFSNRLKRYKTCTLRKNQNKMFVANEKYFYRHIKTHSTLGNSKRNQSSLIIQNTTHHNINKNTPDAAELKSFWADIWENPVQHNRTAEWIVKEENKYSNIELMDFQKIPYEVFHKVIHKLHNWKAPGSDCIHNYWYKKFNFTHPFIYSYVNKFIEMPHTLPSYITTGITHMLPKDQNDLSNPAKYRPITCLQTIYKIITSCISEMIYKHLENNKIIAEQQKGCRKLSRGCKEQLTIDSVVLSQVKKNKLDLFTMYIDYKKAFDSVPHSWMLHVLEIYRINPQIISFLQNTMTKWSTKLRLIIDSNVVVTENIKIHRGIFQGDALSPLWFCLALNPLSNLLDSTNIGYDLTHNYRSTDQMKDSIIYKLNHLLYMDDIKLYSSSEEELQHLALITENYSKDVCLDFGIDKCKINSIITGELYNHQFKLQTGELIDSLDDNEVYKYLGYNQSQQVLHKEIKNSLLTYFRRRLNAVSRCYLYSKNTFKAINSYAIPVLTYSFGIMNWNATDLKSLQRIVNTTLTQNRKHHPRSCIQRMTLPRTDGGRGVIDIRNLHNKQITNLRTYFHNKAKESILHNAIVHNDKHYTPLNLSDKTQQKNEFQTSKHDKLNEWARKALHGRHLSDLNQSHVDRKASNEWIKRGEMFPETEGFMFAIQDQIIETNNYKKHILKLPNASDDSCRKCKGSSETIQHITGACRAIAQTDYKHRHDQVAAIIHQKLAHQHKLITETTAYYKYTPHRVLETKHHKLYWDRTILTDKTIHFNRPDITFHDKINKIVYLIDIAIPNTHNLLATQTEKTSKYTDLAIELKTQWKVEKVFTIPIILSSTGVIPNTLHTSLKMLNMHPKTYITLQKATILNTCRIVRKFLSLGTTTPAFVLG

SEQ ID NO: 23571 - protein, 1389 aa, Eburuncus unifasciata
MRLRSGMQLPQAGTRANCNGESRLELASSGCPMYSGGDAVSQTSAQLTTAAEGDSVENLPSTSYSPTNSYSPSRSRTTTKTILTEDVAQETDQVTDLVPTTASLNTRKKWSTKMNEFILRTYLQLTLMETDVTGYLPPLHSKFIETFPEMHMITRQRVGDQRRAIINKKLLTQENINRIYKEMRIKLTNIPANVPTSCTNYCPTPTQYQVNNCGTITQRIRWTNEYNETIMRAYYKITRLEENVSAYRPQLHKIFISTHPHLKHITEQRIADQRRLIIHNKYLSDERIQCIKNQVATELLQETPYDTLTLNNTDHVITETDHSIELSTNSDTIHNEQSNTILHGSQLKPAEIEQNFKASYEYFCNTEPTQRSYIPKQKCSTKLASIVNYINKNILPKYIDSDTDFLTLQTVLYCGAWAAAKSNGAKINIPPKENTNHIYLKNKPKWQLRLERRIEELRAQIGRLTQYSKGNRGIKIVRHVNYIQRKYKTHATHEHDNIHLLEFLDTLKQKLTTFSNRLKRYKACTIRKTQNKMFTANEKYFYRQIKTHSTSHSSHRNQACSTAPNDVCKNNIPRAFELQNFWAEIWENPVRHNRTAEWIVNEQNKYSSIELMDFQRIPYDVFHKVIHKLHNWKAPGSDYIHNYWYKKFNFIHPFIHTHVNKFIEMPHTLPSYVTTGITHMIPKDLNDLSNPAKYRPITCLQTIYKIITSCVSELIYKHIESNKIIVEQQKGCRKFSRGCKEQLTIDSVVVVVLSQVKQKKIDLFTMYIDYKKAFDSVPHSWMLHVLEIYRINPQIISFLQNTMTKWSTKLRLITDSNTVITEKIKINRGIFQGDALSPLWFCLALNPLSNLLNLTDIGYDLTHNYGPTHQMTSSFIYKLNHLLYMDDIKLYASRETELEHLALITENFSKDICLDFGIDKCKINSIVAGKPYKHQFQLQSGELIHPMDDSELYKYLGYNQSQQVLHKDTKNTLLTHFRRRLNAVARCYLYSKNTFKAINTYAVPILTYSFGIINWNATELKSLQRTINTTMTQNRKHHPRSCIQRMTLPRIDGGRGVIDIRNLHNKQITNLRTYFHNKAKVSILHNAIVHNDIHYTPLNLSDKTQQKNEYQTSRQDKVNDWARKALHGRHLNDLNQTHVDKKASNEWIKRGELFPETEGFMFAIQDQVIETNNYKKHIMKLPNTSDDSCRKCKGSSETIQHITGACRAIAQTDYKHRHDQVAAIIHQKLAYQHKMLTEPTAYYKYTPHRVLETKHHKLYWDRTILTDKTIHFNRPDITLHDKKNKIVYLIDIAVPNTHNLLTTQSEKTSKYTDLAIELKTQWKVEKVLTIPIILSATGVIPKTLHSSLKMLNIHPKTYITLQKATILNTCRIVRKFLSLGTTSPAFVLG

SEQ ID NO: 23572 - protein, 1400 aa, Myrinia binoculus
MRLRSGFSLPQAGTGANRDGESRPLPSSSGSPTYSGGDTVSQTSAQFSTVAEQDDLVSVESLPSIPSTNPYSHSKSHSTSTTNSTLTEDVVQEADLSSNLTPTPVSYTRRKWSKPMNEYILRTYLQLTLMETDTSGYLPPLHTKFIERFPEMNMVSRQRVGDQRRAIINRKLLPQKNIDRIYKETREKLSQIQTNGQTSSTQNQNLFQHTTTQSQLSSSQSTYRMRWTSQQNETIMRAYYRITQLETNVTAYRPELHRAFITTYPHLEHVTEQRVADQRRLIIHNRYINTERLQMIKDEVAKELNLQKNTNTCSLIYPSATQIDPVTEQDNNIVNSIDINSETNITHSPHKTHANLDCQKIGEIEQNFKQAYAYFKNTDPTHRSYIPKQRSSKNFAIIVDYINSNILPKHIDVNTEFITFQTVLYCSAWTAAKSNGARIEILPKETNYKDKDKKPKWQIRLERRIEELRAQIARLTQYIKGNRNTKIIKHVNYIQIKYKIHAVHENPNTQLSEFLDTLKQKLATLSSRLKRYKTCTLRKTQNKMFTANEKQFYRGLKTSVSNHSTSVGNAQSTNPNIISPTADELRNFWATVWENPVQHNKEAPWILGEKNKFSNSEPMGSQLIPAEVFHDVLKKLHNWKAPGSDNIHNFWYKKFTYTHPFIFNYINKFIELPHTLPDYLTVGTTYMLPKDLNNLSNPAKYRPITCLQTLYKIITSCLTSLIYEHIDTNKLLTEQQKGCRKYSQGCKEQLTIDSIILKQTQKRKSELYSMYIDYRKAFDSVPHSWLIQILDIYNIHPLIISFLHHAMEKWTTRLKLTIETKTIITEPIKIQRGIFQGDALSPLWFCLALNPLSNMLNSSGVGYDLDHKEDDTNQQTDHSIHKLNHLLYMDDIKLYGSTVEELHILTQITENFSKDIYMDFGIDKCKINSVKAGKTYIHQYHTQTGEIIEALHQNEVYKYLGYQQAQLILHKDTKNCLINHFKSRLNAILRCHLHSKNVFKAINTYAIPILTYSFGVINWNKTELKSLQRTVNTTMTKNRKHHPRSCIQRVTLPRHDGGRGLIDIINLHNKQITNLRTYFHFKAQSSSLHNAIAQIDKKLTPLNLSDKSQQRNEIQTDRQNKLNEWSQKSLHGRHFHDLNQPHVDKVASNEWLKRGELFPETEGFMIAIQDQVIETKNYIKHIMKLPNASDDSCRKCKGSPETIQHITGACRAIVQTDYKHRHDQVAAIIHQILAFKHKLITEKIAYYKYIPQTVLDTTDIKLYWDRTILTDKTIHYNRPDITLHDKKNKIVYLIDIAIPNTHNLASTHTDKITKYTDLAIELKTQWKIEKVITVPIVLSATGIIPKSLLTSLKLLNIHPQTYITLQKATILNTCRIVRQFLNQWIMNVSYFIMKPIHSII

SEQ ID NO: 23573 - protein, 1407 aa, Pyrgus malvae
MRLRSGVTLPQAGTGAKCDGESRPGPSGSGSPTYSGGDTVSQTSAQFYTVADDIDSSSVESLPSVPSTNTFSSSPTHSSTTASSMPTEDVVQDALSSVNLAPATGGLTTRRKWSTEMNEFILRTYLQLTSMETDVNGYLPPLHTKFIEKFPDMQMTSRQRIGDQRRAIINKKLLTQANIDRIYKEVRDELTDSQTNPNSYSTQHSSQHTYIPLTISSNETSNRMRWTTEQNEAIIRAYYKITHLETNITGYRPQLHKAFINTYPHLDHITEQRVADQRRLIIRNRYISCERLQNIKDEIARELQVHTQQNIDTQSSSNTQTAVSQAESILYVDNILVDCTNNIETVNALDITTSHLDFEKCKEIDETFKQAYNYFKDTDPTIRPYIPKQNSSRKLAIIVNHINRNILPKYIDDNTEFINFQTALYCGAWTAAKSNGARISIPTKSEPNKCRKRKPKWQIRLERRVEEIRAQIARLIQYIQGNRSIDLVKHVNYIRTKYKIHATHEAPNTHLSEFLDTLKQKLTTYSNRLKRYKICTLRKTQNATFAVNEKQFYRQLRAPKMHPSTSTHNEQDTQTSVSSSTMHNNVHNTNPTTPPAEELRRFWATIWENSVSHNNEADWITREKSKYLSVEPMEFQCIPAEVFRDVIKKLQNWKTPGSDNIHNFWYKKFSYIHPYLYKYLNKFIEHPHTMPDYITLGTTYMLPKNPNNTSNSANYRPITCLQTIYKILTSCLTQIIYKHVDSNEILTEQQKGCRKYSQGCKEQLTIDSVILKQTQKRKSNLYSMYIDYKKAFDSVPHSWLLEILNIYRIHPQIVLFLQNSMAKWATRLKLTTDNDTVITEPIKINRGIFQGDALSPLWFCLSLNPLSNMLNSSTAGYNLSYQENSIDPLTNFSIYKLNHLLYMDDIKLYSSTEEELTQLAEITEKYSEDICMNFGIDKCKINSIKAGEIYKHHFTTRTGEQIEPLGETETYKYLGYNQSQQILHKHTKESLTKHFKSRLNTLLRCHLYSKNTFKAINTYAIPVLTYSFGIINWSKTQLKTLQRTIHTTLTQSRKHHPRSCIQRMTLPRHDGGRGLIDIINLHNKQIANLRSYFHNKEKTSLLHKSIVQNDKKLTPLNLSDQTQQPNEILTDRQIKLDEWARKSLHGRHLRDLKQPHVDNKASNEWLRRGELFPETEGFMIAIQDQIIETKNYKKHIIKQQNASDDSCRKFKCSPETIQHITGACRSIAQTDYKHRHDQVAAIIHQILAFKYKLISEKTAYYKYIPQTVLDTTNYKLYWDRTILTDKTVHFNRPDITLHDKKNRIVYLIDIAIPNTHNLSSTYTEKITKYTDLSAEIKAQWKVDKVVTVPIVLSTTGVIPLTLHTSLKLLNVHSQTFINLQKATILNTCRIVRKFLSMDTTPSAFMLG

SEQ ID NO: 23574 - protein, 1407 aa, Pyrgus malvae
MRLRSGVTLPQAGTGAKCDGESRPGPSGSGSPTYSGGDTVSQTSAQFYTVADDIDSSSVESLPSVPSTNTFSSSPTHSSTTASSMPTEDVVQDALSSVNLAPATGGLTTRRKWSTEMNEFILRTYLQLTSMETDVNGYLPPLHTKFIEKFPDMQMTSRQRIGDQRRAIINKKLLTQANIDRIYKEVRDELTDSQTNPNSYSTQHSSQHTYIPLTISSNETSNRMRWTTEQNEAIIRAYYKITHLETNITGYRPQLHKAFINTYPHLDHITEQRVADQRRLIIRNRYISCERLQNIKDEIACELQVHTQQNIDTQSSSNTQTAVSQAESILYVDNILVDCTNNIETVNALDITTSHLDFEKCKEIDETFKQAYNYFKDTDPTIRPYIPKQNSSRKLAIIVNHINRNILPKYIDDNTEFINFQTALYCGAWIAAKSNGARISIPTKSEPNKCRKRKPKWQIRLERRVEEIRAQIARLIQYIQGNRSIDLVKHVNYIRTKYKIHATHEAPNTHLSEFLDTLKQKLTTYSNRLKRYKICTLRKTQNATFAVNEKQFYRQLRAPKMHPSTSTHNEQDTQTSVSSSTMHNNVHNTNPTTPPAEELRRFWATIWENSVSHNNEADWITREKSKYLSVEPMEFQCIPAEVFRDVIKKLQNWKTPGSDNIHNFWYKKFSYIHPYLYKYLNKFIEHPHTMPDYITLGTTYMLPKNPNNTSNSANYRPITCLQTIYKILTSCLTQIVYKHVDSNEILTEQQKGCRKYSQGCKEQLTIDSVILKQTQKRKSNLYSMYIDYKKAFDSVPHSWLLEILNIYRIHPQIVLFLQNSMAKWATRLKLTTDNDTVITEPIKINRGIFQGDALSPLWFCLSLNPLSNMLNSSTAGYNLSYQENSIDPLTNFSIYKLNHLLYMDDIKLYSSTEEELTQLAEITEKYSEDICMNFGIDKCKINSIKAGEIYKHHFTTRTGEQIEPLGETETYKYLGYNQSQQILHKHTKESLTKHFKSRLNTLLRCHLYSKNTFKAINTYAIPVLTYSFGIINWSKTQLKTLQRTIHTTLTQSRKHHPRSCIQRMTLPRHDGGRGLIDIINLHNKQIANLRSYFHNKEKTSLLHKSIVQNDKKLTPLNLSDQTQQPNEILTDRQIKLDEWARKSLHGRHLHDLKQPHVDNKASNEWLRRGELFPETEGFMIAIQDQIIETKNYKKHIIKQQNASDDSCRKCKCSPETIQHITGACRSIAQTDYKHRHDQVAAIIHQILAFKYKLISEKTAYYKYIPQTVLDTTNYKLYWDRTILTDKTVHFNRPDITLHDKKNRIVYLIDIAIPNTHNLSSTYTEKITKYTDLSAEIKAQWKVDKVVTVPIVLSTTGVIPLTLHTSLKLLNVHSQTFINLQKATILNTCRIVRKFLSMDTTPSAFMLG

SEQ ID NO: 23575 - protein, 1384 aa, Epargyreus clarus
MRLRSGYKLPQAGTGANHDGESRPEQSSSGCPTYSGGDTVSQTSAQSNTVADHHHDSESVASFPSVPSTNPYSYSSTCSTTTVNSMRTEDVVQEADPVENLAPTTASLHTRRKWSKAMNEFILRTYLQLTLMETDTSGYLPPLHTKFIEKFPEMHMISRQRVGDQRRAIVNKKLLTQNDIDKIYRETREEINNTQRNAQIYNTKPTHSHTDKPLSPNNNTNQRMRWTTEYNVTIMRAYYKVTLLETNITAYRGQLHKEFITTYPHLQYITEQRVADQRRLIIQNKYLSNEKLQSLKDEVASELDLQKNNNTQIPSSICPAVDFIELQDINSETSNNINNINDSPNIRTSHLNQQKIAEIEQNFDAAYNYFKNTHPTQRTYIPKQKTSVKLATIVNYINKTILPKHVDNDTEFMKLQTVLYCGAWAAAKSNGSKIAIPPKIEVGKIYKIKKPKWQIRLEKRVENLRAEIGQLTQYIKGNTSIKMEKKVKFIKLRHKIHATHENPNTHLSEFLDTLKQKLTTISNRLKRYKTCTLRKTQNNTFSTNEKQFYRGLSTNNSHSLQNNTQINISPPPSDELRTFWATIWENSVQHNKMANWILHEQNTYSESEPMIFDCIPFEVFDSVIKKLHNWKAPGSDNIHNFWYKKFTFIHPFIYNYINKFIKIPHALPEYITEGITYMLPKDLNDISNPAKYRPITCLQTIYKIMTSCLTQIIYNYVDSNNILTEQQKGCRKYSQGCKEQLTIDSVVLKQTQKRKSDLYSMYIDYKKAFDSVPHTWLLQVLEIYHIHPQIISFLQNTMKKWITKLKLTNGTNTVITEPIKIRRGIFQGDALSPLWFCLALNPLSNMLNSSNTGYDLKFIENNPNRLADFSIYKLNHLLYMDDIKLYGSTEQELQKLAQITENFSTDICMEFGIDKCKINSIKAGQTYQHQYQMQTGELVKTLHENEVYKYLGYNQAQQILHKDIKDSLTIQFRRRLNAILRSHLYSKNTFKAINTYAIPILTYSFGVINWNKTQLKTLQRIINTTMTQHRKHNPRSCVQRITLPRQDGGRGLIDILNLHNKQITNLRTYFHNRAQTSDLHNAIVENDTNLTPLNLYDKTLQRNEIQTDRQTKLNEWTRKALHGRHLHDLNQPNVDKLASNEWLRRGELFPETEGFMIAIQDQIIETKNYKKHIMKVPNASDDSCRKCKGSPETIQHITGACRAIAQTDYKHRHDQIAAIVHQCLAFKYKLIPEKITYYKYTPQTVLDTTDYKLYWDRTILTDKTVHYNRPDITLHDKKNKIVYLIDIAIPNTHNLSSTHSEKITKYTDLAIELKSQWKVGKVKTVPIVISTTGVIPDTLHSSLKLLNIHPQTYITLQKASILNTCRIVRKFLSMDPTLPALMLG

SEQ ID NO: 23576 - protein, 1402 aa, Viola violella
MRLRSGFKLPQAGTGANRDGESSLEPSSSGSPMYSGGDSESQASAQLNTDADHEHDSMSVVSFPSDPSTNPYSCSSTPSTISSNSSSSSQPEDVVQKANPANNLAPIAVITKTRRKWSKAMNEFILRTYLHLTLMETDVSGYLPALHTKFIERFPDMHFISRQRIGDQRRAIINKNLLTQTEIDNIYKEIQKEINDRSTSFQNTPEYIATSLHTNRPTEQPRELFHTQNRITHTCSNGENNQRMRWSKEQNETIMRAYYKITLLESNMSAYRTQLHKAFISAYPHLQHITEQRIADQRRLILNNRYLSEERLQEIKSEIAIELHLHGNNDSQSLNKTQEVSQLECEVEEGFNWETIASSELIQNIDRSHNIDAIKKSHLDESCTRAIEENFNLAYNYYINTNPTQRSYIPKQRPSKKLAAIVDFINKNILPKYIDLESEFITLQTVVYCGAWAAAKSNGSRIDIPRETEICTKIKNKKKPKWQKRLESRVEEIRAEIGRLTTYIKGNRSPKLEKHINFIKIKYKLHSKHETPNTDLPEFLDTLKQKLTIISNRLKRYNTCTLRKLQNQIFSVNEKQFYRGLKTSSFKPNTTRTQPATTPENCQQNINNNSFPPAQELQSYWAGIWENPSQHNQAADWITSERKHHLNVTPMEFSRIPVEVFHNVIKKLHNWKAPGSDNIHNFWYKKFTHAHPIIYNLINNFIEKPETLPDYITTGMTYMLPKDTNNMTNPAKFRPITCLQTIYKIITSCLTHIIYKHIDDNNILAEQQKGCRKHSQGCKEQLTIDSIVLKQTQKLKTDLYSMYIDYQKAFDSVPHTWLLQCLGIYRVHPQIVSFLENAMTKWTTRLRLTTDTDTIITDPIKIQRGIFQGDALSPLWFCLALNPLSNMLNSSNLGFHLDSNANETDRLTDSSTKKLNHLLYMDDIKLYGSTEDELQQLAQLTESFSKDISMNFGIDKCKINSVKAGQIFKHDYIMQNGEIIKPLNNNEVYKYLGYNQSQQISHKDIKSTLTKQFRHRLNSISQSHLNSRNTFKAMNTYAVPILSYSFGVINWNKTELKSLQRIIHTTLTKHRKHHPRSCIQRLTLPRIDGGRGLIDIVNLHNKQITNLRNYFHCKAQSSSLHKNITQIDKKLTPLNLADNTKQKNEILTDRLTKLNEWARKSLHGRHFHDLSQPNVDKTASNAWLKHGELFPETEGFMIAIQDQIIETKNYKKYIMKLPNASDDSCRKCKAASETIQHVTGACKTIAQTDYKHRHDQVASIIHQNLALKCKLISLKTAYYKYTPHTILDNKNYKLYWDRTILTDKTIHYNRPDITLHDKKNKTVYLIDIAIPNTHNLSSTYTEKITKYTDLAIELKSQWKVNKIVTIPIILSATGVIPDTLHTSLKLLSISSYTYITLQVSRT

SEQ ID NO: 23577 - protein, 1407 aa, Pyrgus malvae
MRLRSGVTLPQAGTGAKCDGESRPGPSGSGSPTYSGGDTVSQTSAQFYTVADDIDSSSVESLTSVPSTNTFSSSPTHSSTTASSMPTEDVVQDALSSVNLAPATGGLKTRRKWSTEMNEFILRTYLQLTSMETDVNGYLHPLHTKFIEKFPDMQITSRQRIGDQRRAIINKKLLTQANIDRIYKEVRDELTDSQTNPNSYSTQHSSQRTYIPLTISSNETSNRMRWTTEQNEAIIRAYYKITHLETNITGYRPQLHKAFINTYPHLDHITEQRVADQRRLIIRNRYISCERLQNIKEEIARELQVHTQQNIDTQSSSNTQTAVSQAESILYGDNILVDCTNNVETVNALDITTSHLDFEKCKEIDQTFKQAYNYFKDTDPTIRPYIPKQNSSRKLAIIVNYINRNILPKYIDDSTEFINFQTALYCGAWTAAKSNGARISIPTKSEPNKCRKRKPKWQIRLERRVEELRAQIARLIQYIQGNRSIDLVKHVNYIRTKYKIHATHETPNTHLSEFLDTLKQKLTTYSNRLKRYKICTLRKTQNATFAVNEKQFYRQLRAPKMHPSTSTHNEQDTQTSVSSSTMHNNVHNTNPTTPPAEELRRFWATIWENSVSHNKEADWITREKSKYLSVEPMEFQCIPAEVFRDVIKKLQNWKTPGSDNIHNFWYKKFSYIHPYRYKYLNKFIEHPHTMPDYITLGTTYMLPKNPNNTSNSANYRPITCLQTLYKILTSCLTQIIYKHVDSNEILTEQQKGCRKYSQGCKEQLTIDSVILKQTQKRKSNLYSMYIDYKKAFDSVPHSWLLEILNIYRIHPQIVLFLQISMAKWATRLKLTTDNDKVITEPIKINRGIFQGDALSPLWFCLSLNPLSNMLNSSTAGYNLSYQENSIDPLTNFSVYKLNHLLYMDDIKLYSSTEEELTQLAEITEKYSEDICMNFGIDKCKINSIKAGEIYKHHFTTRTGEQIEPLGETETYKYLGYNQSQQILHKHTKESLTKHFKSRLNTLLRCHLYSKNTFKAINTYAIPVLTYSFGIINWSKTQLKTLQRTIHTTLTQSRKHHPRSCIQRMTLPRHDGGRGLIDIINLHNKQIANLRSYFHNKEKTSLLHKSIVQNDKKLTPLNLSDQTQQPNEILTDRQTKLDEWARKSLHGRHLHDLKQPHVDNKASNEWLRRGELFPETEGFMIAIQDQIIETKNYKKHIIKQQNASDDSCRKCKCSPETIQHITGACRSIAQTDYKHRHDQVAAIIHQILAFKYKLISEKTAYYKYIPQTVLDTTNYKLYWDRTILTDKTVHFNRPDITLHDKKNKIVYLIDIAIPNTHNLSSTYTEKITKYTDLSAEIKAQWKVDKVVTVPIVLSTTGVIPLTLHTSLKLLNIHSQTFINLQKATILNTCRIVRKFLSMDTTPSAFMLG

SEQ ID NO: 23578 - protein, 1384 aa, Autochton oryx
MRLRSGYKLPQAGTGAKRNGESRPEQSGSGSPTYSGGDTVSQTPAQPSAVADYNHDSDSVVSFSSVTSTNPYFYSPTSSTTTGNSMLTEDVVQETDQVENLAPTTASLNTRKKWSKTMNEFILRTYLQLTLMETDNSGYLHPLHTKFIEKFPEMHMITRQRVGDQRRAIVNKKLLTQNDIDRIYKETREELNNTQTSSQKLNLQIIQSQATHTNDTSQRMRWTTEHNETIIRAYYKITLLETNISAYRGPLHKEFISKYPHLKHITEQRVADQRRLIIHNKYLSEERLQTIRDEIASELLLQKNLNAQNSNRLSPIPEHINEQANTNYMDPKSFTNINITNNPSNLKTIHLDIQKRADIEQNFNAAYNYFKNINPTQRSYVPKQKASKKLAAIVNYINSYILPKYINNDTTFNTLQTVLYCGAWAAAKSNGSKITIPPKTELHSLYNTKKPKWQIRLERRVEKLRAQIGHLTQYIKGNKSTKIEKQVKVIKSKYKIHATHENPNTYLSEFLDTLKQKLTTISSRLKRYKTCTLRKTQNNTFSTNEKQFYRGLNSHNLHNTQNNTYINTPLPLSHELRTFWASIWENSVQHNKMASWIIHEQNKYSKSEPMVFQCIPAEVFDSVIKNLHNWKAPGSDNIHNFWYKKFTFIQPFIFKYINKFIETPHILPDYITEGITYMLPKDLNDISNPAKYRPITCLQTIYKIMTSCLTHVIYNYIDENKILTEQQKGCRKYSQGCKEQLTIDSIVLKQTRKRKSDLYSMYIDYKKAFDSVPHTWLIHILEIYHIHPQIIAFLQNTMAKWITRLRLNNSTNTVITETIKIRRGIFQGDALSPLWFCLALNPLSNMLNLSNTGCNLELEENHTNLLTECSIYKLNHLLYMDDIKLYGSTETELQKLAQITEKFSKDICMEFGIDKCKINSVRAGQTYQHHYQMQTGELVKALHEHEVYKYLGYNQAQQILHKDIKDSLTKQFKRRLNIILRSYLYSKNIIKAINTYAIPILTYSFGIINWNKTELKSLQRIINTTMTQNRKHHPRSCVQRMTLPRHDGGRGLIDILNLHNKQITNLRTYFHNKAQTSPLHNAVVKNDINLTPLNLFDKTLQKNETQTDRQTKLNEWTRKTLHGRHLHDLNLPNVDKTASNEWLRRGELFPETEGFIIAIQDQVIETKNYKKHIMKLPNASDDSCRKCKGAPETIQHITGACRAIAQTDYKHRHDQIAAIIHQSLAFKYKLISELTAYYKYTPQTVLDTTDYKLYWDRTILTDKTVHYNRPDITLHDKKNKIVYLIDIAIPNTHNLSSTHTEKITKYTDLAIELKSQWKVEKVKTVPIVLSTTGVIPNTLNSNLKLLNIHPQTYIILQKASILNTCRIVRKFLSNDTTSPTFMLG

SEQ ID NO: 23579 - protein, 847 aa, Pyrgus malvae
MHPSTSTHNEQDTQTSVSSSTMHNNVHNTNPTTPPAEELRRFWATIWENSVSHNNEADWITREKSKYLSAEPMEFQCIPAEVFRDVIKKLQNWKTPGSDNIHNFWYKKFSYIHPYLYKYLNKFIEHPHTMPDYITLGTTYMLPKNPNNTSNSANYRPITCLQTIYKILTSCLTQIIYKHVDSNEILTEQQKGCRKYSQGCKEQLTIDSVILKQTQKRKSNLYSMYIDYKKAFDSVPHSWLLEILNIYRIHPQIVLFLQNSMAKWATRLKLTTDNDTVITEPIKINRGIFQGDALSPLWFCLSLNPLSNMLNSSTAGYNLSYQENSIDPLTNFSIYKLNHLLYMDDIKLYSSTEEELTQLAEITEKYSEDICMNFGIDKCKINSIKAGEIYKHHFTTRTGEQIEPLGETETYKYLGYNQSQQILHKHTKESLTKHFKSRLNTLLRCHLYSKNTFKAINTYAIPVLTYSFGIINWSKTQLKTLQRTIHTTLTQSRKHHPRSCIQRMTLPRHDGGRGLIDIINLHNKQIANLRSYFHNKEKTSLLHKSIVQNDKKLTPLNLSDQTQQPNEILTDRQIKLDEWARKSLHGRHLHDLKQPHVDNKASNEWLRRGELFPETEGFMIAIQDQIIETKNYKKHIIKQQNASDDSCRKCKCSPETIQHITGACRSIAQTDYKHRHDQVAAIIHQILAFKYKLISEKTAYYKYIPQTVLDTTNYKLYWDRTILTDKTVHFNRPHITLHDKKNRIVYLIDIAIPNTHNLSSTYTEKITKYTDLSAEIKAQWKVDKVVTVPIVLSTTGVIPLTLHTSLKLLNVHSQTFINLQKATILNTCRIVRKFLSMDTTPSAFMLG

SEQ ID NO: 23580 - protein, 957 aa, Autographa pulchrina
MNGSKIQIPPVDASIRFKKSKPKWQIRLERRIVELRGQIGRLTQYIRGNRNTKLVKHVNYIQHKYRVHATHENHNTQLIEFLDTLKQKLTALSNRLKRYKTCTLRKTQNKQFTSNEKQFYRGLRTTFDNSLSSTNFESRTPTTPTSGNPRPSPDADELRGFWAGIWENPVQHAKEAEWIQNEHNRHLDSEPMDFQCIPVEIFHDVIKKLHNWKAPGSDNIHNFWYKKFTYLHPLIYNNINKFIKQPETLPCYVTVGTTYMLPKDPSSLTDPAKYRPITCLQTIYKIITSCLTHIIYEHIDRNNLLAEQQKGCRKYSQGCKEQLTIDSVILKHTQLNKSDLFSMYVDYKKAFDSVPHSWLLQVLDIYRINPIITSFLQNTMTRWATRLSLTTDSSTVLTEPIKVQRGIFQGDALSPLWFCLSLNPLSNMLNSLNLGYQLEYKVNEDAPLIHCSSYKLNHLLYMDDIKLYGSTEEELLRMAELTETFSRDICMHFGIDKCKINSTKGGQQYTHQYCMQSGEIVEPLAEAEVYKYLGYNQAQQIQHKNIKINLTKQFKLRLNTILRSHLYSKNTFKAVNTFAIPVLTYSFGIINWNKTELKSLQRTINTTMTKNRKHHPRSCIQRMTLPRNVGGRGLTDVLNLHNTQIKTLRTFFHNKSNTSILHRAIVQNDKKFTPLNLLDRTQQKNESQTDRQTKLNEWTRKALHGRHLHDLNQPTVDKIASNEWLRRGEMFPETEGFMLAIQDQVIETNNYKKHIMKLPSLINDTCRKCKGSSETIQHITGACRVIVQTDYKHRHDQVAAIIHQNLAFKFNLIKEKIAYYKYTPQVVIDNADYKLYWDRTILTDKTVHYNRPDITLHDKKNQTVYLIDIAIPNTHNLSSTHTEKLTKYTDLAIELKNQWKVKAVKTIPIVLSSTGIIPHTLHTSLKLLDLHSLTYILLQKATILNTCRIVRKFLSTD

SEQ ID NO: 23581 - protein, 1403 aa, Autographa pulchrina
MRLRSSNKLPQAGTGSISERESRTKPSGLGCLTYSGGGNVLQCSTQFLTDAELHHHPHSHDSSAVNISPSSSSSSLFASIPSTNPYSRSPAHSIASSMLSEDVVQETESVAILAPTTSSLYSRKKWSKPMNEFILRTYLQLTLMETDTNGYLPPLHTKFVEKFPEMQKVSRQRVGDQRRAIINKKLLPQNDIDDIYTEVNEEINNIRINTLTPNLQTGAIAQTLSSNQVAQRMRWSKDHNETIMRAYYKITHLESNISAYRGPLHQAFVNAFPNLNHISEQRVADQRRLIIKNRYISEERLQAIKDEVASVARQQSNNDGLVRNSIDIVSTQVGPDPELENNRFNSLDLGLPTNVDSYINNATESTDLQLDQRYAELDQTFQECYNYFKNTDPTQRSYIPKQKSSKKLATIVNYINCNILPKHLFHDTEFITLQTVLYCAAWTAARMNGSKIQIPPVDASIRFKKSKPKWQIRLERRIVELRGQIGRLTQYIRGNRNTKLVKHVNYIQHKYRVHATHENHNTQLIEFLDTLKQKLTALSNRLKRYKTCTLRKTQNKQFTSNEKQFYRGLRTTFDNSLSSTNFESRTPTTPTSGNPRPSPDADELRGFWAGIWENPVQHAKEAEWIQNEHNRHLDSEPMDFQCIPVEIFHDVIKKLHNWKAPGSDNIHNFWYKKFTYLHPLIYNNINKFIKQPETLPCYVTVGTTYMLPKDPSSLTDPAKYRPITCLQTIYKIITSCLTHIIYEHIDRNNLLAEQQKGCRKYSQGCKEQLTIDSVILKHTQLNKSDLFSMYVDYKKAFDSVPHSWLLQVLDIYRINPIITSFLQNTMTRWATRLSLTTDSSTVLTEPIKVQRGIFQGDALSPLWFCLSLNPLSNMLNSLNLGYQLEYKVNEDAPLIHCSSYKLNHLLYMDDIKLYGSTEEELLRMAELTETFSRDICMHFGIDKCKINSTKGGQQYTHQYCMQSGEIVEPLAEAEVYKYLGYNQAQQIQHKNIKINLTKQFKLRLNTILRSHLYSKNTFKAVNTFAIPVLTYSFGIINWNKTELKSLQRTINTTMTKNRKHHPRSCIQRMTLPRNVGGRGLTDVLNLHNTQIKTLRTFFHNKSNTSILHRAIVQNDKKFTPLNLLDRTQQKNESQTDRQTKLNEWTRKALHGRHLHDLNQPTVDKIASNEWLRRGEMFPETEGFMLAIQDQVIETNNYKKHIMKLPSLINDTCRKCKGSSETIQHITGACRVIVQTDYKHRHDQVAAIIHQNLAFKFNLIKEKIAYYKYTPQVVIDNADYKLYWDRTILTDKTVHYNRPDITLHDKKNQTVYLIDIAIPNTHNLSSTHTEKLTKYTDLAIELKNQWKVKAVKTIPIVLSSTGIIPHTLHTSLKLLDLHSLTYILLQKATILNTCRIVRKFLSTD

SEQ ID NO: 23582 - protein, 766 aa, Autographa gamma
MDFQCIPVEIFHDVIKKLHNWKAPGSDNIHNFWYKKFTYLHPMIYNNINKFIEQPETLPCYVTVGTTYMLPKDPSSLTDPAKYRPITCLQTIYKIITSCLTHIIYEHIDRNSLLAEQQKGCRKYSQGCKEQLTIDSVILKHTQLNKSDLFSMYVDYKKAFDSVPHSWLLQVLDIYRINPIITSFLQNTMTRWATRLSLTIDSSTVLTDPIKVQRGIFQGDALSPLWFCLSLNPLSNMLNSLNVGYQLEYKVNEDTPLIPCSPYKLNHLLYMDDIKLYGSTEQELLRMAELTETFSRDICMNFGIDKCKINSTKGGQQYDHQYCLQSGEIVEPLGEAEVYKYLGYNQAQQIQHKNIKVNLTKQFKHRLNTILRSHLYSKNTFKAVNTFAIPVLTYSFGIINWNKTDLKSLQRTINTTMTKNRKHHPRSCIQRMTLPRNVGGRGLTDVLNLHNTQIKKLRTYFHNKSNTSMLHRAIVQNDKKFTPLNLLDRTQQKNESQTNMQTKLNEWTRKALHGRHLHDLNQPTVDKTASNEWLRRGEMFPETEGFMLAIQDQVIETNNYKKHIMKLPSLINDTCRKCKGSSETIQHITGACRVIVQTDYKHRHDQVAAIIHQNLAFKFNLIKVKIAYYKYTPQVVIDNADYKLYWDRTILTDKSVHYNRPDITLHDKKNQTVYLIDIAIPNTHNLSSTHTEKLTKYTDLAIELKNQWKVKAVKTIPIVLSSTGVIPHTLHTSLKLLDLHSLTYILLQKATILNTCRIVRKFLSTD

SEQ ID NO: 23583 - protein, 766 aa, Autographa pulchrina
MDFQCIPVEIFHDVIKKLHNWKAPGSDNIHNFWYKKFTYLHPLIYNNINKFIKQPETLPCYVTVGTTYMLPKDPSSLTDPAKYRPITCLQTIYKIITSCLTHIIYEHIDRNNLLAEQQKGCRKYSQGCKEQLTIDSVILKHTQLNKSDLFSMYVDYKKAFDSVPHSWLLQVLDIYRINPIITSFLQNTMTRWATRLSLTTDSSTVLTEPIKVQRGIFQGDALSPLWFCLSLNPLSNMLNSLNLGYQLEYKVNEDAPLIHCSSYKLNHLLYMDDIKLYGSTEEELLRMAELTETFSRDICMHFGIDKCKINSTKGGHQYTHQYCMQSGEIVEPLAEAEVYKYLGYNQAQQIQHKNIKINLTKQFKLRLNTILRSHLYSKNTFKAVNTFAIPVLTYSFGIINWNKTELKSLQRTINTTMTKNRKHHPRSCIQRMTLPRNVGGRGLTDVLNLHNTQIKKLRTFFHNKSNTSILHRAIVQNDKKFTPLNLLDRTQQKNESQTDRQTKLNEWTQKALHGRHPHDLNQPTVDKIASNEWLRRGEMFPETEGFMLAIQDQVIETNNYKKHIMKLPSLINDTCRKCKGSSETIQHITGACRVIVQTDYKHRHDQVAAIIHQNLAFKFNLIKEKIAYYKYTPQVVIDNADYKLYWDRTILTDKTVHYNRPDITLHDKKNQTVYLIDIAIPNTHNLSSTHTEKLTKYTDLAIELKNQWKVKAVKTIPIVLSSTGIIPHTLHTSLKLLDLHSLTYILLQKATILNTCRIVRKFMSTD

SEQ ID NO: 23584 - protein, 1403 aa, Autographa pulchrina
MRLRSSNKLPQAGTGSTSERESRTKPSGLGCLTYSGGGNVLQCSTQFLTDAELHHHPHSHNSSAVNISLSSSSSSLFASIPSTNPYSRSPAHSIVSSMLSEDVVQETESVAILAPTTSSLNSRKKWSKSMNEFILRTYLQLTLMETDTNGYLPPLHTKFVEMFPEMQKVSRQRVGDQRRAIINKKLLPQNDIDDIYTEVNEEINNIRINTLTPNLQTGAIAQTLSSNQVGQRMRWSKDHNETIMRAYYKITHLESNISAYRGPLHQAFVNAFPNLNHISEQRVADQRRLIIKNRYISVERLQAIKDEVASVARQQSNNDGLVRNSIDIVSTQVGPDPELENNRFNSLDLGLPTNVDSYINNSTESTNLQLDQRYAELDQTFQECYNYFKNTDPTQRSYIPKQKSSKKLATIVNYINCNILPKHVFHDTEFITLQTVLYCAAWTAARMNGAKIQIPPVDASIKFKKSKPKWQIRLERRIVELRGQIGRLTQYIRGNRNTKLVKHVNYIQHKYRVHATHENHNTQLIEFLDTLKQKLTALSNRLKRYITCTLRKTQNKQFTSNEKQFYRGLRTTFDNLLSSTNFESRTPTTPTSRNPRPSPDADELRGFWAGIWENPVQHAKEAEWIQNEHNRHLDSEPMDFQCIPVEIFHDVIKKLHNWKAPGSDNIHNFWYKKFTYLHPLIYNNINKFIKQPETLPCYVTVGTTYMLPKDPSSLTDPAKYRPITCLQTIYKIITSCLTHIIYEHIDRNNLLAEQQKGCRKYSQGCKEQLTIDSVILKHTQLNKSDLFSMYVDYKKAFDSVPHSWLLQVLDIYRINPIITSFLQNTMTRWATRLSLTTDSSTVLTEPIKVQRGIFQGDALSPLWFCLSLNPLSNMLNSLNLGYQLEYKVNEDAPLIHCSSYKLNHLLYMDDIKLYGSTEEELLRMAELTETFSRDICMHFGIDKCKINSTKVGHQYTHQYCMQSGEIVEPLAEAEVYKYLGYNQAQQIQHKNIKINLTKQFKLRLNTILRSHLYSKNTFKAVNTFAIPALTYSFGIINWNKTELKSLQRTINTTMTKNRKHHPRSCIQRMTLPRNVGGRGLTDVLNLHNTQIKKLRTFFHNKSNTSILHRAIVQNDKKFTPLNLLDRTQQKNESQTDRQTKLNEWTQKALHGRHLHDLNQPTVDKIASNEWLRRGEMFPETEGFMLAIQDQVIETNNYKKHIMKLPSLINDTCRKCKGSSETIQHITGACRVIVQTDYKHRHDQVAAIIHQNLAFKFNLIKEKIAYYKYTPQVVIDNADYKLYWDRTILTDKTVHYNRPDITLHDKKNQTVYLIDIAIPNTHNLSSTHTEKLTKYTDLAIELKNQWKVKAVKTIPIVLSSTGIIPHTLHTSLKLLDLHSLTYILLQKATILNTCRIVRKFLSTD

SEQ ID NO: 23585 - protein, 1406 aa, Autographa gamma
MRLRSSNKLPQAGTGSISEGESRTKPPGLGCLTYSGGGNVLLCSTQFLTDSELHHHSHSHDPSEVNISPSSPSSSSSLFASIPSTNPYSRSPAHSIVSSMLSEDVVQETKSVAILAPTTSSLNSRKKWSKLMNEFILRTYLQLTLMETDTNGYLTPLHTKFVEKFPEMQNVSRQRVGDQRRAIINKKLLPQNDIDNIYTEVNEEINNIRMNTLTPNLQTGAMAQTLSSSQVGQRMRWSKDHNETIMRAYYKITQLESNISAYRGPLHQAFVNAFPNLNHISEQRVADQRRLIIKNRYISEERLQAIKDEVASIAREQSNCDGLVRNITDIVSTQVGPDPELENNRFNSLDLGLPTNVDSFINNSLESTDLQPDQSYTELDQTFQDCYNYFKNTDPTQRSYIPKQKSSKKLATIVNYINCNILPKHVFHDTEFITLQTVLYCAAWTATRMNGANIQIPPVDTSIIRFKKSKPKWQIRLERRIVELRGQIGRLTQYIRGNRNTQLVKHVNYIQYKYRVHATHENHNTQLIEFLDTLKQKLTALSNRLNRYITCTLRKIQNKQFNSNEKQFYRGLKTTCNNSLSSTNFESRTPTTPTSRNPRTSPDADELRGFWAGIWENPVQHAKEAEWIQNEHNRHLDSEPMDFQGIPVEIFHDVIKKLHNWKAPGSDNIHNFWYKKFTYLHPLIYNIINKFIEQPETLPGYITVGTTYMLPKDPSSLSDPAKYRPITCLQTIYKIITSCLTHIIYKHIDGNNLLAEQQKGCRKYSQGCKELLTIDSVILKHTQLNKSDLFSMYVDYKKAFDSVPHSWLLQVLDIYRINPIITSFLQNTMTRWATRLSLTTDSSTVLTDPIKVQRGIFQGDALSPLWFCLSLNPLSNMLNSLNLGYQLEYKVNEDAPLINFSPYKLNHLLYMDDIKLYGSTEEELLRMAELTETFSRDICMNFGIDKCKINSTKGGQQYEHQYCMQSGEIVEPLGEAEVYKYLGYNQAQQIQHKNIKVNLTKQFKYRLNTILRSHLYSKNTFKAVNTFAIPVLTYSFGIINWNKTELKALQRTINTTLTKNRKHHPRSCIQRMTLPRNVGGRGLTDVLNLHNTQIKKLRTYFYNKSNTSILHRAIVQNDKKFTPLNLLDRTQQKNECQTDMQTKLNEWTRKALHGRHLHDLNQPTVDKTASNEWLRRGEMFPETEGFMLAIQDQVIETNNYKKHIMKLPSLINDTCRKCKGSSETIQHITGACRVIVQTDYKHRHDQVAAIIHQNLAFKFNLIREKVAYYKYTPQVVIDNADYKLYWDRTILTDKTVHYNRPDITLHDKKNQTVYLIDIAIPNTHNLSSTHTDKLTKYTDLAIELKNQWKVKAVKTIPIVLSSTGVIPHTLHTSLKLLDLHSLTYILLQKATILNTCRIVRKFLSTD

SEQ ID NO: 23586 - protein, 1422 aa, Abrostola tripartita
MRLRSGNNLPQAGTGADSNGESRLEPSGSGCPTYSGGDNVLQSAQLRTAADNHNYHHDSSSVYSSASSSIFPSVPSSHPYSRSPTHSSSTPSSMLLEDVVQEAHTATNPAPTATSSKTRRKWSKPMNEFILRTYLQLTLMETDISGYLPLLHTKFIEKFPEKHLISRQRVGDQRRAIVRKNLLAQCDIDNIYSEVRDEINNIQISTQTQNIQPIQIDNSTTQIDSSTPPRIMQSQLTSTTQTSQRMRWNKVHNEAIMRAYYRITSLEANITAYRGPLHQAFITTFPHLDHITEQRVADQRRLIIHNRYLSEERLQAIKDEVASELPLDSNRDPCTHSFNLEPSHSELTIEQNINSLNYSNPEINTQIDSDTNTTQETIPHSLQQKTTEIEQTFNDAYQYFKNTDPTQRSYIPKQKCSKKLAAIVHCINKDILPKHIRGDTEFTTLQSVLYCAAWAAAKSNGAKINIPPRVEVNRMQKKNKPKWQVRLERRIEELRAQIGRLTQYIRGNRSDKIVKHVKYIQNQYKIHATYESPNTLFSEFLDTLKQKLTTFSNRLKRYKTCTLRKTQNKQFLCNEKQFYRGLRIPVINNHASIPIDHSTQPTHTPQNTPQDNSVPPAEDLRRFWANIWENPVQHNKEANWILKEQSSHLNSEPMDFQCISIEVFQDVIKKLHNWKSPGSDNIHNYWYKKFTHIHPFIHNYINTFIQQPHTLPNFVTVGTTYMLPKDPNNLSNPAKYRPITCLQTIYKIITSCLAQLIYNHVDKNNILAEQQKGCRKFSQGCKEQLTIDSVLLKQTQKKNSDLYSMYIDYKKAFDSVPHSWLLQILEIYRIHPQYLSFLQNTMSNWETRLRLTTDTNTVTTESISVQRGIFQGDALSPLWFCLALNPLSNMLESVNAGFNLDYNNINNTDILTDCSIHKINHLLYMDDIKLYGSTEDELQQLAQITETFSQDICMEFGIDKCKINSIRKGQQYEHQYHMQNDELIVALTENEVYKYLGYNQGQQIKHKDIKDNLTKQFRHRLNTILRSHLYSKNTFKAVNTYAIPILTYSFGIISWSKSEIKSLQRIINTSLTRHRKHHPRSCIQRMTLPRSVGGRGLIDILNLHNSQITNLRTYFHKRALTSTLHNAITQNDKKLTPLNLTDKTQQNNEIQTDRQTKFNEWTRKALHGRHLHDLNQPTVDKTASNDWIKRGELFPETEGFMLAIHDQVIETKNYKKHIMKLANSSDDSCRKCKGAPETIQHITGACRAIVQTDYKHRHDQVAAIIHQNLAFKLKLISEKTAYYKYTPQTVLDTTDYKLYWDRTILTDKTVHYNRPDITLHDKKNQKVYLVDIAIPNTHNLSSTHTEKLTKYTDLAIEIKSQWKVKTVQTIPIVLSSTGVIPRTLHTSLKLLDIHPLSYILLQKAVILNTCRIVRKFLSMDSS

SEQ ID NO: 23587 - protein, 1422 aa, Abrostola tripartita
MRLRSGNNLPQAGTGADSNGESRLEPSGSGCPTYSGGDNVLQSAQLRTAADNHNYHHDSSSVYSSASSSIFPSVPSSHPYSRSPTHSSSTPSSMLLEDVVQEAHTATNPAPTATSSKTRRKWSKPMNEFILRTYLQLTLMETDISGYLPLLHTKFIEKFPEMHLISRQRVGDQRRAIVRKNLLAQCDIDNIYSEVRDEINNIQISTQTQNIQTIQIDNSTTQIGSSTPPRILQSQLTSTTQTSQRMRWTKLHNEAIMQAYYRITSLEANITAYRGPLHQAFITTFPHLDHITEQRVADQRRLIIHNRYLSEERLQAIKDEVASELPLDSNRDPCTHSFNLEPSHSELTIEHNINSLNYSNSEINTQINSDTNTTQETIPHSLQQKTTEIEQTFNDAYQYFKNTDPTQRSYIPKQKCSKKLAAIVHCINKDILPKHIRGDTEFTTLQSVLYCAAWAAAKSNGAKIDIPPRVEVNRMQKKNKPKWQVRLERRIEELRAQIGRLTQYIRGNRSDKIVKHVKYIQNQYKIHATHESPNTLFSEFLDTLKQKLTTFSNRLKRYKTCTLRKTQNKQFLCNEKQFYRGLRMPVINNHASTLIDHSTQPTHTPQNTPQDNSLPPAEDLRRFWANIWENPVQHNKEANWILKEQSSHLNSEPMDFQCISIEVFQDVIKKLHNWKSPGSDNIHNYWYKKFTHIHPFIHNYINTFIQQPHTLPKFVTVGTTYMLPKDPNNLSNPAKYRPITCLQTIYKIITSCLAQLIYNHVDKNNILAEQQKGCRKFSQGCKEQLTIDSVLLKQTQLKKSDLYSMYIDYKKAFDSVPHSWLLQILEIYRIHPQILSFLQNTMSNWETRLRLTTDTNTVTTEPISVQRGIFQGDALSPLWFCLALNPLSNMLESVNAGFNLDYNNINNTDILTDCSIHKINHLLYMDDIKLYGSTEDELQQLARITETFSQDICMEFGIDKCKINSIRKGQQYEHQYHMQNDELIVALTENEVYKYLGYNQAQQIKHKDIKDTLTTQFRHRLNTILRSHLYSKNTFKAVNTYAIPILTYSFGIISWSKSEIKSLQRIINTSLTRHRKHHPRSCIQRMTLPRSVGGRGLIDILNLHNSQITNLRTYFHKRALTSTLHNAIAQNDKKLTPLNLTDKTQQNNEIQTDRQTKFNEWTRKALHGRHLHDLNQPTVDKTASNDWIKRGELFPETEGFMLAIQDQVIETKNYKKHIMKLANSSDDSCRKCKGAPETIQHITGACRAIVQTDYKHRHDQVAAIIHQNLAFKLKLISEKTAYYKYTPQTVLDTADYKLYWDRTILTDKTVHYNRPDITLHDKKNQKVYLVDIAIPNTHNLSSTHTEKLTKYTDLAIEIKSQWKVKTVQTIPIVLSSTGVIPRTLHTSLKLLDIHPLSYILLQKAVILNTCRIVRKFLSMDSS

SEQ ID NO: 23588 - protein, 1422 aa, Abrostola tripartita
MRLRSSNNLPQAGTGADSNGESRLEPSGSGCPTYSGGDNVLQSAQLRTAADNHNYHHDSSSVYSSASSSIFPSVPSSHPYSRSPTHSSSTPSSMRLEDVVQEAHTATNPAPTATSSKTRRKWSKPMNEFILRTYLQLTLMETDISGYLPLLHTKFIENFPEMHLISRQRVGDQRRAIVRKNLLAQCDIDNIYSEVRDEINNIQISTQTQNIQTIQIDNSTTQIDSSTPPRIMQSQLTSTTQTSQRMRWNKVHNEAIMRAYYRITSLEANITAYRGPLHQAFITTFPHLDHITEQRVADQRRLIIHNRYLSEERLQAIKDEVASELPLDSNRDPCTHSFNLEPSHSELTIEQNINSLNYSTPEINTQIDSDTNTIQETIPHSLQQKTTEIEQTFNDAYQYFKNTDPTQRSYIPKQKCSKKLTAIVHCINKDILPKHIRGDTEFTTLQSVLYCAAWAAAKSNGAKINIPPRVEVNRMQKKNKPKWQVRLERRIEELRAQIGRLTQYIRGNRSDKIVKHVKYIQNQYKIHATYESPNTLFSEFLDTLKQKLTTFSNRLKRYKTCTLRKTQNKQFLCNEKQFYRGLRIPVINNHASIPIDHSTQPTHTPQNTPQDNSLPPAEDLRRFWANIWENPVQHNKEANWILKEQSSHLNSEPMDFQCISIEVFQDVIKKLHNWKSPGSDNIHNYWYKKFTHIHPFIHNYINTFIQQPHTLPKFVTVGTTYMLPKDPNNLSNPAKYRPITCLQTIYKIITSCLAQLIYNHVDKNNILAEQQKGCRKFSQGCKEQLTIDSVLLKQTQKKKSDLYSMYIDYKKAFDSVPHSWLLQILEIYRIHPQILSFLQNTMSNWETRLQLTTDTNTVTTEPISVQRGIFQGDALSPLWFCLALNPLSNMLESVNAGFNLDYNNINNTDILTDCSIHKINHLLYMDDIKLYGSTEDELQQLAQITETFSQDICMEFGIDKCKINSIRKGQQYEHQYHMQNDELIVALTENEVYKYLGYNQGQQIKHKDIKDNLTKQFRHRLNTILRSHLYSKNTFKAVNTYAIPILTYSFGIISWSKSEIKSLQRIINTSLTRHRKHHPRSCIQRMTLPRSVGGRGLIDILNLHNSQITNLRTYFHKRALTSTLHHAITQNDKKLTPLNLTDKTQQNNEIQTDRQTKFNEWTRKALHGRHLHDLNQPTVDKTASNDWIKRGELFPETEGFMLAIHDQVIETKNYKKHIMKLANSSDDSCRKCKGAPETIQHITGACRAIVQTDYKHRHDQVAAIIHQNLAFKLKLISEKTAYYKYTPQTVLDTTDYKLYWDRTILTDKTVHYNRPDITLHDKKNQKVYLVDIAIPNTHNLSSTHTEKLTKYTDLAIEIKSQWKVKTVQTIPIVLSSTGVIPRTLHTSLKLLDIHPLSYILLQKAVILNTCRIVRKFLSMDSS

SEQ ID NO: 23589 - protein, 1422 aa, Abrostola tripartita
MRLRSSNNLPQAGTGADSNGESRLEPSGSGCPTYSGGDNVLQSAQLRTAADNHNYHHDSSSVYSSASSSIFPSVPSSHPYSRSPTHSSSTPSSMRLEDVVQEAHTATNPAPTATSSKTRRKWSKPMNEFILRTYLQLTLMETDISGYLPLLHTKFIEKFPEMHLISRQRVGDQRRAIVRKNLLAQCDIDNIYSEVRDEINNIQISTQTQNIQTIQIDNSTTQIDSSTPPRIMQSQLTSTTQTSQRMRWNKVHNEAIMRAYYRITSLEANITAYRGPLHQAFITTFPHLDHITEQRVADQRRLIIHNRYLSEERLQAIKDEVASELPLDSNRDPCTHSFNLEPSHSELTIEQNINSLNYSTPEINTQIDSDTNTIQETIPHSLQQKTTEIEQTFNDAYQYFKNTDPTQRSYIPKQKCSKKLTAIVHCINKDILPKHIRGDTEFTTLQSVLYCAAWAAAKSNGAKINIPPRVEVNRMQKKNKPKWQVRLERRIEELRAQIGRLTQYIRGNRSDKIVKHVKYIQNQYKIHATYESPNTLFSEFLDTLKQKLTTFSNRLKRYKTCTLRKTQNKQFLCNEKQFYRGLRIPVINNHASIPIDHSTQPTHTPQNTPQDNSLPPAEDLRRFWANIWENPVQHNKEANWILKEQSSHLNSEPMDFQCISIEVFQDVIKKLHNWKSPGSDNIHNYWYKKFTHIHPFIHNYINTFIQQPHTLPKFVTVGTTYMLPKDPNNLSNPAKYRPITCLQTIYKIITSCLAQLIYNHVDKNNILAEQQKGCRKFSQGCKEQLTIDSVLLKQTQKKKSDLYSMYIDYKKAFDSVPHSWLLQILEIYRIHPQILSFLQNTMSNWETRLQLTTDTNTVTTEPISVQRGIFQGDALSPLWFCLALNPLSNMLESVNAGFNLDYNNINNTDILTDCSIHKINHLLYMDDIKLYGSTEDELQQLAQITETFSQDICMEFGIDKCKINSIRKGQQYEHQYHMQNDELIVALTENEVYKYLGYNQGQQIKHKDIKDNLTKQFRHRLNTILRSHLYSKNTFKAVNTYAIPILTYSFGIISWSKSEIKSLQRIINTSLTRHRKHHPRSCIQRMTLPRSVGGRGLIDILNLHNSQITNLRTYFHKRALTSTLHHAITQNDKKLTPLNLTDKTQQNNEIQTDRQTKFNEWTRKALHGRHLHDLNQPTVDKTASNDWIKRGELFPETEGFMLAIHDQVIETKNYKKHIMKLANSSDDSCRKCKGAPETIQHITGACRAIVQTDYKHRHDQVAAIIHQNLAFKLKLISEKTAYYKYTPQTVLDTTDYKLYWDRTILTDKTVHYNRPDITLHDKKNQKVYLVDIAIPNTHNLSSTHTEKLTKYTDLAIEIKSQWKVKTVQTIPIVLSSTGVIPRTLHTSLKLLDIHPLSYILLQKAVILNTCRIVRKFLSMDSS

SEQ ID NO: 23590 - protein, 1401 aa, Sarmientola browni
MQLRSGYKLPQAGTGANRNGESRPEPSNSGCPTYSGGDTVSQTSAQSSTAADSASVVSFPSMPTTNPYSRSPTSITSTTANSMLTEDVVQEADPAENLAPTTAGFNTRKKWSKSMNEFILRTYLQLTLMETDISGYLLPLHTKFIERFPEMHMISRQRVGDQRRAIVNKKLLTQDNIDRIYNEIREEINNTHTNAQKHNTLHTISQTNEPTQTHNLTQYINIQAPLTHRNETNQRMRWTIEHNVTIMRAYYKITQLETNISAYRGQLHKEFITTYPHLVHITEQRVADQRRLIIHNKYLSEEKLQAIKEEVASELVLQNNISIQTPNSINLATFESEITDQQSNNLINNTDSEIFTDINSKNNPAVTNKLNLDQQKNIEIENNFNLAYNYFKNIDPTHRSYIPKQKSSTKLAAIVNYINDKVLPKHINKDTKFITLQTMLYCGAWAAAKSNGSKLDIPLKIEGNYSTYKIKTPKWQTRLERRVDQLRRHIGQLTQYIKGNKSSKLEKQVKNIKKQYKIHATHETPNTRLSEFLDTLKQKLTTTSNRLKRYKTCTLRKMQNKIFTTNEKQFYRGLRSASSHNSQINTPRPSRDELRSFWAKIWENPIQHNMAADWIQHEHNKYSDSEPMIFQCIPAEVFHNVIKKLHNWKAPGSDNIHNFWYKKFTYIHPFIHNYINKFIEMPHTLPDYITEGITYMLPKDSNDISNPAKYRPITCLQTIYKIMTSCLTQIIYSYIDNNKILAEQQKGCRKYSQGCKEQLTIDSIVLKQTQKRKLDLYSMYIDYKKAFDSVPHSWLVQILEIYHIHPQIIYFLQNAMSKWTTRLRLTTDTDTVITEPIKIQRGIFQGDALSPLWFCLALNPLSNMLNVTNAGYDLECKNNTNLQTDCSINKINHLLYMDDIKLYGSTEEELHKLAQITEKFSMDICMEFGIDKCKINSIKAGQLYKNQYQMQTGELVEALQENEVYKYLGYNQAKQILHKDIKNSLTKQFRHRLNTIVRSHLYSKNTFKAINTYAIPILTYSFGIINWNKSELKSLQRIINTTLTRNRKHHPRSCVQRMTLPRQDGGRGLIDILNLHNKQITNLRTYFHNKAKISSLHSAIVKTDKNLTTLNLCDKTLQRNELQTDRQTKINEWTRKALHGRHPHDLNQSNVDKKASNEWLRRGELFPETEGFMISIQDQVIETKNYKKHIMKLPNAADDSCRKCKGAPETIQHITGACRAIAQTDYKHRHDQVAAIIHQNLAFNCKLISKKTSYYKYIPETVLDTTDYKLYWDRTILTDKTVHFNRPDITLHDKKNKIVYLIDIAIPNTHNLSTTHTEKITKYTDLAIELKNQWKVDKVKTVPIAVSATGVIPITLHSSLKLLNIHPQTYITLQKAAILNTCRVVRKFLSMDITSPALVLG

SEQ ID NO: 23591 - protein, 1436 aa, Anthocharis cardamines
MRLRSGTKLPQAGTGANRDGESRLEALTSSSPTYSGGDNVAQISDQLRTGPIYNERSSSAHPSSSSHPSSSSSAHPSSLSSIFPSVPSTNPYSSSSTYSTTSNILLEDVVQETNLVDNLAPTTNSKKARRKWSKEMNKFILRTYLQLTLMETDTNGYLPLLHTKFIEKFPEMQMISRQRVGDQRRVIINKNLLAQSEIDQIYRETREELKNMQYNTHIHNTSTSNTEHSHENITYPQNSLTHTNNEPPIINTNKTSQRMRWTKEHNETIIRIYYKLTSIETNVTAYRGPLHQAFLAKFPHLTHISEQRVADQRRLIICNKYLSQERLEAIKEEVMSELLTQSSNYSETHTNNNFPTTSGSDPMLEQSNISSYDNRHNNIDSEINYEIENNPYMTIQTNIQQSNTTDIGIERTFEEAYNFFKNTDPTKRSYIPKQKSSKKLNFIVNYINNNVLTKFIDNDSEFNKLQTVLYSAAWTAAKINGAKLKIPPTEINFSNKTKKAKWQIRLERKIEELRVQIGRLTQYIKGNRTIKIVKHVNYIKNHYKIHATYENPNIQLSEFLDTLKQKLSTYSSRLKRYNTCTLRKIQNKQFLSNEKQFYRKLKNQNRNDHNLSQNNNCNNNSLSAADIHRYWANIWGNPIQHNVEADWIRNEENRYQNSEPMEFQLIPIEIFQDVIKGLHNWKAPDSDNIHNFWYKKFTFIHAFLYNHINNFIKQPHTLPNYITLGTTYMLPKDPNNLTDPAKYRPITCLQTIYKIITSCLTQIIYHHVDKNMILAEQQKGCRKYSQGCKEQLTIDSVLLKQTLQKKRDLFTMYIDYKKAFDSVPHTWLLKILEIYNIHPQIIQFLRNTMTRWTTRLKLTTESNIVITEPIAIQRGIFQGDALSPLWFCLALNPLSNMLNSSNLGYELNYTDNDDTNLLTNFSTLKLNHLLYMDDIKLYGTSEEQLHQLAEITESFSQDINMEFGIDKCKINSIKSGKKFEHQYHMQSGDTIEALAANEVYKYLGYMQAQQIQYKNIKKSLTTQFKHRLNIILRSQLYSKNATKAINTYAIPVLTYSFGIINWSRTELKSLQRLINTTMTRHRKHHPRSCVQRMTIPRNDGGRGLIDIINLHNKQITNLRSYFHNKALTSTLHNSIVLNDKKLTPLNLFDKTQQRNEIQTDQQTKFSEWMRKSLHGRHLHDLQLPIVDKTASNEWLRRGELFPETEGFMLAIQDQVIETNNYKKHIIKLPNFTDDRCRKCKESSETIQHITGSCRVIAQTDYKHRHDQVAAIIHQNLAFKYKLILEKKTYYKYTPETVLDTKYYKLYWDRTIITDKTIHYNRPDITLHDKKNQTVYLIDVAIPNTHNLSSTHTEKITKYTDLAIEIKNQWKVKEVKTIPIVISSTGVIPYTLHTSLKILDIHPLTYIILQKAVILNTCRIVRKFLSTELTTPAIVLD

SEQ ID NO: 23592 - protein, 1436 aa, Anthocharis cardamines
MRLRSGTKLPQAGTGANRDGESRLEALTSSSPTYSGGDNVAQISDQLRTGPIYNERSSSPHPSSSSAHPSSSSAHPSSLSSIFPSVPSTNPYSSSSTYSTTSNILLEDVVQETNLVDNLAPTTNSKKTRRKWSKEMNKFILRTYLQLTLMETDTNGYLPLLHTKFIEKFPEMQMISRQRVGDQRRVIINKNLLAQSEIDQIYRETREELKNMQYNTHIHNTSTSNTEHSHENITYPQNSLTHTNNEPPIINTNKTSQRMRWTKEHNETIIRIYYKLTSIETNVTAYRGPLHQAFLAKFPHLTHISEQRVADQRRLIICNKYLSQERLEAIKEEVMSELLTQSSNYSETHTNNNFPTTSGSDPMLEQSNISSYDNRHNNIDSEINYEIENNPYMTIQTNIQQSNTTDIGIERTFEEAYNFFKNTDPTKRSYIPKQKSSKKLNFIVNYINNNVLTKFIDNDSEFNKLQTVLYSAAWTAAKINGAKLKIPPTEINFSNKTKKAKWQIRLERKIEELRVQIGRLTQYIKGNRTIKIVKHVNYIKNHYKIHATYENPNIQLSEFLDTLKQKLSTYSSRLKRYNTCTLRKIQNKQFLSNEKQFYRKLKNQNRNDHNLSQNNNCNNNSLSAADIHRYWANIWGNPIQHNVEADWIRNEENRYQNSELMEFQLIPIEIFQDVIKGLHNWKAPGSDNIHNFWYKKFTCIHAFLYNHINNFIKQPHTLPNYITLGTTYMLPKDPNNLTDPAKYRPITCLQTIYKIITSCLTQIIYHHVDKNMILAEQQKGCRKYSQGCKEQLTIDSVLLKQTLQKKRDLFTMYIDYKKAFDSVPHTWLLKILEIYNIHPQIIQFLRNTMTRWTTRLKLTTESNIVITEPIAIQRGIFQGDALSPLWFCLALNPLSNMLNSSNLGYELNYTDNDDTNLLTNFSTLKLNHLLYMDDIKLYGTSEEQLHQLAEITESFSQDINMEFGIDKCKINSIKSGKKFEHQYHMQSGDTIEALAANEVYKYLGYMQAQQIQYKNIKKSLTTQFKHRLNIILRSQLYSKNATKAINTYAIPVLTYSFGIINWSRTELKSLQRLINTTMTRHRKHHPRSCVQRMTIPRNDGGRGLIDIINLHNKQITNLRSYFHNKALTSTLHNSIVLNDKKLTPLNLFDKTQQRNEIQTDQQTKFSEWMRKSLHGRHLHDLQLPIVDKTASNEWLRRGELFPETEGFMLAIQDQVIETNNYKKHIIKLPNFTDDRCRKCRESSETIQHITGSCRVIAQTDYKHRHDQVAAIIHQNLAFKYKLILEKKTYYKYTPETVLDTKYYKLYWDRTIITDKTIHYNRPDITLHDKKNQTVYLIDVAIPNTHNLSSTHTEKITKYTDLAIEIKNQWKVKEVKTIPIVISSTGVIPYTLHTSLKILDIHPQTYIILQKAVILNTCRIVRKFLSTELTTPAIVLD

SEQ ID NO: 23593 - protein, 1436 aa, Anthocharis cardamines
MRLRSGTKLPQAGTGANRDGESRLEALTSSSPTYSGGDNVAQISDQLRTGPIYNERSSSPHPSSSSAHPSSSSAHPSSLSSIFPSVPSTNPYSSSSTYSTTSNILLEDVVQETNLVDNLAPTTNSKKTRRKWSKEMNKFILRTYLQLTLMETDTNGYLPLLHTKFIEKFPEMQMISRQRVGDQRRVIINKNLLAQSEIDQIYRETREELKNMQYNTHIHNTSTSNTEHSHENITYPQNSLTHTNNEPPIINTNKTSQRMRWTKEHNETIIRIYYKLTSIETNVTAYRGPLHQAFLAKFPHLTHISEQRVADQRRLIICNKYLSQERLEAIKEEVMSELLTQSSNYSETHTNNNFPTTSGSDPMLEQSNISSYDNRHNNIDSEINYEIENNPYMTIQTNIQQSNTTDIGIERTFEEAYNFFKNTDPTKRSYIPKQKSSKKLNFIVNYINNNVLTKFIDNDSEFNKLQTVLYSAAWTAAKINGAKLKIPPTEINFSNKTKKAKWQIRLERKIEELRVQIGRLTQYIKGNRTIKIVKHVNYIKNHYKIHATYENPNIQLSEFLDTLKQKLSTYSSRLKRYNTCTLRKIQNKQFLSNEKQFYRKLKNQNRNDHNLSQNNNCNNNSLSAADIHRYWANIWGNPIQHNVEADWIRNEENRYQNSEPMEFQLIPIEIFQDVIKGLHNWKAPGSDNIHNFWYKKFTCIHAFLYNHINNFIKQPHTLPNYITLGTTYMLPKDPNNLTDPAKYRPITCLQTIYKIITSCLTQIIYHHVDKNMILAEQQKGCRKYSQGCKEQLTIDSVLLKQTLQKKRDLFTMYIDYKKAFDSVPHTWLLKILEIYNIHPQIIQFLRNTMTRWTTRLKLTTESNIVITEPIAIQRGIFQGDALSPLWFCLALNPLSNMLNSSNLGYELNYTDNDDTNLLTNFSTLKLNHLLYMDDIKLYGTSEEQLHQLAEITESFSQDINMEFGIDKCKINSIKSGKKFEHQYHMQSGDKIEALAANEVYKYLGYMQAQQIQYKNIKKSLTTQFKHRLNIILRSQLYSKNATKAINTYAIPVLTYSFGIINWSRTELKSLQRLINTTMTRHRKHHPRSCVQRMTIPRNDGGRGLIDIINLHNKQITNLRSYFHNKALTSTLHNSIVLNDKKLTPLNLFDKTQQRNEIQTDQQTKFSEWMRKSLHGRHLHDLQLPIVDKTASNEWLRRGELFPETEGFMLAIQDQVIETNNYKKHIIKLPNFAGDRCRKCRESSETIQHITGSCRVIAQTDYKHRHDQVAAIIHQNLAFKYKLILEKKTYYKYTPETVLDTKYYKLYWDRTIITDKTIHYNRPDITLHDKKNQTVYLIDVAIPNTHNLSSTHTEKITKYTDLAIEIKNQWKVKEVKTIPIVISSTGVIPYTLHTSLKILDIHPLTYIILQKAVILNTCRIVRKFLSTELTTPAIVLD

SEQ ID NO: 23594 - protein, 1437 aa, Anthocharis cardamines
MRLRSGTKLPQAGTGANRDGESRLEALTSSSPTYSGGDNVAQISDQLRTGPIYNERSSSAHPSSSSSHPSSSSSAHPSSLSSIFPSVPSTNPYSSSSTYSTTSNILLEDVVQETNLVDNLAPTTNSKKTRRKWSKEMNKFILRTYLQLTLMETDTNGYLPLLHTKFIEKFPEMQMISRQRVGDQRRVIINKNLLAQSEIDQIYRETREELKNMQYNTHIHNTSTSNTEHSHENITYPQNSLTQTNNEPPIINTNKTSQRMRWTKEHNETIIRIYYKLTSIETNVTAYRGPLHQAFLAKFPHLTHISEQRVADQRRLIICNKYLSQERLEAIKEEVMSELLTQSSNYSETHTNNNFPTTSSSDPMLEQSNISSYDNRHNNIDSEINYEIENNPYMTIQINIQQSNTTDIGIERTFEEAYNFFKNTDPTKRSYIPKQKSSKKLNFIVNYINNNVLTKFIDNDSEFNKLQTVLYSAAWTAAKINGAKLKIPPTEINFSNKTKKAKWQIRLERKIEELRVQIGRLTQYIKGNRTIKIVKHVNYIKNHYKIHATYENPNIQLSEFLDTLKQKLSTYSSRLKRYNTCTLRKIQNKQFLSNEKQFYRKLKNQNRNDHNLSQNNNCNNNSLSAADIHRYWANIWGNPIQHNVEADWIRNEENRYQNSEPMEFQLIPIEIFQDVIKGLHNWKAPGSDNIHNFWYKKFTFIHAFLYNHINNFIKQPHTLPNYITLGTTYMLPKDPNNLTDPAKYRPITCLQTIYKIITSCLTQIIYHHVDKNMILAEQQKGCRKYSQGCKEQLTIDSVLLKQTLQKKRDLFTMYIDYKKAFDSVPHTWLLKILEIYNIHPKIIQFLRNTMTRWTTRLKLTTESNIVITEPIAIQRGIFQGDALSPLWFCLALNPLSNMLNSSNLGYELNYTDNDDTNLLTNFSTLKLNHLLYMDDIKLYGTSEEQLHQLAEITESFSQDINMEFGIDKCKINSIKSGKKFEHQYHMQSGDTIEALAANEVYKYLGYMQAQQIQYKNIKKSLTTQFKHRLNIILRSQLYSKNATKAINTYAIPVLTYSFGIINWSRTELKSLQRLINTTMTRHRKHHPRSCVQRMTIPRNDGGRGLIDIINLHNKQITNLRSYFHNKALTSTLHNSIVLNDKKLTPLNLFDKTQQRNEIQTDQQTKFSEWMRKSLHGRHLHDLQLPIVDKTASNEWLRRGELFPETEGFMLAIQDQVIETNNYKKHIIKLPNFTDDRCRKCKESSETIQHITGSCRVIAQTDYKHRHDQVAAIIHQNLAFKYKLILEKKTYYKYTPETVLDTKYYKLYWDRTIITDKTIHYNRPDITLHDKKNQTVYLIDVAIPNTHNLSSTHTEKITKYTDLAIEIKNQWKVKEVKTIPIVISSTGVIPYTLHTSLKILDIHPLTYIILQKAVILNTCRIVRKFLSTELTTPAIVLD

SEQ ID NO: 23595 - protein, 776 aa, Anthocharis cardamines
MEFQLIPIEIFQDVIKGLHNWKAPGSDNIHNFWYKKFTFIHAFLYNHINNFIKQPHTLPNYITLGTTYMLPKDPNNLTDPAKYRPITCLQTIYKIITSCLTQIIYRHVDKNMILAEQQKGCRKYSQGCKEQLTIDSVLLKQTLQKKRDLFTMYIDYKKAFDSVPHTWLLKILEIYNIHPQIIQFLRNTMTRWTTRLKLTTESNIVITEPIAIQRGIFQGDALSPFWFCLALNPLSNMLNSSNLGYELNYTDNDDTNLLTNFSTLKLNHLLYMDDIKLYGTSEEQLHQLAEITESFSQDINMEFGIDKCKINSIKSGKKFEHQYHMQSGDTIEALAANEVYKYLGYMQAQQIQYKNIKKSLTTQFKHRLNIILRSQLYSKNATKAINTYAIPVLTYSFGIINWSRTELKSLQRLINTTMTRHRKHHPRSCVQRMTIPRNDGGRGLIDIINLHNKQITNLRSYFHNKALTSTLHNSIVLNDKKLTPLNLFDKTQQRNEIQTDQQTKFSEWMRKSLHGRHLHDLQLPIVDKTASNEWLRRGELFPETEGFMLAIQDQVIETNNYKKHIIKLPNFTDDRCRKCKESSETIQHITGSCRVIAQTDYKHRHDQVAAIIHQNLAFKYKLILEKKTCYKYTPETVLDTKYYKLYWDRTIITDKTIHYNRPDITLHYKKNQTVYLIDVAIPNTHNLSSTHTEKITKYTDLAIEIKNQWKVKEVKTIPIVISSTGVIPYTLHTSLKILDIHPLTYIILQKAVILNTCRIVRKFLSTELTTPAIVLD

SEQ ID NO: 23596 - protein, 1436 aa, Anthocharis cardamines
MRLRSGTKLPQAGTGANRDGESRLEALTSSSPTYSGGDNVAQISDQLRTGPIYNERSSSPHPSSSSAHPSSSSAHPSSLSSIFPSVPSTNPYSSSSTYSTTSNILLEDVVQETNLVDNLAPTTNSKKTRRKWSKEMNKFILRTYLQLTLMETDTNGYLPLLHTKFIEKFPEMQMISRQRIGDQRRVIINKNLLAQSEIDQIYRETREELKNMQYNTHIHNTSTSNTEHSHENITYPQNSLTHTNNEPPIINTNKTSQRMRWTKEHNETIIRIYYKLTSIETNVTAYRGPLHQAFLAKFPHLTHISEQRVADQRRLIICNKYLSQERLEAIKEEVMSELLTQSSNYSETHTNNNFPTTSGSDPMLEQSNISNYDNRHNNIDSEINYEIENNPYMTIQTNIQQSNTTDIGIERTFEEAYNFFKNTDPTKRSYIPKQKSSKKLNFIVNYINNNVLTKFIDNDSEFNKLQTVLYSAAWTAAKINGAKLKIPPTEINFSNKTKKAKWQIRLERKIEELRVQIGRLTQYIKGNRTIKIVKHVNYIKNHYKIHATYENPNIQLSEFLDTLKQKLSTYSSRLKRYNTCTLRKIQNKQFLSNEKQFYRKLKNQNRNDHNLSQNNNCNNNSLSAADIHRYWANIWGNPIQHNVEADWIRNEENRYQNSEPMEFQLIPIEIFQDVIKGLHNWKAPGSDNIHNFWYKKFTCIHAFLYNHINNFIKQPHTLPNYITLGTTYMLPKDPNNLTDPAKYRPITCLQTIYKIITSCLTQIIYHHVDKNMILAEQQKGCRKYSQGCKEQLTIDSVLLKQTLQKKRDLFTMYIDYKKAFDSVPHTWLLKILEIYNIHPQIIQFLRNTMTRWTTRLKLTTESNIVITEPIAIQRGIFQGDALSPLWFCLALNPLSNMLNSSNLGYELNYTDNDDTNLLTNFSTLKLNHLLYMDDIKLYGTSEEQLHQLAEITESFSQDINMEFGIDKCKINSIKSGKKFEHQYHMQSGDTIEALAANEVYKYLGYMQAQQIQYKNIKKSLTTQFKHRLNIILRSQLYSKNATKAINTYAIPVLTYSFGIINWSRTELKSLQRLINTTMTRHRKHHPRSCVQRMTIPRNDGGRGLIDIINLHNKQITNLRSYFHNKALTSTLHNSIVLNDKKLTPLNLFDKTQQRNEIQTDQQTKFSEWMRKSLHGRHLHDLQLPIVDKTASNEWLRRGELFPETEGFMLAIQDQVIETNNYKKHIIKLPNFADDRCRKCRESSETIQHITGSCRVIAQTDYKHRHDQVAAIIHQNLAFKYKLILEKKTYYKYTPETVLDTKYYKLYWDRTIITDKTIHYNRPDITLHDKKNQTVYLIDVAIPNTHNLSSTHTEKITKYTDLAIEIKNQWKVKEVKTIPIVISSTGVIPYTLHTSLKILDIHPLTYIILQKAVILNTCRIVRKFLSTELTTPAIVLD

SEQ ID NO: 23597 - protein, 794 aa, Anthocharis cardamines
MEADWIRNEENRYQNSEPMEFQLIPIEIFQDVIKGLHNWKAPGSDNIHNFWYKKFTFIHAFLYNHINNFIKQPHTLPNYITLGTTYMLPKDPNNLTDPAKYRPITCLQTIYKIITSCLTQIIYHHVDKNMILAEQQKGCRKYSQGCKEQLTIDSVLLKQTLQKKRDLFTMYIDYKKAFDSVPHTWLLKILEIYNIHPQIIQFLRKTMTRWTTRLKLTTESNIVITEPIAIQRGIFQGDALSPLWFCLALNPLSNMLNSSNLGYELNYTDNDDTNLLTNFSTLKLNHLLYMDDIKLYGTSEEQLHQLAEITESFSQDINMEFGIDKCKINSIKSGKKFEHQYHMQSGDTIEALAANEVYKYLGYMQAQQIQYKNIKKSLTTQFKHRLNIILRSQLYSKNATKAINTYAIPVLTYSFGIINWSRTELKSLQRLINTTMTRHRKHHPRSCVQRMTIPRNDGGRGLIDIINLHNKQITNLRSYFHNKALTSTLHNSIVLNDKKLTPLNLFDKTQQRNEIQTDQQTKFSEWMRKSLHGRHLHDLQLPIVDKTASNEWLRRGELFPETEGFMLAIQDQVIETNNYKKHIIKLPNFTDDRCRKCKESSETIQHITGSCREIAQTDYKHRHDQVAAIIHQNLAFKYKLILEKKTYYKYTPETVLDTKYYKLYWDRTIITDKTIHYNRPDITLHDKKNQTVYLIDVAIPNTHNLSSTHTEKITKYTDLAIEIKNQWKVKEVKTIPIVISFTGVIPYTLHTSLKILDIHPLTYIILQKAVILNTCRIVRKFLSTELTTPAIVLD

SEQ ID NO: 23598 - protein, 1434 aa, Anthocharis cardamines
MRLRSGTKLPQAGTGANRDGESRLEALTSSSPTYSGGDNVAQISDQLRTGPIYNERSSSAHPSSSSSHPSSSSSAHPSSLSSIFPSVPSTNPYSSSSTYSTTSNILLEDVVQETNLVDNLAPTTNSKKTRRKWSKEMNKFILRTYLQLTLMETDTNGYLPLLHTKFIEKFPEMQMISRQRVGDQRRVIMNKNLLAQSEIDQIYRETREELKNMQHNTHIHNTSTSNTEHSHENITYPQNSLTHTNNEPPIINTNKTSQRMRWTKEHNETIIRIYYKLTSIETNVTAYRGPLHQAFLAKFPHLTHISEQRVADQRRLIICNKYLSQERLEAIKEEVMSELLTQSSNYSETHTNNNFPTTSGSDPMLEQSSSYDNRHNNIDSEINYEIENNPYMTIQTNIQQSNTTDGIERTFEEAYNFFKNTDPTKRSYIPKQKSSKKLNFIVNYINNNVLTKFIDNDSEFNNLQTVLYSAAWTAAKINGAKLKIPPTEINFSNKTKKAKWQIRLERKIEELRVQIGRLTQYIKGNRTIKIVKHVNYIKNHYKIHATYENPNIQLSEFLDTLKQKLSTYSSRLKRYNTCTLRKIQNKQFLSNEKQFYRKLKNQNRNDHNLSQNNNCNNNSLSAADIHRYWANIWGNPIQHNVEADWIRNEENRYQNSEPMEFQLIPIEIFQDVIKGLHNWKAPGSDNIHNFWYKKFTFIHAFLYNHINNFIKQPHTLPNYITLGTTYMLPKDPNNLTDPAKYRPITCLQTIYKIITSCLTQIIYHHVGKNMILAEQQKGCRKYSQGCKEQLTMDSVLLKQTLQKKRDLFTMYIDYKKAFDSVPHTWLLKILEIYNIHPQIIQFLRNTMTRWTTRLKLTTESNIVITEPIAIQRGIFQGDALSPLWFCLALNPLSNMLNSSNLGYELNYTDNDDTNLLTNFSTLKLNHLLYMDDIKLYGTSEEQLHQLAEITESFSQDINMEFGIDKCKINSIKSGKNFEHQYHMQSGDTIEALAANEVYKYLGYMQAQQIQYKNIKKSLTTQFKHRLNIILRSQLYSKNATKAINTYAIPVLTYSFGIINWSRTELKSLQRLINTTMTRHRKHHPRSCVQRMTIPRNDGGRGLIDIINLHNKQITNLRSYFHNKALTSTLHNSIVLNDKKLTPLNLFDKTQQRNEIQTDQQTKFSEWMRKSLHGRHLHDLQLPIVDKTASNEWLRRGELFPETEGFMLAIQDQVIETNNYKKHIIKLPNFTDDRCRKCKESSETIQHITGSCRVIAQTDYKHRHDQVAAIIHQNLAFKYKLILEKKTYYKYTPETVLDTKYYKLYWDRTIITDKTIHYNRPDITLHDKKNQTVYLIDVAIPNTHNLSSTHTEKITKYTDLAIEIKNQWKVKEVKTIPIVISSTGVIPYTLHTSLKILDIHPLTYIILQKAVILNTCRIVRKFLSTELTTPAIVLD

SEQ ID NO: 23599 - protein, 1311 aa, Telicota sp.
MRLRSGNKLPQAGTGANRDGESRLEPSSSSCPTYSGGDNVSQSSAQVRTVADDRSYHSPSIHSLPSSSTFTSIYHSNQYSSSQTYSTSSINSKLTEDVVQETDPVENLAPISTSPKKRKKWSKTMNEFILRTYLQLTLMETDIRGYLVPLHTKFIEKFPEMYMISRQRVGDQRRAIVNKKLLTQHEIDTIQQEVIEELNNMQANTHIENVHKPNTVTDKHTQQNNSSHTYNTQSMSFCTPQKSLRITWAKEHNETIMRAYYKLTQLEQNMSAYRLPLHRLFITAFPDLKHVTEQRIADQRRLIIKNRYITEERLLAIKDEVASELLLQNSSYTEIHNNISNQIQSHPSHSASGIELDNNQISDHHIGRSDIEKTFETAYNYYKNTAPTHRKYIPKQSSSKKLTSIVNYINLNILPKYINKETEFITLQTILYCAAWTSAKSNGAKIDIPPQENVIRRYKKHKPKWQIRLERKIETLRSQIGRLTQYIKGNRTNKLILKQVEYIKKQYKTHSRHEKPNTDLNEFLDTLKQKLATYSNRIKRYKTCTLRKTQNHKFTLNEKQFYRELSTQTKPSTDTDSTQNNVHNNSSPSAEELHRFWATIWEKPIQHNNDAMWIESEKHRHSATQNMSFENISMDVFLDVIKNLHNWKSPGSDNIHNYWYKKFTHIHPYILNHINKFIQMPHTLPKYISEGITYMLPKDPTSLSNPAKYRPITCLQTIYKIITSCLTHLIYTHIDKNNILAEQQKGCRKYSQGCKEQLTIDSILLKITRQKKLDLYSMYIDYKKAFDSVPHSWLIKILDIYHINPQIIAFLQNTMRSWTTRLRLPTDVNTVETEHIKVQRGIFQGDALSPLWFCLALNPLSNLLNSTDAGFQLDYKTDTDIQTTQTTYKLNHLLYMDDIKLYSSNEEHLQKLAHITEIFSQDIGMEFGIDKCKINSIKAGQYYEHQYHLHNGKVVEALSESEAYKYLGFSQAQQILYKDIKTTLTGQFSHRLNSILKSQLNSKNTTKAINTYAIPILTYSFGIISWTQSELKSLQRKINTTMTKHRKHHPRSSVQRMTIPRSDAGRGFIDITNLHNKQITNLRTYFHSKAQTSLLHNVIVQNDKKLTPLNLNDKSKQRNEAQTDKQTKFNEWIRKTLHGRHLQDLNHPQVDKRASNEWLRRGEMFPETEGFILAIQDQVVDTKNYRKHILKLPNASDDSCRKCKSTPETIQHITSACKAIAQTDYKHRHDQVAAIIHQNIAFKYKIIQEKTAYYKYSPQSVIDTPDYKLYWDRTILTDKTIHCNRPDITLHDKKNQIVYLIDIAVPNTHNL

SEQ ID NO: 23600 - protein, 879 aa, Zera sp.
MRKTQNKVFKTNEKQFYRGLGTLINSSKPHNTEPCTTSITSRTTQSSITSHTTHHNIHKNSTPSADELRSFWTTVWENAVQHNNKATWLLDEQDRHSNTEPMIFQCITAETFHGVIKKLHNWKAPGSDLIHNYWYKKFTCLHPLILIHINKFINMPHTIPRYITLGITHMLPKDPQNTANPAKYRPITCLQTIYKILTSCLTEVIYKHVDSNNILAEQQKGCRKFSQGCKEQLTIDSVVLKQTQKRKSDLYSMYIDYRKAFDSVPHSWLLHILEIYRIHPQIISFLQTVMGRWATRLQLRTDASIVTTKPIEIRRGIFQGDALSPLWFCLALNPLSYLLNSSKIGYQLHCDNSNSDEQTDTLTDASIYKLSHLLYMDDIKLYASTEEELLNLSQLTEKFSKDICMDFGLDKCKINSVKAGQIYKHQHQTQTGAFIHSLDENEVYKYLGYNQNQQIRDKDIKNSLTNNFKNRLHSILQCHLYSKNMTKAINTYTIPILTYSFGIINWNTTELKTLQRMINTTLTKKRKHHPRSCVQRMTLPRMDGGRGIIDIRNLHNKQITNLRTYFHNKTQTSPLHNAIVHNDQNLTPLNLYEKTQQRSESTISRHTKLTEWARKTLHGRHFHDLNQTHVDKDASNEWLKHGELFPETEGFMVAIQDQVIETNNYKKYIMKLPNTNDICRKCKGSSETIQHITGACRAIAQTDYKHRHDQVAAIIHQNLALKYKLVTDKIPYYKYTPQKVLDTPHYKLYWDRTILTDKTVHFNRPDITLHDKINKIVYLIDIAIPNTHNLSSTHTEKVTKYTDLATELKSQWKVESVKTVPIVISSTGVIPDSLHASIKLLSLHRHTYITLQKATILNTCRIVRKFLSLDTTSSAFMLG

SEQ ID NO: 23601 - protein, 1405 aa, Butleria flavomaculatus
MQLRSGNKLPQAGTGAIRNGESRLEPTSSSRPTYSGGDNVSQFSAQFGTVADNHEYHSPSLHSSPSSSIFPSIPSTNTYSHSPTYSTSTVNSRPPEDVVQETDSVTNLAPTFARPIKRRKWSKTMNQFILRTYLQLTLMETDTRGYLPTLHTKFIENFPEMHMISRQRIGDQRRAIINRKLLTQREINLIYEEAREEISNMQANAHKPNTLIPDTLTDKSITQNDNLTHNINTQTQLPSSAQVSQRMSWTKVHNEVIMRAYYKLTLLETNMSAYREPLHQAFVSAFPNLKHITEQRVADQRRLIIHNKYLSEENLQAIKDEVASELLLPNSSHSQIPNNTIYQNSSQTSQIVFTPEQDNNYNTDSNIRTHIQKLDIEKTFKAAYDYFKNTDPTHRSYIPKQKSSRKLAAIVNHINLNILPKYTDTDTEFLTLQTVLYCAAWAAAKSNGAKIEIPPQIESNCRYKKRKPKWQIRLERRIEELRAQIGRLTQYIKGNRTNVTILNHVKYIQNRYKIHSTYENPNTNLSEFLDTLKQKLTTYSNRLRRYKTCTLRKTQNNQFTSNEKQFYRKLSTQTTQNDQTTHTNNNFNNNRPPPADELHRFWAAIWEKPVQHNREAEWILNEQNSYSTAALMDFQCIPFEVFHDVIKRLHNWKSPGSDNIHNFWYKKFTHIHHYLFSHINKFIEMPHTLPNYISAGTTYMLPKDPNCLSNPAKYRPITCLQTIYKIITSCLTQIIYTHIDKNNILAEQQKGCRKYSQGCKEQLIIDSILLKQTQLRKSDLYSMYIDYKKAFDSVPHTWLLKILEIYHIHPQVISFLQNIMTKWTTRLRLTTDKNTFETEPIKVQRGIFQGDALSPLWFCLALNPLSNLLNSSKAGYELDEINDTNLLTDCSTHKVNHLLYMDDIKLYSSNEEHLYELAHITERFSQDICMEFGIDKCKINSIKAGQHYEHQYHMQSGEIVEALTQSEVYKYLGYSQAQQTLHADIKKSLIKQFRHRLNTILRSQLNSKNTTKAINTYAIPILTYSFGVINWTQTELKSLQRIINTTMTRHRKHHPRSSVQRMTIPRNGGGRGLIDIRNLHNRQITNLRTYFHNKALTSLLHNAIVQNDKKLTPLNLTDRTKQRNELQTDIQTKLDEWIRKTLHGRHLHDLNHPTVDKTASNEWLKRGEMFPETEGFMLAIQDQVIETKNYKKHILKLPNSSNDSCRKCKASPETIQHIMGACRAIVQTDYKHRHDQVAAIIHQNLAFKYKLIKEKTAYYKYIPQTVLDTTDYKIYWDRTILTDKTVHYNRPDITLHDKKNQIVYLIDIAIPNTHNLSSSHTEKISKYTDLAIELKTQWKVKTVKTVPIIISSTGIIPHTLHTSLKLLEIHSLTYIILQKAVILNTCRIVRKFLSTDTTQAAVVLG

SEQ ID NO: 23602 - protein, 1404 aa, Dalla cyprius
MKLRSGNILPQAGTGAIRNGESRLEPSSSSCPTYSGGDNVSQSSAQVETVADNQEYHSPSVHSLSSFSIFPSIPSTNPYSHSPTQSTSTIYSRLPGDVVQETDPVTYLAPTTTSPKKRRTWSKIMNQFILRTYFQLTLMETDTNGYLPPLHTKFLEEFPEMHMVSRQRVGDQRRAIIKRKLLSQIEIDLIYKEVREEMNNIQANIYKQNTHIPDSPTNKPVTQKDNTPAQLFSRPQPGQRISWTKAHNDAIMRAYYTITLLEANTSAYREPLHQAFISAFPNLKHVTEQRVADQRRLIIHNRYLSEENLQAIKDEVASELLLQNSSHVNNNPAQQNPSYVDQNRVVSTTEQTNGNTDSDIRTHIQKLEIEKTFNAAYSYFMNTDPTHRSYIPKQKSSRKLAAIVNFINSNILPKYIDTHTAFTTLQTVLYCAAWAAAKSNGARIKIPPSVEADCRYQKKKPKWQIRLERRVEELRAQIGRLTQYIKGNRTNVTILKHVNYIKYRYKIHSTHENPNTNLSEFLDTLKQKLTTYSNRLKRYKTCTLRKTQNNQFISNEKQFYRELTQTTQNDHNTWSRGNSRDSTHNICNNSPPSADDLHRFWATIWEKPVQHNKEAEWIRKEQDRYSSSERMGFQCIPVEVFHDVMKKLHNWKSPGSDNIHNFWYKKFTHIHPHLFNHINKFIEMPHTLPDYISTGITYMLPKDANCLSNPAKYRPITCLQTIYKIMTSCLAEIIYTHIDKNNILAEQQKGCRKYSQGCKEQLTIDSIVLKQIQQRKSDLYSMYIDYKKAFDSVPHTWLLQILEIYNIHPQVITFLQNTMTKWTTRLRLTTDKSTVITDPIKIQRGIFQGDALSPLWFCLALNPLSNLLNSSKAGYGLDYKNETDLLTDCLSHKLNHLLYMDDIKLYSSNETQLHELAHITEMFSHDICMEFGIDKCKINSIKAGQHYEHQYHLQNGETVEALTQNEVYKYLGYSQAQHILHTDVKNSLSKQFKLRLNTILRSQLNSKNTNKAINTFAIPILTYSFGVIKWTQTELKSLQRMINTSMTRHRKHHPRSSIQRMTLPRSDGGRGLIDITNLHNRQITNLRTYFYNKALTSVLHNAIVQNDKKLTPLNLTDKTTQRNETQTDVQTKLGEWIRKALHGRHLQDLNHHTVDKTASNEWLKRGELFPETEGFMLAIQDQVIETKNYKKHIMKLPNSSNDSCRKCKGSSETIQHITGACRTIVQTDYKHRHDQVAAIIHQDLAFKLKLIKEKIAYYKYTPQTVLDTTNYKLYWDRTILTDKTVHYNRPDITLHDKKNQIVYLIDIAIPNTHNLTSSHTEKITKYTDLAIELKTQWKVKSVKTVPIIISSTGIIPHTLHTSLKLLEIHSLTYIILQKAVILNTCRIVRKFLSSDTPSSAIMLG

SEQ ID NO: 23603 - protein, 1405 aa, Quadrus cerialis
MRLRSGFALPQAGTRANSNGESRPERPRSGCPMYSGGDTVSQTSAQSSAAADHDSLRSLTSGTTFHPYSSNVSTTSTSSMLAEDVVQETLSVTNLPPTTASLKTRRHWSKEMNEFILRTYLQLTLMETDVNGYLPPLYAKFIERFPEMQNISRQRVGDQRRAIMNKKLLTQEHIDSIYREIEENIQSNKITHNRTTSEENEITTQTLTSLDHRTKHQHVLNSSSNTSKRIRWTNEYNETIMRVYYKITLLEKNISAYRPQLHKAFIAKYPHLEHITEQRIADQRRLIERNRYLSNERLQVIKAEVAKELEEENSKNTYTENSFDPFTHRDNTNIPNNIPSSESNVDTHEQKSIEIEKYFQVAYTHFKNTDPIMRSYIPRQKSSRKLAYIVNYVNNNILPKYADLSTNFDILQTVMYCGAWTVAKSNGAKLDIPSKTMETNDRHRINKPKWQKRLERRIEDLRAQIGRLTQFIRGNRSPKLVKQINSIQKRHKIHATHEDPNVNLSEFLDTLKQKLNIFSNRLKRYKVCTLRKTQNKLFTSNEKQFYRGLRTHIQSTKPHSISPFPSSITSPSNQSSITSHSTLDNIHNNSSPSADELRSFWATVWENTVQHNHTATWLLDEQDRYSNTEPMNYQCISAETFHGVIKKLHNWKAPGSDNIHNYWYKKFTCLHPLILIHINTFINMPHTIPHYITLGITHMLPKDPNNTSNPAKYRPITCLQTIYKILTSCLTEVIYKHVDRNNILAEQQKGCRKFSQGCKEQLTIDSIVLKQTQKRKSDLYSMYIDYKKAFDSVPHSWLLHILKIYRIHPQIISFLQTVMGKWSTRLQLRTDTSTITTEPIKIQRGIFQGDALSPLWFCLALNPLSFLLNSSNIGYQLNYNSNEQTDTLTDASVYKLSHLLYMDDIKLYASTEEELLKLSQVTENFSKDICMDFGLDKCKINSVKTGQIYKHQHQTQTGDLIYSLGENEVYKYLGYNQNQQIRDKDIKNSLINNFKNRLHSILQSHLYSKNMIKSINTFTIPILTYSFGIINWNITELKTLQRMINTTLTKNRKHHPRSCVQRMTLPRMDGGRGIIDIRNLHNRQITNLRTYFHNKTQTSLLHNAIVHNDQNLTPLNLYEKRQQKNELNISRHTKLTEWARKTLHGRHLHDLNQPHVDKDASNEWLKHGELFPETEGFMVAIQDQVIETNNYKKYIMKLPNTNDSCRKCKGSSETIQHITGACRAIAQTDYKHRHDQVAAIIHQHLALKYKLITDKTPYYKYTPQKVLDTSHHKLYWDRTILTDKTIHFNRPDITLYDKVNKIVYLIDIAIPNTHNLLSTHTDKITKYTDLAMELKSQWQVEKVKTVPIVISTTGVIPNSLHSSLSLLSLNRYTYITLQKATILNTCRLVRKFLSLDPTSSASMLG

SEQ ID NO: 23604 - protein, 1382 aa, Udranomia orcinus
MRLRSGYKLPQAGTGANRDGESRPEQMSSGSPAYSGGDTVLQSSAQHSAAADYNSDVVSPESSLFVPTPFQSPTCSSTTFNSILAEDVVQDDDPVENLAPTTASFYKRRKWSQAMNEFILRTYLQLTLMETDISGYLPLLHTKFIEKFPEMHTISRQRVGDQRRAIVNKKLLNTYEIDKIYRETQEEINSTQINTIVQNSILTDVSQTHNHHRKTQTLLHSYNKPTQRMRWTMAHNITIMRAYYKVTQLERNLSAYRTQIHKEFITTYPHLSHITEQRIADQRRLIIHNKYLGEEKLQAIKDEVAAELLLRDKNSTNTLSSMYPDNVEIDLLNEQNNNATNTNTVTQVNSTNNLDKTQAVHLDQQEETVIEQNFNDAYNHFKNINPTERSYIPKQKSSRKLIRIINYINDKILPNFINNSTEFYTIQTVVYCGAWAAAKSNGSKISIPPKIETNHKYTIRKPKWQVRLERRVETLRAHIGQLTQYIKGNKSSRIEKQVEYIIKTYKVHASHENPNKHILEFLDTLKQKLTTVSNRLRRYKTCTLRKTQNRTFTSNEKQFYRELRSLGTQNNIHNNSLAPPGEELRSFWAKIWEKPVQHNRMASWILCEQNKYSDSEPMTFQCIPADVFKSVVRNLHNWKAPGSDNIHNFWYKKFTYAHPFIHKFINTFIEMPHTLPDYLTEGITHMLPKDPNNYSNPAKYRPITCLQTIYKIMTSCLTQIIYNYINKNKILAEQQKGCRKYSQGCKEQLTIDSIILKQTQKRKTDLYTMYIDYKKAFDSVPHSWLHQILQIYNIHPTIVSFLQNVMMKWTTRLKITRGTTPVTTDPIKIQRGIFQGDALSPLWFCLSLNPLSNMLNYSDTGYDLACRDETNLLNDIPICKLNHLLYMDDIKLYASTEEELQKLAQISECFSNDICMEFGIDKCKINSIRAGQNYKHQYQLQTGEHIEALNSGEVYKYLGYNQAEQILHKDTKLTLTKHFRHRLNTILKSYLSSKNTVKAINTYAIPILTYSFGIICWRKTELKSLQRLINTTMTHNRKHHPRSCVQRMTLTRCDGGRGLIDIYNLHNKQISNLRTYFHNKTQTSYLYSQLIKYDKKLTPLNLSDRTQQKNEIQTDRQTKIDEWTRKALHGRHLHDLNLPNVDKAASNEWLRRGELFPETEGFMLAIQDQIVETKNYRKYIIKLPNASDDSCRKCKGSPETIQHITGACRSIAQTDYKHRHDQVAAIIHQYLAYKFKLIAQKTAYYKYNPQTVLDTAEYKLYWDRTILTDKTIHFNRPDITLHNKKNKLVYLIDIAIPNTHNLTSTHSEKLNKYTDLAIELKTQWKVDKVITVPIILSSTGVIPKTLHTSLQLLNIHPQTYITLQKATILNTCRIVRKFLSIE

SEQ ID NO: 23605 - protein, 1397 aa, Udranomia kikkawai
MRLRSGFKLPQAGTGANRDGESRPEQMSSGSPAYSGGDTVSQTSAQRNAAADDNSEIASPESSLFVPTPSQSPTCSSTTFNSTLAEDVVQDDDLVEKLAPTTASSSKRRKWSQAMNEFILRTYLQLTLMETDISGYLPLLHTKFIEKFPEMHMISRQRIGDQRRAIVNKKLLHTHDIDRIYRETQEEINTTQINTNIQNSTLTNCLTDVSILQNNNQHRNTQTLLPRNDKSTQRMRWTMAHNVTIMHAYYKVTQLERNLSAYRTQIYKEFITAYPHLSHITEQRIADQRRLIIHNKYLSEEQLQAIRDKVAHELLLQEKQSRNSLSSIYPDNLEIETLNEHINKETSNFQPDIVTHINSTNISHQTQALHIEKTFIEQNFNDAYNYFKNINPTQRSYIPKQKSSRKLIGIVNYINTKILPDLINNNTEFNTLQTIIYCGAWAAAKSNGSKISIPPNIETNHTYIIRKPKWQIRLEKRVETLRVHIGQLTQYIKGNKGSRIEKQVEFIKKTYKVHASHENPNEHLLEYLDTLKQKLTTISNRLKRYKTCTLRKTQNRTFTSNEKQFYRELRSIGTQNNTHNSSLTPPVEELRSFWANIWEKPVQHNKTANWISFEQNKYSDSEPMTFQCIPADIFQTVIRKLHNWKAPGSDNIHNFWYKKFTYAHPFIQKFINTFIEMPHTLPDYLTEGITYMLPKDPNNSSNPAKYRPITCLQTIYKIMTSCLTQIIYEYIDKNKILAEQQKGCRKYSQGCKEQLTIDSIILKQTQKQKTDLYSMYIDYKKAFDSVPHSWLHQILEIYNIHPTIVSFLENVMMKWTTRLKITNGTTSEITEPIKIQRGIFQGDALSPLWFCLSLNPLSNMLNYSNTGYDLACKDDTNLLSDVSICKLNHLLYMDDIKLYASTEEELQKLAEISETFSNDICMEFGIDKCKINSTRAGQNYQHQYQLQTGEHIEALDSDEVYKYLGYNQAKQILQKDTKITLSKQFRHRLNTILKSYLSSKNTFKAINTFAIPILTYSFGIICWRKTELKSFQRLINTTMTQNRKHHPRSCVQRMTLSRCDGGRGLIDINNLHNKQISNLRTYFHNKAQTSYLHNQLVQYDKKLTPLNLSNRTQQKNEIQTDRQTKIDEWTRKTLHGRHLQDLNQPNVDKTASNEWLRRGELFPETEGFMLAIQDQVIETKNYRKYIMKLPNASDDSCRKCKGSPETIQHITGACRAIVQTDYKHRHDQVAAIIHQYLAYKFKLIPQKTAYYKYNPQTVLDTSEYKLYWDRTILTDKTIHFNRPDITLHNKKNKIVYLIDIAIPNTHNLSSTHTEKINKYTDLAIELKSQWKVDKVITVPIILSTTGVIPKTLHTSLKLLNIHPQTYITLQKAAILNTCRIVRKFLSIEKTSSAFVLG

SEQ ID NO: 23606 - protein, 1388 aa, Aethilla lavochrea
MRLRSGYKLPQAGTGANRNGESCPGQSGSGSPTYSGGDTESQSSAQISTVAEHSHDSTSVVSFSSIPSTNPHFHSSSLSTSTTDSMLTEDVVQEANLVENLGPTTVSLNTRRKWSKSMNEFILRTYLQLTLMETDISGYLPPLHTKFIEKFPEMHMIGRQRLGDQRRAIVNKKLLTQQDIDRIYKETREEMNSTRTNVHNTFLTRPHLLPHQITTQPKQTEINETSQRIRWTTEYNVTIMRAYYKITQLEANISAYRGPLHKEFTTTYPHLKHVTEQRVADQRRLIIHNKYLNEEKLQVIKDEVAAELRIQRNNSVQNHGCIDLAPKDSEGVNEEGNNINKIGTEIFTNKNNIGNTLSIPKPDLNQDKIREINQNFDAAYNYFKNIEPNQRCYIPKQRSSVKLAAIVNYINKNILPKYIGDDTDFSILQTVLYCGAWATAKSNGSKIAIPPKIEENYRLHTYKPKWQIRLERRVEKLRAHIGQLTQYIKGNKSISLEKQVKYIKKRYKIHATHENPNTYLSEFLDTLKQKLTTISNRLKRYKTCTQRKTQNKEFISNEKQFYRKLRSVTSHNSQNSADNSISPPSAVDLHRFWKTIWDNPVQHNKTADWIKQEQHKFSNSEPMAYQYVPGDVFQDTIRKLHNWKAPGSDNIHNYWYKKFTFVHPFIFKYINKFIEMPHTLPDYLTEGITYMLPKDPSNISNPAKYRPITCLQTFYKIITSCLTQIIYNFIEHNKILAEQQKGCRKYSQGCKEQITIDSVVLKQTGRRKSDLYSMYIDYKKAFDSVPHSWLLHILEIYHIHPHIISFLKIAMTKWTTRLRLTTTLNTIITEPIKIQRGIFQGDALSPLWFCLALNPLSNMLNSTNTGYNLEYKYNETNIQTDNSVYKLNHLLYMDDIKLYSSTEEELRKLAQITENFSKDICMEFGIDKCKINSIKAGKCYEHQYQMQTGELVEALSEKEVYKYLGYNQAQQILHKEIKCSLTKQFRRRLNIILRSHLYSKNMFKAINTYAIPILTYSFAIVAWNKMELKSLQRVINTTLTKNRKHHPRSCIQRMTLPRYDGGRGLIDILNLHNRQITNLRTYFYNKAQTSLLHNAIVKNDNKLTPLNLYDKTLQKNETQTDRQTKVDEWTRKVLHGRHLHDLNQANVDKKASNEWLRRGELYPETEGFLIAIQDQIIETKNYMKHIIKLPNASDDSCRKCKGSSETIQHITGACRAIAQTDYKHRHDQVAAIIHQNIAFMCKLISEKTAYYKYTPQAVIDTKDYKLYWDRTILTDKTVHYNRPDITLHDKKQKIVYLIDIAIPNTHNLSSTHTEKNTKYVDLAIEIKSQWKVEKVRTVPIVISATGVVPKTLHSSLKLLNLHPQIYITLQKAAILNTCRIVRKFLTTD

SEQ ID NO: 23607 - protein, 1386 aa, Epargyreus clarus
MRLRSGYKLPQAGSGANRDGEYRPEQSSSGCPTYSGGDTVSQTSAQSNTVADHHHDSESVASFPSVPSTNPYSYSSTCSTTTVNSMRTEDVVQEADPVENLAPTTASLHTRTRRKWSKAMNEFILRTYLQLTLMETDTSGYLPPLHTKFIEKFPEMHMISRQRVGDQRRAIVNKKLLTQNDIDKIYRETREEINNTQRNAQIYNTKPTHSHTDKPLSPNNNTNQRMRWTTEYNVTIMRAYYKVTLLETNITAYRGQLHKEFITTYPHLQYITEQRVADQRRLIIQNKYLSNEKLQSLKDEVASELDLQKNNNTQIPSSICPAVDFIELQDINSETSNNINNINDSPNIRTSHLNQQKIAEIEQNFDAAYNYFKNTHPTQRTYIPKQKTSVKLATIVNYINKTILPKHVDNDTEFMKLQTVLYCGAWAAAKSNGSKLAIPPKIEVGKIYKIKKPKWQIRLEKRVENLRAEIGQLTQYIKGNNSIKMEKKVKFIKLRHKIHATHENPNTHLSEFLDTLKQKLTTISNRLKRYKTCTLRKTQNNTFSTNEKQFYRGLSTNNSHSLQNNTQINISPPPSDELRTFWATIWENSVQHNKMANWILHEQNTYSESEPMIFDCIPFEVFDSVIKKLHNWKAPGSDNIHNFWYKKFTFIHPFIYNYINKFIKIPHALPEYITEGITYMLPKDLNDISNPAKYRPITCLQTIYKIMTSCLTQIIYNYVDNNNILTEQQKGCRKYSQGCKEQLTIDSVVLKQTQKRKSDLYSMYIDYKKAFDSVPHTWLLQVLEIYHIHSQIISFLQNTMKKWITKLKLTNGTNTVITEPIKIRRGIFQGDALSPLWFCLALNPLSNMLNSSNTGYDLKFIENNPNRLADFSIYKLNHLLYMDDIKLYGSTEEELQKLAQITENFSTDICMEFGIDKCKINSIKAGQTYQHQYQMQTGELVKTLHENEVYKYLGYNQAQQILHKDIKDSLTIQFRRRLNVILRSHLYSKNTFKAINTYAIPILTYSFGVINWNKTQLKTLQRIINTTMTQHRKHHPRSCVQRITLPRQDGGRGLIDILNLHNKQITNLRTYFHNRAQTSDLHNAIVENDTNLTPLNLYDKTLQRNEIQTDRQTKLNEWTRKALHGRHLHDLNQPNVDKLASNEWLRRGELFPETEGFMIAIQDQIIETKNYKKHIMKVPNASDDSCRKCKGSPETIQHITGACRAIAQTDYKHRHDQIAAIVHQCLAFKYKLIPEKITYYKYTPQTVLDTTDYKLYWDRTILTDKTVHYNRPDITLHDKKNKIVYLIDIAIPNTHNLSSTHSEKITKYTDLAIELKSQWKAEKVKTVPIVISTTGVIPDTLHSSLKLLNIHPQTYITLQKASILNTCRIVRKFLSMDPTSPALMLG

SEQ ID NO: 23608 - protein, 1412 aa, Craniophora ligustri
MRLRSGNRLPQAGTGANSNGESRPEPTGTGCPTYSGGDTVSQTSAQFRTVADHHLDSSSVNIPSSLPSSSSLSVIPSIISYNPQPHTSTHSTITTYSMLPEDVVQETEPVADIAPTAISLKTRRKWNKAMNEFILRTYLQLTLMETDTNGYLPLLHTKFIENFPEMHMINRQRVGDQRRAIINKKLLSQSVIDHIYMETREEINSIQINAQTYNTQTPITQADDNIQPPQHTQTGQRMRWTKEHNETIMRAYYKITHLESNISAYRGPLHQAFINTFPHLEHITEQRIADQRRLIIQNRYLDEERLQAIKDEVASELLPLQNNSDTQVCRNTPLSRLEPTVEQDQYLNSIDPEICTHIDNYTNKTPETLTPQSEQQISPEIEQTYQDAYNYFKNTDPTQRSYIPKQKSSKKFGYIVNYINIKVLPKYINVDTDFITLQTVLYSAAWAAAKSNGAKIEIPPRIETTCRYKKNKPKWQIRLERRIEELRAQIGRLTQYISGNRNNKIVKQVQYIQKQYKTHATYENPNTHLSEFLDTLKQKLTTFSNRLKRYKTCTLRKTQNKQFISNEKQFYRGLRTTTNSHSRTSNEQNTHSPSTTQNTTPYNTNSNRSPSAEEMRSFWAGIWENTVHHRNEADWIRNEERRYSTTEPMDFEDIPVEVFYDVIKKLHNWKAPGSDNIHNFWYKKFTRAHPYIHNYINKFIQQPHTLPEYITVGTTYMLPKDSNNLSDPAKYRPITCLQTIYKIITSCLTHLIYNYIDKKSMLAEQQKGCRKYSQGCKEQLIIDSVLLRQTQLKKSDLFSMYIDYKKAFDSVPHTWLLQVLEIYRIHPQIIIFLQNTMTKWTTRLRLTTDTNTAITEPIKVQRGIFQGDALSPLWFCLALNPLSNMLNSLNLGYELDYNDLLTDTSPHKLNHLLYMDDIKLYGSTIGQLQQLAQYTENFSHDICMEFGIDKCKINSITKGQRYQHQYPMQTGDVIEALTETEVYKYLGYNQAQQVQYKSIKNSLTKQFKHRLNTILRSHLYSRNTFKAINTYAIPILTYSFGIINWNKTELKSLQRIVHTSMTRNRKHHPRSCIQRMTLSRYDGGRGLIDILNLHNKQIANLRTYFHNKALTSTLHDAIVQNDTKLTPLNLTDKTQQRNEVQTDRQTKLNEWTRKALHGRHLHDLNQPTVDKTASNEWLRRGELFPETEGFMLAVQDQVIETKNYKKHIMKVPNSSDDSCRKCKGSPETIQHVTGACRAIVQTDYKHRHDQVAAILHQNLAFKYKLILEKTAYYKYTPQTVLDTKDYKLYWDRTILTDKSVHYNRPDITLHDKQKQTVYLIDIAIPNTHNLSSTHTEKLTKYTDLAIELKTQWKVKTVKTIPIILSSTGVIPRTLHTSLKLLEMHSLTYILLQKAVILNTCRIVRKFLNSDTT

SEQ ID NO: 23609 - protein, 1412 aa, Erynnis tages
MRLRSGCILPQAGTGANRTGESGPGPSSPGSPTYSGGDTVLQSSAQESTAAENNDERTSVESYPSVPSSNSYAQSPTHSSTTAISTLTEDVMQATDLVENLAPTTVSSQTRRKWSNDMNEFILRTYLQLTFMETDVNGYLPPLHTKFIERFPELHMISRQRVGDQRRAIINRKLLPQTEIDRIYKEVRQEIDNARAGNLTPNLLTTSTHTNRSTTQTRTLTQYNNNNETSQRMRWTKEQNETIMRIYYKITQLETNISAYRGQLHKEFISVYPHLNHVTEQRVSDQMRLIIRSRYLSEDRLQAIKEEVANELILENNINTEILNNADPRSPQIENIIIQENSLQTNTQSETLNNTDRLNNSSNITTLHLDNQKHSQIKHYFEIAYNYFKNTEPTERSYIPKQKSSAKLAATIKYINSDILPNYIDDSTEFIVMQTIIYCGAWAAAKSNGAKIDIPKENQETYKHKIKKPKWQIRLENRIEELRAQIGRLTQYIKGNRSRNLEKHVDLIKRRHKIHSIHESPNTQLPEFLDTLKQKLSALSSRLKRYKTCTLRKTQNKIFINNEKQFYRGLKSSKITNTDNTNNTRKTNPQDTSHNLQDNAQNNRMAPAADELHAFWATLWEIPAQHNRDADWLQNEDLKYSVSEPMDFQYVPAEVFNDVIKKLHNWKAPGTDNIHNFWYKKFTHVHPFIYKFINKFIDEPQALPEYLTIGITYMLPKDSNNMSNPAKYRPITCLQSFYKIMTSCLTQIMYKHIESNKILAEQQKGCRKWSRGCKEQLTIDSVVLKQTQKQKTDLYSMYIDYKKAFDSVPHSWLLQILEIYRIHPRIITFLKKLMSKWTTRLKLTTATDTIVTEPIKIKRGIFQGDALSPLWFCLALNPLSNMLNSTNIGYNFNYTKNETDLTDCSTHKLNHLLYMDDIKLYGSTEEELETLANITETFSKDIGMDFGIDKCKINSIKAGQNYAHQYHLQTGEIVEALEENEVYKYLGYNQGQYTSHKDIKNSLKTQFKLRLNSILRSHLNSRNTFKAINTFAIPILTYSFGLINWNKTEIKTLQRLINTSLTQNRKHHPRSSVQRMTLPRNDGGRGLIDIGNLHNKQVTNLRTYFHNKAQESILHNAIVQNDKRLTPLNLHDLTQQKNEIQTDKQTKVRDWFKKSLHGRHLHDLSQPNVDRKASNEWLKRGELFPETEGFMAAIQDQIIETKNYKKYIMKLPNSNEDSCRKCKGPSETIQHITGACRAIAQTDYKHRHDQVAAIIHQTLAFKHSLVAEKTAYYKYTPHGFLESKDYKLYWDRAIITDKTIHFNRPDITLHDKKNRVVYLIDVAIPNTHNLTSTHTDKITKYTDLAIQIKTQWRVDKVITIPILISTTGVVPKTLHTSLQQLNIHPQTYITIQKATILNTCRIVRKFLSMDIS

SEQ ID NO: 23610 - protein, 1412 aa, Erynnis tages
MRLRSGCILPQAGTGANRTGESGPGPSSPGSPTYSGGDTVLQSSAQESTAAENTDERTSVESYPSVPSSNSYAQSPTHSSTTAISTLTEDVMQTTDLVENLAPTTVSSQTRRKWSNDMNEFILRTYLQLTFMETDVNGYLPPLHTKFIEKFPELHMISRQRVGDQRRAIINRKLLPQTEIDRIYKEVRQEIDNARAGNLTPNLLTTSTHTNRSTTQTRTLTQYNNNNETSQRMRWTKEQNETIMRIYYKITQLETNISAYRGQLHKEFISVYPHLNHVTEQRVSDQMRLIIRSRYLSEDRLQAIKEEVANELVLENNINIEILNNAEPRSPQIENIIIQENSLQTNTQSETLNNTDRLNNSSNITTLHLDNQKHTQIKHYFEIAYNYFKNTEPTERSYIPKQKSSAKLAATIKYINSDILPNYIDDSTEFIVMQTIIYCGAWAAAKSNGAKIDIPKENQETYKHKIKKPKWQIRLENRIEELRAQIGRLTQYIKGNRSRNLEKHVDLIKRRHKIHSIHESPNTQLPEFLDTLKQKLSALSSRLKRYKTCTLRKTQNKIFINNEKQFYRGLKSSKITNTDNTNNTRKTNPPDTSHNLQDNAQNNRMAPAADELHAFWATLWEIPAQHNRDADWLQNEDLKYSVSEPMDFQYVPAEVFNDVIKKLHNWKAPGTDNIHNFWYKKFTHVHPFIYKFINKFIDEPQALPEYLTIGITYMLPKDSNNMSNPAKYRPITCLQSFYKIMTSCLTQIMYKHIESNKILAEQQKGCRKWSRGCKEQLTIDSVVLKQTQKQKTDLYSMYIDYKKAFDSVPHSWLLQILEIYRIHPRIITFLKKLMSKWTTRLKLTTATDTIVTEPIKIKRGIFQGDALSPLWFCLALNPLSNMLNSTNIGYNFNYTKNETDLTDCSTQKLNHLLYMDDIKLYGSTEEELETLANITETFSKDIGMDFGIDKCKINSIKAGQNYAHQYHLQTGEIVEALEENEVYKYLGYNQGQYTSHKDIKNSLKTQFKLRLNSILRSHLNSRNTFKAINTFAIPILTYSFGLINWNKTEIKTLQRLINTSLTQNRKHHPRSSVQRMTLPRNDGGRGLIDIGNLHNKQVTNLRTYFHNKAQESILHNAIVQNDKRLTPLNLHDLTQQKNEIQTDKQTKVRDWFKKSLHGRHLHDLSQPNVDRKASNEWLKRGELFPETEGFMAAIQDQIIETKNYKKYIMKLPNSNEDSCRKCKGPSETIQHITGACRAIAQTDYKHRHDQVAAIIHQTLAFKHSLVAEKTAYYKYTPHGFLESKDYKLYWDRAIITDKTIHFNRPDITLHDKKNRVVYLIDVAIPNTHNLTSTHTDKITKYTDLAIQIKTQWRVDKVITIPILISTTGVVPKTLHTSLQQLNIHPQTYITIQKATILNTCRIVRKFLSMDIS

SEQ ID NO: 23611 - protein, 1412 aa, Erynnis brizo
MRLRSGYKLPQAGTGANRTGESGPGPSSPGSPTYSGGDTVLQSPAQESTVAENNDETTSVESYPSVPSSNSYARSPTHSRTTTTSTLTEDVMQAADLVENLAPTTVSSQMRRKWSNDMNEFILRTYLQLTFMETDINGYLPPLHTKFIERFPELHMISRQRVGDQRRAIINRKLLPQTEIDRIYKEVRQEIDNARADNLTPNLLTTSTHTNRSTTQTRTLTQHNNNNETNQRMRWAKEQNETIMRIYYKITQLETNTSAYRGQLHKEFISVYPHLNHVTEQRVSDQMRLIKGSRYLSEDRLQAIKEEVANEIVLENNSNTEILNNAEPISFQIENINRQENSLHTNTQSDTLNNTHRLNNSSNITTLHLDNQKRTQIKYYFETAYNYFKNTEPTQRSYIPKQKSSTKLAAIIKYINSDILPIYIDESTEFIVMQTILYCGAWAVAKSNGAKIDIPKENQEKYTHKPKKPKWQIRLEYRIEELRAQIGRLTQYIKGNRSKNLEKHVDLIKRRHKIHSIHESPNTQLPEFLDTLKQKLSALSSRLKRYKTCTLRKTQNKIFINNEKQFYRGLKSPKITNIDNTSNTRNTNPPDNSHNLQDNAPNNSMPPAADELHAFWATIWEIPAQHNREASWLLNEELKYSVSEPMDFQYVPAEVFNDVIKKLHNWKAPGSDNIHNFWYKKFTHAHPFIYKFINKFIDMPHTLPEYLTVGITYMLPKDSNNMSNPAKYRPITCLQSFYKIMTSCLTQIIYKHIDSNKILAEQQKGCRKWSQGCKEQLTIDSVVLKQTQKQKTDLYSMYIDYKKAFDSVPHSWLLQILEIYRIHPRIIIFLKKIMSEWTTRLKLTTTTDTIVTEPIKIKRGIFQGDALSPLWFCLALNPLSNMLNSTNIGYNFNYIENETDLTDRSTHKLNHLLYMDDIKLYGSTEEELQTLANITETFSKDIGMSFGIDKCKINSIKAGQNYIHQYHLQTGEIVEALEESEVYKYLGYNQGQYTLHKDIKNSLKTQFKLRLNSILRSHLNSRNTFKAINTFAIPILTYSFGLINWNKTELKTLQRLINTSLTQNRKHHPRSSVQRMTLPRNDGGRGLIDIVNLHNKQITNLRTYFHNKAQDSILHNAIVQNDKRLTPLNLHDLTQQNNEIQTDKQTKVRDWFKKSLHGRHLHDLSQPNVDRKASNEWLKRGELFPETEGFMAAIQDQVIETKNYKKHIMKLPNSNEDSCRKCKGPSETIQHITGACRAIAQTDYKHRHDQVAAIIHQTLAFKYSLVAEKIAYYKYTPQGFLESSDYKLYWDRAIITDKTIHFNRPDITLHDKKNRVVYLIDIAIPNTHNLTSTHTDKITKYTDLAIQIKTQWRVDKVITIPIVISTTGVVPKTLHTSLQQLNIHSQTYIIIQKATILNTCRIVRKFLSMDIS

SEQ ID NO: 23612 - protein, 1379 aa, Erynnis tages
MQVSSRFFSALLQDVIINFIKLPQLLRTSLVILLSSNSYAQSPTHSSTTAISTLTEDVMQATDLVENLAPTTVSSQTRRKWSNDMNEFILRTYLQLTFMETDVNGYLPPLHTKFIERFPELHMISRQRVGDQRRAIINRKLLPQTEIDRIYKEVRQEIDNARAGNLTPNLLTTSTHTNRSTTQTRTLTQYNNNNETSQRMRWTKEQNETIMRIYYKITQLETNISAYRGQLHKEFISVYPHLNHVTEQRVSDQMRLIIRSRYLSEDRLQAIKEEVANELVLENNINIEILNNAEPRSPQIENIIIQENSLQTNTQSETLNNTDRLNNSSNITTLHLDNQKHTQIKHYFEIAYNYFKNTEPTERSYIPKQKSSAKLAATIKYINSDILPNYIDDSTEFIVMQTIIYCGAWAAAKSNGAKIDIPKENQETYKHKIKKPKWQIRLENRIEELRAQIGRLTQYIKGNRSRNLEKHVDLIKRRHKIHSIHESPNTQLPEFLDTLKQKLSALSSRLKRYKTCTLRKTQNKIFINNEKQFYRGLKSSKITNTDNTNNTRKTNPPDTSHNLQDNAQNNRMAPAADELHAFWATLWEIPAQHNRDADWLQNEDVKYSVSEPMDFQYVPAEVFNDVIKKLHNWKAPGTDNIHNFWYKKFTHVHPFIYKFINKFIDEPQALPEYLTIGITYMLPKDSNNMSNPAKYRPITCLQSFYKIMTSCLTQIMYKHIESNKILAEQQKGCRKWSRGCKEQLTIDSVVLKQTQKQKTDLYSMYIDYKKAFDSVPHSWLLQILEIYRIHPRIITFLKKIMSKWTTRLKLTTATDTIVTEPIKIKRGIFQGDALSPLWFCLALNPLSNMLNSTNIGYNFKYTKNETDLTDCSTHKLNHLLYMDDIKLYGSTEEELETLANITETFSKDIGMDFGIDKCKINSIKAGQNYAHQYHLQTGEIVEALEENEVYKYLGYNQGQYTSHKDIKNSLKTQFKLRLNSILRSHLNSRNTFKAINTFAIPILTYSFGLINWNKTEIKTLQRLINTSLTQNRKHHPRSSVQRMTLPRNDGGRGLIDIGNLHNKQVTNLRTYFHNKAQESILHNAIVQNDKKLTPLNLHDLTQQKNEIQTDKQTKVRDWFKKSLHGRHLHDLSQPNVDRKASNEWLKRGELFPETEGFMAAIQDQIIETKNYKKYIMKLPNSNEDSCRKCKGPSETIQHITGACRAIAQTDYKHRHDQVAAIIHQTLAFKHSLVAEKTAYYKYTPHGFLESKDYKLYWDRAIITDKTIHFNRPDITLHDKKNRVVYLIDVAIPNTHNLTSTHTDKITKYTDLAIQIKTQWRVDKVITIPILISTTGVVPKTLHTSLQQLNIHPQTYITIQKATILNTCRIVRKFLSMDIS

SEQ ID NO: 23613 - protein, 1394 aa, Timochares trifasciata
MRLRNGRILPQAGTEANRNGESGPGSLGAGSPTYSGGDTVSQSSAQYDTVADSRQNTVTIESYPSITSTNSFSRSQTPSNSSTYSIMADVVQETAQVIIPAPTTVNVQMRRKWSTEMNEFILRTYLQLTLMENDTNGYLPPLHTKFIEKFPEMNTISRQRVGDQRRAIVNKKLLTQADIDRIKKEVSEEIKKTHMNTITPIISTQSDNFTLQTYSASQQITQSHLNNTSETSSPRMRWTKDQNETIIRIYYKITQLEADISAYRGQLHKAFIEKYPHLQHISEQRVADQRRLIINNRYIKEERLHVIKDEVARELAQQNIFRPVHSNDTHITTTQPEHTTEQANNFESICNPTYTHTLNNPNLHPVDEEKCEEIKENFHKALSYFKNIDPTQRSYIPKQKSSVKLSAIIKYVDTNILPNNINDNTEFVDMQTIIYCSAWAVAKSNGTKIDIPQDAAVESYKRKIRKPRWQIRLERRVEELRTQIGRLTHFIRGNRSNDLVRHINFIKRKYKLHATHENPNTYLSEFLDTLKQKLTAISNRLRRYKTCTLRKTQNKMFTTNEKQFYRSLRTPNNNTYYTIQNNNNSNSTPVNEIRSFWASIWETPVLHNENSDWIFNEKNRYSHTTPMDFQCISKDVFHNVIKNLHNWKAPGSDNIHNFWYKRFTFTHKFIYKFINKFIEMPHTIPNYITTGITHMLPKNPNSLHNPASYRPITCLQSIYKIITSCLSHVIYKHIDNNNILAEQQKGCRKYSQGCKEQLTIDSVILSQTLKSKSNLYSMYIDYKKAFDSVPHSWLLQILKIYRIHPQIISFLQTLMTKWSTRLKLTDNTDIVYTEPIKIQRGIFQGDALSPLWFCLSLNPLSNLLNSSNLGYNLICEENDTNLQTDHSVHKLNHLLYMDDIKLYGSTEEELQNLAELTEKFSKDICMEFGIDKCRVNSIKEGQNYKHQFYTQSGETIEPLQEKEVYKYLGYSQTQQILHKDIKMSLTEQFKRRLNTILKCHLYSKNTFKAINTYAVPLLTYSFGIIHWNKTELTSLQRSINKMLTLHRKHHPRSCVQRMTLPRSDGGRGLVDITNLHNKQLTNIRNYFYTKAQTSSLHNAIVQNDKKFTPLNLHDQSKQKYEILTNGQTKIDEWTRKVLHGRHLHDLNQPNVDKKASNEWLKRGELYPETEGFMAAIQDQVIETRNYRKHIMKLPNTSDDSCRKCKALPETIQHITGACKAIAQTDYKHRHDQVAAIVHQDLAFKHRLIPEKTAYYKYTPQTVLDSADFKLYWDRTILTDKTVHFNRPDITLHDKKKKIVYLIDIAIPNTHNLTTTHTEKITKYTDLAIELKTQWKVEKVKTIPIIISTTGVVPENLHRSLKNININSNIYITLQKASILNTCRIVRKFLSMDNT

SEQ ID NO: 23614 - protein, 979 aa, Timochares trifasciata
MQTVLYCGAWAAAKSNGAKLNIPKDNQEVYKHKTKKPKWQIRLENRIVVLRAQIGRLTHYIKGSRSIKLERQINCIKRTYKIHATHENPNNKLHEYLDTLKQKLTTISNRLKRYKTCMLRKIQNKIFSNNEKQFYRGLKGPIANPSNQTHTKNTYARDSTQNNLLPLDSTPPDADKLRNYWASIWENPVQHNKEAKWILEEDHKYSTSEPMDFQCVPAEVFHDVIKKLHNWKAPGSDNIQNFWYKKFTYAHPFIYKYINKFIEMPHTLPEYLTVGSTYMLLKDSNSISNPAKYRPITCLQSFYKIMTSCLTHMIYKHIDRNGILAEQQKGCRKSSQGCKEQLLIDSLVLKLTQKKKTDLYSMYIDYKKAFDSVPHSWLLQILEIYRIHPIIINFLRNLMDNWTTQLKLITPTDTIITESIKIKRGIFQGDALSPLWFCLALNPLSNMLNFSNTGYNFNYKGNETDPTMTYSYNYKLNHLMYMDDIKLYGSTEKELSTLAHITEVFSNDVNMEFGIDKCKINSTKAGNNYQHHYQLQTGETVEALEEHQIYKYLGYNQGQNVSHADIKLILKKEFKLRINTILRCYLNSKNTFKAINTYAVPILTYSFGIINWNKTDLTTLQRTINTTLSQNRKHHPRSSIQRMTIPRKEGGRGLTDIVNMHNKQITCLRSYFHNKTQTSTLHKAVVHNDKKLTPLNLCDRTQQKNEIQTDRQTKIRDWTKKALHGRHLLDLNQPYVDRIASNEWLKRGDLFPETEGFMAAIQDQVIETKNYRKHIMKLPNSSEDSCRKCKGPSETIQHITGACRAIAQTDYKHRHDQVAAIIHQNLALNHKLISEKTAYYKYTPHKVLDTADYKLYWDRTILTDKTVHFNRPDITLHDKTNKIVYLIDIAIPNTHNLTSTYNDKITKYTDLALEIKAQWKIDQVKTVPIVISSTGIVPKTLHTSLKQLNIYPQTYVTIQKATILNTCRIVRKFLSMDTT

SEQ ID NO: 23615 - protein, 1391 aa, Cabirus procas
MRLRSGYKLPQAGTGTNRDGESRPVHLLTGCPTYSGGGTVSQTSAQYNTVADHNGDDSSASSPSIPSSNSFSCISTQSTTTVNSILSADAVQEADLVENLAPTTASSYMRKKWSKAMNEFILRTYLQLTSMETDVSGYLLPLHTKFIEKFPEMNTISRQRVGDQRRAIMNRKLLTQDIIDRIYKETREEINITQANAQIHNMQVTPTHRNIHQHITYSSQTSQRMRWTTEHNTTIMRAYYKITQLEANISAYRGPLHKEFITTFPHLEHITEQRVADQRRLIIHNRYLSEERLQAIKDEVASQLYVQQNNIQNPNHIHSSASINESEYGNEQNSNFMSSIDTGIFTNIKKTNNTPTLTLTSHLEQQKSTEIEQNFNTAYNYFTNIEPTKRSYIPKQKCSSKLTAIVKYINNNVLSKHINDDTEFITLQTVIYCGAWAAAKSNGSKITIPPNIEANNKCKTRKPKWQIRLERRVEIIRAHIGQLTQYIKGNNSFKVQKQVKYIKNKYKIHATHENENTQLPEFLDTLKQKLTTISNRLKRYKTCTSRKTQNKTFITNEKQFYRGLSILHTQQNSTNRSSAPSDELRSFWTNIWENPVQHNKEANWITDEQNKYSNSEPMAFESISMEVFQNVVSNLHNWKAPGSDNIHNFWYKKFSFIHPFIHKYINKFIETPHILPNYITEGITYMLPKDPNNISNPEKYRPITCLQTIYKIITSCVTQIIYNYIDKNKILAEQQKGCRKYSQGCKEQLTIDSVVLKQTQKSKSDLYSMYIDYKKAFDSVPHSWLLQVLEIYNIHPQIIIFLQNAMKKWSTKLKITTETSCIITEPINIQRGIFQGDALSPLWFCLALNPLSNMLNLSNVGYDLECNKKNTNLTDCSTHKLNHLLYMDDIKLYSSSKEELQKLALITEHFSKDICMEFGVDKCKINSIRAGQSFEHQYQLQTGEIVEALQQNEVYKYLGYNQAQQILHKPVKDFLTKQFKYRLKTILHSHLYSKNTFKAINTYAIPILTYSFGIINWNKTELKTIQRLINTTLTQNRKHHPRSCVQRMTLPRQDGGRGLIDILNLHNKQITNLRTYFHYKAQNSCLHNAIVINDKKLTPLNLSDKTQQRNEIQIDRQTKIDEWTRKTLHGRHLHDLNQPNVDKTASNEWLRRGELFPETEGFMIAIQDQIIETKNYKKHIMKLPNEADDSCRKCKGCPETIQHITGACRAIAQTDYKYRHDQVAAIIHQNLALKYKFIPDKTAYYKYTPQTVLDTREYKLYWDRTILTDKTIHFNRPDITLHDKKNKIVYLIDIAIPNTHNLSSTYTEKITKYTDLAIELQKQWKVEKVKTIPIVLSTTGIIPKTLHSSLKLLDIHSQTYITLQKATILNTCRIVRKFLSMDAASQALVLG

SEQ ID NO: 23616 - protein, 1385 aa, Spialia phlomidis
MRLRSGYRLPQAGTGAKSDGESSLEQPSSSSPTYSGGDTGSQASAQCNTDADHTHDSISVVSFPSDPSFSPYSSSSTYSSTDSNSNSIQPEDVVQKADSAENFAPIPGSVNLKTRRRWSKAMNEFILRTYLQLTSMESDVSGYLPALHTKFIKKFPDMYMISRQRVGDQRRAIVNNKLLSQTEINEIYKQVAKEINIPNKDTYTPNKISSQTDTPIDKTQKFSHSQQKNSEGTISNDKNQRMRWTKEQNETIMHTYYKITLLESNTSAYRPQLHKAFITKYPHLQHISEQRIADQRRLIVHNKYLSSERLQEIRDDVAKELVLHESTSTQNYSRNVTIVSEPESVNVESYNMRDVNNPETIDSIETDRTQNSSEVNKSYLSEAMAKEIEENFNSAYKYFKNTNPIERSYIPKQKSSKKLAAIVNFINKDILPKYINIDTEFITLQTVLYCGAWAAVKSNGAKINIPQFEEVETYSKCRKKKKPKWQIRLEYRVEEIRAQIGRLTQYIKGNRSNKIERHIDKIKQQYKLHSTHENPNIHLSEFLDTLKQKLTTISNRLRRYKTCTMRKTQNQMFLVNEKQFYRGLKTSTCMNTCNTSNNQDTPRYTSQTPQHNTHNSSLPPAQELHRYWATIWENSIQHNHAAEWITKEKTYYSNATPMEYSGVTAEIFHNVIKKLHNWKAPGSDNIHNFWYKKFTFVQPFLYKFINKFIEMPETLPDYITAGITYMLPKDPKNMTNPAKFRPITCLQTIYKIITSCLTQILHTHIEENNMLAEQQKGCRKNSQGCKEQLTIDSIVLKQTQKYKKDLFSMYVDYQKAFDSVPHSWLLQCLDVYCVHPQIINFLQNVMTKWTTRLRLTTDSNVVITDPIKIQRGIFQGDALSPLWFCLALNPLSNMLNSSDLGYQLKNKETDQLTNISTNKLNHLLYMDDIKLYGSTEDELQQLAQITENFSKDISMNFGIEKCKINSVKAGKMYKHEYSMQTGELVESLNQNEVYKYLGYNQSQQIQHKDIKNTLTKQFRHRLNTISQCHLNSKNTFKAINTYAIPILTYSFGIIKWNKTELKSLQRIIHTTLTKHRKHHPRSCLQRMTLPRIDGGRGLTDIVNLHNKQITNLRTYFHHKAISSPLHDIITQNDKNFTPLNLADNTKQRNEILTDRQTKLKDWSQKALHGRHLHDLNQHNVDKIASNAWLKHGELFPETEGFIIAIQDQVIETKNYKKHIMKLPSFSDDFCRKCKGSPETIQHIIGACRVIAQTDYKHRHDQVAAIIHQSLAFNHKLITLKTPYYKYSPQTILDNKDYKMYWDRTILTDKTVHFNRPDITLHDKKNKIVYLIDIAIPNTHNLTSTHTEKIIKYTDLAIELKTQWKVNKVITVPIVLSATGLIPEAL

SEQ ID NO: 23617 - protein, 1028 aa, Ectomis asine
MKLAAIVEYVNNNILPKYIVSDTDFITFQTVLYCGAWAVAKSNGSKIFLPPKPITDNKYIKKKPKWQIRLECRVEKLRAHIGQLTQYIKGNKSVRIEKQVKFIKKKYKIHATHENPNISVSEFLDTLKQKLTIISNRLKRYKTCTLRKIQNNTFTNNEKQFYRRLNLGSSHNIQNSSQNTNLPPSADELRSFWASIWENSVRHNEAANWILEEQNRYSNSDPMVFQHIPTDLFHDVIRKLHNWKAPGSDNIHNYWYKKFTYIHTFLHDYINKFIEMPHTLPNFVTQGVTYMLLKDHSNISNPANYRPITCLQTFYKIVTSCLTQLIYNYIDSGKVLAEQQKGCRKYSQGCKEQLIIDSIVLKQTQKRKSDLYSMYIDYKKAFDSVPHSWLLKILEMYHIHPQIISFLQNTMTKWSTKLKLSTDMHTIITEPINIKRGIFQGDALSPLWFCLALNPLSNILNSSNIGFGLDCRKNSTDSQTDFSFFKLNHILYMDDLKLYGTTQEEIQKLALLTETFSKDICMEFGINKCRTNSIKAGQGYEHHHQMQTGELIEALHQNEVYRYLGYNQNKQILHKDTKESLTKQFRSRLNTIFRSYLNSKNTFKAINTYAIPILTYSFGIINWNKTELKSLQRTINTTMTQNRKHHPRSCVQRMTLPRHDGGRGLIDILNLHNKQITHLRTYFHSKAQTSSLHSAIVKNDVSLTPLNLHDNAKQRSEIQTDRQTKLDEWIRKALHGRHLHDLNQPNVDKKASNEWLRRGELFPETEGFMLAIQDQVIETNNYKKYIMKLPNASDDCCRKCKVSSETIQHITGACRTIAQTDYKHRHDQIAAIIHQKLAFKFKLISEITAYYKYTPQTVLDSTDYKLYWDRTILTDKTVHCNRPDITLHDKINKIVYLIDIAIPNTHNLSHTYTEKITKYTDLAIELKAQWKVIKVKTIPIVLSTTGVIPKTLHTSLKLLNIDKLTYLTLQKAAILNTCRIVRKFLIEHNLISFCAWLRPAQKCSIPPLFGRKNITIIIITLSTLIAPH

SEQ ID NO: 23618 - protein, 1410 aa, Pyrgus malvae
MRLRSGVTLPQAGTGAKCNGESHPGPSGSGSPTYSGEDTVSQTSAQFNAVADVNDSTSVESVSSIPSTNPYSPTSTHSTKTINSMPTEAVVQDAVPSVNLASTAAGLTTRRKWSTEMNEFILRTYLQLTSMETDINGYLPPLHTKFIEKFPEMHMINRQRIGDQRRAIINKKLLSQNNINRIYKEVREELASFHKNTSAVHSYDNLTYSSHSRHFQNFSQDTLTLQRSTSSNETSLRMRWTTEQNETIIRAYYKITHLETNLTGYRSQLHKAFITAYPHLDHLTEQRIADQRRLIIHNKYISFERLQVIKDEIAHEVRVQQNTGLQTSNSTHTLVRPSELTFEQNNILDSNNSQKITNSSETINVKNTSHFDEEKYREVEQNFQQAYTYFKNTDPTQRSYIPKQNSSKKLAVIVNYINKNILPKHINHSTDFIDLQTVIYCGAWAAAKTNGARIGIPPKEVVKTFKKPKWQQRLERRVEELRAQIGRLMQYIQGNRSTKLIRHIDYIKIKYKIHATHETPNIHLSEFLDTLKQKLVTYCNRLKRYKSCTLRKTQNKMFAVNEKQFYRRLRSPIQTSNTLDSPQPIHSPTYDVDHNTPSSEDLRKFWGEIWENPIHHNNESEWIYNEKNRYSNIEPMDFQCIPLEVFHGVIRKLKNWKTPGSDNIHNFWYKKFTYTHQFIYNHLNKFMEHPHTLPAYVTVGTTFMLPKDTNDTSNPAKYRPITCLQTIYKILTSCITQILYNRIDKNNILAEEQKGCRKYSQGCKEQLTIDAVVLKQTQKQKSDLFSMYIDYRKAFDSVPHSWLLEVLNIYKIHPQITSFLQNTMARWTTRLKLTTDTNTVITEPIKIQRGIFQGDALSPLWFCLALNPLSNMLNLSEAGYNLDYKEKNTDPSAASSIHKLTHLLYMDDLKLYSSTEKELEHLAQITEHFSDDICMNFGIDKCRINSIKAGEIYKHHHLTHTGEEISSLDETEAYKYLGYNQSKQILHKDTKDTLTKHFKSRLNALLRCHLYAKNTFKAINTYAIPILTYSFGIINWNKTQLKSLQRSIHTSLTKSRKHHPRSCVQRMTLPRNDGGRGLIDIVNLHNKQIANLRSYFHAKAETSLLHKAIVQSDKKLTPLNLSDQTQQINEKQIDKQTKLDEWARKALHGRHLHDLNQPYVDKIASNEWLKRGDLFPETEGFIIAIQDQIIETKNYTKHIIKQPNASDDSCRKCKGCPETIQHITGACRAIAQTDYKHRHDQVAAIIHQNLAYKYKLLLEKTAYYKYAPNAVLDTKDYKLYWDRTILTDKTIHYNRPDITLHDKKNKIVYLIDIAIPNTHNLSSTYSNKITKYTDLAIEIKTQWKAEKVITVPIVLSTTGVIPQTLHTSLKLLNIHSHTYVTLQKATILNTCRIVRNFLSMDTTTPTFMLG

SEQ ID NO: 23619 - protein, 1410 aa, Pyrgus malvae
MRLRSGVTLPQAGTGAKCNGESRPGPSGSGSPTYSGEDTVSQTSAQFNAVADVNDSTSVESVSSIPSTNPYSPTSTHSTKTINSMPTEAVVQDAVPSVNLASTAAGLTTRRKWSTEMNEFILRTYLQLTSMETDINGYLPPLHTKFIENFPEMHMINRQRIGDQRRAIINKKLLSQNNINRIYKEVREELASFHKNTSAVHSYDNLTYSSHSRHFQNFSQDTLTLQRSTSSNETSLRMRWTTEQNETIIRAYYKITHLETNLTGYRSQLHKAFITAYPHLDHLTEQRIADQRRLIIHNKYISFERLQVIKDEIAHEVRVQQNTGLQTSNSTHTLVRPSELTFEQNNILDSNNSQKITNSSETINVKNTSHFDEEKYREVEQNFQQAYTYFKNTDPTQRSYIPKQNSSKKLAVIVNYINKNILPKHINHSIDFIDLQTVIYCGAWAAAKTNGARIGIPPKEVVKTFKKPKWQQRLERRVEELRAQIGRLMQYIQGNRSTKLIRHIDYIKIKYKIHATHETPNIHLSEFLDTLKQKLVTYCNRLKRYKSCTLRKTQNKMFAVNEKQFYRRLRSPIQTSNTLDSPQPIHSPTYDVDHNTPSSEDLRKFWGEIWENPIHHNNESEWIYNEKNRYSNIEPMDFQCIPLEVFHGVIRKLKNWKTPGSDNIHNFWYKKFTYTHQFIYNHLNKFMEHPHTLPAYVTVGTTFMLPKDTNDTSNPAKYRPITCLQTIYKILTSCITQILYNHIDKNNILAEEQKGCRKYSQGCKEQLTIDAVVLKQTQKQKSDLFSMYIDYRKAFDSVPHSWLLEVLNIYKIHPQITSFLQNTMARWTTRLKLTTDTNTVITEPIKIQRGIFQGDALSPLWFCLALNPLSNMLNLSEAGYNLDYKEKNTDPSAASSIHKLTLLLYMDDLKLYSSTEKELEHLAQITEHFSDDICMNFGIDKCRINSIKAGEIYKHHHLTHTGEEISSLDETEAYKYLGYNQSKQILHKDTKDTLTKHFKSRLNALLRCHLYAKNTFKAINTYAIPILTYSFGIINWNKTQLKSLQRSIHTSLTKSRKHHPRSCVQRMTLPRNDGGRGLIDIVNLHNKQIANLRSYFHAKAETSLLHKAIVQSDKKLTPLNLSDQTQQINEKQIDKQTKLDEWARKALHGRHLHDLNQPYVDKIASNEWLKRGDLFPETEGFIIAIQDQIIETKNYTKHIIKQPNASDDSCRKCKGCPETIQHITGACRAIAQTDYKHRHDQVAAIIHQNLAYKYKLLLEKTAYYKYAPNAVLDTKDYKLYWDRTILTDKTIHYNRPDITLHDKKNKIVYLIDIAIPNTHNLSSTYSNKITKYTDLAIEIKTQWKVEKVITVPIVLSTTGVIPQTLHTSLKLLNIHSHTYVTLQKATILNTCRIVRNFLSMDTTTPTFMLG

SEQ ID NO: 23620 - protein, 1266 aa, Ectomis octomaculata
MRLRSGYKLPQAGTGAERNGESRPEQLSSGSPTYSGGDTVSRTSAQIVTVADSDSSSVLSYPSVPSTNPYSQSPSYSTTTANSTLMEDVVQETNSVGNIAPTTVGIKTRRKWSKEMNTFILRTYLQLTLMETDTKGYLPLLHTKFIEKFPEMHMISRQRVGDQRRAIVNRKLLTQSDIDRIYRETHEEINISQTNSQLNRTLNASHTSIQIDERTHFTHNTHKTYERMRWTTEQNITIMRAYYKITQLEQNITAYRGQLHKEFVTAYPHLKHINEQRVADQRRLILKNKYLTEEKLQSIKDEVTSELLLQKRNLDTNNSIIPPVFESDIIHKQGLIESELVADRNNSNTSLKINSYLDQQKTTEIENNFNIAYKYFKNIEVTQRNYIPKQKTSMKLAAIVKYVNNNILPKYIDNDTDFLTLQMVVYCGAWAVAKSNGSKISLRPKSIEVSKNSKKKPKWQIRLECRVEILRAHIGQLTQYIKGNKSARIEKQITFIKKKYKIHAAHENPNTRLSEFLDTLKQKLNTLSNRLRRYKTCTLRKAQNNLFSNNEKQFYRSLNSDSSRNLQNSSQSNNLPPSADELRRFWASIWETSVRHNEADWILDEQNKFSNSNSMAFQHIPADLFHDVIRKLHNWKAPGSDNIHNFWYKKFTYIQPFLLKYVNKFIEMPHSFPDYLTQGVTYMLPKDHTNISNPAKYRPITCLQTFYKIVTSCLTQVIYSYIDSNNILAEQQKGCRKYSQGCKEQLTIDSIVLKQTQKRKSDLYSMYIDYKKAFDSVPHSWLLRILKMYQIHPQIIFFLQNIMTKWSTQLKLSTDANTIITDPIYIKRGIFQGDSLSPLWFCLALNPLSNMLNSSNVGFQLEYRENLTDSQTDLSIFKLNHILYMDDLKLYGTTEEELQKLAIITETFSKDICMEFGIDKCKTNSIKTGQNYVHPYKMQTGEVIAALHHDEVYKYLGYSQNKQILHKNTKESLTKQFKHRLNTIFRSYLCSKNTSKAINTYAIPILTYSFGIIKWTKTELKSLQRTINTSMTKNRKHHPRSCVQRMTLPRHDGGRGLIDIVNLHDKQIANLRTYFHTKAQTSSLHSAIVRNDINLTPLNLCNETRQRGEIRTDRQIKLDEWIRKALHGRHLHDLNQPNVDKKASNEWLRRGELFPETEGFMIAIQDQIIETNNYKKYIMKLPTASDDCCRKCKASPETIQHITGACRAIVQTDYKHRHDQIAAIIHQKLAFKFKLISEKTMYYKYAPQTVLDSTDYKLYWDRTILT

SEQ ID NO: 23621 - protein, 825 aa, Lymantria dispar
MTHNDSRPRATSTSQTTSQNNRVNISAPNANDLRKFWARVWENPVHHDDNANWLQIEQTRYLNLEPMNFQGIPVEVFHDVLKNLQNWKAPGSDNIHNFWYKKFTYIHPVIYKYINKFIEYPHTLPDYIATGTTFMIPKDANRLSDPAKYRPITCLQTIYKIITSCLSRIILGYIDKNNMLAEQQKGCRKYSQGCKEQLTIDSVLLKQTLKKKSDIYTMYIDYKKAFDSVPHSWLIKTLEIHCIHPQIISFLKNTMTKWTTRLRLTQNTNTIITEPIHVQRGIFQGDALSPLWFCLALNPLSHMLNSLNKGYNLPYKENNTEIRTEFSNYKLNHLLYMDDIKLYGSTQQELQDLVKVTENFSQDICMEFGIDKCKTNSIKNGQRYQHQYHMQTGSLIEALSEGEVYKYLGYNQALEIAHKDVKDSLTKDFKHRLNTILKNYLNSKNTSKAVNTFAIPILTYSFGILNWRKNELKSLQRTINTTMTQYRKHHPRSCIQRMTLTRKDGGRGLIDILNLHNKQITNLRSYFHRKALTSSLHKAIVFNDNKITPLNLTDKVQQRNEIQINNQIKLNEWTQKALHGRHIHDLNQPNVDKIASNEWLKRGELFPETEGFMLAIQDQIIETKNYRKYIMKLGNSSDDSCRKCKSSAETIQHVTGACRAIVQTDYKHRHDQVAAIIHQTLALKYKLISEKVAYYKYTPQTVLDTAEYKLYWDRTILTDKTVHCNRPDITLHDKKQEIVYLIDIAIPNTHNLSTSHTEKITKYTDLAIELKTQWKVKAVKTIPIILSTTGVIPYTLHTSLKLLDIHPLTYINLQKAVIFKHMQNC

SEQ ID NO: 23622 - protein, 1288 aa, Lymantria dispar
MESRNEQFILRTYLQLTLMETDTNGYLPPLHIKFIERFPDMNTISRQRVGDQRRAIINKKLLPQATIKHIYNEVRKEIHSMKNDIYNNSQTDTPTHNFSHHNSMQSKNQTNQRIRWTAEHNETIIRNYYKITQLESNISGYRGPLHETFITTFPHLNHITEQRIADQRRLIIRNKYINEERLQAIRDEVASESHYNNNREYINLVPTQIEHNDTQNTYFNNIETRVPTNNAQESPILHASQEPTNIERFYTEAYAYFVNIDPTLRCYIPKQKSSRKLAIIIQYINHNILPKHVNDDTEFSTLQTVLYCAAWTAAKCNGSNIEISPGVESNNNNKKIKPKWQTRLENKISVLRAQIGRLTHYIKGNRSLKLLKHITLIQKQYKIHATHETPNTHLYEFLDTLKQKLTSVSNRLRRYKTSTLRQTQNKQFVSNEKQFYRTLKSATLNPYDMTHNDSRPRATSTSQTTSQNNRVNISAPNANDLRKFWARVWENPVHHDDNANWLQIEQTRYLNLEPMNFQGIPVEVFHDVLKNLQNWKAPGSDNIHNFWYKKFTYIHPVIYKYINKFIEYPHTLPDYIATGTTFMIPKDANRLSDPAKYRPITCLQTIYKIITSCLSRIILGYIDKNNMLAEQQKGCRKYSQGYKEQLTIDSVLLKQTLKKKSDIYTMYTDYKKAFDSVPHSWLIKTLEIHCIHPQIISFLKNTMTKWTTRLRLTQNTNTIITEPIHVQRGIFQGDALSPLWFCLALNPLSHMLNSLNKGYNLPYKENNTEIRTEFSNYKLNHLLYMDDIKLYGSTQQELQDLVKVTENFSQDICMEFGIDKCKTNSIKNGQRYQHQYHMQTGSLIEALSEGEVYKYLGYNQALEIAHKDVKDSLTKDFKHRLNTILKNYLNSKNTSKAINTFAIPILTYSFGILNWRKNELKSLQRTINTTMTQYRKHHPRSCIQRMTLTRKDGGRGLIDILNLHNKQITNLRSYFHRKALTSSLHKAIVFNDNKITPLNLTDKVQQRNEIQINNQIKLNELTQKALHGRHIHDLNQPNVDKIASNEWLKRGELFPETEGFMLAIQDQIIETKNYRKYIMKLGNSSDDSCRKCKSSAETIQHVTGACRAIVQTDYKHRHDQVAAIIHQTLALKYKLISEKVAYYKYTPQTVLDTAEYKLYWDRTILTDKTVHCNRPDITLHDKKQEIVYLIDIAIPNTHNLSTSHTEKITKYTDLAIELKTQWKVKAVKTIPIILSTTGVIPYTLHTSLKLLDIHPLTYKNLQKAVILNTCRIVRKFLSIDAPTTIVLG

SEQ ID NO: 23623 - protein, 1412 aa, Eracon sarahburnsae
MRLRSGFSLPQAGTGAIRNGESRPGHYSSGSPTYSGGDTVSQTSAQFSAAAEHNDSTSVESLPSIPSTNPFSHSPNHSTATNSSMLAEDVVQDAVPSANLASTTAGLTKRRKWSKEMNEFILRTYLQLTFMETDKNCYLLPLHTKFIERFPEMHTISRQRIGDQRRAIINKKLLTQNNIDRIYKEVQEELYHSQINSHTQHAQNISQLTQPVQSTSSNETGHRMRWTTAQNETIIRAYYKITQLETNITGYRSQLHKAFINTYPHLNHITEQRVADQRRLIIHNRYISSERLQTIKDEITSELHIQQNIDSQTTSSTDITVSPPVESILEQSGTVVNIIDPEIFTNIFDQPTNTQDIASHLDQEKFKEIDQNFKQAYNYFKDVDPTKRTYIPKQNSSRKLAIIVKYINDNILPNYITATTEFIYLQTVVYCGAWAAAKSNGARISIPPKEKTIKSKKRKPKWQIRLEHRVEELRAQIGRLIQYIQGNRSINVVKHVNYILIKYKIHATHENPNTHLSEFLDTLKQKLFIYSNRLKRYKVCTLRKTQNTMFTVNEKQFYRGLRESFVHPLTSTPNEHSTQTPVSSQTIHNSIHNFNHTTPPAEELRRFWSAIWGNSINHNKEANWILEERNRYGNIEPMDFQCIPAEVFRDVIKKLKNWKAPGSDNIHNYWYKKFTYTHPYIYNHLNKFIEEPHTLPDYITVGTTYMLPKDLNNSSNPTNYRPITCLQTIYKILTSCLTQVIYKHIDNNNILAEQQKGCRKYSQGCKEQLTIDSVVLKQTQKYKSDLYSMYIDYKKAFDSVPHSWLLEILDIYHIHPQIILFLQNAMARWTTRLKLTTDTDTIVTEPIKIQRGIFQGDALSPLWFCLSLNPLSNILNSSNAGYNLSYKENNNGILTNCFNFKLNHLLYMDDIKLYSSTEQELQQLTEITENFSRDICMNFGIDKCKISSIQAGEIYKHHYITKTGEQIGPLDETEAYKYLGYNQSQQILHKQTKEILTKHFKSRLNTLLRCHLYSKNTFKAINTYAIPILTYSFGIINWSKTQLKALQRTIHTTLTQSRKHHPRSCIQRMTLPRHDGGRGLIDIINLHNKQITNLRNFFYSKAQTSHLHKSIVQNDTKLTPLNLSDQSQQTNEIQTDRQTKVNEWARKSLHGRHLHELNQPHVDKKASNEWLKRGELFPETEGFMIAIQDQIIETRNYKKHIIKQPNASDDSCRKCRGCPETIQHITGACRAIAQTDYKHRHDQVAAIIHQNIAFKYKLLAEKIAYYKYTPPAVLDTPTYKLYWDRTILTDKTVHYNRPDITLHDKKNKIVYLIDIAIPNTHNLASTYTDKITKYTDLSIEIKAQWKVDKVITVPIVLSTTGIIPQTLHRSLKLLNIHSQTYITLQKAAILNTCRIVRKFLSIDTTTSAVMLD

SEQ ID NO: 23624 - protein, 1183 aa, Lymantria dispar
MKNDIYNNSQTDAPTHNFSHHNSMQSKNQTNHRIRCTAEHNETIIRNYYKITQLESNISGYRGPLHETFITTFPHLNHITEQRIADQRRLIIRNKYINEERLQAIRDEVASESHYNNNREYINLVPTQIEHNDTQNTYFNNIETRVPTNNAQESPILHASQEPTNIERFYTEAYAYFVNIDPTLRCYIPKQKSSRKLAIIIQYINHNILPKHVNDDTEFSTLQTVLYCAAWTAAKCNGSNIEISPGVESNNNNKKIKPKWQTRLENKISVLRAQIGRLTHYIKGNRSLKLLKHITLIQKQYKIHATHETPNTHLYEFLDTLKQKLTSVSNRLRRYKTSTLRQTQNKQFVSNEKQFYRTLKSATLNPYDMTHNDSRPRATSTSQTTSQNNRVNISAPNANDLRKFWARVWENPVHHDDNANWLQIEQTRYVNLEPMNFQGIPVEVFHDVLKNLQNWKAPGSDNIHNFWYKKFTYIHPVIYKYINKFIEYPHTLPDYIATGTTFMIPKDANRLSDPAKYRPITCLQTIYKIITSCLSRIILGYIDKNNMLAEQQKGCRKYSQGCKEQLTIDSVLLKQTLKKKSDIYTMYIDYKKAFDSVPHSWLIKTLEIHCIHPQIISFLKNTMTKWTTRLRLTQNTNTIITEPIHVQRGIFQGDALSPLWFCLALNPLSHMLNSLNKGYNLPYKENNTEIRTEFSNYKLNHLLYMDDIKLYGSTQQELQDLVKVTENFSQDICMEFGIDKCKTNSIKNGQRYQHQYHMQTGSLIEALSEGEVYKYLGYNQALEIAHKDVKDSLTKDFKHRLNTILKNYLNSKNTSKAINTFAIPILTYSFGILNWRKNELKSLQRTINTTMTQYRKHHPRSCIQRMTLTRKDGGRGLIDILNLHNKQITNLRSYFHRKALTSSLHKAIVFNDNKITPLNLTDKVQQRNEIQINNQIKLNEWTQKALHGRHIHDLNQPNVDKIASNEWLKRGELFPETEGFMLAIQDQIIETKNYRKYIMKLGNSSDDSCRKCKSSAETIQHVTGACRAIVQTDYKHRHDQVAAIIHQTLALKYKLISEKVAYYKYTPQTVLDTAEYKLYWDRTILTDKTVHCNRPDITLHDKKQEIVYLIDIAIPNTHNLSTSHTEKITKYTDLAIELKTQWKVKAVKTIPIILSTTGVIPYTLHTSLKLLDIHPLTYWVCRK

SEQ ID NO: 23625 - protein, 1410 aa, Pyrgus malvae
MRLRSGVTLPQAGTGAKCNGESRPGPSGSGSPTYSGEDTVSQTSAQFNAVADVNDSTSVESVSSIPSTNPYSPTSTHSTKTINSMPTEAVVQDAVPSVNLASTAAGLTTRRKWSTEMNEFILRTYLQLTSMETDINGYLPPLHTKFIEKFPEMHMINRQRIGDQRRAIINKKLLSQNNINRIYKEVREELASFHKNTSAVHSYDNLTYSSLSRHFQNFSQDTLTLQRSTSSNETSLRMRWTTEKNETIIRAYYKITHLETNLTGYRSQLHKAFITAYPHLDHLTEQRIADQRRLIIHNKYISFERLQVIKDEIAHEVRVQQNTGLQTSNSTHTLVRPSELTFEQNNILDSNNSQKITNSSETINVKNTSHFDEEKYREVEQNFQQAYTYFKNTDPTQRSYIPKQNSSKKLAVIVNYINKNILPKHINHSIDFIDLQTVIYCGAWAAAKTNGARIGIPPKEVVKTFKKPKWQQRLERRVEELRAQIGRLMQYIQGNRSTKLIRHIDYIKIKYKIHATHETPNIHLSEFLDTLKQKLVTYCNRLKRYKSCTLRKTQNKMFAVNEKQFYRRLRSPIQTSNTLDSPQPIHSPTYDVDHNTPSSEDLRKFWGEIWENPIHHNNESEWIYNEKNRYSNIEPMDFQCIPLEVFHGVIRKLKNWKTPGSDNIHNFWYKKFTYTHQFIYNHLNKFMEHPHTLPAYVTVGTTFMLPKDTNDTSNPAKYRPITCLQTIYKILTSCITQILYNHIDKNNILAEEQKGCRKYSQGCKEQLTIDAVVLKQTQKQKSDLFTMYIDYRKAFDSVPHSWLLEVLNIYKIHPQITSFLQNTMARWTTRLKLTTDTNTVITEPIKIQRGIFQGDALSPLWFCLALNPLSNMLNLSEAGYNLDYKEKNTDPSAASSIHKLTHLLYMDDLKLYSSTEKELEHLAQITEHFSDDICMNFGIDKCRINSIKAGEIYKHHHLTHTGEEISSLDDTEAYKYLGYNQSKQILHKDTKDTLTKHFKSRLNALLRCHLYAKNTFKAINTYAIPILTYSFGIINWNKTQLKSLQRSIHTSLTKSRKHHPRSCVQRMTLPRNDGGRGLIDIVNLHNKQIANLRSYFHAKAETSLLHKAIVQSDKKLTPLNLSDQTQQINEKQIDKQTKLDEWARKALHGRHLHDLNQPYVDKIASNEWLKRGDLFPETEGFIIAIQDQIIETKNYTKHIIKQPNASDDSCRKCKGCPETIQHITGACRAIAQTDYKHRHDQVAAIIHQNLAYKYKLLLEKTAYYKYAPNAVLDTKDYKLYWDRTILTDKTIHYNRPDITLHDKKNKIVYLIDIAIPNTHNLSSTYSNKITKYTDLAIEIKTQWKVEKVITVPIVLSTTGVIPQTLHTSLKLLNIHSHTYVTLQKATILNTCRIVRKFLSMDTTTPTFMLG

SEQ ID NO: 23626 - protein, 901 aa, Telemiades fides
MEKRVKFIKKKYKIHATYEDPNIHLSEFLDTLKQKLTTINNRLKRYRTCTLRKTQNKLFTSNEKQFYRGLNTDISHNHQNTSHTNSLPPPADELRSFWASIWENSVHHNEAANWIFDEQNKYSTSEPMVFQRVPADLFHDVMRKLHNWKAPGSDNMHNFWYKKFTYVHPFLHKFINNFIEMPDTLPEYMTEGITYKLPKDNSNISNPAKYRPITCLQTIYKIITSCLTQLIYNYIDNNKILAEQQKGCRRYSQGCKEQLIIDSIVLNQARKQKSNLYCMYIDYKKAFDSVPHSWLLQILKMYHIHPLIISFLQNVMAKWSTKLRVNTDTNTVLTEPIKIKRGIFQGDALSPLWFCLALNPLSNMLNSSNVGYDLEYGDNYTDLLTDCSTYKLNHLLYMDDIKLYSNTKEELQELAQITEIFSKDICMEFGIDKCRTNSINSGQKYELEYQMQTGKLIQALHQNEVYKYLGFNQTQQILHKITKESLIKQFKHRLNTIFRSYLYSKNIFKAVNTYAIPILTYSFGIIRWNKSELKSLQRTINTTMTQNRKHHPRSCVQRMTLPRHDGGRGLIDILNLHNKQISNLRTYFHNKTQTSSLHSAVVKNDKKLTPLNLHDNTQQKNETQTDRQTKLDEWMRKALHGRHLHDLNQPNVDKKASNEWLRRGELFPETEGFMVAIQDQIIETNNYKKYIMKVTNASDDSCRKCKSSPETIQHITGACRSIVQTDYKHRHNQIAAIIHQKLAFKYKLISEKTAYYKYIPQTVLDSTDYKLYWDRTILTDKTVHNNRPDITLHDKKNKIVYLIDIAVPNTHNLSSTHTEKITKYTDLAIEIKTQWKVEKVKTVPIVVSTTGVIPKTLHTSLKLLNIENQTYITLQKAAILNTCRIVRKFLSMDTSSAFVLG

SEQ ID NO: 23627 - protein, 1419 aa, Timochares trifasciata
MRLRSGKKLPQASTEANRDGESCPEPTSSGRPTYSGGDTVSQTSAQNITVAEKNHETYSVDSYPSVPSTHSYSQSPTNSSSTTISMMTRDVVQVAEPVENLAPIIGGPQKRKKWSNVMNEFILRTYLQLTLMETDTNGYLPPLYTKFLERFPEMNLISRQRIGDQRRAIINKKLLPQTDIDRIYKEVQKEINNTQQNTYTPHLLITSSKNKCTPQTHTHPQRDIQNVSNNVNSQRMRWTKEQNETIMRAYYKTTLLETNVSGYRGQLHKEFITAYPNLNHLTEQRISDQRRLIIRNRYLSEDRLRAIKDEIAKELSLEKENNNSKMELTYHNTNHSHPYPPTVHALGGEINVVNIESNSIISTDIVIDSLNTLHIDNHKRAIIKQHFETAHNYFKNTEPTQRSYIPKQKSSFKLAAIVKYINNVILPDYIDDSTEFITMQTILYCGAWAAAKSNGAKLEIPKGTQENYKHNVKKPKWQVRLEHKIDELRAQIGRLTHYINGNRSFKLEKHINYVKRRYKIHTTYENLNSQLQEFLDTLKQKLTIFSNRLKRYKACTLRKKQNKIFSNNEKQFYRGLKTSITNFVTKTHNIQNIDPSQTSNSSQNNTNERNTPPAADKLRSFWANIWEVPVQHNKEANWILNEEYKYSTSKAMDFQCIPAEEFHEVIKKLHNWKAPGSDNIQNFWYKKFTYAHPFIYKYINKFIENPHTLPKYLTVGITYMMPKDSNNLSNPAKYRPITCLQSFYKIMTSCLTQVIYKHIDKNEILAEQQKGCRKWSQGCKEQLLIDSLVLKQTQKKKSDLYSMYIDYKKAFDSVPHSWLLQILEIYRIHPTIITFLKNLMDNWTTRLRLTTPTDTIVTKPIKIKRGIFQGDALSPLWFCLALNPLSNMLNLTNTGYNFDSKEHETDLTLTDNAPKLNHLLYMDDIKLYGSTEEELQTLAHITENFSRDINMEFGIDKCKINSIRTGENYMHQHHLQTGEIVEALKENEMYKYLGYNQGQNILHADIKDSLKKLFKLRLNLILKSYLNSKHTFKAINTYAIPILTYSFGLINWNKTELKTLQRTINTTLTQYRKHHPRSSLQRMTLPRNDGGRGLIDIVNLHNKQITNLRTYFHKKAQASTLHKTVVQNDKRLTPLNLYDRTKQKNEVQTDRQTKTREWTKKALHGRHLLDLNQPIVDRNASNEWLKRGDLFPETEGFMAAIQDQVIETKNYKKYIMKLPNSAEDSCRKCKGPSETIQHITGACRTLAQTDYKHRHDQVAAIIHQNLAFKYRLILEKTAYYKYTPHKVLDTADYKLYWDRTILTDKTVHFNRPDITLHDKKNKTVYLIDIAIPNTHNLTSTYSDKITKYTELALEVKAQWKVDKVKTIPIVISSTGVIPKTLHSSLQQLNMHPQTYITIQKATILNTCRIVRKFLCFDTT

SEQ ID NO: 23628 - protein, 1400 aa, Eantis tosta
MRLRSGYKLPQAGTGAYSNGESRPGQLSSGSPTYSGGDTVSQTSAQHSTVAEQSHDSTSDISFPSIPSTNPYSRSPTHSTSTVNSMLTEDVVQEAYPVENLASTTASFKARRKWSKTMNEFILRTYLQLTLMETDISGYLPILHTKFIEKFPEMHMISRQRIGDQRRAIINKKLLTQDNIDRIYREIREEINTKGTNIQKHNTLLTVTQANVSASHINNLPYHTETQFQTTYSNKTNQRIRWTTNHNVTIMRSYYKITLLESNLSAYRGQLHKEFITEYPHLNYITEQRVADQRRLIIRNNYLSEEKLQELKEEVAAELHTHKHNNDTQNQNNTNTFNLEAGLINEQENNFTNSIETEIFTDITESSSNSKKSDLDHQKAAEINQNFSSAYDYFKNIEPNHRSYIPKQKTSVKLSIIINYINKHILPKYIDSDTEFIKLQTVLYCGAWAAAKSNGSKIEIPPKIEPFKNYNKRKPKWQIRLENRVLKLRAHIGQLTQYIKGNKSNKIEKQIQYIKRRYKLHATHENQNTSLSEFLDTLKQKLSSFSNRLKRYKTCTLRKTQNKMFATNEKQFYRGLRSGSSQFSSNNTSNSSLIPPADELRNFWAGIWEKSVQHNNADWMLDEEKRFSNCEPMIFQCIPGDVFHSVIQKLHNWKAPGSDNIQNFWYKKFTFAHPFIYKYINKFIEMPHTLPDYITEGITYMLPKDPNCLSNPAKFRPITCLQTFYKIMTSCLTQIIYNYIDDNKILAEQQKGCRKYSQGCKEQITIDSVVLRQATKQKSDLFSMYVDYKKAFDSVPHSWLLHILKMYNIHPHIINFLQTATTKWTTRLRLNTGKNIVITEPIKIQRGIFQGDALSPLWFCLALNPLSNLLNSTNTGYNLKYNENETNLQTDHSAYTLNHLLYMDDIKLYSSTEDGLQKLAEVTEKFSSDICMEFGIDKCKINSMRLGKSYAHQYMMESGELIESLNEHEIYKYLGYNQTQQILQKETKHSLIKQFKHRLNTILRSHLYSKNIFKAINTYAIPILTYSFGIITWNKSKLKSLQRIVNTTLTKHRKHHPRSCIQRMTLPRSDGGRGLIDILNLHNKQITNLRTYFHDKKQNSLLHNAITSNDKKLTPLNLFEKEPQRNEIQIDRQTKLKEWTRKALHGRHLHDLNQPNVDKKASNEWLRRGELYPETEGFILAIQDQIIETKNYLKHILKLPNASDDSCRKCKGSSETIQHITGACKAIAQTDYKHRHDQVAAIIHQNIALMYNLILEKTAYYKYTPQAVIDTSDYKLYWDRTILTDKTVHYNRPDITLHDKKRKIVYLIDIAIPNTHNLSSTFTDKNTKYTDLAIEIKSQWKVEKVKTVPILISTTGVIPKTLHSSLKLLNLHSLSYLTLQKAAILNTCRIVRKFLSTDIN

SEQ ID NO: 23629 - protein, 1402 aa, Pythonides amaryllis
MRLRSGFVLPQAGTGANRNGESRPEHLSSGCPTYSGGDTVSQTSAQSSTAADHASMKSISSGTIFNPHSSSISTTTISSMLAEDVVQETLSVTKLAPTTVSLKTRRHWSKEMNEFILRTYLQLTSMETDVNGYLPPLYAKFIERFPEMQNISRQRLGDQRRAIVNKKLLTQENIDRIYREMQESTQLNTPTPNTIITASQTDKPTAHPQTGQPHVSNTSGNTSQRMRWSNEYNETIIRAYYKITLLEKNISAYRSELHKVFITTHPHLEHISEQRIADQRRLIIRNRYLSNERLQVIKAEVAKELEENSKDTYTANNPFPNNDGTNILHEISTPETNTQTQQQQSTDIDQNFQIAYTYFKNTDPTTRSYIPRQKSSKKLAFIVNYMNNNILPKYIDINTDFTTLQTILYCGAWAVAKSNGAKLDIPPKTIETNRKYNKNKPKWQKRLERRIDNLRAQIGRLTQYIKGNRSTKLLIHVNYIQKRYKIHAKHEDSNAHLSDFLDTLKQKLNIFSNRLKRYKTCTMRKTQNKFFTTNEKQFYRSLKIPIISRYPHDTQTSQPPTTSHSTDSSITSHTEQHTVQKNSRPSADELRDFWATIWENPAQHNNTATWIRNEEDSHSNTEPMNFQCIPAEIFHGVIKKLHNWKAPGSDNIHNYWYKKFNCLHPLILMHINKFINTPHSVPNYITLGITHMLPKDPQNTSNPAKYRPITCLQTIYKIVTSCLTELIFKHVDSHNILAEQQKGCRKFSQGCKEQLTIDSIVLKQTQKRKSDLYSMYIDYKKAFDSVPHSWLLQILEIYRIHPQIISFLQILMTKWTTRLKLSTDTTTIITEPIKIQRGIFQGDALSPLWFCLALNPLSNLLNSSKIGYRLNYNEINLNGQTDILTDGSFYKLNHLLYMDDIKLYASTEEELLHLTQVTEKFSTDICMDFGLDKCKINSVKAGQIYKHQYQTQTGDLIYSLDENEVYKYLGYNQAQQVQHKVIKDTLINQFRRRLHTVLQSHLYSKNMIKAINTYTIPILTYSFGIINWNTTELKTLQRIINTTLTQNRKHHPRSCVQRMTLPRTDGGRGIIDIRNLHNKQITNLRTYFHIKSQTSELHNAIVHNDKNLTPLNLTEKTHQRSEFNVSRQTKLTEWSQKSLHGRHLHDLNLPHVDKTASNEWLKRGELFPETEGFMVAIQDQIIETNNYKKYIMKLPNSFNDTCRKCKGSSETIQHITGACRAIAQTDYKHRHDQVAAIIHQHLAFKYKLVTEKVPYYKYTPQKVLNTTHHKLYWDRTILTDKTIHFNRPDITLHDKTNKIVYLIDIAIPNTHNLITTHTEKITKYTDLSIELKSQWKVEKVKTIPIVISTTGVIPDTLHTSLNTLNIHPHTYITLQKATILNTCRIVRKFLSLDSTSPASMLG

SEQ ID NO: 23630 - protein, 1312 aa, Autographa gamma
MLSEDVVQETESVAILAPTTSSLNSRKKWSKQMNEFILRTYLRLTLMETDTNGYLPPLHTKFLEKFPEMQNVSRQRVGDQRRAIVNKKLLPQSDIDIIYREVNEEMNRNRDNTLTSNLETGATAHTLSLQIQKTTVSSNQVGQRLRWSKDHNEAIMRAYYRITQLEANTSAYRGPLHQAFVNTFPALNYISEQRVADQRRLIIKNRYISEERLQAIKDEVASEIPLQSNSDALDRIGIVSTQAVPDAELENNWFNSLDFGLPTNVESSINNASENTELQLDQNLTEIDQTFQECYNYFKNTDPTQRSYIPKQKPSKRLGAIVNYINCNILPKHIFPGTEFITLQTVLYCSAWTAAKVNGAKIQIPPRLEASNIYKTNKPKWQIRLELRIGELRCQIGRLTQYIRGNHNINLVKHVNYIKYKYRVHATHENHNTQLTEFLDTLKQKLTALSNRLKRYKTCTLRKNQNKQFTSNEKQFYRGLRTTCNNSPFSTHVESSTPATPTCRNPRTSSDADELRGFWAGIWENQVQHTKEADWIQDEYNRHLDAEPMDFQCIPVEIFRDVIKKLHNWKAPGSDNIHNFWYKKFTYLHPFIHNNINKFIEQPDTLPCYVTVGTTYMLPKDLSSLSDPAKYRPITCLQTIYKIITSCLTHMIYEHIDRNSLLAEQQKGCRKYSQGCKEQLTIDSVILRHTQLNKSDLFSMYIDYQKAFDSVPHTWLLQVLEIYRINPIIISFLQNTMTRWVTRLSLTTDSCTVLTEPIKVQRGIFQGDALSPLWFCLSLNPLSNMLNSLNLGYQLKYKADEDALDSQCLPYKLNHLLYMDDIKLYGSTEVELLRMAEIAENFSRDICMNFGIDKCKINSMRGGQQYDHQYCMQNGEIIKPLAEAEVYKYLGYNQAQQIQHKTIKASLIKQFRLRLNIILRSHLYSKNTFKAVNTFAIPVLTYSFGIINWNKTELKSLQRIIHTTMTKNRKHHPRSCIQRMMMPRTRGGRGLIDILNLHNSQIKNLRSYFHTKHNISLLHKAIVQNDKKLTPLNLLDRTHQKNEVQTDMQTKLDEWARKTLHGRHLHDLNQPTVDKTASNEWIRRGEMFPETEGFMLAIQDQVIETNNYKKHIMKLPSLINDTCRKCKGSSETIQHITGACRVIVQTDYKHRHDQVAAIIHQNLAFKYILIKEKVAYYKYTPQVVIDNADYKLYWDRTILTDKTVHYNRPDITLHDKKNETVYLIDIAIPNTHNLSSTHTEKLTKYTDLAIELKNQWKVKVSYRIVLSSTGVIPHTLHTSLKLLDLHSLTYILLQKATILNTCRIVRKFLSTD

SEQ ID NO: 23631 - protein, 1389 aa, Toxidia parvulus
MRLRSGNKLPQAGTGATRDGESRLEPSSSSCPTYSGGDNVSQSSAQIGTVADNQNHHSHSLPSSSIFQSISSSNPYSSSATYSTSTTNSRLQEDVVQETDPVANLASTSTSPQKRRKWSKTMNKFILRTYLQLTLMETDIGGYLPPLHTKFIEKFPEMHTISRQRIGDQRRAIVNRKLLTQTEIDIIYKEVREEINNMQANTCVENVQKLDTLTNEPTQNNNTQSQSFQSPQTGQRMTWTKKHNETIMRAYYKITLLEVNTSAYRIPLHQAFITAFPNLKHITEQRVADQRRLIIHNKYLTEENLQAIKDEVASELLLQSSDHTQTYNNISHQRRSQTINTVSTNEQDSNHNTDFDIIPLEIERRFKTAYNYFKNTDPTHRSYIPKQKSSRRLAAIVNYINLNILPKYIDKDIEFITLQTILYCAAWVSAKSNGAKIEIPPQVKVDYRYKKKKPKWQIRLERRIEELRAQIGRLTQYIKGNRTNVTILKHVASIKKRYKVHSTHENPNTNLSEFLDTLKQKLTTYSNRLKRYKTCTLRKTQNKQFTFNEKHFYRELNTQTTQNGHSTQSPGSSRENTHSFHNNSSPSADELHTFWAAIWSKPVQHNKQAEWIQKEQDRYLSSEPMNFQCIPFEVFRDVIKNLHNWKSPGSDNIHNYWYKKFTHIHPYIFNHINKFIEIPHTLPAYISEGITYMLPKDSNCLANPAKYRPITCLQTIYKIITSCLTRLIYTHIDNNNMLAEQQKGCRKYSQGCKEQLIIDSVLLKQTQRRRSDLYSMYIDYKKAFDSVPHTWLIKILEIYRIHPQVISFLQNTLTSWTTRLRLTTDISTIETQPIKVQRGIFQGDALSPLWFCLALNPLSNLLNSTTGGFELDYKNDTDLQTDYTTHKLNHLLYMDDIKLYGSTEEHLHELAHITEKFSQDICMEFGIDKCKINSIKAGQHFEHQYHLENGEIVEALSESEVYKYLGYSQAHQILHTDIKTSLTKQFRHRLNSILRSQLNSKNTIKAINTYAIPILTYSFGVIRWNQTELKSLQRIINTTMTRHRKHHPRSAVQRMTLPRNDGGRGLIDITNLHNRQITNLRTYFHNKALTSLLHSAIVHNDQKLTPLNLNDKTKQRNEMVTDIHTKFNEWIRKTLHGRHLQDLNHPDVDKAASNEWLRRGEMFPETEGFMLAIQDQVVETKNYKKHILKLPNSSDDSCRKCKGSPETIQHITSACRAIAQTDYKHRHDQVAAIIHQQLAFKYRLIQEKTAYYKYTPQTVLDTTDYKLYWDRTILTDKTLHYNRPDITLHDKKNQVVYLIDITIPNTHNLSSSYTEKIAKYTDLAIELKTQWKVKTVKTVPIIISSTGIIPRTLHTSLKLLNIQSYTYILLQKAVLLNTSRIVRKFLSSE

SEQ ID NO: 23632 - protein, 1394 aa, Anisynta dominula
MQLRSGNKLPQAGTGATRDGESRLEPSSSSCPTYSGGDNVSQSSAQVETVADNHSISSSSIFSSVSSINPYSSLPTYSTSTTNSRLLEDVVQETDPVVNLASTSTSPKKRRKWSKTMNEFILRTYLQLTLMETDIRGYLPPLHTKFIEKFPERHMISRQRVGDQRRAIINRKLLTQIEIDRIYKEVREEINNMQPNTHLENVHKPNSLNNEPTQNNNLSYNSNTQSHLFSNSQVGQRMSWTKEHNETIMRAYYKLTLLEANTSAYRVPLHQAFITAFPNFKHITEQRVADQRRLIIHNRYLTEENLQAIKDEVASELLLQNSNHAHTFNDITHQLPFQTNHIPSATEQNNHNTDFDIHAHIQELEIERVFKTAYNYFKNTDPTHRSYIPKQKSSRRLAAIVNYINLNILPKYIDKDTEFSTLQTILYCAAWASAKSNGAKLEISPQVKVNCRHKRNKPKWQIRLERRIEELRAQIGRLTQYIKGNRTNVTILKHVAYIKTQYKIHSTHENPNTNLSEFLDTLKQKLTTYSNRLKRYKTCTLRKTQNKQFTFNEKQFYRELSTQTTQNDHNTQSPGTSQENTNYNIRNNSFPSADELHKFWATIWEKPVQHNKEAEWIQREQDKYLTSEPMNFQCIPLEVFHDVIKKLHNWKSPGSDNIHNYWYKKFTYLHPHIFNHVNKFIEMPHTLPDYISEGITYMLPKDPNCLSNPAKYRPITCLQTIYKIITSCLTHLIYTHIDNNNILAEQQKGCRKYSQGCKEQLIIDSILLKQTQLRRSDLYSMYIDYKKAFDSVPHTWLLQILEIYRIHPQIITFLQNTMTSWTTKIKLTTDINTLETQPIKVQRGIFQGDALSPLWFCLALNPLSNLLNSTKAGFELDYKNDTNLMTDYNPHKLNHLLYMDDIKLYGSNEEHLHELAHITEKFSQDICMEFGIDKCKINSIRAGQHYEHQYHLQNGEIVEALSESEVYKYLGYNQAKHILHTDIKTSLTKQFRHRLNSILRSQLNSKNTIKAINTYAIPILTYSFGVISWTQTELKSLQRVINTTMTRHRKHHPRSSVQRLTLPRNDGGRGLIDITNLHNRQITNLRTYFHNKALTSLLHNAIVQNDKKLTPLNLTDKSKQRNETQTDIHTKFNAWIRKSLHGRHLHDLNQPYVDKTASNEWLKRGEVFPETEGFMLAIQDQVIETKNYKKHIFKLPNSSDDSCRKCKGSPETIQHITSACRAIAQTDYKHRHDQVAAIIHQNLALKYKLIEEKTAYYKYTPQTVLDTTDYKLYWDRTILTDKTLHYNRPDITLHDKKNQTVYLIDITIPNTHNLSSSHTEKITKYTDLAIELKTQWKVKTVKTVPIIISSTGIIPHTLHTSLKLLKINSFTYILLQKAVILNTCRIVRKFLSSD

SEQ ID NO: 23633 - protein, 921 aa, Piruna aea
MKGNRTSETILKHVRYIQNRYKIHSSYENPNTNLSEFLDTLKQKLTTYSNRLKRYKICTLRKTQNKQFTTNEKHFYRELKTLTTYNDHTTQSSSTNRNTTNTNTRNNNPPHADELHKFWAKIWEGSVEHNKEAEWIRYEQNTYSHSEPMEFQCVPVEIFKDVIQKLHNWKCPGSDNIHNFWYKKFTHIHPHIYKHVNNFINMPQTLPDYITAGTTYMLPKDPNCLSNPAKYRPITCLQTIYKIITSCVTQIIYKHIEKNNILTEQQKGCRKYSQGCKEQLTIDSIVLKQSQKRKSDLYSMYIDYKKAFDSVPHSWLLQILQIYNIHPQVISFLQNTMSKWTTRLRLTTDVNIIETEPIKIQRGIFQGDALSPLWFCLALNPLSNLLNSSSVGYAFDHIDETDSLTDRPPHILNHLLYMDDIKLYGSNEEQLQLLAQITETFSQDICMEFGIDKCKINSIKAGQHYEHQYYMQNGEIVEPLTESEVYKYLGYNQAQQTLHKDIKNSLIKQFRHRLNTILRSQLNSKNTTKAINTYAIPILTYSFGIINWTQTELKSLQRIINTTMTRHRKHHPRSSVQRMTLPRNDGGRGLIDITNLHNRQITNLRSYFHNKALTSLLHSAIVQNDKKLTPLNLVDRTKQKNEIQTNVQTKLAEWIRKTLHGRHLHDLNQPTVDKTASNEWLKRGEMFPETEGFMLAIQDQVIETNNYKKHILKLPNSSNDSCRKCKGSPETIQHITGACRAIVQTDYKHRHDQVAAIIHQNIAFKYKLIPEKIAYYKYTPQTVLDTTDFKLYWDRTILTDKTVHFNRPDITLHDKKNQVVYLIDISIPNTHNLSSSHTEKITKYTDLAIELKAQWKVKTVKTVPIIISSTGVIPHTLHTSLKLLNMHPLTYIILQKAVILNTCRIVRKFLSTDTISAIVLG

SEQ ID NO: 23634 - protein, 1299 aa, Urbanus esmeraldus
MRTEDVVQEADPVENLAPTTASLNTRRKWSNAMNEFILRTYLQLTLMETDIAGYLPPLHTKFIEKFPEMHMISRQRVGDQRRAIINNKLLPQNDIDRIYRETREEINNTQSNTLIHNTNLTHSQTDKSIAYVNDTSKRMRWATEHNITIMRAYYKITLLETNISAYRGPLYKEFITKYPHLKHMTEQRVADQRRLIVHNKYLSEENLQSIKDEVANELLLQKTNNTQASSSKQSTSDLINQQNNTNYNDSEICTNINDTNDSSNVKISYLDQQQIAEIEQNFDAAYNYFKNTIPTQRSYIPKQKASKKLATIVNYINHTLLPKHIDKDTEFINFQTVLYCGAWAAAKSNGSKIAIPPKIETYDIYKRKTPKWQIRLERRVEKLRLEIGQLTQYIKGNRSIKIAKRVELIKTQYKIHATHENPNTHLSEFLDTLKQKLSTISNRLKRYKTCTQRKIQNNTFSNNEKQFYRVLKSNNSHNSPNNSHINNTSPPHVEELRTFWAKIWENSVEHDKMAKWILHEQNTYSKSEPMVFQCIPAEVFDNVIKKLHNWKAPGSDNIHNFWYKKFTFIHPFIYNYINKFIETPHTLPEYITEGVTYMLPKDLNDTSNPAMYRPITCLQTIYKIITSCLTQIIYNYIDNNNILAEQQKGCRKYSRGCKEQLTIDSVVLRQAQKRKSDLYSMYIDYRKAFDSVPHTWLLHILEIYHIHPQIISFLKNTMTKWITRLRLTNNKNKIITEPIKIQRGIFQGDALSPLWFCLALNPLSNTLNSSNTGYDLELQNNPNLLTDCSIYKLNHLLYMDDIKLYGSTEEELQKLAQITENFSKDICMEFGIDKCKINSIRTGKTYQHQYQMQTGELIEALQETEVYKYLGYNQAHQILHKDIKDSLTQQFRCRLNAILKSHLYSKNTIKAINTYAIPILTYSFGLINWNKTQLKTLQRIINTSMTKNRKHHPRSCVQRMTLPRQDGGRGLIDILNLHNKQITNLRTYFHIKAQNSSLHSAVVKNDTKLTPLNLFDKTLQTSETQTDRLTKLHEWNQKALHGRHLHDLNRPNVDKIASNEWLRRGELFPETEGFMIAVQDQIIETKNYKKHIMKLPNASDDSCRKCKGAPETIQHITGACRAIAQTDYKHRHDQIASIIHQSLAFKYKLINEQTAYYKYKPQTVLDSTDYKLYWDRTILTDKTVHYNRPDITLHDKKNKIVYLIDIAIPNTHNLSSTHTEKIAKYTDLAIELKTQWKVERVTTIPIVLSTTGVIPKTLHQSLKSLNISSYTYTILQKAVILNTCRIVRKFLQSDITTSI

SEQ ID NO: 23635 - protein, 1393 aa, Mylon lassia
MRLRSGYILPQAGTGTNRTGESGPGPSSSGCPTYSGGDTVSQSSAQYNTVADFQHDASSIDSFPSIPSSNTFSRSHTPVSSSTTSVMEDVVQETIQVFNHAPTTVNVQTRRKWSTEMNEFILRTYLQLTLMESDTNGYLPPLHTKFIDKFPEMSMISRQRVGDQRRAIVNKKLLTQADIDRIYKEAREDINNAYIPPTLITTTRLIDDSSLQTHTLTQTTFQSQTPENEVANSQRMRWTKEQNETIIRVYYKITQLEADISAYRGQLHKAFIEKYPQLNHITEQRIADQRRLIIHNRYLSEERLQTIKDEVAREIIIQKTTTQSESTREQGHNLESNCYTNNIHNSSSSLKTLFTNEEKCKEIEENFITALNYFKSDNPTQRSYIPKQKSSIRFSAIIKYINTIILPKYINDNTEFSDMQTIIYSGAWAAAKSNGTKMVIPPKITEGNFKKQSRKPTWQIRLERRVEELRAQIGRLTHFIKGDRSSKLEKHVNYIKRKYKIHATHENLNTDLSEFLDTLKQKLTTISNRLRRYKTCTLRKTQNKMFTNNEKQFYRGLKTSNINTSNTRNVENTQPHVTSQNTNSNSIPVKELRTFWADIWETPVVHNKDADWIFNEENKYSHTTPMDFQSIPIDMFHNVIKKLHNWKAPGSDNIHNFWYKRFTYTHAFVYKYINKFIEMPHTIPDYLTTGITYMLPKDPNNLSNPAQYRPITCLQSFYKIITSCLSQVIYKHIDNNTILAEQQKGCRKYSQGCKEQLIIDSVILKQTQKKKSDLYSMYIDYKKAFDSVPHSWLLKILKMYHIHPQIISFLQTLMTKWTTTLRLTDNTNVHDTEPIKILRGIFQGDALSPLWFCLSLNPLSNMLNSSNAGYNLSYLENDTEIQTDHSILKLNHLLYMDDIKLYGATEGELQNLAEVTEKFSKDICMNFGIDKCRVNSIKEGQSYRHEHITQTGETIEPLQENEFYKYLGYNQAQQILHKEIKMSLTNQFKHRLNTILKCHLYSKNTFKAINTYAIPILTYSFGIINWTKTEITSLQRNINTALTRHRKHHPRSCIQRMTLPRSEGGRGLVDITNLHNKQLINLRTYFHSKGQISSLHNAIVQNDIKLTPLNLQDKSKQKYEIQTNRQTKIDEWIRKSLHGRHLLDLNQPNVDKKASNEWLKRGELFPETEGFMAAIQDQVVETRNYRRYIMKLPNTSNDSCRKCKALPETIQHITGACRTIAQTDYKHRHDQVAAIIHQDLAFKYRLISEKTAYYKYTPQTVLDSTDFKLYWDRTILTDKTVHFNRPDITLYDKKNKIVYLIDIAIPNTHNLTSTHTEKISKYTDLAIELKTQWKVEKVNTIPIVISATGVVPETLHMSLKHLKINSHTYIILQKATILNTCRIVRKFLSMDTI

SEQ ID NO: 23636 - protein, 1275 aa, Ebrietas anacreon
MNKFILRTYLQLTLMENDMSGYLPPLHTKFIEKFPEMNSVSRQRVGDQRRAIVNRKLLSQADIDRIRKEVDEEINKSEINTTPPIIATQIDTCSLQTTTNQISNQRMRWTKEQNETIMRVYYKITQLESDLSAYRGQLHEGFLEKYPHLKHITEQRIADQRRLIVHNRYINEERLQTIKDEVARELVRQNNSRTQNCTSTHSRTHVETTIDDMAINAECTFNQDNIHSLTNKSNLHVDEEKCKEIKENFNRALDYFKNIDPTQRIYIPKQKSSAKLSAIIKYINTCILPKNINDTTEFTDMQTVIYCSAWAAAKSNGSKIDIPQMAANVNYKKKIHKPRWQIRLERRVEELRAQIGRLTHFIKGNRSGVLEKHINYIKRKYKLHATYENPNTHLSEFLDTLKQKLTTISSRLRRYKTCTLRKTQNKMFITNEKQFYRGLKISNNTSKTHNVQNTQSFVNTEPNNNCNSPPSNEIRSFWAALWENPAVHNEGADWISNEENKYSHTTPMDFQCIPIEVFHNVIKNLHNWKAPGSDNIHNFWYKRLTYTHTFIYKYINIFIQMPHTMPDYVTTGITYMLPKDPNCIPNPANYRPITCLQSIYKIITSCLSHLIYKHIDSNTILAEQQKGCRKYSQGCKEQLTIDSVILSQTFKRKSDMYSMYIDYKKAFDSVPHSWLLQILKIYRIHPQIISFLQTLMSKWSTRLRLTDNTDVLVIEPIKIKRGIFQGDSLSPLWFCLSLNPLSNMLNSSKAGYSLNYTESDTDLQTDQSTHKLNHLLYMDDIKLYGSTEEELEDLAKLTEIFSKDICMDFGIEKCRVNSIKKGQSYKHEYSTQAGEVVESLQENEVYKYLGYSQTQQILHKDIKISLIEQFKRRLSSILKCYLSSKNTFKAINTYAVPILTYSFGIIHWNKTELTSLQRTVNKMLTLHRKHHPRSCIQRMTLPRSEGGRGLVDITNLHYRQLINLRNYFHTKAQTSSLHNAIVQNDLKLTPLNLSDKLKQKYEIQTNKQTKIDEWTQKVLHGRHLHDLNQPNVDKKASNEWLKRGELYPETEGFMAAIQDQVIETRNYRKHIMKLPNTSDDSCRKCKALPETIQHITGACRTIAQTDYKHRHDQVAAIIHQDLALKHRLISEKTTYYKYTPQTVLDSTDFKLYWDRTILTDKTVHSNRPDITLHDKKNKIVYLIDIAIPNTHNLKSTHTEKITKYADLAMELKTQWKVEKVKTIPIVISATGVVPETLHMSLKHLNINSNIYVTLQKATILNTCRLVRKFLSMDTT

SEQ ID NO: 23637 - protein, 1390 aa, Erynnis brizo
MRLRSGCILPQAGTGANRTGESSPGPSNPGSPTYSGGDTVLQSSAQYDTVADTQSDTVSIESFPSIPSTNSFSRPQTPSSSTTYICSIAEDVVQETVQVTNIAPATAKSHMRRKWSNNMNEFILRTYLQLTLVESDISGYLPPLHTKFIEKYPEMNMISRQRVGDQRRAIVNKKLLPQADIDRIYKEVREEINNTQLSTNTQTPLITTTPMDGSYKQTHTNTKSNEISSQRMRWSKEQNETIMRAYYKITQLESDISAYRGPLHKAFIETFPHLNHISEQRIADQRRLIIHNRYLKEDRLQTIKDEVARELIQQSILRTQDSTRKIYHTRTHTQPEHNEQSYNAESSCNTGITYNSSNTLQLPHMDQERCKEIEENYKKAFNYFKNIDPTQRSYIPKQKSSVKLSAIIKFINTNILPNYINDNTEFTDLQTIIYSSAWAAAKSNGSKIDIPQIIPEGNYKRKTHKPKWQVRLERKVEELRAQIGRLTHFIKGNRSEKLERQVNYIKRKYRVHAKHETPNTHLSDFLDTLKQKLSAYSNRLRRYKTCTHRKTQNKMFMTNEKQFYRGLRTSNNLTAQNNNSCNSPPIHELRNFWAGIWEMPVQHNKDADWIFNEEEKYSYTMPMDFQCIPIDVFHNVIKKLQNWKAPGSDNIHNFWYKRFTYAHSFIYKYINKFIEMPHTIPDYITTGITHMLPKDPTCLSNPAKYRPITCLQSFYKIITSCLSHVIYKHIDNNTILAEQQKGCRKYSQGCKEQLTIDSVILKQTMKRKSDLYSMYIDYKKAFDSVPHSWLLQILKIYHIHPQIISFLQTVMKKWSTKLRLTDNTDVKDTEPIKIQRGIFQGDALSPLWFCLSLNPLSNMLNSSNTGHDLKYADNDKDLRTDLATHKLNHLLYMDDIKLYGSTEEELQNLVNLTEKFSTDICMDFGIDKCRINSVKKGQCYKHHYHTQDGETVEPLQDNEVYKYLGYIQAQQILHKDIKKSLVENFKSRLNTIAKCHLYSKNTFKAINTYAIPILTYSFGIINWNKTELTSLQRIVNTTLTKHRKHHPRSCIQRMTLPRSMGGRGLVDITNLHYKQLTNLRNYFYTKAQTSSLHNAIVQNDIKLTPLNLHDKTNQKYETQTNTQTKMDDWIRKPLHGRHLHDLNQPNVDKKASNEWLKRGELFPETEGFMAAIQDQVIETRNYRKHIMKVPNSSDDSCRKCKAQPETIQHITGACRAIAQTDYKHRHDQVAAIIHQDLAFKYKLISEKTPYYKYTPLPALESEDFKLCWDRTIITDRTVHFNRPDIILHDKKNKIAFLIDIAIPNTHNLISTHTEKITKYTDLAIELKTQWRVEKVKIIPIVISTTGVVPETLHTSLKHLNIHSHTYIILQKATILNTCRIVRKFLSMDIT

SEQ ID NO: 23638 - protein, 1428 aa, Amphipyra berbera
MRLRSRLLPQAGTVANHDGESRPGPSGPGCPTYSGEGTVSQTSAQFRTVVDHHQDSSSVISSTSSSIFPSVPSHDPYSRAPTHSTSTASSMLSEDVVQETESVANLAPTATSLRTRRKWSKIMNEFILRTYLQLTLMETDTSGYLPPLHTKFIEKFPEMHMISRQRVGDQRRAIINKKLLTQSDIDRIYKEIREEINNIQINTQIQSVTTSTSQTDDYSTDIHNFPHHRNTRPHLTNSNQAGQRMRWTKEHNETIMRAYYKITLLEANISAYRGPLHQAFITTFPHLEHISEQRVADQRRLIIHNRYLSEERLQAIKDEVASDLFLQNSINTQTSIIANSIHPTPTQPELTTEQDNFLNSIDSEIHTRINNDTNNTLETSTPHSNLTIEIERTFKEAYDYFKNTDPTQRSYIPKQRSSKKLAIIVNYINNNIIPKHIEVDTEFITMQTVLYCAAWAAAKNNGAKIEILPRVEVSCKYKKNKPKWQRRLESRIEDLRAKIGRLTQYIRGNRSSKIVKHVQYIQNKYKIHATHESPNTHLSEFLDTIKQKLTTFSNRLKRYKTCTLRKAQNKQFAANEKQFYRGLRAPFTNSHTNIHNDHNTQPTPTLQNTTQNNSPPVGELHSFWATIWEDAVQHNKEADWIRNEQDRYLYSEPMDFQCIPVEVFHDVVNKLHNWKAPGSDNIHNFWYKKFTRAHTFIYNYINKFIEQPQLLPQYITAGTTYMLPKDPNNLSNPAKYRPITCLQTFYKILTSCLTQIIYKHIDQNNILAEQQKGCRKYSQGCKEQLSIDSILLNQTLHSKSDLYSMYIDYKKAFDSVPHTWLLQILEIYRIHPQIISFLQTTMTKWTTRLRLTTDTSTVITEPIKVQRGIFQGDALSPLWFCLALNPLSNMLNSSNAGYDLDYKENETDLLTDCSTHKLNHLLYMDDIKLYSTTEEELQRLAQITEKFSQDICMEFGIDKCKINSIKKGQRYEHQYHTQTGELVEALTESDVYKYLGYNQAQQILHKDIKNSLTKQFKHRLNTILRSHLYSKNTFKAVNTYAIPILTYSFGIINWNKTELKSLQRIISTSMTRHRKHHPRSCIQRMTLPRNNGGRGLIDILNLHNKQITNLRNYFYHKTLTSSLHNAIVQNDKKLTPLNLADKTQQRNEVQTDRQTKLNEWTRKALHGRHLHDLNQPTVDKTASNEWLKRGELFPETEGFMLAIQDQVIETKNYKKYIMKLANSSDDSCRKCKGSPETIQHITGACRAIVQTDYKHRHDQVAAIIHQNLAFKHKLISEKTAYYKYTPQTVHDTTDYKLYWDRTILTDKTVHFNRPDITLHDKKNQIVYLVDIAVPNTHNLSSTHAEKLSKYTDLAIEIKTQWKVKAVKTVPIVLSSTGVIPHTLHTSLKIIDIHPLTYIILQKAVILNTCRIVRKFLSMDTTTTALVLG

SEQ ID NO: 23639 - protein, 1385 aa, Astraptes hopfferi
MRLRSGYKLPQAGTGAKRNGESRPEPSNSGRPTYSGGDTVSQTSAQSNTAADHSHNSESVVSFPSVPSTNPYSYSPTSSTTTTSSMRTEDVVQEADPVGNLAPTTASFNTRRKWSKSMNEFILRTYLQLTLMETDITGYLPPLHTKFIEKFPQMHMISRQRVGDQRRAIINKKLLTQNDIDRIYRETQEDINNTQGSTQLHITKRLQIDKSVTHVNDTSQRMRWTMEHNVTIMRAYYKITLLEANISAYRGQLHKEFIAKYPHLKHITEQRVADQRRLIIQNRYLNEEKLQSIKDDIADELLLQKNNNTQTSSDTLLTSDVINQQDNLNYNDPEIFANLNETNDLSHQTPSNVTPHLDQQKIAEIERNFDAAFNYFKNIKPTQRSYIPKQKSSIKLAAIVNYINNSILPKHVNEDIEFINLQAVLYCGAWTAAKSNGSKIAIPPKIETYNIHKTKTPKWQIRLERRVEKLRVEIGQLTQYIRGNNSNKIAKRVEFIKTKYKIHATHENPNTHLSEFLDTLKQKLSTICNRLKRYKMCTLRKIQNSTFSNNEKQFYRGLRLNSSHISHNNTYTNTSPPPSEELRNFWATIWENSVQHDKTAKWILHEQNKYSKSEPMAFQSIPAEVFESVIKDLHNWKAPGSDNIHNFWYKKFTFIHPFLHKYINKFIESPHTLPDYVTEGITYMLPKDPNDISNPAKYRPITCLQTFYKIITSCLTKIIYNHIDNNNILAEQQKGCRKYSQGCKEQLTIDSVVLKQAQKRKSDLYSMYIDYRKAFDSVPHSWLLQILEIYRIHPQIISFLQNTMTKWLTKLRLTNITNTIITEPIKIQRGIFQGDALSPLWFCLALNPLSNMLNSSNTGYDLECIKNNPDIQTDCAIYKLNHLLYMDDIKLYGSTEEELQELAQITEKFSKDIYMEFGIDKCKINSIRTGQSYRHQYQMQNGEVIEALHESEVYKYLGYNQAQQILHKDIKDSLTQQFKCRLNAILRSQLYSKNTIKAINTYAIPTLTYSFGVIKWNKAQLKSLQRIINTSMTKYRKHHPRSCVQRMTLPRNDGGRGLIDILNLHNKQITTLRTYFHNKAQSSSLHNAIVSNDKNLTPLNLFNKTLQRNEIQTDRPTKLQEWNRKALHGRHLHDLNHPNVDKIASNAWLRRGELFPETEGFMIAIQDQIIETKNYKKHIMKLPNASDDSCRKCKGASETIQHITGACRSIAQTDYKHRHDQIAAIIHQSLAFKYKLIPEYTAYYKYTPQTVLDTTEYKLYWDRTILTDKTVHCNRPDLTLHDKKNKIVYLIDIAIPNTHNLSSTHTEKISKYTDLAIELKTQWKVESVKTVPIVLSTTGVIPKTLQQSLRSINLPPYIYITLQKAVVLNTCRIVRKFLQTDITIP

SEQ ID NO: 23640 - protein, 773 aa, Eracon sarahburnsae
MVFQCIPVEVFHNVIKKLHNWKAPGSDNIHNFWYKKFTSVHPFIYNYINKFIKMPHTLPDYVTEGITYMLAKDPNNISNPSKYRPITCLQTIYKIITSCLTQIIYTHLDNNKILAEQQKGCRKYSKGCKEQLTIDAIVLKQTLKQKSDLYSMYIDYKKAFDSVPHSWLIQTLEMYCIHPQIINFLQNTMTKWTTRLRLTTASNNDITEPIKIQRGIFQGDALSPLWFCLALNPLSNILNSSNTGYKFECEDTDLLTDFPSHKINHLLYMDDIKLYGSTEEELRTLTQMTENFSNDIRMEFGIDKCKINSIRLGQNYTHQHHTQTGELIESLDENEVYKYLGYNQARQILHKDTKDSLIKQFRRRLNTILRSHLYSKNIIKAINTYAIPILTYSFGIINWNKTELKYLQRIINTTMTLNRKHHPRSCVQRMTLPRTEGGRGLIDILNLHNKQITNLRNYFHKKAQTSFIHEAIVKSDKKMTPLNLFDKKQQKNETQIDRQTKLNEWTRKTLHGRHLHDLNQPNVDKAASNEWLRRGELFPETEGFMIAIQDQIIETKNDKKHIIKLSCASDDSCRKCKGSPETIQHITGACRAIAQTDYKHRHDQVASIIHQNLALKLNLISETTSYYKYTPQTILDTVDYKLYWDRTILTDKTVHYNRPDITLHDKKNKIVYLIDIAIPNTHNLSSTHSEKITKYTDLAIEIKSQWKVEKVVTVPIILSTTGVIPVTLHTSLKVLNLHCQTYVTLQKATILNTCRIVRKFLSIDTHSPAFVLG

SEQ ID NO: 23641 - protein, 1419 aa, Autographa pulchrina
MRLRSGNKLPQAGTGSISEGESRTKPSGLGCLTYSGGGNVLQSSAQFSTDVEFHHHPHSHDSSAIKISPSSSSLSSSSSLFASIPSTNPYSRSPTHSIVSSMLSEDVVQETDSVAILAPTTSSLNSRKKWSKPMNEFILRTYLQLTLMETDTNGYLPPLHTKFLEKFPEMQNVSRQRVGDQRRAIVNKKLLPQNDIDIIYREVNEEINSIRDNTLTSNLETGATAHTLSLQIQKQTVSSNQVGQRLRWSKDNNEAIMRAYYRITQLEANISAYRGPLHQAFVNTFPTLSYISEQRVADQRRLIIKNRYISEERLQAIKDEVASETPLQSNSVALDRNSIGIVSTQAGPDAELENNWFNSLDFGLSTNVDSSINNASENTELQLDQNSTELDQTFQECYNYFKNTDPTQRSYIPKQKSSKRLATIVNYINCNILPKHIIFPDTEFITLQTVLYCAAWTAAKVNGAKIQIPPRLEASSRFKTKKPKWHIRLELRIGELRCQIGRLTQYIRGNQNIKLVKHVNYIQNKYRVHATHENHNTQLTEFLDTLKQKLTALSNRLKRYKTCTLRKTQNKQFTSNEKQFYRGLKTTCNNSPFSTYFESRTPATPTPRNPRTSPDADELRGFWAGIWENPVHHTKEADWIQDEHNRHLDAEPMDFQCIPVEIFRDVIKKLHNWKAPGSDNIHNFWYKKFTYLHPFIHNNINKFIEQPDTLPCYVTVGTTYMLPKDPSSLSDPAKYRPITCLQTIYKIITSCLTHMIYKHIDRNSLLAEQQKGCRKYSQGCKEQLTIDSVILRHTQLNKSDLFSMYIDYQKAFDSVPHTWLLQVLEIYRINPIIISFLQNTMTRWVTRLSLTTDSSTVMTEPIKVQRGIFQGDALSPLWFCLSLNPLSNMLNSLNLGYQLKYKADEITPATQCLPYKLNHLLYMDDIKLYGSTEVELLRMAEITENFSRDICMNFGIDKCKINSMRGGQQYDHQYCMQNGEIIEPLAEAEVYKYLGYNQAQQMQHKTIKASLIKQFRHRLNIIILRSHLYSKNTFKAVNTFAIPVLTYSFGIINWNKTELKSLQRIIHTTMTKNRKHHPRSCIQRMTMPRTRGGRGLIDILNLHNSQIKNLRTYFHTKSNISLLHKAIVQNDKKLTPLNLLDPTHQKNERQTDMQTKLNEWTRKTLHGRHLHDLNQPTVDKIASNEWIRRGEMFPETEGFMLAIQDQVIETNNYKKHIMKLPSLINDTCRKCKGSSETIQHITGACRVIVQTDYKHRHDQVASIIHQNLAFKFNLIKEKVAYYKYTPQVVIDNADYKLYWDRTILTDKTVHYNRPDITLHDKKNETVYLIDIAIPNTHNLSATHTEKLTKYTDLAIELKNQWKVKAVKTIPIVLSSTGIIPHTLHTSLKLLDLHSLTYILLQKATILNTCRIVRKFLSTD

SEQ ID NO: 23642 - protein, 774 aa, Udranomia kikkawai
MIFQCIPADVFHRVIRNLHNWKAPGSDNIHNFWYKKFTYIHPFIHNFINQFIEMPHTLPDYLTEGITYMLPKDPNNFSNPAKYRPITCLQTIYKIITSCLAQIIYNYIDQNTILAEQQKGCRKHSQGCKEQLTIDSIVLRQTQKQKTDLYSMYIDYKKAFDSVPHSWLHQILEIYNIHPKIISFLQSAMTKWTTRLKLTTDTTQVITEPIKIQRGIFQGDALSPLWFCLALNPLSNMLNSSSVGYDLACKNDTDLLTDCSFSKLNHLLYMDDIKLYATTEEDLQKLAQITESFSNDICMEFGIEKCKINSIRAGQNYEHQFHMQTGELVTALHADEVYKYLGYNQAQQIQHKDTKNILTKQFRHRLNTILKSHLYSKNLFKAINTYAIPILTYSFGIISWSKTELKSLQRIINTSLTQNRKHHPRSCVQRMTLSRQDGGRGLIDIYNLHNKQIFNLRSYFHNKAKNSYLHNQIVKHDKKLTPLNLSDKLQQKNEKQIDRQTKLDEWNRKALHGRHLQNLNQPNVDKTASNEWLRRGELFPETEGFMIAIQDQIIETRNYRKHIMKLPNAADDSCRKCKGSPETIQHITGACRAIAQTDYKHRHDQVAAIIHQDLAYKFKLIPEKTAYYKYTPQTVLDTADYKLYWDRTILTDKTIHFNRPDITLHSKKNKIVYLIDIAIPNTHNLSSTHTEKISKYTDLAIELKTQWKVDKVITVPIILSATGVIPETLHTSLKLLNIHPQTYITLQKAAILNTCRIVRKFLSMDTTTPALVLG

SEQ ID NO: 23643 - protein, 1384 aa, Astraptes enotrus
MRLRSGYKLPQAGTGAKRNGESRPEHSNSGSPTYSGGDTVSQTSAQSNTVAEQHHDTESVVSFPSVPSTNHYSQLPSCSTTTDNSMLTEDVVQEADPVENLAPTTTSLNKRRKWSKAMNDFILRTYLQLTLMETDTSNYLTSLHTKFIEKFPEMHMISRQRVGDQRRAIVNKKLLTQDDIDRIYKEIREEINNTQTDIQMHNSQNVTSQITNKNDIRQRMRWSTEHNITIMRAYYRITLLETNISAYRGQLHKEFISKYPHLKHITEQRVADQRRLILQNKYLNEERLQTIKDEIAKELLLQKNNNTQILSRAPPAPEHINKQDNTNHTDSETLTNLLIINNSPSIKTLHLDEQKITEIKQNFNAAYNYFKNTNPTQRSYIPKQKSSTKLAAIVNYINSYILPKRIDNETDFTTLQTILYCGAWAAAKSNGSKINIPPKLEECHTYNAKKPRWQVRLERRVEKLRAQIGQLTQYIKGNRSTKIEKEVKYIKIKYKIHATYENHNTCLSEFLDTLKQKLTTISNRLKRYKTCTLRKTQNNTFSNNEKQFYRGIKSLSSHNSQNNTHINSSPPSANELRTFWATIWENSVQHNKTANWILQEQNKYINAEPMVFQCIPEEVFYSVIKKLHNWKAPGSDNIHNFWYKKFTYTHPFIFNYINKFIEMPQTLPHYITEGITYMIPKDQNDISNPTKYRPITCLQTIYKIMTSCLTHVIYSHIEENKILAEQQKGCRKYSQGCKEQLTIDSLVLKQTRRHKSDLYSMYIDYKKAFDSVPHTWLLHILEIYNIHPQIIYFLQNAMTKWITRLKLTNGTNTIITKPIQIQRGIFQGDALSPLWFCLALNPLSNMLNSSNTGYDLGIEENCINLLTDYPIYKLNHLLYMDDIKLYGSTEEELQTLAQITEKFSKDICMEFGIDKCKINSIRAGQTYQHQYQMQTGELVEALHENEAYKYLGYNQAQQILHKDIKYNLTKQFRHRLNTILRSHLYSKNIFKAINTYAIPVLTYSFGIINWTKTDLKSLQRIINTTMTQHRKHHPRSCVQRMTLPRHDGGRGLTDILNLHNKQITNLRTYFHNKSQTSSLHNAIVQSDKKLTPLNLFDKTVQKNETQTDRQTKLNEWNRKAMHGRHLHDLNLPNVDKMASNEWLRRGELFPETEGFMIAIQDQIIETKNYRKHIMKLPSASDDSCRKCKGAPETIQHITGACRAIAQTDYKHRHDQIAAIIHQSLAFKYKLISEQTAYYKYTPQTVLDTTDYKLYWDRTILTDKTVHYNRPDITLHDKKNKIVYLIDIAIPNTHNLTSTHTEKITKYTDLAIELRTQWKVDKVKTVPIVLSTTGVIPDTLHSSLTLLNLHPKTYITLQKASILNTCRIVRKFLSMDNTSPALMLG

SEQ ID NO: 23644 - protein, 1417 aa, Ebrietas anacreon
MRLRSGYELPQASTGANRTGESGPEPESSGCPTYSGGDTVSQTSAQNITVADSNHEISSVGSYPSVPSTHSYSQSPTHSSTTTVSMLTSGVVQEAETAENIAPITVGFQKRKKWSNVMNEFILRTYLQLTLMETDINGYLPPLYTKFLERFPEMYMISRQRIGDQRRAIINKKLLPQTDIDRIYKEVQQEINNAQPNTLTQHHSLTSSTDKTTQQAHTLSQSLEIKNFSNNNETSQRMRWTKEQNETIMRSYYKITLLETNISAYRGQLHKEFVTAFPHLDHLTEQRISDQRRLIIRNRYISEDRLRAIKDEIAKELLQEKDSNIHISNHTVLTNPQTVNLHGDDTNLDININSDPLINADIINNSSNTLHLDNHKCTVIKQHFEVAYNYFKNTEPTQRSYIPKQKSSLKLAAIVKCINSDILPNYIDDSTEFITMQTILYCAAWAAAKSNGAKLETPKEGHENYKHKTNKKPKWQIRLERRIEELRAQIGRLTHYINGNRSLKLEKHINYIKRRYKMHATHENPNTQLQEFLDTLKQKLTSFSNRLKRYKACTLRKKQNKLFLNNEKQFYRGLKTPLSNFVTETHNTQNINPSLTSNTLQNNSHDNNMPPAADKLRSFWADIWEVPLEHNKEANWILNEENKYSTSEAMDFECISAEVFQEVIKKLHNWKAPGSDNIQNFWYKKFTHAHPFLYKYINKFIEMPHTLPKYLTVGITYMIPKDSNNLSNPAKYRPITCLQSFYKIMTSCLTHVIYKHIDKNSILAEQQKGCRKWSQGCKEQLLIDSVVLKQTQKKKTDLYSMYIDYKKAFDSVPHSWLLKILEIYHVHPIIISFLNNLMNNWTTTLRLTTPTDTITTEPIKIKRGIFQGDALSPLWFCLALNPLSNMLNSTNTGYNFNHEENETDLTLTDNTLKLNHLLYMDDIKLYGSTKEKLQTLAHTTENFSRDVNMEFGIDKCKINSIRAGQNYVHQHQLQTGEIIGALKENEVYKYLGYNQGQNMLHADIKDSLTKLFKLRLNLILKTYLNSKHTFKAINTYAIPVLTYSFGLIKWNKTELQTLQRTINTTLTQNRKHHPRSSTQRMTLPRNDGGRGLIDIVNLHNKQITNLRTYFHSKAQTSNLHKMIIHSDKRLTPLNLYDRTQQKNEVQTDRQTKIREWAKKALHGRHLVDLNQPNVDRKASNEWFKRGDLFPETEGFMAAIQDQVIETKNYKKHIMKLPNSAEDSCRKCKGPSETIQHITGACRAIAQTDYKHRHDQVAAIIHQNLAFKYRLLPKMTAYYKYTPHTVLDTADYKLYWDRTILTDKTVHFNRPDITLHDKKHKTVYLIDIAIPNTHNLTSTYTDKITKYTELALEIKAQWKVEKVKTIPIIISSTGVVPKTLHTSLQQLDIHSQTYITIQKATILNTCRIVRKFLSLDTT

SEQ ID NO: 23645 - protein, 1281 aa, Chiomara georgina
MNEFILRKYLQLTLMETDVNGYLTPLHTKFIERFPEMHMISRQRVGDQRRAIINKKLLTQTDIDRIYNEVRQEINKRHTNTLPHTLVTASSTNKTTLQTSPSQIQLHNNLHSTNIQRMRWTKDQNETIMRAYYNITSLETNKSAYRGALHKEFIMRYPNLSHVSEQRVSDQMRLIIRNRYLSEDRLQAIKDEVANELLLKDINIQNVTEQKSPQTELNDYRRENNSNDNLQSDTLIETDIINDTSSIALYLDKHNIRDIKQNFDIAYNYFKSTEPTQRSYIPKQKSSVKLAAIVKCINNEILPKYIDDTTEFIRMQTILYCGAWAAAKSNGSKLDIPKENQENFKNKTKKPKWQIRIEHRINTLRAQIGRLTQYVKGSRSAKLEKHVNLIKRRYKIHATYENVNIQLDEFLDTLKQKLTTLSNRVKRYKTCTLRKIQNKVFTNNEKQFYRGLKSSMESNTPNTSVSNAQNCSVPPTADRLHGFWTSIWGIPVQHNTEANWIKDERYKYSTTEPMDFQNIPVEVFHDVIKNLHNWKAPGSDNIQNYWYKKFTYAHPFIYKYINKFIENPHIIPEYLTVGITHMLPKDSNNISDPAKYRPITCLQSFYKIMTSCLTHIIYKHIDHNGILAEQQKGCRKWSQGCKEQLLIDSVVLKQTQKKKSDLYTMYVDYKKAFDSVPHSWLLQILEIYRIHPVVITFLKYLISNWSTTLRLTTPTDTIMTKPINIKRGIFQGDALSPLWFCLALNPLSNLLNSTNTGYNFNNRENETDITLTDNFIKLNHLLYMDDIKLYGSSEEELQNLAHNTETFTKDVKMEFGIDKCRINSIKAGQIFKHQYLLQTGERVESLEENEVYKYLGYNQGQNILHAEIKNSLKKQFKLRLNSILRSYLNSRNTFKAINTYAIPILTYSFGILKWNKTELKSLQRTINTTLTHNRKHHPRSSVQRMTLHRNDGGRGLIDLLNLHNKQILNLRNYFHFKAQTSSLHNSIVHNDKKLTPLNLYDITQQKNEIQTDRQTKLQDWTKKTLHGRHLLDLNQPNVDKKASNEWLKRGELFPETEGFMAAIQDQVIETRNYKKHIMKIPNSADDACRKCKGPSETIQHITGACRAIAQTDYKHRHDQVAAIIHQNLAFKYGLISEKTPYYKYTPHTVLDTIDYKLYWDRTILTDKTVHFNRPDITLHDKKKKVVYLIDIAIPNTHNLTSTYTDKITKYTDLAIEIKAQWKVDKVKTIPIVISTTGVVPKTLHTSLQQLNIHSQLYITIQKATILNTCRIVRKFLSIDTI

SEQ ID NO: 23646 - protein, 1401 aa, Cycloglypha thrasibulus
MRLRSGYKLPQASTGANRTGESCPEPSSSGCPTYSGGDTVSQTSAQNVTVAENNHETSSIESYPSVPSSHSYSQSPTHSSTTTLSMLADGVVQEAEPVENLAPIIVGSQKRKKWSNVMNEFILRTYLQLTLMETDVNGYLPPLYTKFLERFPEMHMISRQRIGDQRRAIINKKLLPQTDIDRIYREVQQEINNAQPNTLAHNSLTSSTDKTTQQTHILSQTRDIDDHYNKNRQRMRWTKEQNETIMRSYYKITLLETNVSAYREQLHREFIIAYPHLNHLSEQRISDQRRLIIRSRYISEDRLQAIKDEIAKELLLEKDSDISNHMELTNPQTIHLHREDINLDNNINNSDPLINLDNHICTAIKQHFEVAYNYFKNTEPTQRSYIPKQKSSLKLAAIVKYINNDILPNYIDESTGFITMQTILYCGAWAAAKSNGAKLEIPTEDQENCKYKTNRKPKWQIRLENKIEELRAQIGRLTHYINGNRSLKLEKHVNHIKRRYKMHATYENPNTQLKEFLDTLKQKLTTISNRLKRYKTCTLRKKQNKVFLHNEKQFYRGLKTPINNLVTETHNTQNSNPSHTSNTLRQISQAHNTPPAADKLRSFWANIWEVPVQHNKEANWILNEENKYSSFESMDFECISAEVFHEVIKKLHNWKAPGSDNIQNFWYKKFTHAHPFLYKYINKFIQMPHTLPKYLTVGITYMMPKDSNNLSDPAKYRPITCLQSFYKIMTSCLTNVIYKHIDKNLILAEQQKGCRKWSQGCKEQLLIDSVVLKQTQKKKTDLFSMYIDYKKAFDSVPHSWLLQILEIYQIHPIIISFLSNVMNNWTTRLRLTTPTDTIVTDPIKIKRGIFQGDALSPLWFCLALNPLSNMLNSTNTGYNFNNEENETDLTLTDNTLKLNHLLYMDDIKLYGSTEEELQTLAHITEIFSRDVNMEFGIDKCRINSIRAGQNYEHQYHLQTGEIIEALKENEVYKYLGYNQGQNILHTDIKDSLKKLFKLRLNLILKSYLNSKHTFKAINTYAIPVLTYSFGLINWNKTELKTLQRTINTTLTQNRKHHPRSSIQRMTLPRNDGGRGLIDIVNLHSKQITNLRTYFHNKAQTSTLHKTIAQNDKRLTPLNLYDKTQQKNEIQTDRQTKIREWTEKALHGRHLLDLNQPNVDRKASNEWFKRGDLFPETEGFMAAIQDQVIETKNYKKHIMKLPNSAEDSCRKCKGPSETIQHITGACRAIAQTDYKHRHDQIAAIIHQHLAFKYRLIQEKIAYYKYKPHTVLDTADYKLYWDRTILTDKTVHFNRPDITFHDKKHKTVYLIDIAVPNTHNLTSTYTDKITKYTELSLEIKTQWKVEKVKTIPIIISSTGVIPKTLHTSLQQLNMHPQTYITIQKAAILNTCRIVRKFLSMDTT

SEQ ID NO: 23647 - protein, 824 aa, Oechydrus chersis
MRHTQNTHKKSFPNTDELRSFWTKIWENPIQHNSRADWIHNETLNYHNTDTMDFQRVPIDVFHVVIKKLHNWKAPGSDNIHNYWYKKFTCVHPFIYNYINKFIEMPNTLPDYLTVGTTYMLPKDQHNTSNPAKYRPITCLQTFYKILTSCLAHLIYKHINDKEILAEQQKGCRKYSQGCKEQLTIDSIVLKQTQKQKSDLYSMYIDYRKAFDSVPHSWLLHILEIYKVHPQIISFLQNISAKWTTRLKLTTDTDTIITEPIKIRRGIFQGDALSPLWFCLALNPLSNMLNSTQAGHNLVYKDTDLQTDSSTHKLNHLLYMDDIKLYGSTKEELYNLAEITEHFSKDICMDFGIDKCKVNSIKAGQHYKHQYNTQTGEVIKPLDENETYKYLGFNQSTQILQKDTKNTLIKQFKNRLNSLLKCHLYSKNTFKAINTHAIPILTYSFGIINWNKTELKSLQRTINTTLTQHRKHHPRSCIQRMTLPRHDGGRGLIDITQLHNKQIASLRIYFHIKAQSSSLHCAIVQNDKKLTPLNLSDHTKQRNEIQTDRQTKFNEWAQKALHGRHLHELNQPYVDKIASNEWLKRGELFPETEGFMLAIQDQIIETKNYKKFIIKQPGSFDDSCRKCKTSSETIQHITGACRTIAQTDYKHRHDQVAAIIHQNLALKYKLLAEKTAYYKYTPQTVLDSTDYKLYWDRTILTDKTIHYNRPDITLHDKKNKIVYLIDVAIPNTHNLSSTYTDKITKYTDLAIELKTQWKVDKVKTIPIVLSTTGVIPQTLHTSLKLLSMHSQTYITLQKATILNTCRIVRKFLSMDTTQSAFVLG

SEQ ID NO: 23648 - protein, 1393 aa, Codatractus alcaeus
MRLRSGYKLPQAGTGAPSNGESRPGQSSSGCPTYSGGDTVSQTSAQSNTVADYDHGSESVASFPSLPSTNPYSPTHSTTTVNSPDTEDVVQEADPVENLAPTAASLKTRRKWSKVMNEFILRTYLQLTLMETDISGYLPTLHTKFIEKFPEMHMITRQRVGDQRRAIVNKKLLTQQNIDRIGREIREEINNTQRKAQIDNTKYSLQTDNTAILTRDLPQHRNIQTQLTHSSDPSMRMRWTREHNVTIMRTYYKITELESNISAYRGHLHKEFITTYPYLKHITEQRVADQRRLIINNKYLNEETLQAIKNEVARELLLEKNRRTQTSIDSSLIPEVTNQQENINFIESEVYTNSNTNNSSKTKTSRLDQQKITEIEQTFNVAYNYFKNINPTQRSYIPKQKTSIKLAAIVNYINSKILPKYIDHTTEFNSLQTVLYCGAWTAAKSNGSKITIPPKSVVHNINKTIKPRWQIRLERRVETLRMHIGQLTQYIKGNKSVKIEKQVKFIKIKYKIHASHENSNTYLPEFLDTLKQKLTAISNRLKRYKTCTLRKTQNNTFTTNEKQFYRVLRSLSLHNPPNNTHINISPPSADELRSFWATIWENSVQHNKTADWILHEQNKYSKFEPMAFQCIPEEVFHNVIKKLHNWKTPGSDNIHNFWYKKFTHIHPFIHNYINSFLKKPHTLPDYLTEGITYMLPKDLENVSNPAKYRPITCLQAIYKIITSCLTQVIYTHIDNNKILAEQQKGCRKYSQGCKEQLTIDSVVLKQTRKRKSDLYCMYIDYKKAFDSVPHTWLLQILEIYRIHPQIISFLQNTMTKWTTRLRLTNDTSTVITERIKIQRGIFQGDALSPLWFCLSLNPLSNMLNSSNTGYVLDYSKNYTNLPTDCPTLKLNHLLYMDDIKLYGSSEEELQKLTQITENFSKDICMEFGIDKCKINSVKAGQAYQHQYQMKTGEHVDALLENEVYKYLGYNQTHQILHKDIKDSLTKQFRHRLNNILRSHLYSKNTFKAINTYAIPVLTYSFGIINWNKTELKSIHRIINTTMTQYRKHHPRSCVQRMTLSRLDGGRGLIDISNLHNKQITNLRTYFHNKAQTSFLHKAIVNNDTNLTPLNLFDKTQQRNEIQTDRQTKLNEWNRKALHGRHLHDLNQHNVDKEASNEWIRRGELFPETEGFMVAIQDQIIETKNYKKHIMKLPTASDDSCRKCRGSPETIQHITGACRAIAQTDYKHRHDQIAAIIHQGLAFKYKLITEQTAYYKYIPQTVIDTTDYKLYWDRTILTDKTIHYNRPDITLHDKKNKIVYLIDIAIPNTHNLSSTYTEKISKYTDLAIEIKTQWKVKKVITVPIILSTTGIIPTTLHTSLKLLNMHPQTYITLQKASILNTCRIVRKFLSNSTS

SEQ ID NO: 23649 - protein, 1266 aa, Spathilepia clonius
MNEFILRTYLQLTLMETDIAGYLPPLYTKFIEKFPEMHMISRQRVGDQRRAIINKKLLTKNDIDRIYRETREEINNTQNETQIYNTKLTHTQTDNPLTFINDTNQRIRWTTQHNLTIMRAYYRITQLEANTSAYRGLLHKEFITTYPHLKHVTEQRVADQRRLIIHNKYLNEEMLQSIKDEIASELLLRKNNNTPTSDGMFQVQYSNTNYDDPEIFTNVNNTNDSPNIKASHLDQIKIADIEQNFEIAYNYFKNIYPTQRSYIPKQKSSIKLATIINYINKTIFPKRVDKDTEFIDLQTVLYCGAWAAAKSNGSKIDIPPKIDTYNTYKIIKPKWQIRLEQRVEKLRVEIGQLTQYIKGNKSTKIEKKVKFIKTKYKIHATHENPNTHLSEFLDTLKQKLTTISNRLKRYKTCTLRKSQNKTFLTNEKQFYRGLRSNSSHNTENNTHINTSPPPPDELRTFWATIWENSLQHNKTAKWIQDEYTKYTKSEPMVFQCISAEIFDGVIKKLHNWKAPGTDNIHNFWYKKFTYIHPFIHNYINKFIEMPHILPNYITEGITYMLPKDLNDISNPEKYRPITCLQTIYKIITSFLTQIIYNYIDNNKILAEQQKGCRKYSQGCKEQLTIDSVVLKQTQKRKSDLYSMYIDYKKAFDSVPHTWLIQILEIYHIHPQIISFLQNTMTKWITRLRLTNGTSTVITEPIKIQRGIFQGDALSPLWFCLALNPLSNMLNSSNTGYSLEYTEKDTNVRADYSIYKLNHLMYMDDIKLYGSTEEELQNLAKITEDFSRDICMEFGIDKCKINSMRAGQIYQHQYHMQTGELVEALHENEVYKYLGYYQVQQIQHKNIKESLTKQFRCRLNAILRSHLFSKNTFKAINTYAIPILTYSFGIISWNKTQLKSLQRIVNTTMTQNRKHHPRSCVQRITLPRHDGGRGLIDILNLHNRQISNLRIYFHNKAKTSSLHKAIVNNDTNLTSLNLFDKKLQKNETQTDRQTKLHEWTQKVLHGRHFHDLNHPNVDKIASNEWLRRGELFPETEGFMIAIQDQIIETKNYKKHIMKIPNAADDSCRKCRGSSETIQHITGACRAIAQTDYKYRHDQIAAIVHQSLAFKYKLISKKDASYKYTPQTVLDTTDYKLYWDRTILTDKTIHYNRPDITLHDKKNKTVYLIDIAVPNTHNLTSTHTEKITKYTDLAIELKSQWKVEKVKTVPIVISTTGVIPKTLHSSLKILNIHPKTYITIQKASILNTCRIVRKFLSMDTTSPALMLG

SEQ ID NO: 23650 - protein, 1295 aa, Epargyreus clarus
MLTEDVVQEADPVEILAPTTASLNKRRKWSKPMNEFILRTYLQLTLMETDISGYLPSLHTKFIEKFPEMHTISRQRVGDQRRAIVNKKLLTQNEINKIYEETREDINNAQSNTQIHNLQTIQSQLTDINDTRKRMKWTTEHNITIMRAYYKITLLETNISAYRGQLHKELILKYPHLKHVTEQRVADQRRLILQNKYLSEERLQIIKDEIAGEILLQKNNHTPIPSPTPEHIIEQDINNIDSQITTNIHTTNNSPTINTLHLDEQKTQDIEETFNTAYNYFKNTNPTQRNYIPKQRPSTKLAAIVNYINSYILPKYIDNGTEFTTLQTILYCGAWAAAKSNGSRISIPSKLEAHNTYNTKKPKWQIRLERRVDKLRAQIGKLTQYIKGNKSAKIEKEVTFIKTKYKIHATHENPNTCLTEFLDTLKQKLTTLSNRLKRYKTCTLRKTQNNTFTTNEKQFYRGLKSTSSHNPQNHTQTNNSPPSPCELRTFWAKIWENTVQHNKKADWTLQEEHRYAKVEPMVFQCVPADVFNDVIKKLHNWKAPGSDNIHNFWYKKYTYTHPFILKYVNKFIEMPHTLPSYITEGITYMLLKDQSDVSNPAKYRPITCLQTIYKIMTSCLTHVIYNHINENKILAEQQKGCRKHSQGCKEQLTIDSIVLKQTQKRKSDLYSMYIDYKKAFDSVPHTWLLQILKIYQIHPQIISFLQNTMTKWITRLRLTNGTNTVITEPIRIQRGIFQGDALSPLWFCLALNPLSNMLNLSNTGYDFVNEENNTNLLTDCPVLKLNHLLYMDDIKLYGSTEKELQTLVQLTENFSADICMEFGINKCKINSIRAGQIYQHQYQMQTGELVEALNENEVYKYLGYNQAQQILHKDIKDSLTKQFRRRLNTILRSHLYSKNIFKAINTYAIPILTYSFGIINWNKTELKSLQRIINTTMTQYRKHHPRSCVQRMTLARCDGGRGLIDILNLHNKQITHLRTYFNDKAQISPLHNAIVNSDKKLTPLNLFDKTLQKNEILTDRQTKLNEWIRKALHGRHLHDLNLPNVDKVASNEWLRRGELFPETEGFMIAIQDQIIETKNYKKHIMKLPNASDDSCRKCKGAPETVQHITGACRAIAQTDYKHRHDQIAAIIHQTLAFKYNLISEQTAYYKYTPQTVLDTTDYKLYWDRTILTDKTVHYNRPDITLHDKKNKTVYLIDIAIPNTHNLSSTHTEKISKYTDLAIELKSQWKLEKVTTVPIVLSTTGVIPDTLHSSLKLLNIRPQTYITLQKASILNTCRIVRKFLSMDTSSPALMLG

SEQ ID NO: 23651 - protein, 1386 aa, Cephise aelius
MRLRSGYKLPQAGTGAKCNGESRPEQPSSGCPTYSGGDTVSQTSAQYNTAADHNHDSASEISFPSVPSTNQYSPTRSTVTVDSMLTEDVVQEANPVENLAPTTASLNTRRKWSKSMNEFILRTYLRLTFMETDIRGYLPPLHTKFVERFPEMHMISRQRIGDQRRAIVNKKLLTQTDIDKIYREIREEMNNTQLDTQIHNTLIHSTHSHTDTQIPSSHTNHRMRWTTEHNVTIMRAYYKITLFEANTSAYREQLHKEFITMYPHLGHITEQRVADQRRLIIHNRYLSEEKLQSIKDEVANELILKQNSIMPTSINSATYGSEIIGDQSNNLNSIDTDIFSNINNTINTPKVTSQYLDQQKIEIEQNFSAAYNHFKHTDPTQRSYIPKQKSSKKLANIVNHINNNILPKYFDDDMEFITLQTILYCGAWAAAKSNGSKIFIPPKHGESYKNRKVKPRWQLRLERRVDVLRVHIGQLTQYIKGNKSIKLEKQVEYIKRRKAHATHENSNTHLSEFLDTLKQKLTTISNRLKRYKTCTLRKTQNTTFTVNEKQFYRDLKSHIHNTQSYTHDNISPPSADELHSFWATIWENSVQHNKTTDWILHEQNKYPNSEPMVFQRIPTEVFHNAINKLHNWKAPGSDNIHNFWYKKFTCAHPFIHNYINKFIEMPHIIPDYMTEGITYMLPKDTNNISNPAKYRPITCLQTFYKIMTSCLTQVIYNYINSNKILAEQQKGCRKYSQGCKEQLTIDSIVLKQTRKRKSDLYSMYIDYKKAFDSVPHSWLLQILDIYRISPQIISFLQSIMTKWTTRLRLTSSTNTVTTEPIKIQRGIFQGDALSPLWFCLALNPLSNMLNSSNTGYDLKYEKDDTNLLTDCSIHKLNHLLYMDDIKLYGSTEKELYKLVEITEIFSTDICMEFGVDKCKINSIKAGQSYEHQYQMQGGELIEALHENEVYKYLGYNQAQQILYKETKNCLTKQFRQRLNAIFRSHLYSKNTSKAINTYAIPILTYSFGIINWNKAELKSLQRIINTTMTHHRKHHPRSCVQRMTLPRQDGGRGLIDILNLHNKQIANLRKYFHDLAQTSSLHNAIVSNDKNLTPLNLFDRTQQRNEIQTDRQTKLNQWTQKALHGRHLHDLNQPNVDKRASNEWLRRGELFPETEGFMVAIQDQIIETKNYKKHIMKLPNAFDDFCRKCKSSPETIQHITGACKAIAQTDYKHRHDQVAAIIHQNLAYKYGFISEKNAYYKYTPQTVLDTTDYKLYWDRTILTDKTVHHNRPDITLHDKKNKIVYLIDIAVPNTHNLSSTHTEKISKYTDLAIELKSQWKVMKVITVPIILSTTGVIPKTLFSGLQLLNIHTQTYITLQKATILNSCRIVRKFLSMDATPPAFVLG

SEQ ID NO: 23652 - protein, 1391 aa, Erynnis tages
MRLRSGCILPQAGTGANRTGESSLGPSSPGSPTYSGGDTVLQSSAQYDTVADTQSDSVSIESFPSIPSTNSFSRPQTPSSSTTYTCSIAEDVVQETVQVTNIAPATANTQMRRKWSNDMNEFILRTYLQLTLVESDISGYLPPLHTKFIEKFPEMNMISRQRVGDQRRAIVNKKLLPQADIDRIYNEVREEINNTQLSTNTQTPLIIATPMDGSYKQTHTHTKSSEISSQRMRWSNEQNETIMRAYYKITRLESDISAYRGPLHKAFIETYPHLNHITEQRIADQRRLIIHNRYLNEERLQRIKDEVARELFQQNSLRTQDTTRQTYHTRTHTQTEHKEQSYNAESSCNTGITHNSSNTLQLPHVDQERYKEIEDNFKKAFNYFKNIDPTQRSYIPKQKSSVKLSAIIKVINTKILPNYINDNTEFIDLQTIIYSSAWAVAKSNGSKMDIPQNIPEGNYKRKTRKPKWQVRLERKVEELRAQIGRLTHFIKGNRSDKLERQVNYIKRKYRLHAKHETPNTHLFDFLDTLKQKLSAYSNRLRRYKTCTLRKTQNKMFMTNEKQFYRGLRTSNNLTLQNNNSCNSPPINELRNFWAGIWEMPVQHNKDADWIVNEEEKYSQTIPMDFQCIPIDVFHNVIKKLQNWKAPGSDNIHNFWFKRFTYAHNFIYKYINKFIEMPHTIPDYITTGITHMLPKDPTCLSNPAKYRPITCLQSFYKIITSCLSQVIYKHIDNNIILAEQQKGCRKYSQGCKEQLTIDSVILKHTMKRKSDLYSMYIDYKKAFDSVPHSWLLKILKIYHIHPQIISFLQTVMKKWSTRLRLTDNTDVKDTEPIKIQRGIFQGDALSPLWFCLSLNPLSNMLNSSNMGHDLKYAENDTDLRIDLTTHKLNHLLYMDDIKLYGSSEEELQNLVNLTEKFSKDICMDFGIDKCRINSVKKGQCYKHHYHTQNGETIEPLQDNEVYKYLGYIQSQQILHKDIKKSLIENLKSRLNTIAKCHLYSKNTFKAINTYAIPILTYSFGIINWNKTELTSLQRIVNTTLTKHRKHHPRSCIQRMTLPRNMGGRGLVDIKNLHYKQITNLRNYFYTKAQTSSLHNAIVQNDIKLTPLNLHDKTNQKYETQINNTQTKIDDWIRKTLHGRHLHDLNQPNVDKKASNEWLKRGELFPETEGFMAAIQDQVIETRNYRKHIMKVPNSGDDSCRKCKAQPETIQHITGACRAIAQTDYKHRHDQVAAIIHQDLAFKYKLISEKTPYYKYTPLPALESDDFKLCWDRTIITDRTVHFNRPDIILHDKKNKIAFLIDIAIPNTHNLISTHTEKITKYTDLAIELKTQWRVEKVKIIPIVISATGVVPETLHMSLKHLNIHSHTYIILQKAIILNTCRIVRKFLSMDIT

SEQ ID NO: 23653 - protein, 1185 aa, Muschampia plurimacula
MRWTKEQNETIMYAYYKITLLESNKSAYRTQLHKAFITKYPHLQHITEQRVADQRRLIIHNSYLTEERLQQIKENVANELLLNENNSRQNLSRNAAIVSQPKSVSRHSGCGNMETDNLVDVTSSETLQSTEITNIPNLSESNTSYLDEMSKKEIEENFNSAYNYFKSTNPTQRSYIPKQKSSKKFSAIVNFINKDVLPKHINLDSEFIAMQTVLYCGAWAAAKSNGSKIVIPQEVETYSKNKKKRKKPKWQIRLERRVGEIRAQIGRLTQYIKGNTSDKIIKHVNNIKRQYKLHSTHENPNIHLSEFLDTLKQKLTIISNRLRRYKTCTLRKTQNHMFSVNEKQFYRGLKTSSYSNIRSTSNYQGTRDNNLPPAHVLHSYWSAIWDNPMQHNETTDWITNKKNLYSKSLSMEYHGLPIEIFHNVIKKLHNWKAPGSDNIHNFWYKKFTYLHPFIYNFINKYIEIPETLPDYITTGITYMLPKDSNDMSNPAKFRPITCLQTIYKIITSCLTQILYKHIEGNDMLAEKQKGCRKNSQGCKEQLTIDSIVLKQTQKHKTDLYSMYIDYQKVFDSVPDSWLLQCLDIYGVHPQIKRFLQNVMTKWTTRLRLTTDTNTIISNPIKIQRGIFQGDALSPLWFCLALNPLSNLLNASDLGYNLRGKNNETDQVTNSSTKKLSHLLYMDDIKLYGSTEEELQRLAEITENFSNDIFMNFGIDKCKINSVKAGQMFKHEYIMQTGKLVESLNQNEVYKYLGYDQSRQIRHKDIKNTLTKQFRHRLNTVSQSHLNSRNTFKAINTYAIPILTYSFGIINWTKTELKSLQRIIHTTITRHRKHHPRSCIQRMTLPRSDGGRGLIDIINLHNKQITNLRTYFHQKAQSSALHEMITQNDKNLTPLNLADNRKQKNELLTDRQTKVSEWARKALHGRHLHDLNQPNVDKIASNAWLKRGELFPETEGFMIAIQDQIIETKNYKKHIMKLPNSSDDSCRKCKGSPETIQHIIGACRTIAQTDYKHRHDQVAAIIHQSLAFNHNLTTYKTAYYKYTPQTILDNKDFKLYWDRTILTDKTVHFNRPDITLHDKKNKVVYLIDIAIPNTHNLTTTHTEKITKYTDLAIELKTQWKLDKVKTIPIVLSATGVIPESLHTSLKLLNIHPHTYITLQKATILNTCRIVRKFLSMDITTSALVLG

SEQ ID NO: 23654 - protein, 1360 aa, Muschampia musta
MSLVSFPSDPSNSLYSPSSTSSCTSSNSDSIQPDDVVQKADLADNLAPIPVNSKKRRKWSKAMNEFILRTYLQLTLMETDIGGYLPTLHTKFIERFPDMHMITRQRVGDQRRAIVNKKLLSKIEIDKIYKEIDKQINTDKTAYIPSTPTPTQTNVLIDQTQERIHSQTNKEKNQRMRWTKEQNETIMYAYYKITLLESNKSAYRTQLHKAFITKYPHLQHITEQRVADQRRLIIHNSYLTEERLQQIKENVANELLLNENNSRQNLSRNAAIVSQPESVSRHSGCGNMETDNLVDVISSEILQSTEITNIPNLSESNTSYLDEMSKKEIEENFNSAYNYFKSTNPTQRSYIPKQKSSKKLSAIVNFINKDVLPKHINLDSEFITMQTVLYCGAWAAAKSNGSKIDIPQEVETYSKNKKKRKKPKWQIRLEHRVGEIRAQIGRLTQYIKGNTSDKIIKHVNNIKRQYKLHSTHENPNIHLSEFLDTLKQKLTIISNRLRRYKTCTLRKTQNHMFSVNEKQFYRGLKTSSYSNIRSISNYQGTRDNNLPPAHVLHSYWSAIWDNPIQHNETADWITNEKNLYSKSLSMEYHGIPIEIFHNVIKKLHNWKAPGSDNIHNFWYKKFTYLHPFIYNFINKYIEIPETLPDYITTGITYMLPKDSNDMSNPAKFRPITCLQTIYKIITSCLTQILYKHIEGNDMLAEQQKGCRKNSQGCKEQLTIDSIVLKQTQKHKTDLYSMYIDYQKAFDSVPHSWLLQCLDIYGVHPQIKCFLQNVMTKWTTRLRLTTDTNTIISNPIKIQRGIFQGDALSPLWFCLALNPLSNLLNASDLGYNLRGKNNETDQVTNSSTKKLSHLLYMDDIKLYGSTEEELQRLAEITENFSNDISMNFGIDKCKINSVKAGQMFKHEYIMQTGKLVESLNQNEVYKYLGYDQSRQIRHKDIKNTLTKQFRHRLNTVSQSHLNSRNTFKAINTYAIPILTYSFGIINWTKTELKSLQRIIHTTITRHRKHYPRSCIQRMTLPRSEGGRGLIDIINLHNKQITNLRTYFHQKAQSSALHEMITQNDKNLTPLNLADNRKQKNELLTDRQTKVSEWARKALHGRHLHDLNQPNVDKIASNAWLKRGELFPETEGFMIAIQDQIIETKNYKKHIMKLPNSSDDSCRKCKGSPETIQHIIGACRTIAQTDYKHRHDQVAAIIHQSLAFNHNLTTYKTAYYKYTPQTILDNKDFKLYWDRTILTDKTVHFNRPDITLHDKKNKVVYLIDIAIPNTHNLTTTHTEKITKYTDLAIELKTQWKLDKVKTIPIVLSATGVIPESLHTSLKLLNIHPHTYITLQKATILNTCRIVRKFLSMDITTSALVLG

SEQ ID NO: 23655 - protein, 1236 aa, Hesperia meskei
MNLPYQLTLMETDTNGYLPPLQTKFIEKFPEMHMISRQRIGDQRRAIINKKLLTQNTLDKIYREVNEEIKNMQINVNKQNISTSTTVNQVLTHSSNTLPSINTQQVLKKTQTGQRMRWTKEHNETIMRLYYKITMLEENISAYRGLLHQAFIDAFPDLQHITEQRVADQRRLIIHNKYLSEERLDEIKREVTLELLPQSNNHSHTQCNTNLQETHSTTQLTVTPERNPINSEFSTQTQKTEIEVTFNSAYNYFKNIKPTQRSFIPKQKSSRRLSTIVNYINDNILPKYIDSNTEFTTLQSVLYCAAWTAAKNNAAKIEILPKINADHRKRKHKPKCQIRLERKILDLRAHIGRLTLYIKGNRSDKIVKHIKYIQSQYKTHSTYENPNTHISDFLDTLKQKLSTYSNRLRRYKTCTLRKVQNKQFVSNEKQFYRNLRNDTTHNNKSSQAEPRHTLGNLTPTNIHNNNSPSSVELREFWAKIWENPVQHNKEADWIRNEQNSYANYDCMDFHCIPVETFRGVIKRMHNWKSPGSDNIHNFWYKKFTYIHPFIYNYINKFIKSPHTLPDFITEGITYMLPKDSSCLLNPSKYRPITCLQTFYKIITSCLTEVIYKHIDENFMLSEEQKGSRKYSHGCKEQLVIDAVLLKQSNRRKTDLFSMYIDYKKAFDSVPHTWLLQILEIYRIHPQIISFLQNAMSKWTTRLRLNTDLDTIETEPIKIRRGIFQGDALSPLWFCLALNPLSTLLNSSDAGYNLDYKLTTDLQTDTLVHKINHLLYMDDIKLYGSTEEELRHLAHLTETFSHDICMEFGVDKCKINSIKAGQHYEHEYFMQSGEIVTALTESEAYKYLGYSQAQQIQHKVIKKSLTTQFKTRLTSIFRSQLNSKNTFKAVNAYAIPVLTYSFGIINWNKTELQTLQRIVNTTMTRHRKHHPRSSILRMTLPRNDGGRGLIDISDLHNRQITNLRTYFFNKTSSSTLHNAITQNDRKLTPLNLSDRALQRNEIQTDRQTKLNEWSRKALHGRHLHDLNQANVDKKASNEWLKRGELFPETEGFMLAIQDQVIETKNYKKHIMKLPNSSNDSCRKCKGSPETIQHITGACKAIVQTEYKHRHDQVAAIIHQSLAVKYKLIQDKQPYYKYTPQPVLDTTDYKLYWDRTILTDKTVHYNRPDITLHDKKNQIVYLIDVAIPNTHNLTTAHTEKLSSSWLYKQTEHRSNIFNNTPLYASGVKKRIERNFIQF

SEQ ID NO: 23656 - protein, 1410 aa, Hesperia comma
MRLRSGNKLPQAGTRANRDGESRLPPSGRSCPTYSGGDTVSQSSVQFKTVADSHFHPSSSVHSASSSSIFQSIPSTNPYSRSPSHSSSTTNSRLPEDVVQETDSVTYLAPTTASQIKRRKWNREMNEFILRTYYQLTLMETDTKGYLPLLHTKFIETFPEMHMISRQRIGDQRRAIINKKLLTQTTLDKIYREVNEEIKNMQININKQNTGISINTDNQSLSDSSNIPPNINTQQVLKRTQAGQRMRWTKEHNETIMRLYYKITLLEENVSAYRGLLHQAFINAFPDLEHITEQRVADQRRLIIHNKYLSEERLGEIKREVTLELLPQSKNYSHAQGNTTLHDTYSATQLTVMPDQNPTNFEINTQTQNSEIEKTFEAAYNYFKNINPTQRSFIPKQKTSRRLGTIINYINDNILPKYIDSDTAFTTLQSVLYCAAWTAAKNNGAKIEIPPRINADRRNRKNKPKWETRLERKILDLRVHIGRLTQYIKGNRSDKIVKHIKYIQSQYKNHSTHENPNTHLSDFLDTLKQKLSTYSNRLKRYKTCTLRKVQNKQFVSNEKQFYRHLRNDTTHNKQNTQSEPSHPLGNLTPTDINSNKAPSAVELREFWAKIWENPVQHNKEADWIRNEQNRYENYESMEFHCIPVETFRDVIKRLHNWKSPGSDNIHNFWYKKFTYIHPFIYNYINKFIKSPHTLPDFITEGITYMLPKDPSCLLNPSKYRPITCLQTFYKIITSCLTEVIYQHIDKNCMLSEEQKGSRKYSQGCKEQLVIDAVVLKQTNQKRSDLFSMYIDYKKAFDSVPHTWLLQTLEIYRIHPQVISFLQNTMSKWTTRLRLNADLNTTETEPIKIRRGIFQGDALSPLWFCLALNPLSNLLNSTNAGYKLEYKFTTDLQTDTLVHKINHLLYMDDIKIYASTEEHLQNLAHLTETFSKDICMEFGVDKCKINSIKAGQPFEHEYFMQTGEIVTALTECEVYKYLGYSQAQQIQHKDVKKSLTIQFKSRLTSILRSQLNSKNTFKAVNTYAIPILTYSFGIINWTKTELKTVQRIVNTTMTRHRKHHPRSSILRMTLPRNDGGRGLIDILNLHNKQITNLRTYFFNKASSSTLHNAIAQNDRKLTPLNLSDKAQQRNEIQTDRQTKLNEWNRKALHGRHLHDLNQATVDKTASNEWLKRGELFPETEGFMLAIQDQVIETNNYKKHIMKLPNSSNDSCRKCKGSSETIQHITGACRAIVQTEYKHRHDQVAAIIHQSLAFKYKIIEDKKPYYKYTPQTVLDTTDYKLYWDRTILTDKTVHYNRPDITLHDKRNQIVYLIDVAIPNTHNLTTAHTEKLTKYTDLATELKTQWKVKAVKTVPIVISSTGVIPHTLHTSLKLLDIHPLTFIIIQKAVILNTCRIVRKFLSTDITTSALVLG

SEQ ID NO: 23657 - protein, 1428 aa, Tiana niger
MRLRSGYKLPQAGTRANRNGESCPEQSSSGSPTYSGGDTESQTSAQCNTVADHNHDLVSVVSSPSDPSNNQYSRSSTHSSRNSSSSMQSEDVVQKADSADNVAPITGSFKKRRKWSKSMNEFILRTYLQLTLMETDTNGHLPALHTKFIERFPDMHMIGRQRIGDQRRAIINNKLLTQTNIDRIYKEARNEINNAHVNTPAHITPTSSQTHKPSEQTHNLLHLQHQTTQSYTTINNEKNHRMRWTKQQNETIMRAYYKITHLESNISTYRTQLHKAFITAYPHLEHITEQRVADQRRLIIHNRYLTDERLQTIKDEVATELVSHQNHNIQHLSTNNALISQSNSVNEEGNDLQSTVDSEILQNTEIINNAAELKTSYLDKKTLTEIEQNFNSAYNYFKNTNPTQRSYIPKQKSSKKLAIIVHFINKNILPKYIGLNTEFISLQTVLYCAAWAAAKSNGAKIVVPPKTETHSKYKKKKPNWQIRLERRVKEIRAQIGRLTQYIIGNRNSKIEKHVNYIKKKYKVHSTHENLNTHLSEFLDTLKQKLSIVSNRLKRYITCTLRKTQNQKFSANEKQFYRGLKTPTTNHFTNTCDEQRTGLTSTPQTAQNNTYNKRLPPAHELHSYWAGIWERPIQHKQEADWINNEKKRCSNSTSMEFHGIPIEVFHDVIKKLHNWKAPGSDNMHNFWYKKFTFAHPYIYNFINKFIEMPDTLPDYITAGITYMLPKDTTNNIISPAKFRPITCLQTIYKIITSCLTEIIYKHVDNNNMLAEQQKGCRKYSQGCKEQLTIDSIVLKRTQKDKRDLYSMYIDYRKAFDSVPHSWLLQCLDIYRIHPQIISFLQNIMTKWTTRLKLTTNINTTNTAPIKVQRGIFQGDALSPLWFCLALNPLSNMLNSSNLGYCLDCNENKTDQPTDDTNKLNHLLYMDDIKLYGSTEEELQQLAKITENFSKDICMNFGIDKCKINSIKAGQYYKHEYVMHTGELIESLNQSEVYKYLGYNQAQQIQHKDIKKSLTNQFRHRLNTIFKCHLNSKNTFKAINTYAIPVLTYSFGIINWNKTELKTLQRIIHTTLTKHRKHHPRACIQRMTLPRIDGGRGLIDITNLHNKQITNLRTYFHHKAQTSPIHKAIIQNDKNLTPLNLEDKRKQKNEILTDRQTKFNEWNRKALHGRHLHDLNQPNVDKIASNEWLKRGELFPETEGFMIAIQDQIIETKNYKKHIIKLPNASDDSCRKCKTTSETIQHITGACRTIAQTDYKHRHDQVAAIIHQRLALNHKLILIKTPYYKYTPQTILDNTEYKLYWDRTILTDKTIHYNRPDITLHDKKNRIVYLIDIAIPNTHNLTSTHTEKITKYTDLAIEIKSQWNVQKVKTVPITISATGVIPGTLHTSLKLLNIHPQTYITLQKAAILNTCRIVRKFLSLDTTPSPLVLG

SEQ ID NO: 23658 - protein, 769 aa, Heliopetes ericetorum
MFTVNEKQFYRKLISPIQTSHTPGSSQPMHSSTKNSNHNAPSADELRTFWGAIWENPLNHNNESDWLHSERSRCSNIEPMDFQGIPLEVFHSVIRKLPNWKAPGSDNIHNFWYKKFTYAQQFIYNHLNKFIELPHTLPDYITAGTTILLPKDTNDTSNPAKYRPITCLQTIYKILTSCLTQILYNHIDKNNILAEEQKGCRKYSKGCKEQLTIDAVVLKQTQKRKSDLFSMYIDYRKAFDSVPHSWLLEVLKIYRIHPQIIFFLQNTMTTWTTRLRLTTDSDIIVTDPIKIQRGIFQGDALSPLWFCLALNPLSNMLNFSKAGYTLDYKENISDPEAACSIHKLTHLLYMDDLKLYSSTEKELLQLAKITEEFSDDICMSFGIDKCRINSIKAGEIYKHHHTTNTGEEISPLDEIETYKYLGYTQSKQIQHKITKNILTKHFKNRLNALFRCHLYAKNTFKAINTYAVPVLTYSFGIINWNRTQLKSLQRIINTTLTKSRKHHPRSCVQRMTLSRHDGGRGLIDIINLHNKQIANLRSYFHAKAKTSILHKAIAQSDKKFTPLNLSDNTQQANEKQTDKQIKLDEWARKALHGRHLHDLNQPNVDKTASNEWLRRGELFPETEGFMIAIQDQIIETKNYKKHIIKQPNASDDSCRKCKGCPETIQHITGACRAIAQTDYKHRHDQVPGNIHQNLAHKYKLIEAKTAYYKYTPNTVLDTKNCKLYWDRTILTDKTVHYNRPDINLHDKKNKVLYLIDIAIPNTQSLMHIH

SEQ ID NO: 23659 - protein, 1428 aa, Craniophora ligustri
MRLRSGNRLPQAGTGANSNGESRPEPTGSGCPTYSGGDTVSQTSAQFRTVADHHLDSSSVNIPSLSSPHDLDSSSVNMPSSLPSSSSLSTIPSITSYNPQPHTSTHSTITTYSMLPEDVVQETEPVADIAPTAISLKTRRKWNKTMNEFILRTYLQLTLMETDTNGYLPPLHTKFIEKFPEMHMINRQRVGDQRRAIINKKLLSQSVIYRIYMETREEINSIQINAQTYNTQTPITQADDNIQPPLTHSRQTGQRMRWTKEHNETIMRAYYKITHLESNISAYRGPLHQAFINTFPHLEHITEQRVADQRRLIIQNRYLDEERLQTIKDEVASELLPLQNNSDTQVCRNTPLSRLEPTVEQDQYLNSIDPEICTHIDNYTNNTPETLTPQSEQQISPEIEQTYQDAYNYFKNTDPTQRSYIPKQKPSKKFGYIVNYINIKVLPKYINVDTEFITLQTVLYSAAWAAAKSNGAKIEIPPRTETTCRYKKNKPKWQIRLERRIEELRAQIGRLTQYIRGNRNNKIVKQVQNIQKQYKTHATYENPNTHLSEFLDTLKQKLTTFSNRLKRYKTCTLRKTQNKQFISNEKQFYRGLRTPTTNSHSRTNNEQNTHSPSTTQNTTPYNTNSNRSPSAEEMRSFWAGIWENTVHHRKEADWIRNEERRYSTTEPMDFEYIPVEVFHDVIKKLHNWKAPGSDNIHNFWYKKFTRAHPYIHNYINKFIQQPHTLPEYITVGTTYMLPKDSNNLLDPAKYRPITCLQTIYKIITSCLTHLIYNYIDKNSMLAEQQKGCRKYSQGCKEQLIIDSVLLRQTQLKKSDLFSMYIDYKKAFDSVPHTWLLQVLEIYRIHPQIIIFLQNTMTKWTTRLRLTTDTNTTITEPIKIQRGIFQGDALSPLWFCLALNPLSNMLNSLNLGYELDYNDLLTDSSPHKLNHLLYMDDIKLYGSTIGQLQQLAQYTESFSHDICMEFGIDKCKINSITKGQRYKHQYLMQTGEVVEALTETEVYKYLGYNQAQQIQYKSIKSSLTKQFKHRLNTILRSHLYSKNTFKAINTYAIPILTYSFGIINWNKTELKSIQRIVHTSMTRNRKHHPRSCIQRMTLSRYDGGRGLIDILNLHNKQIANLRTYFHNKAFSSTLHDAIVQNDTKLTPLNLTDKTQQRNEVQTDRQTKLNEWTGKALHGRHLHDLNQPTVEKTASNEWLRRGELFPETEGFMLAVQDQVIETKNYRKHIMKVPNSSDDSCRKCKGSPETIQHITGACRAIVQTDYKHRHDQVAAIIHQNLAFKYKLILEKTAYYKYTPQTVLDTKDYKLYWDRTILTDKTVHYNRPDITLHDKQKQTVYLIDIAIPNTHNLSSTHTEKLTKYTDLAIELKTQWKVKTVPIILSSTGVIPRTLHTSLKLLEMHSLTYILLQKAVILNTCRIVRKILNSDTT

SEQ ID NO: 23660 - protein, 1428 aa, Amphipyra berbera
MRLRSRLLPQAGTVANHDGESRPGPSGPGCPTYSGEGTVSQTSAQFRTVVDHHQDSSSVISSTSSSIFPSVPSHDPYSRPPTHSTSTASSMLSEDVVQETESVANLAPTATSLRTRRKWSKIMNEFILRTYLQLTLMETDTSGYLPPLHTKFIEKFPEMHMISRQRVGDQRRAIINKKLLTQSDIDRIYKEIREEINNIQINTQIQSVTTSTSQTDDYSTDIHNFPHHRNTRPHLTNSNQAGQRMRWTKEHNETIMRAYYKITLLEANISAYRGPLHQAFITTFPHLEHISEQRVADQRRLIIHNRYLSEERLQAIKDEVASDLFLQNSINTQTSIIANSVHPTPTQPELTTEQDNFLNSIDSEIHTRINNDTNNTLETSTPHSNFTIEIERTFKEAYDYFKNTDPTQRSYIPKQRSSKKLAIIVNYINNNIIPKHIEVDTEFITLQTVLYCAAWAAAKNNGAKIEIPPRVEVSCKYKKNKPKWQRRLESRIEDLRAKIGRLTQYIRGNRSSKIVKHVQYIQNKYKIHATHESPNTHLSEFLDTIKQKLTTFSNRLKRYKTCTLRKAQNKQFAANEKQFYRGLRAPFTNSHTNIHNDHNTQPTPTLQNTTQNNSPPVGELHSFWATIWEDAVQHNKEADWIRNEQDRYLYSEPMDFQCIPVEVFHDVVNKLHNWKAPGSDNIHNFWYKKFTRAHTFIYNYINKFIEQPQLLPQYITAGTTYMLPKDPNNLSNPAKYRPITCLQTFYKILTSCLTQIIYKHIDQNNILAEQQKGCRKYSQGCKEQLSIDSILLNQTLHSKSDLYSMYIDYKKAFDSVPHTWLLQILEIYRIHPQIISFLQTTMTKWTTRLRLTTDTSTVITEPIKVQRGIFQGDALSPLWFCLALNPLSNMLNSSNAGYDLDYKENETDLLTDCSTHKLNHLLYMDDIKLYSTTEEELQRLAQITEKFSQDICMEFGIDKCKINSIKKGQRYEHQYHTQTGELVEALTESDVYKYLGYNQAQQILHKDIKNSLTKQFKHRLNTILRSHLYSKNTFKAVNTYAIPILTYSFGIINWNKTELKSLQRIISTSMTRHRKHHPRSCIQRMTLPRNNGGRGLIDILNLHNKQITNLRNYFYHKTLTSSLHNAIVQNDKKLTPLNLADKTQQRNEVQTDRQTKLNEWTRKALHGRHLHDLNQPTVDKTASNEWLKRGELFPETEGFMLAIQDQVIETKNYKKYIMKLANSSDDSCRKCKGSPETIQHITGACRAIVQTDYKHRHDQVAAIIHQNLAFKHKLISEKTAYYKYTPQTVHDTTDYKLYWDRTILTDKTVHFNRPDITLHDKKNQIVYLVDIAVPNTHNLSSTHAEKLSKYTDLAIEIKTQWKVKAVKTVPIVLSSTGVIPHTLHTSLKLIDIHPLTYIILQKAVILNTCRIVRKFLSMDTTTTALVLG

SEQ ID NO: 23661 - protein, 1428 aa, Amphipyra berbera
MRLRSRLLPQAGTVANHDGESRPGPSGPGCPTYSGEGTVSQTSAQFRTVVDHHQDSSSVISSTSSSIFPSVPSHDPYSRPPTHSTSTASSMLSEDVVQETESVANLAPTATSLRTRRKWSKIMNEFILRTYLQLTLMETDTSGYLPPLHTKFIEKFPEMHMISRQRVGDQRRAIINKKLLTQSDIDRIYKEIREEINNIQINTQIQSVTTSTSQTDDYSTDIHNFPHHRNTRPHLTNSNQAGQRMRWTKEHNETIMRAYYKITLLEANISAYRGPLHQAFITTFPHLEHISEQRVADQRRLIIHNRYLSEERLQAIKDEVASDLFLQNSINTQTSVIANSIHPTPTQPELTTEQDNFLNSIDSEIHTRINNDTNNTLETSTPHSNLTIEIERTFKEAYDYFKNTDPTQRSYIPKQRSSKKLAIIVNYINNNIIPKHIEVDTEFITMQTVLYCAAWAAAKNNGAKIEIPPRVEVSCKYKKNKPKWQRRLESRIEDLRAKIGRLTQYIRGNRSSKIVKHVQYIQNKYKIHATHESPNTHLSEFLDTIKQKLTTFSNRLKRYKTCTLRKAQNKQFAANEKQFYRGLRAPFTNSHTNIHNDLNTQPTPTLQNTTQNNSPPVGELHSFWATIWEDAVQHNKEADWIRNEQDRYLYSEPMDFQCIPVEVFHDVVNKLHNWKAPGSDNIHNFWYKKFTRAHTFIYNYINKFIEQPQLLPQYITAGTTYMLPKDPNNLSNPAKYRPITCLQTFYKILTSCLTQIIYKHIDQNNILAEQQKGCRKYSQGCKEQLSIDSILLNQTLHSKSDLYSMYIDYKKAFDSVPHTWLLQILEIYRIHPQIISFLQTTMTKWPTRLRLTTGTSTVITEPIKVQRGIFQGDALSPLWFCLALNPLSNMLNSSNAGYDLDYKENETDLLTDCSTHKLNHLLYMDDIKLYSTTEEELQRLAQITEKFSQDICMEFGIDKCKINSIKKGQRYEHQYHTQTGELVEALTESDVYKYLGYNQAQQILHKDIKNSLTKQFKHRLNTILRSHLYSKNTFKAVNTYAIPILTYSFGIINWNKTELKSLQRIISTSMTRHRKHHPRSCIQRMTLPRNNGGRGLIDILNLHNKQITNLRNYFYHKTLTSSLHNAIVQNDKKLTPLNLADKTQQRNEVQTDRQTKLNEWTRKALHGRHLHDLNQPTVDKTASNEWLKRGELFPETEGFMLAIQDQVIETKNYKKYIMKLANSSDDSCRKCKGSPETIQHITGACRAIVQTDYKHRHDQVAAIIHQNLAFKHKLISEKTAYYKYTPQTVHDTTDYKLYWDRTILTDKTVHFNRPDITLHDKKNQIVYLVDIAVPNTHNLSSTHAEKLSKYTDLAIEIKTQWKVKAVKTVPIVLSSTGVIPHTLHTSLKLIDIHPLTYIILQKAVILNTCRIVRKFLSMDTTTTALVLG

SEQ ID NO: 23662 - protein, 1417 aa, Autographa pulchrina
MRLRSGNKLPQAGTGSISEGESRTKPSGLGCLTYSGGGNVLQSSAQFSTDVEFHHHPHSHDSSAINISPSSSSLSSSSSLFASIPSTNPYSRSPTHSIVSSMLSEDVVQETDSVAILAPTTSSLNSRKKWSKPMNEFILRTYLQLTLMETDTNGYLPPLHTKFLEKFPEMQNVSRQRVGDQRRAIVNKKLLPQNDIDIIYREVNEEMNSIRDNTLTSNLETGTTAHTHSLQIQKQTVSSNQVGQRLRWSKDHNEAIMRAYYRITQLEANISAYRGPLHQAFVNTFPTLSYISEQRVADQRRLIIKNRYISEERLQAIRDEVASETPLQSNSDALDRNSIGIVSTQAGPDAELENNWFNSLGFGLSTNVDSSINNASENTELQLDQNSTELDQTFQECYNYFKNTDPTQRSYIPKQKSSKRLATIVNYINCNILPKHIFPGTEFITLQTVLYCAAWTAAKVNGAKIQIPPRLEASSRFKTKKPKWQIRLELRIVELRCQIGRLTQYIRGNQNIKLVKHVNYIQNKYRVHATHENHNTQLIEFLDTLKQKLTALSNRLKRYKTCTLRKTQNKQFTSNEKQFYRGLKTTCNNSPFSTYFESRTPATPTPRNPRTSPDADELRGFWAGIWENPVHHTKEADWIQDEHNRHLDAEPMDFQCIPVEIFRDVIKKLHNWKAPGSDNIHNFWYKKFTYLHPFIHNNINKFIEQPDTLPCYVTVGTTYMLPKDPSSLSDPAKYRPITCLQTIYKIITSCLTHMIYKHIDRNSLLAEQQKGCRKYSQGCKEQLTIDSVILRHTQLNKSDLFSMYIDYQKAFDSVPHTWLLQVLEIYRINPIIISFLQNTMTRWVTRLSLTTDSSTVMTEPIKVQRGIFQGDALSPLWFCLSLNPLSNMLNSLNLGYQLKYKADEITPATQCLPYKLNHLLYMDDIKLYGSTEVELLRMAEITENFSRDICMNFGIDKCKINSMRGGQQYDHQYCMQNGEIIEPLAEAEVYKYLGYNQAQQMQHKTIKASLIKQFRHRLNIILRSHLYSKNTFKAVNTFAIPVLTYSFGIINWNKTELKSLQRIIHTTMTKNRKHHPRSCIQRMTMPRTRGGRGLIDILNLHNSQIKNLRTYFHTKSNISLLHKAIVQNDKKLTPLNLLDPTHQKNEMQTDMQTKLNEWTRKTLHGRHLHDLNQPTVDKIASNEWIRRGEMFPETEGFMLAIQDQVIETNNYKKHIMKLPSLINDTCRKCKGSSETIQHITGACRVIVQTDYKHRHDQVASIIHQNLAFKFNLIKDKVAYYKYTPQVVIDNADYKLYWDRTILTDKTVHYNRPDITLHDKKNETVYLIDIAIPNTHNLSATHTEKLTKYTDLAIELKNQWKVKAVKTIPIVLSSTGIIPHTLHTSLKLLDLHSLTYILLQKATILNTCRIVRKFLSTD

SEQ ID NO: 23663 - protein, 1395 aa, Cycloglypha thrasibulus
MRLRSGCILPQAGTGANRTGESSPASLGTGSPTYSGGDTVSLTSAQISTVAENNHDTTSVESYSSVPSTHSYSQSPTHTNTTTTSMLTGDVVQAANPAENLAPIIVSSQTRKKWSNTMNEFILRTYLQLTIMETDLNGYLPPLHTKFIERFPEMHMISRQRVGDQRRAIINKKLLKQNDIDRIYEEVRQEIHNTHRNTLTHNLLTTLSHTVQSPTLTYPTDTQTHNNISENNQRMRWSKKQNETIMYAYYKITLLETNTSAYRGQLHKEFIKAYPHLKHITEQRVSDQRRLIVCNKYLSEDTLQAIKEQVAKELPLENNSNIDTLNIIEPASDTLINTSLTNDLSNKTTLNLDIQKQTEIKQHFETAYNYFKNIEPTQRCYIPKQKSSIKLAIIVKYINNEILPSYINDSTEFSKMQTVLYCGAWAAAKSNGAKLNIMKDNQEVYRHRMKKPKWQIRLENRVEVLRAQIGRLTYYIKGSRSVKLERQINCIRRIYKIHATHENPNNTLHEFLDTLKQKLTTVSNRLKRYKTCTLRKIQNKTFSNNEKQFYRGLKTPTDNSSIKTHIQNTCTRDTSRNTSHSNSTPPNADKLRSFWTTIWENPVQHNKEAKWILEEQCKYSTTEPMDFQCVPAKVFHDVIKKLHNWKAPGSDKIQNFWYKKFTYAHPFIYKYINKFIEMPHTLPEYLTVGSTYMLLKDSNSISNPAKYRPITCLQSFYKIMTSCLTHIIYKHIDDTGILAEQQKGCRKWSQGCKEQLLIDSVVLKGTQKKKTDLYSMYIDYKKAFDCVPHSWLLQILEIYRIHPIIINFLKNLMDNWTTHLKLITSTDTIITEPIKIKRGIFQGDALSPLWFCLALNPLSNMLNSTNTGYNFNYRETATNFITSNKCNQTDRLNHLLYMDDIKLYASTEQELNNLAQITENFSKDVNMEFGIDKCKINSVKAGQNYMHHYHLQTGEIVKPLEEHQVYKYLGYNQNQNILNADIKLALKKEFKLRINSILRSYLNSKNTFKAINTYAIPILTYSFGVINWNKTDLKTLQRTINTTLSQNRKHHPRSSIQRMTLPRNDGGRGLIDIENLHNKQITNLRTYFHNKAQTSTLHRTVVHNDRKLTPLNLYDRTQQKNEIQTDRQTKIRDWTKKALHGRHLLDLNQPNVDRKASNEWLKRGDLFPETEGFMAAIQDQVIETKNYRKYIMKLPNSAEDSCRKCKGPSETIQHITGACRAIAQTDYKHRHDQIAAIIHQNLAFNHRLVSEKTAYYKYTPQTVLDSADYKLYWDRTILTDKTVHFNRPDITLHDKTNKIVYLIDIAVPNTHNLTTTYTDKITKYTDLALEIKAQWKVDKVKTIPIVISSTGVVPRTLHTSLKQLNIHSQTYVTIQKATILNTCRIVRKFLSMDTT

SEQ ID NO: 23664 - protein, 1416 aa, Autographa pulchrina
MRLRSGNKLPQAGTGSISEGESRTKPSGLGCLTYSGGGNVLQSSAQFSTDVEFHHHPHSHDSSAINISPSSLSSSSSLFASIPSTNPYSRSPTHSIVSSMLSEDVVQETDSVAILAPTTSSLNSRKKWSKPMNEFILRTYLQLTLMETDTNGYLPPLHTKFLEKFPEMQNVSRQRVGDQRRAIVNKKLLPQNDIDIIYREVNEEINSIRDNTLTSNLETGATAHTLSLQIQKQTVSSNQVGQRLRWSKDHNEAIMRAYYRITQLEANISAYRGPLHQAFVNTFPTLSYISEQRVADQRRLIIKNRYISEERLQAIKDEVASETPLQSNSVALDRNSIGIVSTQAGPDAELENNWFNSLDFGLSTNVDSSINNASENTELQLDQNSNELDQTFQECYNYFKNTDPTQRSYIPKQKSSKRLATIVNYINCNILPKHIIFPDTEFITLQTVLYCAAWTAAKVNGAKIQIPPRLEASSRFKTKKPKWQIRLELRIGELRCQIGRLTQYIRGNQNIKLVKHVNYIQNKYRVHATHENHNTQLTEFLDTLKQKLTALSNRLKRYKTCTLRKTQNKQFTSNEKQFYRGLKTTCNNSPFSTYFESRTPATPTPRNPRTSPDADELRGFWAGIWENPVHHTKEADWIQDEHNRHLDAEPMDFQCIPVEIFRDVIKKLHNWKAPGSDNIHNFWYKKFTYLHPFIHNNINKFIEQPDTLPCYVTVGTTYMLPKDPSSLSDPAKYRPITCLQTIYKIITSCLTHMIYKHIDRNSLLAEQQKGCRKYSQGCKEQLTIDSVILRHTQLNKSDLFSMYIDYQKAFDSVPHTWLLQVLEIYRINPIIISFLQNTMTRWVTRLSLTTDSSTVMTEPIKVQRGIFQGDALSPLWFCLSLNPLSNMLNSLNLGYQLKYKADEITPATQCLPYKLNHLLYMDDIKLYGSTEVELLRMAEITENFSRDICMNFGIDKCKINSMRGGQQYDHQYCMQNGEIIEPLAEAEVYKYLGYNQAQQMQHKTIKASLIKQFRHRLNIILRSHLYSKNTFKAVNTFAIPVLTYSFGIINWNKTELKSLQRIIHTTMTKNRKHHPRSCIQRMTMPRTRGGRGLIDILNLHNSQIKNLRTYFHTKSNISLLHKAIVQNDKKLTPLNLLDPTHQKNERQTDMQTKLNEWTRKTLHGRHLHDLNQPTVNKIASNEWIRRGEMFPETEGFMLAIQDQVIETNNYKKHIMKLPSLINDTCRKCKGSSETIQHITGACRVIVQTDYKHRHDQVASIIHQNLAFKFNLIKEKVAYYKYTPQVVIDNADYKLYWDRTILTDKTVHYNRPDITLHDKKNETVYLIDIAIPNTHNLSATHTEKLTKYTDLAIELKNQWKVKAVKTIPIVLSSTGIIPHTLHTSLKLLDLHSLTYILLQKATILNTCRIVRKFLSTD

SEQ ID NO: 23665 - protein, 1317 aa, Narcosius parisi
MRLRSGYKLPQAGTGANCNGESRPESSNSGRPTYSGGDTVSQTSAQSNTVADLHHDSESVASFPSVPSTNPYSYSSNSSSTTANSMRTEDVVQEADPVENLAPTTASLNTRRKWSKTMNEFILRTYLQLTLMETDISGYLSPLHTKFIEKFPEMHMISRQRVGDQRRAIVNKKLLAQNDIDRIYREIREETNNTQKHTQISNTKPTHSHTDKPLPHNNSTCQRMRWTTDHNVTIMRAYYKITLLEANISAYRGQLHKEFIATYPHLKHITEQRVADQRRLIIQNRYLNEEKLQSIKDEVASELLLQKHNNTLTTSNMIPAPDLTNQQDSIHYNDSEIFNNINNTNESSNIKTSHLDKQKIAEIGKNFEAAYNYFKNINPTQRSYIPKQKASVKLAIIVNYINKSILPKHIDEDIEFSNLQTVLYCGAWAAAKSNGSKLAIPPKIESYNIYKIRKPKWQIRLERRVEKLRVEIGQLTQYIKGNNSIKIEKSVKFIKIRYKIHAAHENPNTHLSEFLDTLKQKLTTISNRLKRYKTCTLRKTQNNTFSTNEKQFYRQLRSNSSHNAQNSSQINTSPPPPDELRAFWATIWENSVRHNKMAKWILHEQSTYSKSEPMVFQWIPSEVFDDVIKNLHNWKAPGSDNIHNFWYKKFTSIHPFIYKYINKFIEMPHTLPDYITEGITYMLPKDLNDISNPAKYRPITCLQTIYKIMTSCLTQIIYNHIDNNHILTEQQKGCRKYSQGCKELLTIDSVILKQTQKRKSDLYSMYIDYKKAFDSVPHTWLLQILEIYHIHPQIISFLQNTMTKWITRLKINNGTCTAITDPIKIQRGIFQGDALSPLWFCLALNPLSNMLNLSNTGYVLKLTEDDPNLLAVLSTYKLNHLFYMDDIKLYGSTEEELQNLAQITDEFSKDICMEFGIDKCKINSIKAGQTYQHQYQMQTGELIEALHENEVYKYLGYNQAQQILHKDIKDSLTKQFRHRLNVILRSHLYSKNTFKAINTYAIPILTYSFGVINWNKTQLKSLQRIINTTMTQNRKHHPRSCVQRITLPRQDGGRGLIDISNLHNKQITNLRTYFHNKAQTSSLHNAIVKNDTNLTPLNLFDKTLQRNEIQTDRQTKLNEWTRKALHGRHLHDLSQPNVDKIASNEWLRRGELFPETEGFMISIQDQIIETKNYKKHIMKVPNASDDSCRKCKGSPETIQHITGACRAIAQTDYKHRHDQIAAIIHQCLAFKCKLIPEKITYYKYTPQTVLDTTDYKLYWDRTILTDKTVHYNRPDITLHDKKNKIVYLIDIAIPNTHNLSSTHSEKITKYTDLAIEL

SEQ ID NO: 23666 - protein, 1384 aa, Epargyreus spanna
MRLRSGYKLPQAGTGANRDGESRPEQSSSGCPTYSGGDTVSQTSAQSNTVADHHHGSESVASFPSVPSTNPYSYSSIRSTTTVNSMQTEDVVQEADPVENLAPTTASLHTRRKWSKAMNEFILRTYLQLTLMETDISGYLPPLHTKFIENFPEMHMISRQRVGDQRRAIVNKKLLTQNDIDKIYRETREEINNTQRNSQTYNTKPTHSHTDKPLSPNNNTSQRMRWTTEYNVTIMRAYYKITLLEANITAYRGQLHKEFITTYPHLQHITEQRVADQRRLIIQNKYLSEEKLQSIRDEVASELHLQINNNIQTPSSMFPVVDSIDQQDINPDISNNINNTKDSPNIRTSHLNQQKITEIEQNFDAAYNYFKNIHPTQRTYIPKQKTSVKLATIVNYINKTILPKHVDKDTEFMKLQTVLYCGAWAAAKSNGSKIAIPPKIEVGNIYKIKKPKWQIRLEKRVEKLRAEIGQLTQYIKGNNSIKIEKKVKFIKIRHKIHATHENPNTHLLDFLDTQKQKLTTISNRLKRYKTCTLRKTQNNTFSTNEKQFYRELSTNSSHSLQNNTQIKISPPPSDELRTFWATIWENSVQHNNMANWILHEQNTYSESEPMIFECIPFEVFDSVIKKLHNWKAPGSDNIHNFWYKKFTFVHPFIYNYINKFIKIPHALPEYITEGITYMLPKDLHDISNPAKYRPITCLQTIYKIMTSCLTEIIYNYVDNNNILTEQQKGCRKYSQGCKEQLTIDSVVLQQTKKRKSDLYSMYIDYKKAFDSVPHTWLLQVLEIYHIHPQIISFLQNTMKKWITKLKLTNGTNTVITEPIKIRRGIFQGDALSPLWFCLALNPLSNMLNSSNTGYDLKFIENNPNRLADFSICKLNHLLYMDDIKLYGSTKEELQTLAQITENFSTDICMEFGIDKCKINSIKAGQNYQHQYQMQTGELVKALHENEVYKYLGHNQAQQILHKDIKDSLTIQFRRRLNAILRSHLYSKNTFKAINTYAIPILTYSFGVINWNKTQLKTLQRIINTTMTQHRKHHPRSCVQRITLPRQDGGRGLIDILNLHNKQITNLRTYFHNKAQISALHNAIVENDTNLTPLNLFDKTLQRNEIQTNRQTKLNEWTRKALHGRHLHDLNQPNVDKLASNEWLRRGELFPETEGFMIAIQDQIIETKNYKKHIMKVPNASDDSCRKCKGSPETIQHITGACRAIAQTDYKHRHDQIAAIIHQCLAFKYKLIPEKITYYKYTPQTVLDTTDYKLYWDRTILTDRTVHYNRPDITLHDKKNKIVYLIDIAIPNTHNLSSTHSEKIAKYTDLAIELKSQWKVEKVKTVPIVISTTGVIPDTLHSSLKLLNIHPQTYIILQKASILNTCRIVRKFLSMDPTSPALMLG

SEQ ID NO: 23667 - protein, 1380 aa, Astraptes talus
MRLRSGYKLPQAGTRAKRNGESRPEPTNSGCPTYSGGDTVSQTSAQFNTAADHSHDTESVVSFPSIPSTNPYSYSPTCSTTTINSMRTEDVVQETDPVENLAPTTASLSARRKWSKLMNEFILRTYLQLTLMETDITGYLPSLHTKFIEKFPEMQTISRQRVGDQRRAIVNKKLLTQNDIDRIYRETREEISNTQSNTYTSTDNTNHTESQTDRSVSYTNRTSQRMRWTMEHNVTIMHTYYKITLLEENISAYRGQLHKEFITKYPHLKHITEQRVADQRRLIIQNKYLNEEKLQSIRDKVASDLLLQKNNNPQTSSGMSLMPDFIDQPNNTSYNVSEISNNINDSPNVKTSHLDKQKIVEIEQNFDAAYTYFKNIKPTLRSYIPKQNSSTKLANIVNYINKSIFPKHVDIDTEFIKLQTLVYCGAWAAAKSNGCKITIPPKIKTYNLYKTKTPKWQIRLERRVEKLRAEIGQLTQFINGNKSIKITKKVESIKSNYKIHATHENPNTHLSEFLDTLKQKLSTICNRLKRYKTCTQRKVQNQTFTNNEKQFYRELRFCNSHNLHISTHGNTSPPPTDELRTFWSRIWENSVQHDNTAEWILHERNRYSKTEPMVYHCIPTEIFDNVIKNLHNWKAPGSDNIHNFWYKKFTYMHPFIHNYINKFIKTPHILPDYVTEGTTYMLPKDLSDISNPAKYRPITCLQTIYKIITSCLTQIMYEYIDNNKILTEQQKGCRKHSQGCKEQLIIDSVVLKQAQKRKLDLYSMYIDYKKAFDSVPHTWLLQVLEIYHIHPQIISFLQNTMTKWTTRLRLNNSTNTEPIKIQRGIFQGDALSPLWFCLALNPLSNMLNSSNFGYNLKYIQNNLNLLTDCSSYKVNHLLYMDDIKLYGSTEEELQQLAQITEHFSKDICMEFGLNKCKINSLNTGQIYKYQYQMQNGELIDALHDNEVYKYLGYDQAKQTLHTDIKDALTKQFRYRLNAILRSHLYSKNTIKAINTYAIPILTYSFGVINWSKTQLKSLQRIINTSMTKNRKHHPRSCVQRMTLPRQDGGRGLIDILNLHNKQITNLRNYFYIKAQTSSLHNAVVKNDTKLTPLNLFDKTLQRNEIQTDRQTKVHEWNRKALHGRHLHDLNHPNVDKIASNEWLRRGELYPETEGFMIAIQDQIIETKNYKKHIMKLPNASDDYCRKCKGAPETVQHITGACRAIAQTDYKHRHDQIAAIIHQNLAFKCKLISEQTAYYKYNPQTVLDTTDYKLYWDRTILTDKTVHHNRPDITLHDKKNKIVYLIDIAIPNTHNLSSTHTEKITKYTDLAIELKTQWKVERVKTIPIVLSTTGVIPKTLHQSLKAIHISPYTYITLQKAVVLNTCRIVRKFLQTDTTTVT

SEQ ID NO: 23668 - protein, 1392 aa, Cecropterus evenus
MRLRSGYKLPQAGTGATCNGESRPEPSNSGCPTYSGGDTVSQNSAQASTVADHHHDSESVVSFSSIPTTNSYSLLNSPTRSTTTINSIQTEDVVHEADSAVNLAPTTASLNTRRKWSKTMNEFILRTYLQLTLMETDITGYLLPLHTKFIEKFPEMHMISRQRIGDQRRAIVNKKLLTQNDMDRIYRETREEMNNTHMNTQHNTELIHSRRNKSVTHINDISKRMRWTTEYNVTIMRMYYKVTLLETNLSAYRGQLHKEFIAKYPHLKHITEQRVADQRRLIIQNKYLNENMLQNIKDEVANELLHQNSSLATSSNNNISTFNDILPTADPIDTNNPCYNETEIFTNINDKNDSTNVKTSQLDQQKTAEIEEHFEAAYKYFKNINPTQRSYIPKQKSSTKLAAIVNFINNTILPKHLEKETEFIHLQTILYCGAWTAAKSNGSRLEISNKVETYNKYKTKIPNWQIRLERKIENLRVEIGQLTQYIKGNKSIKIAKRVEFIKTKYKIHANHENPNTNLVEFLDTLKQKLSTSSNRLKRYKMCTLRKIQNNTFSNNEKLFYRRLKSNVLNIPHNNTHTNTSSSPSDKLRNFWATIWENPAQHNTMAEWILNEQNKYSMSEPMVFQCIPAEVFDNVVKKLHNWKTPGSDNIHNFWYKKFTFIHPFIYNHINKFIESPHTLPDYISEGITYMLPKDLNDTSNPAKYRPITCLQTIYKIITSCLTQIIYKHIDNNNVLAEQQKGCRKYSHGCKEQLTIDSIILKLAQKRKSDLYSMYIDYKKAFDSVPHTWLLQILEIYHIHPQIIYFLQNTMRKWITRLKLTNKTNTIITEPIKIQRGIFQGDALSPLWFCLALNPLSNMLNSSNIGYDVGCIGNNPDLLTDCSTYKLNHLLYMDDIKLYSSTEEELQKIAQITEKFSRDICMAFGIDKCKINSIRTGQIYQHQYQMQTGELIEALDKNEVYKYLGYNQAQQILHKDVKESLTKQFRCRLNAILRSYLYSKNTVKAINTYAIPILTYSFGIINWNKTQLKSLQRIINTSMTKNRKHHPRSCVQRLTLPRHSGGRGLIDIYNLHNKQITNLRTYFHNKAKTSSLHKAIVKNDTKLTPLNLFDETIQRNEVQTDRQTKLNDWTRKALHGRHLHDLNHPNVDKIASNEWLRRGELFPETEGFMIAIQDQVIETKNYKKYIMKLSNASDDSCRKCKGAPETIQHITGACRAIVQTDYKHRHDQVAAIIHQSLAIKCELISEQTAYYKYKPQTVLDTSHYKLYWDRTILTDKTVHFNRPDITLHDKMNKIVYLIDIAIPNTHNLSSTHTEKITKYTDLAIELKSQWKVDKVKTIPIVLSTTGVIPKTLHQSLKSINMSPYTYVTLQKAVILNTSRIVRKFLQTDSSPTIT

SEQ ID NO: 23669 - protein, 1307 aa, Cecropterus phalaecus
MRLRSGYKLPQAGTRANRNGESRPEHSNSGRPTYSGGDTVSQISAQSNTAADHSHDSESVVSFPSVPSTNPYSCLNTPTRSSTTINSMQAEDVVQEADSAGNLAPTTASLNTRRKWSKAMNEFILRTYLQLTLMETDITGYLLPLHTKFIEKFPEMHMISRQRVGDQRIAIVNKKLLTQNDIDRIYRETRKEINNTHIDTQHNSTRTSKSVTHINDISQRMRWTTEYNVTVMRAYYKITQLETNITAYRGQLYKEFITKYPHLKHITEQRVADQRRLIIQNKYLNEEILQNIKDEVASELLQQTNNMLTSSDTLSTSDLNQYNTNCNVTETRTNIDNTKDSTNVKTSHLDQRKIAEIEQYFDTAYNYFKNINPTQRSYIPKQRSSINLATIINYINNYILPKHVEKDTEFIKLQTVLYCGAWTAAKSNGSRLVIPKEIETYNIYKRKIPNWQIRLEKRIEKLRVEIGQLTQYTKGNKSIKIAKRVELIKTKYKIHATHENPNTHLSEFLDTLKQKLSTICNRLKRYKICTLRKIQNNTFSNNEKQFYRRLKSNNLHTPHNNTHTNTSPPPSDELRTFWATIWENPVQHDKMAKWIIHEQNKYSKSKPMVFQCISAEVFGNVIKKLHNWKTPGSDNIHNFWYKKFTFFHPFIHNYINKFIEMPHTLPDYMTEGITYMLPKDPNDIRNPAKYRPITCLQTIYKIITSCLTQIMYNYIDNNNILAEQQKGCRKYSFGCKEQLTVDSIILKQAQKRKSDLYSMYIDYKKAFDSVPHTWLLHILEIYHIHPQIIFFLQNTMSKWITRLRLTNKTNTFITEPIKIQRGIFQGDALSPLWFCLALNPLSNMLNLSNTRFDLGYIENNPNLLTDCSFYKLNHLLYMDDIKLYGCTEEELYKIAQITEIFSKDIYMEFGIDKCKINSIKTGQIYQHQYQMQTGELIEALDENEVYKYLGYNQAQQILHKDIKDSLTQQFRCRLNAILRSHLYSKNTIKAINTYAIPILTYSFGIINWNKAQLKSLQRMINTLMTKNRKHHPRSCVQRITLPRHDGGRGLIDIFNLHNKQISNLRTYFHNKAQTSLLHKAIVKNDTKLTPLNLFDKTIQRNEIQTDRHTKLNEWNRKALHGRHLHDLNHPNVDKIASNEWLRRGELFPETEGFMIAIQDQIIETKNYKKHIMKLSNASDDSCRKCKGAPETVQHITGACRAIAQTDYKHRHDQVAAIIHQNLAIKCKLISKQTPYYKYRPQTVLDTPHYKLYWDRTILTDKTVHFNRPDITLYDKNNKIVYLIDIAIPNTHNLSSTHTEKITKYNDL

SEQ ID NO: 23670 - protein, 1378 aa, Astraptes naxos
MRLRSGYKLPQAGTGANRNGESRPEPSNSGRPTYSGGDTVSQTSAQSNTAADYNHDSESAVTFPSVPSTNPYSYSPTRSTTTINSLRTEDVVQEADPVENLAPTTASISTRRKWSKAMNEFILRTYLQLTLMESDITGYLPPLHNKFIENFPEMHMISRQRVGDQRRAIINKKLLTQVDIDRIYRETREEISNTQSNTKLTHFQIDKPGTHINDASQRMRWTMEHNVTIMHAYYKITLLESNISAYRGQLHKEFITKYPHLQHITEQRVADQRRLIIQNRYLNEEKLQSIKDEVAGELLLQRNNNIHTYSNILPTPDVMNQQDNTNHNDSEMISNINQTNDGNVTKLNLDQQKIAEIEQNFDAAFNYFKNIKPTQRSYIPKQKPSIKLATIVNYINNSILPKHVNDDTEFINLQTVLYCGAWAAAKSNGSKIDVPPKIGIYNTYKAKTPNWQIRLERRVEKLRVEIGQLTQYIKGNKSTKLEKKIESIKTKYKIHATHENPNTRLSEFLDTLKQKLSTICNRLKRYKMCTLRKIQNNTFSNNEKQFYRGLGLNNSHITHNNTQINTSPPPSNDLRKFWATIWENSIQHDKMAKWILHEQNKYSKSEPMTFQCIPVEVFDNVIKNLHNWKAPGSDNIHNFWYKKFTFIHPFIYNYINNFIESPHTLPDYVTEGITYMLPKDPNDISNPAKYRPITCLQTIYKIITSCLTKIIYTYIDNNKILAEQQKGCRKYSYGCKEQLTIDSVILKQVQKRKLDLYSMYIDYRKAFDSVPHTWLLQILEIYHIHPQIISFLQNTMTKWITRLRLTNITNTVISEPIRIQRGIFQGDALSPLWFCLALNPLSNMLNSSNIGYDLECITSNPNLLTDCSIYKLNHLLYMDDIKLYGSTEEELQELSQITENFSKDICMEFGIDKCKINSVRAGQTYLHQYQMQTGELIEALHETEVYKYLGYNQAQQILHKETKETLTQQFKRRLNTILRSHLYSKNTIKAINTYAIPILTYSFGVINWNKTQLKSLQRIINTSMTKNRKHHPRTCVQRMTLPRQDGGRGLIDILNLHNKQITNLRTYFHNKAQTSVLHNAIVKNDTKLTPLNLFDETLQRNEIQTDRQTKLQEWNRKSLHGRHLHDLNHPNVDKIASNEWLRRGELFPETEGFMIAIQDQIIETKNYKKHIMKLPNASDDSCRKCKGASETIQHITGACRSIAQTDYKHRHDQIAAIIHQNLAFQCKLIPEQIAYYKYIPQTVLDTTEYKLYWDRTILTDKTVHYNRPDITLHDKKNKMVYLIDIAIPNTHNLSSTHTEKISKYTDLAIELKTQWKVERVKTVPIVLSTTGVIPKTLHQSLKFINLSPYIYITLQKAVVLNTCRIVRKFLQTDTTTIT

SEQ ID NO: 23671 - protein, 748 aa, Drephalys kidonoi
MVFQCIPAEVFHNVIRNLHNWKTPGSDNIHNFWYKKFTYVHPFIHNYINKFIEMPHSLPDFITEGITYMLPKDPDNVSNPAKYRPITCLQTIYKILTSCLTQIIYNYIDNNKILAEQQKGCRKYSQGCKEQLTVDSIVLKQTRKHKSDLYSSYIDYKKAFDCVPHSWLLQILETYHIHPQIISFLQNTMAKWTTRLRLTTRTDTVITDPIKIQRGIFQGDALSPLWFCLALNPLSNMLNSLNIGYALEYRENNPSPHTDCFNHKLNHLLYMDDIKLYGSTEEELQTLIQTTERFSKDIWMEFGIDKCKINSIRAGQNYQHQYQTSNGELIEALNKNQVYKYLGYNQAQQILHKDTKDSLTKEFKHRLNTILRNHLYSKNTFKAINTYAIPILTYSFGIINWNKTELKSLQRLINTTLTHNRKHHPRSCVQRMTLPRHDGGRGLIDIVNLHNRQITNLRTFFHNKAQTSSLHNAIVENDKKLTPLNLFDRTQQKNEIQTDRQTKLNEWARKALHGRHFHDLSQPNVDKIASNEWLRRGELFPETEGFMIAIQDQIIETKNYKKHIIKMPNASDDSCRKCKESPETIQHITGACKTIAQTDYKHRHDQVAAIIHQNIAFKFKLIAEKIAYYKYIPQTVLDTTDYKLYWDRTILTDKTIHFNRPDITFHDKKNKIVHIIDIAIPNTHNLSSTYSDKITKYADLGIELKTQWKVDKVITVPIILSSTGVIPRSLHSSLKLLHIHPQTYITLQ

SEQ ID NO: 23672 - protein, 1333 aa, Gorgopas trochilus
MRLRSGFKLPQAGTGANRDGESSLEPTSSGSPMYSGGDNGSQTSAQCNTVADDSHDSISVVSFPSDPSTNPYSHTSTLSSTSSNSSNSQLDDVVQWADSASNLAPIAVNIKTRKKWNKSMNEFILRTYLQLTSMETDISGYLPALHSKFIERFPDMHMISRQRVGDQRRAIINKKLLTQTEIDKIYKEIQNEINDSSISHNANHSIATTSQTNIEHTYESLHSHNRISQTPISNEKNQRMRWTKEHNETIMRAYYKITHLESNMSAYRTQLHKTFITIYPHLQHITEQRVADQRRLIINNRYVSEERLQQIKDEIVKELHLHENSNSQSFSISAAKFPPLESENMEGNNRESIASPENFQSTEEIRTAYIDESSTRKIEQNFNTAYSYFKNSDPTQRSYIPKQRSSKKLATIVNFINKNILPKHINFDTEFFTLQTVLYCGAWAAAKSNGTKIDIPLETETHIERKKKKKKKPKWQIRLERRVDKIRAEIGRLMQYIQGNKSIKLEKHVDYIKRKYKLHSTHETPNTHLSEFLDTLKQKLTIISNRLKRYKTCTLRKLQNQMFSTNEKQFYRGLKTSSCNHITNTRNVQSAQPSQHNIHSNSSPPAQDFHKYWAGIWENPIQHNHAADWIANETKHHSDATAMEYQRVPAEVFHAVIKKLHNWKAPGSDNIHNFWYKKFTFAHPYIYNFINKFIEMPDTLPDYITAGITYMLPKDTNNMTNPAKFRPITCLQTIYKIITSCLTHIIYKHTEDNNLLAEEQKGCRKYSQGCKEQLTIDSIVLKQTQKNKTDLYSMYIDYQKAFDSVPHTWLLQCLDIYRVHPQIISFLENVMTKWTTRLRLTTDSNTFITDPIKIQRGIFQGDALSPLWFCLALNPLSNMLNSSNLGYQLHCEENETDRLTDNSFKKLNHLLYMDDIKLYASTEEELNQLAQLTENFSKDISMNFGIDKCKINSVKSGKIYKHQYVMQTGELVEPLNQNEVYKYLGYNQSQQIQHKDIKNSLTKQFRHRLNTISQSHLNSKNTFKAINTYAIPILSYSFGIINWNKTELKSLQRIIHTTLTKHRKHHPRSCIQRMTLPRFDGGRGLIDVINLHNKQITNLRTYFYHKAQISSLHKTIAQNDKNLTPLNLADNRKQKNEILTDRLTKLNDWTQKSLHGRHLHDLCQPNVDKTASNAWLKHGELFPETEGFMVAIQDQIIETKNYKKHIMKLPNASDDSCRKCKGPAETIQHITGACRTIAQTDYKHRHDQVAAIIHQSLALKYKLITLKTAYYKYTPQTILDNKDYKLYWDRTILTDKTIHYNRPDITFHDKKNKIVYLIDIAIPNTHNLTSYLH

SEQ ID NO: 23673 - protein, 1432 aa, Pholisora mejicanus
MRLRSGIKLPQAGTGANRNGESSLEPSSSGSPTYSGGDNGSQASAQFNTDADHSHDSISVVSFPSDPSTNPYSRSSTPLNTSSNNSSQSDDVVQKADSAGNLTPIADGMKTRRKWSKIMNEFILRTYLQLTLMETDISGYLPVLHTKFIERFPDMSMISRQRVGDQRRAIINKKLLTQTEIDKIYREIQIEINNMNSSYIHTHNTTHPTTTLSQTNKPTEKPYELTHSQYRITQTSTNVEKYQRMRWTKEQNETIMRTYYKITLLESNMSAYRTQLHQAFITIYPHLQHITEQRVADQRRLIINNRYLSEEKLQEIKNEIANELHLHENTNSQSLNKTAAIVSQPECENEEGINWEGLASDEIQSRDSTQDSAEIRISYLDESSTKEIVQHFNSAYNYYKNTNPTQRNYIPKQRSSKKFAAIVNFINKNILPKHIDINTEFITLQTVLYCGAWAAAKSNGAKIDIQAETETHTKIKKKKRKPKWQIRLERRVEEIRAEIGRLMQYIKGNRSTKIEKHVNIIKRKYKLHSTHESPNTHLSEFLDTLKQKLTIISNRLKRYKTCTLRKLQNQMFSVNEKQFYRGLKTSSYNHIIHTRNDQSTLPSTTSQIPQHTIHSTNSPPAHELQRYWAGIWENPVQHNQAADWIADETKHHSNCTSMEYRRVPMEVFHNVIKKLHNWKAPGSDNIHNFWYKKFTYAHPFIYNFINKFIERPETLPDYITAGITYMLPKDANNMTNPSKFRPITCLQTIYKILTSCLTQIIYKHIEDNNLLTEQQKGCRKYSQGCKEQLTIDSIVLKKTQKCKTDLYSMYIDYQKAFDSVPHTWLLQCLEIYGIHPQIISFLENVMTKWTTRLRLTTDSNIITTDPIKIQRGIFQGDALSPLWFCLALNPLSNMLNSSDLGYLLDCAGNETDGLTNTSTKKLNHLLYMDDIKLYGSTEEELQQLAQITENFSKDISMNFGIDKCKINSVKAGQIYKHEYIMQTGELVEPLNQNEVYKYLGYNQSQQIQHKDIKNSLTKQFKHRLNTISQCHLNSKNTFKAINTYAVPILSYSFGIINWNKAELKSLQRIIHTTLTKHRKHHPRSCIQRITLPRIDGGRGLIDIINLHNKQITNLRTYFHYKAHSSPLHKSITQIDKNLTPLNLADNRKQKNEILTDRLTKLDEWTRKSLHGRHFHDLSQPNVDKIASNAWLKHGELFPETEGFMIAIQDQIIETKNYKKHIMKVPNASDDSCRKCKGPAETIQHITGACRTIAQTDYKHRHDQVAAIIHQSLALKHKLITLKTTYYKYTPQTVLENKDYKLYWDRTILTDKTIHYNRPDITLHDKKNKIAYLIDIAIPNTHNLTSTYTEKIIKYTDLAIELKSQWKVNKITTIPIILSATGVIPDSLHTSLKLLNTSPYTYIILQKATILNTCRIVRKFLSMDTNPSALVLG

SEQ ID NO: 23674 - protein, 1339 aa, Mimoniades ocyalus
MRLRSGYKLPQAGTGARSNGESRPEQSNSGRPTYSGGDTVSQTSAQSSTAADNDSVSMLSFPSVPSTNSFSQSPTHSSITVNSMPPEDVVQEADLVENLAPTTTGLNRRRKWNKEMNEFILRTYLQLTLMETDTNGYLPSLHTKFIERFPEMHTISRQRVGDQRRAIVNRKLLAQIDIDRIYREIREEINNTQANSLTNKALLTDSQLGEQLSCKNKTKERMRWTMEHNVTIMRAYYKITLLETNISGYRGQLHKEFITTYSHLQHITEQRVADQRRLIVHNRFLHEEKLQAVKDEVATELNIQKNNNTQTTSSINTAIELESINELANIIDPEIHTNRNDTNTLLTVNLNLDQQKTLEIENNFDAAYKYFKNIHPTQRNYIPKQKTSFKLATIINYINDKILPKYIDGNIDFITLQNVLYCGAWAAAKSNGTKIYLPPKLIADIKHHKKKPIWQIRLEYRIEKLRAHIGQLTQYIRGNKSIKIEKQVTFIKRKYKIHATHENPNIHLSEFLDTLKQKLTTYSNRLKRYKTCTLRKTQNKTFTNNEKQFYRGLSLINKHTEQNSSHNNNLPPSVDKLRSFWATIWENSVQHNKAANWIFEEQNKYLHIEPMVFQRVPAEIFHDVIRKLHNWKAPGSDNIHNFWYKKFTYIHSFLHNHINKFIECPHTLPEYVTEGITYMLPKGHTNISDPAKYRPITCLQTFYKIMTSCLTQLINNHIDSNKILAEEQKGCRKFSQGCKEQLTIDSIVLNQTRKRKSDLYSMYVDYKKAFDSVPHSWLLQVLQIYHIHPQVIYFLQNVMAKWTTKLRLTTDSNTIITEPIKIQRGIFQGDALSPLWFCLALNPLSNMLNSSNIGYDLQYKTNYTKLLTDSSIYKLNHRLYMDDIKLYGPTKEALHKLAQITESFSKDICMEFGVDKCRTNSIKAGQNCEYQMQTGELIESLQENEVYKYLGYNQMQHILHKDTKETLTKQFKHRLNTIFRSHLYSKNTFKAINTYAVPILTYSFGIINWNKTELKSLQRIIHTTMTHNRKHHPRSCVQRMTLPRPDGGRGLMDILNLHNRQIANLRNYFHTKAKTSSLHSAIVENDLKLTPLNLFDKSQQKNETLTDRQTKLEEWTRKALHGRHLNDLNQPNVDKKASNEWLKRGELFPETEGFMVAIQDQIIETNNYKKYIMKLPNASDDSCRKCKGSPETIQHITGACRAIVQTDYKYRHDQIAAIIHQKLAFKYKFISEKVAYYKYTPQTVLDSIDYKLYWDRTILTDKTVHYNRPDITLHDKKNKIVYLIDIAIPNTHNLSSTHTEKITKYTDLAIELKTQWKVEKVKTIPIVLSTTGVIPKTLH

SEQ ID NO: 23675 - protein, 1383 aa, Polygonus savigny
MRLRSGYKLPQAGTGARSNGESRPEQSNSGRPTYSGGDAVSQTSAQYSTAADNDSVSMLSFPSVPSTNSFSQSPTHSSITVNSMPPEDVVQEADLVENLAPTTTGLNRRRKWNKEMNEFILRTYLQLTLMETDTNGYLPSLHTKFIERFPEMHTISRQRVGDQRRAIVNRKLLAQIDIDRIYREIREEINNTQGNSLTNKSLLTDSQVGEQLSCKNKTKERMRWTMEHNVTIMRAYYKITLLETNISGYRGQLHKEFITTYPHLQHITEQRVADQRRLIVHNRFLHEEKLQTIKDEVATELNLQKNNNTQTTSSINTAIELESINELGNIIDPEIHTNRNDTNTLLTVNLNVDQQKILEIENNFDAAYKYFKNIHPTQRSYIPRQKTSFKLATIINYINDKILPKYIDGNIDFITLQNVLYCGAWAAAKSNGTKIYLPPKPIADIKHHKKKPIWQIRLEYRIEKLRAHIGQLTQYIRGNKSIKMEKQVTFIKRKYKIHATHENPNIHLSEFLDTLKQKLTTYSNRLKRYKTCTLRKTQNKTFTNNEKQFYRGLSLINKHTEQNSTHNNNLPPSVDKLRSFWATIWENSAQHNKAANWIFEEQNKYSHIEPMVFQRVPAEIFHDVIRKLHNWKAPGSDNIHNFWYKKFTYVHSFLHNHINKFIECPHTLPEYVTEGITYMLPKDHTNISDPAKYRPITCLQTFYKIMTSCLTQLINNHIDSNKILAEEQKGCRKFSQGCKEQLTIDSIVLNQTRKRKSDLYSMYVDYKKAFDSVPHSWLLQVLQIYHIHPQVIYFLQNVMAKWTTKLRLTTDSNTIITEPIKIQRGIFQGDALSPLWFCLALNPLSNMLNSSNIGYDLQYETNYTNLLTDSSIYKLNHLLYMDDIKLYGPTKEALHKLAQITESFSKDICMEFGVDKCRTNSIKAGQNCEYQMQTGELIESLQENEVYKYLGYNQMQHILHKDTKETLTKQFKHRLNTIFRSHLYSKNTFKAINTYAVPILTYSFGIINWNKTELKSLQRIIHTTMTHNRKHHPRSCVQRMTLPRPDGGRGLIDILNLHNRQIANLRNYFHTKAKTSSLHSAIVENDLKLTPLNLFDKSQQKNEILTDRQTKLEEWTRKALHGRHLNDLNQPNVDKKASNEWLKRGELFPETEGFMVAIQDQIIETNNYKKYIMKLPNASDDSCRKCKGSPETIQHITGACRAIVQTDYKYRHDQIAAIIHQKLAFKYKFISEKVAYYKYTPQTVLDSIDYKLYWDRTILTDKTVHYNRPDITLHDKKNKIVYLIDVAIPNTHNLSSSHTEKITKYTDLAIELKTQWKVEKVKTIPIVLSTTGVIPKTLHTSLTLLGIDKQTYITLQKAAILNTCRIVRKFLSMDTNSTAFALG

SEQ ID NO: 23676 - protein, 1392 aa, Autochton oryx
MRLRSGYKLPQAGTGANRNGESRPELSNSGRPTYSGGDNVSQTSAQSNTAADYNHDSESVESVLSIPSTNPYSYSPTCSTTTISSMRTGDVVQETNPVENLAPTTVGVKTRRKWNKAMNEFILRTYLQLTLMETDITGYLSPLHTKFIEKFPEMHMISRQRVGDQRRAIVNKKLLTQNEIDRVYEETRQEINNKQIFTQLHNTKPTHSQIDKPFAHINNTSQRMKWTTEHNVTIMRAYYKITQLESNISAYRAPLHKEFITVYPHLKHITEQRVADQRRLITHNKYLNEEKLQSIKDDVARELHLQEINNTNYSSDILPAPHLPNQQNNTDYTYSDIVPNINYTTDSPNMNKSKLNQQKIAEVEQNFVTAYNYFKNIKPTQRSYIPKQKASLKLATIINYINSIILPKHVDKNTEFINLQTILYCGAWAAAKSNGSKIAIPPKIEAYDLSKSKIPKWQVRLERRIENLRREIGQLTQYIKGNKSTKLERRVKFIKTKYKIHATHENPNTHLSDFLDTLKQKLTTISNRLKRYTMCTLRKTQNKTFSTNEKHFYRSLRSNNSHNTQKNMHINVSSNALPPPSEQLRNFWATIWENSVQHDKTANWILHEQEKYSKYEPMAFECIPIEVFDDVIKKLHNWKSPGSDNIHNFWYKKFTYIHPFIHHYINKFIATPHTLPDYITEGITYMLPKDLNDISNPAKYRPITCLQTIYKIITSCLTQIIYNYIDSKKILAEQQKGCRKYSQGCKEQLTIDSVILKQAQKRKSDLYSMYIDYKKAFDSVPHTWLLQILEIYHVHPRIISFLQNTMTKWITRLRLTNTTNAVITEPIKIQRGIFQGDALSPLWFCLSLNPLSNMLNSSNTGYILESIDNSPNLLTGCYKLSHLLYMDDIKLYGSTEEELQKLAQLTENFSKDICMEFGIDKCKINSIRAGQIYQHQYQLQTGELIESLHEFEVYKYLGYNQAHQILHKDIKDSLTTQFTHRLNTILRSHLYSKNTIKAINTYAIPILTYSFGVINWTKTQLKSLQRIIHTSMTKNRKHHPRSCVQRMTLPRHDGGRGIIDILNLHNQQITNLRKYFYNKAHISLLHNAIVINDINLTPLNLFDKTLQRNEIQTDRQTKLNEWNRKALHGRHLHDLNQPNVDKIASNEWLRRGELFPETEGFMVAIQDQIIETKNYKKHIMKVPNASDDSCRKCKGSPETIQHITSACRAIAQTDYKHRHDQIAAIIHQSLAFNYNLVSKKVAYYKYIPQTVLDTKDYKLYWDRTILTDKTVHYNRPDITLHDKRNRIVYLIDISIPNTHNLSTTHTEKITKYTDLAIELKSQWKVEEVKTVPIIISTTGIIPKTLHSSLKLLNIHPQTYITIQKASILNTCRIVRKFLSMSTPSHHPPLMLG

SEQ ID NO: 23677 - protein, 956 aa, Spioniades abbreviata
MTEIQLNFDAAYNYFKNINPTQRSYIPKQKSSSKFAAIVNFINIKILPTHIDDNTEFITLQTVMYCGAWAAAKSNGSKLDIPPKAEENDKHKIKKPKWQIRLERRVDELRAYIGQLTQYIKGNQSIKIQKHVECIKKRFKIHATHESPNTCLSEFLDTLKQKLTTTSSRLKRYKTCTLRKKQNKTFITNEKQFYRGLRSVSSNPPNNTNNKSSPPLADELRSFWANIWDNSIQHNKEADWIVREKIKYLNSEPMVFQCVSAETFHSVIKRLHNWKAPGSDNIHNFWYKKFTFVFPFIHKYINKFIMVPKSLPGYITEGITFMLPKDPKNSLNPTMYRPITCLQTFYKIMTSCLTDILYNHIENNKILAEQQKGCRKYSQGCKEQLTIDSIVLKQTRKRKKDLYSMYIDYKKAFDSVPHTWLVQILEIYHIHPLIISFLQNVMTKWTTRLRLTTGSSTVVTEPINIQRGIFQGDSLSPLWFCLALNPLSNLLNSSNLGYDLECNELENILTDCSRLKLNHLLYMDDIKLYGSTEKELEKLAQITETFSKDIRMDFGIDKCKINSIKSGQNYKHQYQMQTRELIESLHENEVYKYLGYNQVQQVLHKDTKNNLTKQFRHRLNTILRSHLYSKNIFKAMNTYAIPILTYSFGIINWSKTELKSLQRIINTTMTQNRKHHPRSCVQRITLPRHDGGRGLIDILNLHNKQITNLRNYFQYKAQSSPLHNAIVKNDKNLTPLNLFDQTQQRNEILIDRQTKLDEWTRKALHGRHLQDLNQPNVDKAASNEWLRRGELFPETEGFMIAIQDQIIETKNYKKHIMKLSNTADDSCRKCKGSPETIQHITGACRAIAQTDYKHRHDQVAAIIHQSLAFNHKLITEKVPYYKYTPQTILDSTNYKLYWDRTILTDKTIHYNRPDITLYDKKNKIVFLIDIAIPNTHNLSSVHSEKITKYTDLAIEL

SEQ ID NO: 23678 - protein, 1203 aa, Cecropterus bathyllus
MNEFILRTYLQLTLMETDITGYLTPLHTKFIEKFPEMHMITRQRIGDQRRAIVNKKLLTQNDIDRIYRETREEMSNTHIDTQYNSKLIHSRKSKSVTHINDISQRMRWTTEYNVTIMRAYYKITLLETNITAYRGQLHKEFITKYPHLKHITEQRVADQRRLIIQNKYLNEETLQSIKDEIASELLVQKSNNILTSSDTTLPTPDPINQYNTNYNVTETTTNINDTNDSTNIKTSHLDQQKIAEIEQHFNAAYNYFKNINPTQRSYIPKQRSSIKLATIVNYINNTILPKHIGKDTEFIKLQTVLYCGAWAAAKSNGSRLVIPKKIETYNVYKTKIPNWQIRLERRIEKLRAEIGQLTQYTRGNKSIKIAKKVEFIKTKYRIHATHENPNTHLPEFLDTLKQKLSTICNRLKRYKMCTLRKMQNNTFSNNEKQFYRVLKSSNLHTPHNNTYTNTSPPLSDEMRTFWATIWENPVQHDKRATWIIHEQNKFSNSEPMVFQCISGEVFGNVIKKLHNWKTPGSDNIHNFWYKKFTFMHPFIHNYINKFIETPHTLPDYITEGITYMLPKDPNEIPNPAKYRPITCLQTIYKIITSCLTQIIYKYIENNNILAEQQKGCRKYSYGCKEQLTIDSIILKQAQKRKSDLYSMYIDYKKAFDSVPHTWLLQILEIYHIHPQIIYFLQNTMSKWITRLKLTNKTNIVITEPIKIQRGIFQGDALSPLWFCLALNPLSNMLNSSNSGFDLGNIENNLLTDCSIYKLNHLLYMDDIKLYGSTEEELYKIARITEIFSKDICMEFGIDKCKINSIKTGQIFQHQYQIQTGELVKALDENEVYKYLGYNQAQQILHKDIKDSLTQQFRCRLNAILRSHLYSKNTIKAINTYAIPILTYSFGVINWNKTQLKSLQRIINTLMTKNRKHHPRSCVQRMTLPRDDGGRGLIDIFNLHNKQISNLRTYFHNKARTSSLHKAIVKNDTKLTPLNLFDKTTQRNEIQTDRQTKLNEWNRKALHGRHLHDLNHPNVDKIASNEWLRRGELFPETEGFMIAIQDQIIETKNYKKHIMKLSNVSDDSCRKCKGASETVQHITGACRAIAQTDYKHRHDQVAAIIHQSLAIKCKLISEQTAFYKYRPQTVLDTSHYKLYWDRTILTDKTVHFNRPDITLYDKKNKIVYLIDIAIPNTHNLSSTHTEKITKYTDLALELKSQWKV

SEQ ID NO: 23679 - protein, 1400 aa, Autochton pseudocellus
MRLRSGYKLPQAGTGANRNGESRPEPSNSGRPTYSGGDTVSQTSAQSNTVAEHSHDSESVVSFPSVPSTNPYSLLNSPTRSTTTINSMQTEDAVQVADPAANLAPTTASLNTRRKWSKAMNEFILRTYLQLTLMETDITGYLPPLHTKFIENFPEMNMISRQRVGDQRRAIVNKKLLTQNDIDRIYRETREEINDTHRNTQTNNTILTHSQIDKTVTLINDTSQRMRWTTEHNVTIMRAYYKITLLEANISAYRVQLHKEFITKYPHLKHITEQRVADQRRLIIHNKYLNEEKLQSIKDEVASELLLDKNNTTPTSSSTLPTLDHVNQHNNNNYSDPETFTNINDTNDPQIVKTLHLDKQKIAEIEQNFDVAYNYFKNINPTQRSYIPKQKSSIKFSTIVNYINNTILPKHVDNDTEFISLQTVLYCGAWAAAKSNGSKIGIPPKIETYNKYKPKIPNWQIRLERRVENLRVEIGQLTQYIKGNKSIKIAKRAEFIKEKYKIHATHENPNTQLSEFLDTLKQKLSTICNRLKRYKMCTLRKMQNNTFSNNEKQFYRGLRSNSSHIPHNNIHINTSPPQSNELRSFWAKIWENSVQHDKMAKWILHEQNKYSKSEPMLFQSIPTEVFDDVIKKLHNWKAPGSDNIHNFWYKKFTFIHPFIHNYINKFIQTPHTLPDYVTEGITYMLPKDLNDISNPTKYRPITCLQTIYKIITSCLTQIIYKHIDNNKIFAEQQKGCRKYSHGCKEQLSIDSVILKQAQKRKADLYSMYIDYKKAFDSVPHTWLLQILEIYQIHPQIISFLQNTMTKWITRLRLANITKTVLTEPIKIQRGIFQGDSLSPLWFCLALNPLSNMLNSSNTGYDLECIENNSNLVTDCSTYKLNHLLYMDDIKLYGSTEKELQTLAQITENFSKDICMEFGIDKCKINSIRAGQIYQHQYQMQTGELVEALQENEVYKYLGYNQGQQLLHKDVKDCLTKQFRFRLNVILRSHLYSKNIIKAINTYAIPILTYSFGVINWNKTQLKSLQRIINTSMTKNRKHHPRSCVQRLTLPRCDGGRGLIDILNLHNKQITNLRTYFHNKAQTSSLHNAIVRNDANLTPLNLFDKAVQRNEIQTDRQTKLNEWNRKVLHGRHLHDLNHPNVDKIASNEWLRRGELFPETEGFMIAIQDQIIETKNYIKHIMKLPNASDDSCRKCKGPPETIQHITGACRAVAQTDYKHRHDQIAAIIHQSLAFKCKLITEQIAYYKYSPQTVLDTTDFKLYWDRTILTDKTVHYNRPDITLHDKKNKIVYLIDIAIPNTHNLLSTHTEKITKYIDLATELKTQTCRFKEMKRGNPTPKPKNRHWILFVQHPYCNPLLSSSLAPSLLLLICWVCCRLQCLFRYILSTNLQPGFNLDSKYVWY

SEQ ID NO: 23680 - protein, 851 aa, Cecropterus toxeus
MCTLRKMQNNTFSNNEKQFYRGLTSNNSHTPQNNIKINTSPVHSNELRAFWATIWENSVQHDKMAKWILHEQDKYSNSEPMLFQCIPAEVFDIVIKKLHNWKAPGSDNIHNFWYKKFTFIHPFIHNYINKFIQTPQTLPDYITEGITYMLPKDLDDISNPTKYRPITCLQTIYKIITSCLTQIIYKHIDNNQILAEQQKGCRKYSHGCKEQLSIDSVILKQAQKQKSDLYSMYIDYKKAFDSVPHSWLLQILEIYQIHPKIISFLQNTMTKWITRLRLTNTTQTIITEPIKIQRGIFQGDALSPLWFCLALNPLSNMLNSSNTGYDLEFIENKPNQLTDCSSYKLNHLLYMDDIKLYGTTEVELQTLAQITENFSKDICMEFGIDKCKINSIRAGQIYQHQYQMKTGELVEALQETEVYKYLGYNQGQQILHKDIKESLTKQFRFRLNAILRSHLYSKNVIKAINTYAVPILTYSFGVINWNKTQLKSLQRIINTSMTKNRKHHPRSCVQRLTLPRHDGGRGLIDILNLHNKQITNLRTYFHNKAQTSSLHNAIVKNDANLTPLNLFDKTLQKNEIQTDRQTKLNEWNRKVLHGRHLHDLNHPNVDKIASNEWLRRGELFPETEGFMIAIQDQIIETKNYIKHIMKLPNASDDSCRKCKGAPETIQHITGACRALAQTDYKHRHDQIASIIHQSLAIKCKLITEQTAYYKYHPQTVLDTTDFKLYWDRTILTDKTIHFNRPDITLHDKKKKIVYLIDIAIPNTHNLLSTHTEKITKYTDLATEVKTQWKVERVKTIPIVLSTTGVIPKTLHQSLKSINISPYTYITLQKAVILNTCRIVRKFLQTDITTIT

SEQ ID NO: 23681 - protein, 1156 aa, Cecropterus bathyllus
MKWTTEHNVTIMRAYYKITLLEANISAYRVQLHKEFITKYPHLKHITEQRVADQRRLIIHNKYLNEEKLQSIKDEVASELLLEKKNTTPTSITTLPTLDHVNQQNNNSDPETFTNINDSNDPQIVKTLHLDKQKIAEIKQNFDAAYSYFKNINPTQRSFIPKQKSSIRFATIVNFINNIILPKHIDKDTEFNNLQTVLYCGAWAAAKSNGSKLDIPPKIGTYNKYKTKKPNWQIRLERRVENLRVEIGQLTQYIKGNKSIKIAKRAEFIKEKYKIHATHENPNTQLSEFLDTLKQKLSTICNRLKRYKMCTLRKIQNNTFSNNEKQFYRGLRSNRSHTPHNNVHINASPPHSNELRSFWATIWENSVQHDKMAKWILHEQNKYSKSEPMFFQNIPAEVFDDVIKKLHNWKAPGSDNIHNFWYKKFTFIHPFIHNYINKFIQTPHTLPDYVTEGITYMLPKDLNDISNPAKYRPITCLQTIITSCLTQIIYKHIDNSKILAEQQKDCRKYSHGGKEQLSIDSVILRQSQKRKADLYSMYIDYKKAFNSVPHTWLLQIFEIYQIHPQIISFLQNTMTKWFTRLRLTNITKTIITEPIKIQRGIFQGDSLSPLWFCLALNPLSNMLNSSNTGYDLECTENNSNLVTDCSTYKLNHLLYMDDIKLYGSTEEELQTLAEITENFSKDICMEFGIDKCKINSIRAGQIYHHQYQMQTGELVEALQETEVYKYLGYNQGQQLLHKDIKESLTKQFRFRLNVILRSHLYSKNIIKAINTYAIPILTYSFGVINWNKTQLKSLQRIINTSMTKNRKHHPRSCVQRLTLPRRDGGRGLIDILNLHNKQITNLRTYFHNKAQTSSLHNAIVRNDANLTPLNLFDKALQRNELQTDRQTKINEWNRKVLHGRHLHDLNLPNVDKIASNEWLRRGDLFPETEGFMIAIQDQIIETKNYIKHIMKLPNTSDDSCRKCKGAPETIQHVTGACRAVAQTDYKHRHDQIAAIIHQSLAFKCKLITEQIAYYKYSPQTVLDTRDFKLYWDRTILTDKTIHYNRPDITLHDKKNKIVYLIDIAIPNTHNLLSTHTEKITKYTDLATELKTQWKVEIVKTIPIVLSTTGVIPKTLHQSLKSINLSPYTYITLQKAVVLNTCRIVRKFLQTDTTTIT

SEQ ID NO: 23682 - protein, 1385 aa, Cecropterus dorantes
MRLRSGYKLPQAGTGANRNGESRPELSNSGRPTYSGGDTVSQTSAQSNTAADHSHDSESVVSFPSVPSTNPYSLLNSPTRSTNTINSMQTEDVVQEANAAANLAPTTASLNTRKKWSKAMNEFILRTYLQLTLMETDITGYLPPLHNKFIEHFPEMNMISRQRVGDQRRAIVNKKLLTQNDIDRIYRETREQINDTQRNTTNNTILTHSIIDKTVAHINDTCQRMRWTTEHNVTIMRAYYKITLLEANISAYRVQLHKEFITRYPHLKHITEQRVADQRRLIVHNKYLNDEKLQSIKDEVASELLLEKYNTTATSSSTLPTLDLINQHNNINHIEPQTSTNINDTNDAHIVKTLNLDKQNIAEIEQNFDAAYNYFKNINPTRRSYIPKQKSSKKFANIVNYINNTIMPKYIDKDTEFINLQTVLYCGAWAAAKSNGSKIGIPPKIETYNKYKTKIPNWQIRLERRVEKLRVEIGQLTQYIKGNKSIKIAKKVEFIKEKYKIHATHENPNTQLSEFLDTLKQKLSTVCNRLKRYKMCTLRKMQNNTFSNNEKQFYRGLRSSSSPPPQNDIHTNTSPPHSNELRTFWATIWENSVEHNKMAPWILHEQNKYSKSEPMLFQSIPAEIFDNVIKKLHNWKAPGSDNIHNFWYKKFTFSHPFIHNHINKFIQAPHTLPDYITEGITYMLPKDLNDISNPTKYRPITCLQTIYKIITSCLTQIIYKHIDNNKILAEQQKGCRKYSNGCKEQLSIDSVILKQAQKRKADLYSMYIDYKKAFDSVPHTWLLQILEIYQIHPQIIFFLQNTMTKWITRLRLTNTTNTVFTEPIKIQRGIFQGDSLSPLWFCLALNPLSNMLNSSNKGYDLECIENNFNLVTECSTYKLNHLLYMDDIKLYGSTEQELQTLTQITESFSRDICMEFGIDKCKINSIRAGQIYQHQYQMQTGEVVEALQENEVYKYLGYNQGQQLLHKDVKESLTKQFRFRLNVILRSHLYSKNIIKAINTYAIPILTYSFGVIDWNKTQLKSLQRIINTSMTKNRKHHPRSCVQRLTLPRHDGGRGLIDIVNLHNKQITNLRTYFHNKAQTSSLHSAIVRNDANLTPLNLFDKALQKNEIQTDRQTKLNEWNRKVLHGRHLHDLNHPNVDKIASNEWLRRGELFPETEGFMIAIQDQIIETKNYIKHIMKLPNASDDSCRKCRGAPETIQHITGACRALAQTDYKHRHDQIASIIHQNLAFKYKLITEQIAYYKYSPQTVLDTADFKLYWDRTILTDKTIHYNRPDITLHDKKNKIVYLIDIAIPNTHNLLSTHTEKITKYTDLATELKTQWKVERVKTIPIVLSTTGVIPTVLHQSLKSINISPYTYITLQKAVVLNTCRIVRKFLQTDTTTIP

SEQ ID NO: 23683 - protein, 1389 aa, Cecropterus casica
MRLRSGYKLPQAGTGANRNGESRPEPSNSGRPTYSGGDTVSQTSAQSYTVADPSHDSESVVSFPSVPSTNPYSLLNSPTRSTTTINSMQTEDVVQVADPAANLAPTTAGLNTRRKWSKAMNEFILRTYLQLTLMETDITGYLPPLHTKFIENFPEMNMISRQRVGDQRRAIVNKKLLTHSDIERIYRETREEINDTQRNTQTNNTILTHSQINQTVTHTNDTSQRMRWTTEHNVTIMRAYYKITLLEANTSAYRVQLHKEFITKYPHLKHITEQRVADQRRLIIHNKYLNEEKLQSIKDEVASELLLKKKNTTPTSTSTLPTLNLVNQHNNNNYSGPETFTNTNDTSDRLIVKTLHLDIQKIAEIEQNFDAAYNYFKNISPTQRSYIPKQKSSIKFATIVNYINNTILPKHIDKDTGFINLQTVLYCGAWAAAKSNGSKIGIPPKIETYNKFKTKIPNWQTRLERRVEKLRVEIGQLTQYIKGNKSIKIAKRVEFIKEKYKIHATHENPNTQLSEFLDTLKQKLSTICNRLKRYKMCTLRKMQNNTFSNNEKQFYRGLRSNSSHTPQNNIQSHHINTSPPHSNELRSFWATIWENSVQHDKMAKWILHEQNKYSKSEPMSFQSIPAEVFDNVIKKLHNWKAPGSDNIHNFWYKKFTFIHPFIHNYINQFIQTPHTLPDYVTEGITYMLPKDLNDISNPTKYRPITCLQTIYKIITSCLTHIIYKHIDNNKILAEQQKGCRKYSYGCKEQLSIDSVILKQAQKRKADLYCMYIDYKKAFDSVPHTWLLKILEIYQIHPQIISFLQNTMTKWITRLRLTNITKTVITEPIKIQRGIFQGDSLSPLWFCLALNPLSNMLNSSNTGYDLECIENNSNLIADCSTYKLNHLLYMDDIKLYGSTEEELQTLAQITENFSKDICMEFGIDKCKINSIRAGQIYKHQYQMQTGELVEALQETEVYKYLGYSQAQQLLHKDAKESLIKQFRLRLNVILRSHLYSKNFIKAINTYAIPILTYSFGIINWNKTQLKSLQRIINTSMTKNRKHHPRSCVQRLTLPRHDGGRGLIDILNLHNKQITNLRTYFHNKAQTSSLHNAIVRIDANLTPLNLFDRALQRNEIQTDRQTKLNEWNRKVLHGRHLQDLNHPNVDKIASNEWLRRGELFPETEGFMIAIQDQIIETKNYIKHIMKLPNASEDSCRRCKGAPETIQHMTGACRALAQTDYKHRHDQIAAIIHQSLAFKYKLITEQIAYYKYSPQTVLDTTDFKLYWDRTILTDKTIHYNRPDITLHDKKNKIVYLIDIAIPNTHNLSSTHTEKISKYMDLATELKTQWKVERVKTIPIVLSTTGVIPKTLHQSLKSINLSPYTYITLQKAVILNTCRIVRKTLQTDTTTVT

SEQ ID NO: 23684 - protein, 1378 aa, Astraptes brevicauda
MRLRSGYKLPQAGTGANRNGESRPEPSNSGRPTYSGGDTVSQTSAQSNTAADQSHDSESVLSFPSVPSTNPYSYSSTHSTTTTNSMRTEDVVQEADPVENLVPTTAGLNTRRKWSKAMNEFILRTYLQLTLMETDITGYLLPLHTKFIEKFPEMHMISRQRVGDQRRAIINKKLLTQNDIDKIYRETREEISNTRNTKLTHLQVDKLNNHINHKSQRMRWTMDHNVTIMHAYYKITLLEANISAYRGQLHKEFITKYPHLKHITEQRIADQRRLIIQNKYLNEEKLQSIKDEVAGELLLQRNNITQTSSDILPTPDAINQNDCTNHNDSERFANTNETNNSPNVKMLHLDQHKIAEIEQNFDMAFNYFKNIKPTQRSYIPKQKPSIKLATIVNYINNSILPKHANEDTEFIYLQMILYCGAWAAAKSNGSKLVVPPKIETCNTYKTKTPNWQIRLERRVGKLRAEIGQLTQYIKGNKSNKVGKSVESIKTKYQIHATHENPNTHLSEFLDTLKQKLCTICNRLKRYKMCTLRKIQNNTFSNNEKQFYRGLRLNSSNITHNNVHINTSPPFSHELRNFWATIWENSVQHDMTAKWILHEQNKYSTSEPMVFQGIPVEVFDNVIKKLHNWKAPGSDNIHNFWYKKFTFIHPLIYNYINKFIDSPHTLPDYVTEGITYMLPKDPNDITNPGKYRPITCLQTIFKIITSCLTEIIYNYIDNNKILAEQQKGCRKYSHGCKEQLTIDSVILKQAQKRKSDLYSMYIDYKKAFDSVPHTWLLQILEIYHIHPQIISFLQNTMNKWITRLKLTNATDTVITEPIKIQRGIFQGDALSPLWFCLAINPLSNMLNASNTGYDLECKKNNTNLLTDCSIYKLNHLLYMDDIKLYGSTEEELQELAQITEGFSKDICMEFGIDKCKINSIRKGQTYQHQYQTRTGEFIDALNESEVYKYLGYNQAQQILHKDIKDTLIQQFRSRLNAILRSHLYSKNTIKAINTYAIPILTYSFGVINWNKTQLKSLQRIINTSMTNNRKHHPRTCVQRLTLARHDGGRGLIDILNLHNKQITNLRTYFHNKAQTSALHNVIVKNDSHLTPLNLFDETLQRNEIQTDRQTKLQEWNRKALHGRHLHDLNHPNVDKIASNEWLRRGELFPETEGFMIAIQDQIIETKNYKKHIMKLPNSSDDSCRKCKGASETVQHITGACRAIAQTDYKHRHDQIAAIIHQNLAFQCNLIAEQTAYYKYIPQTVLDTKEYKLYWDRTILTDKTVHYNRPDITLHDKNNKVVYLIDIAIPNTHNLSSTHTEKISKYTDLAIELKTQWKVERVKTVPIVLSTTGVIPKTLHQSLKCIHLSPYTYITLQKAVILNTCRIVRKFLQTDTTPIT

SEQ ID NO: 23685 - protein, 1383 aa, Telegonus anausis
MRLRSGYKLPQAGTGANRNGESRPEPSSSGRPTYSGGDTVSQTSAQSNTAADHSHDSESVVSFPSTPSTNPYSYSPTGSTTTINSMRTEDVVQEANSVGYLAPTTASFNTRRKWSKSMNEFILRTYLQVTLMETDITGYLPHLHTKFIENFPEMHMISRQRVGDQRRAIINKKLLTQNDIDRIYRETREEMNNTQRNTQLHNTKQLHIDKSITHVNDTSQRMRWTMEHNVTIMRAYYKITLLEANISAYRGQLHKEFITKYPHLKHITEQRVADQRRLIIQNKYLNEEKLQSIKDEIADELLLQKNNNTQTSSDTLLTSDVTNQQDNINYNDSQIFDNLNDTNNLPYQTTPNVKTQHLDQQKIAEIEHNFNAALNYFKNIKPTQRSYIPKQKSSKKLAAIVNYINNSILPKHVNEDTEFINLQAVLYCGAWTAAKSNGSKIAVPPKIETYNTYKTKTPKWQIRLERRVEKLRVEIGQLTQHIKGNNSNKLSKRVDLIKTKYKIHATHENPNTHLSEFLDTLKQKLSAICNRLKRYKMCTLRKIQNNTFSNNEKQFYRGLRLNSSHISHNSTYTNTSPPPSDELRTFWATIWENSIQHDKTAKWILHEQNKYSKFEPMAFQCIPAEVFENVIKNLHNWKAPGSDNIHNFWYKKFTFIHPFVYNYINKFIESPHTLPDYITEGITYMLPKDPKDSSNPAKYRPITCLQTIYKIITSCLTKIIYDYIDNNKILAEQQKGCRKYSHGCKEQLTIDSVILKQVQKRKSDLYSMYIDYRKAFDSVPHSWLIQILEIYRVHPQIISFLQNTMTNWFTRLKLTNITNTIITEPIKIQRGIFQGDALSPLWFCLALNPLSNMLNSSNTGYDLECIKNNPDIQTDCTIHKLNHLLYMDDIKLYGSTEEELQELAQITEKFSKDISMEFGIDKCKINSIRTGQTYRHQYQMQTGELIEALHESEVYKYLGYNQAQQILHKDIKDSLTQQFRCRLNAILRSHLYSKNTIKAINTYAIPTLTYSFGVIKWNKSQLKSLQRIINTSMTKNRKHHPRSCVQRMTLPRYDGGRGLIDILNLHNKQITTLRTYFHDKAQTSSLHNAIVSNDKNLTPLNLFDKSLQRNEIQTDRQTKLQEWNRKALHGRHLHDLNHPNVDKIASNAWLRRGELYPETEGFMIAIQDQIIETKNYKKHIMKLLNASDDSCRKCKGASETIQHITGACRSIAQTDYKHRHDQIAAIIHQSLAFKCKLIPEYTAYYKYSPQTVLDTIEYKLYWDRTILTDKTVHFNRPDITLHDKKNKIVYLIDIAIPNTHNLSSTHTEKISKYTDLAIELKSQWKVEKVITVPIVISTTGVIPKSLHQSLKTINLLPYTYITLQKAVVLNTCRIVRKFLQSDT

SEQ ID NO: 23686 - protein, 1322 aa, Cecropterus albociliatus
MRLRSGYKLPQAGTGANRNGESRPEPLNSGRPTYSGGDTVSQTSAQSNTVADNSHDSESVVSFPSVPSTNPYSSLNSPSRSTTSINSLQTEDVVQEADPVKNLAPTTACLNTRRKWSKAMNEFILRTYLQLTLMETDTSGYLSPLHTKFIEKFPEMNMISRQRVGDQRRAIVNKKLLTQSDIDRINRETREEINNTQINTQTNNTVLTQTQTDKTVTQINDTSQRMRWTTEHNVTIMRTYYKITLLEANISAYRVQLHKEFIDKYPHLKHVTEQRVADQRRLIVHNKYLNDEKLQSIKDEVASELLIEKNNTTPTSSNTLPTLDLINQHKNTNCSEPETFTNIYDTNDPQIIDTLHLGKQKIAEIEQNFDAAYSYFKNIHPTQRSYIPKQKSSIKLATIVNFINNTILPKHIGKDTEFINLQTVLYCGAWAAAKSNGSKIGIPPEIETYNKYKTKIPNWQIRLERRVEKLRVEIGQLTQYIKGNKSNKIANRVEFIKIKYKIHSTHENPNTQLSEFLDTLKQKLSTVCNRLKRYKMCTLRKMQNNTFSNNEKQFYRGLRSNSSHTPQDNIHINTSPLHSNELRAFWASLWENSVQHDKMAKWILHEQDKYSNSEPMLFQNIPAEVFNDVIKKLHNWKTPGSDNIHNYWYKKFTFIHPFIHNCINKFIQTPQTLPDYITEGITYMLPKDLDDISNPTKYRPITCLQTIYKIITSCLTQIIYKHIDNNQILAEQQKGCRKYSHGCKEQLSIDSVILKQAQKQKLDLYSMYIDYKKAFDSVPHTWLLQILEIYQIHPKIISFLQNTMTKWITRLRLTNTTDTIITEPIKIQRGIFQGDALSPLWFCLALNPLSNMLNSSDTGYDLKSIENNPKQLTDCSSYKLNHLLYMDDIKLYGSTEVELQTLAQITENFSKDICMEFGIDKCKINSIRAGQIYQHQYQMQTGELIEALQETEVYKYLGYNQGQQILHKNIKESLTKQFRSRLNAILRSHLYSKNIIKAINTYAVPILTYSFGVINWNKTQLKSLQRIINTSMTKNRKHHPRSCVQRLTLPRHDGGRGLIDILNLHNKQINNLRTYFHNKAQTSSLHNEIIRNDANLTPLNLFDKTLQKNEIQTDRQTKLNEWNRKVLHGRHLHDLNHPNVDKIASNEWLRRGELFPETEGFMIAIQDQVIETKNYIKHIMKLPNASDDSCRKCKGAPETIQHITGACRALAQTDYKHRHDQIAAIIHQSLAIKCKLITEQTAYYKYHPQTVLDTTDFKLYWDRTILTDKTIHFNRPDITLHDKKNKIVYLIDIAIPNTHNLSSTHTEKITKYTDLATELKTQ

SEQ ID NO: 23687 - protein, 1385 aa, Autochton zarex
MRLRSGYKLPQAGTGANRNGESRPEPSNSGRPTYSGGDTVSQTSAQSNTAADHSHDSESVVSFPSVPSTNQYSFLNSLTRSPTSINSIQPEDVVQEADTAANLAPTTASLNTRRKWSKAMNEFILRTYLQLTLMETDITGYLPPLHTKFIEKFPEMNMISRQRVGDQRRAIINKKLITQNDIDRIYRETCEEMNNTHTNTQHNTKLVHSRSRISVTHINNISQRMRWTTEYNVTIMRAYYKITLLETNISAYRGQLHKEFITKYPHLNHITEQRVADQRRLIIQNKYLNEETLQNIKDEVSSELLYQKNYNHLSSSDKSPAPDPINQNDTNYNVPEMLTNNVNDTNDTPNVKTSHLDQHKTAEIEQNFNAAYNYFKNINPTQRSYIPKQKTSKKLATIVNYINNTILPKHVGKDTEFNNLQTVLYCGAWTAAKSNGSRLVIPKDIETYNKYKTKIPNWQIRLERRIEKLRVEIGQLTQYTKGNKSIKIAKRIEFIKTKYKIHANHENPNTHLPEFLDTLKQKLSTICNRLKRYKMCTLRKMQNNTFSNNEKQFYRGLKSNNLHTPHNNTNANITSPPPDELRTFWANIWENPIQHDKMAKWILHEQNKYSKSEPMVFQCIPAEVFDNVIKKLHNWKTPGSDNIHNFWYKKFTFIHPFIHNYINKFIETPDTLPDYITEGITYMLPKDLNDISNPAKYRPITCLQTIYKIITSCLTQIIYKYIDNNNILAEQQKGCRKYSHGCKEQLTIDSVILKMTQKRKSDLYSMYIDYKKAFDSVPHTWLLQILEIYRIHPQIIYFLQNTMEKWLTRLKLTDKTNIVTTEPIKIQRGIFQGDALSPLWFCLALNPLSNMLNSSNTGFDIGHIENNSDVLTDCSIYKINHLLYMDDIKLYGSTEEELQKIAQITENFSTDICMEFGIEKCKINSIRSGQVYQHQYQMQTGEYVEALDENEVYKYLGYNQAQQILHKDIKESLTKQFRCRLNVILRSHLYSKNITKAINTYAIPILTYSFGVINWNKTQLKSLQRIINTLMTKNRKHHPRSCVQRMILPRCDGGRGLIDIFNLHNKQITNLRTYFHIKAQTSSLHKAIVENDTKLTPLNLFDKTIQGNEIQTDRQTKLNEWNQKALHGRHLHDLNHPNVDKIASNEWLRRGELFPETEGFMIAIQDQIIETKNYKKYIMKLSNASDDSCRKCKGAPETVQHITGACRAIAQTDYKHRHDQVAAIIHQSLAIKCKLISEQTSYYKYNPQTVLDTSHYKLYWDRTILTDKTVHFNRPDITLHDKKNKIVYLIDIAIPNTHNLSSTHTEKITKYTDLAVEIKTQWKVEKVKTIPIVLSTTGVIPKTLHQSLKSINISPYTYITLQKAVILNTCRIVRKFLQTDTNTVI

SEQ ID NO: 23688 - protein, 1431 aa, Amphipyra berbera
MRLRSRLLPQAGTVVNHDGESRPGPSGPGCPTYSGEGTVSQASAQFRTVVDHHQDSSSVISFTSSSIFPSVPSHNPYSRPPTHSTSTASSMLSEDVVQEAEPVANLAPTTTSLRTRRKWSKIMNEFILRTYLQLTLMETDTSGYLPPLHTKFVEKFPEMHMISRQRVGDQRRAIINKKLLTQSDIDRIYKEIREEINNIQINTQIQNTTTSASQTNDYSTDIHNLPQHRNTRPHLINSNHTGQRMRWTKEHNETIMRAYYKITLLETNISAYRGPLHQAFITTFPHLEHISEQRVADQRRLIIHNKYLSEERLQAIKDEVASDLFLQNSTNTQTSSIANSIHPTPTQPEPTTEQDNFLNSIDSEIHTHIDNDTNNTLETSTQHSNQQQTIEIERTFREAYNYFKNTDPTQRSYIPKQRSSKKLAIIVNYINNNIIPKHIKADTEFITLQTVLYCAAWAAAKSNGAKIDIPPRVEVSCKYKKNKPKWQKRLERKIEDLRSQIGRLTQYIRGNRSSKIVKHVEYIQNKYKIHATHESPNTHLSEFLDTIKQKLTTFSNRLKRYKTCTLRKTQNNQFTVNEKQFYRGLRRPIANSHINTHNDHNTQPTLTSQNTTQNNTPPPADELHSFWATIWENAVQHNKEADWIRNEQDRYSHSEPMDFQCIPVEVFNGVINKLHNWKAPGSDNIHNFWYKKFTRAHSFIYNYINKFIEQPQLLPEFITVGTTYMLPKDPNSLSNPAKYRPITCLQTFYKILTSCLTQIIYKHIDQNNILAEQQKGCRKYSQGCKEQLSIDSVLLKQTLLSKSDLYSMYIDYKKAFDSVPHTWLLQILEIYRIHPQIISFLQTTMTKWTTRLRLTTDTSTVITEPIKVQRGIFQGDALSPLWFCLALNPLSNMLNSSNAGCDLDYKENEIDLLTNFSTHKLNHLLYMDDIKLYSTTEEELQRLAQITENFSQDICMEFGIDKCKINSIKKGQRYEHQYHTQTGELVEALTESDVYKYLGYNQAQQILHKDIKNSLTKQFKLRLNTILRSHLYSKNTFKAINTYAIPILTYSFGIINWNKTELKSLQRIINTTMTRHRKHHPRSCIQRMTLPRNDGGRGLIDILNLHNKQITNLRTYFYHKTLTSSLHSAIVQNDKKLTPLNLADKTQQRNEVQTDRQTKLNEWTRKALHGRHLHDLNQPTVDKTASNEWLKRGELFPETEGFMLAIQDQVIETKNYKKHIMKLANSSDDSCRKCKGSPETIQHITGACRAIVQTDYKHRHDQVAAIIHQNLAFKHKFISEKTAYYKYTPQTVHDTTDYKLYWDRTILTDKTVHFNRPDITLHDKKNQIVYLIDIAVPNTHNLSSTHTEKLSKYTDLAIEIKTQWKVKTVKTVPIVLSSTGVVPHTLHTSLNLIDIHPLTYIILQKAVILNTCRIVRKFLSMDTTTTALVLG

SEQ ID NO: 23689 - protein, 1381 aa, Astraptes apastus
MRLRSGYKLPQAGTGANRNGESRPEPSNSGCPTYSGGDTVSQTSAQSDTVADKSHDSESVVSFPSTNSYSPTCSTTTVNSIQTEDVVQEANPADNLAPTTASLNTRRKWSKAMNEFILRTYLQLTLMETDIAGYLPSLHTKFIEKFPEMHMISRQRVGDQRRAIINKKLLTQNDTDRIYRETREEISNTQSSPQFHNTKLTHSQVNKLVTHINDTSKRMRWTMEHNITIIRAYYKITLLETNISAYRGQLHKEFITKYPHLKHITEQRVADQRRLIIQNKYLSEEKLQNIKDEVASELLIQNTNNTQASSGEQSTSDLINQQNNTNYNDSEIFTNINDTNGSSNKKKSHLDQEKIAEIDQNFNAAYNYFKNIIPTQRSYIPKQNSSKKLVNIVNYINHTILPRHVDKDTEFINLQTVLYCGAWAAAKCNGSKIVIPPKIEKNDIIYKTKKPNWQIRLERRVENLRAEIGQLTQYIKGNKSIKIAKKVEVIKTKYKIHATHENPNTHLSEFLDTLKQKLSTICNRLKRYKMCTQRKIQNNIFSNNEKQFYRGLKSNTSHNPHNNTHINNSSPPPVEELRTFWATIWENSVQHDKMAKWILNEQNTYSKSEPMVFQFIPVEVFDSVIKKLHNWKAPGSDNIHNFWYKKFTFIHPFIYSYINKFIETPHTLPEYVTEGITYMVPKDLNDTSNPAKYRPITCLQNIYKIITSCLTQIIYNYLDNNKILAEQQKGCRKYSRGCKEQLTIDSVILKQTQKRKSDLYSMYIDYKKAFDSVPHSWLIHILEIYRIHPQIISFLQNAMTKWITRLKLTNVKNTIITEPIKIQRGIFQGDALSPLWFCLVLNPLSNMLNSSNTGYNLEYIQTNPNLLTDCSINKLNHLLYMDDIKLYGSTEKELQKLAEITENFSKDICMEFGIDKCKINSIRIGQTYQHCYQMQTGELVVALQKNEVYKYLGYNQAQQILHKDIKDSLTQQFRCRLNAILRTHLYSKNTIKAINTYAIPVLTYSFGVINWSKTQLKSLQRIINTSMTKNRKHHPRSCVQRMTLPRQDGGRGLIDIINLHNKQITNLRTYFHIKAQTSSLHNAIVKNDTNLTPLNLFDKTLQRNEIQTDIQTKLHEWNRKALHGRHLHDLNHPNVDKIASNEWLRRGELFPETEGFMIAIQDQIIETKNYKKHIMKLSNASDDSCRKCKGAPETIQHITGACRAIAQTDYKHRHDQIASIIHQSLAFKCKFITEPTAYYKYIPLTVLDSTDYKLYWDRTILTDKTVHYNRPDITLHDKKNKIVYLIDIAIPNTHNLSSTQTEKITKYTDLAIELTTQWKVEKVTTIPIVLSTTGVIPKALHQSLKCLKISPYTYITLQKAVVLNTCRIVRKFLQSDTTSIA

SEQ ID NO: 23690 - protein, 851 aa, Cecropterus tehuacana
MCTLRKRQNTTFANNEKQFYRGLNSKNLHTPHNNTHTNTTIPPPDELRTFWATIWENPVQHDKMAQWIIHEQNKYSNSEPMVFQCIPTEVFGNVIKKLHNWKTPGSDNIHNFWYKKFTFIHPFIHNYINKFIEMPHTLPDYITEGITYMLPKDPKDISSPAKYRPITCLQTIYKIITSCLTQIIYNYIENNNILAEQQKGCRKYSYGCKEQLTIDSIILKQAQKRKSDLYSMYIDYKKAFDSVPHTWLLQILEIYHIHPQIIYFLQNTMSKWITRLRLTNKTNIVITESIKIQRGIFQGDALSPLWFCLALNPLSNMLNSSNTGFDLGNIENSPNLLTDCSIYKLNHLLYMDDIKLYGSTEEELYRIATITERFSKDICMEFGIDKCKINSIKTGQIYQYQNQMQAGEIIKALDENEVYKYLGYNQAQQILHKYIKDSLTQQFRCRLNAILRNHLYSKNTIKAINTYAIPILTYSFGVINWNKTQLKSLQRMINTSMTKNRKHHPRSCVQRMTLPRHDGGRGLIDMFNLHNKQISNLRTYFHNKAQTSPLHKAIVKNDTKLTPLNLFDITTQKNEIQADRQTKLNEWHRKTLHGRHLHDLNHPNVDKLASNEWLRRGELFPETEGFMIAIQDQIIETKNYKKHIMKLSNASDDSCRKCRGAPETVQHITGACRAIAQTDYKHRHDQVAAIIHQSLAIKCKLIPEKTAYYKYRPQTVLDTSHYKLYWDRTILTDKTVHFNRPDITLYDKKNKIVYLIDIAIPNTHNLSSTHTEKITKYTDLALELKTQWKVEKVKTIPIVISTTGVIPKTLHQSLKSINISPYTYITLQKAVILNTCRIVRKFLQTDTTTVI

SEQ ID NO: 23691 - protein, 1383 aa, Cecropterus albociliatus
MRLRSGYKLPQAGTGANRNGESRPEPSNSGRPTYSGGDTVSQTSAQSNTVADHSHDSESVVSFPSVPSTNPYSFLNSQTRSTTTINSMQAEDVVQEADPAGNLAPTTASLNTRRKWSKAMNEFILRTYLQLTLMETDITGYLLPLHTKFIEKFPEMHMITRQRVGDQRRAIVNKKLLTQIDIDRIYRETRAEINNTHIDTQHNSKFIHSRTSKSVTHVNDISQRMRWTTEYNVTVMRAYYKTTLLETNITAYREQIHKEFITKYPHLKHITEQRVADQRRLIIQNKYLNEETLQNIKDEVASELLHQQTNNILTSSDTLSTSDRNQYNTNYNVTETTTNISNTKDSTNVKTLHLDQQKIAEIEQHFDTAYNYFKNVHPTQRSYIPKQRSSIKLATIINYINNYILPRHVEKDTEFIKLQTVLYCGAWTAAKSNGSRLVIPKKIETHSIYKTKIPTWQIRLEKRKEKLRVEIGQLTQYTKGNKSVKVAKNVQIIKSKYKIHATHENPNTHLPEFLDTLKQKLSTICNRLKRYKMCTLRKIQNNTFSNNEKQFYRGLKSNNLHTSHNNPHTNTSPPPSDELRTFWATIWENPIQHDKTAKWIIHEQNKYSKSEPMVFQCISAEVFGNVIKNLHNWKTPGSDNIHNFWYKKFTFIHPFIHNYINKFIETPHTLPDYMTEGITYMLPKDPNDIPNPAKYRPITCLQTIYKIITSCLTQIIYKYIDNNNILAEQQKGCRRYSYGCKEQLTVDSIILKQAQKRKSDLYSMYIDYKKAFDSVPHTWLLQILEIYRIHPQIIFFLQNTMSKWITRLRLTNKTDIVITGPIKIQRGIFQGDALSPLWFCLALNPLSNMLNLSNTGFDLGCIGNNSNLLTDSSILKLNHLLYMDDIKLYGSTEEELYKICQITEMFSKDICMEFGIDKCKINSIKTGQIYQHQYQMQSGELIDALDENEVYKYLGYNQAQQILHKDIKDSLTQQFRCRLNAILRSHLYSKNTIKAINTYAIPILTYSFGVINWNKAQLKSLQRIINTLMTKNRKHHPRSCVQRMTLPRHDGGRGLIDICNLHNKQISNLRTYFHNKAQTSSLHKAIVKNDTKLTLLNLFDKTIQRNEIQTDRQTKLNEWNRKALHGRHLHDLNHPNVDKIASNEWLKRGELFPETEGFMIAIQDQIIETNNYKKHIMKLSNASDDSCRKCKGAPETIQHITGACRAIAQTDYKHRHDQVAAIIHQSLAIKCKLISEQTPYYKYRPQTVLDTSHYKLYWDRTILTDKTVHFNRPDITLHDKKNRIVYLIDIAIPNTHNLSSTHAEKITKYTDLAIELKSQWKVDKVKTVPIVLSTTGIIPKALHQSLKSINISPYIYITLQKAVILNTCRIVRKFLQADTTTVI

SEQ ID NO: 23692 - protein, 1383 aa, Cecropterus toxeus
MRLRSGYKLPQAGTGANRNGESRPEPSNSGRPTYSGGDTVSQTSAQSNTVADHSHDSESVVSFPSIPSTNPFSLLYSPTRSTTTINSMQTEDVVREADSVGNLAPTTASLNTRKKWSKAMNEFILRTYLQLTLMETDTTGYLPPLHTKFIEKFPEMHMISRQRIGDQRRAIVNKKLLTQNDIDRIYRETREEMNNTHIETQHNSKLSHSQTSKSVTHINDISQRMRWTTEYNITVMRAYYKITLLERNITAYRGLLHKEFITKYPHLKHITEQRVADQRRLIIQNKYLNEETLQSIKDEVASELLDQQTNNILTSSDTLLTPDLNQYNINYNTNETTTNINNTKDSKNVKTSHLDPQKIAEIELNFDAAYNYFKNINPTQRSYIPKQRSSIKLATIINYINNYILPKRVGKDTEFIKLQTVLYCGAWTAAKSNGSRLVIPKKIETYNIYKTKIPNWQIRLEKRIEKLRVEIGQLTQYTKGNKSIKIAKRVETIKTKYKIHATHENPNTHLPEFLDTLKQKLSTICNRLKRYKMCTLRKIQNNTFSNNEKQFYRGLKSNNLHTSHNNNNTNISLPPSDELRAFWATIWENPVQHDKMAKWIINEQNKYSKSEPMLFQCISAEVFGNVIKNLHNWKTPGSDNIHNFWYKKFTFIHPFIHNYINKFIETPHTLPDYMTEGITYMLSKDPNDIRNPAKYRPITCLQTIYKIITSCLTQIIYKYIDTNNILAEQQKGCRKYSYGCKEQLTVDSIILKQAQKRKSDLYSMYIDYKKAFDSVPHTWLLQILEIYHIHPQIISFLQNTMSKWITRLRLTDKTNTCITEPIKIQRGIFQGDALSPLWFCLALNPLSNMLNLSNTGFDLGYRENNPNILTDCSIYKLNHLLYMDDIKLYGSTEEELYKIAKITEIFSKDICMEFGIDKCKINSIRTGQIYQHQYQMQTGEIIEALDENEVYKYLGYNQAQQILHKDIKDSLTQQFRCRLNTILRSHLYSKNTIKAINTYAIPILTYSFGIINWNKAQLKSLQRIINTLMTKNRKHHPRSCVQRITLPRYDGGRGVIDIFNLHNKQISNLRTYFHNKAQTSPLYKAIVKNDTKLTPLNLFDKTIQRNEIQTDRHTKLNEWNRKALHGRHLHDLNHPNVDKIASNEWLRRGELFPETEGFMIAIQDQIIETKNYKKHIMKLSNASDDSCRKCKGAPETVQHITGACRAIAQTDYKHRHDQVAAIIHQSLAIKCKLISEQTPYYKYRPQTVLDTPHYKLYWDRTILTDKTVHFNRPDITLYDKNNKIVYLIDIAIPNTHNLSSTYTEKITKYTDLAIELKSQWKVEKVKTIPIVLSTTGIIPKVLHQSLKSINISPYTFITLQKAVILNTCRIVRKFLQTDTSTVI

SEQ ID NO: 23693 - protein, 1315 aa, Tagiades litigiosa
MRLRNGKNLPQAGTGANSDGESRPVQQCAGSPTYSGGDTVSQTSAQSRTDADDSYDPTSVESTPSTSTLPSVPSSYSYSTNSPTRTNLNSELGEDVMQETCSVDNLASTTSSINKRKKWTKAMNEFILRTYLQLTLMETDIRGYLSLLHTKFIERFPDMNMISRQRLGDQRRAIVNKKLLAQIDIDRIYSESHEYINNIQTPASTYTTLPKTQNTQIDYSSSQALNNNQLKHNRNQPPQRMSWSRHHNETIMREYYKITLLESNTTAYREQLHKAFITSFPQLQHITEQRVADQRRLIINNRYISIERLQAIKEEVAKELLLANYNNTEGHSSNDKISTETETTNAHDNNYLSNIDTEIFIDNNITTSANTAISYPDSQEYIEIEKTFAEAYAYFKNSDPSQRSYIPKQKSSKKLALIVTYINNNVLPKQIDPNIEFSTLQTVLYCAAWAAAKCNGAKLKILSTENVNHKYRNRKPKWQIRLEYRIEELRAQIGRLTQYINGNKSKKIANHVNNIKKRYKIHATYENPNTHLPEFLDTLKQKLTTISNRLKRYKTCTLRKKQNSQFTSNEKQFYRELKKPTNFMCSSHRVELSSNSKSTTENSECHNNPPSADKLRSYWSNIWENPVHHNLQAGWIKKEQNTYANTEPMDFQCIPGEVFHDVIKKLHNWKTPGSDNLHNYWYKKFTNAHPFIYKYVNQFIAMPHTLPDYITQGTTYMLPKDTNRLSNPEKYRPITCLQTIYKIITSCLTQVMYNYIDKNSILTEQQKGCRKYSRGCKEQLTIDSIILKQTLQRKTNLYSMYIDYKKAFDSVPHSWLLKILEIYRIHPTIISFLQNTMTKWTTRLKLTTDTDIVFTEPIKIQRGIFQGDALSPLWFCLALNPLSNMLNNLKPGYIFNDNTDNPKNKLNHLLYMDDIKLYASTELELQELAQITEQFSQDISMEFGIDKCKTNSVRAGQMRYAYRYCMQSGDLVQALTENEVYKYLGYNQAQQTLHKEIKDSLVKQFKHRINSILRSHLNSKNTFKAINSYAIPILIYSFGIISWSKTELKSLQRLVHTSLTKNRKHHPRSCIQRMTLPRNIGGRGLIDILNLHNKQIINLRNYFQNKALTSPLHQSIVQNDQKLTPLNLSDKTQQKNEEQTDRQTKLSEWAQKSLHGRHLHDLNQHTVDKTASNEWIKRGELFPETEGFMLAIQDQVIETNNYKKYIMKLPNSSNDSCRKCKSSPETIQHITGACRAIAQTDYKHRHDQVAAVIHQHLAFKHKLISEKTAYYKYTPQTVLDSKDFKLYWDRTILTDKTIHYNRPDITLHDKNNLIV

SEQ ID NO: 23694 - protein, 1396 aa, Panoquina ocola
MRLRSGNKLPQAGTGVTHDGESRLRPSGLSCPTYSGGDTVSQSSAQLKTVAEGHNHQSSSNESSSSSSLFPSIPSTNSYARSPTHSISSGYSKLPEDVVQETDSVTLLAPTTAGQNKRRKWSTEMNEFILRTYYQLTLMETDTNGYLPSLHTKFIEKFPEMHMISRQRIGDQRRAIINKKLLTQNSIDSIYKEINEEINNLKNNHTLTQRHDKSPVTNTLQVSNKPQNSQRMRWTREHNETIMRAYYKITLLEQNISAYRGLLHQAFIAAFPNLQHISEQRVADQKRLIIHNKYLSEERLQDLKREVSAELLTQTRTNTHSSNNTITLDTSSVNQPTFTPNQNTIDSDICDNTKIFDIERTFKTAYNYFQHIHPTQRTYIPKQKPSRRLSAIITYINENILSKHLNSNIEFNTLQSILYCAAWTAAKTNGSKIEIPPRIEADYRCRKKKPKWQMRLERRIEDLRAQIGRLIQYIRGNRNNKIVKHIKYIKKQYKIHATYENANTHLSEFLDTLKQKLTTYSNRLKRYKTCTLRKTQNKQFASNEKQFYRQIGTQTIHSNESAEKDSPSISEDTSLHNTQRSNFPTAEELSMFWENIWGSSAQHNKEADWIRKEQTDYFSSEPMDFQCITTEVFNNVIKRLHNWKAPGSDNIHNFWYKKFTRIHPYIYNHINQFIKMPQTLPDYITEGTTYMLPKDPNCLSNPSKYRPITCLQTFYKILTSCLTDMIYTHINNNNILSEEQKGCRKYSYGCKEQLTIDATILKQTQQRKSDLYSMYIDYKKAFDSVPHTWLLQILEIYRIHPQIISFLQNTMSKWTTRLRLNTEIKLIETKPIKIRRGIFQGDALSPLWFCLALNPLSNLLNSFNAGYNVEYKTTTDSQTNYSTHKINHLLYMDDIKLYASTEDQLQQLAQQTEIFSQDICMEFGIDKCKINSIKAGQHYEHQYSMQSGETVTALTESEVYKYLGYSQAQQIQHKEIKKSLTTQFKTRLNSILKSQLNSKNIFKAINTYVIPVLTYSFGIIHWNKTELKALQTSINTTMTRHRKHHPRSSILRMTLPRSDGGRGLTDISNLHNKQITNLRTYFHSKAQSSVLHNAIVQSDIKLTPLNLSDITQQTNEIQTDRQTKLNEWSLKSLHGRHLHDLNQVTVDKAASNEWLKRGELFAETEGFMLAIQDQVIETKNYKKHIMKLPQSSNDSCRKCKASPETIQHVTGACRAIVQTDYKHRHDQVAAIIHQCLAFKYKLIKEKTAYYKYTPQTVIDTTHYKLYWDRTILTDKTVHYNRPDITLHDKKNQIVYLIDIAIPNTHNLSTTHTDKLTKYTDLAIELKSQWKVKTVKTVPIVLSSTGVIPHALHTSLKLLDIHSLTYVTLQKAVILNTCRIVRKFFSTDNTISAFVLG

SEQ ID NO: 23695 - protein, 1409 aa, Hesperia comma
MRLRSGNKLPQAGTGATSDGESRLPPSGRSCPTYSGGDTVSQSSAQFRTDADSHIHPLSSVHSASSSSLFQSIPSTNSYSRSPTHSISTTNSRLPEDVVQETDSVTPLAPTVASKNKRRKWSKEMNEFILRTYYQLTLMGTDTNGYLPPLHTKFIEKFPEMHMISRQRIGDQRRAIINKKLLTQKSLDNIYREVNEEIKNMQINVNKQNTPGTSTNFTDSRCQTHSSHISPSIDTQQLLSRTQTGKRMRWTEEHNETIMRLYYKITLLEENISAYRPLLHQAFTAAFPEFQHITEQRVADQRRLIIHNNYLSEERLQEIKTEVMLELMPQSKNSSHSHCNTTLQDTCPTTQFTVPTERNTINSERNTQTKNIEIEQTFKSAYNYFKNTDPTKRSFIPKQKTSRRFSITISYINDNILPNYIDSDTEFTTLQSVLYCAAWTAAKHNGAKIEIPPKINTDHRNRKNKPKWQMRLERRILDLRANIGRLTQYIKGNHSDRIVKCVKHIQKQYMTHSTHENSNTQLSHFLDTLKQKLSTYSNRLKRYKTCTLRKIQNKRFMSNEKHFYRHLRADSTHDNLNIQSQNSENLTSNDMPSNNSPSAVELREFWAKIWEKPVQHNKNADWIRNEEDIYANSESMDFRCIPVETFHSVINKLHNWKSPGSDNIHNFWYKKFKHIHPFIYNYINQFITSPHTLPDYITEGTTYMLPKDPSCLVNPSKYRPITCLQTFYKIITSCLTEEIYKHVEKNCILSEEQKGSRKYSQGCKEQLLIDAVILKQTNQRRSDLYSMYIDYKKAFDSVPHTWLIQILEIYRIHPQIISFLQNTMSKWTTRLTLNTGFNKIETEPIKIRRGIFQGDALSPLWFCLALNPLSNLLNSTNTGYNLDYKLTTDLQTDTLVHKINHLLYMDDIKLYASTEEQLRHLAHLTETFSQDICMEFGVDKCRINSIKAGQHYEHEYFMQSGEIVTALTECEAYKYLGYSQAQQIQHRDIKKNLIRQFKFRLASILRTQLNSKNTFKAVNTYAIPILTYSFGVINWNKTELKSLQRSINTTMTQHRKHHPRSSILRMTLPRNDGGRGLIDILNLHNKQITNLRTYFFIKSSSSILHNAIAQNDRKLTPLNLSDKTQQKNETQTDRQTKLNEWSQKTLHGRHLHDLNQTTVDKIASNEWLKRGELFPETEGFMLAIQDQVIETKNYKKHIMKLPNSFNDSCRKCKGSPETIQHITGACRAIVQTEYKHRHDQVAAIIHQSLAFKYKLIEDKKPYYKYTPQTVLDTTDYKLYWDRTILTDKTVHYNRPDITLHDKKNQIVYLIDVAIPNTHNLTTAHTEKITKYTDLAIELKAQWKVKAVKTVPIVISSTGVIPHTLHTSLKLLDIHSLTFIILQKAVILNTCRIVRKFLSTDITTSALVLG

SEQ ID NO: 23696 - protein, 1411 aa, Thymelicus sylvestris
MRLRSGNKLPQAGTGAIRDGESRLLPTGSSCPTYSGGDTVSQSSVQFKTAADSHHHHPSTSVHSSSPPSLFSSIPSTNSYSRSPTHSISSTNSRRPEDVVQETDPVTPLAPTTASQNKRRKWSKEMNEFILRTYYQLTFMETDMNGYLPSLHIKFIEKFPEMHMISRQRIGDQRRAIVNKKLLIQKTIDNIYKEVNEEINNSRVNVDEQNTDKQYDLPDKLPLTVSDDISPNINTQKLIKTPQTVQRMRWTKEHNEAIMRAYYKITHLEENISAYRGLLHQAFITKFPNLQHISEQRVADQRRLITHNKYLSEERLQELKREVMIELVPQTKNNSNDNANSLDTSSVNQITVTPDHYILDSEAICKHTTNIDIEVTFETAYSYFKNINPTERAYIPKQKPSRRLSTIVTYINDNILPKYLNSGIEFNTFQCILYCAAWTAAKNNGAKIDIPPKQETGCRYNKRKPKWQIRLERRIDDLRVQIGRLTQYIRGNRSEKMVKHINYIQKHYKTHSKYENPNTHLLEFLDTLKQKLTTYSNRLKRYKTCTSRKIENNQFTSNEKQFYRQLGTHAVHNHQTAQVNQNNVRENVTQHNTQHSSSPSAEELHAFWANIWERPAQHNKEAEWIRNEQNNYVNSEPMDFQCVPTEVFHYVIKRLHNWKSPGSDNIHNFWYKKFTRTHPFIYSYINQFINTPETLPDYITQGTTYMLPKDTNFLSNPSKYRPITCLQTFYKILTSCITEMIYKHIDKNSILSEQQKGCRKYSYGCKEQLVIDAIILEKTRQRRSDLYSMYIDYKKAFDSVPHTWLLQTLEIYRIHPQIISFLQNTMSKWTTTLRLKTDLNTIETEPIKIRRGIFQGDALSPLWFCLALNPLSNLLNSSDAGYNLEYKINTDLQTDNSVYKINHLLYMDDIKLYATAEDKLQELAQLTEMFSQDIRMEFGIEKCKINSIKAGQHYAHHYPMQTGEIITPLTESEVYKYLGYNQAHKIQHKDIKNSLTKQFKYRLNSILKTHLYSKNTFKAINTYVIPVLTYSFGIIQWNKTELKTLQRIVNTTMTHHRKHHPRSSILRMTLPRSDGGRGLIDISNLHNKQVKNLRTYFHSKALSSILHNAIVQNDKKLTPLNLSDKTLQKNELQNDRQTKLNEWILKPLHGRHIHDLNQITVDKAASNEWLKRGELFPETEGFMLAIQDQVIETKNYKKHIMKLPNSSNDSCRKCKASPETIQHVTGACRAIVQSDYKHRHDQVATIIHQYLAFKYKLIQEKTAYYKYTPQTVIDTTNYKLYWDRTILTDKTVHYNRPDITLHDKKNQIVYLIDIAIPNTHNLSSTHTEKLSKYTDLAIELKTQWKVKTVKTVPIIISSTGVIPYTLHTSLKLLDIHSLTYITLQKAVVLNTCRIVRKFFASDNTTSALALG

SEQ ID NO: 23697 - protein, 1422 aa, Tagiades gana
MTNGAIVSGNAMRLRNGKNLPQAGTGANSDGESRPAHSCTGSPTYSGGDTVSQTSAQSSTDADSSYDPPSVESTPSTSTFPSVPLTHSYPTNTLTHLKLNVNIEPEEDAMQETCSVSNLASTTSSFKKRKKWNKIMNEFILRTYLQLTLMETDVRSYLPQLHAKFIEKFPDMNMISRQRLGDQRRAIINKKLLAQTDIDRIYSETHEYVNNIHMNTNTDNTPLLNTQINYDTPHTSEFNSYQTPQRMRWTRHHNETIIRAYYKITNLESNTSAYREQLHRAFITSFPQLQHITEQRIADQRRLIINNRYISTERLQAIKDEVTNELLLENRSCAEIQYNNNQTDTTYTHDNYLCNTDTVIFNDTRENINNITNTEMSHPDEKKNAEIEKTFAEAYAYFKNSDPSQRSYIPKQKSSKKLAIIVNYINDKILPNHISSNTEFINLQTVLYCAAWAAARCNGSKLEITPTVENNCKNQNRKPKWQIRLENKIAELRAQIGRLTQYINGNKSKKIANHVSSIKKRYKIHATHENPNTHLTEFLDTLKQKLTTISNRLKRYKTCTLRKKQNSHFISNEKQFYRQLRNPTDYINSGNRIESSNNSQNNIGHNSPPPANELRSYWANIWENPVHHNMQAEWIHKEHNNYGNCEPMDFQCVPAEVFHDVIKKLHNWKTPGSDNLHNYWYKKFTNAHPLVYKYVNQFIALPHTLPEYVTIGTTYMLPKDKNNLSNPEKYRPITCLQTIYKIITSCLTQIMYNHIDNNNLLAEQQKGCRKYSQGCKEQLTIDSIILKQTLQRKTDLYSMYIDYKKAFDSVPHSWLLKILEIYRIHPLIISFLQKTMAKWTTRLRLTTDMGTILTEPIKIQRGIFQGDALSPLWFCLALNPLSNMLNSIKPGYIFNDNERSRSLTDIPKNKLNHLLYMDDIKLYASTEVELQKLAQITEIFSQDIGMEFGINKCKTNSIRAGKSYAYYYQMQSGDLVEALTENEVYKYLGYNQAQQTLHREIKESLVKQFRHRLNSILRSYLNSKNIFKAINSYAIPILIYSFGIISWSKTELKALQRLINTSLTLHRKHHPRSCIQRLTLPRNIGGRGLIDILNLHNTQIKNLRKYFQNKALTSPLHQSIVQNDKKLTPLNLSDNTLQKNEEQTDRQTKLSEWTRKSLHGRHLHDLNQPTVDKAASNEWIKRGELFPETEGFILAIQDQVIETNNYKKHIMKVPNSSNDTCRKCKASPETIQHITGACRAIAQTDYKHRHDQVAAVIHQILAFKHKLISETTAYYKYIPQTVLDSRNCKLYWDRTILTDKTLHYNRPDITLHDKINQIVYLIDIAVPNTHNLVTTHTEKLTKYTDLATEIKSQWKVKTVINVPIVLSATGVIPLTLHTSLKRLNLPPYTYVTLQKAVILNTCRLVRKFLSMEISTTPTSVLG

SEQ ID NO: 23698 - protein, 1409 aa, Hesperia comma
MRLRSGNKLPQAGTGATSDGESRLPPSGRSCPTYSGGDTVSQSSAQFRTDADSHIHPLSSVHSASSSSLFQSIPSTNSYSRSPTHSISTTNSRLPEDVVQETDSVTPLAPTVASKNKRRKWSKEMNEFILRTYYQLTLMGTDTNGYLPPLHTKFIEKFPEMHMISRQRIGDQRRAIINKKLLTQKSLDNIYREVNEEIKNMQINVNKQNTPGTSTNFTDSRCQTHSSHISPSIDTQQLLSRTQTGKRMRWTEEHNETIMRLYYKITLLEENISAYRPLLHQAFTAAFPEFQHITEQRVADQRRLIIHNNYLSEERLQEIKTEVMLELMPQSKNSSHSHCNTTLQDTCPTTQFTVPTERNTINSERNTQTKNIEIEQTFKSAYNYFKNTDPTKRSFIPKQKTSRRFSITISYINDNILPNYIDSDTEFTTLQSVLYCAAWTAAKHNGAKIEIPPKINTDHRNRKNKPKWQMRLERRILDLRANIGRLTQYIKGNHSDRIVKCVKHIQKQYMTHSTHENSNTQLSHFLDTLKQKLSTYSNRLKRYKTCTLRKIQNKRFMSNEKHFYRHLRADSTHDNLNIQSQNSENLTSNDMPSNNSPSAVELREFWAKIWEKPVQHNKNADWIRNEEDIYANSESMDFRCIPVETFHSVINKLHNWKSPGSDNIHNFWYKKFKHIHPFIYNYINQFITSPHTLPDYITEGTTYMLPKDPSCLVNPSKYRPITCLQTFYKIITSCLTEEIYKHVEKNCILSEEQKGSRKYSQGCKEQLLIDAVILKQTNQRRSDLYSMYIDYKKAFDSVPHTWLIQILEIYRIHPQIISFLQNTMSKWTTRLTLNTGFNKIETEPIKIRRGIFQGDALSPLWFCLALNPLSNLLNSSDAGYNLDYKLTTDLQTDTLVHKINHLLYMDDIKLYASTEEQLRHLAHLTETFSQDICMEFGVDKCRINSIKAGQHYEHEYFMQSGEIVTALTECEAYKYLGYSQAQQIQHRDIKKNLIRQFKFRLASILRTQLNSKNTFKAVNTYAIPILTYSFGVINWNKTELKSLQRSINTTMTQHRKHHPRSSILRMTLPRNDGGRGLIDILNLHNKQITNLRTYFFIKSSSSILHNAIAQNDRKLTPLNLSDKTQQKNETQTDRQTKLNEWSQKTLHGRHLHDLNQTTVDKIASNEWLKRGELFPETEGFMLAIQDQVIETKNYKKHIMKLPNSFNDSCRKCKGSPETIQHITGACRAIVQTEYKHRHDQVAAIIHQSLAFKYKLIEDKKPYYKYTPQTVLDTTDYKLYWDRTILTDKTVHYNRPDITLHDKKNQIVYLIDVAIPNTHNLTTAHTEKITKYTDLAIELKAQWKVKAVKTVPIVISSTGVIPHTLHTSLKLLDIHSLTFIILQKAVILNTCRIVRKFLSTDITTSALVLG

SEQ ID NO: 23699 - protein, 1412 aa, Doberes anticus
MQLRSGNKLPQAGTGATRNGESRLEPSRSSRPTYSGGDNVSQSSAQFETVANDRQYQSPSVHSLPSSSIFSSVPSTNPYSRSPTFSTSTVDSRPEDVVRETISVTNLAPTSISLKTRRKWSTTMNEFILRTYLQLTLMETDTGGYLPPLYTKFIERFPEMHMVSRQRVGDQRRAIIRRKLLAKTDIDRIYQEVREEMNEIQANTHAHSTPLLNTLTDEPIRSHIINTQVQRFTSPRTSQRMSWSKVHNETIMRAYYRLTLLESNISGYREPLHQAFVTAFPDLEHITEQRVADQRRLIIYNRYITEERLQAIKDEVATELLLQNNTQVQTHSSSTSQTQHIFQTSQPELTTSPNYTQTIHNNIDTETSSHRQSLDIEKTFDTAFNYFQHTHPTQRSYIPKQKSSRRLAYLVNYINVTILPKYVTQDTEFTTLQTVLYCASWTAAKCNGAKIEIPPKEISNRRFKKKKPKWQIRLERRVDELRAQIGRLTHYINGNRTSETILRHVRYIQNRYKLHSTYENPNTKLSEFLDTLKQKLTTYSNRLKRYKTCTLRKTQNKQFSTNEKHFYRELKTQSPNNDRTTQSSRTNRNNTYTETDNNNPPHADELHKFWAKIWESSVEHNKDAEWIQYEQNTYSTSEPMDFQCIPVEVFYDVIKKLHNWKCPGSDNIHNFWYKKFTHIHPHIYTHVNKFINMPHTLPDYITAGTTYMLPKDPNCLSNPAKYRPITCLQTIYKIITSCLTQIIYKHIDKNNILTEQQKGCRKYSQGCKEQLTMDSIVLKQTQQRKSDLHSMYIDYRKAFDSVPHTWLLKILEIYNIHPQVISFLQNTMTKWTTRLRLTTEANIIETEPIKIKRGIFQGDALSPLWFCLALNPLSNLLNSSSVGYYLDYKNDTDVLTDSSTHKLNHLLYMDDIKLYGSSEAQLHLLAQITETFSQDICMEFGIDKCKINSIKDGQHYEHQYHMQNGEIVEPLTESEVYKYLGYNQAQQTLHTDIKHSLTKQFRHRLNTILRSQLNSKNTIKAINTYAIPILTYSFGVIKWTQTELKSLQRIINTTMTRHRKHHPRSSVQRMTLPRNEGGRGLIDITNLHNRQITNLRSYFHNKALTSLLHIAIVQNDKKLTPLNLIDRTKQKNEIQTDTQTKLTEWIRKTLHGRHLHDLNHPTVDKRASNEWIKHGEMFPETEGFMLAIQDQVIETNNYKKHILKLPNSSNDFCRKCKGSPETIQHITGACRAVVQTDYKHRHNQVAAIIHQNIAFKYKLIQEKIAYYKYTPQTVLDTSDFKLYWDRTILTDKTVHFNRPDITFHDKKNQIVYLIDIAIPNTHNLSSSHTEKITKYTDLAIELKTQWKVKTVKTVPIIISSTGIIPHTLHTSLKLLDMHPHTYTILQKAVILNTCRIVRKFLSTDTTSAFVLG

SEQ ID NO: 23700 - protein, 1401 aa, Atrytonopsis hianna
MRLRSGNKLPQAGTRANRDGESRLLPSGLSCPTYSGGDTVSQSSAQSRTAADSHHHPSTSVYSSSPSSCIFPSVASSNSYSSSPTHSIPTINSRLPEDVVQDTDSVTSLAPTSTSQTKRRKWSKNMNEFILRTYYQLTLMGTDTNGYLPSLHIKFIEKFPEMHMISRQRIGDQRRAIVNKKLLTQKTIDTIFNEVNEELNNIQITGDKQNSVTPKKSTNILPIPQSNDITPAIDTRQLQNRPQTGQRMRWTKEHNETIMRAYYKITLLEENISAYRGLLYQAFIAAFPHLIHITEQRVADQRRLIIHNKYLSEERLEAIKREVTLELLPQRNITYDTPSPNQLTSTLDQNAINSENGTQTNRLDIEETFKIAYNYFKHTHPTQRAYIPKQKPSKKLSIIVTYINDVILPRYLDTDTEFNTLQSVLYCAAWTAAKNNGAKIEIPPKIQVDNKYNKKKPKWQIRLERRIDDIRVHIGRLTQYIKGNRNDKVVKHIKYIQKQYKTHSTYENSNTHLSEYLDTLKQKLTTYSNRLKRYKSCTLRKIQNKQFTSNEKQFYRQIGTSINNYQTTQPERHHTVENTQNNIQLDSPPSAEELHAYWANIWERAVQHNKEADWIRNEQNHYFNTEPMDFQCIPVEVFHNVIKRLHNWKSPGSDNIHNFWYKKFTRIHPFIHNYINQFIKSPQTLPDYITEGTTYMLPKDRNCLSNPSKYRPITCLQTFYKIITSCITEMIYKHVDKNYILSEEQKGCRKYSLGCKEQLIIDSILLQQTQQRKSDLYSMYIDYRKAFDSVPHTWLLQTLEIYRINPQIISFLQNAMLKWTTRLRLNTDKSTIETGPIKIRRGIFQGDALSPLWFCLALNPLSNLLNSSNAGYNLEYKNNIDLQTDSSIYKINHLLYMDDIKLYASTEDQLQQLAQITEIFSQDICMEFGIDKCKINSIKAGKQYEHQYPMQTGEIVTALTENEVYKYLGCSQAQQIQHKQIKDSLTRQFKYRLNNIVKSQLYSKNTFKAVNTYVISVLTYSFGIVHWTKTELKILQTTINTTLTRHRKHHPRSSILRMTLPRSDGGRGLIDISNLHNKQVTNLRTYFHSKASSSILHNAIVQNDQKLTPLNLSDRTLQTNEIQTDRQTKLNEWTRKALHGRHLHDLNQAAVDKTASNEWLKRGELFPETEGFMLAIQDQVMETKNYKKHIMKLPNSSNDSCRKCKASPETIQHITGACRAIVQTDYKHRHDQVATIIHQCLAFKYKLIQEKTAYYKYTPQTVIDTTDYKLYWDRTILTDKTVHYNRPDITLHDKKNHKVYLIDIAIPNTHNLSTTYTEKITKYTDLAIELKTQWKVKTVKTVPIVISSTGIIPHTLHTSLKLLDIHSNTYIILQKAVILNTCRIVRKFLSTDITTSTLVLG

SEQ ID NO: 23701 - protein, 1407 aa, Thymelicus lineola
MRLRSGNKLPQAGTGATRDGESRLLPTGSSCPTYSGGDTVSQSSAQFRTAADSHHHHPSTSVHSSSSSSIFPSVPSTNSYSRSSPHSNSSTNRRLPEDVVQETDPVISLAPTTASQNKRRKWSKEMNEFILRTYYQLTLMETDTNGYLPSLHTKFIEKFPEMHTISRQRIGDQRRAIVNKKLLTQKTIDTIHREVSEEINEMQTNLEAQNAVTPENLNYTVSPTQSKDMLVATNTQKPKTVQRMRWTKEHNEAIMRAYYKITFLEENISAYRGLLHQAFITTFPNLQHISEQRVADQRRLIIHNKYLSEERLQDIKREVTIELLPQTRNDTQTHYNTSSLDISSTNQLTLTSNRNTIDSETCTYTNNFDIEQSFKKAYDYFKNINPTQRPYIPKQKPSKRLGTIVTYINENILPKYLHSNTEFNDFQSVLYSAAWTAAKNNGSKIEIPPRIDADFRYKKKKPKWQIRLERRIDDLRVLIGRLTQYIKGNRNDRLVKQINFIQKHYKIHSTYENPNTHFSEFLDTLKQKLTTYSNRLKRYKTCTLRKKQNSQFKSNEKQFYRQIGADTIHSNQTDQLDQHVLEVTAQPNLQNSSSPSAEELRAFWANIWERSIQHNKEADWIQKEQNSYFNTDPMDFQCIPVEVFHNVIKRLHNWKSPGSDNIHNFWYKKFTHIHSFIYNFINKFIKTPETLPDYITEGTTYMLPKDLNCLSNPSKYRPITCLQTFYKILTSCLTEVIYKHIDKNNILSEEQKGCRKYSYGCKEQLIIDAVILKQTQQKRSDLYSMYIDFKKAFDSVPHTWLLQILDIYRVHPQIISFLKNTMTKWTTKLRLNTETNAIETQPINIRRGIFQGDALSPLWFCLALNPLSNLLNLSNAGYNLKYNSTTNLQTDNLVHKINHLLYMDDIKLYASTEDQLLQLVQLTEIFSQDICMEFGIDKCKINSIKAGQPYEHQYSMQSGETVTALTENEVYKYLGCSQAQHIQHKDIKTSLIRHFKYRLNTILKSHLYAKNTFKAINTYVIPVLTYSFGIINWNKTDLKTLQRIINTTMTRHRKHHPRSSIIRMTLPRIDGGRGLIDISNLHNKQVTSLRAYFHSKAPSSILHKAIVQNDKKLTPLNLSDETRQKNEIQIDRQTKLNEWTLKALHGRHLHDLNQDTVDKVASNAWLKRGELYPETEGFMLAIQDQVIETKNYKKHIMKLPQSSNDSCRKCKTSSETIQHITGACKAIVQSDYKHRHDQVATIIHQYLAFKYKLIQEKIAYYKYTPQTVIDTTNYKLYWDRTILTDKTVHYNRPDITLHDKKNQIVYLIDIAIPNTHNLTTTHTEKLNKYTDLAIELKTQWKVKTVKTIPIIISSTGIIPYTLHTSLKLLDIHPLTYITLQKAVILNTCRIVRKFFATDNTTSALVLG

SEQ ID NO: 23702 - protein, 1396 aa, Euphyes dion
MRLRSGNKLPQAGTRSNRDGESRLLSSGLSCPTYSGGDTVSQSTAQLRTAAVSHHQPIPSVHSSSPSSSTTLYVPSSNSESISPTHSILTINSRLPEDVVQETNPVTPLAPTTSSQNKRKKWSKEMNEFILRTYYHLTLMETDTNGYLPSLHTKFIEKFPEMHMISRQRIGDQRRAIVNKKLLPQKIIDTIFNQVNEELNGMQTNGDQQNTVTPKKNIHELPNIQCNHIPSVIDTQQTPNKPQAGQRIRWTKEHNEAIMRAYYKITLLEENISAYRGLLHQAFVTAFPNLQHITEQRVADQRRLIIHNKYLSEERLQDIKREVTLELPPQRINTPDTSLTNQLTFTSDPEIGHETTRPDIEEYFKAAYNNFKNIHPTQRAYIPKQKPSKKFGAIVNYINDILLPKYIGTDTEFSDMQSILYSAAWTAAKTNGARLEIPPKIEVDKTYKKNKPKWQIRLERKINDIRLHIGRLTQYIRGNRNDRIVKHIKYIQKQYKTHSTHENPNTHLSEFLDTLKQKLTTYSNRLKRYKTCTLRKIQNEKFITNEKQFYRQLGTPNIHQVSQPERHHLLENTTQDNIQFSSSPSADDLYAYWATIWERPVQHNKEADWIRNEQNNYSYSETMHFQLIPIEVFQNVIKKLHNWKSPGSDNIHNFWYKKFTRIHPFIYNYINQFIKSPQTLPDYVTEGITYMVPKDPNCLSNPSKYRPITCLQTLYKIITSCLTEMIYKHVDDNSILSEEQKGCRKYSLGCKEQLIIDSIVLKQAQQKRSDLYSMYIDYRKAFDSVPHTWLLQVLEIYRINPQIISFLQNTMLNWRTKLRLNNQRTTIETGPIKIRRGIFQGDALSPLWFCLALNPLSNLLNSSNSGCYLEYKSNADTHTDSSSHKINHLLYMDDIKLYASSEDQLQELAQLTENFSLDICMEFGIDKCKINSIKAGKHYEHQYCMQNGDTVTSLSESEVYKYLGYSQAQQIQHKQIKDSLTRQFRYRLTNILKSQLYSKNTFKAVNTYVISVLTYSFGIINWTKTELKTLQTIINTTMTRHRKHHPRSSILRMTLPRTDGGRGLIDISNLHNKQVTNLRTYFHSKAPTSILHNAVVQNDKKLTPLNLSDNTPQPNEIQTDRQTKLNDWTRKALHGRHIHDLNQETVDKKASNEWLKRGELFPETEGFMLAIQDQVIETKNYKKHIMKLLCSSNDSCRKCKSSSETIQHITGACKAIVQTDYRHRHDQVARIIHQSLAFKYKLIQEQTAYYKYTPQTVIDTSNYKLYWDRTIITDKTVHYNRPDITLHDKKNQIVYLIDIAIPNTHNLSTTYTEKLTKYTDLAIELKTQWKVKTVKTVPIIISSTGVIPHTLHKSLKLLDIHSHIYIMLQKAVILNTCRIVRKFLSTDITTSALVLG

SEQ ID NO: 23703 - protein, 1394 aa, Hesperia comma
MRLRSGNKLPQAGTGATRDGESRLPPSGRSCPTYSGGDTVSQSSAQFRTAADSQSHHPLSVHSSSPSSSIFPSVPSSNSFSSSPTHSASTINIRLPEDVVQETDTVSSLAPTTTSQTMRRKWSKEMNEFILRTYYHLTLLETDTNGYLPSLHTKFIEKFPEMHTISRQRIGDQRRAIVNKKLLTQNTIDSIFKEVSEELNNFQRHGYEHNTITPVTDILPTTQSMNMSPASNIQHMQNKHQTGQRMRWTKEHNEAIMRAYYKITLIEENISAYRRLLHQAFITAFPNLQHITEQRVADQRRLIIHNKYLSEDRLEEIKREVTRELMPQRNITQDTPPASQLIFTPDHNEISSEEETETVRTDIEDTFKIAYNYFQNTHPTQRAYIPKQKPSKKLSIIVGYINNIIFPKYLNTDTEFTTMQTVLYSAAWTAAKTNGAKIEIPPEIKVDGWSKEKKPKWQIRLERRIDDLRVQIGRLTQYIRGNRSDRMVKHIQYIQKLYKIHSTYDNPNTQLSEFLDTLKQKLTTYSNRLKRYRTCTLRKLQNKQFKSNEKQFYRQLGSHNIPQKTTQSERHHIVENLTQNNALLSSPPSVQELHSYWANIWERSVQHNKDADWIRKEQNSHLNFERMDFQCIPVEVFNNVIKRLHNWKSPGSDNIHNFWYKKFTYIHPFIYKYINQFIKSPQTLPDYITEGITYMLPKDPNCLSNPSKYRPITCLQTFYKIITSCLTEIIYKHIDKNCILSEEQKGCRKYSLGCKEQLVIDTIILKQSQQKKSDLYSMYIDYRKAFDSVPHTWLLQILEIYHINPQIISFLQNAMLKWATKIKLNTKQNTIETEHIKIRRGIFQGDALSPLWFCLALNPLSNLLNSSNAGYNLEYENNTDLRTTSSIYKINHLLYMDDIKLYATAEDQLQQLALLTEIFSNDICMEFGIDKCKINSIKAGKHFEHQYYMQTGETIEALTENEVYKYLGYSQAQQLQYRQIKDSLSRQFKTRLNYILKSQLYSKNTFKAVNTYAIPILTYSFGIINWTKTELKTLQTTINTTLTRHRKHHPRSSILRMTLPRADGGRGLIDISNLHNKQVTNLRKFFYSKASSSFLHNAIVQNDKKLTPLNLSDTTVQTNEIQTDRQTKLNEWAQKALHGRHFHDLSQATVDKTASNEWLKRGELFPETEGFMLAIQDQVIETKNYKKHIMKLSNSSNDSCRKCKASPETIQHVTGACRAIVQTDYKHRHDQVASIIHQYLAFKYKLIQEKTAYYKYTPQTVIDTTNYKLYWDRTILTDKTVHYNRPDITLHDKIKQIVYLIDIAIPNTHNLSSTYTEKLTKYTDLAIELKTQWKVKTVKTVPIVLSSTGVIPHTLHTSLNLLDIHSYTYIILQKAVILNTCRIVRKFLSTDINT

SEQ ID NO: 23704 - protein, 1397 aa, Duroca duroca
MRLRSGNKLPQAGTSAIRDGESRLAPSGPSCPTYSGGDTVSQSSAQFRTAADSHHHPLTSIHSTSSSSLFPSVPSTNSYSRSPTHSTATTNSMLPEDVVQVTDPVYPLAPTTSSQNKRRKWSKDMNEFILRTYYQLTLMETDTNGYLPSLHTKFIEKFPEMQNISRQRIGDQRRAIVNRKLLTQKAIDTIYKEVNEELNNMQINVDTRNTDMPDRLSVTQPNHISPAISTKQLFNKPKPGQHMRWTKEHNETIMRAYYKITLLEENISAYRGLLHQAFITAFPNLQYITEQRVADQRRLIVHNKYLSEERLQDIKREITLELQNKDHTHTYHNTTSQENTFTRNEIESETHTHTKSTDIEQTFETAYNYFKNINPTLRMYIPKQKPSRRLSSIVNYINDNILPKYLHSNIEFSTMQSLLYCAAWTAAKNNGAKIEIPPRIEVDRRNRKRKPKWQIRLERRIDDLRAQIGRLTQYIRGNRNDRIVKHVNYIKKQYKSHSTYENPNTYLPEFLDTLKQKLTAYSNRLKRYKTCTLRKTQNKQFTSNEKQFYRQLGSHVILNNENTQSERHNTSRNITQNNIQHSSSPSAEELRSFWANIWERSVQHNEEAEWIRNEQNRYNNSEPMEFQCIPIEVFNNVIGRLHNWKSPGSDNIHNFWYKKFTRIQPFVYNYINKFIKSPQILPDYITEGTTYMLPKDQNCLSNPSKYRPITCLQTIYKIITSCLTEIIYKHVDTNHILSEEQKGCRKYSYGCKEQLIIDAIIHKQTQQRRSDLYSMYIDYKKAFDSVPHTWLLQILKIYRIHPQIISFLQNTMSKWTTRLRLNTETNTIETESIKIRRGIFQGDALSPLWFCLALNPLSNLLNSLNAGYNLEYKANTDIQTDNLVHNINHLLYMDDIKLYASTEDQLQQLAHVTEIFSQDICMEFGIDKCKINSIKAGEHYEHQYSMQTGETVTALSESEVYKYLGFSQAQQIQHKDIKNSLTRQFKHRLNSVLKSQLYSKNNFKAINTYVIPVLTYSFGIVYWYKSELKAVQRIINTTMTRHRKHHPRSSILRMTLPRSDGGRGLIDITNLHSKQITNLRTYFHSKATSSILHNAIVQNDKKLTPLNLSDKTSQANEIQTDRQTKINEWARKALHGRHLHDLNQDTVDKTASNEWLKRGEVFPETEGFMIAIQDQVIETRNYKKHIMKLPQSSNDSCRKCKASSETIQHITGACRAIVQTDYKHRHDQVAKIIHQCLAFKYKLIHEKTAYYKYTPQSVLDTTNYKLYWDRTILTDKTVHYNRPDITLHDKKNQIVYLIDVAIPNTHNISTTHSEKLTKYTDLSIELKTQWKVKTVKTVPIVISSTGVIPHTLHTSLKLLDIHTLTYINLQKAVILNTCRIVRKFLSTDITTSALELG

SEQ ID NO: 23705 - protein, 1410 aa, Hesperia comma
MRLRSGNKLPQAGTRANRDGESRLPPSGRSCPTYSGGDTVSQSSVQFKTVADSHFHPSSSVHSASSSSIFQSIPSTNPYSRSPSHSSSTTNSRLPEDVVQETDSVTYLAPTTASQIKRRKWNTEMNEFILRTYYQLTLMETDTKGYLPLLHTKFIETFPEMHMISRQRIGDQRRAIINKKLLTQTTLDKIYREVNEEIKNMQININKQNTGISINTDNQSLSDSSNIPPNINTQQVLKRTQAGQRMRWTKEHNETIMRLYYKITLLEENVSAYRGLLHQAFINAFPDLEHITEQRVADQRRLIIHNKYLSEERLGEIKREVTLELLPQSKNYSHAQGNTTLHDTYSATQLTVMPDQNPTNFEINTQTQNSEIEKTFEAAYNYFKNINPTQRSFIPKQKTSRRLGTIINYINDNILPKYIDSDTAFTTLQSVLYCAAWTAAKNNGAKIEIPPRINADRRNRKNKPKWETRLERKILDLRVHIGRLTQYIKGNRSDKIVKHIKYIQSQYKNHSTHENPNTHLSDFLDTLKQKLSTYSNRLKRYKTCTLRKVQNKQFVSNEKQFYRHLRNDTTHNKQNTQSEPSHPLGNLTPTDINSNKAPSAVELREFWAKIWENPVQHNKEADWIRNEQNRYENYESMEFHCIPVETFRDVIKRLHNWKSPGSDNIHNFWYKKFTYIHPFIYNYINKFIKSPHTLPDFITEGITYMLPKDPSCLLNPSKYRPITCLQTFYKIITSCLTEVIYQHIDKNCMLSEEQKGSRKYSQGCKEQLVIDAVVLKQTNQKRSDLFSMYIDYKKAFDSVPHTWLLQTLEIYRIHPQVISFLQNTMSKWTTRLRLNADLNTTETEPIKIRRGIFQGDALSPLWFCLALNPLSNLLNSTNAGYKLEYKFTTDLQTDTLVHKINHLLYMDDIKIYASTEEHLQNLAHLTETFSKDICMEFGVDKCKINSIKAGQPFEHEYFMQTGEIVTALTECEVYKYLGYSQAQQIQHKDVKKSLTIQFKSRLTSILRSQLNSKNTFKAVNTYAIPILTYSFGIINWTKTELKTVQRIVNTTMTRHRKHHPRSSILRMTLPRNDGGRGLIDILNLHNKQITNLRTYFFNKASSSTLHNAIAQNDRKLTPLNLSDKAQQRNEIQTDRQTKLNEWNRKALHGRHLHDLNQATVDKTASNEWLKRGELFPETEGFMLAIQDQVIETNNYKKHIMKLPNSSNDSCRKCKGSSETIQHITGACRAIVQTEYKHRHDQVAAIIHQSLAFKYKIIEDKKPYYKYTPQTVLDTTDYKLYWDRTILTDKTVHYNRPDITLHDKRNQIVYLIDVAIPNTHNLTTAHTEKLTKYTDLATELKTQWKVKAVKTVPIVISSTGVIPHTLHTSLKLLDIHPLTFIIIQKAVILNTCRIVRKFLSTDITTSALVLG

SEQ ID NO: 23706 - protein, 950 aa, Katreus johnstonii
MEIDNRCKKNKPKWQIRLERKINDLRVQIGRLTQFIRGNRNDRLVKHIKHIQNQYKTHSSYENPNTQLSEFLDTLKQKLTTYSNRLKRYKTCTLRKMQNKQFTANEKQFYRHLRTQTTHDILSTEPRQHNTSENIRQNERTNNSSPSAVELRAFWAKIWERPAQHNKEADWIRHEQNTYSYSEPMEFQCIPVEVYHDVIKRLHNWKAPGSDNIHNFWYKKFSRIHPFIYNYINKFIEMPHTLPDFITEGTTYMLPKDSNCLSNPSKYRPITCLQTIYKIITSCLTEMIYKHIDKNNILSEEQKGCRKYSQGCKEQLIIDAIILKQTQQRKSDLYSMYIDYKKAFDSVPHTWLLQILKIYHIHPQIISFLQNAMTKWTTRLRLNTDINTIETEPIKIRRGIFQGDALSPLWFCLALNPLSNLLKSSNAGYNLDYRITTDLQTDCSIHKINHLLYMDDIKLYASTEEQLQLLAQISEMFSQDICMEFGIDKCKINSIKAGQHYEHQYTMQTGETVTSLDESEVYKYLGYGQAQQILHKDIKNSLTKQFRYRLTSILKCQLYSKNTFKAVNTYAIPILTYSFGIINWNKTELKSIQRLINTTMTRHRKHHPRSAIQRMTLPRHDGGRGLIDISNLHNKQITNLRSYFHTKALSSTLHSAIIQNDKKLTPLNLIDKTQQRNEIQTDRQTKLNEWIQKALHGRHPHDLNQATVDKIASNEWLKRGGLFPETEGFMIAIQDQVIETNNYKKYIMKLPNSSNDSCRKCKSSPETIQHITGACRAIAQTDYKHRHDQVAAIVHQSLAIKYKLIQEKTAYYKYIPQTVLDTTHYKLYWDRTILTDKTIHYNRPDITLHDKKNQIVYLIDIAIPNTHNLSTTHTDKLSKYTDLAIELRTQWKVKTVKTVPIIMSSTGVIPHTLHASLKLLDIHSLTYILMQKAVILNTCRIVRKFLSMDI

SEQ ID NO: 23707 - protein, 1399 aa, Nastra julia
MRLRSSNKLPQAGTSAFRDGESRLAPSGPSCPTYSGGDTVSQSSAQFRTAADRHHHPLTSTHSTPSSSLLPSVPSTNSFSRSPTHSTATTNSMLPEDVVQVTDPVSTLAPTTDSQNKRRKWSKAMNEFILRTYYQLTLMETDTNGYLPSLHTKFIDKFPEMQNISRQRIGDQRRAIVNRKLLTQKTIDNIYKEVNEELSNMQKNVGTQNSDILDTQLATHPNNISPALHTKQLINKPVAGQRMRWTKEHNETIMREYYKITLLEENISAYRGLLHQAFITAFPNLHHITEQRVADQRRLIIHNKYLSQERLEDIKREITLELHNKNHTHTCSNTTYSKNTRTCNGTESEVHTHTKSADIEQTFETAYNYFKNISPTQRIYIPKQKPSRRLSSIVNQINDNILPKYLHSNIEFNTMQTVLYCAAWTAAKKNGAKIEIPPRIEADRIVKNRKPKWQIRLERRIDDLRAQIGRLTQYIKGNRSHRVEKHVNYIKKQYKSHSTYENPNIHLSEFLDTLKQKLTTYSNRLKRYKTCTLRKIQNKQFSSNEKHFYRQLGSHIVHSDENTRPEQNNTTADITQNTSNTQYSGSPSADELHSFWANIWEGSVQHNEGADWIRNEQNRYINSEPMDFQCIPIEVFNNVIKRLHNWKSPGSDNIHNFWYKKFTIIHPFVYNHINKFIKSPETLPNYITEGTTYMLPKDQTCLSNPSKYRPITCLQTIYKIITSCLTEIIYKHVDSNHILSEEQKGCRKYSYGCKEQLIIDAVILKQTQQRKSDLYSMYIDYKKAFDSVPHTWLLQVLKIYRIHPQIISFLQNTMSKWSTILRLNTDKNAIETESIKIRRGIFQGDALSPLWFCLALNPLSNLLNSLDVGYDLEYKATTDRQTDNLVHKINHLLYMDDIKLFASTENQLQQLAQVTEIFSKDICMEFGIDKCKINSIKAGEHYEHQYSMQIGETVKALTESEVYKYLGFSQAKQIQHKDIKKSLTRQFKQRLNLILKSQLYSKNTFKAINTYVIPVLTYSFGIVNWYKTELKVLQRIINTTLTRYRKHHPRSSILRMTLPRCDGGRGLIDISNLHNKQVTNLRTYFHNKITSSILHNAIVQNDKNLTPLNLSDKALQANEIQTDKQTKLNEWAQKALHGRHLHDLNQDTVDKTASNEWLKRGEVFPETEGFMLAIQDQVIETKNYKKHIMKLPHSSNDSCRKCKASSETIQHITGACRAIVQTDYKHRHDQVAKIVHQCLAFKYKLIQEKTAYYKYTPQSVLDTTNYKLYWDRTILTDKTVHYNRPDITLHDKKNQTVYLIDIAIPNTHNLSTSHSEKLSKYTDLSIELKTQWKVKTVKTVPIIISTTGVIPHTLHKSLKLLDIHTLTYITLQKAVILNTCRIVRKFLSTDIATSAIVLD

SEQ ID NO: 23708 - protein, 1399 aa, Ochlodes sylvanus
MRLRSGNKLPQAGTRANRDGESRLSPSGLSCPTYSGGDTVSQSSAQLRTAADNHLHPLTSVHSSSPSFPSVPSSSSYSNSPTHSILTVNSRLPEDVVQETDPVTPLAPTTASQTKRRKWSKEMNEFILRTYYQLTLMETDTNGYLPSLHTKFIEKFPDMHMISRQRIGDQRRAIVNKKLLTQKTIDTIFKEVNEELNNMQINREKQNTVTPKNLTNTLLNTQSNDTSPVIDTRQLPNRPQIVHRMRWTKEHNEAIMRAYYKITLLEENISAYRGLLHQAFITAFPNLHHITEQRVADQRRLIIHNKYLMTERLEDIKREVTLELLSQSNTTQNTSSTNQLTFTPNQNEMTSEEGTETNRTDIEETFNMAYNYFKRTHPTQRAYIPKQKPSKKLSIIVAYINDNILPKYINTDTEFSTMQSVIYCAAWTAAKNNGAKIEIPPKIKVDSNFKKKKPKWQIRLERRIDDLRVQIGRLTQYIRGNRSDRMVKHIEHIKKQYKTHSTYEDPNTHLSEFLDTLKQKLTTYSNRLKRYKTCTLRKIQNNQFTSNEKQFYRQLGSNTTHNHQTTRSERHPTLANTTHNNIQLSSPSTEELHVYWASIWEKSVQHNKDADWIRNEHNSYLESEPMDFQCIPVEIFQDVIKRLHNWKSPGSDNIHNFWYKKFTRIHPFIYNYVNQFINSPETLPDYITEGITYMLPKDPNCLSNPSKYRPITCLQTFYKIITSCLTQIIYKHVDKNNILSEEQKGCRKYSLGCKEQLIIDTIILKQTQQKSSDLYSMYIDYRKAFDSVPHAWLLEILDIYRINPQIISFLQNAMLKWTTRLRLNTKQNTIETEPIKIRRGIFQGDALSPLWFCLALNPLSHLLNSSNAGYNLEYKNNTDLPTESSIHKINHLLYMDDIKLYATTEDQLQQLAQLTEIFSKDICMEFGIDKCKINSIKADKHYEHQYSMQTGETVTALTENEVYKYLGYSQAQQIQYKQVKDSLTRQFRNRLNYILKSQLYSKNTFKAVNTYVISILTYSFGIIHWTKTELKILQTTINTTMTRHRKHHPRSSILRMTLPRSDGGRGLIDITNLHNKQVTNLRTYFHGKVPYSVLHNAIVQNDKKLTPLNLSDKALQTNEIQTDRQTKLNEWARKALHGRHLQDLSQATVDKRASNEWLRRGELFPETEGFMLAIQDQVVETKNYKKHIMKLPNSSNDSCRKCKASPETIQHITGACRAIVQTDYKHRHDQVATIIHQSLAFKYKLIQEKTAYYKYTPQTVIDTINYKLYWDRTILTDKTVHYNRPDITLHDKRNQIVYLIDIAIPNTHNLSTTYTEKLTKYTDLAIELKTQWKVKTVKTIPIVISSTGVIPHTLHTSLKLLDIHSYTYTILQKAVILNTCRIVRKFLSADITTSALVLG

SEQ ID NO: 23709 - protein, 1399 aa, Ochlodes sylvanus
MRLRSGNKLPQAGTRANRDGESRLSPSGLSCPTYSGGDTVSQSSAQLRTAADNHLHPLTSVHSSSPSFPSVPSSSSYSNSPTHSILTVNSRLPEDVVQETDPVTPLAPTTASQTKRRKWSKEMNEFILRTYYQLTLMETDTNGYLPSLHTKFIEKFPDMHMISRQRIGDQRRAIVNKKLLTQKTIDTIFKEVNEELNNMQINREKQNTVTPKNLTNTLLNTQSNDTSPVIDTQQLPNRPQIVHRMRWTKEHNEAIMRAYYKITLLEENISAYRGLLHQAFITAFPNLHHITEQRVADQRRLIIHNKYLTTERLEDIKREVTLELLSQRNTTQNTSSTNQLTFTPNQNEMTSEEGTETNRTDIEETFNMAYNYFKRTHPTQRAYIPKQKPSKKLSIIVAYINDNILPKYINTDTEFSTMQSVIYCAAWTAAKNNGAKIEIPPKIKVDSNFKKKKPKWQIRLERRIDDLRVQIGRLTQYIRGNRSDRMVKHIEHIKKQYKTHSTYEDPNTHLSEFLDTLKQKLTTYSNRLKRYKTCTLRKIQNNQFTSNEKQFYRQLGSNTTHNHQTTRSERHPTLANTTHNNIQLSSPSTEELHVYWASIWEKSVQHNKDADWIRNEHNSYLESEPMDFQCIPVEIFQDVIKRLHNWKSPGSDNIHNFWYKKFTRIHPFIYNYVNQFINSPETLPDYITEGITYMLPKDPNCLSNPSKYRPITCLQTFYKIITSCLTQIIYKHVDKNNILSEEQKGCRKYSLGCKEQLIIDTIILKQTQQKSSDLYSMYIDYRKAFDSVPHAWLLEILDIYRINPQIISFLQNAMLKWTTRLRLNTKQNTIETEPIKIRRGIFQGDALSPLWFCLALNPLSHLLNSSNAGYNLEYKNNTDLPTESSIHKINHLLYMDDIKLYATTEDQLQQLAQLTEIFSKDICMEFGIDKCKINSIKAGKHYEHQYSMQTGETVTALTENEVYKYLGYSQAQQIQYKQVKDSLTRQFRNRLNYILKSQLYSKNTFKAVNTYVISILTYSFGIIHWTKTELKILQTTINTTMTRHRKHHPTSSILRMTLPRSDGGRGLIDITNLHNKQVTNLRTYFNSKVPYSVLHNAIVQNDKKLTPLNLSDKALQTNEIQTDRQTKLNEWARKALHGRHLQDLSQATVDKRASNEWLRRGELFPETEGFMLAIQDQVVETKNYKKHIMKLPNSSNDSCRKCKASPETIQHITGACRAIVQTDYKHRHDQVATIIHQSLAFKYKLIQEKTAYYKYTPQTVIDTINYKLYWDRTILTDKTVHYNRPDITLHDKRNQIVYLIDIAIPNTHNLSTTYTEKLTKYTDLAIELKTQWKVKTVKTIPIVISSTGVIPHTLHTSLKLLDIHSYTYTILQKAVILNTCRIVRKFLSADITTSALVLG

SEQ ID NO: 23710 - protein, 1272 aa, Odontoptilum angulatum
MMKDNNLVRHLDACETMGNATAICSDKTGTLTTNRMAIINKKLLTQDHLDRIFSDVQKEIHDSKINIQANNTTNQTEESITYTKSQPTSSKYTVQRMRWTQQHNDTIIRAYYKITHLESNISAYREQLHKAFISSFPHLQHVTEQRIADQRRLIIHNKYISQERLKEIKDEVAKELMLEKNSSTENQNENYQISDQIEISNEQTHCFSNLDTEIFINACKSTNNTLNLATHPNTHSNQQIIRETFKEAYTHFKNIDPTQRSYIPKQKSSKKLGLIVNYINDNILPEYIDTNTDFITFQSVLYCAAWAAAKCNGAKIKIPPKDKFNFRNQKKAPKWQIRLEYRVVELRAQIGRLTQYIKGNQSKNIEKHVKHIQKRYKIHATHENPNKNLHEFLDTLKQKLTTISNRLKRYKTCTLRKKQNSQFSSNEKQFYRELGTPMKNFTPNVQNAHQYISTQSNEHSSINSNNRPSANELRNFWANIWEHPVEHNKEADWIMQEQNNYSTIEPMTFQHIPVEIFHDVIKKLHNWKTPGSDNLHNYWYKKYTYIHPFIYNYINKFISTPHTLPNYITTGITYMLPKDLNKLSKPEKYRPITCLQSIYKIITSCLSQVIYNYIDKNNILAEQQKGCRKYSQGCKEQLTIDSVVLKQTQQRKSNLYSMYIDYKKAFDSVPHTWLVKVLEIYRIHPLIISFLQNTMAKWTTRLRLTTDTGVTITDPIKIQRGIFQGDALSPLWFCLAINPLSNILNSLNTGHNFNDIKNNTDLLPNTSIYKLNHLLYMDDIKLYGSTEEELLQMAQITEKISQDIRMEFGIDKCKTNSIRAGQSHSYQYHMQTGELVEAITENEAYKYLGYNQFLQILHKDIKNSLIKQFRHRLNIILRTHLYSKNTFKAINTYAIPILTYSFAIINWNKTELKTLQRLINTTMTRNRIHHPRSCIQRLTLPRNVGGRGLIDILNLHNRQINNLRTYFQSKDLTSPLHKAVVDSDKKLTPLNLNDKTQQRNEILIDRQTKIDEWTRKALHGRHLHDLNQHTVDKTASNEWLKRGELFPETEGFILAIQDQIIETKNYRKHIIKLPNSSDDSCRKCKVAPETIQHITGACRAIAQTDYKHRHDQIAAVIHQYLAFKYKLITEKTAYYKYTPQTVIDSKDFKLYWDRTILTDKTLHYNRPDITLHDKKKQTVYLIDIAIPNTHNLTSTHTEKLTKYTDLAIEIKKQWKVKSVLTVPIVLSTTGVIPLTLHKSLKLLDIHSQTYITLQKAAILNTCRTVRKFLTID

SEQ ID NO: 23711 - protein, 856 aa, Matsumurasca onukii
MGLRAQGAEGAFAQLLQEADTLSLTIFRDPDNMDRAEVAESLDVLVRGFVAYKVGRRPVQRRAGGGEQNRGRRRNHAHRRRVAYARVQELFKKNPAGLAQRVLEGTLDNEVEGDEQKPSPAQFLNLYQGLWGVQGRCDVEFEVRDEQQVSQIEGITPRDVWLRLRRVKGNSAAGPDGVVKRDLIGREKTTVFLAKVFNVALVTGCFPEAWKENKTTLIPKPNKAKDDPANWRPITISSLLARLYSGLIDARLRVLVQLSAGQRRFLPMNGCHISCHILHELLKIGRRGFPLAACLLDVSKAFDTVPHGAIAKALRAQGVPGHMVNLVSSMYVNCSTRLGVLGSPRVELRRGVKQGDPLSPILFNLVMDPLLRQLEQSGDGFNVDADGSKVGAMGFADDLIVFGNDAVQVQRQLDRVGGYLEGLGMALAARKSLALQISYSRRSWVATNPQLKVRGEDVPAAVPGTKFPYLGVKFNIEQGMANAHLGEELIQGAQRLQALPLKPLQKLELLQTYMIPKFAYALSIDLPSRNVLRNIDREIRKVIRGMFHLHESTTDRLLYARVRDGGLGFPRLETQLSLILLANHAKNSGGRGDWLLERLHDINDAEGEIARLAQLAGVPYPVTLAGVNSQREKQKADESREWQRLQSHGHGVKDFRNDPCGNAWLRSTLLKPSIHVKALRLRTNTMGTRVACGRADPAASRQCRRCDHPFETLGHVLGECVAGKGARIRRHNEMVSALANEIEKTGQRLFIENSFRAPGVDGAMRLFKPDLVVINDRAVIVADVTVRYENGNALATGYEEKINKYTTLAEHLRRQFGKAEAMVVPVVVGSRGATSCRLERSLKSLGIFSRGLKLTQ

SEQ ID NO: 23712 - protein, 1263 aa, Proteides mercurius
MRLRSRQIPQAGTSDGESRPGHSRSGCPTYSGGGTASHMTHSEVVADELHITSHGTSPISSTHSLFPSPNSSPYSFQTIPSSPNSHTSPISSLPNSNNPPPSSSLFSLSDNVEKEASAKKPSPIADTKRARKTWTTEMNIFIWRTFLTITKLKPPTRGYLDELHLQFHSKFPHMDASKQRVGDQRRAIVRNKLLSQQLLDKIKDEVTVILQNSDPSEHTHANTTNTQIHLTEKRRMVWTTEINEAIIKIYYEVTELESNLTTYRKRLYDKFIEHFPHLSHLTEQRIADQRRAIVMNKMLTENRITQIKQEVATKLSEDIIPDNPTLNYFQNNSLNSTNNHEMFDTATHERTLITENESSQLNEYFSCALKDFKDTDPTSRPAIPRQRLTKKLSNALQHLNNVLIPNVITHTTDFDTTQLVIYCAAYSAAKQNGSKIDLQSKEHLNNRIIIPAWQVKLEKRIEQLRVHIGRLTEFIKGTRSNSLIKNVEHIKHKYKIHSRHENPNTDLSHFLDTLKQKLNALASRLRRYKKTTLRKTQNKLFANNEKTFYRNLTKQINTSSTRDTQNPPLIKDALQSFWSNIWSESTEHNHSSSWIQEDKNSLMNLPEMEFESISLDLMKRVIGRTHNWKATGSDKIHNYWYKKLTCMHTLLHVHINNFIKSPNSLPRYITQGITYMLPKDMTDMSNPAKYRPITCLQNIYKIITSCISEIIYEHTEQNNLLAEEQKGCRKNRYGCKEQLTIDAVAMKQAYANKRSIYTMYIDYQKAFDSVPHSWLIYILKHYNIHPTIVHFLESVMNIWKTKIKLHTSTENIETDLINIKRGIFQGDALSPLWFCLALNPLSQLLNNTKKGFKIYYEKEQHTISHLMYMDDIKLFGSTLHEIHTLATVIQTFSSDISMQFGIQKCKIQSINNGIVEHNSYNISNEDLIEPVDQSEGYKYLGYQQSRLIHHKETKTNLTKNFKSRLHQILNTQLNARNTIKAINTYAIPILTYSFGIIQWTRTDLQNLQRIINTTMTKYRKHHPRACIQRQTLPRREGGRNIIDIQNLHNRQVKSLRNYFYNRSHYSQIHLAIVQADKKFTPLNLRERNKQLDEITPEQKISTWIQKSLHGRHRVDLNNPYVDKVASNAWLKRGELFSETEGFMIAIQDQVIDTRNYRKHIIRDPNLRSDLCRHCHSSSETIQHITGACRCIVQTDYKHRHDQVAAIIHQYLALKYKLITEKTNYYKYSPAIILESTKFKLYWDRTIITDKTVHYNRPDITLHD

SEQ ID NO: 23713 - protein, 1394 aa, Chioides albofasciatus
MTNGALVFKKYAMRLRSRVIPQAGTCEGESRPGPSSSGCPTYSGGGTASHMSRNDVVGESHITSHPSSPISSTHSLFPSPNSSPYSYQTQQSSSSSHSTTPLLNDSTEEAGLISPILSSSNIINNPPPFSLSDNVEKEASAKNPSPIADTKRVRKTWSTEMNIFIWRTYLTVTKIETCTRGYLDELHLRFHSKFPHMDVSKQRVGDQRRAIVRNKLLSQQLLDKIKEETRTYLQNNEPLAHIHTDTNNTQTQATGKRRMVWNTEINETIIKIYYEVTELESNLTTYRKRLYDKFIEHFPHLSNLTEQRIADQRRVIINNKMLSENRITQLKQEVATKLSKDIISGNPIPNCSQRNSLNNINNTNNEVVTNQVINQSVGIVTDETILITENERSQLEEYFSEALKQFIHTDPTSRPPIPKQRLTKKLNNALQHLNDNLMPKVISHDTDFETTQLVIYCAAYTAAKYNGSKLDLPIKTQINRTPAWQVKLEERIKDLRVHIGRLTEFIKGIRSNSLIKKVENIKQKYKIHSQHENPNTDLSHFLDTLKQKLNALASRLRRYKKTTLRKTQNNLFNNNEKAFYRNLTKHENTSAKSNIQNPPITKNALERFWSKLWSEPTEHKETSSWIKEDKNRLTNLPEMQFENISLELLKRVIGRTHNWKATGSDKIHNYWYKKFTCMHTLLHTHINKFIKSPHSLPHYITQGITYMLPKDTNDTSNPAKYRPITCLQNIYKIITSCISEIIYEHTDQNNLLSEEQKGCRKNRQGCKEQLTIDAVAMKQAHADKRSIYTMYIDYQKAFDSVPHSWLVYILKHYNIHPIIVQFLKSVMNTWKTKIKLHTSTAVIETDLLNIRRGIFQGDALSPLWFCLALNPLSQLLNNTNKGFKIQYEKKQHTISHLMYMDDIKLFGSTLTEIHTLAEVTQTFSSDICMRFGLEKCKIQSVREGAIEHNSYNINNDDVIEPIDQLEGYKYLGYQQSRLIHHKETKTTLTDKFKSRLHKILNTQLNARNTIKAINTYAIPILTYSFGIIHWTQTDLQRLQRIINTTLTKYRKHHPRACIQRQTLPRQEGGRNIIDIQNLHNRQVKSLRNYFYNMSHHSQIHLATIQADKKFTPLNLRDRNRQIDEITPEQKISTWIQKSLHGRHRLDLNNPHVDKAASNAWLKRGELFSETEGFMIAIQDQVIDTRNYRKYIIKDPNLVNDLCRHCHSNSETIQHITGACRCIVQTDYKHRHDQVAAIIHQYLALKYKLITEKTNYYKYSPAVILESPKFKLYWDRTIITDKTVHYNRPDITLHDKENKTVYLIDIAIPNTNNLETTYTNKLTKYADLSIELKTQWKADKVQTVPIIISATGIIPKTLHSSLKILQIHPLTFLIIQKAVILNTCRIVRKFLSIDT

SEQ ID NO: 23714 - protein, 1195 aa, Tagiades litigiosa
MDVSKQRVGDQRRAIIRCKLLPQTLLDEIKQEVTLSLRDTNLQSNLLNNHSNTHINTAQKHRMAWSLDMNETIIRLYFEVTDIETNFTAYRKILYQKFINHYPLLSHLTEQRIADQRRVIMNNKLLSESRITQIKHEVATNRQCNISVGNINSSLYTQNINILPLDTNTHTEDTSTHTLNESTHSLNTSTHTLDTSTHIQHTNTNAQETSIHTRDMSMAEKQYNGLSELTKEQIELTFITTLKIFDNTDPTARPVIPKQKSSIKFAKIVHYINTYLIPKVITTDTDFVKTQLVIYCAAYTAVTHNGGRFRSQIENYVKRIPAWQVKLETRIKELRANIGRITEYMKGTRNPTLQRRVEQIKYKFKIHSHHENPNIDLSHFLDTLKQKLNALANRLRRYKKTTLRKNQNSLFTNNEKVFYRNITRNNSLTPNNCTTIPSKDTFLQYWTKVWSKPVIHKSNSWIQEDRNKIKDIAQMRFESINIDLFKQIIDKTHNWKATGSDDIHNFWYKKLTSVHSLLHIHINNFISSPNTLPQYITHGITYMIPKDKSDTGNPAKYRPITCLQSIYKIITSCINEVIYRHIQKENILAEEQKGCRRGSHGCKEQLVIDAVTQQQARSKKRNIYTMYIDYQKAFDSVPHSWLLYILDHYNISSTLIHFLETAMKNWKTKLKVHCNNKTIETDFIDINRGIFQGDALSPLWFCLALNPLSNLLNNSNKGFKIKYDKTSQTISHLMYMDDIKLFASTLHEIKTLADITQLFSTDICMQFGIDKCKMQSVERGIIKSNSYKTNNNEYIEALDQEQGYKYLGYQQSQQIHHKEIKATLVQKFIHRIHKIFNTELNARNTIKAINSFAIPILTYSFGVIKWTQSELKKLQRIINTTMTKYRQHHPRSCSQRLVLPRIEGGRGIIDIQNLHNKQIKTLRAFFYNKAEQSHIHKAVVMADRKLTPLNLKDTSTSQVENTKQDKLDAWIQKSLHGRHRLDLTNQNVDKTASNTWLKKGELFPETEGFMIAIQDQVIDTKNYRKHIIRHPNAQNDLCRHCHASSETIQHITGACKSRAQTDYKHRHDQVASIIHQYLAYKYKLITDKVPYYKYSPQVVLDTPNFKLYWDRTIVTDKTVHYNRPDITFHDKRNSTIYLIDVAIPNTHNLQTTYVEKLTKYTDLSIELKSQWKANTVRTIPVVVSSTGVIPKSLHV

SEQ ID NO: 23715 - protein, 1243 aa, Signeta flammeata
MNIFIWRTYLIVTKVETCIRGHLDKLQQQFQNAFPHMNASKQRIGDQRRAIVRNKLLPQTLLDEIRQEVTLHLQNTNLQSNQIDIINSQASGTNKGRIAWSTEMNETIIRSYFEVTDIECNTTAYRKKLYDKFIEHYPHLSHLTEQRIADQRRVIINNKQLSESRIADIKHEVELNVQTTNTPSTNTQHINSLENTDIMQETTQITLEDFHNEENTTATKTVVTGHEQNNSRNHVPLDIQNQIELTFLDTLKIFDSTDPTMRPAIPKQKSSKYFANIVDFINTSLIPKVINDNISFENTQLILYCAAYTAVKHNGAKFPKETHRYTKIIPAWQEKLEKRIQELRANIGRITEYMKGIRTQSLQRKVEIIKNKYKIHSKHENLNTDLSHFLDTLKQKLNALSNRLRRYKKTTRRKTQNRLFNNNEKIFYRNLTQHDSSFDSNNTPAPTKDSLLEYWSKIWSKPVNHKCNNWIAKDKENLKHLPLMEYENIDIGLLKQVIARTHNWKATGSDKIHNFWYKKFTSIHSLLLFHINNFIQSPETLPHYITHGITYMLPKDKTDIGNPAKYRPITCLQNLYKIITSCIHEIIYRHINQNHILAEEQKGCRRGSRGCKEQLTIDAVAIQQAYSRKSNIYTMYIDYQKAFDSVPHSWLLYILQHYNVNQTLVHFLGSAMQSWKTKLKLHCNNETIETDFINIHRGIFQGDALSPLWFCLALNPLSNLLNSSNKGYKIKYNNTSQVISHLMYMDDIKLFGGTLRDIETLANITQSFSSDICMQFGIDKCRTQSVHRGVITRNSFYVSNNEHIDSLDPVEGYKYLGFQQSQHIHHKQTKTALIEKFRIRLHKIFNTELNSRNTIKAVNTYAIPALTYSFGIIRWTQSELHKLQRIINTTMTKYRKHHPKACVQRQVLPKNEGGRGIIDIIILHNNQVQALREFFYQRAEHSHIHKATVHADNKFTPLNLRNSSMQLPEITKAQKLHTWQQKSLHGRHRLDLTNQNVDMIASNAWLKRGELFPETEGFMIAIQDQVIDTKNYRKHIIRRPDAHNDLCRHCYSTAETIQHITGACKSRAQTDYKHRHDQVASIIHQYLAYKYKLIQDKTSYYKYSPQVILDSACYKLYWDRTIITDKTIHHNRPDITLHDKRNKVVYLIDVAIPNTHNMQSTYSQKLAKYTDLSIELKSQWKVDTVRTIPIVLSSTGVIPKSLHNSLKTLQIHPLTFLSMQKAVILNTCRIVRKFLSIDSPICT

SEQ ID NO: 23716 - protein, 1356 aa, Dyscophellus porcius
MQDNSKNKKYNLRSLSKASQATRSVRINDEQKSRRTYIGQVPVAGNHTPLISSPVFMSSLSDEPHSSPQSTSNSYSHQYSSSSSMSDNVVQEASASNSVPVSDTIRTRKKWTKEMNIFIWRTYLIVTKVETCIRGHLNMLHQQFQATFPHMDVSKQRIGDQRRAIIRSKLLPQTLLDDIKQEVISHLQDNTQQSSQIDTINVPVTTTDKQRMAWSNEMNETIIRSYFEVTENETNLTAYRKNLHKKFIEQYPHLSHLTEQRVSDQRRVIINNKQLSENRIEQIRQEIEIKLQSIKYANAQNWNNLENTMDMQVVPSIEVSDNGHTRHTRHETQSPNTLHEHNNERNQLPLDIQNQIESIFSDTIKLFENTDPTVRPYIPKQKSSKKFANIVKFINNTLIPRVINIDTNFDKTQLIIYCAAYTAVKHNNARCLIITDKNKKAIPAWQEKLENRIQNLRVNIGRVTEYMRGIRSHALERKVEIIKSKYQIHSRHENVNTDLSHFLDTLKQKLNALANRLRRYKKTTLRKTQNTLFTNNEKIFYRNLTQNNNITRVNNTSTPTKDNFLAYWSKIWSEPVTHKPNSWVEEDKNKLKDLPQMQYDSIDIELLKRMIAKTHNWKATGSDNIHNYWYKKFTSIHTLLHIHINNFIKSPETIPHYITHGITYMIPKDKTDINNPAKYRPITCLQSIYKIITSCINEIIYRHVQENNILAEEQKGCRRDSHGCKEQLTIDAVALQQAYTKKRNIYTMYIDYQKAYDSVPHSWLIYILRHYNINPILIRFLGSAMSHWKTKLKVRYSSETIETDFISINRGIFQGDALSPLWFCLTLNPLSSLLNSQNKGFKIKYDRTSQTISHLMYMDDIKLFGSTLKELHALADVTELFSSDICMKFGIDKCKIQSVHRGIIERNSYILNNDEHIEPVDPAEGYKYLGYQQFQQINQKQTKNTLIEKFRNRLNKIFKTELNARNTIKAINTYAIPILTYSFGVIRWTQSELLRLQRIINTSMTRHRKHHPRTCVQRLVLPRNEGGRGIVDIQNLHNKQIDTLRIFFHRKSEQSHIHKAAVQADKKLTPLNLNCNSVGTVQTTKEQKLDAWIQKSLHGRHRLDLTNQNVDKIASNAWLKRGELFPETEGFMIAIQDQVIETKNYRKHIIRDPGAYNDLCRHCCSSSETIQHITGACKSRAQTDYKHRHDQIAAIVHQYLAYKYKLISDKTSYYKYSPQVILDSANYKLYWDRTIITDKTVHCNRPDITFHDKRNKTVYLIDIAIPNTHNLQTTHTEKLSKYTELSIELKAQWKVDTVRTIPIVISSTGVIPKSLHTSLKTLQIHPLTFITMQKAVILNTCRIVRKFLSIDSPNCT

SEQ ID NO: 23717 - protein, 1353 aa, Tagiades gana
MRLRSANKLPQAGTGANRNGESRSECQSSGCPTYSGGDTASHTSPQSTPSSSSRIASLAASPSSSISDNVVQEAKADYSAPIPDTLRARKKWSKEMNIFIWRTYLIITKVETSVRGHLNILHQLFQNKFPHMDASKQRIGDQRRAILRSKLLPQTLLDEIKQEVILSLQNTNPQSNVLTNYNNIQINTTQKHRMAWSIDMNETIIRLYFEVTDIETNFTTYRKNLYNKFIEHYPHLSHLTEQRIADQRRVVMNNKHLSESRINQIKQEVKNQLQNRGSNNTENNTQNISHSETIDSSILTQDTSTLPLDTSTLPLDTSTHILDTITLPLDISTNTQDPSIHTQDKQYNSLSVDTQKQIELTFITALKIFDNTNPTSRPVIPKQKSSKKFYNIVDYLNTYLIPKVITTDTDFIKTQLVIYCAAFTAVTHNGARIRRQIEKYVERIPPWQAKLEKRIQELRVNIGRITEYMKGTRNRTLQRRVEIIKSKYQIHSNHENPNIDLAHFLDTLKQKLNALANRLRRYKKTTLRKNQNALFANNEKVFYRSITQRNSLNSNNNTLIPTKDTFLQYWTDIWGKPVKHKSNSWIREDKHQIKDLPQMRYESINIDLLKQIIDKTHNWKATGSDNIHNFWYKKFTSVHSLLHIHINNFITSPETLPQYITHGITYMIPKDKSDIGNPAKYRPITCLQSIYKIITSCINELIYRHIQEENILAEEQKGCRRGSHGCKEQLIIDSVAQQQAYSKKRNIYTMYIDYQKAYDSVPHSWLIYILEHYNIHSTLIHFLESAMTNWKTKLKVYCDNNTIETDFIKINRGIFQGDALSPLWFCLALNPLSNLLNRCNKGFKIKYSNTSLTISHLMYMDDIKLFGSTHHEITTLADITQLFSTDICMQFGIDKCKMQSVQRGVIKSDTFITSNYEKIEPIDPEEGYKYLGYQQSQHIHHKQTKTTLIQRFTNRLHKIFNSELNARNTIKAINSFAIPILTYSFGVIKWTQSELKRLQRLINITMTRYRQHHPRSCSQRLVLPRIEGGRGMIDIQNLHNKQIKTLRTFFYTKSENSHIHKAVVLADKKLTPLNLKDTSLLQTENTKEDKLDAWVQKSLHGRHRLDLTNQNVDKVASNAWLKRGELFPETEGFMIAIQDQVIDTRNYRKHIIRHPNAQNDLCRHCHCNPETIQHITGACKTRAQTDYKHRHDQVASIIHQYLAYKYKLITDKIPYYKYSPQVVLDTPNFKLYWDRTIITDKTVHYNRPDITFHDKRNSIIYLIDIAIPNTHNLQATYVEKLTKYTDLSIELKSQWKVNTVRTIPVVISSTGVIPNSLHMSLKTLQMHPLTYIIMQKAVILNTCRIVRKFLSIN

SEQ ID NO: 23718 - protein, 1338 aa, Pholisora mejicanus
MEDKKSQIELGKKYNLRSLSSSTKLAKSLRTNDAESSKEYPSGHNSDNQGHNRMSTASPYSSIPLSISSISPSPSSISDIVVQEVDAIEPTPVSDTLRARKKWSNDMNIFIWRTYLKITKLETCIKGHLDILHREFQNQFPNMDVSKQRVGDQRRAILRSKMLSQSQLDEIKQEVIEYLQNKDPESYHSETIKMTDKRRMAWSNDMNEIIIRSYFEVTENETNLTAYRKNLHKKFIEHYPHLSHLSEQRIADQRRVIINNKQIPENRIMELRYETELKLKNLHITNRRQNNRIPTTEILNTTENTTYENNNNNNIQDMDIEYEQDNTKQLSLDVQQKIELTLLESLKTFDKSDPTTRPVIPKQKSSKRFAQIVNFLNNKLIPKVLSENANFHQTELVIYCAAYTAVKHNGGKFPIEINKKTRKIPKWQEKLEKRIQELRANIGRVTEYIKGVRSHKLQKKIDIIRHKFKIHSQHENPNTDLTHFLDTLKQKLNALANRLRRYKKTTLRKTQNSLFCTNEKVFYRNLTQLNVQVTSNNTAPPTKDTFIQYWKKLWSEPVTHNVSDWIREDKERLKDLSQMTYESIDLDVLKRVIAKTHNWKATGSDNIHNFWYKKFTNVHKQLHIHINSFIVLPESLPDYFTQGITYMIPKDRTDTTNPAKYRPITCLQNIYKIINSCINEIIYRHVHEGKILAEEQKGCRRASYGCKEQLTIDAVALQQAYLKKRNIFTMYIDYQKAYDSVPHSWLLYILHHYNINPKLIHFLKTAMTNWKTKLRIHDSTDTIETDFIEINRGIFQGDAFSPLWFCLALNPLSGLLNDCNKGFKIKYDKTHHLLSHLMYMDDIKLFSSTLQGMKTLTNITQLFSSDICMKFGIDKCKMQSVHRGVINKNSYQISDDECIEPLDQTKGYKYLGFQQSQQIHQKQTKHNLTQHFKSRLHKIFKTELNSRNTIKAINTYAIPILTYSFGVIRWTQSDLMKLQRIINTTLTKYRQHHPRSCVQRLVLPRSEGGRGIVDIVNLHNKQIKTLRSFFYYKAEHSLIHKAVVQADQKLTPLNLKSTTIHSQENTKEQKIQAWLQKSLHGRHRLDLTNQNVDRIASNAWLKRGELFPETEGFMMAIQDQVIDTKNYRKHIIRDPNAHNDLCRHCCSSSETIQHITGACKSRAQNDYKYRHDQIAGIIHQYLAYKYKLISEKVSYYKYKPQIILNSTDYKLYWDRTIITDKTVHCNRPDIILYDKVKKTVFLIDIAIPNTHNLQSSYAEKIAKYTELSIEIKTQWKVDTVKTIPIVISSTGVVPKTLHNCLKVLQIHPLTFLTIQKSVILNTCRTVRKFLSMEATKDN

SEQ ID NO: 23719 - protein, 1183 aa, Gesta gesta
MNIFIWRTYLMITQLEANTRGHLDELHVKFIEKFPHMDVSKARVSDQRRTILRNKLLPQNTLDEIKEEVRVSLQNTEQSGMTQTNNSQTQTTDKRRMIWTPQMNETIIKLYYEVTELESNITTYRPKLHGKFVEIYPHLAHLSEQRIADQRRVIVNNKMLSENKILEIKQEVARKLSNLNSESQTFSNLQSEILINTHRQNITQNPVDSENININEGLITTEDTKKLLEEYFSEALKQFKYTDPTLRPSIPKQKCSKKLILATKYLNDTIIPKTLSQEAEFESVQLVVYCAAYTAAKFNGSKFDLQYNSNNNKQKPFWQINLENRIEKIRVYIGRLIEYNKGIRSNWLVRKVQEIKQKYKIHSTHESPNTDTEHYLDTLKQKLSALASRLRRYKKTTLRKSQNKLFNNNEKAFYRNLTNTNTHNNSNNLDSAPKKEELTEFWSNLWSQPVEHNHNSPWIKDDKNSLTHLPDMRFENVSLEVIKRVINKTHNWKATGSDKIHNYWYKKFSSIHPYLHTYINNFITAPHTIPCYVTQGTTYMLPKDVNDMRNPAKYRPITCLQTIYKIITSCISEIIYKHLETNNILAEEQKGCRRNRQGCKEQLIVDSVALKQAYTKKSSIYTMYIDYQKAYDSVPHSWLIYILKHYNIHPTIVTFLESIMKTWKTKLKLHTKSETIETDFIDINRGIFQGDGLSPLWFCVALNPLSKLLNNSNIGFKIRNQETLHTISHLMYMDDIKLFGNTLEEIHTLADITHLFSENICMQFGIDKCKIQSVKRGKLIQESYNIDSTSQTIQPVDEIEGYKYLGFQQSRQIHQKVTKSTLTHKFKSRLHKILNTQLNAKHTIKAINTYAIPTLSYSFGIIQWSQTQLQKLQRIINTTMTLYRKHHPRACIQRQTLPRQEGGRGLIDIQNLHNRQVNSLRKYFHDRAESSQLHQAIVQADNKFTPLNLKNQTTTLIETSNEQKIHTWTQKSLHGRHRLDLINPNVDKEASNAWLRQGELFPETEGFMLSIQDQVIDTKNYRKHIIRDPKLINDSCRHCHSSSETIQHITGACRTIVQTDYKHRHDQVGAIIHQYLAYKHKLIKEKTSYYKYSPAVVLESQKFLLYWDRAVITDKTVHYNRPDIILHDKENKIVYLIEIAIPNTHNLHTTYTNKLTKYTDLTIELKTQWKVNTVKTIPYLLQE

SEQ ID NO: 23720 - protein, 1313 aa, Cecropterus confusis
MRSMTNGALVYTKYAMRLRSRQIPQAGTCEGESRPGPSSSGCPTYSGGGTVSHRSHNDVVADESCITSHPSSPISSTQSLFPSPNSSSPYSYQTEQSSSRSHTMSPLSNHNTEDAHHVPPISSSSNIISNNPSHPISSFLFSLSDNVVEEASAKNPSPIADNKRARKTWSKEMNIFIWRTYLTITKLESCTRGYLDELHLQFYSNFPHMDVSKQRVGDQRRAIVRNKLLPQQLLDKIKEEVRAHLQSSETLENKHTQTHTTETRRMVWTTEINEAIIKIYYEVTEVESNLTTYRKKLYDKFIEHFPHFPNLTEQRIADQRRAIIKNKMLTENRISQIKQEVAAKLAHNVTSDNEILNYSQINSFNNISSTNNEESVDTYKRVILTENESSQLEALFLEALTEYKHTDPTSRPHIPKQRITKKLSNALQHLNDVLIPRVIINNTDFEKTQLVIYCAAYTAAIFNGSKIDRQIKNPSYNLIPPWQVKLEKRIEELRAYIGRLTEFIKGVRTNSLIKKVDAIKHKYKIHSQHENPNTDLSHFLDTLKQKLNALASRLRRYKKTTLRKTQNKLFNNNEKAFYRNFSKQITTSSITDIQNSTITKDSLGNFWSNLWSEPTTHKYNSSWIKEDKNRLSNLPEMQFNNISLDLMKRVIGRSHNWKATGSDKIHNYWYKKFTSTHTLLHIHINNFIKTPNSLPHYITQGVTYMLPKDMSDVNNPAKYRPITCLQNIYKIITSCISEIIYEHVDQHNLIAEEQKGCRKNRQGCKEQLTIDSVAMKQAYVSKRSIYTMYIDYQKAFDSVPHSWLLYILKHYNIHPTLVQFLQSVMDIWKTKIKLHGNTGLIETDLINIKRGIFQGDALSPLWFCLALNPLSQLLNNSNKGFKIKYNKEQQTISHLMYMDDIKLFGSTLNEIDTLAKITETFSSDICMHFGIDKCKIQSVCKGLIKHNPYNLNSGDLMQPVNQSEGYKYLGYQQSRLIHQKETKSALIEKFKLRLRKILNTQLNARNTIKAVNTYAIPILTYSFGIIQWTQTDLHKLQRIINTTMTKYRKHHPRACIQRQTLPRQEGGRNLIDIQNLHNRQVITLRNYFYNRSHNSQIHLATVQADKKLTPLNLNDQSKYIDEITQEQKINTWTQKSLHGRHRLDLNDPYVDKAASNEWLRRGELFPETEGFMIAIQDQVIETRNYRKHIIKDPNCVNDLCRHCHSASETIQHITGGCRCIVQTDYKHRHDQVAAIIHQYLALKHKLITEKTNYYKYSPAVILESPKFKLYWDRTIITDKTVHYNRPDITLHDKENKTVYLIDTATPNQSTIHH

SEQ ID NO: 23721 - protein, 1392 aa, Astraptes apastus
MTNGALVSTKYVMRLRSRQIPQAGTCEGESRPGPSRSGCPTYSGGGTASHMTRNDVVADESPIILHPSSPISSTQSLFPSPNSSPYSYQHSLSRAHIITSLSNDSTEDAYRAPSTSSSSSIASNHPPTSSSYLFSLSDNVVEKVSTNNPPPIADIKRARKTWSTEMNIFIWRTYLTITKIESCTRGYLDELHLQFHSKFPHMDVSKQRVGDQRRAIVRNKLLPQELLDNIEEEVRTHLQSSESLVHTHTNTINTQTHATEKRRMVWTTEINEAIIKMYYEVTELESNLTTYRKKLHNKFIEHFPHLSNLTEQRIADQRRAIFKNKMLTENRITQLKQEVASMLVEDVIPDNQTHNYSQTNSCNNSDNPNNQDTVDILTCDRVLITENESSQIESYFSEALIKFKHTDPTSRPPLPKQRLTKKLSNALQHLNDILIPKVVSHNTDFHTTQLVIYCAAYTAAKHNGSKIDQQTLISLNNLIPAWQVRLERRIEELRAHIGRLTEFIKGVRSNSLTKKIEIIKRKYKIHSQHENPNTDLPHFLDTLKQKLNALASRLRRYKKTTLRKTQNKLFNNNEKAFYRNFTKQISTSPTTNTQNPIITKDALASFWSKLWSEPTKHKNCSSWIKADKNRLSNLPEMQFENISLDLMKRVIGRTHNWKATGSDKIHNYWYKKLTSIHPLLHIHINNFIKSPNSLPHYITQGITYMLPKDVTDLSDPARYRPITCLQNIYKMITSCISEIIYEHIDQNNLLAEEQKGCRRNAQGCKEQLTIDAVIMKQAYASKRSIYTMYIDYQKAFDSVPHSWLLYILEHYNIHSTIVQFLESAMKTWKTKIKLHCSTGDIETDLLNIKRGIFQGDALSPLWFCLALNPLSRLLNNSNKGFKIKYEKHQYTISHLMYMDDIKLFGSTLDEIDTLAKITQNFSTDICMQFGIDKCKIQSVCKGLIENNSFNINSEDLIQQVDQSVGYKYLGYQQSRLIHQKETKSALIEKFKARLHKILNTQLNARNTVKAVNTYAIPILTYSFGIIQWTQSDLHKLQRMINTAMTKYRKHHPRACIQRQTLPPQEGGRNLIDIYNLHNRQVKSLRNYFYSRSLHSQIHLATVQADKKLTPLNLKDHNRHINEITQEQKISTWLQKSLHGRHRLDISNPYVDKAASNEWLRRGELFPETEGFMIAIQDQVIETRNYRKHIIKDPSFVSDLCRHCHSCSETIQHITGGCRCIVQTDYKHRHDQVAAIIHQYLALKYKLITEKTNYYKYSPAVVLESPKYKLYWDRTIITDKTVHYNRPDITLHDKEQKTVYLIDIAIPNTNNLQTTYTTKLTKYTDLTIELKTQWRVDTVKTIPIVISSTGIIPKTLHSSLKLLQIHPLTFLTIQKAVILNTCRIVRKFLSIDT

SEQ ID NO: 23722 - protein, 1126 aa, Urbanus esmeraldus
MTWTTEINEAIIRIYYEVTELESNITSYRKKLYDKFTEHFPHLSNLTEQRISDQRRAIIKNKMLTESRIAQIKLEVATKLSQDVISDHRPLNYSQTNSLNNTNIQVTVGLDTCERVSMTENESSQLEAHFAEALNNFKHTDPTSRPPIPKQRLTNKLSKSLQHLNDILIPNVISPNLDFETTQLVIYCAAYSAAKYNGSKMDSHTETHLHNRIPAWQVKLQKRIEELRIHIGRLTEFIKGTRSNSLIKKVDNIKHKYKIHSQHENPNTDLPHFLDTLKQKLNALASRLRRYKKTTLRKTQNKLFNNNEKAFYRNFTKQITTSSNIHSQNSTITKDALTDFWSDLWSEPIEHKKCSWVQEDKNRLSNVPEMQFENISLDLLKRVIGRTHNWKATGSDKIHNYWYKKLTSIHTLLHIHINQFIKSPNTLPNYITQGTTYMLPKDLTDTGNPAKYRPITCLQNIYKIITSCISEVIYDHADQHNLLAEEQKGCRRSSQGCKEQLTIDAVAMKQAFTNKRSIYTMYIDYQKAFDSVPHSWLVYVLKHYNIHPTIVQFLESVMDTWKTKIKLHSNTEIIETDLLNIKRGIFQGDALSPLWFCLALNPLSQLLKNSNKGFTIKYEKHQYTISHLMYMDDIKLFGSTLDEIDTLAKITQTFSSDICMQFGTDKCKIQSVNKGLIEHNSFNINNEDLIQPVDQSVGYKYLGYQQSRLIHQKETKSALIEKFKVRLHKILNTQLNARNTIKAINTYAIPILTYSFGIIQWTQSDLHKLQRMINTAMTRYRKHHPRACIQRQTLPPQEGGRNLIDIQNLHNRQVKSLRNYFYTRSLHSQIHLAIVQADKKLTPLNLKDHTRHINEVTQEEKINTWTQKSLHGRHRLDLSNPYVDKAASNEWLRRGELFPETEGFMIAIQDQVIETRNYRKHIIKDPSFVNDLCRHCHSCSETIQHITGGCRCIVQTDYKHRHDQVAAIIHQYLALKYKLITDKTNYYKYSPAVILESSKYKLYWDRTIITDKTVHYNRPDITLHDKEHKTVYLIDIAIPNTNNLQTTYTTKLTKYADLTIELKTQWRVDTVKTIPIVISSTGIIPKILHSSLKLLQIHPLTFLTIQKAVILNTCRIVRKFLSIDTL

SEQ ID NO: 23723 - protein, 1394 aa, Astraptes talus
MTNGALVSTKYAMRLRSREIPQAGTCEGESRPGPSRSGCPTYSGGGTASHMSRNDVVADESRITLHPSSPISSTQSLFPSPNSSPYSYQHTLLRSHTNTPLSNESTEDVYHAPLVSSSSSSSSSVFSNHPPPSSYSFSLSDNVVDMVSANNPPPIADIKRARKTWSTEMNIFIWRTYLTITKIESCTRGYLNELHLQFHSKFPHMDVSKQRVGDQRRAILRNKLLPQQLLDNIKEEVRKHLQSSEPLVHTHTNTVNTQTHAAEKRRMAWTTEINEAIIKIYYEVTELELNLTTYRKKLYTKFIEHFPHLSNLTEQRIADQRRAIIKNNMLTENRITQLKQEVASKLAEDIPDNQTLNYSQINSLNNSDNPNNQEAVHIATCDRLLIAESESSQIESYFAEALINFKHTDPTSRPPLPKQRLTKRLSNALQHLNAMLIPKVIAHNTDFHTTQLVIYCAAYTAAKHNGCKINQQTQISLNNRVPAWQVRLEKRIEELRTHIGRLTEFIKGTRSNSLIKKIEIIKSKYKIHSQHENPNTDLPHFLDTLKQKLNALASRLRRYKKTTLRKTQNKLFNNNEKSFYRNFTKQITTSPTSNTPNPTITKDALASFWSKLWSEPTKHKNCSTWIKEDKNRLSNLPEMQFEHISLDLMKRVIGRTHNWKATGSDNIHNYWYKKLTSIHTLLHTHINNFIRSPNSLPHYITQGITYMLPKDLTDVNNPAKYRPITCLQTIYKIITSCISEVIYEHIDQNNLLAEEQKGCRRNAYGCKEQLTIDAVVMKQAFASKRSIYTMYIDYQKAFDSIPHSWLLYILKHYNIHPTIVQFLESAMNTWKTKIKLHNSTGVIETDLLNIKRGIFQGDALSPLWFCLALNPLSQLLNNSNKGFKIKYEKHQYTISHLMYMDDIKLFGNTLDEIDTLAKITQTFSSDICMQFGLDKCKIQSVCKGVIEHNSFSINSEDVIQHVDQSLGYKYLGFQQSRLIHQKETKSGLIEKFKVRLYKILNTQLNARNTIKAVNTYAIPILTYSFGIIQWTQSDLHKLQRMINTAMTKFRKHHPRACIQRQTLPPQEGGRNLIDIHNLHNRQVKSLRNYFYSRSLHSQIHLAIVQADRRLTPLNLKDHNRRINEITQEQKINTWIQKSLHGRHRLDISNPYVDKAASNEWLRRGELYPETEGFMIAIQDQVIETRNYRKHIIKDPSVVNDLCRHCHSSSETIQHITGGCRCIVQTDYKHRHDQVAAIIHQYLALKYKLITDKTNYYKYSPAVILESPKYKLYWDRTIITDKTVHFNRPDITLHDKEHKTVYLIDIAIPNTNNLQSTYTTKLTKYTDLTIELKTQWRVDTVKTIPIVISSTGIIPKTLHSSLKLLQIHPLTFLIIQKAVILNTCRIVRKFLSIDS

SEQ ID NO: 23724 - protein, 1024 aa, Polygonus savigny
MQYTNILNTHEQHTDSYKIPLDIQNQIESTFLDTLEMFRNTDPTLRPFISKQKSSKKFANIVYFINHTLIPKQINNNTNFDTTQLIIYCGAYTAAKYNDPRFPIETDKNNRVIPAWQEKLEKRIQELRVNIGRVTEYIRGIRSNSLKRRIEIIKNKYKIHSRHENLNTDLSHFLDTMKQKLNALANRLRRYKKTSQRKIQNKLFINNEKIFYRNLTQHNNTSLTNNTLTLTKNSFSEYWTKIWSTPATHQHSTWIEEDKQKLKDLPQMSYESIDIDLFKRVIAKTHNWKATGSDNIHNFWYKKFTSLHTLLHIHINNFINSPETLPQYITQGITYMIPKDKSDISNPAKYRPITCLQNIYKIINSCINEIIYKHVEQCNILAEQQKGCRRNSHGCKEQLIIDAVAMQQAFSKKRNIYTMYIDYQKAFDSVPHSWLVYILQHYNINPKLIHFLQSAMTHWKTKVKVKYNIETIETDFINIHRGIFQGDALSPLWFCLALNPLSSLINTSKNGFKIKYDDTSQTLSHLMYMDDIKLFGGTLKEIKKLVEITQQFSSDICMQFGINKCRMQSVHRGVIKKNSYQLTNEQFIEAIDQEEGYKYLGFQQSQQIHQKQTKTTLTDKFKNRLHKICNTQLNARNIVKAINTFAVPILTYSFGVIRWTQSELQRLQRIINTTMTKHRKHHPRACFQRLVLPRNEGGRGIIDIKNLHSKQLKTLRAFFYNRAEQSSIHKAIVQADKKLTPLNLNNMSISMIEISREQKINDWMQKSLHGRHRADLTNQNVDKVASNAWLKIGELFPETEGFIIAIQDQVIETKNYRKHIIRDPSAYNDLCRHCCSSSETIQHITGACKSKAQTDYKHRHDQVASIIHQYLAYKYKLIANNTSYYKYSPQVILDSPKYKLYWDRTIITDKTVHCNRPDITFHDKTSKTVYLIDIAIPNTHNLQTTYSEKLAKYTELSIEIKSQWKVDTVKTVPIIISSTGVIPKTLHNSLKTLQIHPMTFVTMQKAVILNTCRIVRKFMSMDTP

SEQ ID NO: 23725 - protein, 1358 aa, Polygonus leo
MRLRNRKIPQAGTREGESRPGPSGSGCSTYSGGSNVSHKTKLCHNDEEQIRDNNIRQESHTDNDISITTPISSNSIYSSSYSSCQSIPTSLMSDNVVEVADADNPAPVSDTIRVRKKWSREMNIFIWRTFLIITKVETCIKGHLDLLHQQFLTAFPHMDVSKQRVGDQRRAIIRSKLLPQTLLDEIKQEVIRYLGDKSESIQVDVANTQINSTDKRRLAWTTEMNETIMRLYFEVTENERNLTAYRKNLYKKFIEHYPHLSHLSEQRIADQKRVIINNKQLKESRIEEIKHEIEIKLQKSTHFNVETLNNTENARVIQDLPNTEVLDKTNNGSEMQYTNILNTHEQHTDSYKIPLDIQNQIESTFLDTLEMFRNTDPTLRPFISKQKSSKKFANIVYFINHTLIPKQINNNTHFETTQLIIYCGAYTAAKYNDPRFPIETDKNHRVIPAWQEKLEKRIQELRVNIGRVTEYIRGIRSNSLKRKIEIIKNKYKIHSRHENLNTDLSHFLDTMKQKLNALANRLRRYKKTSQRKIQNKLFINNEKIFYRNLTQHNNTSFTNNTLTLTKNSFSEYWTKIWSTPATHQHSTWIEEDKQKLKDLPQMSYESIDIDLFKRVIAKTHNWKATGSDNLHNFWYKKFTSLHTLLHIHINNFINSPETLPQYITQGITYMIPKDKSDISNPAKYRPITCLQNIYKIINSCINEIIYKHVEQWNILAEQQKGCRRNSHGCKEQLIIDAVAMQQAFSKKRNIYTMYIDYQKAFDSVPHSWLVYILQHYNINPKLIHFLQSAMTHWKTKVKVKYNIDTIETDFINIHRGIFQGDALSPLWFCLALNPLSSLINTSKNGFKIKYDNTSQTLSHLMYMDDIKLFGGTLKEIKKLVEITQQFSSDICMQFGINKCRMQSVHRGIIKRNSYQLTNEQFIEAIDQEEGYKYLGFQQSQQIHQKQTKTTLTDKFKNRLQKICNTQLNARNLVKAINTFAVPILTYSFGVIRWTQSELQRLQRIVNTTMTRHRKHHPRACFQRLVLPRNEGGRGIIDIKNLHSKQLKTLRAFFYNRAEQSSIHKAIVQADKKLTPLNLNNMSISMIEISREQKINDWMQKSLHGRHRADLTNQNVDKVASNAWLKIGELFPETEGFIIAIQDQVIETKNYRKHIIRDPSAYNDICRHCCSSSETIQHITGACKSKAQTDYKHRHDQVASIIHQYLAYKYKLIDNKTSYYKYSPQVILDSPKYKLYWDRTIITDKTVHCNRPDITFHDKTSKTVYLIDIAIPNTHNLQTTYSEKLAKYTELSIELKSQWKVDSVKTVPIIISSTGVIPKTLHNSLKTLQIHPMTFVTMQKAVILNTCRIVRKFMSIDTP

SEQ ID NO: 23726 - protein, 995 aa, Erynnis brizo
MVSENKILEIRQEVAKKLCNVSCNVQVPAESDIQLETSTHTQNIQNRIEPENTDIQVSEILTVTQSTKDLINEYFLEALSKFKDTDPTSRPSIPKQKCTKKLTNAVQYLNQTVIPEVLSPETEFKYLQLVVYCAAYTAAKCNGSKFLDSNSNSNKSNTQKPFWQIKLEKRIEELRVHIGRLTEFRKGTRSKWLVRKVEIIKQKYKIHSQYEPPNTDIIHFLDTLKQKLNALSSRLRRYKKTTLRKSQNKLFNNNEKTFYRTLSHSNTHKSSHNSTSIPKKEELEEFWSDLWSQPVEHNYDCAWIKEDKNSLTDLPQMQFESVSIDLIKRVIGRTHNWKATGSDKIHNYWYKKFTSIYPYLHIHINNFITAPNTIPHYVTQGITYMLPKDHKNIRDPAKYRPITCLQTIYKIITSCISEIIYTHVEANNILAEEQKGCRKNRQGCKEQLVIDACAMRQAYTKKRSIYTMFIDYQKAYDSVPHSWLLYILNHYNIHPTIVQFLESIMKTWKTKLKLHSNSETTETDLIDIRRGIFQGDGLSPLWFCLALNPLSKLLNNTNKGFVIKYDRTCHTISHLMYMDDIKLFANTLEDIHTLADTTHTFSADIHMKFGIDKCKIQSVEGGKVIQESYNINNSDQVMPVDPIDGYKYLGFQQSRQIHQKETKTTLTDRFKSRLHKILNSQLNARNTIKAINTFAVPVLTYSFGVIQWTQTELQKLQRTINTTMTLYRKHHPRSCVQRQTLPRKEGGRSLIDIKNLHTRQINSLRSYFHNRAENSKIHRAVVQADNKLTPLNLKSRTATLNETSDEQKVNTWTQKSLHGRHRLDLNNPNVDKVASNAWLRQGELFPETEGFMLSIQDQVVDTKNYRKHIIRDPALVNDNCRHCHSSSETIQHITGACRTIVQTDYKHRHDQVGAIVHQYLAYKCKLINERTSYYKYSPAALLESHKFILYWDRGVITDKTVHYNRPDIILHDKENKLVYLIDIAIPNTHNIHTIS

SEQ ID NO: 23727 - protein, 1339 aa, Ebrietas anacreon
MKKQILKSSRYNLRSLSKASQSTSTRTLSYEEQQFSESENSLVLDNISVSTSTPISINFNSSSTTDFSSPPTTSSYLLDNVVEEASAKCPSPVTSSKYARKKWTTEMNIFIWRTYLIITKLEITTRGHLDELYTKFINKFPQMDVSKQRVGDQRRTIVRNKLLPQKTLDDIKEEVRLMLQNFNIEQSLSHTQTNNIRSQTLTTDKKRIIWTEQMNEAIIQIYFEETELESNLTTYRKKLYEKFVEQFPNLSFLTEQRIADQRRVIINNKMLPEHKILEIRQEVAKKLCNLNPNIQLHEGIQSKTSTDTENIESSSEPENICIQQNERQTATQSTKILLEEYFSEAVREFKQIDPPLRPRIPKQKCTKKLINAIQYLNQTIIPKSLSQEVDFDYLHLIVYSAAYTAAKYNDSKFLYSRTDNNYNNMQKPSWQIKLEKRINEIRVHIGRLTEYKKGIRSNWLVRKVEEIKHKYKIHSEHETPNTGIIDYLDTLKQKLNALSSRLRRYKKTTLRKSQNRLFNNNEKTFYRNLNQTDTHYTSNNLNNIPKKEEIEEFWSNLWSQPVEHDYTSPWIKEDKNSLTELPQMQFENISIELIKRVIARTHNWKSPGSDKIQNFWYKKFTSLYPYLQTHINNFVKSPNTIPHYVTQGITYMIPKDNNNMMDPSKYRPITCLQTIYKIITSCICELIHTHVETNDILAEEQKGCRKYKQGCKEQLTIDAVAMRQAFTKKRNIFTMFIDYQKAYDSVPHSWLVYILNHYNIHPTIVTFLESIMKTWKTQLILHSNLGTTETDLISIKRGIFQGDGLSPLWFCLALNPLSKLLNNSKKGFKIKYDKQHHSISHLMYMDDIKLFASTLDEIHFLADTTHTFSADIHMKFCIDKCRIQSVNRGKIILESYNINSTDQITPVDQIEGYKYLGYQQTRQIHQKETKSTLTNRFKSRLHKILKSQLNARNTIKAINTYAVPVLTYSFGIIQWTQTDLIRLQRIINTTMSLYRKHHPRSCVQRQTLPRKEGGRGLIDIQNLHNRQINTLRKYFHTRADNSRIHQAIVETDNNLTPLNLKNRTSTLNETSDEQKVNTWTQKSLHGRHRLDLNNPNVDKVASNAWLRQGELFPETEGFMLSIQDQVIDTKNYRKHIIRDPTLVTDTCRHCHSSSETIQHITGACRNIVQTDYKHRHDQVGAIIHQYLAYKYKLINEKTSYYKYSPAVILESDKFKLYWDRTIITDKTVHYNRPDITLHDKENKIVYLIDIAIPNTHNIQSTYTNKLTKYTDLTIELKTQWKVNTVKTIPIVVSSTGIIPNTLLPSLETLNIHPLTYLTIQKAVILNTCRIVRKFLSINT

SEQ ID NO: 23728 - protein, 969 aa, Achlyodes mithridates
MTIQLIVYCGAYTAAKYNGSKIRSPQDNNKTNIQKPFWQIKLDKRINDLRVHIGRLTEYSKGVRSNKLLKKVEDIKRKYKIHTQHENPNTDISHFLDTLKQKLNALASRLQRYKKTTLKKTQNKLFINNEKTFYRSLTQPANTKNISNNSTPTKEQLEGFWSNLWSNPIEHNCKSNWIYEDKHALKDLAHMQFENISLDLMRSIIHRTHNWKATGSDKIHNYWYKKFTSIHSHLQTHINKFIKAPDTIPKYLTQGITYMLAKDNTNLNDPSKYRPITCLQNFYKIITSCISELIYRHIDKNNILAEEQKGCRKNTQGCKEQLTIDAVALKQAYTKKRSIYTMYIDYQKAFDSVPHSWLLYILKHYNIHPTIIYFLEAVMSTWQTKLKLCNGTKTTESDLLKIQRGIFQGDALSPLWFCLALNPLSRLLNNSNKGFKVKYDRKHHTISHLMYIDDIKLYGSTLKEIQILADITQTFSSDICMQFGIDKCKIQSVKRGIIEKNAHSISNNDQIIQPLDQSEGYKYLGYQQSRQIHQKETKCTLTEKFRSRLHKILNTELNARNTIQAINSYAIPVLTYSFGIIKWTQTDLQKLQRIINTTMTKYRKHHPRSCSQRQTLPRLEGGRSIIDKHTLHNKQIHNLRTYFHNRAEHSLIHQATVEADTKYTPLNLRDRAITLTEITTIEQKINSWSQKSLHGRHRLELTNPTVDKAASNAWLRRGELFTETEGFMIAIQDQVIETKNYRKHIIKDPTLVNDRCRHCHSNSETIQHITGACRSIVQTDYKHRHDQVAAIIHQYLAHKHKLIPEKTNYYKYIPAVILESQKFRLYWDRTIITDKTVHYNRPDITLHDKINKIVYLIDIAIPNTHNLHTTYTNKLTKYTDLTIELKTQWKVKTVRTIPIVISSTGIVPKTLQPNLKTLNIHPLTFLTIPTRTESCYFKYLQNCEKISLYRYVMTKFYVPQIRLAKSPRI

SEQ ID NO: 23729 - protein, 1230 aa, Autochton longipennis
MNIFIWRTYLEITQIESCTRSYLDELYLQFSKKFPHMDVSKQRVGDQRRAIVRNKLLPRQLLDDIKEEATLNIHKTNHVSLTQTNTLNPQTDVIDKRRMIWTTKMNEVIIQTYYEVTELETNLTTYRKKLFNKFIEHFPHLSHLSEQRVADQRRVIMNNKMIPVTKMDQIRQEVSLKLHGDINATNLQIHPQSHTDSLSHESNTHNIQLIQIPERDEESIQITSHTQNQVKEYFSEALNIFKNSEPTLRPSLPKQKITRRLTIAVQYLNNTLIPNTVNNDSDFETLQLVIYCAAYAAVKYNGSKIRHINTEVQYNTQAPRWQVTLEDRIEKLRAHIGSLTEYNKGNPSKTLQRKVEEIKHRYKLHSKHENPNTELPHFLDTLKQKLNALASRLRRYKKTTLRKTQNKLFHNNEKMFYRTLTCNSNGSSVTNNTPILPSKSDLTEFWSSIWSKSQQHKDASWIRKDKDSLTDLPEMPFENIELDLLKHVIARTNNWKATGTDKIHNYWYKKFTFIHPLLHTHINNFIKSPNTLPNYITQGITYMLPKGTTDMSNPAKYRPITCLQNIYKIITSCIREIIYIHAEKNNILAEEQKGCRKNTQGCKEQLTIDAVLSKQACENKRNIFTMYIDFQKAFDSIPHSWLLYILTHYKIHPTIILFLKSAMSNWKTQIKLNSSRGTVESELLAINRGIFQGDSLSPLWFCLALNPLSRLLNNSKKGFKVKFDNKQHTISHLVYMDDIKLYGSTLNEINTLANITQTFSTDIHMQFGIDKCKMQSVRRGVLEPNSYAFDTQNVIDPVDHINGYKYLGYQQSRQIHHKITKSTLTDNFKSRLHKILNTQLNGRNTIKAINTYAISVLTYSFGIINWTKTDIQKLQRIINTTMTKYRKHHPRACTQRLTLSRQEGGRNLIDIQNLYSRQLATLRTYFHNRAEHSLIHQAIVKADNKYTPLRLRDSTVHLPTVTAEQKIQAWVQKSLHGRHRTDLSNPLVDKDASNAWLKRGELFPETEGFLIAIQDQVIDTRNYRKHIIRDKSLVTDVCRHCHSNTETIQHITGACRSIVQTDYKHRHDQVAAVIHQYLAYKYKLILEKSRYYKYTPEVILESPKIKLYWDRTIITDKTVHHNRPDITLHDKENKIVYLIDIAIPNTHNMQATYTEKLTKYTDLTIELKTQWKVNTVRTIPIIISSTGVVPKNLHASLKEIDIHPLTFLTIQKAAILNTCRIVRKFLSIDT

SEQ ID NO: 23730 - protein, 1356 aa, Chioides albofasciatus
MHLRSRKLPQAGTQEGESRPGPSSSGSPTYSGGGKASHTTTRSRTVVVDNSFINSHTSSPIPSIDITSSPISSGESYSAHSVTSPSSNSSYLSDNVVQEASAKNPPPITGSKRARKKWSNDMNIFIWRTYLEITQIETCTRGYLDELYFQFCKKFPHMDVSKQRVGDQRRAIIRNKLLSQQILDNIKEEVTLNINKINHLPQAQTNTHINTLNSQTDVTDKRRMTWTTKMNEVIIETYYEVTELETNLTTYRKKLFDKFIEHFPHLSHLTEQRIADQRRVIMYNKMLPQTKIDQIRQDISLKLHKENVSTNSTHSHIHTESLIHENNTQNIQTIQNQVQVQEHEEEEIQITSHTQDQIHEDFSEALRVFKNLEPTLRPSLPKQLITKRLNSAVQYLNNTLIPNIINNETDFETLQLVIYSAAYAAVKHNGGKIRDKHINAQYNTQTPRWQLVLEERIEKLRAHIGRLTEYNKGIRSKGLQKKVEEIKVKYKLHSQHEQPNTELPHFLDTLKQKLNALARRLRRYKKATLRKTQNKLFHNNEKMFYRNLTHNNITSVNNTPTLPSKNNLTDYWSNIWAKSQQHKEASWIQKDKESLLDLPEMTFENIDIDLLKRVIARSHNWKATGSDKIHNYWYKKFTCTHFLLHLHINNFIKSPNTLPDYITQGITYMLPKDPTDMSNPAKYRPITCLQNIYKIITSCISEIIYNHAEQNNILAEEQKGCRKKSQGCKEQLTIDAVISKQAFEEKRSIYTMYIDFQKAFDSIPHSWLLYILEHYNIHPTIIHFLKNAMSNWNTQLKLHSNTGTIESELIAINRGIFQGDSLSPLWFCLALNPLSRLLNNSKKGFKVRYDNKQHTISHLIYMDDIKLYGTTLNEINSLANITQTFSTDICMQFGIDKCKIQSVRKGVIENNSYSLDTHNLIDPVDQITGYKYLGYQQSRQIHEKQTKATLIEHFKTRLHKLLNTQLNARNTIKAINTYAISILTYSFGIIQWTRTDIQKLQRIINTTLTKYRKHHPRACVQRLTLSRQEGGRSLIDIQNLHNRQLAALRTYFHNKARDSLIHQAIVQADTKYTPLRLKDTTINFPIVTTQHKADTWLQKSLHGRHRTDLNNPTVDKDASNAWLRRGELFPETEGFMIAIQDQVIDTRNYRKHIIRDKSLITDHCRHCHSSSETIQHITGACRSIVQTDYKHRHDQVAAIIHQYLAYKYKLISDKTSYYKYTPKVILESPKIKLYWDRTIITDKTIHYNKPDITLHDKENKIVYLIDIAIPNTHNMQTTYTEKLTKYTDLTIELKTQWKVNTVRTIPIIISSTGIVPKNLHTSLKAIEIHPLTFLTIQKAVILNTCRIVRKFLSIDT

SEQ ID NO: 23731 - protein, 1405 aa, Venada nevada
MPMTNGALALKNYAMRLRSRRLPQAGTREGESRPELSSSGSPTYSGGGHASHNVTTQARTVVVGNSYTNAHISSSSSSPSKVFQCTQRTQTAYDKETLTKEQAPKKRDSEEFNTDITCSPTSSEVSLSINSVTSPSSNNSFLSDNVVQGAFADFLAPITDSKRARKKWSTEMNIFIWRTYLEITKLEYCTKGYLDELYLKFSKKFPYMDVSKQRVGDQRRAIIRNKLLAPQLLDDIKEEVRLNLQISKHLPHSQLDTVSPQTDTANKRRMIWTTKLNEVIIQTYYEVTELESNLTTYRKKLFDKFIEHFPQLSHLTEQRIADQRRVIIHNKLLPQTKLDQIRQEVASKLHRENISTIHEIRSHTQTVPLTEENSVQNIQIIQTQTQLPECTTEEELITSYTQNQIDEYFSEATKLFENSEPTQRPSLPKQIISKKLTEAVQYLDNSLIPKIVCNETSFEKLQLIIYCAAYAAVKYNGSKVYDTHTDFQFNRRIPNWQLILEKRIGELRAHIGRLTEYNKGTRSKRLERKVEKIKQKYKLHSQHENPNTELPHFLDTLKQKLNALANRLRRYKNTTLRKTQNKLFRNNEKTFYRTLTHSTNISSVTNNNPILPTKDKLTEFWSNIWSEPLQHKYANWIQIDKDSLTYLTEMPFQNIPLDLLKRVIARSHNWKATGSDKIHNYWYKKFTSTHSLLHTHINNFIKSPNTLPSYITQGITYMIAKDPADMCNPAKYRPITCLQNIYKIITSCISEIIYIHAEQNNILAEEQKGCRKNRQGCKEQLTIDAVISKQAYEKKRNIYTMYIDYQKAFDSVPHSWLLYILKHYNIHPTIILFLKSAMTNWKTEIKLHTSTGIIGTDLLAIKRGIFQGDSLSPLWFCLALNPLSKLLNNSQKGFKVKYDNKQHTISHLLYMDDIKLYGSTLNEINILANITQSFSTDICMQFGIDKCKMQSVRRGVKEENSYSLDTQNLIDPVDHLNGYKYLGYQQSRQIHHKQTKITLTENFKTRLHKILNTQLNARNTIKAINTYAISILTYSFGIIQWTRTDLQKIQRVINTTMTRYRKHHPRACVQRLTLPRQQGGRSLIDIQNLYNRQLTTLRTYFHNRAEQSLIHQAIVQADRKYTPLKLRDRTIPLQNITTEQKINTWMQKSLHGRHRTDLNNPNVDKYASNAWLRRGELFPETEGFMIAIQDQVIDTRNYRKHIIRDKSLVTDLCRHCHSSSETIQHITGACRSIVQTDYKHRHDQVAAIIHQYLAYKYKLITEKTSYYKYTPETVLESSKIKLYWDRTLITDKTVHHNRPDITLHDKENKTVYLIDIAIPNTHNIQTTYTEKLTKYTDLTIELKTQWKVNKVRTIPIIISSTGIVPQSLHTSLKAIEIHPLTFLTIQKAAILNTCRIVRKFLSIET

SEQ ID NO: 23732 - protein, 1410 aa, Urbanus velinus
MPREGRTLDSISLHYSSDQQSNSISKYAMRLRSRQLPQAGTRQGESRPEPSSSGCPTYSGGGNASHMTTQSHTVVVDNSFINSHSSSSIPSRVFRSTKRAQIACNKETSKIEQESDKPGSDSETDTTFSPPISPVESYSANSVTFSSSNNQNLSDNVVQEAYAANPTPVTDSKRARKKWNTDLNIFIWRTYLEITQLEYCTRGYLDELYSKFCKKFPHMDVSKQRIGDQRRAIVRNKLLPQQVLDNIKEEVKLNIQKTNHLPHAQTDTHNSQTNLTDKRRMIWTTKMNEVIIQTYYEVTELETNLTTYRTKLFNTFIKHFPHLSHLTEQRIADQRRIIINNKMLPDTKIDQIRQEVALKLHREKVATNTQIHSHTHKNSTQNIQTLQTLVQNPDREEEGIQITSHINNQIEEYFSEAIKQFGNLEPTLRPSLPKQKITKKLTNAVQYLNNTLIPNIVCSETNFERLQLIIYCAAYAAVKYNGSKIKDHHTNKPFNARIPGWQLILEKRIAELRANIGRLTEYNKGTRSKGLQRKVENIKRKYKLHSQHENQNTELPHFLDTLKQKLNALSSRLRRYKKTTLRKTQNKLFYNNEKMFYRTLTQHINSSSSSNNSSTVLSKNDLTEFWSNIWSKSQQHANASWIQQDKDSLIDLPEMPFENISLDLVKRVIARTHNWKATGSDKIHNYWYKTFTSTHSLLHTHINNFIKSPNTLPHYITQGITYMLPKDPTDMNNPAKYRPITCLQNIYKIITTCISELIYIHAEQNNILAEEQKGCRKNTQGCKEQLTIDAVISKQAYDKKRSIYTMYIDYQKAFDSVPHSWLLYILEHYNIHPTIIHFLKSAMSNWKTKLKLHSDAETIETELLPINRGIFQGDSLSPLWFCLALNPLSKLLNNSKKGFKIKYDNKQHTISHLIYMDDIKIYGSTLNEINTLANITQSFSTDICMQFGVDKCKMQSVKRGIIKDNSYALDSQNTIDPVDHIYGYKYLGYQQSRQIHQKQTKTTLIENFKTRLHKILNTQLNARNTIKAINTYAIPTLTYSFGIIHWTKSDIQKLQRIINTTMTKYRKHHPRACIQRLTLSRQEGGRNLIDIQNLHNRQLTTLRTYFHNRAQHSVIHQAVVRADIKFTPLRLGNNTINLPIITTDQKTHSWIQKSLHGRHRADLNNPSVDKDASNAWLRRGELFPETEGFMIAIQDQVIDTRNYRKHIIKDNSLITDLCRHCHSNSETIQHITGACRSIVQTDYKHRHDQVAAIIHQYLACKYKLITEKTSYYKYIPQVILESPKIKLYWDRTIITDKTIHYNRPDITLHDKENKIVYLIDIAIPNTHNMQTTYTEKLTKYTDLTIELKTQWKVNTVRTIPIIVSSTGIIPKYLHTSLKAIDIHPLTYLTIQKAAILNTCRIVRKFLSIDS

SEQ ID NO: 23733 - protein, 1246 aa, Astraptes brevicauda
MNIFIWRTYLEITQIESCTRGYLDELYFQFCKKFPHMDVSKQRVGDQRRTIIRNKLLSQQLLEDIKEEVTLKIQNTNHLPIAQIDTHNLQTDVADKRRMIWTTKMNEVIIQIYYEVTELETNLTTYRKKLFDKFMEHFPDLTHLTEQRIADQRRVIMNNKMLPETKIDQIRQDVSSKLHKDKVSTNIPIYSYSHTEYSIHENNTHNNQTIQTHIQVPEYEEEGIQITSHTQNLIKEYFLEALKIFKDSEPTARPSLPKQKITKRLNSAVQYLNSNLIPNTINNGTDFETLQLVIYCAAYTVVKYNGDRVRDINTDIQYNTQTPRWQLILEDRIIKLRTHIGRITEYNKGTRSKRLQRKVEEIKRKYKLHSQHENPNTELSHFLDTLKQKLNALASRLRRYKKTTLRKTQNKLFHNNEKMFYRTLTQQSTQHVSSNTPILPSRSDLEEFWSNIWSIPQQHKDASWIRKDKDSLTDLPEMPFENIDLDLLKRVIARSHNWKATGSDKIHNYWYKKFTCIHSLLQIHINNFIKSPNTLPLYITQGITYMIPKDPTDMSNPAKYRPITCLQNLYKIITSCITEIIYTHAEQNNILAEEQKGCRRNTQGCKEQLTIDAVISKQAFEKKINIYTMYIDFQKAFDSIPHSWLIYILKHYNVHPTIILFLQSAMSNWKTQLKLNNGAVTLESDFLEIKRGIFQGDSLSPLWFCLSLNPLSRLLNNSKNGFKIRSDNIQHTISHLVYMDDIKLYGSTLNEINTLTTITQSFSTDICMQFGIDKCKMQSVKRGILEHNSYSLDTQNQIDSIDPINGYKYLGYEQSRQIHQKHTKATLTENFKTRLHKILNTQLNARNTIKAINTYAVSILTYSFGIIQWTRTDIQKLQRTINTTMTKYRKHHPRACVQRLTLSRKEGGRSLIDIQNLYNKQLTGLRTYFYNRAPHSLIHQTIVQADNNYTPLRLKNTTVNLSTVTSEQKIHTWLQKSLHGRHRIDLNNPVVDKDASNAWLRRGELFPETEGFMIAIQDQVIDTRNYRKHIIRDKSLLTDVCRHCRSCSETIQHITGACRSIVQTDYKHRHDQVAAIIHQYLAYKYKLISEKNSYYKYTPEIILESPKIKLYWDRTIITDKTIHYNRPDITLHDREKKIVYLIDIAVPNTHNIQTTYTEKLTKYTDLSIELKTQWKVNTVRTIPIIISSTGIVPKNLHTSLKEIDIHPLTFLTSNFKYMQDCEKISVNRHLIHLLTSIYVLAKSPRN

SEQ ID NO: 23734 - protein, 1247 aa, Cecropterus toxeus
MNIFIWRMYLEITQIESCTRGYLDELYFQFCKKFPHMDVSKQRVGDQKRAIIRNKLLSQKILDDIKDEVTLNMHKNNHLPHAQTDTLHLQTDTKDKRRIMWTTKMNEVIIQAYYEVTELETNLTTYRKKLYDKFIEHFPHLSHLTEQRIADHRRVIMCNKMLPVTKLDQIRHEVSLKLHTDNIATNVQIHSHSHTNSSLHFTNHENSTHYIQPIKTQIQNDDEQEIHITSHTQKQIEEYFSGALKIFKNSEPTLRPSLPKQKITKRITTAVTYLNSTLIPKTTNNETDFETLQLLLLLVIYCAAYAAVKYNGCKIRDINTNVQYNTQKPKWQLTLEERLGKLRAHIGRLTEYNKGNSSKALQRKVEEIKHKYKLHSQHENPNTELPHFLDTLKQKLNALASRLRRYKKTTMTKTQNKLFHSKEKLFYRTLVSHSNDSSVTNNTSSLPSKSDLTQFWSNIWSKSQQHKDASWIRDDRNSLTDLPEMPFENIELDLLKHVIARSNNWKATGSDKIHNYWYKKFTYIHPLLLTHINNFIKSPNTLPHYVTQGITYMLPKDSSDMSNPAKYRPITCLQNIYKIITSCIKEIIYEYIHAEQNNILAEEQKGCRKNTQGCKEQLTIDAVISKQACEEKRNIFTMYIDFQKAFDSIPHSWLLYILNHYKVHPTIIAFLKSAMTNWKTQLKLNSSTGTVESELLTINRGIFQGDSLSPLWFCLAIHYHTLNPLSRLLNKSKKGFKVRFDNKLHTISHLVYMDDIKLYGSTLNEINTLANITQTFSTDICMQFGIDKCKMQSVRKGILEANSYSLDAQNVIDPVDQLTGYKYLGYQQSRQIHQKQTKSTLTDNFKTRLHKILNTQLSGRNTIKAINTYAVSVLTYSFGIIQWTRTDIQKLQRIINTTLTKYRKHHPRACVQRLTVSRQEGGRSLIDIQNLHNRQLTTLRTYFHDRAQHSLIHQAIVQADNRYTPLRLRDSTIHLPSVTTEQKIQAWLQKSLHGRHRSDLNNPLVDKDASNAWLKRGELFPETESFIIAIQDQVIDTRNYRKYIIRDNHLITDMCRHCHSSSETIQHITGACRSIVQTDYKHRHDQVAAIIHQYLAYKYKLIPEKTSYYKYTPKVILESQNHRLYWDRTIITDKTIHHNRPDITLHDKEKKIVYLIDIAISNTHNMQTTYTEKLTKYTDLTIELKTQWKVNTVRTIPIIISSTGIVPKNLHVSLKAIDIHPLTFLTIQKAGILNTCRIVRKFLSIDS

SEQ ID NO: 23735 - protein, 1342 aa, Aeromachus stigmata
MMNKQNTQNNPKYNLRSLSRAAAKSERMNNNEVPNIRSSPGQAPITTINTSSSPSTSTASSFESNVSCYPSPTLSLASSMSDNVVQEAYATNPAPVSDTPRVRKKWSQEMNIFIWRTYLLVTNLGTSINGHLDILHQQFHNAFPHMNASKQRIGDQRRAIVRNKLLPESVLDQIKEEVKCNLQNTNSQQNQIDTRSTPNSVIDKSRLSWSTEMNENIIRFYFEVTNIGTNLSAYRKQLHIKFVTKYPSLAHLTEQRIADQRRVIIKNKLISESRVSEIRSEVETLGTSENFTNDNIIETTCSNNQNEQSTVNLLVADENSDTPEQGVNNFKNNLSLDTMNQIELTFLEILKTFDETNPIMRPFIPKQKPSKKLHTIVNFINVTLIPKVINDTTSFENSHLILYCAAYTAAKHNGAKFPIGVNSYIKKIPAWQEKLQNRIDELRRNIGRITEYMKGIRTKTLLKKVEIIKSKYKIHSQHENLNTELSHFLDTLKQKLNALANRLRRYKKTTLRKTQNKLFTNNEKVFYRNLNEHNNNAINCTTQSPTKESLMGYWSKIWSQSVEHSYNSWIEKDKESLKHLPDMKYNSISIDLLKKVINKTHNWKATGSDNIHNFWYKKFTNLHNLLHIHINNFIQYPETLPGYITEGLTYMLPKDKTDSSNPSKYRPITCLQNIYKIITSCIHEIIYEHLNENHILAEEQKGCRRGTYGCKEQLTIDAVALQQAYSKKRNIYTMYIDYQKAFDSVPHSWLLYILHHYNINPIIINFLSSAMNNWKTKLKLHSHNETIETDLIDINRGIFQGDALSPLWFCLALNPLSKILNSSNKGFKIKYDNNFHLISHLMYMDDIKLFGSTLNDIEHLAKLTESFSADIGMQFGMDKCRMLSVHRGVLQNNSYETSNSGFIDTLEPEEGYKYLGYQQSQYIHHKQTKNTLKEKFKTRLHKILNSQLNSRNTIKAINTYAISILTYSFGIIRWTQSDLKNLQRMINTTMTTYRKHHPKSCTQRLVLPRNEGGRGIIHIENLHSKQIKTLRTFFFNRSEHSLLHKAIVQADKKLTPLNLIDTSVQITQITKQQTLDTWKQKALHGRHRLDLTSQNVDMIASNAWLKRGELFPETEGFMISIQDQVIMTKNYRKHIIHDPSARNDLCRHCHSSSETIQHITGACKSKAQTDYKHRHDQVASIIHQHLAYKYKFLEEKVPYYKYSPQVVLDSAQYKIYWDRTIITDKTIHYNRPDITLHDKKNKTVYLIDIAIPNTHNLQSTYSEKIAKYTDLSIELKSQWKVDTVKTIPIIISSTGIIPKHLHTGLNTLHIHPLTYLTMQKAVILNTCRIVRKFLSLDSPAST

SEQ ID NO: 23736 - protein, 1382 aa, Parnara guttata
MMRLRSSNRLPQAGTSNGESRPGPLGSGSPAYSGVGDVSLPLVQTRTVTRRRAGKSGPHAGGSNAKTVGDMELRKKAVTEERNTPSPATTYNYSSSSDIYSPDSSLPSSKSSIQPSSSSSSSSSSSILSAAAAQEANAINLVPTSDTFRARKKWSKEMNIFIWRTYLRITKIETCTKGHLDILHQQFLNAFPLMDVSKQRIGDQRRAIIRNKLLPLTLLQKIKEEVLLDMKNSSVVLDHTNITSTQSFSATNKSRIAWSNEMNESILRTYFEVTSNETNLTAYRKHLYEKFIEQYPHLSYVTEQRIADQRRIIMNNKQLSESKIYEIRREVELKLQSKANYIDNAQHTEGPSIQNLQNQQTTNTIEDVTNEHNRPNIRNTIPSELQTQIELTFLENLTNFENTDPSMRPTIPKQNSSKKLSNIVEFINRSIIPKVINNDTNFETCQLILYCAAYTAVKYNDPKFSKEFIRYPKMIPAWQKNLEKRIQELRANIGRITEYIRGIRTPRLVRKVEVIKSKYKSHSRHEIENTQMSHFLDTLKQKLTALTNRLRRYKKTSFRKSQNKLFYINEKVFYRSLTDNTDNSCINSTKTPTKDSIYEYWSKIWSESVSHKCNDWIEEDKRKLTNVTNMEYESISIDLMKHVIDRTHNWKATGSDKIHNFWYKKFTCLHTLLHAHINTFIKSPETLPHYITQGITYLIPKDKRDTSNPAKYRPITCLQNIYKIISSCIQEVIYKHVQQNHILAEEQKGCRRGSYGCKEQLTIDAVALQQAYSKKRNIYTMYIDYQKAFDSVPHSWLIYILHHYNINPILIDFLGSAMHNWKTKLKIYHNDEVIETDFIEINRGIFQGDALSPLWFCLALNPLSNLLNNSNKGFKIKYNNTSHLISHLIYMDDIKLYSSTLRDIGKLAKITESFSTDICMKFGLDKCRIQAVRRGIVTKNSYEINNSSSIDPVGPEGYKYLGYQQSQYIHHKQTKNTLINNFKTRLHKICNSQLNSRNTIKAINTYAIPILTYSFGIIRWNQSELKKLQRIINTTLTKYRKHHPRSCFQRLILPRSEGGRGIIDVQNLHNKQITRMRNFFRQRAEQSHIHKAIVQSDKKITPLNLYNTMVCSEATIHQKLETWMQKSLHGRHRLDLMNQHVDKRASNAWLARGELFPETEGFMVAIQDQVIDTKNYRKHIIRDPNAHNDLCRHCYSSSETIQHITGACRSRAQTDYKHRHDQVASIIHQYLAYKHNLIKNKTQYYKYTPEVVLDSSDYKLYWDRTIITDKTIHYNRPDITFHDKINKTVYLIDVSIPNTHNLQSAYTEKLTKYTDLSIELKAQWKVDTVRTIPIIISTTGIIPKSLHSSLKTLNIHPLTYLTMQKAVILNTCRIVRKFLSLD

SEQ ID NO: 23737 - protein, 1341 aa, Telegonus cellus
MSRNDVVADVSHITSHPSSPISSTHSLFPSPNSSPHSYQTQQSSLSDSTEKCYHVAPISSSSNIHHNSLSSSSSFSLSDNVVKKASATNLLPIADIKRARKTWSTEMNIFIWRTYLTITKNESCTRGYLDELHLQFHSKFPHMDVSKQRVGDQRRAIVRNKLLPQQLLDNIRGEVRAYPQSSEPLAQVHINMTNTQTEKRRMAWTTEINEAIIKIYYEVTELESNLTTYRKKLYDKFIEQFPHLSNLTEQRISDQRRVIIKNKMLTENRIIQIKQEVAKKLSEDDISGNQTLNYSQLNSSKNINNTFNQATVVSVNSAGTLMTENESSQLEAYFLDALKDFEYTDPTSRPPIPKQRLTKKLSKALQHLNDILIPKVISPDSDFDTTQLVIYCAAYTAAKYNGSKLDSQIDNHLNNRIPAWQIKLERRIEELRIHIGRLTEFMKGTRSNSLIKKVENIKHKYKIHSQHENPNTDLSHFLDTLKQKLNALASRLRRYKKTTLRKTQNKLFNNNEKAFYRNITKQITTSSTIHAQNSTITKDALTNFWSNLWSQSIEHKHSSWIKEDKSRLSNLPEMQFENISLDLMKRVIGRTHNWKATGSDKIHNYWYKKFTSIHTLLHTHINKFIKSPNSLPHYITQGITYMLPKDVTDMGNPAKYRPITCLQNIYKIITSCISEIIYDHADQNNLLAEEQKGCRRNRQGCKEQLTIDAVAMNQAYTYKRSIYTMYIDYQKAFDTVPHTWLIYILKHYNIHPTIVQFLESVMNIWKTKIKLHNSTGVIETDLLNIKRGIFQGDALSPLWFCLALNPLSQLLNNTNKGFNIQYDNEHHTLTHLMYMDDIKLFGSTLNELHTLALVTQTFSSDIRMQFGIEKCKIQSVRNGLIENDPYNISNEALIQPVDQSVGYKYLGYQQSRLIHQKETKSNITEKFKSRLHKILNTQLNAHNTIKAINTYAIPILTYSFGIIHWTQTDLQKLQRLINTTMTKYRKHHPRACIQRQTLSRQEGGRNIIDIQNLHNRQVKSLRTYFHNRSHHSQIHLATVQADKKLTPLNLKDHNRHIDEITPEQKISTWTQKSLHGRHRLDLCNPYVDKTASNEWLRRGELFSETEGFMIAIQDQVIDTRNYRKYIIKDPKLINDLCRHCHSSSETIQHITGACRCIVQTDYKHRHDQVAAIVHQYLALKYKLITEKTNYYKYSPEVILESPKFKLYWDRTIITDKTVHCNRPDITLHDKENKTVYLIDIAIPNTNNLQTTYTNKLTKYTDLTIELKTQWQVDTVKTIPIVISSTGIIPKTLHSSLKLLHIHPLTFVTIQKAVILNTCRIVRKFLSIVTSVFFFPLNQRLA

SEQ ID NO: 23738 - protein, 1263 aa, Ctenoptilum multiguttatum
MSDNVVQAACVGKPTSVTDSKRARKKWSPEMNMFIWRKYLEITQIEYCTRGYLDELYLQFRKKFPFMDVSKQRVGDQRRAIVRNKLISQQVLDNIKEEVTLDLQNKNRIPQTQTKNTKNQSDNTLKQRMIWTTEINEAIIKIYYQVTELESNLTTYRKKLYEKFLEQFPHLSHVTEQRIADQRRVIINNKMLSTSKLSQIRHEVAMELTNINSTIQTDNDTQLGSSNNTNNTENHILTDNLSIRELRRHPLSQNTQNQLDEYFDDAFKKFKHIEPTSRPSIPKQRQTKKLNCAVHHLNHSLIPKLITNDTDFETTQLIIYCAAYTAVRYNNPKMLHSNVQNVQNIKTPFWQIKLEKRIEELRAHIGRLTEFNKGVRSKALVRKIEHIKRKYKTHALHENPNTDLSHFLDTLKQKLNALVSRLRRYKKTSLRKTQNKLFNNNEKVFYRSLTQHFNTPQVTKTNQSIPTKEQLEQFWSNLWSNPIQHNDTDSSIKWIQEDKNRLTDLQEMQYENINLDLIKRVIARTHNWKATGSDKIHNYWYKKLTCIHPLLHTHINNFIKSPNTIPRYITQGITYMLPKDINDTNNPAKYRPITCLQNIYKIITSCISEIIYTHAERNNILAEEQKGCRKNRQGCKEQLTIDAVALKQAYTKKRSIYTMYIDYQKAYDSVPHSWLLYILKHYNIHPAIIHFLKSVMNSWQTKLKLNNATRSIETDLIYIRRGIFQGDALSPLWFCLALNPLSNLLNNSNKGFKIKYDKKQHVISHLMYMDDIKLFGSNLEEIHSLANITQSFSSDICMQFGIEKCRIQSVRRGQLVHNSYDLENVGAIQPVDETEGYKYLGYQQSRQIHQKQTKATLTEKFKSRLNKILNTQLNSRNTIKAINTYAIPILTYSFGIIQWTQTDLQKLQRTINTTMTKYRKHHPRACVQRQTLLRQDGGRGLIDLQNLHNKQVKALRTYFFNRADCSGIHLATVQADNKLTPLNLRDRNIQLEEITAEEKQTTWSQKSLHGRHPIALSNPNVDKVASNEWLRRGELFPETEGFMIAIQDQVIETRNYRKHIIRDTGLVTDLCRHCHSTSETIQHITGACRSIVQTDYKHRHDQVGAIIHQYLAYKHKLITEKCSYYKYSPAVILESQKFKLYWDRTIITDKTVHYNRPDITLHDKENKIVYLIDIAIPNTHNLQSTYTNKLTKYADLTIELKTQWKANTVRTIPIVISSTGVVPETLHTCLKALQIHPLTFLTIQKAVILNTCRIVRKFLSIDM

SEQ ID NO: 23739 - protein, 1227 aa, Narcosius parisi
MNIFIWRAYLTITKMETSTRGYLDELHLQFHSKYPHMDVSKQRVGDQRRAIVRNKLLSQQLLDKIKEEVRVHLQKSAPLTHTHTNMINTQTHTTEKRRMTWTTEINEAIIRIYYEVTEVESNLTTYRKKLYDKFIEHYPHLSSLTEQRIADQRRAIIKNKMLKESRVAQIKQEVATKLSADIIPVNPTLNYSQRNSLHYITNTMNEVTVDTVTHETILITENESSQLEEIFSHALIEFKHTDPTSRPPIPKQRLTKQLSNALQHLNDILIPKVISQDTDFETTQLVIYCAAYTAAKHNGSKIDLQIKTQLNNQVPAWQVKLEKRIEELRIHIGRLTEFIKGTRSNSLINKVENIKHKYKIHSQHENPNTDLSHFLDTLKQKLNALASRLRRYKKCTLRKTQNKLFNNNEKAFYRNFNNQINTSANSVTQNPPITKDALESFWSNLWSESIEHKHNSSWIKEDKTRLTNLPEMQFENVSLDLMKRVIGRTHNWKATGSDKIHNYWYKKLTCIHSLLHTHINKFIKSPNLLPRYVTQGITYMLPKDVADTSNPAKYRPITCLQNIYKIITSCISEIIYEHTDQNNLLAEEQKGCRKNRQGCKEQLTIDAVAMKQAYANKRSIYTMYIDYQKAFDSVPHSWLVYILKHYNIHPTIVHFLESVMNIWRTKIKLHTSTGVIETDLLNIKRGIFQGDALSPLWFCLALNPLSQLLNDTNIGFKLKYDKKQHTISHLMYMDDIKLFANTRDEIQTLAKVTETFSSDICMRFGIDKCKIQSVRKGVIEHDSFKISSKDLIQPVDQSEGYKYLGYQQSRLIHHKETKTNLTEKFKSRLHKILNTQLNARNTIKAVNTYAIPILTYSFGIIHWTQTDLQKLQRIINTTLTKYRKHHPRACIQRQTLPRQEGGRNIIDIQNLHNRQVKSLRNYFYNRSHHSQIHSATVQADKKLTPLNLRDHNRYIDEITPEQKIVIWTQKSLHGRHRLDLNNPYVDKAASNAWLRRGELFSETEGFMIAIQDQVIDTRNYRKHIIKDPKLVNDLCRHCHSSSETIQHITGACRCIVQTDYKHRHDQVAAIIHQYLALKYKLITEKTNYYKYSPAIILESPKFKLYWDRTIITDKTVHYNRPDITLHDKEKKTVYLIDIAIPNTNNLETTYTNKLTKYTDLAIELKTQWKVDKVQTVPIIISATGVIPKTLQFSLKILQIHPLTFLTIQKAVILNTCRIVRKFLSIDT

SEQ ID NO: 23740 - protein, 1369 aa, Tagiades gana
MRRRCRNTLPQAGTKIGESRPEASTSGSPTYSGGGTASLEPCRKSKTRKSRYNLRSQSSKDSIEINLQTETSPERNLEDHTTNISSHSTSHSPSTSITDLSFSSSYTSTLSDNVVQEASAKIPASVTDSKRARKKWSTEMNIFIWRTYLIITKLESNTRGHLDELFFQFNKKFPFMDVSKQRVSDQRRTILRNKLIPQQVLDDIREEVQLHLHNISQLPQTQTDNVTTQLDSTTKRRIVWTTEMNEAIIKIYYEVTELESNLTTYRKKLHEKFIEHFPHLTHLTEQRIADQKRVIINNKMLSTCKITQIQQEVAKVIAMKNKTLDTLTPKNTRTESFSNNSNINSHVQVHHTNTKEHEMMLPQNVQNQLEEYFSDALKQFKVVEPTSRPSIPKQRQTRKLTSAVEYLNHTLMPKFISQDTDFETTQLVIYCAAYTAAKYNDSKFINPSTSSNINCKIPFWQVNLEKRIEELRVHIGRLTEYNNGIRSKALIRKVEFIKRKYKTHALHENPNFEISHFLDTLKQKLNALASRLRRYKKTSLRKKQNKLFTNNEKIFYRTLTEQTHTTQNCNKNLPSIEEVESFWSNLWSRPIQHNVNNAWIEEDKNRLKNLEEMQFENLSISIIKRVIARTHNWKATGSDKIHNYWYKKFTCVHPLLQIHINNFIRSPSTLPHYITQGITYMLPKDIYDTSNPAKYRPITCLQNIYKIITSCIGEIIYTHVDKNNILAEEQKGCRKNRQGCKEQLIIDAVALKQAYKMKRSIYTMFIDYQKAYDSVPHSWLLYILKHYNINPVIVNFLESVMNTWQTKLKLTNNIGSIETDFLNIRRGIFQGDALSPLWFCLALNPLSQILNSSNKGFKIKYDKNQCIISHLLYMDDIKLFGNTLKEIEVLANITESFSSDICMQFGIDKCKIQSVKKGVVVANSFNTHNKEVIQPVDQELGYKYLGFQQSRQIHQKQTKATLTDKYKLRLHKILNTQLNARNTVKAINTYAVPILTYTFGIIQWTQTDLQKLQRTINTTMTNYRKHHPRACIQRQTLPWQEGGRGLIDIQKLHNKQVESLRTYFHNRAEHSQIHKAIVKADNKLTPLNLRAHNTHLTEVTVEQRINTWAQKSLHGRHRLDITNPNVDKVSSNEWLRRGELLPETEGFIIAIQDQVIDTRNYRKYIIKDSSMVTDLCRHCHSTSETIQHITGACRAIVQTDYKHRHDQVAAIIHQYLAYKHKLITEKCSYYKYSPAVILESQKFKLYWDRTILTDKTVHYNRPDITLHDKANRIVFLIDISIPNTNNMQTTYTNKLTKYTELAIALKTQWKVDTVLTIPIVMSSTGIVPKTLHTSLKLLQIHPLTFLTIQKAVLLNTCRIVRKFLSIDTS

SEQ ID NO: 23741 - protein, 1409 aa, Astraptes apastus
MPREGRTLAALSYKIPMTNGAIVSTKYAMRLRGRQIPQAGTCEGESRPGPSSSGCPMYSGGGTASHMSRNVAVADESSIITRPSSPISSTHSLFPSPNSSSCSYQTQQSSSRSQTVTPVSGESTISSSPNINVKNPSTSSFFSLSDNVVEGVSAIKPSPITDTKRVRKTWSKEMNIFIWRTYLTVTKLESCTRGYLDELHLKFHSKYPHMDVSKQRVGDQRRAIVRNKLLSQQLLDNIKEEVRAYLRSSEPLAHTQPNTTDTQQIHTTEKRRMVWTAEINETIIRIYYEVTEVESNLTTYRKKLYNKFIEHFPHLSNLTEQRIADQRRAIINNKMLSENRITQIKQEVATKLSEGIIFAHNHAHNYSQISSLNNRNITNNQSTECIGNIGTDTERETILITENERSQLEEYFSAALNEFNHTDPTLRPPLPKQRLTKKLSNALRYLNDTLIPKVTSNNTDFETTQLVIYCAAYTAAKHNGSKIIDPLMRTQLSVRIPAWQVKLEKRIEDIRVHIGRLTEFINGTRSNSLIKKVEIIKHKYKIHSQHESPNTDLSHFLDTLKQKLNALASRLRRYKKTTLRKTQNKLFNNNEKAFYRNITKQIKTSSTSDTQNSIPAKDILAGFWSNIWSEPAEHNHNTSWIKEDKSRLIDLPDMQFQSISLDLIKRVINRTHNWKATGSDKIHNFWYKKFTSLHTLLHIHINKFIESPNTLPHYVTQGITYMLPKDITDTNNPAKYRPITCLQNIYKIMTSCISEIIYDHIDQNNLLAEKQKGCRKNRQGCKEQLIIDAVALKQAYANKRSIYTMYIDYQKAFDSVPHSWLLYILKHYNIHPIIIQFLQTVMNTWKTKIKLHSNTGTTETDFLNIKRGIFQGDALSPLWFCLALNPLSQLLNNNNIGFKIKYEKEHHTISHLMYMDDIKLFGSTLNEIHTLAEITQTFSSDICMQFGIEKCKIQCVHNGLVENNSYNINNEDIIQPLDQSEGYKYLGYQQSRRIHQKETKSTLIKKFQSRLHKILNTELNAHNTIKAVNTYAIPTLTYSFGIIQWSQSDLQKLQRIINTTMTKYRKHHPRACIQRQTLPRQEGGRNIIDIHNLHNRQIETLRNYFYNRSHNSKIHLATVQADKKYTPLNLRDQNRHIEEITVEQKIRTWTQKSLHGRHRLDLNNPNIDKAASNAWLKRGELFSETEGFMIAIQDQVIDTRNYRKHIIKDPNLVNDLCRHCHSASETIQHITGACRCIAQTDYKHRHDQVAAIIHQYLALKYKLITEKTSYYKYSPAIVLESPKFKLYWDRTIITDKTVHYNRPDITLHDKESNIVYLIDIAIPNTNNLQSTYTNKLTKYTDLSIELKTQWKVDKVQTVPVVISTTGIIPKTLLPSLKILQIHPLTFLIIQKAVILNTCRIVRKFLSINT

SEQ ID NO: 23742 - protein, 1082 aa, Udranomia eurus
MTWTNNMNETIIKTYYEVTHLETNLTAYRKKLYDTFMEHYPNLTHLTEQRIADQRRVIINNKMLSEDRLIQIRQEIALKMNKENVNLESHTINYNREESVNNNSNEILGENTNRQECVGHQMAQDFNDLEKYFTEALQEFKHTDPTSRPAIPKQKLTKKFNYAVQHLNQTSIPKVTSNDTDFETTQLVIYCAAYAAAKYNGSKIKYTQTNTQFTRQIPAWQFQLEKRISNLRVHIGRLTEFIKGNRSNALNKKVENIKLRFKIHSSHESPNTDLTHFLDTLKQKLNVLASRLRRYKKTTLRKTQNKLFNNNEKIFYRNLTNSQLTSSEPIPKKEDLLNFWSNLWSKSVEHKKDSAWIQEDKNKLIDLPEMKFGNISLDLIKRIIARTHNWKAAGSDKIHNYWYKKLTSIHSLLHTHINNFIKSPNTLPHYITQGITYILPKNRENMSDPANYRPITCLQNIYKIITSCISDIIHTHVEQNNILAEEQKGCRRNMKGCKEQLTIDAVVLKQAFANKRSIFSMFVDYQKAFDSVPHSWLIYILDHYNIHPTIVHFLESVMSTWQTKLKLHSTTESIETDFLKIKRGIFQGDAFSPLWFCMALNPLSKLLNNCNKGFKLKYNTQQHTISHLLYMDDIKLFASTLNEINSLANTTHLFSVDICMQFGIDKCKIQSVSKGIIQHNSYNINNEELIQPVDQTSGYKYLGYQQSRQIHQKETKSTLTEKFKTRLHNILHTELTARNTVKAINTYAISILTYSFGIIHWTQTDLQRLQRTINTTMTKYRKHHPRACVQRQILPRLEGGRSIIDIHNLHNKQIKSLRTYFYNRAEHSQIHLAVVHADNKFTPLNLKDNTKHCKQITIEEKINTWSQKSLHGRHRLDLNNPNVDKTASNAWLKRGELFSETEGFMIAIQDQVIDTRNYRKHIIKDPSLVNDLCRHCHNSSETIQHITGACRCIVQTDYKHRHDQVAAIVHQYLAYKFKLISEKTNYYKYKPAIILESPAFKLYWDRTILTDKTVHFNRPDITLHDIINKKVYLIDIAIPNTHNLQSTYTDKLTKYTDLQFDSIELKTQWRVDTVQTIPIIIS

SEQ ID NO: 23743 - protein, 1334 aa, Timochares trifasciata
MKKQILKSSRYNLRSISKANQSTRDMRTLGYEEQEVSESDNSLILDNSSDPVSPISINFNSNAITNFSSLPPNASILLDNVVEEASANSPSPVTNSKCARKKWTTEMNIFIWRTYLILTKLEVSTRGHLDELHSKFINKFPLMDVSKQRVSDQRRTIIRNKLLPQKTLDNIKEEVRLLLQNVNIEQSHYHSQTNNIRSQIFTTDKRRITWTEQMNEAIIQIYYEETELESNTTAYRKKLYEKFVEQFPNLSFLTEQRIADQRRAIMNNKMLSENKILQIRETVAKKLYDLNSDVQSDIQSETLTYTQRRTDPENLGSQQNARRIMTPSTKVLLEENFSEAVRQFKHIDPTSRPSIPKQKCTKKLINAVQYLNQTIIPKALAQEVDFENLHLVVYCAAYTAAKYNDSNFLDSRTYNNNNNREKPAWQIKLEKRIDEIRVHIGRLTEFNKGIRSNWLVRKVEQIKQKYKIHSEHEAPNTDTIEFLDTLKQKLNALSSRLRRYKKTTLRKMQNRLFNNNEKTFYRNLNHTETHNISNNVNSKPSKEELEEFWSNLWSQPEEHDYTSPWIKEDKNRLTDLPQMQFEDISIDLIKRVIARTHNWKATGSDKIHNFWYKKFTSLYPYLQVQINNFIKSPRTIPLYVTQGITYMIPKDYNNLNDPAKYRPITCLQTIYKIITSCISEIIHTHVETNDILAEEQKGCRKYKQGCKEQLTIDAVAMRQAFTKKINIFTIFIDYQKAYDSVPLSWLLYILNHNNIHPKIVNFLESVMKTWKTQLILHSNLGTTETDLISIKRGTFQGDGLSPLWFCLALNPLSTILNNSNKGFKIKYDEHHHTISHLMYMDDIKLFASTLEEIHILADNTHTFSTDIRMKFCIDKCKIQSVNRGKVILEPYNINSTDQITPVDQNEGYKYLGYQKTRQINQKETKSTLTDRFKSRLHKILKSQLNARNTIKTIHTYAVPVLTYSFGIIQWSQTDLLKLTRIINTTMSLYRKHHPRSCVQRQTLPRKEGGRGLIDIQNLHNRQVNNLRRYFHTRAENSQIHQAIVQTDDKLTPLNLKNRTSTLSEISDEQKFNTWTQKSLHGRHRLDLNDPNVDRVASNAWLRRGELFPETEGFMLSIQDQVIDTKNYRKHIIRDPTLTTDICRHCHSSSETIQHITGACKSIVQTDYKHRHDQVGAIIHQYLAYKHKLINERISYYKYSPAIILESPKFKLYWDRTIITDKTVHHNRPDITLHDKENKIVYLIDIAIPNTHNIQSTYTNKLTKYTDLTIELKTQWKVNTVKTIPIVISSTGIIPNTLHSSLKTLDIHPLTYLTIQKAVILNTCRIVRKFLSINT

SEQ ID NO: 23744 - protein, 1067 aa, Autochton zarex
MLTENRISQIKQEVAAKLAADIIPDNQIHNNSQRTSTININNTNNHNSVDTVTCERALITENDSSQLDAYFSEAFIKFKLTDPTSRPHIPKQKLTKKLSNAVLYLNDILIPKVIAHNTDFETTQLVIYCAAYTVARHNGSKMDLQIKTPLNNVIPAWQVKLERRIEELRAHIGRLTEFIKGIRSNSLIKKIETIKHKYKIHSQHENPNTDLSHFLDTLKQKLNALASRLRRYKKTTFRKTQNKLFNNNEKAFYRNLTQHIPPSPATDIPSSTITKDALASFWSKIWSEPTKHNHSSKWINEDKNRLSYVPQMQFEDISLDLMKRVIGRTHNWKATGSDKIHNYWYKKFTAIHNLLHIHINNFIKSPHLLPHYITQGITFMLPKDVTDMNNPAKYRPITCLQNIYKIITSCISEIIYEHIDRHSLLAEEQKGCRKNSRGCKEQLIIDAVAMKQAYKSKGSIYTMYIDYQKAFDSVPHSWLLYILEHYKIHPTITQFLESVMCTWKTKIKLRNGIEEIETDSLNIKRGIFQGDALSPLWFCLALNPLSHLLNNSNTGFKIKYDKEQHTISHLMYMDDIKLFGSTLNEIHTLANITQTFSSDICMQFGIDKCKIQSVSKGSIEHNSYSINSEDIIQPVDQSEGYKYLGYQQSRLIHQKETKSVLIEKFKIRLRKILNTQLNARNTIKAVNTYAVPILTYSFGIIQWTQSDLHKLQRIINTTMTKYRKHHPRACVQRQTLPRQEGGRNITDIHNLHNRQVKSLRNYFYNRSHHSQIHLATVQADKKLTPLNLRDHNRNINEVTQEQKINTWTQKSLHGRHRLDLNNPYVDKAASNEWLRRGDLFPETEGFMIAIQDQVIETRNYKKHIIKDPNFVNDLCRHCHSTSETIQHITGACRCIVQTDYKHRHDQVAAIIHQYLALKYKLITEKTNYYKYSPAVILESSKFKLYWDRTIITDKTVHYNRPDITLHDKEKKTVYLIDIAIPNTNNLQSTYTNKLTKYTDLTIELKTQWNVDTVKTIPIVISSTAIIPKTLHSSLKILQIHPLTFLIIQKAVILNTCRIVRKCLSIDT

SEQ ID NO: 23745 - protein, 1388 aa, Astraptes naxos
MTNGALVSTKYAMRLRSRQIPQAGTCEGESRPGPSSSGCPTYSGGGTASHMSRKAVLAVESCITSRPSSPISSTHSLFPSPNSSPHSYQTQQSSSRSQTVTPVSSESTISSSPYINVKNPLTSSFFSLSDNVVEEASAKKPSPIADTKRARKTWSKDMNIFIWRTYLTITKLESCIRGYLDELHLKFLSKYPHMDVSKQRVGDQRRAIVRNKLLSQQLLDNIKEEVRTYLRSSEPLAHTHSNTTNTNQIHTTQKRRMIWTTEINEAIIRIYYEVTEIESNLTTYRKQLYSKFIEHFPNLSNLTEQRIADQRRAIINNKMLSENRIMQIKQEVATKLSEDITLHNHTHNYSQISSLNNINSANNQSAEDIDTEMCERMLITKSECSQLEEYFSAALNEFNHTDPTSRPSIPKQRLTKKLSNALLHLNDTLIPKVISNDTDFETTQLVIYCAAYTAAKHNGSKIIDPSMRIQSNMRIPAWQVKLEKRIEELRVNIGRLTEFINGTRSNSLNKKVENIKLKYKIHSQHENPNTDLSHFLDTLKQKLNALASRLRRYKKTTLRKTQNKLFNNNEKVFYRNMTKQIQTSSTSDTQNSIPCKDVLAGFWSNIWSEPTEHNRNTSWIKEDKSRLIDLPDMQFENVSLDLIKRVINRTHSWKATGSDKIHNFWYKKLTSVHTLLHTHINKFIESPNTLPHYVTQGITYMLPKDITDMKNPAKYRPITCLQNIYKIITSCISEIIYEHIDQNNLLAEEQKGCRKNSQGCKEQLIIDAVALKQAYANKRSIYTMYIDYQKAFDSVPHSWLLYILKHYNIHPTIVQFLETVMTTWKTKIKLHSNAGTIETDLLNIKRGIFQGDALSPLWFCLALNPLSQLLNNSNVGFKIKYEKEHHTISHLMYMDDIKLFGSTLNEIHTLADITQTFSSDISMQFGIEKCKIQSVSNGLVEQNSYIINNEDIIHPVDQSEGYKYLGYQQSRLIHQKETKSTLIEKFQSRLHKILNTQLNARNTIKAVNTYAIPILTYSFGIIQWTQSDLQKLQRIINTTMTKYRKHHPRACIQRQTLPRQEGGRNIIDIHNLHNRQVKSLRNYFYNRSHNSKIHSATVQADKKHTPLNLRDQNKHIDEITTDQKISTWTQKSLHGRHRLDLTNPNVDKAASNAWLKRGELFPETEGFMIAIQDQVIDTRNYRKHIIKDPNLVNDLCRHCHSAGETIQHITGACRCIVQTDYKHRHDQVAAIIHQYLALKYKLITEKTNYYKYSPAIVLESPKFKLYWDRTIITDKTVHYNRPDITLHDKESKTVYLIDIAIPNTNNLQSTYTNKLTKYTDLTIEVKTQWRVDKVQTVPIVISSTGIIPKTLIPSLKILQIHPLTFLTIQKAVILNTCRIVRKFLSIDS

SEQ ID NO: 23746 - protein, 1388 aa, Astraptes hopfferi
MTNGALVSTKYAMRLRSRQIPQAGTCEGESRPGPSRSGCPTYSGGGTASHMYRNVVADESYITSRPSSPISSTHSLFPSPNSSPYSYQTQSSSRSHTVTPVPSDRTIPSSSNININNPPLTSTFFSLSDNVVEEASARNPPPITDTKRARKTWSTEMNTFIWRTYLTVTKIETCTRGYLDELHLQFHSKYPHMDVSKQRVGDQRRAIVRNKLLPQQLLDSIKEEVRINLRSSEPLTHTLTNTTDTQKHTTEKRRMAWTTDINEAILKIYYEVTEVESNLTTYRNKLYNKFIEHFPHLSHLTEQRIADQRRAIIKNKMVSENRIAQIKQEVAKMFSEDISSHIQTLNYSQTSSLNNLHISTNQSTAGIGTETFERPLITENESNQLEEYFSAALNEFKHIDPTLRPSIPKQRLTKRLSSALQHLNDTLIPNIVSKDTDFETTQLIIYCAAYTAAKHNGSKIIDTQIRTQSNILNRTPAWQIKLEKRIDELRVHIGRLTEFINGTRNNSLIKKVENIKHKYKIHSHHENPNTDLTHFLDTLKQKLNALASRLRRYKKTTLRKTQNNLFNNNEKVFYRNITNQIKTSSTSDIQNSTPSQDALTDFWSNLWSEPTEHKYNSSWIRDDKSRLIDLPDMQFQSMSLDLIKRVIGRTHNWKATGSDKIHNYWYKKLTSIHSLLHIHINKFIQSPNTLPHYVTQGITYMLPKGMTDMSNPAKYRPITCLQNIYKIITSCISEVIYEHIDQNNLLAEEQKGCRKNRQGCKEQLTIDAVALKQAYTNKRSIYTMYIDYQKAFDSVPHSWLLYILKHYNIHPTIIQFLESAMNTWKTKIKLHSSTGTIETDLLSIKRGIFQGDALSPLWFCLALNPLSQLLNNSNKGFKIKYEKEHHTISHLMYMDDIKLFGTTLNEIHTLAEITQTFSSDICMQFGIEKCKIQSVHNGSVEQNSYNINSEDLIQPVDQVLGYKYLGYQQSRFIHQKETKSTLIEKFRSRLHKILHTQLNARNTIKAVNTYAIPILTYSFGIIQWTKSDLQKLQRIINTTMTKYRKHHPRACIQRQTLPRQEGGRSIIDIHNLHNRQVTSLRNYFYNRSHNSQIHLATVQADKKLTPLNLSDHNRHIDEITAEQKISIWTQKSLHGRHRLDLSNPYVDKDASNAWLTRGELFSETEGFMIAIQDQVIDTRNYRKFIIKDPNLVNDLCRHCHSNSETIQHITGACRCIVQTDYKHRHDQVAAIIHQYLALKYKLIAEKTNYYKYSPAVILESPNFKLYWDRTIITDKTVHYNRPDITLHDKQNKTVYLIDIAIPNTNNLQTTYTNKLTKYTDLSIELKTQWRVDKVQTVPIVISATGVIPKSLKSSLKILQIHPLTFLTIQKAVILNTCRIVRKFLSIDT

SEQ ID NO: 23747 - protein, 1336 aa, Cycloglypha thrasibulus
MKKQILKSSRYNLRSLSKASQSTTGMRTVGNEEDQQDSESANSVVLDNISVPSSPISISFNSITNTDSSSPSTNTSSLLDNVVEEASAKCPSPVTSSKCARKKWTTEMNIFIWRAYLEITNLEVSTRGHLDELYAKFIDKFPLMDVSKQRVGDQRRTIIRNKLLPQNTLDGIKEEVRLLLQNYNIEQSHLQTHTNNIRSQTLTIDKRRMTWTEQMNEAIIQIYFEETELESNLTTYRKKLHEKFVEQFPHLSFLTEQRLADQRRVIINNKMLSENKILEIRQEVAKKLCNLNSNVQLHTGIQSEPSTNTQNMQSRVEPENVNTQHERQIMTQSTKELLEEYFSEAVREFKHIDPTSRPSIPKQKCTKKLINAIQYLNQTVLPKSLSQEPDFDNLHLVVYCAAYTAAKYNDSKFLASRTYINHNNMQKPLWQSKLEKRIDKIRVHIGRLTEFNKGIRSNWLVRKVQQIKQKYKIHSEHEAPNTSINEFLDTLKQKLNALSSRLRRYKKTTLRKTQNRLFNNNEKTFYRNLNQTDTSHNFNSNPKKEELEEFWANLWSQPVEHDYTSPWITEDKDSLTDLPRMHFDNISLDLIKRVIARTHNWKATGSDKIHNYWYKKFTSLYPHLQTHINHFINSPNTIPHYVTQGITYMIPKDYSNLMDPAKYRPITCLQTIYKIITSCICEIIHTHVETNDILAEEQKGCRKYRQGCKEQLTIDAVAMRQAFTKKRNIFTMFIDYQKAYDSVPHSWLLYILNHYNVHPKIVTFLESVMKTWKTQLILHSNLGTTETDLISIKRGIFQGDGFSPLWFCLALNPLSKILNNSNKGFKIKYDKQHHTISHLMYMDDIKLFASTLEEIHVLADTTHLFSTDIRMKFCIDKCKIQSVNRGKVIPEAYNINSTEQITPVDQIEGYKYLGYQQTRQIHQKETKSTLTDRFKSRLHKILKSQLNARNTIKAINTYAVPVLTYSFGIIQWTQTDLLKLQRIINTTMSLYRKHHPRSCVQRQTLPRKEGGRGLIDIQNLHNRQVNTLRKYFHTRAENSQIHQAIVQTDNKLTPLNLKNRTATLSETSNDQKVSTWTQKSLHGRHRLDLNDPNVDNVASNAWLRQGELFPETEGFMLSIQDQVIDTKNYRKHIIRDPSLTTDICRHCHSSSETIQHITGACRSIVQTDYKHRHDQVGAIIHQYLAYKYKLINEKTSYYKYSPEIILESPKFKLYWDRTIITDKTVHHNRPDITLHDKENKIVYLVDIAIPNTHNIQSTYTNKLTKYTDLTIELKTQWKVNTVKTIPIVISSTGIIPNTLHSSLKTLNIHPLTYLTIQKAVILNTCRIVRKFLSINT

SEQ ID NO: 23748 - protein, 916 aa, Urbanus esmeraldus
MRIPAWQINLEKRIVELRVHIGRLTEFINGTRSNSLNKKVENIKQKYKIHSQHENPNTDLSHFLDTLKQKLNALASRLRRYKKTTLRKTQNKLFNNNEKAFYRNMTEQIKTSCTSDTQNTIPSKDILAGFWSNIWSEPTEHKCNTSWIEEDKSRLIDLPDMQFQNISLDLMKRVINRTHNWKATGSDKIHNFWYKKFTSIHTLLHIHINKFLESPNTLPQYLTQGITYMLPKDINDTSNPAKYRPITCLQNIYKIITSCISEIIYEHVDQNDLLAEEQKGCRKNRQGCKEQLIIDAVALKQAYTNRRSIYTMYIDYQKAFDSVPHSWLLYILKHYNIHPKIVQFLETVMSTWKTKIKLHSSIGTTETDLLNIKRGIFQGDALSPLWFCLALNPLSQLLNNSNIGFKIKYEKEHHTISHLMYMDDIKLFGSTLHEIHTLAEITQTFSSDICMQFGIEKCKIQSVRNGLVEQNSYNINSEDLIQPVNQSEGYKYLGYQQSRLIHQKETKSTLIEKFRSRLHKILNTQLNARNTIKAVNTYAIPILTYSFGVIQWTKSDLQKLQRIINTTMTKYRKHHPRACIQRQTLPRQEGGRNIIDIHNLHNRQIKSLRNYFYNRSHNSKIHSATVKADKKYTPLNLRDHNRHIDEITTEQKINTWTQKSLHGRHRLDLINPIVDKAASNAWLKRGELFTETEGFMIAIQDQVIDTRNYRKYIIKDKNLVNDLCRHCHSASETIQHITGACRCIVQTDYKHRHDQVAAIIHQYLALKYQFITEKTNYYKYSPAIVLESPKFKLYWDRTIITDKTVHYNRPDITLHDKENKTVYLIDIAIPNTNNLQTTYTTKLTKYTDLTIELKTQWRVDKVQTVQIVISATGVIPKTLIPSLKTLQIHPLTFLTIQKAVILNTCRIVRKFLSIDT

SEQ ID NO: 23749 - protein, 1329 aa, Camptopleura auxo
MKKQILKSSRYNLRSLSKASQSTTGMRTLSNEEQQVTESDNSLVLDNISAPTSPISTYLNSSTTTFSSPSTNTSNLLDNVVEEPSANRSSPVTSSKCARKKWTTEMNIFIWRTYLIITKLEVSIRGHLDELYSKFINKFPLMDVSKQRVGDQRRTIIRNKLLPQKTLDNIKEEVRLLLQQSNIEESHSYTQTNNSTSQTFTTDKRRIIWTEQMNEAIIQIYYEETELESNLTTYRKKLFEKFIEKFPHLSFLTEQRIADQRRVIINNKMLSENKVLEIRQEVAKKLCNFNSNIQSETSTDRQSRTEAENIGTQQNERQTITQSTKVLLEEYFSDAVREFKHTDPTLRPSIPKQKCTKKLINAVQYLNQTVIPKSLSQELDFENLHLVVYCAAYTAAKYNDSKFLDSRNYNTNNNMQKPLWQIKLEKRIEEIRVHIGRLTEFNKGIRSNWLVRKVEQIKRKYKIHSQHEAPNTGIIEFLDTLKQKLNALSSRLRRYKKTALRKTQNRLFNNNEKTFYRTLNQTDTQNTSSNLNSNPKKVELEEFWSNLWSQPAEHDYTSPWIKEDKNSLTDLPQMQFESITIDLIKRVIARTHNWKATGSDKIHNYWYKKFTSLYPYLQNHINNFIKSPNTIPHYVTQGITYMIPKDNNNLMDPAKYRPITCLQTIYKIITSCICEIIHIHVETNDILAEEQKGCRKYKQGCKEQLTIDAVAMRQAFTKKRNIFTMFIDYQKAYDSVPHSWLIYILNHYNIHPTIVNFLESVMKTWKTQLILHSNLGTTETDLISIKRGIFQGDGLSPLWFCLALNPLSKILNNSNKGFKIKYDRQHHTISHLMYMDDIKLFASTLEEIHILADTTHTFSTDIRMQFCIDKCKIQSVNRGKIILETYNINSTDKITPVDQIEGYKYLGYQQTRQIHQKETKSTLTDKFKFRLHKILKSQLTARNTIKAINTYAIPVLTYSFGIIQWTQTDLLKLQRIINTTMSLYRKHHPRSCVQRQTLPRKEGGRGLIDIQNLHNRQVNTLRMYFHNRAENSQIHQAIVQTDNKLTPLNLKNRTTTLNETSDQQKVNTWTQKSLHGRHRLDLNDPNVDKVASNAWLKQGELFPETEGFMLSIQDQVIDTKNYRKHIIRDPTLATDTCRHCHSSSETIQHITGACKSIVQTDYKHRHDQVGAIIHQYLAYKYKLINERTSYYKYSPAIILESPKFKLYWDRTIITDKTIHYNRPDITLHDKENKIVYLIDIAIPNTHNLQSTFTNKLTKYTDLTIELKTQWRVNTVKTIPIVISSTGVIPNTLHSSLKTLNIHPLTYLTIQKAVILNTCRIVRKFLSINT

SEQ ID NO: 23750 - protein, 1225 aa, Autochton longipennis
MNIFIWRTYLTITKLESVTKGYLDELHLQFNSKFPHMDVSKQRVGDQRRAIVRNKLLPQQLLDQIKEEVRAYLPSSEPLGHTHTHMINTQTHTIEKRRMVWTTEINVAIIKIYYEVTEIESNLTTYRKKLYDKFIEHFPHLSNLTEQRIADQRRAIIKNKMLSETRISQIKQEVAAEMTNNVIPDNEIFNYTQRNSINNINNTNNEGLEDTFERALITENESSQLEAYFSEALNEYKYTDPTSRPFIPKQRITKKLSKALQHLNDILIPKVIAHNTDFEMTQSIIYCAAYTAARYNDSKIGIVTQNPSNNLIPAWQIKLEKRVEELRANIGRLTEFIKGVRSNSLIKKVEAIKHKYKIHSQHENPNTDLSHFLDTLKQKLNALASRLRRYKKTTLRKTQNNLFNNNEKSFYRNFTKQITTSPTTDTENSKITKDALTNFWSNLWSVASNHKHSSSWITEDKNLLSNLPEMQYENISLDLMKRVIGRTHNWKATGSDKIHNYWYKKFTSVHTLLHTHINNFIKTPIALPTYITQGITYMLPKDITDMNNPAKYRPITCLQNIYKIMTSCISELIYEHVDQHNVLAEEQKGCRRNRQGCKEQLTIDAVAMKQAYVSKRSIYTMYIDYQKAFDSVPHSWLLHILKHYKIHPTIVQFLESVMDLWKTKIKLHSSTGLVETDLINIKRGIFQGDALSPLWFCLALNPLSQLLNKSNTGFKVKYDKKQHTISHLLYMDDIKLFGSTLNEINTLAQITQTFSSDICMQFGIDKCGIQSVCKGLIEYNSYGINSEEFIQPVDQSRGYKYLGYQQSRLIHQKETKSALIEKFKVRLRKILNTQLNARNTIKAVNTYAIPILTYSFGIIHWTQTDLRKLQTIINTTMTKYRKHHPRACIQRQTLPRQEGGRNLIDIQNLHNRQINSLRNYFYNRSHHSQIHLATVQADKKLTPLNLNDQSKHINEITHEQKINTWTQKSLHGRHRLDLNNPCVDKAASNEWLKRGELFPETEGFMIAIQDQVIETRNYRRYIVKDPNYVNDICRHCHSASETIQHITGACRCIVQTDYKHRHDQVAAIIHQYLALKYKLISEKTNYYKYSPAVILESPKYKLYWDRTIITDKTVHYNRPDITLHDKENKTIYLIDIAIPNTNNLQSTYTNKLTKYTDLTIELKTQWRVNTVKTIPIVISSTGIIPKTLHSSLKLLQIHPLTFITIQKAVILNTCRIVRKFLSIET

SEQ ID NO: 23751 - protein, 1391 aa, Spathilepia clonius
MTNGALVYTIYAMRLRSREIPQAGTCEGESRPGPSGSGCPTYSGGGTASHISHKDVVEDKSHNSSHPSSPISSTQSLFPSPNSSPYSYQTQQSSSTSHTTTPQLEDSTEEIYHLSPILSSPNSNIHNRPPSSLFSLSDNVVREAIAKNPLPIADTKRARRTWSTEMNIFIWRTYLTITKIESSTRGYLDELHLQFHTKFPHMDVSKQRVGDQRRAIVRNKLLSQQLLDKIKEEVRASLQNSEPLTHTHINNINTQKHTTERRRMVWTTEINETIMKIYYEVTEVESNLTTYRKRLYDKFIEHFPFLSNLTEQRIADQRRAIVNNKMLTENRITQIKQEVATKLSEDVIPANRLLNHSQRNSLNIINTYNQRTVGTVTYDTILISENESSQLEQYFSDALKEFKHTDPTSRPPIPKQRLTKKLSNALQHLNEILIPKVISHNTDFETTQLVIYCAAYTAAKHNGSNMDLQVRSKINYQKPAWQVKLERRIEELRVNIGRLTEYINGVRSNSLIKKVEHIKHKYKIHSQHESPNTALSHFLDTLKQKLNALASRLRRYKKTTLRKTQNKLFNNNEKAFYRNFNTHINTSSTPDTQYPPMTKDTLETFWSNLWSEPIEHNYNSSWIKEDKNLLTNLPKMHFENLSLDLIKRVIGRTHNWKATGSDNIHNYWYKKLTCVHTLLHTHINQFIKSPNSLPHYITQGITYMLPKDTTDMSNPAKYRPITCLQNIYKIITSCISEIIYQHTDQNNILAEEQKGCRKQSQGCKEQLTIDAVAMKQAYTNKRSIYTMYIDYQKAFDSVPHSWLLYTLKHYNIHPTIVQFLESVMQTWKTKIKLHTSIGVIETNLLNIKRGIFQGDALSPLWFCLALNPLSQLLNQTNKGFKIKYEQKQHTISHLMYMDDIKLFGSTLNEIHELAKVTQTFSSDICMQFGIEKCKIQSVNKGVIKPNSYNIGSEDLILPVDQSEGYKYLGYQQSRFIHHNETKTSLTEKFKYRLHRILNTQLNARNTIKAINTYAIPILTYSFGIIRWTQTDLQRLQRVINTTLTKYRKHHPRACVQRQTLPRLEGGRNIIDIQNLHNRQVKSLRSYFYDKSHYSQIHLATVQADKKLTPLNLRDHNRQIDEITPEQKISTWIQKSLHGRHRLDLNNPSVDKAASNAWLKRGELFSETEGFMIAIQDQVIDTRNYRKYIIKDPNLVNDLCRHCHSSSETIQHITGACRCIVQTDYKHRHDQVAAIIHQYLALKYKLITEKTSYYKYCPAVILESPKFKLYWDRTIITDKTVHYNRPDITLYDKENKTVYLIDIAIPNTNNLEITYTNKLTKYTDLTIELKTQWRVDKVQTVPIVISSTGIIPKTLHNSLKTLQIHPLTFLTIQKAIILNTCRIVRKFLSIDT

SEQ ID NO: 23752 - protein, 1225 aa, Autochton potrillo
MNIFIWRTYLTITKIETCTRGYLDELQLQFHLKFPHMDVSKQRVGDQRRAIVRNKLLPQQLLNKIKEEVGASLQSSVPLTHTNMVNTQKHLTEKRRMVWTTEVNETIMKIYYEVTELESNLTTYRKKLYDKFIEHFPYLTNLTEQRIADQRRVIIKNKMLTENRLLQIKQEIATKLSEITIPDKETLNSSQTNLVNNTNNSNNQVTIGVETCEIIERITENESSQLEAYFTKALQEFKQIDPTMRPSIPKQRLTKKLSNAVRHLNDILIPKVTTHNTDFETTQLIIYCAAYTAAKHNGSKIHQQITTQVYNGRPAWQIKLEKRIEELRVHIGRLTEFIKGTHSNSLIKKIENIKCKYRIHSHHENPNTDLSHFLDTLKQKLNALASRLRRYKKTTLRKTQNKLFINNEKAFYRNLRQQINTSTTFNTQNNTITKEVVEKFWSSLWSESTEHIHSNWIKQDKSRLSNISKMQFDNISLDLLKRVIGRTHNWKATGSDKIHNYWYKKFTNIHTLLHIHINKFIKSPHSLPHYITQGITYMLPKDITDINNPAKYRPITCLQNIYKIITSCISEIIYEHTDKNNLLTEEQKGCRKNRQGCKEQLTIDAVAMKQAHANKRSIYTMFIDYQKAFDSVPHSWLIYILKHYSIHPAIVHFLESVMNSWKTKIKLQTSTGAIETDFLNIKRGIFQGDALSPLWFCLALNPLSQLLYNTNKGFKIQYENERYTISHLMYMDDIKLFGSTLNEIHELAKVTQTFSSDICMQFGIEKCKIQSIHKGLIEHNTYNISNEELIQPVDQSIGYKYLGYQQSRLIHQKETKSNLTEKFKARLHKILNTQLNARNTIKAMNTYAIPILTYSFGIIHWTQTDLQRLQRIINTTMTKYRKHHPRACIQRQTLPRQEGGRNIIDIQNLHNRQLKSLRTYFYNQSHRSQIHLATVQADKKLTPLNLKDYNKHIYEITAEQKISTWIQKSLHGRHRLDLNNPYVDKIASNEWLRRGELFAETEGFMIAIQDQVIDTRNYRKHIIKDPNLVNDLCRHCHNSSETIQHITGACRCIVQTDYKHRHDQVAAIVHQYLALKYKLISEKTNYYKYSPEVILESPKFKLYWDRTIITDKTVHCNRPDITLHDKDNKTVYLIDIAIPNTNNLQTTYISKLTKYTELSIELKTQWRVDTVKTIPIVISSTGIIPKTLHSSLKLLQIHPLTFITIQKAVILNTCRIVRKFLSIDT

SEQ ID NO: 23753 - protein, 1376 aa, Urbanus proteus
MRLRSRQIPQAGTCEGESRPGPSSSGCPTYSGGGTASHMARNDVVADESCITSRPSSPISSTHSLFPSPNSSPYSYQPQQSSSRSQTVTPISCDSTISSSPNINIKNPLTSSFLSLSDNVVEGASAKKPPPIADIKRARKTWSNEMNIFIWRTYLTITKIEYSTRGYLDELYLQFHSKYPHMDVSKQRVGDQRRAIVRNKLLPQQLLDNIKEEVRAYLRSSEPLAHTHSNTTDTHPLRTTGKRRMVWTTEINEAIIRIYYEVTEVESNLTTYRRKLYNKFIEHFPHLSNLTEQRIADQRRVIVNNKMLSENRITQIKQEVATKLSEDTILHNHTHNNSQISSLNNINIINNQSTEDIDTEICERMLLTENECSQLEEYFSAALNDFNDTDPTLRPPIPKQRITKRLSSALRHLNDTLIPNVISNATDFEKTQLVIYCAAYTAAKYNGSKIIDPPIRTKSNMRIPAWQVKLENRIVELRVHIGRLTEFINGTRSNSLIKKVENIKQKYKIHSQHENPNTDLSHFLDTLKQKLNALASRLRRYKKTTLRKTQNKLFNNNEKAFYRNMTKQIKTSSTSDTQNAIPSKDILTEFWSNIWSEPTEHKHDSSWIKEDKSRFIDLPDMQFQSIGLDLMKRVINRTHNWKATGSDKIHNFWYKKFTSIHTLLHTHINKFFDSPNTLPHYITQGITYMLPKDITDMSNPAKYRPITCLQNIYKIITSCISEIIYEHIDQNNLLAEEQKGCRRNRQGCKEQLIIDAVALKQAYVNKRSIYTMYIDYQKAFDSVPHSWLLYILKHYNIHPKIVQFLETVMNTWKTKIKLHNSTGTTETDLLDIKRGIFQGDALSPLWFCLALNPLSQLLNNSHLGFKIKYEKEHHTISHLMYMDDIKLFGSTLNEIHTLAEITQTFSSDICMQFGIEKCKIQSVRNGLVEQNSYNINSEDLIQPVDPSEGYKYLGYQQSRLIHQKETKSTLIEKFRSRLHNILNTQLNARNTIKAVNTYAIPILTYSFGIIQWTQSDLQKLQRIINTTMTKYRKHHPRACIQRQTLPRQEGGRNIIDIHNLHNRQVKSLRNYFYNRSHNSKIHSATVNADRKYTPLNLRDHNRNIEEMTIEQKINTWTQKSLHGRHRLDLINPIVDKVASNAWLKRGELFSETEGFMIAIQDQVIDTRNYRKHIIKDPNLVNDLCRHCHSASETIQHITGACRCVVQTDYKHRHDQVAAIIHQYLALKYKLIKEKTNYYKYSPAIVLESPKFKLYWDRTIITDKTVHYNRPDITLHDKQNKTVYLIDIAIPNTNNLQTTYTNKLTKYTDLTIELKTQWRVDKVQTVPIVISSTGIIPKTLIPSLKILQIHPLTFLTIQKAVILNTCRIVRKFLSIDT

SEQ ID NO: 23754 - protein, 1012 aa, Urbanus velinus
MLLTENECSQLEEYFSAALNEFNHTDPTLRPPIPKQRITKRLSSALRHLNDTLIPNVISNATDFEKTQLIIYCAAYTAAKYNGSIIVDPPIRTKSNMRIPAWQVKLENRIVELRVHIGRLTEFINGTRSNSLIKKVENIKQRYKIHSQHENPNTDLSHFLDTLKQKLNALASRLRRYKKTTLRKTQNKLFNNNEKAFYRNMTKQTKTSSTSDTQNTIPSKDILAEFWSNIWSEPTEHKRDSSWIKEDKSRLIDLPDMQFQSIGLDLMKRVINRTHNWKATGSDKIHNFWYKKFTSIHSLLHTHINKFFNSPNTLPHYITQGITYMLPKDITDMSNPAKYRPITCLQNIYKIITSCISEIIYEHIDQNNLLAEEQKGCRKNRQGCKEQLIIDAVALKQAYVNKRSIYTMYIDYQKAFDSVPHSWLLYILKHYNIHPKIVQFLETVMNTWKTKIKLHNSTGTTETDLLDIKRGIFQGDALSPLWFCLALNPLSQLLNNNNLGFKIKYEKEHHTISHLMYMDDIKLFGSTLNEIHTLAEITQTFSSDICMQFGIEKCKIQSVRNGLVEQNSYNINNEDLIQPVDPSEGYKYLGYQQSRLIHQKETKSTLIEKFRSRLHNILNTQLNARNTIKAVNTYAIPILTYSFGIIQWTQSDLQKLQRIINTTMTKYRKHHPRACIQRQTLPRQEGGRNIIDIHNLHNRQVKSLRNYFYNRSHNSKIHSATVNADRKYTPLNLRDHNRNIEEMTIEQKITIWTQKSLHGRHRLDLINPIVDKVASNAWLKRGELFSETEGFMIAIQDQVIDTRNYRKYIIKDPNLVNDLCRHCHSASETIQHITGACRCVVQTDYKHRHDQVAAIIHQYLALKYKLIKEKTNYYKYSPPIVLESPKFKLYWDRTIITDKTVHYNRPDITLHDKQNKTVYLIDIAIPNTNNLQTTYTNKLTKYTDLTIELKTQWRVDKVQTVPIVISSTGIIPKTLIPSLKILQIHPLTFLTIQKAVILNTCRIVRKFLSIDT

SEQ ID NO: 23755 - protein, 1444 aa, Urbanus sp.
MNSDSLSIFDPPVVTSLYPVQFCIIIIIIISPSQTYLHVRHDHLLPREGRTLAALSYKIPMTNGALVSTKYAMRLRSRQIPQAGTCEGESRPGPSSSGCPTYSGGGTASHMSRNDVVAEESHFTSHPSSPISSTHSLFPSPDSSHCSYQTQQSSSSDSIEEDDHVAAISSSSSHININNPLPSPSLFSSSDNVVEKASAENLLPITDIKRARKTWTTEMNIFIWRTYLTITKLETCTRGYLDELHLQFHSKFPHMDASKQRVGDQRRVIVRNKRLPQQLLDSIREEVRAYLQSSETLTQLHINMINTQTHTIEKRRMTWTTEINEAIIRIYYEVTELESNITTYRKKLYDKFTEHFPHLSNLTEQRISDQRRAIIKNKMLTESRIAQIKQEVATKLLLDVVPDNRSLNYSQTNSLNNIDNTISQAPVSSDTCERVSMTEMESSQLEAHFLEALNNFKHTDPTSRPPIPKQRLTNKLSKALQHLNGILIPKVTSPDLDFETTQLVIYCAAYSAAKYNGSKIDSQIEPHLHNRIPAWQVKLQNRIEELRTHIGRLTEFIKGTRSNSLIKKVENIKHKYKIHSQHESPNTDLSHFLDTLKQKLNALASRLRRYKKTTLRKTQNKLFNTNEKAFYRNFTKQLTTSSDTLTQNSTITKDALTNFWSNLWSEPIEHKNCSWIQEDKNRLSNLPEMQFENISLDLMKRVIGRTHNWKATGSDKIHNYWYKKFTSIHTLLHIHINKFIKSPNTLPHYITQGTTYMLPKDVTDTGNPAKYRPITCLQNIYKIITSCISEVIYVHTDQHNLLAEEQKGCRRSSYGCKEQLTIDAVAMKQAFTNKRSIYTMYIDYQKAFDSVPHSWLIYILKHYNIHPIIVQFLESVMKTWKTKIKLHNSTGVIETDLLNIKRGIFQGDALSPLWFCLALNPLSQLLNNTNQGFNIQYDREQHTLTHLMYMDDIKLFGSTLSEIHTLAKVTETFSSDICMQFGIEKCKIQSVRNGVIEHNPYNISSEDVIQSVDQSVGYKYLGYQQSRLIHHKETKTNLTEKFKSRLHKTLNTQLNARNTIKAINTYAIPILTYSFGIIHWTQTDLQKLQRLINTTMTKYRKHHPRACIQRQTLPRQEGGRNIIDIHNLHNRQITSLRTYFHNRSHHSQIHFAIVHADNKLTPLNLKDHNRQINEITPEQKISAWIQKSLHGRHRLDLSNPYVDKAASNEWLRRGELFSETEGFMIAIQDQVIDTRNYRKYIIKDPKLTNDLCRHCHSNSETIQHITGACRCIVQTDYKHRHDQVAAIIHQYLALKYKLIAEKTNYYKYSPEVVLESPKFKLYWDRTIITDKTVHFNRPDITLHDKENKTVYLIDIAIPNTNNLQSTYTNKLTKYTDLSIELKTQWQVDTVKTIPIVISSTGIIPKTLHSSLKLLQIHPLTFVTIQKAVILNTCRIVRKFLSIDT

SEQ ID NO: 23756 - protein, 1335 aa, Telegonus cellus
MSRNAVVADESYITSRPSSPISSTHSLFPSPISSPYSYQTQSSSRSHTVTPVSSDNTIPTAPNININNSPTTSTFFSLSDNVVEGAPARNPPPITDTKRARKTWSTEMNIFIWRTYLTITKIESCTRGYLDELHLQFHSKYPHMDVSKQRVGDQRRAIIRNKLLSQQLLDTIKEEVRTYLRNSEPLTHTHTNMTDTQTNTTEKRRMAWTSEINEALLKIYYEVTEVESNLTTYRNKLYNKFIEHFPHLSNLTEQRIADQRRAIIRNKMLSENRIAEIKQEVATKLSENIILHNQTLNYSQTNLLNNLNITNNQTTEGTETCERPLISENESNQLEEYFSAALNEFKHTDPTLRPPIPKQRLTKKLSSALQHLNDTLIPKVTSEDTDFEKTQLIIYCAAYTAAKHNGSKITDPHIRNQLNTRTPAWQVKLEKRIEELRVHIGRLTEFINGTRSNSLSKKVENIKHKYKIHSQHESPNTDLSHFLDTLKQKLNALASRLRRYKKTTLRKTQNKLFNNNEKVFYRNITKQIKTPSTSDTQNSTPSKDTLTDFWSNLWSEPTEHKYNSSWIKDDKSRFIDLPDMQFQSVGLDLIKRVIGRTHNWKATGSDKIHNYWYKKLTSIHTLLHIHINKFIESPNTLPHYVTQGITYMLPKDMTDMSNPAKYRPITCLQNIYKIITSCISEIIYEHIDQNNLLAEEQKGCRKNRQGCKEQLTIDAVALKQAYTNKRSIYTMYIDYQKAFDSVPHSWLLYILKHYNIHPTIVQFLESVMNTWKTKIKIHSSTGTIETDLLNIKRGIFQGDALSPLWFCLALNPLSQLLNNTNKGFKIKYEKAHHTISHLLYMDDIKLFGTTLNEIHTLAEVTQTFSSDICMQFGIEKCKIQSVHNGSVEQNSYNINSEDLIQPVDESIGYKYLGYHQSRLIHQKETKSTLIEKFQSRLHKILHTQLNARNTIKAVNTYAIPILTYSFGIIQWTQSDLQKLQRIINTTMTKYRKHHPRACIQRQTLPRQEGGRNIIDIHNLHNRQVKSLRNYFYNRAHNSKIHLATVQADKKLTPLNLRDHNRHIDEITAEQKISTWTQKSLHGRHRLDLNNPCVDKVASNAWLIQGELFSETEGFMIAIQDQVIDTRNYRKYIIKDPKLVNDLCRHCHSNSETIQHITGACRCIVQTDYKHRHDQVAAIIHQYLALKYKLIAEKTNYYKYSPAVILESPNFKLYWDRTIITDKTVHYNRPDITLHDKENKTVYLIDIAIPNTNNLQTTYTNKLTKYTDLSIELKTQWRVDKVQTVPIVISATGVIPKTLKSSLKILQIHPLTFLTIQKAVILNTCRIVRKFLSIDT

SEQ ID NO: 23757 - protein, 1384 aa, Astraptes enotrus
MRLRSRQIPQAGTCKGESRPGPSSSGCPTYSGGGTASHISRNDVVADESSITSHPSSPISSTNSLFPSPNSSPYSFQTQQSSSSSRTTTPLISDSTEGASLVSPIVRSSNITITNPPQSSSSFSLSGNVEKEASAKNPSPISDNKRARKTWSKEMNIFIWRTYLTITKIESCTRGYLDELHLQFHSKFPHMDVSKQRVGDQRRAIVRNKLLSQQLLDKIKEEVRAYLQNNEALAHIYTNTNNIHTPATEKRRMIWTTEINEAIIKIYYEVTELESNLTTYRQRLYDKFLEHFPHLSNLTEQRIADQRRVIINNKMLSENRITQLKQEVATKLSEDVIPDNPTLDYSQRISLNNINNTNNQLIDQPEDTVADGRILITENESSQLEEYFTEALKQFKHTDPTSRPHIPKQRLTKKLSNALQHLNDNLIPEVISHDTDFETIQLVIYCAAYTAAKHNGSKIDLPIKTQVSDRIPAWQVKLENRIKELRVYIGRLTEFIKGIRSNSLIKKVENIKHKYKIHSQHENPNTDLTHFLDTLKQKLNALASRLRRYKKTTQRKTQNKLFNNNEKAFYRNLTTQINTPVSSEILNPPITKDALESFWSNVWSEPTQHKVNSNWIKEDKNRLTNLPEMQFENISIDLMKRVIGRTHNWKATGSDKIHNYWYKKLTCIHTLLHIHINKFIKSPNSLPHYITEGITYMLPKDRTDMSNPAKYRPITCLQNIYKIITSCISEIIYEHTHQNNLLSEEQKGCRKNSQGCKEQLTIDAVVMKQANANKRSIYTMYIDYQKAFDSVPHSWLVYILKHYNIHPTIVHFLESVMNIWKTKIKLHTSTEIIETNLLNIKRGIFQGDALSPLWFCLALNPLSQLLNNTNKGFKIKYEKEQHTISHLMYMDDIKLFGSTLNEIHTLAKVTEAFSSDICMQFGIEKCKIQSICKGVVEYNSYNINNNDIIEPVDQSEGYKYLGYQQSRLIHHKETKTNLTKKFKSRLHNILNTQLNARNTIKAVNTYAIPILTYSFGIIHWTQTDLQRLQRIINTTLTKYRKHHPRACIQRQTLPRQEGGRNIIDIQNLHNRQLKSLRNYFYNRSHHSRIHLATVQADKKLTPLNLRNHNRQIDEITPEQKINTWVKKSLHGRHRLDLNNPHVDKAASNAWLKRGELFSETEGFMIAIQDQVIDTRNYRKYIIKDPNLVTDLCRHCHSSSETIQHITGACRCIVQTDYKHRHDQVAAIIHQYLALKYKLITEKTNYYKYSPAVILETAKFKLYWDRTIITDKTVHYNRPDITLHDKEKKTVYLIDIAIPNTHNLETTYTNKLTKYTDLTIELKTQWKVDRVKTVPIVISSTGIIPKTLHASLKILQIHPLTFLTIQKAVILNTCRIVRKFLSIDT

SEQ ID NO: 23758 - protein, 1330 aa, Astraptes brevicauda
MSRTDVEADESHITSHPSSPISSTQSLFLSPNSSLHSYQTQQSSSSESTVEDYNVAPISSSSNITTNKSLSPFSSLSLSDNVVKKASAGNLLPIADIKRARKTWSTEMNIFIWRTYLTITKNESCTRGYLDELHFQFHSKFPQMDVSKQRVGDQRRAIVRNKLLSQQLLDNIKEEVRVHLQNSEPLAQVQINMTNTQTHGKRRMAWTTEINEAIIKIYYEVTEIESNLTTYRKKLYDKFIEHFPHLSNLTEQRISDQRRAIIKNKMLTENRIAQLKQDVARKLSEYVIPDNQTLNCSQLNSSNKMNNTINPATVVPVTSEGILLSENESSQLEAHFFETLKHFKQTDPTSRPPIPRQRLTKKLSKALQHLNDILIPKVISPDSDFDTTQLVIYCAAYTAAKYNGSRLDSHIDTHLNNRTPAWQIKLERRIEELRVHIGRLTEFIKGTRSNSLIKKVENIKQKYKIHSQHENPNTDLSHFLDTLKQKLNALASRLRRYKKTTLRKTQNKLFNNNEKAFYRNISKQITTPTTHTQNSTITKDTLTNFWSNLWSQPIDHKHSSWIKEDKNRLVTLPQMQFESISLDLMKRVIGRTHNWKATGSDKIHNYWYKKFTSIHTLLHIHINKFIKSPSSLPHYITQGITYMLPKDVSDMGNPEKYRPITCLQNIYKIITSCISEIIYDHADQNNLLAEEQKGCRRNRQGCKEQLTIDAVATKQAYKNKRSIYTMYIDYQKAFDTVPHSWLIYILKHYNIHPTIVQFLESVMNIWKTKIKLHNSTEVIETDLLNIKRGIFQGDALSPLWFCLALNPLSQLLNNTNKGFNIHYDNEYHTLTHLMYMDDIKLFGNTLNELHTLAQVTQTFSSDICMQFGIEKCKIQSVRKGLIEDNHYNITSEALIQPVDQSVGYKYLGYQQSRLIHQKETKSNIIEKFKSRLHKILNTQLNARNTIKAVNTYAISLLTYSFGIIHWTQTDLQKLQRLINTTMTKYRKHHPRACIQRQTLSRQEGGRNIIDIQNLHNRQLKSLRTYFHNRSHHSQIHLATVQADEKLTPLNLKDHNRPIHEITPEQKISTWAQKSLHGRHRLDLTNPHVDKAASNEWLRRGELFSETEGFMIAIQDQVIDTRNYRKYIIKDPKLINDLCRHCHSSSETIQHITGACRCIVQTDYKHRHDQVAAIIHQYLALKYKLIAEKTNYYKYSPEVILESPKFKLYWDRTIITDKTVHCNRPDITLHDKENKTVYLIDIAIPNTNNLQTTYTNKLTKYTDLTIELKTQWQVDTVKTIPIVISSTGIIPKTLHSSLKLLQIHPLTFVTIQKAVILNTCRIVNKFISIDT

SEQ ID NO: 23759 - protein, 1400 aa, Urbanus velinus
MPREGRTLGAFKCKSQNPVTNGALVSTKYVMRLRSRQIPQAGTCEGESRPGPSSPGCPTYSGGGTASHMSRNDVVAEESHITSHPSSPISSTHSLFPSPDSSPNSYQVEQSSSSDSIEEDYHIPAMSSSSHKNINNPLPPSSLFSSSDNVVEKASAENLLPIADIKRARKTWSTEMNIFIWRTYLTISKLESCTRGYLDELHLQFNSKFPHMDASKQRVGDQRRAIVRNKLLPQQLLDSIREEVREYLQSSETLAQGHINMINTQTHTTEKRRMTWTTEINEAIIRIYYEVTDLETNITTYRKKLYDKFTEHFPHLSNLTEQRISDQRRAIIKNKMLTESRIAQIKQAVATKLSQDVVPDNTSHNYSQTNSLNNINNTSIQAPNLDSCERVPMTEIESSQLEAYFSEALNIFKDTDPTSRPFIPKQRLTNKLSKSLQHLNGNLIPKVISPNLDFETTQLVIYCAAYSAAKYNGSKIDSQFETHVHNRIPAWQVKLQKRIEELRIHIGRLTEFIKGTRSNSLKKKVENIKHKYKIHSQHENPNTDLSHFLDTLKQKLNALASRLRRYKKTTLRKTQNKLFNNNEKAFYRNFTKQIITSSNTHTQNSTITKDTLTDFWSNLWSKPIEHRNCTWIQEDKNRLSNLPEMQFENISLDLMKRVIGRTHNWKAPGSDKIHNYWYKKFTSLHTLLHIHINKFIKSPNTLPHYITQGTTYMLPKDVNDTGNPAKYRPITCLQNIYKIITSCISEVIYNHTDQHNLLAEEQKGCRKSSYGCKEQLTIDAVAMKQAFTKKRSIYTMYIDYQKAYDSVPHSWLIYILNHYNIHPILIQFLESVMKTWKTKIKLHNSTGVIETDLLNIKRGIFQGDALSPLWFCLALNPLSQLLNNTNQGFNIQYDEEQHTLTHLMYMDDIKLFGSTLSEIQTLAKVTETFSSDICMQFGIEKCKIQSVRNGVIEHNPYNISSEDIIQPVDQSVGYKYLGYHQSRLIHHKEIKTNLTEKFKSRLHKILNTQLNARNTIKAINTYAIPILTYSFGIIHWTQTDLQKLQRLINTTMTKYRKHHPRACIQRQTLPRQEGGRNIIDIHNLHIRQITSLRTYFHDRSHHSQIHFAVVHADNKLTPLNLKDHNRHIDEITPVQKISAWIQKSLHGRHRLDLSNPYVDKAASNEWLRRGELFSETEGFMIAIQDQVIDTRNYRKYIIKDPKLTNDLCRHCHSSSETIQHITGACRCIVQTDYKHRHDQVAAIIHQYLALKYKLIAEKTNYYKYSPEVILESPKFKLYWDRTIITDKTVHCNRPDITLHDKENKIVYLIDVAIPNTNNLQSTYTNKLTKYTDLSIELKTQWEVDTVKTIPIVISSTGIIPKTLHSSLKLLQIHPLTFVTIQKAVILNTCRIVRKFLSIDT

SEQ ID NO: 23760 - protein, 1388 aa, Cecropterus bathyllus
MTNGALVVTKYAMRLRSRQIPQAGTCEGESRPGPSGSGCPTYSGGGTASHRSHKDVVADESCVTTHPSSPISSTHSLFPSPNSSPYSYQTQQSSSRSHTMTPLSYHSTDDAHHVPPISSSFNIISNDPPPSSLLFSPSDNVVEEASAKNPLPIADIKRARKTWSKEMNIFIWRTYLTITKLESCTRGYLDELHLQFHSKFPHMDVSKQRVGDQRRAIVRNKLLSQQLLDNIKEEVRAHLRNSESLAHTQTINTHTQITENRRIVWTTDINEAIIKIYYEVTEVESNLTTYRKKLYDKFVEHFPHLSNLTEQRIADQRRAIIKNKMLTENRISQIKQEVAAKLAENVIPDSEIYNYLQRNSYNHISSTNNEEPVNTCKRVLLTENESSQLEAYFSEALTEFKQTDPTSRPHIPKQRLTKKLSDALQHLNDILIPKVISHNTDFEMTQLVIYCAAYTAARYNGYKLDRPIKTPSNNFIPTWQVRLEKRIEELRAHIGRLTEFIKGVRTNSLIKKVEAIKHKYKIHSQHENPNTDLSHFLDTLKQKLNALANRLRRYKKTTLRKTQNKLFNNNEKAFYRNLSKQITPSPTDIKNSATTKDALASFWSNLWSEPTKHKHSSSWIKEDKNRLSNLPKMQFDNISLDLMKRVIGRTHNWKATGSDKIHNYWYKKFTSTHTLLHTHINNFIKSPNSLPHYITQGITYMLPKDITDMNNPSKYRPITCLQNIYKIITSCISEIIYEHVDQHNLLAEEQKGCRRNRQGCKEQLIIDSVAMKQAYVGKKSIYTMYIDYQKAFDSVPHSWLLYILKHYNIHPTIVQFLESVMDIWKTKIKLHGSTGLIETDLINIKRGIFQGDALSPLWFCLALNPLSQLLNNSNKGFKIKYNKEQHTISHLMYMDDIKLFGSTLNEIDTLAKITQTFSSDICMQFGIDKCKIQSVCKGLIEPNPYDINSEDLIQPVDQSEGYKYLGYQQSRLIHQKETKSALIEKFKVRLRKILNTQLNARNTIKAVNTYAIPILTYSFGIIQWTQTDLHKLQRIINTTMTKYRKHHPRACIQRQTLPRQEGGRNLIDIQNLHNRLVKSLRNYFYNRSHNSQIHLATVQADKKLTPLNLNDQNKHIDEMTQEQKINTWTQKSLHGRHRLDLNNPYVDKAASNEWLRRGELFPETEGFMIAIQDQVIETRNYRKHIIKDPNCVNDLCRHCHSASETIQHITGGCRCIVQTDYKHRHDQVAAIIHQYLALKYKLITEKTNYYKYSPAVILESPKFKLYWDRTIITDKTVHYNRPDITLHDKENKTVYLIDVAIPNTNNLQSTYTNKLTKYTDLTIELKTQWKVDIVKTIPIVISSTGIIPKTLHSDLKILQIHPLTFLTIQKAVILNTCRIVRKFLSIDT

SEQ ID NO: 23761 - protein, 1382 aa, Telegonus anausis
MTNGALVYTKYAMRLRSRQIPQAGSCEGESRPEPSRSGCPTYSGGSTASHMSRNDVVADESHITSHPSSPISSTHSLVPSPNSSPHSYQTQQSPSSDSTEDSYHAVPISSSSYITTYNSLPSSSLALSDNVVEKASATNLLPIADIKRARKTWSTEMNIFIWRTYLTITKNESCTRGYLDELHFQFHSKFPQMDVSKQRVGDQRRAIVRNKLLPQQLLDHLREEVRTYLNSSEPLAQVHINMTNTQTQVTEKRRMAWTTDINEAIIKIYYEVTDLESNLTTYRKKLYDKFIEQFPHLSNLTEQRISDQKRAIIKNKMLSENRITQIRQEVAKTLSEDVTSHNQTLNCSQLNSSHNINNTSNQATVVSVNSEGILMTENEISKLEADFSEALKNYKDTDPTSRPSIPKQRLTKKLSKALQHLNDILIPKVISPDLDFDTTQLVIYCAAYTAAKYNGSKLDSQLNNHVNNRKPAWQIKLERRIEELRIHIGRLTEFMKGTRSNSLIKKVENIKYKYKIHSQHENPNTNLSHFLDTLKQKLNALASRLRRYKKTTLRKTQNKLFNNNEKAFYRNITKEITTPSIAHTQNSVITKDALTNFWSNLWSQPIDHKHSSWIKDDKNRLSNLPEMQFENISLDLMKRVIGRTHNWKATGSDNIHNYWYKKFTSIHTLLHIHINKFIKTPNSLPHYITQGITYMLPKDATDMGNPAKYRPITCLQNIYKIITSCISEIIYDHADQNNLLAEEQKGCRRSRQGCKEQLTIDAVAMKQAYTNKRSVYTMYIDYQKAFDTVPHTWLIYILQHYNIHPTIVQFLESVMHIWKTKIKLHNSTGVIETDLLNIKRGIFQGDALSPLWFCLALNPLSQLLNNTNKGFKIQYDNEHHTLTHLMYMDDIKLFGNTLNELHTLAQVTQTFSTDICMQFGIDKCKIQSVQKGLIENNPYNISNEALIQPVDQTVGYKYLGYQQSRLIHQKDTKSNLTEKFKSRLHKILNTQLNARNTIKAINTYAIPILTYSFGIIQWTQTDLQKLQRLINTTMSKYRKHHPRACIQRQTLSRQEGGRNIIDIQNLHNRQVKSLRTYFHNRSQHSQIHLATVQADKKLTPLNLKDHNRHIDEITPEQKISTWIQKPLHGRHRLDLNNPYVDKAASNEWLRRGELFSETEGFMIAIQDQVIDTRNYRKHIIKDPKLINDLCRHCHSSSETIQHITGACRCIVQTDYKHRHDQVAAIIHQYLALKYKLITEKTNYYKYSPEVILESPKFKLYWDRTIITDKTVHCNRPDITLHDKENKTVYLIDIAIPNTNNLQTTYTNKLTKYTDLTIELKTQWQVDTVKTIPIVISSTGIIPNTLHTSLKLLHIHPLTFVTLQKAVILNTCRIVRKFLSIDT

SEQ ID NO: 23762 - protein, 1357 aa, Urbanus proteus
MRLRSRQIPQAGTCEGESRPGPSSPGCPTYSGGGTASHMSRNDVVAEESHITSHPSSPISSTHSLFPSPDSSPNSYQVQRSSSSDSIEEDYHIPAMSSSSHININNPLPSSSLFSSSDNVVEKASAENLLPIADIKRARKTWSTEMNIFIWRTYLTISKLESITRGYLDELHLQFHSKFPHMDASKQRVGDQRRAIVRNKLLPQQLLDSIREEVREYLQSSETLAQGHINMINTQTHTTGKRRMTWTTEINEAIIRIYYEVTDLESNITSYRKKLYDKFTEHFPHLSNLTEQRISDQRRAIIKNKMLTESRIAQIKQAVATKLSQDVVPDNTSHNYSQTDSLNNINNTSIQAPNLDSCERVPMTEIESSQLEAHFSEALNIFKDTDPTSRPFIPKQRLTNKLSKSLQHLNQNVIPKVISPNLDFETTQLVIYCAAYSAAKYNGSKIDSQIETQAHNRIPAWQVKLQKRIEELRIHIGRLTEFIKGTRSNSLKKKVENIKHKYKIHSQHENPNTDLSHFLDTLKQKLNALASRLRRYKKTTLRKTQNKLFNNNEKAFYRNFTKQIITSSNTHTQNSTITKDTLTDFWSNLWSKPIEHKNCTWIQEDKNRLSNLPEMQFENISLDLMKRVIGRTHNWKAPGSDKIHNYWYKKFTSLHTLLHIHINKFIKSPNTLPHYITQGTTYMLPKDVNDTGNPAKYRPITCLQNIYKIITSCISEVIYNHTDQHNLLAEEQKGCRKSSYGCKEQLTIDAVAMKQAFTKKRSIYTMYIDYQKAFDSVPHSWLIYILKHYNIHPIIIQFLESVMKTWKTKIKLHNSTGVIETDLLNIKRGIFQGDALSPLWFCLALNPLSQLLNNTNQGFNIQYDEEQHTLTHLMYMDDIKLFGSTLSEIQTLAKVTETFSSDICMQFGIEKCKIQSVRNGVIENNPYNISSEDIIQPVDQSVGYKYLGYHQSRLIHHKEIKTNLTEKFKSRLHKILNTQLNARNTIKAINTYAIPILTYSFGIIHWTQTDLLKLQRLINTTMTKYRKHHPRACIQRQTLPRQEGGRNIIDIHNLHIRQITSLRTYFHDRSHHSQIHFAVVHADNKLTPLNLKDHNRHIEEITPVQKISAWIQKSLHGRHRLDLSNPYVDKAASNEWLRRGELFSETEGFMIAIQDQVIDTRNYRKYIIKDPKLTNDLCRHCHSSSETIQHITGACRCIVQTDYKHRHDQVAAIIHQYLALKYKLIADKTNYYKYSPEVILESPKFKLYWDRTIITDKTVHCNRPDITLHDKENKIVYLIDVAIPNTNNLQSTYTNKLTKYTDLSIELKTQWQVDTVKTIPIVISSTGIIPKTLHSSLKLLQIHPLTFVTIQKEVKYM

SEQ ID NO: 23763 - protein, 1371 aa, Urbanus evona
MRLRSREIPQAGTCEGESRPGPLSSGCPTYSGGGTASHMSRNDVVAEESHITLHPSSPVSSTHSLFPSPNSSPYSYQTQQSSSSDSIEEDYHVAPISSSSHINIHNPLPSSSLFSSSDNVVEKASAENLLPITDIKRARKTWSTEMNIFIWRTYLTITKLEFCTRGYLDELHLQFHSKFPHMDASKQRVGDQRRAIVRNKLLPLQLLNSVREEVRAYLQSSETSAQVHMNMINTQTHTTEKRRMTWTTEINEAIIRIYYEVTELESNITSYRKKLYDKFTEHFPHLSNLTEQRISDQRRAIIKNKMLTESRIAQIKLEVATKLSQDVVSDHRPLNYPQTNSLNNTNNTNIQVTVGLDTCERVSMTENESSQLEAHFAEALNYFKHTDPTSRPPIPKQRLTNKLSKSLQHLNDILIPKVISPNLDFETTQLVIYCAAYSAAKYNGSKMDSHTETHLHNRIPAWQVKLQKRIEELRIHIGRLTEFIKGTRSNSLIKKVENIKHKYKIHSQHENPNTDLPHFLDTLKQKLNALASRLRRYKKTTLRKTQNKLFNNNEKAFYRNFTKQLITSSNTHTQNSTITKDALTDFWSNLWSEQIEHKNCSWIQDDKNRLSNLPEMQFENISLDLMKRVIGRTHNWKATGSDKIHNYWYKKLTSIHTLLHIHINKFIISPNTLPHYITQGTTYMLPKDLTDTGNPAKYRPITCLQNIYKIITSCISEVIYDHTAQHNLLAEEQKGCRRSSQGCKEQLTIDAVAMKQAFTNKRSIYTMYIDYQKAFDSVPHSWLIYILKHYNIHPTIVQFLDSVMKTWKTKIKLHNNTGVIETDLLNIKRGIFQGDALSPLWFCLALNPLSQLLNNTNKGFKIQYDEEQHTVTHLMYMDDIKLFGSTLNEIQTLAKVTETFSSDICMHFGIEKCKIQSIRNGVIEHNPYNISSEDIIQPVDQSVGYKYLGYQQSRLIHHKETKSNLTEKFKSRLHKILNTQLNARNTIKAINSYAIPILTYSFGIIHWTQTDLQKLQRLINTTMTKYRKHHPRACIQRQTLPRQEGGRNIIDIYNLHTRQVTSLRTYFHNRSHHSQIHLAIVHADNKLTPLNLKDQNRHMEEITPEHKISAWIQKSLHGRHRLDLSNPYVDKAASNEWLRRGELFSETEGFMIAIQDQVIDTRNYRKHIIKDLKLTNDLCRHCHSSSETIQHITGACRCIVQTDYKHRHDQVAAVIHQYLALKYKLIAEKTNYYKYSPEVILESPKFKLYWDRTIITDKTIHCNRPDITLHDKENKTVYLIDVAIPNTNNLQSTYTNKLTKYTDLSIELKTQWQVDTVKTIPIVISSTGIIPKTLHSSLKLLQIHPLTFVTIQKAVILNTCRIVRKFLSIDT

SEQ ID NO: 23764 - protein, 1322 aa, Celaenorrhinus opalinus
MKKVTNIKYNLRSLSRAQQGTLTVQNDVVVRDNATSHLIAPPYSLANSKNNPSPSTCTSIMSDNVVKAAHAKSPLPVPDIKRARKKWSTEMNIFIWRTYLIVTQMEVNTRGHLDELYLRFNRKYPNMDVSKQRVSDQRRTIIRNKLIPQQLLDEIKEEVRIQLQHTNHAPASHTQTDIVSTQINITDRRRMTWSTEINESIIKIYYEVTEMESNLTAYRKKLYDKFIETFPHLSHVTEQRIADQRRVILNNKMLSESKLTQIRQEVASKLFRIETSSNAHTLDDTQITQTLLDTINIHTTDDRQETREHEKLFITQNAKTLLEEHFTDALKQFKNSDPTTRPPIPKQRQTRMLTSAVQYINNTLIPKTISQETDFESTQLVLYCAAYTAATYNGSKIVDFNKNIQLNVRKPFWQVNLEKRIEDLRVHIGRLTEFNNGVRSKALVRKVEHIKRKYKIHALHENPNTELSHFLDTLKQKLNTLASRLRRYKKTTLRKTQNKLFHNNEKIFYRNLAQQANSSYNNNSNSLPSKMALEEFWSKVWAKPIQHNISSSWIQDDKNSLTDLPQMPFETISLDLIKRVIARTHNWKATGTDKIHNYWYKKFTSLHTLLQIHINNFIRSPNTLPHYITQGITYMLPKDMTDMNDPAKYRPITCLQNIYKIITSCISETIYLHVDQNNILAEEQKGCRKGRQGCKEQLTIDAVAMKQAFLKKRNIYTMYIDYQKAYDSVPHSWLIYILEHYNIHPKIVFFLKSVMSAWRTKLILHSNSGTVETNLLNIKRGIFQGDALSPLWFCLALNPLSNILNNSSKGFKIKYDQKQYTISHLMYMDDIKLFGATLKEIRSLANITQTFSTDIGMQFGIDKCKIQSVHRGIIENNTYYINSQNVIQPVDEIEGYKYLGYQQSRKIHQKQIKSSLTDTFKSRIHKILNTQLNARNTVKAINTYAIPILTYSFGIIQWTQTELQNLQRIINTSMTKYRKHHSRACIQRQTLPRHKGGRGLIDIRNLHIRQIKSLRTYFHNMAEHSQIHKATVQADNKLTPLNLRDHTVHIEEITAEQKINTWAQKSLHGRHLLDLNNPNVDKTASNAWLQRGELFPETEGFIIAIQDQVIDTRNYRKHIIQDPTIVSDLCRHCHSASENIQHITGACRSIVQTDYKHRHDQVGAIIHQYLAHKCKLINEKTSYYKYSPAVILESHKFKLYWDRTILTDKTVHYNRPDITLHDKENKIVYLIDIAIPNTHNLQTTYVNKLSKYTDLTTEIKTQWKVNTVRTIPIVISSTGIVPKTLHSSLKTLQIHPLTYITIQKAVILNTCRIVRKFLSLDT

SEQ ID NO: 23765 - protein, 1361 aa, Astraptes hopfferi
MRLRSRQIPQAGTCEGESRPGPSCSGCPTYSGGGTASHMSRNDVVADESHITSHPSSPISSTHSLFPSPNSSPHSYQTQQSPSSDSTSSSSNITTYNSLPSSSFALSDNVVEKASATNLLPIADIKRARKTWSTDMNIFIWRTYLTITKNESCTRGYLDALHFQFHSKFPHMDVSKQRVGDQRRAIVRNKLLPQQLLDNLREEVRTHLNSSEPLEQVHINMTNTQTQVTEKRRMVWTTQINEEIIKIYYEVTDLESNLTTYRKKLYDKFIEQFPHLSNLTEQRISDQRRAIIKNKMLSENRITQIRQEVAKKLSEDVTSHNQTLNYSQLNSSHNISNTSNQATVVSVNSEGISMTENEISKLEADFSEALKNFKDTDPTSRPPIPKQRLTKKLSKALQHLNDILIRRVISPDLDFDTTQLVIYCAAYAAAKYNGSKLDAQINNHSNNRKPAWQIKLERRIEELRIHIGRLTEFMKGTRSNSLIKKVENIKHKYKIHSQHENPNTNLSHFLDTLKQKLNALASRLRRYKKTTFRKTQNKLFNNNEKAFYRNITKEITTPSITHTQNSIITKDALTNFWSNLWSQPIDHKHSSWIKEDKNRLSNLPEMQFENISLDLMKRVIGRTHNWKATGSDNIHNYWYKKFTSIHTLLHIHINKFIKSPNTLPHYITQGITYMLPKDATDMGNPAKYRPITCLQNIYKIITSCISEIIYDHADQNNLLAEEQKGCRRNRQGCKEQLTIDAVAMKQAYTNKRSVYTMYIDYQKAFDTVPHSWLIYILQHYNIHPTIVQFLESVMNIWKTKIKLHNSTEVIETDLLNIKRGIFQGDALSPLWFCLALNPLSQLLNNTNKGFKIQYDNEHHTLTHLMYMDDIKLFGSTLNELHTLAQVTQTFSTDICMQFGIDKCKIQSVQKGLIENNPYNISNDALIQPVDQTVGYKYLGYQQSRLIHQKDTKSNLTEKFKSRLHKILNTQLNARNTIKAINTYAIPILTYSFGIIQWTQTDLQKLQRLINTTMTKYRKHHPRACIQRQTLSRQEGGRNIIDIQNLHNRQVKSLRTYFHNRSQHSQIHLATVQADKKLTPLNLKDYNRHIDEITPEQKIGTWIQKPLHGRHRLDLNNPYVDKAASNEWLRRGELFSETEGFMIAIQDQVIDTRNYRKHIIKDPKLINDLCRHCHSSSETIQHITGACRCIVQTDYKHRHDQVAAIIHQYLALKYKLITEKTNYYKYSPEVILESPKFKLYWDRTIITDKTVHCNRPDITLHDKENKTVYLIDIAIPNTNNLQTTYTNKLTKYTDLTIELKTQWQVDTVKTIPIVISSTGIIPKTLHTSLKLLHIHPLTFVTLQKAVILNTCRIVRKFLSIDT

SEQ ID NO: 23766 - protein, 1325 aa, Nerula fibrena
MNHKKQKNIRYNLRSLSKAPQDTTSMRTENDKPSSSCTTSAALQQDRTDSIQPSPITSPNSTYSSSLSFSSSSMSDNVVEGAHAQITSPVADNKRARKKWSKDMNIFIWRTYLQITQIETCTRGHLDELYFQFNKKFPHMDASKQRVSDQRRAIVRNKLLTEQVLNEIKEEVKINLRNSNQLSSTQSNTQTTDTCRITWTTTMNEAIIKIYYHVTDLESNLTTYRKKLYEKFIEQFPHLSHVSEQRVADQRRVIFNNKMIPDDRIIQIRQEVALELHTENITLNNEPSINTCRETSNHLNNTPNQEQTENIYNIQKEYSQTKENEYSQLQQYFSEAIKQFEHTQPTSRPSLPKPRLTKKLSNAVHYLNQILIPKKISHSTDFDTVQLVIYCAAYAAVKYNGSKIIDTESNTQRVIRKPAWQIKLDKRIENLRAHIGRLTEYNNGIRSHKLIRKVENIKSIYKIHSHHETPNTDSTHFLDTLKQKLNALASRLRRYKKTTLRKSQNSTFNNSEKSFYRKLTQHMDTKSTPMPTKDQLTSFWSKIWSEPVEHKQNSDWIEEDKMRHQDVATMHFDNISLDLVKRVIARTHNWKATGSDKIHNYWYKKFTSLHSLLHLHINSFINSPNTLPLYITQGITYMLPKDRTDTSNPAKYRPITCLQNIYKIITSCISELIYTHADQNNILTEEQKGCRKNRQGCKEQLTIDSIALKQAYKTKRNIYTMYIDYQKAFDSVPHSWLIYILHHYNIHPTLVHFLESVMNTWQTKLRLHKNSESIETDLLNIKRGIFQGDALSPLWFCLALNPLSKLLNNSNKGFKIKYDNKHHIISHLMYMDDIKLFGSTLGEIHTLANITQTFSTDICMHFNIDKCKIQSVRKGVLEHNAYITNSQDLIQPVDQVEGYKYLGYQQSRLVHVKNTKSTLIGKFTGRLHQILNSQLNARNTIKAINTYAIPILTYSFGVIQWTQTDLQKLQRIINTTMTKYRKHHPRACIQRLTLSRQDGGRSIIDIKNLHNRLITSLRLYFYNRAEQSQIHLAAVQADNKLTPLNLRDNSVQLDETTAEQKINTWTQKSLHGRHRLDLSNPNVDIAASNAWLKRGELFPETEGFMIAIQDQVIDTKNYRKYIIKDPLLVNDICRHCHNSSETIQHITGACSSIVQTDYKHRHDQVAAIIHQYLAYKYKLVTEKNNYYKYSPAIILESSKFKLYWDRTIITDKTVHCNRPDITLHDKENKTVYLIDVAIPNTHNLQSTYTNKLTKYTDLTIELKTQWRVNTVRTVPIVISSTGVVPKNLHTSLNTLKIHPLTYLTIQKAVILNTCRIVRKFLSIDT

SEQ ID NO: 23767 - protein, 1321 aa, Entheus sp.
MNKPKNTRYNLRSLSIPCHQSNSSSPHSSPSNSINTFHHPSPSPSFSSFSSISMSDNVVEEAQAVNTSPVTDIKRARKKWSTEMNIFIWRTYLTITQLETCCRGHLDELYLKFHTKFPNMDVSKQRIGDQRRAIVRNKLLSSQMLDNIKEEVRNYLQKSNQFECPRNTDSLNRETHTINKRRIVWSAKMNEAIIQIYYEVTELESNRTTYRKKLYDKFVQQFPHLSHLTEQRIADQRRVIINNKMLPQDKIVEIREKVAKDFQTEVGNPETQTLAHSQAGLSNDINSYDQPTYQNMNTDEHESSQIAQNNTDNTYSDLDIYFTEALHEFKHTDPTSRPTIPKQKLTRKLSDAVQHLNNILIPKIITHETNFETTQLVIYCAAYSAAKYNGYKITNTHANTQLNKPIPLWQVKLEKRINDLRTHIGRLTEYNNGIRSKALIRKVEVIKNKYKIHSQHEHPNTDLSHFLDTLKQKLNALASRLRRYKKTTLRKTQNKLFNNNEKVFYRNLTLQANASATSDFDTHNSVPTKEALADFWSTLWSTPTEHHHSSSWIQEDKIRLTNLPKMQFDSISLDLVKRVIARTHNWKATGSDKIHNFWYKKFTSLHSLLHSHINHFIRSPNLLPQYITQGITYMLPKDKTNLSNPAKYRPITCLQNFYKIITSCISDIIYTHADQNNILAEEQKGCRKNRQGCKEQLTIDAVVLKQAFIDKRNIYTMFIDYQKAFDSVPHSWLLYILTHYNIHPTIVHFLESVMTTWKTKLKLHSNNETIETDLLNIKRGIFQGDALSPLWFCLALNPLSQLLINSNKGFKIKYDQKQHIISHLLYMDDIKLYGSTLKGINKLAEITHTFSHDICMHFGLEKCKIQSVRRGQIEPNSLKINSEDMILPVDQRVGYKYLGYQQSRCIHQKETKSTLIDHFKSRLHKILNTQLNSRNTIKAINTYAIPILTYSFGIIKWTPTDLHRLQRIINTTMTKYNTHHPRACVQRQTLSHQEGGRGLIDLQNLHNKQIKTLRTYFYSRENNSQIHLATVKADNKLTPLNLKNHDIQIEEITAEQKIRTWMHKSLHGRHRLDLTNPNIDKTASNAWLHRGELFCETEGFMIAIQDQVINTKNYRKHIIKDTNLVNDLCRHCNNSSETIQHITGSCRHIVQTDYKHRHDQVAAIIHQYLALKYKLITEKINYYKYTPSVILDSPKFRLYWDRTIITDKTVHHNRPDITLHDKENKTVYLIDVAIPNTHNLQTAYTDKLTKYTDLAIELKTQWRVNTVKTIPIIISSTGIVPKNLHTSLNMLHIHPLTYITIQKAVILNTCRIVRKFLSLDP

SEQ ID NO: 23768 - protein, 1376 aa, Autochton oryx
MRLRSRQLPQTGTCEGESRPGPSGSGCPTYSGGGTASHMSRNDVVADESYITTHPSSPVSSSCSLFPSPNSSPYSYQTQPFSSRSPTITPLSSVNTEEGHRGASISSSPDYSTNNPPPSSLFSLSANVVEEADANNPSSITDSKRARKTWSTEMNIFIWRTYLTLTKIETCTRGYLDELQHQFHFKFPHMDVSKQRLGDQRRAIVRNKLLPQQLLDKIKDEVGASLRISEPLTHTHTNMMHTQTHPIEKRRMVWTTEINEAIIKIYYEVTELESNLTTYRKKLYDKFIEHFPHLASLTEQRIADQRRVIIKNKMLAENRITQIKQEVALKLSEDIIPGNQSRINSLNNTNNTNEQVTIGTQSCEIIEKITEDESSHLEADFSEALNEFKHIDPTSRPSIPKQKLTKKLSNTVQHLNDILIPKVISHHTDFETTQLIIYCAAYTAAKHNGSKIHFQITTHTNNRIPAWQIKLEKRIKELRIHIGRLTEFIKGTRSNSLIKKVENIKHKYQIHSSHENPNTDLSHFLDTLKQKLNALASRLRRYKKTTLRKTQNKLFNNNEKTFYRTLGKQINTSSTSNTQNCTITKDIVENFWSNLWSEPIEHKHSSWIKQDKNRLSKLAEMQFDNISLDLIKRVIGRTHNWKATGSDKIHNYWYKRFTSIHTLLHTHINNFLKSPKSLPHYITQGITYMLPKDMNDMNNPAKYRPITCLQNIYKIITSCISEIIYEHLDQNNLLAEEQKGCRKNRQGCKEQLTIDAVALKQAYANKRSIYTMYIDYQKAFDSVPHTWLLYILKHYNIHPTIVQFLESIMQTWRTKIKLHSSTETIETDLLNIKRGIFQGDALSPLWFCLALNPLSQVLNNSNKGFKIKYEKEHHTISHLMYMDDIKLFGSTLHEIHTLAEITQKFSSDICMQFGIEKCKIQSVRKGFIEHNSYNINSEDLIQPVDQSEGYKYLGYQQSRLIHQKETKSILTEKFKSRLHKILNTQLNARNTIKAVNTYAIPILTYSFGIIQWTQTDLQKLQRIINTTMTKYRKHHPRACIQRQTLPRQEGGRNLIDLQNLHNRQVKTLRNYFYNRSHNSQIHLATVQADKKLTPLNLKDNNRYLEEITAEQKISNWIKKSLHGRHRLDLSNPYVDKVASNAWLRRGEMFSETEGFMIAIQDQVIDTRNYRKHIIKDPNLINDICRHCHSSAETIQHITGGCRCIVQTDYKHRHDQVAAIIHQYLALKHKLITEKTNYYKYSPAVILESSKFKLYWDRTIITDKTVHYNRPDITLHDKENKTVYLIDIAIPNTNNLQTTYTNKLTKYTDLTIELKTQWRVDTVKTIPIVISATGIIPKNLHSSLKTLQIHPLTYLTIQKAVILNTCRIVRKFLAIDS

SEQ ID NO: 23769 - protein, 1350 aa, Urbanus sp.
MSRNDVVEDESRTTLHPSSPISSTQSLFPSPNSSPYSYQTQHSLSRSHSITPLSNDSTESAYYAPSISSSLSSISSNHPRPSSSNHPPPSSSHLLSDNVVEKVSAKNSPPIADIKRARKTWSTEMNIFIWRTYLTITKIESRTRGYLDELHLQFILKFPHMDVSKPRVGDQRRAIVRNKLLPQHLLDNIKEEVRIHLQNSEPLVDINTNTINTLTHTTEKRRMVWTTEINEAIIKLYYEVTELESNLTTYRQKLHNKFIEHFPHLSNLTEQRIADQRRAIIKNKMLTENRLIVLKQEVASNLADVVPVDQTLEYSQINPFNNSDNQNNQETVDIGTCDRVLITESERSQIESIFSEALIKFKCTDPTSRPPLPKQRLTKKLSTALQHLNDIVIPKVISHNTDFYTTQLVIYCAAYTAAKHNGSKIDQQTQVPLNNLKPAWQVRLERRIEELRAHIGRLTEFIKGIRSNSLIQKVEIIKRKYKIHSQHENENTDLPHFLDTLKQKLNALASRLRRYKKTTLRKTQNKLFNNNEKAFYRNFTKQITTSPITDSQNPTITKDALASFWSNLWSEPLQHKNSSWITEDKNRLLNLPEMEFENISLDLIKRVIGRTHNWKATGSDKIHNYWYKKLTSMHTLLHIHINNFIKSPNTLPHYITQGITYMLPKDNTDTSDPAKYRPITCLQNIYKIITSCISEVIYEHIDQNNLLAEEQKGCRRNTQGCKEQLTIDAVVMKQAYANKRSIYTMYIDYQKAFDSVPHSWLVYILKHYNIHPTIVQFLESAMDTWKTKIKLYSSTGVIETDLLNIKRGIFQGDALSPLWFCLALNPLSLLLNNSNKGFNIKYEKHQHTISHLMYMDDIKLFGSTIDEIDTLAKITQIFSSDICMQFGIDKCKIQSVSKGLIEHNSFNINSEDLIQPVDQSVGYKYLGYQQSRLIHQKETKSVLIEKFKCRLHKILNTQLNAHNTIKAVNAYAIPILTYSFGIIQWTQSDLHKLQRMINTTMTKHRKHHPRACIQRQTLPPQEGGRNLIDIHNLHNRQVKSLRNYFYTRSLNSQIHSAIVQADKKLTPLNLKDHTRQINEITQEQKINTWTQKSLHGRHRLDMNNPYVDKVASNEWLRRGELFPETEGFMIAIQDQVIETRNYRKHIIKDPSFVNDLCRHCHSCSETIQHITGGCRCIVQTDYKHRHDQVAAIIHQYLALKYKLITEKTNYYKYSPAVILESSKYKLYWDRTIITDKTVHYNRPDITLHDKEHKTVYLIDVAIPNTNNLQSTYTTKLTKYTDLTIELKTQWRVDTVKTIPIVISSTGIIPKTLHSSLKLLQIHPLTFLTIQKAVILNTCRIVRKFLSIDTL

SEQ ID NO: 23770 - protein, 1241 aa, Cycloglypha thrasibulus
MEYRNEYFHMAHLPNIIIIKLEVSTRGHLDKLYNKFINKFPFMDVSKQRVGDQRRTIIRNKLLPQKTLDDIKDEVRLVLQNTDTEQSQSTQNNNIGSQAHNSDNRRMVWTTQMNEAIVKIYFEVTELESDITTYRKKLYERFIDQYPHLAHLTEQRIADQRRVIVNNKMLSENKILEIRQEVAKKLRNLNVDTQTHVNTNIQEISNSTHNVEYPKESENSRLPETERLIMSQRSKITLEEYFSEALKQFEHTEPTLRPTIPKQKCSKKLSTATQYLNNIIIPKNLFPEAEFQQVQLVIYCAAYTAARYNGSKILDSQFNTNNNKQCSKPSWQINLENRIEKLRVCIGRLTEFNKGIRSNWLVRKVEQIKQKYKIHSQHETPNTDTNEFLDTLKQKLNALASRLRRYKKTTLRKSQNKLFNNNEKTFYRLLSNKNTQNTGNNINSIPKKEELVEFWSNIWSRAVEHDRNSTWITEDKNKLKNVPQMRFENVSLDLIRRVIAKTHNWKATGSDKIHNYWYKKFTSIHLHLHFHINNFIRLPNTIPQYITQGITYMLPKDNNSLHDPAKYRPITCLQTIYKIITSCICETIYTHIENNNILSEEQKGCRKNTQGCKEQLTIDAVALKQAYTKRRSIYTMYIDYQKAYDSVPHSWLLYILKHYNIHPTIVDFLESIMKNWKTKLKLHSNLETVETDLIDVKRGIFQGDGLSPLWFCLALNPLSQLLNSSNKGFKIRYEKKYHTISHLMYMDDIKLFGNTLEEIYTLADITHLFSESICMQFGIDKCNIQSVKCGTVVQESYKINSTNQVIQPVDEIEGYKYLGYQQSRQIHQKETKLTLTNRFKSRLHKIFNSQLNAKHTVKAINTYAIPLLTYSFGIIQWSQTELQKLQRIINTTMTLYRKHHPRSCVQRLTLPRKDGGRGIVDIRNLHHRLVNSLRVYFHSKAENSQIHQAIVLADNKLTPLNLKNQTFTLIETSDEQKLNTWTQKSLHGRHRLDLNNPNVDKAASNAWLRQGELFSETEGFILSIQDQVIDTKNYRKHIIRDPTLVSDNCRHCHSSSETIQHITGACRTIVQTDYKHRHDQVGAIIHQYLAFKCKLIKKTTNYYKYVPSPVLESPKFRLYWDRTIITDKTVHYNRPDITLHDKENKIVYLIDIAVPNTHNLQTTYSNKLTKYTDLTIELKTQWKVNTVKTIPIVISTTGIIPYTLHTSLKVLNIHPLTYLTIQKAVILNTCRIVRKFLSIDT

SEQ ID NO: 23771 - protein, 757 aa, Camptopleura auxo
MRFENISLDLIKRVIARTHNWKATGSDKIHNYWYKKFTSIHQHLHFHINNFIKSPNTIPQYITQGITYMLPKDNNNIHDPAKYRPITCLQTIYKIITSCICETIYTHIEKNNILSEEQKGCRKNRQGCKEQLTIDAVALKQAYTKRRSIYTMYIDYQKAYDSVPHSWLLYILKHYNIHPTIVQFLESVMKTWKTKLKLYSNSETLETDLIHVKRGIFQGDGLSPLWFCLALNPLSKLLNNTNKGFKIKYEKEHHTISHLMYMDDIKLFGNTLEEIYTLADITHLFSESICMQFGIDKCNIQSVKCGKVIQESYNINDTDQIIQPVDEIEGYKYLGYQQSRQIHQKETKSTLTNRFKSRLHKILNSQLNAQNTIKAINTYAIPLLTYSFGIIHWSQTELQKLQRIINTTMTLYRKHHPRSCVQRLTLPRKDGGRGIVDIQNLHNRLVNSLRVYFHNRAENSHIHQAIVLADNKLTPLNLKNKTFTLMETSNEQKLNIWTQKSLHGRHRLDLNNPNVDKVASNAWLRQGELFPETEGFILSIQDQVVDTKNYRKHIIRDPTLVTDNCRHCHSSSETIQHITGACRTIVQTDYKHRHDQVGAIIHQYLAFKCKLIKEKTNYYKYVPAVILESAKFRLYWDRTIITDKTVHYNRPDITLHDKENKIVYLIDVAIPNIHNIQTTYTNKLTKYTDLTIELKTQWKVNTVKTIPIVISSTGIVPYTLHNSLKILNIHPLTYLTIQKAVILNTCRIVRKFLSLDT

SEQ ID NO: 23772 - protein, 1353 aa, Timochares trifasciata
MKKQTPISSSSRYNLRSLSRGSQSTTSVRTLNNEEPCPNIREVPLQQVSESDNSLVLDSITVPTSPISITSTYSSNNDFPSSSTTASSLLDNVAEEANAEYPSPITNSKCARKKWSTEMNIFIWRTYLIITKLEVSTRGHLDELYNKFINKFPYMNVSKQRVGDQRRAIVRNKLLPQKTLDDIKDEVRLMLQNTVTEQSHSTQTNKIGSQPVTSDKRRMVWTTQMNEAIIKIYLEVTELESDITTYRTKLYERFVDQYPHLAHLSEQRIADQRRAIINNKMLSENKILEIRQDVAKKLGNLNLDTQTPVNTNIQKRSSSIHNIECPIEPENTIFPESETIIIAESSKILLEEYFLEAFKQFENTNPILRPSIPKQKCSKKLSTATQYLNNTIIPKVLLPEAEFEHVQLVVYCAAYAVARYNGSKSLDFQSNSNNSKQGGKPLWQINLENRIAKLRVCIGRLTEFNKGIRSNWLIRKVEQIKQKYKIHSQHETPNNDTTQFLDTLKQKLNALASRLRRYKKTTLRKSQNKLFNNSEKTFYRLLSHTTTQNTPNKLNSVPKKEELSEFWSKIWSEPVDHDQSSAWIAEDKKNLKNLPQMRFENVSLDLIRRVIARTHNWKATGSDKIHNYWYKKFTSIHLHLHFHINNFIRSPNTIPQYITQGITYMLPKDNNNTHDPAKYRPITCLQTIYKIITSCISEIIYTHIEKNNILSEEQKGSRKNRQGCKEQLTIDAVALKQAYTKKRSIYTMYIDYQKAYDSVPHSWLLYILKHYNIHPTIVDFLESVMKTWKTKLKLYSNTESFETDLIDVKRGIFQGDGLSPLWFCLALNPLSQLLNNSKKGFKIKYEKKHHTISHLMYMDDIKLFGNTLDEIHTLADITHLFSESIYMQFGIDKCNIQSVKCGKVIQESYNINGTNQIIQPVDEREGYKYLGYQQSRQIHQKETKSTLINRFKSRLHKILNSQLNASHTVKAINTYAVPLLTYSFGIIQWSQTELQRLQRIINTTMTLYRKHHPRSCVQRLTLPRKDGGRGIVDIQNLHNRLVNALREYFHNRAENSQIHQAIVLADNKLTPLNLKNQTFTLIETSDEQKLNSWTQKSLHGRHRLDLNNPNVDKAASNAWLRQGELFPETEGFILSIQDQVIDTKNYRKHIIRDPTLVTDNCRHCHSSSETIQHITGACRTIVQTDYKHRHDQVGAIIHQYLAFKCQLIKEKTNYYKYVPAVVLESSKFRLYWDRTIITDKTVHHNRPDITLHDKENKIVYLIDIAIPNTHNIQTTYTNKLTKYTDLTIELKSQWKVNTVKTIPIVISTTGIIPYTLHTSLKTLNIHPLTYLTIQKAVILNTCRIVRKFLSIDT

SEQ ID NO: 23773 - protein, 1241 aa, Gindanes brontinus
MKNSKPQNIKYNLRSLTKANQNIRNAQKGDREFNSNLQISSLDYMSAPNNDISPFLTPPTSSTPNSLVKLTPLTTDTSYLSDNVVEETHVTCPAPITDNKCTRKKWSTEMNIFIWRTYLIITQLEVNIRGYPDKLYKKFQEKFPYMDVSKQRVSDQRRAIVRNQLLSQNKLDEIREEVQLLITNTLQSNSQHDSSNTITHTAGKSRMTWTTQMNEAIIQIYYEITELESNLTTYRKKLYDKFIEQFPHLSHLNEQRIADQRRVIINNKMLPESRILEIKQQMAKKLNIINSVTQSVNLTQLEMLNNTHNISNLETEENIDTHTNATLLLTENTQNEIEEYFSEAFKEFQNTDPTSRPPIPKQRQTKKLFNAVEYLNRTLIPRIISQDSDFETTQLIIYCGAYAAAKHNSSKIIKHLSNSRTNSQKPIWQIKLEKRIEELRVHIGRLTEYNNGKRSNYLVKKVENIKLKYEFHAQHENPNTDLIHFTDTLKQKLSALANRLRRYKKTTLRKTQNKLFHNNEKTFYRTLTQHTPNTFNDNNNIPTKEKLEGFWSNLWSNPAEHNNSSTWIKEDKNKLINLPNMQFENISLDLIKRVIHRTHNWKATGSDKIHNYWYKKFTSIHSLLQTHINKFITSPDRIPYYITQGITYMLPKDTNNMNDPSKYRPITCLQTIYKIITSCLSEIIYKYVDQNNILTEEQKGCRRNRQGCKEQLTIDAIILKQAYVKKRDIYTMYIDYQKAYDSIPHSWLLYILKHYNIHPTIINFLQSVMNIWKTKLKLCNTTGSVETDLINIRRGIFQGDALSPLWFCLALNPLSNQLKNSKKGFKIKYDMKQHTISHLMYMDDIKLFSSTLIDINKLAKITETFSSDIGMQFGIDKCKIQSVKKGKVEQNTYNLDSTNQIIQPVDEIHGYKYLGYQQSRQIHQKETKAILTNNYKSRLHKIFNSQLNARNTIKAINSFAIPILTYSFGIIQWTQTDLQNLQRIINTMMTKYRKHHPRSCVQRQTLSRLEGGRGLIDIKNLHNKLVNSLRAYFYKRAEQSPIHQAIVEADNKLTPLNLNNRSIHLNELTTEQKINIWTQKSLHGRHRTDLSNPTVDKAASNAWLRRGELFPETEGFMVAIQDQVVDTKNYRKHVIRDVRSVNDMCRQCHSNSETIQHITGACRAIVQTDYKHRHDQVGAIIHQYLAHKCNLITEKTNYYKYSPEVVLESQKFKLYWDRTIITDKTVHYNRPDITFHDKEKK

SEQ ID NO: 23774 - protein, 1326 aa, Quadrus cerialis
MKNSQPKNIKYNLRSLARANQDTSNMHNGEDRVLNSILPESNSDSSPYLTSPTSATPNTLEDLTSLTTNTSYLSDNVVEEVFATCPTPITDNKRARKKWSTEMNIFIWRTYLTITQMEVNIRGYPEELYCKFREKFPWMDVSKQRVSDQRRAIVRNKLLPQNMLDEISEEVRNSLQNAIQSYTQNDPTNTVTQTVCKRRMIWTTKMNEAIIQIYYEVTELETNLTAYRKKLYDKFIQQFPHLSHLNEQRIADQRRVIINNKMLSESKIIELRQEIAKTLNSINTEIQTVDLTQAEILNTDISHIETEENIGSIGTHTDDTVLITQNTQNKIEEYYLEAFNEHKNTNPTSRPSIPKQKQSKKLYIAVKYLNQTLIPRVISEDSDFETTQLIIYCAAYAAAKYNNSKIINIPPNTFKAQIPNWQIKLEKRIEEIRIHIGRLTEYNKGVRSNYLIKKVEDIKLKYKLHAQHENPNTDIVHFVDTLKQKLSALASRLRRYKKTTLRKTQNKLFNNNEKTFYRTLTQNITTTNTSNSNNGIPTKEELEEFWANLWSNPAEYNNSSTWIEEDRNKLNNLPNMPFENISLDVMKRVIHRTHNWKATGSDKIHNYWYKKFTSIHPFLLIHINKFITSPNIIPHYITQGITYMLPKDINNTKDPSKYRPITCLQNIYKIITSCISEVIYNHVDQHKILTEEQKGCRKNSQGCKEQLTIDAVVLRQAYTKKRNIYSMYIDYQKAYDSVPHSWLLYILKHYNIHPTVINFLESVMINWRTKLKLNSSIGSIETDLINIRRGIFQGDALSPLWFCLALNPLSNQLNNSKIGFKVKYDKQQHIISHLMYMDDIKLFGSTLKEINTLANITQTFSSDICMQFGIDKCKIQSVKRGNIEENTYNIDNTNQVIQPVDETEGYKYLGYQQSRQIHQKETKATLTNNFKSRLHKIFNSQLNSRNTIKAINTYAIPLLTYSFGVIQWTQTDLQKLQRIINTMMTKYRKHHPRSCIQRQTLPRLEGGRGIIDIKNLHNKSINSLRTYFHKRAEHSPIHQAIVEADNKLTPLNLKSHSIDLNELTTEQKINIWTQKSLHGRHRTDLINRNVDKVASNAWLRRGELFPETEGFMIAIQDQVIDTKNYRKHIIRDPGLVNDMCRQCHSNSETIQHITGACRAIVQTDYKHRHDQVGAIIHQYLAYKCNLITEKTNYYKYTPKVVLESQKFKLYWDRTILTDRTVHYNRPDITLHDKEKKIVYLIDIAVPNTHNLHTTYTNKLTKYTDLSIELNTVKTVPIVISSTGIIPKTLHTSLKLLNIHPLTYLSIQKAVIINTCRIVRKFLSLDT

SEQ ID NO: 23775 - protein, 1333 aa, Grais stigmaticus
MKNSNSKSQNIRYNLRSLARANQGTMDVRNEDNEESGSLQRTSVRDPEHPDSDTPSYLTSPESSILNLTSSSSDTSTLSDNVVEEAYATFPAPVTDNKRTRKKWSTEMNIFIWRTYLTITQLETSIRGYPDELFRKFQEKFPHMDVSKQRVSDQRRAIVRNKLVSQSILNKIEEEVRLSMQNTVQQDTQTDTINTQTQTMDKRRMIWTTKMNEAIIQIYYEVTDLESNLTSYRKKLYSKFIELFPHLSHLNEQRIADQKRVIINNKMLSENRILEIKQEAAKRRTNTNPESQPVHLMQTETLNNIQNTGNQEEHIIITQADERPQIPQNTQEKLEEYFSKAFTEFKNIYPTCRPPIPKQKQTKKLSNAVQYLNHKLIPRFISHNSDFASMQLVIYCGAYAAAKYNGSKIIDIQVNNKTNPQKPFWQVKLEKRIEELRTHIGRLTEYNNGIRSNYLIKKVENIKQKYKIHAQHETHNTDIIHFIDTLKQKLNALASRLRRYKKTTLRKTQNKLFDNNEKTFYRTLNSPTNTSNNNNSLPTKEELQGFWSNLWSNSAEHNNNSSWIQEDKRRLIGLPHMQFENISVDLIKRVIHRTHNWKATGSDKIHNYWYKKFTSLHPLLHTHINNFIISPDTIPHYITHGITYMLPKDNTNIRDPSKYRPITCLQNIYKIITSCISEIIYTHIDQNNILTEEQKGCRKNRQGCKEQLTIDAVALKQAYAKKRNIYTMYIDYQKAYDSVPHSWLLYILKHYNVHPSIINFLESVMKTWKTKLKLNSSIGSIDTDLLDIKRGIFQGDALSPLWFCLALNPLSKLLSISNKGFKIKYDKKQHTLSHLMYMDDIKLFGSTLKEIHTLADITQTFSSDISMQFGIDKCKIQSIKRGIVEQNTYNIDTLDLIIQPLDQAEGYKYLGYQQSRQIHQKETKITLTDKFKKRLHKILNTQLNARNTIKAINSYAIPVLTYSFGIIQWTKTELLNLQRMINTTMTKYRKHHPKACTQRQTLPRLEGGRSLIDIPNLHNRQINSLRNYFHGRAEHSTIHEAIVQADNKLSPLNLRDHSLHRDEVTVEQKINIWTQKSLHGRHRLDLSNPDVDKTSSNAWLRRGELFPETEGFMIAIQDQVIETKNYRKHIIKDPRLLNDMCRHCHSNSETIQHITGACRSIVQTDYKHRHDQVGAIIHQYLAYKCKLITEKTNYYKYSPAAVLESQKFRLYWDRTILTDKTVHYNRPDITFHDKENKIVYLIDISIPNTHNLHSTYINKIAKYTDLTIELKTQWKVNTVKTVPIIISSTGIIPKTLHTSLEVLKIHPLTFLTMQKAVVLNTCRIVRKFLSIDT

SEQ ID NO: 23776 - protein, 757 aa, Grais stigmaticus
MAFENISLDLIKRVIHRTHNWKATGSDKIHNYWYKKFTCMHLLLQTHINKFISSPNTIPYYITHGITYMLPKDNNHLDDPSKYRPITCLQNIYKIITSCISEIIYTHIDQNNILTEEQKGCRKNRQGCKEQLTIDAVTLKQAYAKKRSIYTMYIDYQKAYDSVPHSWLLYILKHYNVHPTIVNFLEAVMNTWKTKLKLHSSLGTIETDFLNIRRGIFQGDALSPLWFCLALNPLSKQLNNCNKGFKIKYDKKQHTISHLMYMDDIKLFGSTLKEIHTLAKTTQIFSSDICMQFGIDKCKIQSVKRGIIEQNTYNIVNTDQIIQPVDQSHGYKYLGYQQSRQIHQKETKITLTNNFKSRLHKILNTQLNARNTIKAINTFAIPILTYSFGIIKWTQTDLQNLQRIINTTMSKYRKHHPRSCIQRQTLPRLEGGRSVIDIKNLHNRLINSLRSYFHQRAEHSPIHKAIVQADNKLTPLNLREHNLNLDEITTEQKINTWTQKSLHGRHLLDLNNPSVDKAASNAWLKRGELFPETEGFMVAIQDQVIDTKNYRKHIIRDPRVVNDMCRHCHSSSETIQHITGSCRSIVQTDYKHRHDQVGAIIHQYIAHKCKLITEKTNYYKYSPAVVLESQKFKLYWDRTIITDRTVHYNRPDITFHDKENKIVYLIDIAIPNTHNLQTTYTNKLTKYADLTIALKTQWKVNTVKTVPIVISSTGIIPKTLQTSLSILNIHPLTYLTMQKAVILNTCRIVRKFLSIDT

SEQ ID NO: 23777 - protein, 1386 aa, Spathilepia clonius
MRLRSRIIPQAGTCEGESRPGPSGLGCPTYSGGGTASHTSHNDVVADKAHITSHPSSPISSTHSLFSSPNSSSYSYQTDQSSSASQTTTPLFNDSTEEVYHVSPILSPSNSNTNNPPQSSLSSSSSFSLSDNVVKEAPAKNPSSITDTKRARKTWSTEMNTFIWRTYLTITNIESCTRGYLDELHFQFRSKFPHMDVSKQRVGDQRRAIVRNKLLSQQLLDNIKEEVRAKLRTSKPLAHSHTNTINTQTHPTEKRRMVWSNDINEAIIKIYYEVTEAESNLTTYRKRLYDKFIEHFPHLSNLSEQRIADQRRAIINNKMLPENRITQIKQEVAMKLSEDAILNNQTLDSCQRNSLNTINNTNNQVTVGTVTHAIISITPNESSQVEEYFSEALNKFKHTDPTSRPPIPKQRLTKKLSSALQHLNDILIPKIISDNTDFETVQLIIYCSAYTAAKHNGSKIDEQIKTQFEKRIPAWQVKLQKRIEELRVHIGRITEFIKGNHSNSLVKKVENIKHKYKIHSQHENPNTDLSHFLDTLKQKLNALASRLRRYKKTTLRKTQNKLFNNNEKAFYRNFTKQINTSSTSDTQNPLITKDALETFWSNLWSEPIEHKCNSSWIKEDKYRLTNLPEMQFENISLDLMRRVIGRLHNWKATGSDKIHNYWYKKLTSIHTLLHIHINKFIKSPNSLPHYITQGITYMLPKDMTDMSNPTKYRPITCLQNIYKIITSCISEIIYEYTDQNNLLAEEQKGCRKNRQGCKEQLTIDAVAMKQAYANKRSIYTMYIDYQKAFDSVPHSWLLYILKHYNIHPTIVLFLESVMNTWKTKIKLHTITDTIETDLLSIKRGIFQGDALSPLWFCLALNPLSQLLNNSNKGFQIKYEEEQHTISHLMYMDDIKLFGSTLNEIHSLVEITQQYSSDICMMFGIEKCKIQSVHNGLIEHNSYITNSEDLIQPIDQSEGYKYLGYQQSRLIHHKETKSTLIEKFKSRLHKILNTELSARNTIKAINTYAIPYILTYSFGIIQWTQSDLQKLQRIINTTMTKYRKHHPRACIQRQTLSRQEGGRNLIDIRNLHNRQVKSLRNYFYNRSHTSQVHLATIQADKKLTPLNLKDHNRHIYEITPEQKINTWVQKSLHGRHRLDLSNPYVDKAASNEWLRRGELFSETEGFMIAIQDQVIDTRNYRKHIIKDPNLVNDLCRHCHSSSETIQHITGACRCIVQTDYKHRHDQVAAIIHQYLALKYKLITEKTNYYKYSPAVILESPKFKLYWDRTIITDKTVHHNRPDITLHDKERKAVYLIDIAIPNTNNLQTTYTNKLTKYTDLTIELKTQWKVDTVKTIPIVISATGIIPKTLHSSLKTLHIHPLTFLTLQKAVILNTCRIVRKFLSIDT

SEQ ID NO: 23778 - protein, 757 aa, Gorgythion begga
MQFENVSLDLIKRVIARTHNWKATGSDKIHNYWYKKLTSVHPYLQSHINNFIKSANKIPHYITQGVTYMLPKDNTNLHDPAKYRPITCLQTIYKIITSCICEIIYTHVERNNILSEEQKGCRRNRQGCKEQLTIDAVALKQAYTKKRSIYTMYIDYQKAYDSVPHSWLLYILKHYNIHPTIVDFLGSLMKTWKTQLKLYSNSETIETDLIHIKRGIFQGDGLSPLWFCLALNPLSKLLNNNNLGFKLKYEKKHHTISHLMYMDDIKLFGNTLDEIYTLADITHLFSVNICMQFGIDKCKIQSIKSGRVLQESYPVNSSNQIIQPVDEIEGYKYLGYQQSRQIHQKETKSTLTNNFKNRLHKILNTQLNARHTIKAINTYAIPLLTYSFGIIKWSQTELQKLQRLINTTMTLYRKHHPRSCVQRLTLPRKDGGRGIVDIQNLHNRLVNSLRTYFYNRAGNSEVHKAVVQADNKLTPLNLKHQTITLTENSNEQKLNFWTQKSLHGRHRLDLNNPNVDKVASNAWLRQGELFPETEGFMISIQDQVIDTKNYRKHIIRDPTLVTDNCRHCHSSSETIQHITGACRTIVQTDYKHRHDQVGAIIHQYLAFKCKLINEKTNYYKYVPAVVLESPKFRLYWDRTIITDKTVHFNRPDITLHDKENKIVYLIDIAIPNTHNLQTTYTNKLTKYTDLTIELKTQWKVNTVKTIPIVISSTGIIPHTLHTSLKMLNIHPLTYLTIQKAVILNTCRIVRKFLSIDT

SEQ ID NO: 23779 - protein, 1346 aa, Chiomara georgina
MQKQTPKISSKYNLRSRSKDDKNTGSMRTLSNEEPNLNNQAMQRVSESDNSLNSISVSTSPISKTSTCSCTTNFPSPLTNTSSLLDNVVEEASAHCPLPVTSSKCTRKKWNTEMNIFIWRTYLIITKLEVSTRGHLDELYVKFISKFPFMDVSKQRVGDQRRTIIRNKLLPQKTLDDIKEEVRLLLQNATTEHSHLNQTNNVRSQTLTTDKRRMVWKTEMNIAIIKIYFEVTELETNITTYRTKLYERFVNQYPNLAHLTEQRIADQRRVIINNKMLSESKILEIRQEVAHMLSNVNLDTQTHKDTNVQESSNSTHNVAHSIDTDNTIILESDRVTMTQESKILLEDYFSAALKQFEHTDPTLRPTIPKQKCSKKLNSATQYLNNKIIPKFLFPGAEFEHVHLVIYCAAYSIAKFNSTKFLDLPVNNYNKEQKPLWQINLESRIEKLRVNIGRLTEFNKGIRSKWLVKKVEIIKQKYKIHSQHETPNTDTAHFLDTLKQKLNTLASRLRRYKKTTLRKSQNKLFCNNEKTFYRTLAHSNTQNTSRNSNTVPKKEELVEFWSNIWSKSVEHDHNSSWIAEDKNSLENLPHMRFENISLDLMKRVIARTHNWKATGSDKIHNYWYKKLTSIHPYLHNHINNFIKSPNTIPHYITHGVTYMLPKNNNEVHDPAQYRPITCLQTIYKIITSCISEIIYTHLEKNNILSEEQKGCRKNRQGCKEQLIIDAVALKQAYMKKSSIYTMYIDYQKAYDSIPHSWLLYILKHYNIHPTIVEFLESVMKTWKTKLKLYSNVEPIETEFIHIKRGIFQGDGLSPLWFCLALNPLSKLLNNSKSGFKLKYENNHHTISHLMYMDDIKLFGNTLKEIYTLADITHLFSENICMQFGIDKCKIQSVKCGKVVQRSYNVNSTNQIIQPVDEIEGYKYLGYQQSRQIHQKETKSTLTNNFKSRLHKILNTQLNARHTVKAINTYAIPLLTYSFGIIKWSQTELQKLQRIINTTMTLYRKHHPRSCVQRLTLPRKDGGRGIVDIQNLHNRLVNSLRTYFHNRAENSDLHQAVVQADNKLTPLNLKNQTVTFMENTNEQKLNIWTQKSLHGRHRLDLNNPNVDRVASNEWLRQGELFPETEGFMISIQDQVIDTKNYRKHIIRDSTLVTDSCRHCHSSSETIQHITGACRTIVQTDYKHRHDQVGAIIHQYLALKCKLINEKTNYYKYVPAVVLESQKFRLYWDRTIITDKTVHFNRPDITLHDKENKIVYLIDIAIPNTHNLQTTYTNKLTKYTDLTIELKTQWKVNTVKTIPIVISTTGIIPQTLHTSLKSLNIHPLTYRTIQKAVILNTCRIVRKFLSIDT

SEQ ID NO: 23780 - protein, 813 aa, Udranomia orcinus
MFYRTLSQNSNISNINTTPPTKDNLIQFWSSVWCKPVEHLQSSWIHEDKNRLKDLPEMPFEDIDLNLLKRVIGRTHNWKATGSDKIHNFWIKKFTSTHITLLSHINSFIKTPYTLPYYITQGITYMIPKDSTDLSNPAKYRPITCLQNIYKIITSCISDILYEHINKYNILAEEQKGSRKNTQGCKEQLTIDAVSLKHGFEKKRNIYTMYIDYQKAFDSVPHSWLIYILKHYNINPVLIHFLESAMSNWKTELKLYSSTGNIETGLLAIKRGIFQGDALSPLWFCLALNPLSNLLNSSKKGYKITYNNKHHTISHLIYMDDIKLFGSTLNDINTLADITHSFTTDICMQFGIDKCKIQSVRKGKIEENSYRLSNGDQIDPVDQMNGYKYLGYQQSRQIHQKDTKAKLTENFKTRLHKILNSQLNARNTIKAINTYAIPILTYSFGIIKWTQTDIQKLQRIINTMMTKYRKHHPRACVQRQTLSRKEGGRSLIDIQHLHNRQLIGLRTYFYNRAQNSSVHQAIVHADKKYTPLNLCDSSMKLVEISVEEKINTWTQKTLHGRHRLDLNNPNIDKAASNAWLRRGELFPETEGFMIAIQDQVIDTRNYKKHIIRDQSLITDLCRHCHSSSETIQHITGACRSIVQTDYKHRHDQIAAVIHQYLAYKYKLISETNSYYKYSPSIILESPTIKLYWDRTIITDKTVHHNRPDITLHDKEKKIVYLIDIAIPNTHNIQKTYTEKLTKYTDLTIELKSQWRVDSVRTIPIVISSTGIVPKTLHTSLKELQIHPLTYLTIQKAVILNTCRIVRKFLSIET

SEQ ID NO: 23781 - protein, 1230 aa, Udranomia kikkawai
MNIFIWRTYLIITEMESCTRGYLDQLYHKFCEKYPQMDVSKQRVGDQRRTIIRSKLLSQQVLDKIKEEVTDYLKNSNQSLHQNNNMFNNQTTHRRRMIWTTQMNEAIIQIYYEITHLESDLTSYRKKLFDKFIDRFPHLSHLTEQRVADQRRVIICNKMLSETRINEIQQEVALKLNIENIVGTHQTQFHSHNESLIDINNRQNIQTTQIQQDVLQHDAEERPIAVDTQTQLQTYFSDALKTYKNTQPTLRPSLPKQQVSKKLFKAVQYLNSNLIPNALSSDTDFDTLHLILYCAAYAVVKYNGSKIPDTQSTTKLHLQVPTWQVKLEKRINDLRKNIGRLTEYNKGNHNKKLEKKVEDIKRKYRVHSQHENPNTELTHFLDTLKQKLNALANRLRRYKKTTLRKTQNKLFHNNEKMFYRTLTQNTNTLNVNTTPPTKDNLMQFWSTVWCKPVEHKQSSWIQEDKNRLKDLSEMPFEAIDIDLLKRVLDRSHNWKATGSDKIHNFWIKKFTSTHTILLNHINHFIKTPHTLPHYITQGITYMIPKDSTDFSNPAKYRPITCLQNIYKLITSCISEIIYIHIDKNNILAEEQKGSRKNRQGCKEQLTIDAVSLKQSFEKKRDIYTMYIDYQKAFDSVPHSWLIYILKHYKISPTIVNFLKSAMSNWKTELKLCSRTGNIETDLLTIKRGIFQGDALSPLWFCLALNPLSSLLNNSNKGYKITYNNNKQHTISHLMYMDDIKLFGSTLNDINTLADITHSFTTDICMEFGIDKCKIQSVCKGTIQDNSYTLSNGDQIDPVDQLNGYKYLGYQQSRQIHQKDTKAKLIENFKTRLHKILNSHLNARNTIKAINTYAIPILTYSFGIIKWTQTDLHKLQRIINTMMTKYRKHHPRACVQRQTLSRKEGGRSLIDIQHLHNRQLIALRTYFYNRAQHSPIHQAIVHADKKYTPLNLSNSTMKLAEISIEEKINTWTQKTLHGRHRLDLNNPNIDKAASNAWLRRGELFPETEGFMIAIQDQVIETRNYKKHIIRDQSLITDLCRHCHSSSETIQHITGACRSIVQTDYKHRHDQIAAVIHQYLAYKYKLISETNSYYKYSPSVILESPTIKLYWDRTIITDKTVHYNRPDITLHDKEKKIVYLIDIAIPNTHNIQKTYTDKLTKYADLTIELKSQWRVDTVRTVPIVISSTGIVPKSLHTSLKELQIHPLTYLTIQKAVILNTCRIVRKFLSIET

SEQ ID NO: 23782 - protein, 1212 aa, Telemiades fides
MDVSKQRLGDQRRTIIRNKLLPQQLLDDIKEEVRLYLQNKLLHTQTDTTNTQTLVTDKRRMIWTTKMNEVIIQTYYEVTELESNLTTYRKKLFDKFIEHFPQLSHLTEQRIADQRRVIIHNKLLSETRLNQIREKVALILSKKNVATPDIHFNTHTDHLTEINDMQNTQTLHTQLQVTEHRVENTSIPLETQNQINEYFSEALQKFKNSEPTLRPPLPKQKISKKLNIAVQYLNNTVTPNIINSETDFETLQLIIYCAAYSAVKFNGSKIRDTCINIKFNERIPGWQINLEKRIGELRAHIGRLTEYSKGVRSKRLQNKVENIKRKYKLHSQHENPNTELEHFLDTLKQKLNTLANRLRRYKKTTLRKSQNNIFHNNEKMFYRSLNQPTSGTSSNRKTLPTKAELGEFWSKLWSKSIQHTDANWIHEDKNNLQHLKNMPFENISLDLLKRVIAKSHNWKATGSDKIHNYWYKKLTSTHTVLHTHINNFIKFPNTLPHYVTQGITYMLPKHAADVSDPANYRPITCLQNIYKIITSCISELIYTHVEANNILAEEQKGCRRNMQGCKEQLTIDAVISKQAYEKKRNIYTMYIDYQKAFDSVPHSWLLYILEHYNIHPTIIHFLKSAMSNWKTILKLHSEAGTIETDLLAVQNGIFQGDSLSPLWFCLALNPLSTLLNNCKKGFKLKFDNKQNTISHLIYMDDIKLFGSTLNDINSLMNITQSFSTDICMQFGIDKCKMQSIRRGVVEQNSFSLNNLDIIDPLDEVTGYKYLGYQQSRVIHQKQTRKTLTEKFKTRLHQILNTHLNARNIVKAINTYAISILTYSFGIIQWSRTDIQKLQRLINTTMTKYRKHHPRACVQRLTLTRQEGGRSLVDIQNLYNRQLTSLRTYFYNRAQQSVIHQAIVQADKKYTPLNLSNKNIDLPNITTDQKINTWVQKALHGRHRLDLTNQNVDKAASNAWLRRGELFPETEGFMIAIQDQVIETRNYRKHIIRDKSLVTDQCRHCRSSSETIQHITGACRSIVQTDYKHRHDQVAAILHQYLAYKYKLISEKTSYYKYSPAVILESQKFKLYWDRTILTDKTVHHNRPDITLHDKENKTVYLIDVAIPNTHNIHTTYVDKLTKYTDLTIELKTQWKVNTVRTIPIIISSTGVVPKTLHTSLEALQIHPLTFLTIQKAVILNTCRIVRKFLSIETYFVLLFFLLSSRLAKSPRN

SEQ ID NO: 23783 - protein, 1360 aa, Apyrrothrix aesculapus
MRLRSRNTLPQAGTRNGESRLEATTSGSPTYSGGGTVSQESAQHNTVAGRKTKLSTSQSYSSASPETVGGSSTDLNGSITSKSSSNSTSQFSPSLNNMYLSDNVVQEADADNLAPVTDRKCARKKWSKEMNIFIWRTYLKTTQLESSTKGHLDQLYAQFHHYFPHMDVSKQRIGDQRRAIVRNKLLPQKMLDEIKEEVRTELKNSNQAPILILNTQTNSTNKRRMTWTTELNEAIIRIYLEVTELESDLTTYRKKMYNKFIETFPYLSHITEQRIADQRRVIISNKMLPETRIEEIRQEVAFKLNKHTLNISPQSQTQLHDQTVHSITVCYTQDTTQKCLTVLHDEQEKTLVPKNEENQIENIFSQALDIFKPIHPTFRPSLPKQKVTKKLINAIKYLNLTIIPKFVFSDTDFKTVQLIIYCAAYTAVTYNGGKVNHEQTKTTYSDKIPAWQINLEKRIEQLRIHIGRLTEYNKGIRSKALERKVANIKRKYKIHSQHENPNTDLSHFLDTLKQKLNALANRLRRYKNTTLRKTQNKLFQNNEKTFYRSLTQQTSDNHMNSTSTSHPNKDDFTTFWSKLWSDSVEHKESQWIKEDKDRLIDLVEMHFENISLDLLRRVITRTHNWKATGSDKIHNYWYKRFTSIHSILHTHINNFIKSPNTIPDYITQGITYMIPKDTTSLNNPAKYRPITCLQNIYKIITSCISELIYNHAEQNNILAEEQKGCRKNRQGCKEQLIIDTTIIKQAYIKKRNIFTMYIDYQKAFDSVPHSWLLYILKHYNIHPTIITFLKTAMSNWKTEIKLHSNVGTIQTDVIKINRGIFQGDALSPLWFCLALNPLSGLLTNSKKGFNIRYNNTQHTMSHLMYMDDIKLFGSSLDDVYTLANITEKFSSDIGMQFGIDKCKIQSVRKGVIESNSYTLENEEIIGPINQTIGYKYLGYQQSRQIHQKQTKSTLTQNFKYRLHKILNTQLNARNTIKAINTFAIPVLTYSFGIIQWTKTDIQKLQRLINTTMTKYRKHHPRACTQRLSLPRQEGGRSLIDIQNLHNRQITALRLYFYNRALQSQIHQAIVQADTKLTPLNLKDTTINLPQNTTDQKINIWTAKSLHGRHRKDLSKSIVDKNASNVWLKRGELFPETEAFMTAIQDQVIDTRNYRKHIIRDPSLASDLCRHCHSTSETIQHITGACKSIVQSDYKHRHDQVAAIIHQYLGIKYKLITEKTNYYKYTPSTTLENKQFKLYWDRTIITDKTVHHNRPDITLHDKANKKVYLVDIAVPNTHNLQTAYTEKLAKYIDLSIEIKSQWKVNTVRTIPIIISSTGVIPKSLHDSLKTLHIHPLTFITIQKAVILNTCRIVRKFLSIES

SEQ ID NO: 23784 - protein, 1253 aa, Agara belti
MHLRSRNTLPQAGTSSGESRPDPTSSGCPTYSGGGKVSLEPAQSKTVAGRTSDASTRMQSHLPAKPMISGDPRTDKAEYATPTIASSFNSVSQYINPVVKSLHLSDNVVQEADADNLAPIADKKCARKKWSTEMNIFIWRTYLKITQLESSTKGYLDELHDQFHHKFPHMNASKQRLGDQRRAIVRSNLLPQTLLHNITEEVRTELYNTNQISKAVINTQTNITDRRRMIWTTHLNETIIRIYLEVTELESNLTTYRKKLHEKFIESFPHLSHITEQRIADQRRAIINNKMLLETRIIEIRQEVALKLNMHNVHTDSQTHTQHDQTEQLTNVCCTEDATQEKAVLPCNDQDEGFIPENEKIVLEKLFFEALETFRNFEPTVRPLLPKQKVTKKLINAVKYLNLTLIPKILFSNTNFETVQLIIYCAAYSAVIYNGGKVNYEQSKGTHGYRVPAWQINLEKRIEKLRIHIGRLTEYNKGIRNKRLEKKVADIKRRYRIHSQHEQPNTDLTHFLDTLKQKLNALAGRLRRYKLTTLRKTQNKHFQNNEKTFYRSLSQPSSSNQSIPTNASSPNKDDFAKFWSNIWSETVEHNEGEWIQEDKARLEGVQEMQFKEISLELLQRVISRTHNWKATGSDKIHNYWYKKFTNTHPILHTHINNFIKSPNTVPHYVTQGITYMIPKDATAMSDPAKYRPITCLQNIYKIITSCISELIYTHAEQNNILAEEQKGCRKNTQGCKEQLVIDTVMLKQAYTKKRNIFTMYIDYQKAFDSVPHSWLIYILKHYNVHPEIITFLKTAMSNWKTELKIHGTPGATETDLININRGIFQGDALSPLWFCLALNPLSILLNNSRKGFNIKYNNTQHTISHLMYMDDIKLFGSSLNQINTLANITETFSNDIHMQFGIDKCKILSVRKGVLEQNSYTLNNEEVIRPVDQTIGYKYLGYQQSRQIHQKQTKITLTEHFKSRLHKILNTQLNARNTVKAINTFAIPVLTYSFGIVYWTQTDIQKLQRLINTTMTKYRKHHPRACIQRLSLSRQEGGRSLIDIQNLHNRQITALRTYFHNRALHTQIHQATVQADTKLTPLNLRDTTINLPQNTTDQKIHIWTQKSLHGRHRTDLTNTNVDKNASNAWLKRGELFPETEAFMIAIQDQVIDTRNYRKHIIKDSTLVSDMCRHCHSSSETIQHITGACRSIVQTDYKHRHDQVAAIIHQYLGLKYKLITEKTNYYKYNPATALETKLFKLYWDRTIITDKTIH

SEQ ID NO: 23785 - protein, 1412 aa, Spathilepia clonius
MCIMPCVSYVYNNNNNNKPLRNLTPRPARPPLPREGRTLAAASYKMPMTNGALVLTKYAMHLRSRQLPQAGTREGESRPEPSSSGCPTYSGGGNASHMTTQSRAVVVDNSFINSHPSSPISSIDITSSPMSSVESYSTKSVASSSSRNSPLSDNVVLEAYAENPSPITDSKRARKKWSKEMNIFIWRTYLEITQIESCTRGYLDELYSQFCKKFPHMDVSKQRLGDQRRTITRNKLLPQQLLDHIKEDVILNIHRTNQSSQAQTNSLNTQTDISGKRRMIWTTKMNEVIIETYYEVTELETNLTAYRKKLFDKFVEHFPHLSHLTEQRVADQRRVIMYNKMLPETKIDQIRQEVSCKLYKENVGRNSQTHSYIHTEPLIHENNTQNIQTKQSQLQIPEREKERIQITSQHQIEEYFSEALQIFKNSEPTLRPSLPKQKNSKKLTSAVQYLNSILIPNVVSNETEFETLQLVIYCAAYAAVKYNGSKIRDIHIDVHYNTQIPKWQLLLEERIGKLRVHIGRLTEYNNGVRSKGLQRKVEEIKRKYKLHSQHENPNTELPHFLDTLKQKLNALASRLRRYKKTTLRKTQNKLFHNNEKMFYRTLTQNINNPLETKNTPILPSKNDLTDFWSNIWSKSQQHKDASWIQKDKDSLIDLPEMPFENIELDLLKRVIARSHNWKATGSDKIHNYWYKKFTCTHSLLHTHINNFIKSPNTLPHYITQGITYMLPKDLDDMSNPAKYRPITCLQNIYKIITSCISEIIYTHAEQNNILAEEQKGCRKNRQGCKEQLTIDAVISKQAFEKKRNIYTMYIDFQKAFDSIPHSWLLYTLKHYNIHPIIIHFLKSAMSNWKTQLKLNSGAGTITSELLAVSRGIFQGDSLSPLWFCLALNPLSRLLNSSKKGFKIKYDNKQHTISHLIYMDDIKLYASTLNEINSLANITQTFSTDICMQFGIDKCKIQSVRRGVIEDNSYSLDTHNIVDPIDHIHGYKYLGFQQSRQIHQKQTKATLTENFKTRLHKILNTQLNARNTIKAINTYAISILTYSFGIIQWTRTDIQKLQRIINTTMTKYRKHHPRACVQRLTLSRQEGGRSLIDIQNLHNRQLTTLRTYFHNRAQDSLIHQAIVQADDKYTPLRLRDSTINLPIVTVEQKLHTWLQKSLHGRHRTDLNNPIVDKDASNAWLVRGELFPETEGFMIAIQDQVIDTKNYRKHIIRDKSLITDLCRHCHSSSETIQHITGACRSIVQTDYKHRHDQVAAVIHQYLAYKYKLIPEKTTYYKYTPQIIFESSKIKLYWDRTILTDKTIHYNRPDITLHDKENKTVYLIDIAIPNTHNIQSTYTEKLTKYTDLMIELKTQWKVNTVRTIPIIISSTGVVPKSLHTSLKTIEIHPLTFLTIQKAVILNTCRIVRKFLSMDT

SEQ ID NO: 23786 - protein, 1360 aa, Jonaspyge jonas
MRLRSRNTLPQAGTRNGESRLEATSSGSPTYSGGGAVSQESAQHNTVAGRKTKLSTSQSYSSASPETVGRSSTDMDGSVTSKTSSNSTSQFSPLLNNMYLSDNVVQEADADNLAPVTDRKCARKKWSKEMNIFIWRTYLKITQLESSTKGHLDQLYAQFHHYFPHMDVSKQRIGDQRRAIVRNKLLPQTTLDEIKEEVRTELKNSNQAPILILNTQKNSTNKRRMTWTTELNEAIIRIYLEVTELESDLTTYRKKMYNKFIATFPYLSHITEQRIADQRRVIITNKMLLETRIEEIRQEVAFKLNKHTVNTSPQSQTQLHDQTVHSINVCYAQDTTQQRLTVLHDEQEKILVPENEENQIENIFSQALEIFKTIHPTFRPSLPKQKVTKKLINAIKYLNLTIIPKYVFSDSDFKTVQLVIYCAAYTAVIYNGGKVNHEQTKTTYSDKIPAWQINLEKRIEQLRIHIGRLTEYNKGIRSKALERKVANIKRRYKIHSQHENPNTDLSHFLDTLKQKLNALANRLRRYKNTTLRKTQNKLFQNNEKTFYRSLTQQTSDNNMNSTSTSHPNKDDFTTFWSKLWSDTVEHKESHWIKEDKDRLIDLPEMHFENISLDLLRRVITRTHNWKATGSDKIHNYWYKRFTSIHSILHTHINNFIKSPNTIPHYITQGITYMIPKDKTSLNNPAKYRPITCLQNIYKIITSCISELIYNHAEQNNILAEEQKGCRKNRQGCKEQLIIDTTILKQAYTKKRNIFTMYIDYQKAFDSVPHSWLLYILKHYNIHPTIITFLKTAMSNWKTEIKVHSNVGTIETDVIKINRGIFQGDALSPLWFCLALNPLSGLLNNSKKGFNIRYNNTQHTISHLMYMDDIKLFGSSLDDVYTLANITETFSNDINMQFGIDKCKIQSVRKGVIESNSYTLENEEIIGPIDQTIGYKYLGYQQSRQIHQKQTKSTLTQNFKYRLHKILNTQLNARNTIKAINTFAIPVLTYSFGIIQWTQTDIQKLQRLINTTMTKYRKHHPRACTQRLSLPRLEGGRSLIDIQNLHNRQITALRSYFYNRALQSQIHQAIVQADTKLTPLNLKDTTINLPQNTTDQKINIWTDKSLHGRHRKDLSNSIVDKNASNAWLKRGELFPETEAFMIAIQDQVIDTRNYRKHIIRDSSLASDLCRHCHSSSETIQHITGACKSLVQSDYKHRHDQVAAIIHQYLGIKYKLITEKTNYYKYTPSTTLENKQFKLYWDRTIITDKTVHHNRSDIRLHDKANKKVYLVDIAAANTHNLQTAYTEKLAKYIDLSIETKSQSKVNTVTTTPIIISSTGFIPKSLRDSLKTLHIHPLTFITMQKALILNTCRILRKFLSIES

SEQ ID NO: 23787 - protein, 817 aa, Cecropterus dorantes
MEKLRAHIGRLTEYNKGIRSKRLQNKVEEIKRKYKIHSQHENTNTEIAHFLDTLKQKLNALASRLRRYKKTTQRKIQNKLFHNNEKMFYRTLTHHTNNSSVPNKTPNLPSKSDLTEFWSSIWSKSQQHTDASWIRKDKDSLKDLPEMPFENINLDLLKRVIARSHNWKAPGSDKIHNYWYKKFTYIHPLLQTHINNFIKSPNTLPQYITQGITYMIPKDTADMSNPAKYRPITCLQNIYKIITSCLSEIIHIHAERNNILDEAQKGCRKNTQGCKEQLTIDAVISKQALEKKRNIYTMYIDFQKAFDSIPHSWLLYILEHYNIHPTIIFFLKSAMNNWKTQLKLNSRSGAVESELLTINRGIFQGDSLSPLWFCLALNPLSRLLNNSKKGFKIKYDNKQHTISHLVYMDDIKLYGSTLNEINTLTNITQSFSTDICMQFGIDKCKMQSVKRGILEDNSYSLDTLNLIDPIDHINGYKYLGYQQSRQIHQKQTKATLTENFKTRLHKILNSQLNARNTIKAINSYAISILTYSFGIIQWTRTDIQKLQRIINTTLTKYRKHHPRACIQRLTLSRQEGGRSLIDIQSLHNRQLTALRTYFYNRAQHSPIHQAIVQADNKYTPLKLKDSTINLPTVTTEQKIQTWLQKSLHGRHRIDLNNPAVDKDASNAWLRRGELFPETEGFMIAIQDQVIDTRNYRKHIIRDKSLVTDICRHCHSSSETIQHITGACRSIVQTDYKHRHDQVAAIIHQYLAYKYKLISEKTSYYKYTPKVILESPKVKLYWDRTIITDKTIHYNRPDITLHDKENKIVYLIDIYSYP

SEQ ID NO: 23788 - protein, 1364 aa, Passova gellias
MHLRSRNTLPQAGTSNGESRPESTSSGCPAYSGGGKVSLEPAQPQTVAGRTSDASTRMQSHLPAKPMISEDPRVDKANYATSTIASSSNSLSQFTTPVAKSLHLSDNVVQEADADYLAPIADDKKCARKKWSAEMNIFIWRTYLKITLLESSTKGYLDELHNQFHHKFPHMNASKQRLGDQRRAIVRSKLLPQTLLHNIREEVRTELYNTNQIPKDAINTQTNITDRRRMIWTTHLNEAIIRIYLEVTELESNLTTYRKKLHEKFIEAFPHLSHITEQRIADQRRAIINNKMLLEARITEIRQEVALKLNVQNAHTDSQTHTQNDQTEQLSNVGCTEDVTQEKAVLPCKDQDAGFMPENEKIVLENLFSESLETFRNFEPTLRPLLPKQKVTKKLTNAAKYLNLTLIPKILFSDTNFETVQLIIYCAAYSAVIYNGGKVNCEQSTGAHGYKVPAWQISLEKRIEKLRIHIGRLTEYNKGVRNKRLEKKVADVKRKYRIHSKHEQPNTDLTHFLDTLKQKLNALAGRLRRYKMTTLRKTQNKHFQNNEKTFYRSLTQPINSNHSNSTNTSTPNKEDFTKFWSNIWSETVEHNEGEWIREDKARLEGMQEMHFKEISLELLQRVISRTHNWKATGSDKIHNYWYKKFTNTHPILHTHINNFIKAPNTVPHYVTQGITYMIPKDATAMSNPAKYRPITCLQNIYKIITSCISELIYTHAEQNNILAEEQKGCRRDRQGCKEQLVIDTVMLKQAYTKKRNIFTMYIDYQKAFDSVPHSWLIYILKHYNVHPIIITFLKTAMSNWKTELKIHGTPGATETDLIKINRGIFQGDALSPLWFCLALNPLSSLLNNSRKGFNIKYNNTQHTISHLMYMDDIKLFGSSLNQINTLANITETFSNDIHMQFGIDKCKIQSVRKGVVEQNSYTLNNEEVIRPVDQTLGYKYLGYQQSRQIHQKQTKTTLTEHFKSRLHKILNTQLNARNTIKAINTFAIPVLTYSFGIVNWTQTDIQKLQRLINTTMTKYRKHHPRACIQRLSLSRQEGGRSLTDIQNLHNRQITALRTYFHNRALHSQIHQATVQADTKLTPLNLRDTTINLPQNTTEQKIHIWTQKSLHGRHRTDLTNTIVDKNASNAWLKRGELFPETEAFMIAIQDQVIDTRNYRKHIIKDSTLVSDMCRHCHSSSETIQHITGACRSIVQTDYKHRHDQVAAIIHQYLGLKYKLITEKTNYYKYTPATALETKQFRLYWDRTIITDKTIHFNRPDITLHDKTNKIVYLIDITIPNTHNLQTSFTEKLSKYTDLSIALKSQWKVNTVRTIPIVISSTGIIPKSLHASLKTLQIHPLTFLTIQKAVILNTCRIVRKFLSIDT

SEQ ID NO: 23789 - protein, 1362 aa, Piruna aea
MRLRSRNTLPQAGTRDGESRPETTSSGSPTYSGGGTVSLEPAQQKTVAGRRTSTSTSTQVYPLAAKEVSEDFSTNIADYPKSPLSTSSSTSSNSVSQFSSPSTITSSLSDNVAQEADADILAPITDKKRARKKWSIEMNVFIWRTYLKVTHLESSIRGHLDELHLQFHQKFPHMNASKQRVGDQRRAIVRNKLLPNNLLDDIREEVRIELTHANRAPIVDTQANTTNKRRMIWTPQLNEAILRIYLEVTELESNLTTYRKKLYDKFIEAFPHLSHITEQRIADQKRVIINNKMILQTKIEEIRHEVAVKLNQNCIGINQTQSQNRAQNFNNVGCTQDGPSHQDLPSPYTQKEIVYISEHEKAQIEKLFHEALEQFKNIHPTLRPHIPKQKITRKLTNAVEYINTTVLPKLLTNETDFETVQLAIYSGAYSVVTYNGVTVKNQQTKTTRTIPKWQLNLENRIEQLRIHIGRLTEYNKGIRSKRLDRKIENIKRRYKIHSQHENPNTDLSHFLDTLKQKLNALANRLRRYKKTTLRKTQNRLFQNNEKMFYRTLSQATNTNSPAPSESLIPTKDDLTQFWSKLWSESVVHKDSEWIREDKSRLTNLPEMQFENISLDLLKRVIAKTHNWKATGSDKIHNYWYKKFTSVHKTLITHINNFIKSPNTIPHYVTQGVTYMIPKDSTATNNPAKYRPITCLQNIYKIITSCISDIIYTYMEQNNILAEEQKGCRKNSQGCKEQLIIDAVVSKQAFTKKRNIFTMYIDYQKAFDSVPHSWLLYILEHYNVHPQIVTFLKSVMSTWKTELRLYGNAGSVETDLIKINRGIFQGDSLSPLWFCLALNPLSNLLNSSKKGFNVKYNNTHHTISHLMYMDDIKLFGSSLNQINSLTSITQTFSDDIRMQFGIDKCKIQSVRKGVVEYNSYDLNSVEHIRPVDPTTGYKYLGYQQSQQIHQKQTKITLTEHFKSRLHKILNTQLNARNTTKAINTYAIPILTYSFGIIQWTRTDLQKLQRLINTTMTKYRKHHPRACVQRLSLPRLEGGRSLIDIQNLHNRQLTMLRTYFHNKAQHSPMHLATVQADTKLTPLNLRDSNINLQEITHDQKINIWTQKSLHGRHRNDLTNINIDKNASNAWLKRGELFPETEGFMIAIQDQIIDTRNYRKHIIKDSSLVNDLCRHCHSSSETIQHITGACRSIVQTDYKHRHDQVAAIIHQYLALKYKLITEKTNYYKYTPATILDTEQFKLYWDRTIITDKTVHYNRPDITLHDKSNKVVYLIDIAIPNTHNLQTTYTEKLTKYTDLTIELKSQWRVNAVKTIPIIISSTGIVPKTLHNSLKTLQIHPLTYLTIQKAVILNTCRIVRKFLSLDS

SEQ ID NO: 23790 - protein, 1293 aa, Astraptes naxos
MRLRSRQLPQAGTREGESRPGPSSSGCPTYSGGGNASHLTTQSRTVVVHNSFINFHTSPTSSLPIPSSPMPSSPIPSSPIPSRVFQFTKSAQVAEEEHTPDKRRSDITSSPISSIDSSSVYCVTSSSSNNSDLSENVVKEAYAKNPPPITDSKRARKKWSNEMNIFIWSTYLEITQIESCTRGYLDELYFQFCKKFPHMDVSKQRVGDQRRTIIRNKLLSQQLLEEIKEEVTLKIQKTNHLPIAQTDTRNLQTDVADKRRMIWTTKMNEVIIQIYYEVTELETNLTTYRKKLFDKFMEHFPELTHLTEQRIADQRRVIMNNKMLPETKIDQIRQDVSLKLHRDKASTNIHIHSHTHTESSIHKNNTHSNQTIQTHIQVPQYEEEEIQITSHTQNQIEEYFSEALKIFKNSEPTIRPSLPKQKITKRLNSAVQHLNSNLIPNTINNGTDFETLQLVIYCAAYAAVKYNGSKVRDINTNIQHNTQIPRWQLILEDRIMKLRTHIGRLTEYNKGTRSKGLQRKVEEIKRKYKLHSQHENPNTELSHFLDTLKQKLNALASRLRRYKKTTLRKTQNKLFQNNEKMFYRTLTQQNTQHLSSNTPVLPSKDDLVEFWSNIWSIPQQHKDASWIRKDKDNLTDLPEMPFESIDLDLLRRVIARSHNWKATGSDKIHNYWYKKFTFTHSLLQIHINNFIQSPNTLPLYITQGITYMLPKDPTDMSNPAKYRPITCLQNIYKIITSCISELIYIHAEQNNILAEEQKGCRRNTQGCKEQLTIDAVISKQAFEKKRNIYTMYIDFQKAFDSIPHSWLIYILKHYNIHPTITFFLQSPMSNWKTQLKLNSGAVTLESDFLEIKRGIFQGDSLSPLWFCLSINPLSRLLNNIKKGFKIRYDNKQHTISHLVYMDDIKLYGSTLNEINTLTTITQSFSTDICMQFGIDKCKMQSVKRGILEDNSYSLDTQNQINSVDPISGYKYLGYQQSRQIHQKYTKATLTENFKTRLHKILNTQLNARNTIKAINTYAISILTYSFGIIQWTRTDIQKLQRIINTTMTKYRKHHPRACVQRLTLSRQEGGRSLIDIQNLHNRQLTGLRTYFYNRAPHSLIHQAIVQADNKYTPLRLRNTTVNLSTVTTEQKIHTWLQKSLHGRHRIDLNSPVVDKDASNAWLRRGELFPETEGFMIAIQDQVIDTRNYRKHIIRDKSLVTDVCRHCHSCSETIQHITGACRSIVQTDYKHRHDQVAAIIHQYLAYKYKLISEKNRYYKYTPEIILESPKIKLYWDRTIITDKTIHHNRPDITL

SEQ ID NO: 23791 - protein, 1375 aa, Urbanus sp.
MHLRSRQLPQAGTREGESRPGPSSSGCPTYSGGGNASHLTTQSRTVVVHNSLINSHNSLIPSPIMPSPPIPSSSFIPSRLSKSMKRAQTAGDKGTPKAEQILNRRGSVITSSTRSSVESSSAYSVTSPSSNNSDLSDNVVQEAYADNPGPITDSKRARKKWSDEMNIFIWRTYLEITQIESCIRGHLDELYFQFCKKFPHMDVSKQRVGDQRRTILRNKLLPQQLLDDIKADVTLNIHKTNNLPETYTDSLNLHLTEVTDKRRMVWTTKMNEVIIQAYFEITELETNLTSYRKKLFDKFMEHFPHLTHVTEQRIADQRRVIVHNKMLPETKIEQIRQEVALKLHRHKHATNLQRHSFTHTESLINENNTQNNQTIQTQLQEPECEGEGIQITSHTQKQIEEYFTEALENFKNSEPTLRPSLPKQKITKRLTCAVQYLNSNLIPNVVNNETDFETLQLVIYCSAYAAVKYNGGKIRDINTESQYNTQKPRWQLILEDRIEKLRIHIGRLTEYNKGTRSKGLQRKVEEIKRKYKLHSQHENPNTELPHFLDTLKQKLNALASRLRRYKKTTLRKTQNKLFYNNEKLFYRTLTQHSTQHVTTPILPTKNDLTEFWSNIWSIPQQHKDASWIQKDKESLTDLPEMPFENIDLDLLKRVIARTHNWKATGSDKIHNYWYKKFISTHSLLHIHINNFIKSPNTLPHYITQGITYMLPKDPTDTSNPAKYRPITCLQNIYKIITSCISEIIYIHADQNNILAEEQKGCRRNTQGCKEQLTIDAVISKQACEKKRNIYTMYIDFQKAYDSIPHSWLLYILKHYNIHPTIIHFLKSTMSNWKTQLKLNSNAGTIESDFLAINRGIFQGDSLSPLWFCLALNPLSKLLNISKKGFKIKYNNKQHTITHLVYMDDIKLYGSTLNDINTLANITQSFSTDICMQFGIDKCKMQSVKRGVLEENSYSLDTQNQIDSIDPINGYKYLGYQQSRQIHQKQTKATLTENFKTRLHKILNTQLNARNTVKAINTYAISILTYSFGIIQWTRTDIQKLQRIINTTMTKYRKHHPRACIQRQTLSRQEGGRSIIDILNLHNRQLTGLRTYFHSRAQNSLIHQAIVQADNKYTPLRLRDTTVNLSTVTTDQKIQTWLQKSLHGRHRIDLNNPVIDKDASNAWLRRGELFPETEGFMIAIQDQVIDTRNYRKHIIRDKSLVTDVCRHCHSGSETIQHITGACRSIVQTDYKHRHDQVAAIVHQYLAYKYKLISDKTSYYKYTPEVILESSKIKLYWDRTIITDKTIHHNRPDITLHDKENKIVYLIDIAIPNTHNIQTTYTEKLTKYTDLTIELKTQWKVNTVRTIPIIVSSTGIIPKNLHTSLKAIDIHPLTFLT

SEQ ID NO: 23792 - protein, 1223 aa, Piruna aea
MNIFIWRAYLKVTHLESSIRGHLDELHFQFNQKFPQMDASKQRIGDQRRAIIRNKLLPQKLLDDIREEVKTELENTNQLSIINTQQDSLNKRRMIWTPQLNEAIIRIYLEVTELESNLTTYRKKMYDRFIEAFPHLTHISEQRIADQRRAIINNKMILETKIEQIRQEIAIKLNNINIHQTQTQIETEINTSSSYTQDDRFTQQQLPTQEATIPMPEHQKIELEKLFSETLDLFKNTNPTSRPFIPKQKITKKFTSAVQYINMSILPKFLSNDTDFETMQLIIYTGAYSAVTFNGSKIRNHETKIIKNNRKPMWQLNLEKRIEQLRIHIGRLTEYKKGIRSKALDRKVEDIKRRFKMHSQHEDPNKDLSHFLDTLKQKLNALASRLRRYKKTTLRKTQNRLFQNNEKMFYRTLSETSNTNSPTVSENSIPTKDDLTQFWSKLWSESVKHKDSQWIREDKSRLTNLPEMQFENISLDLLKRVIGKTHNWKATGSDKIHNYWYKKFTSIYKVLHIHINNFIKSPNTIPDYITQGVTYMIPKDSTAMNNPAKYRPITCLQNIYKIITSCICDLIYTYTEQNNILAEEQKGCRKNSQGCKEQLIIDTVVSKQAFTKKRNIFTMYIDYQKAFDSVPHSWLLYILEHYNVHPVIVTFLKSVMSTWKTELRLHGNAGIVETEPIKINRGIFQGDSLSPLWFCLALNPLSNLLNSSKKGFSIKYNNTQHTISHLMYMDDIKLFGSSLNQINSLTSITQTFSDDIRMQFGIEKCKIQSVRKGVVEYNSYTLNSVEHISPVDPVTGYKYLGYQQSQQIHQKETKITLSEHFKSRLHKILNTQLNARNTIKAINTYAIPILTYSFGIIQWTRTDLQKLQRVINTTMTKYRKHHPRSCIQRLSLPRLEGGRSLTDIQNLHNKQLTTLRTYFHTRAQHSQIHLATVQADTKFTPLNLRDSNINLQEITDDQKINIWTQKSLHGRHRNDLTNLNIDKHASNAWLKRGELFPETEGFMIAIQDQIIDTRNYRKHIIKDSSLVNDLCRHCHSSSETIQHITGACRSIVQTDYKHRHDQVAAIIHQYLALKYKLITEKTNYYKYTPATILDTEQFKLYWDRTIITDKTVHHNRPDITLHDKTNKIVYLIDVAIPNTHNLQTTYTEKLTKYTDLTIELKSQWRVNTVKTIPIIISSTGIVPKTLHNNLKTLQIHPLTYLTIQKAVILNTCRIVRKFLSLDS

SEQ ID NO: 23793 - protein, 1300 aa, Pseudonascus paulliniae
MDNQKDDLAYLPSSTNRGAEDIVSINISSISSTSNSMTSLQSSHSSFSSLSDNVVEEAFAENPLPIADNKRARKKWSTEMNIFIWRTYLTITNLESCTRGHLDELYHKFTTKFPYMDVSKQRLSDQRRTILRNKLLSQQIFDEIKEEVKVYLRNNGSLVDTQPHATDGQTHTQDKRRMAWTTEMNEVIIKIYYEVTELESNLTTYRKKLYEKFIEHFPHLLHVTEQRIADQRRVIINNKMLPENRLIQLKQEVALKIQSKDVAPQLVTNYSENKSLDTLNNNMDNSLGKDIDAEESGRLLMTPMERSQIEECFSEAFKKFKYIVPTSRPSIPKQKVTKKLGSVVQHLNHVLIPKVISHNTNFETAQLVIYCAAYTAAKYNGCKIMDSPKNSKLNTRIPAWQAKLEKRIAELRKHIGRLTEFNKGTRSNSLINKVEEIKRKYKIHSQHENPNTDLTHFLDTLKQKLNALASRLRRYKKTTLRKIQNNLFNNNERTFYRNLAENTLPISNTHNPIPTKDELAGFWSNLWSNSVEHKHESSWIQEDKNRLANLPQMEFENISLDLVKRVIARSNNWKATGSDKIHNYWYKKFTSTHSLLHSHINNFIKSPHTLPDYVTQGITYMLPKDRTDTKNPAKYRPITCLQNIYKIITSCISEMIYTHTDQNNILAEEQKGCRKNRYGCKEQLTIDSVALKQAYTSKRSIYTMYIDYQKAFDSVPHSWLLYILKHYNIHPTLILFLESVMNTWKTKLKLHSRSENIETELINIRRGIFQGDALSPLWFCLALNPLSQLLNNSNKGFKIKYDKNQHIISHLMYMDDIKLFGSTIIEINALAKITQTFSSDISMQFGTDKCKMQSVRRGFIENNFYEINSEDLIQPVNQLEGYKYLGYQQSRLIHQKETRSTLTEKFRSRLHKILNTQLNARNTVKAINTYAIPILTYSFGIIHWTQTDLLKLQRIINTTMTKYRKHHPRACFQRQTLSRQEGGRNLIDIQNLHNRQVKSLRVYFYNRSHHSQVHLATVQADKKFTPLNLSDQTKNIVEITADEKMSAWIKKSLHGRHRLDLCNPNVDKTASNAWLKRGELFSETEGFMIAIQDQVIETRNYRKYIIKDPNLVNDLCRHCHNSSETIQHITGACRCIVQTDYKHRHDQVAAIIHQYLALKYKLITEKNSYYKYSPAVVLESPKFKLYWDRTIITDKTVHYNWPDITLHDKDNKTAYLIDIAIPNTNNLQTTYTEKLTKYTDLAIELKTQWRVNTVKTIPIVISSTGIVPKHVHSSLNVLKIHSLTYLTIQKAVILNTCRIV

SEQ ID NO: 23794 - protein, 1299 aa, Oechydrus chersis
MNDTQQKNIRYNLRSLSRACQGTASVRAENDKRNLTSMQTFQQVRTDAIQFSPITTSYSIYSPSSSSSSSFSMSDNVVEGAYTQITPPVADNKRARKKWSKDMNIFIWRTYLQITQIETYTRGHLDELYLQFHNKFPHMDVSKQRVSDQRRAIVRNKLLTEQVLNEIKEEVKITLRNSNQLSSTQSNTHTQTDTRRMAWTTMMNEAIIKIYYEVTDLESNLTTYRKKLYEKFIEQFPHLSHLSEQRIADQRRVIINNKMISEDRIVQMRQEVAFKLHTENITLNNETSINICRETPNNSNTADNQIQTENTYNLQEEYSQIKENEHNQLQQYFSEAIKQFKHTEPTSRPSLPKPRLTKKLSNAVQYLNQTLIPNKISHNTDFDTVQLVIYCAAYAAVKYNGSKMIDTPSNTQRIIRKPAWQIKLEKRIENLRVHIGRLTEFNNGIRSPALIRKVENIKRIYKIHSHHETPNTDLIHFLDTLKQKLNALASRLRRYKKTTLRKTQNSVFNKSEKSFYRNLSQNLDSSCTPVPTKDQLTSFWSNIWSESVEHKQNSNWIEEDKIRHQDVATMHFENISLDLVKSVIARTHNWKATGSDKIHNYWYKKFTSLHSLLHLHINSFINSPNTLPRYITQGITYMLPKDKTDTSNPAKYRPITCLQNIYKIITSCISELIYIHTDHNDILTEEQKGCRKNRQGCKEQLTIDAIALKQAYKSKRSIYTMYIDYQKAFDSVPHSWLIYILHHYNIHPTIVHFLESVMKNWQTKLKLHSGIQSIETDLLNIKRGIFQGDALSPLWFCLALNPLSKLLNNCRKGFKIKYDDKHQTITHLMYMDDIKLFGSTLNEIHTLANITQEFSTDICMQFNIDKCKIQSVRKGILEHDTYITTSEDIIHPVDQAEGYKYLGYQQSRLVHVKETKSSLIAKFTSRLHQILNTQLNARNTIKAINTYAIPTLTYSFGIIQWSQTDLQKLQRIINTTMTKYRKHHPRACIQRLTLSRQEGGRSLIDIKNLHNRLIKSLRLYFYKRAEDSQIHLAAVQADNKLTPLNLRDHCIQLDETTAEQKINTWTQKSLHGRHRLELSNPNVDTVASNAWLKRGELFPETEGFMIAIQDQVIDTKNYRKHIIRDPALVYDTCRHCHSSSETIQHITGACRSIVQTDYKHRHDQVAAIIHQYLAYKYKLVTEKYNYYKYSPAVILESSKFKLYWDRTIITDKTVHCNRPDITLHDKENKTVYLIDIAIPNTHNLQSTYTNKITKYTDLTIEIKTQWRVNTVRTVPIVISSTGVVPKNLHTSLNTLKIHP

SEQ ID NO: 23795 - protein, 1232 aa, Dyscophellus porcius
MEMNIFIWRAYLIITQIESCTRGYLNELHLQFRKKFPYMDVSKQRVGDQRRTIIRNNLLSPQVLNDIKEEVRLHLQHTNQIPHIQTDTQTDISNKPRLTWTAKMNEVIIKTYYEVTELETNLTTYRKKLFDKFIEHFPHLSHLTEQRIADQRRVIINNKMLSDTKLEQIREEVALKLHRENVVANTQIQSYTQAEPSVDTNHMQSNQILQPQTPRREDVRSLTNTIDTQNQIEAYFSEALKTFTDTEPTIRPSLPKQKISKKLASAVQYLNNTLIPNKICNETDFQTLQLTIYCAAYAAVKYNGSKIKDTLTSAQCNTRIPAWQLKLENRIGQLRAHIGRLTEYSKGTPSKKLERKVENIKQQYKLHSRHENINTEIPHFLDTLKQKLNALASRLRRYKKTTLRKTQNNLFNNNEKLFYRTLTQSTNTSSSNNNTPNLPTKESLTEFWTNIWSKSVLHKDASWIQEDRNSLTNLSQMEFENIDLDLLKRVIGRSHSWKSPGSDKIHNYWYKKFTSIHSLLHIHINNFIKHPNTLPDYITHGITYMLPKDTTDMSNPAKYRPITCLQNIYKIITSCICESIYKHTEQNNILAEEQKGCRKNRQGCKEQLTIDAVISKQAIEKKRNIYSMYIDFQKAFDSVPHSWLLYILEHYNIHPIIINFLKSAMNNWKTELKLHSTAGTIESDFLSIKRGIFQGDALSPLWFCLSLNPLSNLLNNSRKGFKIKYDNKQHTISHLIYMDDIKLYGSNLKEINSLANITRSFSADICMQFGIDKCKMQSVRRGIVENNSYSVTREDLIEPIDQINGYKYLGYQQSRQIHQKHTKITLTEAFKSRLHRILNTQLNSRNTIKAINTYAISILTYSFGIIHWTRTDIQKLQRTINTTMTKFRKHHPRACVQRLTLSRQEGGRSLIDIYNLHNRQLTSLRTYFYNRAQDSEIHQAITRADKKYTPLNLRDNNISLPITTAEQKINEWTQKSLHGRHRLDLNNQNVDKTASNAWLKRGELFPETEGFIIAIQDQIVETRNYRKHIVKDRSLVTDVCRHCHSSSETIQHITGACRSIVQTDYKHRHDQVAAVIHQYLAYKYKLISEKTSYYKYSPKIILESPKIKLYWDRTIITDKTVHYNRPDITLHDKENKVVYLIDIAIPNTHNLQTTYIEKLTKYTDLTIELKTQWKVNTVRTIPIIISSTGVVPKTLHTGLKTLQIHPLTFLTIQKAAILNTCRIVRKFLSIET

SEQ ID NO: 23796 - protein, 1352 aa, Toxidia parvulus
MKQNHNQINKKYYLRSLSKSLANNVQSNKDVVEEISRKTTTGQAPYTDNSTSFPTSPVSINSLYELPHSLSHSSSSSSMSDIVVQEADAAKLVPVSDIARARKKWSKEMNIFIWRTYLIITKVETCIRGHLDKLHQQFRDAFPHMDASKQRIGDQRRAIVRSKLLPQSLLDEIRQEVTLHLQNTNLYPNQIDTINMQTSDTNKGRIAWSTEMNETIMRSYFEVTDNESNMTAYRKNLYNKFIQHYPHLSHLTEQRIADQRRVIINNKQLSESRIAEIRHEIELKLQRRKNHAPPNTQQTHGEENLDKNQETTQTTTQDFHNEENTIVTQTTTTQHEQNNNRNYLPLDVQNEIEMTFVDTLKIFDKTDPTMRPAIPKQKSSKNFANIVNFINTSLIPKVISNDKSFENIQLVLYCAAYTAVKHNDAKFLKETHRHNKMIPQWQEKLENRIQELRRNIGRITEYMKGIRTQYLQRKVEIIKNKYKIHSKHENLNTDLSHFLDTLKQKLNALSNRLRRYKKTTLRKTQNRLFINNEKIFYRNLTQHDSSFNIKNTPVPTKDSFLEYWSKIWSESVNHKSNSWVEKDKENLKHLPLMEYENIDIDLLKRVIARTHNWKATGSDNIHNFWYKKFTSIHSLLLLHINNFINSPETLPHYITHGITYMIPKDKTDIGNPAKYRPITCLQNLYKIINSCIHEIIYRHIDENHILAQEQKGCRKGSRGCKEQLTIDAVALQQAYSKKRNIYTMYIDYQKAFDSVPHSWLLYILQHYNINPTLVHFLGSAMQNWKTKLKVHCNNEKIETDFININRGIFQGDALSPLWFCLALNPLSNLLNSSNKGYKLKYNNTSQVISHLMYMDDIKLFGGTLKDIETLASITQSFSSDICMQFGMDKCRIQSVNRGVITKNAFHTNNNDHIDPLDPAEGYKYLGFQQSQYIHHKQTKTTLIEKFRIRLHKIFKTELNSRNTIKAINTYAIPLLTYSFGIIRWTKSELHKLQRIINTSMSQYRKHHPRACVQRQVLPRSEGGRGIIDIIILHNKQIKALREFFYDRAEHSYIHKATVQADNKLTPLNLKDTSIQLTETTKLQKLDTWRQKSLHGRHRLDLTNQNVDMIASNAWLKRGELFPETEGFMVAIQDQVIDTKNYRKYIIRSPDAHNDLCRHCYSTTETIQHITGACKSRAQTDYKHRHDQVASIIHQYLAYKHKLIQDKTSYYKYSPEVILDSDSYKLYWDRTIITDKTIHYNRPDITLHDKINKTVYLIDIAIPNTHNLQSTYTQKLAKYTDLSIELKSQWKVNTVRTIPIVISSTGVIPKFLHSSLKTLQIHPLTFLTMQKAVILNTCRIVRKFLSIDSPSCT

SEQ ID NO: 23797 - protein, 1357 aa, Polygonus leo
MTNGAIVFKNYAMRLRSRQIPQAGTREGESRPGPSSPGCPTYSGGGTASHMATQSHTAVGHQSYQHSPSKSSITSYSSSSKSTSQSVSFASSPSSNRSIMSDNVVQEAYADNLPPISDIKRARKKWSTEMNIFIWRTYLIITQIESCSRGYLDELFIRFNKEFPHMDVSKQRVGDQRRAIIRNKLLPQKMLDDIKEEVRSHLQYTNQLSHTQIDTLSTQTQGTDKRRMIWTTTMNEFIIQTYYEVTELESNLSTYRKKLFDKFIEHFPHLSHLTEQRIADQRRVIVHNKLLPETKVDQIRQEVAIKLHRNIDATLETHSISHAGHLVDLNDRQNTDTDQQITENQVENSLLTPHTKKQVEEYFSEALQKFKNTEPTLRPSLPKQKTSKKLALAVQYLNNTLIPNTISNETDFETLQLIIYCAAYAAVYYNGSKIKDTNTNVQFNERIPRWQEVLERRIGELRSHIGRLTEYIKGVRSKGLQRKVETIKRKYKLHTQHENPNTELSHFLDTLKQKLNALANRLRRYKKTTLRKKQNNLFNNNEKMFYRTLSQNTNNSPTISKILPTKIQLTEFWSNIWSKSQEHQEASWIQEDKNSLTHLIDMPYQNISLDLLTRVIARSHNWKATGSDKIHNYWYKKFTATHSLLHVQINHFITSPDTLPPYITQGITYMLPKDKGDMSNPANYRPITCLQNIYKIITSCITELIYTHVERNNILAEEQKGCRKNMQGCKEQLIIDAVISKQAYEKKRNIYAMYIDYQKAFDSVPHSWLLYILKHYNVHPTVITFLESAMSNWQTQLKLHSETGIIETDFLAINRGIFQGDSLSPLWFCLALNPLSTLLNKSKNGFKIKYDNKHHTISHLIYIDDIKLFGSTLNDIHTLTNITQSFSTYICMQFGIDKCKMQSVRRGVVEKNSYSVNSEDLIDPVDQIHGYKYLGYQQSRLIHHKQIKTTLTENFKSRLYQILNSQLNARNTVKAINTYGISILTYSFGIIQWSRTDIQKLQRIINTTMTKNRKHHPRACIQRMILPRQEGGRGLINIQNLYNRQLTTLRTYFYNRAQHSAIHQAVTRADYKYTPLNLRDTTVILPNVTTEQIINTWTQKSLHGRHRLDLNNLNVDKTASNAWLRRGELFPETEGFMIAIQDQVIETRNYRKHIIRDKSLVTDQYRHCRSSSETIQHITGACRSIVQTDYKHRHDQVAAIIHQYLAYKYKLISQKTSYYKYSPAVILESSKIKLYWDRTIITDKTIHYNRPDITLHDKENKIVYLIDISIPNTHNMHTAYTEKLAKYTDLTIELKTQWKVNTVRTIPIIISSTGVVPKTLHTSLKAISIHPLTYLTIQKAVILNTCRIVRKFLSIET

SEQ ID NO: 23798 - protein, 1384 aa, Telegonus cellus
MRLRSRQLPQAGTREGESRPGPSSSGCPTYSGGGNASHLTTQSRTVVVHNSSIHSHTSLIPSSPIRSSHIPSSPIPFQSTKSAQIAGNKETPKKEQTPNRRRSDITSSPISSIESSSAYYVTSPSSNNSDLSDNVVQEAYADNPPPITDNKRARKKWSKEMNIFIWRTYLEITKIESCTRGYLDELYFQFCKKFPLMDVSKQRVGDQRRTIIRNKLLSQQLLEDIKEEVTLNIHKTNHLPIAQTDTLNLQTYVTDKRRMIWTTKMNEVIIQIYYEVTELETNLTTYRKKLFDRFMEHFPHLTHITEQRIADQRRVIMNNKMLPETKIDQIRQEVSMKLHRDKVATNLQIHSHTHTESSIHENNTPNNQTIQTQIQVPEYEEEGIQITSDTQNQIGEYFSEALKIFKNSEPTLRPSLPKQKITKRLNSAVQYLNSNLIPNKVNHATDFETLQLVIYCAAYAAVKYNGSKIRDTNTDIQYNTQTPRWQLILEDRIGKLRIHIGRLTEYNKGTRSKGLQRKVEEIKRKYKLHSQHENPNTELPHFLDTLKQKLNALASRLRRYKKTTLRKTQNKLFHNNEKMFYRTLTQHSTQHLTSNTPITPSKNDLTEFWSNIWSISQQHKDASWIRKDKDSLTDLPEMPFENIDLDLLKRVIARSHNWKATGSDKIHNYWYKKFTYTHSLLHTHINNFIKSPKTLPLYITQGITYMLPKDPTDMSNPAKYRPITCLQNIYKIITSCISEIIYTHAEQNNILAEEQKGCRRNTQGCKEQLTIDAVISKQAFEKKRNIYTMYIDFQKAFDSIPHSWLLYILKHYNIHPTIILFLKSAMSNWKTQLKLNSGAGTLESDFLAINRGIFQGDSLSPLWFCLALNPLSRLLNNSKKGFKIRYENKQHTISHLVYMDDIKLYGSTLNEINTLATITQSFSTDICMQFGIDKCKMQSVKRGILEDNSYSLDTQNQIDPVDQISGYKYLGYQQSRQIHQKQTKATLTENFKTRLHKILNTQLNARNTVKAINTYAISILTYSFGIIQWTRTDIQKLQRIINTTMTKYRKHHPRACVQRLTLSRLEGGRSLTDIQNLHNRQLTGLRTYFHNRAQHSLIHQAIVQADNRYTPLRLRNTTVNLSTVTTEQKIHTWLQKSLHGRHRIDLNNPVIDKDASNAWLRRGELFPETEGFMIAIQDQVIDTRNYRKHIIRDKSLVTDVCRHCHSCSETIQHITGACRSIVQTDYKHRHDQVAAIIHQYLAYKHKLITEKTRYYKYTPEVILESPKIKLYWDRTIITDKTIHYNRPDITLHDKENKIVYLIDIAIPNSHNIQTTYTEKLTKYTDLTIELKTQWKVNTVRTIPIIISSTGIVPKNLHTSLKAIDIHPLTFLTIQKAAILNMQDC

SEQ ID NO: 23799 - protein, 813 aa, Urbanus velinus
MFYRTLTQHSTQHVTTPILPSKNELTEFWSNIWSIPQQHKDASWILKDKESLTDLPEMPFENIDIDLLKRVIARTHNWKATGSDKIHNYWYKKFIYTHSLLHIHINNFIKSPNTLPQYITQGITYMIPKDPTDTSNPAKYRPITCLQNIYKIITSCISEMIYIHAEQNNILAEEQKGCRRNTQGCKEQLTIDAVISKQACEKKRNIYTMYIDFQKAFDSIPHSWLLYILKHYYIHPTIILFLKSTMSNWKTKVKLNSSAGTVESDFLAINRGIFQGDSLSPLWFCLALNPLSKLLNNSKKGFKIKYNNKQHTITHLVYMDDIKLYGSTLNDINTLANITQSFSTDICMQFGIDKCKMQSVRRGVLEQNSYSLDTQNQIDSIDPINGYKYLGYQQSRQIHQKQTKATLTENFKTRLHKILNTQLNARNTVKAINTYAISILTYSFGIIQWTRTDIQKLQRTINTTMTKYRKHHPRACIQRLTLSRQEGGRSIIDIQNLHNRQLTGLRTYFHNRAQHSLIHQAIVQADYKYTPLKLRDTTVDLTTVTTEQKIHTWLQKSLHGRHRIDLNNPVIDKDASNAWLRRGELFPETEGFMISIQDQVIDTRNYRKHIIRDKSLVTDVCRHCHSGSETIQHITGACRSIVQTDYKHRHDQVAAIVHQYLAYKYKLISDKISYYKYTPEVILESSKIKLYWDRTIITDKTIHHNRPDITLHDKENKIVYLIDIAIPNTHNIQTTYTEKLTKYTDLTIELKTQWKVNTVRTIPIIVSSTGIIPKSLHTSLKAIDIHPLTFLTIQKAAILNTCRIVRKFLSIDT

SEQ ID NO: 23800 - protein, 1353 aa, Euriphellus phraxanor
MNKKEQYFRYNLRSLSREFQSTRAVRSIDKKGVQDEQQTCNVEVFQAHDTVITSLSSPSVFTPANSITSSSSSVSFSLGKDNFSPLSSSNSSSENVVQEAYAENPPPITDIKHARKKWSTEMNIFIWRAYLQITQIESYTRGYLDELYLQFCRKYPHMNVSKQRIGDQRRTITRNKLLSQQLLNDIKEEVRLQLQDANQIQYTQTNTLNTQTGISDKRRMIWTTKMNEIIIQTYYEVTEIETNLTAYRKKLFDKFIEYFPHLSHLTEQRIADQRRIIINNKMLSEAKLDQIRQEVALKLHRENVVANPQIPSHTQKEIVIDKNCMQNIQTTPQQTTEREEEKTLTITFDTQNHIQEYFSKALTLFKNIEPTVRPSLPKQKMTKKLASAVQYLNSTLIPNSIYSGTDFETLQLIIYCAAYAAIKYNDCKINDTQTTIQNNTRIPAWQLKLEKRIGELRSHIGRLTQYKKGTPSKRLERLVENIKRKYKLHSKHENSNTELSHFLDTLKQKLNALASRLRRYKKTSLRKTQNNLFINNEKMFYRTLSQSTNIPSSSNMPNLPTKDNLTEFWTNIWSKSVQHADNSWIREDKNSLIDLPQMAFEKIDLDLLKRVIGRSHNWKAPGSDKIHNYWYKKFSSTHSLLHTHINNFIKHPHTLPQYITHGITYMIPKDTADMSNPAKYRPITCLQNIYKIITSCICEIIYTHTEQNNILAEEQKGCRKNRQGCKEQLTIDAVISKQAYEKKRNIYTMYIDYQKAFDSVPHSWLLYILEHYNIHPMIINFLNSAMNSWKTELKLYSTAGIIESDLLSIKRGIFQGDSLSPLWFCLSLNPLSNLLNNTRKGFKIKYDNKQHTVSHLIYMDDIKLYGSTLKEINSLAHITQSFSTDICMQFGIDKCKMQSVRRGVIEENSYLVNTEDLIEPIDQINGYKYLGYLQSRKIHQKQTKITLTEAFKTRLHKILNTQLNARNTIKAINTYAISTLTYSFGIIHWTRTDIQKLQRVINTTMTKYRKHHPRACVQRLTLSRQEGGRSLIDIENLHNRQITSLRTYFYNRAQQSQIHQAIIETDKKYTPLNLRDNTMNLPIITAEHKINEWTQKSLHGRHRLDLNNQNIDKAASNAWLKRGELFPETEGFVIAIQDQVIDTRNYRKHIIKDTSLVTDLCRHCHSSSETIQHITGACRSIVQTDYKHRHDQVAAVIHQYLAYKYKLIPDKTSYYKYSPATILESAKIKLYWDRTIITDKTVHYNRPDITLHDKENKIVYLVDVAIPNTHNIQTTYTEKLTKYTDLAIELKTQWKVDTVRTIPIIISSTGIIPKTLHNSLKALQIHPLTFLTIQKAVILNTCRIVRKFLSIDT

SEQ ID NO: 23801 - protein, 1303 aa, Spathilepia clonius
MPMTNGALVLTKYAMRLRSRQLPQAGTREGESRPEPSSSGCPTYSGGGNASHMATQPRAVVVDNPLINSHPSSPISSIDITSSPTSSVESYSTKSVASSSSRNSPLSDNVVQEAYAENPSPIADSKRARKKWSKEMNIFIWRTYLEVTQIESSTRGYLDELYSQFCKKFPHMDVSKQRLGDQRRTITRNKLLPQQLLDDIKEDVAINLHRTNQSWSQAQTNLLSTQTDVTGKRRMIWTSQMNEVIIKTYYEVTELESNLTAYRSKLFEKFVEHFPHLSHLTEQRVADQRRVIMYNKMLPETKIDQIRQEVSSKLHKENVDRNLQRHSHIHTENLIDENNTQNIQTTQSQLQIQEFEEEGIQITSHTQNQIEEHFSEALILYKNSEPTLRPPLPKQKMSKKLTSAVQYLNSTLIPDKVNNETDFETLQLVIYCAAYAAVKYNGSKIRDIHANVQYNTQTPRWQLILEERIGKLRAHIGRLTEYNNGIRSKGLLRKVEEIKRKYKLHSQHENPNTELPHFLDTLKQKLNALASRLRRYKKTTLRKTQNNLFYNNEKIFYRTLTQHISNSAVTKNTSTLPSKNDLTDFWSNIWSKSQQHKDASWIQKDKDSLRNLPEMSFENIDLDLLKGVIAKSHNWKATGSDKIHNYWYKKFTCTHSLLLTHINNFIKSPNTLPHYITQGITYMLPKDPADMSNPAKYRPITCLQNIYKIITSCISEIIYIHAEQNNILAEEQKGCRKNRQGCKEQLTIDAVISRQAFEKKRNIYTMYIDFQKAFDSIPHSWLLYILKHYNIHPIIIHFLKSAMSNWKTQLKLNNGAGTITSELLAVNRGIFQGDSLSPLWFCLALNPLSRLLNSSKKGFKIKYDNKHHTISHLVYMDDIKLYASTLNEINTLANITQTFSTDICMQFGIDKCKIQSVRRGVVEDNSYTLDTENVIDPIDHIHGYKYLGYQQSRQIHQKQTKATLTENFKTRLHKILNTQLNARNTIKAINTYVISILTYSFGIIHWTRTDIQKLQRIINTTMTKYRKHHPRACVQRLTLSRQEGGRNLIDIQNLHNRQLTTLRTYFHNRAQDSLIHQAIVQADDNYTPLKLRDNTINLPIVTSDHKIHTWLQKSLHGRHRTDLNNPVIDKDASNAWLARGELFPETEGFMIAIQDQVVDTRNYRKHIIRDKSLITDLCRHCHASSETIQHITGACRSIVQTDYKHRHDQVASIIHQYLAYKYKLISEKSSYYKYTPQVILESPKIKLYWDRTIITDKTIHYNRPDITLHDKENKRVYLIDIAIPNTHNIQSTYTEKLTKYTDL

SEQ ID NO: 23802 - protein, 1348 aa, Urbanus esmeraldus
MTTQSQTVVVDNSFINSHSSSPIPSRVFRSTKRTQIACNKETSKIEQESNRLGSDSDTDTTFSPPISPVESYSSNSVTSPSNNNQNLSDNVVQEALAENPPPITDSKRARKKWSTDMNIFIWRTYLEITQLESCTRGYLYELYFQFCKKFPHMDVSKQRVGDQRRAIIRSKQLPQQLLDDIKKQVTLNIHKTSHLPRTQINTHNSQTDVTEKRRMIWTNKMNEIIIQTYYEVTELETNLTTYRTKLFNIFIKHFPHLSHLTEQRIADQRRVIMYNKMLPETKIEQIRQEVALKLHREKVATNTQIHSHPHLETLNHENSIQNIQTIQTLTQVPDREEEGIQITSHLQNQIEEFFLDAIKEFENLEPTLRPSLPKQKITKKLTNAVHYLNNILIPNKICSETNFERLQLITYCAAYAAVKYNGSKIKNNHTNIPFNARIPTWQLTLEKRIAELRAHIGRLTEYNKGIRSKRLQRKVENIKRKYKLHSQHENPNTEIPHFLDTLKQRLNALSSRLRRYKKTTLRKTQNKNFYNNEKMFYRTLTKHSSSDTNNTPNLPSKSNLTEFWSNIWSKSQQHINASWIKKDKDSLTHLPEMPFENINIELIKRVIARTHNWKATGSDKLHNYWYKKFTCTHSLLHTHINNFIKSPDTLPHYVTQGITYMLPKDEADMSNPAKYRPITCLQNIYKIITSCLSELIYVHAEQNNILAEEQKGCRKNTQGCKEQLTIDAVISKQAYDKKRNIYTMYIDYQKAFDSVPHSWLLYILEHYNIHPTIIHFLKFTMSNWKTKLKLHSGAEIIETESLPINRGIFQGDSLSPLWFCLALNPLSTLLNNSKKGFKIKYDNKQHTISHLIYMDDIKIYGSTLNEINTLTNITQSFSTDICMQFGVDKCKMQSVKRGILEDNSYTLNTQNTIDPVDHINGYKYLGYQQSRQIHQKQTKTTLIENFKTRLHKILNTQLNARNTIKAINTYAISTLTYSFGIIHWTRTDIQKLQRIINTTMTKYRKHHPRACVQRLTLSRQEGGRSLIDIQNLHNRQLTTLRTYFHNRAQHSDIHQAIVRADTKYTPLRLRDNTTSLPIITSDQKIQTWMQKSLHGRHLADLNNPNVDRDASNAWLRRGELFSETEGFMIAIQDQVIDTRNYRKYIIRDNTLVTDLCRHCHSSSETIQHITGACRSIVQTDYKHRHDQVAAIIHQYLAYKHKLITEKTSYYKYTPEVILESPKIKLYWDRTIITDKTIHYNRPDITLHDKENKIVYLIDIAIPNTHNIQTTYTEKLTKYTDLTIELKTQWKVNTVRTIPIIISSTGIVPKNLHASLKAIEIHPLTFLTIQKAAILNTCRIVRKFLSIDT

SEQ ID NO: 23803 - protein, 993 aa, Lobocla liliana
MKLHRENVVTIHQIHSNTQTEPLIEENDIQNIQTIQTRTQIPENVEEEILVTSHTQNQIEEYFSEALKVFKNSEPTQRPSLPKQRISKKLTNAVQYLNNILIPNIVNNETEFETLQLIIYCAAYAAVKYNGSKINNTHIDVQFNTRIPTWQLILEKRIAELRVHIGRLTEYNKGMRSKGLEKKIEIIKHKYKLHSQHENPNTEIPHFLDTLKQKLNALASRLRRYKKTTLRKTQNKLFCNNEKMFYRTLTQGTNSSSITNNNPILPTKDKLSEFWSNIWSKSLQHKDANWIQKDKDSLIDLPEMPFENINLDLLKRVIARTHNWKATGSDKIHNYWYKKFTSTHTLLHTHINNFIKSPNTLPPYITQGITYMLPKDPTDMSNPAKYRPITCLQNIYKIITSCISEIVYTHAEQNNILAEEQKGCRKNRQGCKEQLTIDAVISKQAYEKKRNIYTMYIDYQKAYDSIPHSWLLYILKHYNIHPTIILFLKSAMTNWKTELRLHSSAGTIRTDLLEINRGIFQGDSLSPLWFCLALNPLSRLLNNRKKGFKIKYDDQQHTISHLIYMDDIKLYGSTLSEINTLANITQSFSTDICMQFGIDKCKMQSVRRGVIEDNSYSLDTQILIDPVDLVNGYKYLGYQQSRQIHQKQTKTILTKNFKIRLHKILNTQLNARNTIKAINTYAISILTYSFGIIQWTRTDIQKLQRIINTTMTKYRKHHPRACVQRLTLPRQEGGRSLIDIHNLYNRQLTALRTYFHNRAQESLIHQAIVQADKNYTPLKLRDSTINLSNVTIEQKINTWTQKSLHGRHITDLNNPKVDKDASNTWLKRGELFPETEGFMIAIQDQVIDTRNYRKHIIKDKTIVTDLCRHCHSSSETIQHITGACRSIVQTDYKHRHDQVAAIIHQYLAYKYKLIAEKTSYYKYSPKIVLESPKIKLYWDRTILTDKTVHFNRPDITLHDKENKIVYLIDIAIPNTHNIQTTYTKKYLSKLFSS

SEQ ID NO: 23804 - protein, 1332 aa, Urbanus esmeraldus
MPSPPIPSSSLIPSRTSQSTKRAEIVDKNETPREEQSLNRRGSDITSSPISSVESSSTYSVTSPSSNNSDLSDNVVQEAYADNPAPITDSKRARKKWSNEMNIFIWRTYLEITQIESCTRGHLDELYFQFCKKFPHMDVSKQRVGDQRRTILRNKLLPQRLLDNIKADVSLNIHKTNNLLDTHTDTHNLHSTDVTDKRRMIWTTKMNEVIIQTYFEVTELETNLTAYRKKLFDKFMEHFPHLTHLTEQRIADQRRVIVHNKMLPETKIDHIRQEVALKLHRHEDATNLQLHSLTHTKSLIHENNTQNNQTIQTQLQLPECEDEGIQITSHTQKQVEEYFSEALEIFKNLEPTLRPSLPKQKITKRLTSAVQYLNNSLIPNVVNNETDFETLQLVIYCAAHAAVKYNGGKIRDINTDNQYYTQKPRWQLILEDRIGKLRIHIGRLTEYNKGNRSKGLQRKVEEIKRKYKLHSQHENPNTELPHFLDTLKQKLNALASRLRRYKKTTLRKTQNKLFYNNEKMFYRTLAQSSTQHVTTPILPSKNDLTKFWSDIWSIPQQHKDASWILKDKESLTDLPEMPFENIDLDLLKRVIARTHNWKATGSDKIHNYWYKKFICTHSLLHIHINNFIKSPNTLPHYITQGITYMLPKDPTDPTNPAKYRPITCLQNIYKIITSCISEIIYTHVEQNNILAEEQKGCRRNTQGCKEQLTIDAVISKQACEKKRNIYTMYIDFQKAFDSIPHSWLLYILKHYNIHPTIILFLKSAMSNWKTQLKLNSNAGTIESDFLAINRGIFQGDSLSPLWFCLALNPLSKLLNTSKKGFKIKYNNKQHTITHLVYMDDIKLYGSTLNDINTLANITQSFSTDICMQFGIDKCKMQSVKRGVLEDNSYSLDTHNQIDSIDPINGYKYLGYQQSRQIHQKQTKATLIENFKTRLHKILNTQLNARNIVKAINTYAISILTYSFGIIQWTQTDIQKLQRIINTTMTKYRKHHPRACIQRLTLSRQEGGRSIIDIQNLHNRQLTGMRTYFHNRAQHSLIHQAIVQADNKYTPLRLKDTTVNLATVTTEQKIHTWLQKSLHGRHRIDLNNPVVDKDASNAWLRRGELFPETEGFMIAIQDQVIDTRNYRKHIIRDKSLVTDVCRHCRSGSETIQHITGACRSIVQTDYKHRHDQVAAIVHQYLAYKYKLISEKTSYYKYTPEVILESSKIKLYWDRTIITDKTIHYNRPDITLHDKENKIVYLIDIAIPNTHNIQTTYTEKLTKYTDLSIELKTQWKVNTVRTIPIVVSSTGIIPKNLHTSLKAIDIHPLTFLTIQKAAILNTCRIVRKFLSIDT

SEQ ID NO: 23805 - protein, 1361 aa, Apyrrothrix sp.
MRLRSRNTLPQAGTRNGESRLEATTSGSPTYSGGGAVSQESAQRNTVAGRKMKLSTSQSYSSASPKTVGGLSTDLDDSVASKSSSNSSTSQFSPPLNNVYLSDNVVQEADADNLAPVSDRKCARKKWSKEMNIFIWRTYLKTTQLETSTKGHLDQLYTQFHYYFPDMDVSKQRIGDQRRAIVRNNLLPQTMLDEIKEEVRTELKNSNQAPILSLNTQTNSTNKRRMTWTTELNEAIIRIYLEVTELESDLTTYRKKMYNKFIETFPYLSHITEQRIADQRRVIIRNKMLLETRVEEIRQEVALKLNKHTRNISPQSQTQLHDQTVHSINVCYTQDTTQKGLIVLHDEQEKTLVPDNEENQIENIFSQALDIFKTIHPTVRPSLPKQKVTKKLINAIKYLNLTIIPKFVCSDTDFTTVQLIIYCAAYTAVIYNGGKVNHEQTKTTFSGKIPAWQINLEKRIEQLRIHIGRLTEYNKGIRSKGLERKVANIKCRYKIHSQHENPNTDISHFLDTLKQKLNALANRLRRYKNTTLRKTQNKLFQNNEKTFYRSLTQQTSDNHMNSTSTSHPNKDDFTTFWSKLWSDTVEHKESQWIKEDKDRLIDLSEMQFENISLDLLRRVITRTHNWKATGSDKIHNYWYKRFTSIHSILHTHINNFIKSPNTIPDYITQGITYMIPKDTTSLNNPAKYRPITCLQNIYKIITSCISELIYNHAEQNNILAEEQKGCRKNRQGCKEQLIIDTTILKQAYIKKRNIFTMYIDYQKAFDSVPHSWLLYILKHYNIHPTIITFLKTAMSSWKTEIKIHSSVGTIQTDVIKINRGIFQGDALSPLWFCLALNPLSGLLNNSEKGFNIRYNNTQHTISHLMYMDDIKLFGSSLDDVYTLTNITENFSKDIGMQFGIDKCKIQSVCKGVIESNSYTLENEEIIGPINQTIGYKYLGYQQSRQIHQKQTKSTLTQNFKYRLHKILNTQLNARNTIKAINTYAIPVLTYSFGIIQWTKTDIQKLQRLINTTMTKYRKHHPRACTQRISLPRQEGGRSLIDIQNLHNRQITALRSYFYNRALQSQIHQAIVQADTKLTPLNLKDTTINLPQNTTDQKINIWINKSLHGRHRKDISKSIVDKNASNMWLKRGELFPETEAFMTAIQDQVIDTRNYRKHIIRDSSLASDLCRHCHSTSETIQHITGACKSLVQSDYKHRHDQVAAIIHQYLGIKYKLIAEKTNYYKYTPSTTLENKQFKLYWDRTIITDKTVHHNRPDITLHDKTNKKVYLVDIAVPNTHNLQTAYTEKLAKYIDLSIEIKSQWKVNSVRTIPIIISSTGVIPKSLHDSLKTLHIHPLTFITIQKAVILNTCRIVRKFLSIES

SEQ ID NO: 23806 - protein, 1359 aa, Dalla cyprius
MQLRSRNTLPQAGTRNGESRPETTSSGCPTYSGGGTVSLEPAQPKAVAGRKTTASTSTQSHSLASWVLGDLSTDIADYPASTSPSSSSISQFSSPSTNISSLSDNVAQEANANILAPITDKKRARKKWSTEMNIFIWRTYLKVTHLESSIRGHLDELHLHFHQKFPQMDASKQRVGDQRRAIIRNKLLPERLLHDIREEVKIELHNTNQSPIINTQADISNKRRMIWTPQLNETIIRIYLEVTELESNLTTYRKKMYDKFIEAFPHLSHITEQRVADQRRVIINNKMILETKMEEIRQEVALKLNSHHINSRQTQSHNRTEQLISDSHPQDPHTIQQQESTPYVQQEIIHIPEHEITQIENSFCEALQIFKNTDPTLRPPLPKQKPSKKLTNAVEYINTSLLPKFIISNTDFETVQLGIYCAAYSAIIYCGGKIQNQQTINTYIDRKPTWQLNLENRIEKLRIHIGRLTEYNKGIRNKTLDRKIEDIKQRYKIHSQHENPNTDLSHFLDTLKQKLSALASRLRRYKKTTLRKTQNKLFQNNEKTFYRSLTETNQTNSPTVSNTSIPTKEDLTQFWSKLWSDNVQHKDSEWIRKDKDRLTDLPEMQFENISIDLLKRVIARTHNWKATGSDKIHNYWYKKFTSTHPILHTHINNFIKLPNSIPHYITQGVTYMIPKDSTAMNNPSKYRPITCLQNIYKIITSCISEIIYTHTEQNNILAEEQKGCRRNRQGCKEQLIIDTVTSKQAYTKKRNIFTMYIDYQKAFDSVPHSWLIYILEHYNIHPTIIYFLKSVMVNWKTKLKLHSNLGSTETDLININRGIFQGDSLSPLWFCLALNPLSNLLNNSKNGFNIKYNQTQHTISHLMYMDDIKLFGSSLNQINKLASITETFSDDICMQFGIDKCKIQSVRKGVIEYNSYTINNADVIGPVDPTTGYKYLGYQQSQQIHQKQTKVTLTENFKSRLHKILNTELNARNTIKAINTYAIPILTYSFGVIQWTRTDIQKLQRLINTTMTKYRKHHPRSCIQRLSLPRVEGGRSLIDIQNLHNRQLTSLRNYFHNRAQHSQIHQATVQADAKLTPLNLRDSNFNLPEITPDEKISTWTQKSLHGRHRIDLNNTNIDKTSSNAWLRRGELFPETEGFMLAIQDQVIDTRNYRKHIIKDPSLVNDLCRHCHGSSETIQHITGACRSIAQTDYKHRHDQVAAIIHQYLALKYKLITEKTNYYKYSPATTLDTQQFKLYWDRTIITDKTVHHNRPDITFHDKANKTVYLIDIAIPNTHNLQTTYTEKLTKYTDLSIELKTQWKVNTVRTIPIIISSTGVVPKTLHGSLKTLLIHPLTFLTIQKAVILNTCRIVRKFLSIDS

SEQ ID NO: 23807 - protein, 1348 aa, Aurina azines
MNDKQHPFRYNLRSLSRAFQGTNMVRNTNNEGTSKEEQDPNKKVLLCNTNITSTPTSSPSFSANSVTSLPTSSILSLDKCILSSPSSSNSLPDNVVQEAYAESSASITDNKRARKKWTIDMNIFIWRAYLTITQLESCTRGYLDELYLQFCRKFPYVDVSKQRVGDQRRAIVRNKLLPQQLLDNIKEEIKGHLQNTNQLSHAQNDTLDTQTNVTDKRRIIWTTKMNEIIIQTYYEVTELESNLTTYRKKLFDKFIEHFPHLSHLTEQRIADQRRVIINNKMLSETKIGQIRQEVALKLQKQNSRDHQMLSHTDTADLIDNIRTEQTQLRTQQSEEERTIFTLNTRNQIEEYFSDALNVFKYTEPTARPSLPKQKISKRFTNGVQYLNSVLIPNIITSETDFETLQLIIYCAAYAAIKYNGTKVKDTQRKDQFNSRIPAWQLKLEKRIEELRTHIGRLTEYNKGIRSKKLQRKIENIRRKYKLHSQHENPNTELSHFLDTLKQKLSALSNRLRRYKKTTLRKTQNKLFHNNEKMFYRTLIQQNNTSSSTNNTTILPTKDNLTEFWTNIWSKSLQHKDASWIHEDKDNLSDLPQMTFEKISLDLVKRVLAKSHSWKSPGSDKIHNYWYKKFTSIHALLHTHINNFIKSPDTLPHYITQGITYMLPKDMADMSNPAKYRPITCLQNIYKIITSCICEIIYNHVEQNNILAEEQKGCRKNRQGCKEQLTIDAVILKQAYDKKRNIYTMYIDYQKAFDSVPHSWLLYILKHYNIHPTIIRFLKSAMSNWKTQLKLYSGIGMLETDILSINRGIFQGDSLSPLWFCLALNPLSSLLNNTRKGFKIKYDDKHHILSHLIYMDDIKLFGSTLKEINNLANITQSFSTDIGMQFGIDKCKMQSVRRGIIENNSYLVNRNDIIDPIDQTVGYKYLGYQQSRQIHQKETKTTLTETFKTRLHKILNTQLNARNTIKAINTYAVSILTYSFGIVHWTRTDIQKLQRIINKIMTKYRKHHPRACIQRLTLSRHEGGRSLIDIQNLYNRQLTSLRTYFHNRAQLSQVHQAIVKADNKYTPLNLRDHTINLPIITNEQKINTWTQKSLHGRHPLDLNNPNVDKVASNAWLRRGEVFPETEGFMISIQDQVIDTRNYRKYIIKDKSLVTDLCRHCRSSSETIQHITGACRSIVQTDYKHRHDQVAAVIHQYLAYRYKLISERVSYYKYTPSTVLESPKIKLYWDRTIITDKTVHYNRPDITLHDKENKVVYLIDIAVPNTHNMQNTYTDKLTKYTDLTIELKTQWKVNTVRTIPIIISSTGVIPKTLHNSLKILQIHPLTFLNIQKAVILNTCRIVRKFLSIET

SEQ ID NO: 23808 - protein, 1354 aa, Pseudonascus paulliniae
MNNNNNKRFRYNLRSQSRAVPDKNNVLTPEDKETLREVLASNGRRSPLNTNRTSCPTSPCSLSTNSVTLSSGSTLSLNRDICSSSSSSNSVSDNVVEEACAESPPPITDSKRARKKWSTDMNTFIWHTYLIITQIETCTRGHLDELYLQFHRQFPNMDVSKQRVGDQRRAIIRNKLLSKQVLDGIKEEVRLHLLKTNRLPHASTDSLNTQPVGSDKRRMIWTTKMNEVIIETYFQVTELESNITTYRKKLFDKFIEHYPHLSHLTEQRIADQRRAIINNKMLSEATINQIRQEVALKLQKENTITYSQIHTPSHIHTETLNANIQITPTQLQTPQLELERTIHYTITLEAQNQIEKYFTEALEVFKNSKPTLRPSLPKQKVSKKFNSAVQFLNSTLIPNVISDETNFETLQLTIYCAAYAVVKFNGSKIRDTQSDVQFHTRSPAWQLNLEKRIGELRAHIGRLTEYIKGNRNKGLHKKVENIKRKYKLHSQHENPNTELTHFLDTLKQKLNALASRLRRYKKTTLRKTQNKLFYNNEKMFYRTFNTYTNTSSSSDNTSNTPTKDNLTEFWTNIWSKSPQHKNATWILEDKNNLTDLPQMPFEEINLDLLKRVIAKSHSWKAPGSDKIHNYWYKKFTNTHSLLHTHINNFIKSPSTLPHYITQGITYMLPKDVADMRNPAKYRPITCLQNIYKIITSCISEVMYMHTEQNNILAEEQKGCRRNRQGCKEQLTIDAVTSKQAYDKKRNIYTMYIDYQKAFDSVPHSWLLYILEHYNIHPTIISFLKSAMSNWKTQLKLHSNTVTIETDLVPINRGIFQGDSLSPLWFCLALNPLSNLLNNTGNGFKIKYDNKQHTISHLLYMDDIKLFGSTLKEINYLANITQTFSTDICMQFGIDKCKMQSVKRGIIENNSYLLNKGDSIDPVDQINGYKYLGHQQSRQIHQKQTKLTLIENFKSRLHRILNTQLNARNTIKAINTYAISILTYSFGVIHWTRTDLQKLQRMINTTMTKYRKHHPRACIQRQTLSRHEGGRSLIDVQNLHNRQLTSLRTYFHNRALYSKIHQAVVQADNKYTPLNLRDKTIVLPIITTEQKINAWAQKSLHGRHRLDLNSPNVDKVASNAWLRRGELFPETEGFIIGIQDQVIDTRNYRKHIIRDKTLVTDLCRHCHSCSETIQHITGACRSIVQTDYKHRHDQVAAVVHQYLAYKYKLISEKTSYYKYSPAIILESPQIKLYWDRTIITDKTVHYNRPDITLHDKENKIVYLIDIAIPNTHNIQTTYTDKLTKYTDLTIELKTQWKVNSVRTIPIVISSTGVVPKTLHTSLKALQIHPLTFLTIQKAAILNTCRIVRKFLSIET

SEQ ID NO: 23809 - protein, 1362 aa, Cecropterus bathyllus
MTNGALVFIKYAMRLRSKQLPQAGTREGESRSEPSSSGCPTYSGGGNASHKTTQFHTVVVHNSLINSHTSSFIPSRVFQNTKNAKITGDKETLKEDQAFDRRGSVVNTDITSSPISSVESYSSYSVTSPSSNNSHPSDDVVREANAINPPPITDTKRARKKWTTEMNIFIWRTYLEITRIESCTRCYLDELHLQFCKKFPHMDVSKQRVGDQRRAIVRNKLLPQQLLDDIKKEATLKMHNTNHLSLSQTDTLNLQTDKRRMIWTTKINEVIIQTYYEVTELETNLTTYRKKLFDKFIEHFPHLSHLTEQRIADQRRVIMHNKMLPVTKIDQIRQEVSLKLHRHKVATNRQTHSHTHTESLINENISQNIQTIQTQIQVPERVDVGIQITSEAQNQIQQYFSEALKSFKNSEPTLRPSLPKQKITKRLTSAVQYLDNTLIPNIVNNETDFETLQLVIYCAAYAAVKYNGSKIRDTNTDVQYNTQIPRWQLILEDRIGKLRVHIGRLTEYTKGVRSKGLQNKVEEIKRKYKIHSKHENTNTEIPHFLDTLKQKLNALASRLRRYKKTTQRKIQNMLFHSNEKMFYRTLSHNTNNSSVTNNAPNLPSKSDLTKFWSSIWSKSQQHTDASWIRKDKDSLKDLPEMPFENIDLDLLKRVIARSHNWKATGSDKIHNYWYKKFTYIHPLLQIHINKFIKSPNTLPHYITQGITYMIPKDTADMSNPAKYRPITCLQNIYKIITSCLSEIIYTHAERHNILDEAQKGCRKNTQGCKEQLTIDAVISKQALEKKRNIYTMYIDFQKAFDSIPHSWLLYILEHYNIHPTIIFFLKSAMSNWKTQLKLNSRTGTVESELLAINRGIFQGDSLSPLWFCLALNPLSRLLNNSKKGFKIKYDNKQHTISHLIYMDDIKLYGGTLNDINTLTKITQSFSTDICMQFGIDKCKMQSVKRGILQDNSYSLDTQNLIDPVDHINGYKYLGYQQSRQIHQKQTKATLTENFKTRLHKILNSQLNARNTIKAINSYAISILTYSFGIIQWTRTDIQKLQRIINTSLTKYRKHHPRACVQRLTLSRQEGGRSLMDIQNLHNRQLTALRTYFYNRAQHSLIHQAIVQADNKYTPLRLKDSTINLPTVTAEQKIHTWMQKSLHGRHRIDLNNPTVDKDASNAWLKRGELFPETEGFMIAIQDQVIDTRNYRKHIIRDKSLVTDICRHCHSSSETIQHITGACRSIVQTDYKHRHDQVAAIIHQYLAYKYKLIAEKTSYYKYTPKVILESPKIKLYWDRTIITDKTIHFNRPDITLHDKENKIVYLIDIAIPNTHNIQSTYTEKLTKYTDLTIELKTQWKVNTVRTIPIIISSTGIIQKICILV

SEQ ID NO: 23810 - protein, 1336 aa, Oileides vulpinus
MNQTQTKNIRYNLRSLSRACQGSMSVRTENEELNSSKEPIRPDVHSSSPTTSTETNSVYAPSSLSSSPSSSSSSMSVNVVEGAYAQNPSPITDIKRVRKKWSTEMNIFIWRTYLLITEIETCTQGHLEELYFRFHSKFPHMDVSKQRVSDQRRAIVRNKLLPQKVLDEIKEEVRVKLHNSNQVPNTLNNTINTQTQTTDKQRITWTSKMNEAIIRIYFEVTDLESNLTTYRKKLYDKFIEHFPHLSHLSEQRIADQRRVIVYNKMLPEDKIVQIRQEVALKIHTENNILNTQTYTNTNTQTLTTFNNINNADNQLFEEHTDTRECEGSRMTQNAYSELKQYFTEALKTFQNIDPTSRPVLPKQKVTKKLSSAVQYLNHTLIPETISQNTDFETTHLVIYCAAYAAVIFNGSKVKESHTNTRLNIQKPAWQVKLENRIKELRVHIGRLTEYNNGIRSKTLIRKVEKIKNKYKIHSQHENPNTDLSHFLDTLKQKLNALASRLRRYKKTTLRKTQNKLFSNNEKAFYRNLTQHNNTHTSPTAIPTKEHLSSFWSKLWSEPIEHRSKSSWIQEDKNRLKDLPNMQYENISLDLIKRVIAKTHNWKAAGSDKIHNYWYKKFTSTHPLLHVHINNFINTPSTLPVYITQGITYMLPKDTTDTSNPAKYRPITCLQNIYKIITSCISEIIYSHAEQNNILAEEQKGCRKNRQGCKEQLTIDAIALKQAHVNKRSIYTMYVDYQKAFDSVPHSWLVYILKHYNVHPTIVNFLESVMKTWQTKLRLHNGSESIETDPLNIKRGIFQGDALSPLWFCLALNPLSQLLNNSNKGFQIKYDKKHHTMSHLLYMDDIKLFGRTLNEIHTLANTTETFSSDICMQFNIDKCKIQSVYKGIIEHNSYNTNSENLIQPVDQAEGYKYLGYQQSRLIHVKETKTTLTEKFKARLHKILNTHLNARNTIKAINTYAIPTLTYSFGIIQWTQTDLQKLQRTINTTMTKYRKHHPRACVQRLTLSRQEGGRSLIDIQNLHNKLIKSLRTYFYNRADNSQLHLAVVKADRKLTPLNLSDHTIQLEEITAEQKINTWTQKSLHGRHRLDLNNPNVDKAASNAWLRRGELFSETEGFMIAIQDQIIDTRNYRKHIIRDTSLINDLCRHCHSSSETIQHITGACRCIVQTDYKHRHDQVAAIIHQYLAYKYKLIKEKTNYYKYSPAVILESSKFKLYWDRTIITDKTVHYNRPDITLHDKENKAVYLIDIAIPNTHNLQNTYTEKLTKYTDLTIELKTQWRVNTVKTIPIVISSTGIVPKNLHTSLKTLQIHPLTFLTIQKAVILNTCRIVRKFLSIDT

SEQ ID NO: 23811 - protein, 1356 aa, Myscelus amystis
MHLRSSNTLPQAGTTSGESRPESTSSGSSTYSGGGKSSLEPAQSKTVAGRTSRTSNASTRMQAHHSAKPMILEEPSTDKDATSTISSSFNSISQCITPAAQTLHLSDNVVQAADADNLAPIADKKCARKKWSTEMNIFIWRTYLKITQLESSTRGYLDELHHQFHRKFPHMNTSKQRLGDQRRAIVRNKLLPKTLLDNITEEVKTELCNTNQTLNAAINTQANITDRRRMVWTTQLNEAIIRIYLEVTELESNLTTYRKKLHEKFIEAFPHLSHITEQRIADQRRAVINNKMLLEPRIAEIRQEVAVKLNMHNVNTNPQTHTQHDQTEQLSAQEEPILLCSDKDEGFMPENEKLVIENLFSEALETFRNVEPTLRPLLPKQKVTKKLSNTVKYLNLILIPKTLIGDTNFETVQLIIYSAAYSAVIYNGGKVDYQQANATHVNKVPAWQINLEKRIGKLRIHIGRLTEYNKGIRNKGLERKVANIKRIYKIHSQHEQPNTDITHFLDTLKQKLNALAGRLRRYKITTLRKTQNKHFQNNEKTFYRSLSQQNNSNHSISSTTSIPNKDDFTNFWSKIWSETVEHNEGEWIQEDKNRLEGVQEMQFKEISLELLQRIISRTHNWKATGSDKIHNYWYKKFTNIHPILHAHINNFIKSPNTIPHYVTQGITYMIPKDATAMNNPAKYRPITCLQNIYKIITSCITELIYTHAEQNNILAEEQKGCRKNRQGCKEQLVIDTVMLKQAYSKKRNIFTMYIDYQKAFDSVPHSWLIYILKHYNVHPIIITFLKTAMSNWKTELKIHGTPGATGTDLIKINRGIFQGDALSPLWFCLALNPLSSLLNNSRKGFNIKYDNTQHTISHLMYMDDIKLFGSSLNHINTLANITEKFSNDIHMQFGIDKCKIQSVRKGVVEQNSYTLNNEEVITPVDQTIGYKYLGYQQSRQIHQKQTKTTLTEHFKSRLHKILNTQLNARNTVKAINTFAIPVLTYSFGIVNWTQTDIQKLQRLINTTMTKYRKHHPRACTQRLSLSRQEGGRSLIDIQNLHNRQITALRTYFHNRALHSQTHQATVRADTRLTPLNLGDTTINLTQNTTEQKIQTWAQKSLHGRHRNDLTNTNVDKNASNAWLKRGELFPETEAFMIAIQDQVIDTRNYRKHIIKDSSLVSDMCRHCHSSSETIQHITGACRSIVQTDYKHRHDQVAAIIHQYLALKHKLITEKTNYYKYTPATALETKSFKLYWDRTIITDKTIHHNRPDITLHDKANKIVYLIDIAIPNTHNLQTAFTEKLTKYTDLSIALKSQWKVNTVRTIPIIISSTGIVPKSLHASLKTLQIHPLTFLTIQKAVILNTCRIVRKFLSIDT

SEQ ID NO: 23812 - protein, 1368 aa, Proteides mercurius
MTNGALVSTKYAMRLRSRNLPQAGTREGESRPGPSSPGCSTYSGGGNASHMATQFRTTVVVDNSSINSHKSSPISSIDITSSPVSSVESYSHNKTTSSSSNNSHMSDNVVQEAYAENPPPVTDNKCARKKWSTEMNIFIWRTYLEITQIEYCTRGYLDLLYSEFCKKFPHMDVSKQRVGDQRRAIIRNKRIPQQLLDDIKKEVTLKLARTNQTPHAQTDILNPQTDITDRRRMIWTTKMNELIIESYYEVTELETNLTAYRKKLFDKFIEHFPNLTHLTEQRVADQRRAIINNKMLSEIQLNQIRQEVVMKLYRRKDVTNIQTHSHTHTESPTHENNIHHYQTTQTQTYIPESEEEIIQIISNAQKQIAEYFSEALKDFKNSEYSLRPSLPKQKITKKLINAVEYLNSTLIPNILCKETDFETLQLIIYCAGYAAVKFNGSKIKDSHTNIQLNARIPNWQLVLEKRIAELRTHIGRLTEYNNGVRSKILERKVEKIKRKYKLHSKHENPNTELPHFLDTLKQKLNALASRLRRYKKTSLRKTQNNLFQNNEKIFYRTLTQHKNSSSNTNKNLDLPSKDNLTEFWSNIWSISQQHKDANWIQKDKDSLVGLPEMPFENINLDLLKRVIAKSHNWKATGSDKIHNYWYKKFTCTHTFLHTHINNFIKSPNTLPNYITQGITYMIPKEPTDSSNPAKYRPITCLQNIYKIITSCLSEIIYTHVEQNNILADEQKGCRKHSQGCKEQLTIDAVISKQAYEKKRNIYTMYIDYQKAFDSIPHSWLLYILKHYKIHPTIILFLQYAMSNWKTKLKLHTSTQTIETDFLEINRGIFQGDSLSPLWFCLALNPLSRLLNNSKKGFKIKYDNKQHTISHLIYMDDIKLYGSTLKEINSLANITQSFSTDICMQFGVDKCKMQSVKRGIIEENSYSLNTENVIDPVDHINGYKYLGYQQSRQIHQKQIKATLIENFKIRLHRILNTQLNARNTSKAINTYAISILTYSFGIIQWTRTDIQKLQRIINTTMTKYRKHHPRGCIQRLTLSRHEGGRSLIDIQNLYNRQITALRTYFHNRAQYSLIHQAIVQADNKYTPLQLRDISVNLPNTTREQKIHTWMQKSLHGRHYTDLNNSFVDKNASNAWLRRGELFPETEGFMIAIQDQVIDTRNYRKHIIRDKSLVTDLCRHCHSSSETIQHITGACRSIVQTDYKHRHDQVAAIIHQYLACKYKLVSEKTSYYKYTPAVILESSKIKLYWDRTIITDKTIHYNRPDITLHDKENKIVYLIDIAIPNTHNLQTTYTDKLTKYTDLTIELKTQWKVNTVRTIPIIISSTGVVPKHLHTSLKEIKIHPLTFLTIQKAVILNTCRIVRKFLSIDV

SEQ ID NO: 23813 - protein, 1401 aa, Telegonus anausis
MPMTNGALVFTEYAMRLRSRQLPQAGTREGESRPEPSSSGCPTYSGGGNASHMTTRLHTVVVNNSFIDSHSSSSIPSRVFHSKKRAQIACGKDTSKIEQQSNRPGSSSNTDTTFSPLISPVESYSANDVTSSPSNILNLSDNVVQEAYAENPPPITDSKRARKKWNTDMNIFIWRTYLQITQLESCTRGYLDELYFQFSKKFPLMDVSKQRVGDQRRAIIRNKLLPQQLLDDIKKEVTLNIHKTNHLPHTQTNTYNPETDVTDKRRIVWTTKMNEVIIKTYYEVTQLETNLTSYRTKLFNTFIEHFPHLSHLTEQRIADQRRVIMYNKMLAETKIEQIRQEVALKLHREKVVTNTQTLSYTHIEAVNHENSTQDNSQTIQTQVPDHEEEGIHITSHTQNQIEEYFSEAIQEFENLEPTLRPSLPKQKITKKLTKAVQYLNNTLIPNLVCNETNFERLQLIIYCAAYAAVKYNGSKIKHNHTNIPFNARIPFWQLTLEKRIAELRVHIGRLTEYNKGIRSKGLQRKVENIKRKYKLHSQHENPNTELPHFLDTLKQKLNALSSRLRRYKKTTLRKTQNKLFYNNEKMFYRTLNQHTNSSLGNNNKPNLPSKDNLTEFWSNIWSKSQQHVDANWIRKDKDTLIDLPEMPFDNINLELVKRVIARTHNWKATGSDKLHNYWYKKFTCIHSLLHTHINNFIKSPNTLPHYITQGITYMLPKDPADMTNPAKYRPITCLQNIYKIITSCISELIYVHAEENNILAEEQKGCRKNTQGCKEQLTIDAVISKQAYEKKRNIYTMYIDYQKAFDSVPHSWLLYILKHYNIHPTIIHFLKSVMSNWKTGLKLYNGAEAIETELLPINRGIFQGDSLSPLWFCLALNPLSKLLNNSKKGFKIRYDNKQHTLSHLIYMDDIKIYGSTLNEINILANITQSFSTDICMKFGVDKCKMQSIKRGIIEDNSYTLNTQNTIDPIDHINGYKYLGYQQSRQIHQKQTKITLIENFKTRLHKILNSQLNARNTIKAINTYAISTLTYSFGIIHWTRTDLQKLQRIINTTMTKYRKHHPRACVQRLTLSRQEGGRSLIDIQNLHNRQLTILRTYFHNRAQNSLIHQAIIRADIKYTPLKLRTNTVDLPIITADQKIHTWTQKSLHGRHRTDLNNPTVDKDASNAWLRRGELFPETEGFMIAIQDQVIDTRNYRKYIIRDNSLVTDLCRHCHSSSETIQHITGACRSIVQTDYKHRHDQVAAIVHQYLAYKYKLISEKTSYYKYTPEVILESPKIKLYWDRTIITDKTIHYNRPDITLHDKENKIVYLIDIAIPNTHNIQTTYTEKLTKYTDLTIELKTQWKVNTVRTIPIIISSTGIVPKNLHASLKAIDIHPLTFLTIQKAAILNTCRIVRKFLSIDT

SEQ ID NO: 23814 - protein, 1386 aa, Urbanus evona
MRFRSRQLPQAGTREGESRPEPSSSGCPTYSGGGNASHMTTQSQTVVVDNSFINSHSSSPIPSRVFRSTKRTQIACVKEASKIEQESNRLGSESDTDTTFSPPISPVESYSSNSVTSSSSNNQNLSDNVVQEALAENPPPITDSKRARKKWSTDMNIFIWRTYLEITQLESCTRGYLDELYFQFCKKFPHMDVSKQRVGDQRRAIIRSKQLPQQLLDDIKEQVTLNIHKTSHLPRTQINTHNSQTDVTEKRRMIWTNKMNEIIIQTYYEVTELETNLTTYRTKLFNIFIKHFPHLSHLTEQRIADQRRVIMYNKMLPETKIEQIRQEVALKLHREKVATNTQIHSHTHLETLNHENSIQNIQTIQTLTQVPDREEEGIQMTLHLQNQIEEFFLEAIKEFENLEPTLRPSLPKQKITKKLTNAVHYLNNILIPNKICSETNFERLQLITYCAAYAAVKYNGSKIKNNHTNIPFNARIPTWQLTLEKRIAELRAHIGRLTEYNKGIRSKKLQRKVENIKRKYKLHSQHETPNTEIPHFLDTLKQKLNALSSRLRRYKKTTLRKTQNKNFYNNEKMFYRTLTKHSSSGTNNTPNLPSKSNLTEFWSNIWSKPQQHINASWIKKDKDSLTHLPEMPFENINIELVKRVIARTHNWKATGSDKLHNYWYKKFTCTHSLLHTHINNFIKSPDTLPHYVTQGITYMLPKDEADMSNPAKYRPITCLQNIYKIITSCLSELIYVHAEQNNILAEEQKGCRKNTQGCKEQLTIDAVISKQAYDKKRSIYTMYIDYQKAFDSVPHSWLLYILEHYNIHPTIIHFLKFTMSNWKTKLKLHSGAEIIETESLPINRGIFQGDSLSPLWFCLALNPLSTLLNNSKKGFKIKYDNKQHTISHLIYMDDIKIYGSTLNEINTLTNITQSFSTDICMQFGVDKCKMQSVKRGILEDNSYTLNTQNTIDPVDHINGYKYLGYQQSRQIHQKQTKTTLVENFKTRLHKILNTQLNARNTIKAINTYAISTLTYSFGIIYWTRTDIQKLQRIINTTMTKYRKHHPRACVQRLTLSRQEGGRSLIDIQNLYNRQLTTLRTYFHNRAQNSDIHQAIVRADTKYTPLRLRDNTTSLPIITNDQKILTWMQKTLHGRHRADLNNPNVDRDASNAWLRRGELFSETEGFMIAIQDQVIDTRNYRKYIIRDNTLVTDLCRHCHSSSETIQHITGACRSIVQTDYKHRHDQVAAIIHQYLAYKHKLITEKTSYYKYTPEVILESPKIKLYWDRTIITDKTIHYNRPDITLHDKENKIVYLIDIAIPNTHNIQTTYTEKLTKYTDLTIELKTQWKVNTVRTIPIIISSTGIVPKNLHVSLKAIEIHPLTFLTIQKAAILNTCRIVRKFLSIDT

SEQ ID NO: 23815 - protein, 1392 aa, Autochton zarex
MTNGALVFTKHAMRLRSKQLPQAGTREGESRPEPSSSGCPTYSGGGNASHKTTQFHTVVVHNSSIKSHTSSSIPSRVFQNTNNAQITDDKETTKEGQTCDRLGSDVNSNITSSPISSVESYSSYSVSSSSSNSSHLSDNVVREAYAENPPPITDNKRARKKWSAEMNIFIWRKYLEITQIESCTRSYLDELYLQFCKKFPHMDVSKQRVGDQRRAIVRNKLLSQKTLDDIKADAILNIHKTNHLSLSQTDTLNLQTDVTDKRRMIWTTKMNEVIIQIYFEVTELETNLTTYRKKLFDKFIEHFPHLSHLTEQRIADQRRVIMHNKMLPVTKIDEIRQEVSLKLHRDKPATNPIQLHTHTESLIHENSTQNIQTQIQVPEHDEAGIQITSQAQNQIEEYFSEALKIFKNSEPTLRPSLPKQKITKRLTIAVLYLNSTLIPNIASNETNFETLHLVIYCAAYAAIKYNGGKIREINAYTQYNTQTPRWQLILEDRIGKLRVHIGRLTEYNKGIRSKRLQKKVEEIKRKYKLHSQHENPNTEISHFLDTLKQKLNALASRLRRYKKTTQRKTQNKLFNNNEKLFYRTLTNNSPVTNNTPNLPSKSDLTEFWSNIWSKSPQHTDASWIRKDKDSLKDLPEMPFEGIDLDLLKRVIARTHNWKATGSDKIHNYWYKKFTYTHPLLHTHINNFIKSPNTLPHYITQGITYMLPKDAADTSNPAKYRPITCLQNIYKIITSCLSEIIYAHAEQNNILDEAQKGCRKNTQGCKEQLTIDAVISKQALEKKRNIYTMYIDFQKAFDSIPHSWLLYILKHYNIHPTIICFLKSAMSNWKTQLKLNSGAGTIESELLAINRGIFQGDSLSPLWFCLALNPLSRLLNNSKKGFKIKYENKQHTISHLVYMDDIKLYGSSLNEINTLTNITQSFSTDICMQFGIDKCKTQSVKRGILEDNSYSLDTQNLIDPVDHVNGYKYLGYQQSRQIHQKQTKTTLTENFKTRLHKILNSQLNARNTIKAINTYAISILTYSFGIIQWTRTDIQKLQRIINTTMTRYRKHHPRACTQRLTLSRQEGGRSLIDIQNLHNRQLIALRTYFHNRAHHSLIHQAIVKADNKYTPLRLKDSIVNLPTVTTEQKIEAWMQKSLHGRHRIDLKNPAVDKDASNAWLKRGELFPETEGFLIAIQDQVIDTRNYRKHIIRDKSLVTDVCRHCHSSSETIQHITGACRSIVQTDYKHRHDQVAAIIHQYLAYKYKLIVEKTNYYKYIPDVILESSKIKLYWDRTIITDKTIHHNRPDITLHDKEHKIVYLIDIAIPNTHNMQTTYTEKLTKYTDLTIELKTQWKVNTVRTIPIIISSTGVVPKNLHASLKEIDIHPLTFLTIQKAAILNTCRIVRKFLSIDT

SEQ ID NO: 23816 - protein, 1349 aa, Aguna metophis
MTNGALVFTKYAMRLRSRQLPQAGTQEGESRPGPSSSGCPTYSGEGNASHTTTQSRTVVVHNSFINSHISSSSEDSTYSVTSPSSNNSDLSDNVVQEACAANPSSITDSKRARKKWSTEMNIFIWRTYLEITELEYCTRGYLDELYLQFCKKFPHMNVSKQRVGDQRRTIIRNKLLSQQSLDNIREEVTLKIQKNNHLPYTQTSTLNPQTDLKDKRRMIWTNDMNEVIIQTYYEVTELETNFTTYRKKLFDKFIEHFPHLSHLTEQRIADQRRVIIYNKMLPDNKIDQIRQQVSIKLHRENVATNHQKHLHTHTESFIHENSTQNIQTIQTQVLEEEDIQETTHAQNQIKEYFSEALKIFKNSEPTLRPSLPKQKTTKKLTNAVQYLNNTLIPNVANSDTDFESLQLIIYSAAYAAVKYNGSKIRDINTDVQHNTQKPRWQIILEDRIEKLRVYIGRLTEYNNGVRSKRLQRKVEEIKRKYKLHSQHENQNTEIPHFLDTLKQKLNALASRLRRYKKTTLRKSQNKLFNNNEKMFYRSLTQHTNTSSVTSRRPFLPSKNDLTEFWSNIWSKSQQHKESSWIHEDRDSLKDLPEMPFENIDLDLLKRVIARTHNWKATGSDKIHNYWYKKFTCIHPLLHIHINNFIKSPNTLPHYITQGITYMLPKDPEDLSNPAKYRPITCLQNIYKIITSCISEIIYIHAEQNNILAEEQKGCRKNKQGCKEQLTIDAVISKQAYEKKRNIYTMYIDFQKAFDSIPHSWLLYILKHYNIHPTIILFLKSVMSNWKTQLKLNSSAGTIESELLSISRGIFQGDSLSPLWFCLALNPLSKLLNNSKKGFKIKYDNKQHTISHLVYMDDIKLYGSTLNEINTLTNITHSFSTDICMQFGIDKCKMQSIKRGVLEDNSYSLDTQNVIDPIDHINGYKYLGYQQSRQIHQKQTKTMLTENFKTRLYKILNTQLNARNTIKAINTYAISTLTYSFGIIQWTRTDLQKLQRIINTTMTKHRKHHPRACIQRLTLSRQEGGRSLIDIQNLHNRQLTTLRTYFHYRAQHSLLHQAIVQADNKYTPLRLRDNTINLPVVTTEQKIHTWLEKSLHGRHRTDLNNPVVDKDASNAWLKRGELFPETEGFMIAIQDQVIDTRNYRKHIIRDRSLVSDICRHCHSSSETIQHITGACRSIVQTDYKHRHDQVAAIIHQYLAYKYKLISVKNSYYKYTPEVILESSKIKLYWDRTIITDKTIHHNRPDITLHDKENKIVYLIDIAIPNTHNIQTTYTEKLTKYTDLTIELKTQWKVNTVRTIPIIISSTGVVPKNLHTSLKAIDIHPLTFLTIQKAAILNTCRIVRKFLSIDS

SEQ ID NO: 23817 - protein, 1334 aa, Telemiades fides
MCLFGRRLIAGITYIIIIIIIEQRIENNSREDPHTDCITSITPTPLPSSSFHSTSSSSHQPSSTSLLSDNVVQVANADNSAPVSDNIRTRKKWSRDMNIFIWRTYLIITKVETCIRGHLDLLHQQFQIEFPHMDVSKQRIGDQRRSIIRSKLLPQTLLDEIKQEVIQQLGDTQTTQVNTINVQINDKDKRRIAWSVEMNETILRLYFEVTENETNLTAYRKNLYNKFIEHYPHLSHLSEQRIADQRRVILNNKQLSESRIEQIKHETVIKLQSKKQNVQILNNTENTCSMQDTLNTVVADNTNNTNEIHTTMLNTYEQNTDRHKISVDDQNKIETTFLETIEMFKNTEPTSRPFIPKQKSSKKFANIVYFINNNLIPKITNNNTDFDTTQLIIYCGAYTAVKHNDPRFSTRTDRRNNIIPAWHEKLQKRIQELRANIGRVTEYLRGIRSNALKRRIEIIKSKYKIHSKHENLNTELSHFLDTLKQKLNALANRLRRYKKTTLRKTQNKIFINNEKIFYRNITHNNYNTSLRNNTPSPKTDNFLEYWTKIWSQPITHKHNNWIEEDKQKLKDLPQMKYESIDIDLLKRIIAKTHNWKATGSDNIHNFWYKKFTNIHTLLHIHINNFIKSPKTLPQYITQGITYMIPKDKLDINDPGKYRPITCLQNIYKIINSCINEIIYKHVEESNILAEEQKGCRRSSHGCKEQLTIDAVAMQQALSKKRNIYTMYIDYQKAYDSVPHTWLIYILHHYNIDPKLIQFLESAMSHWKTKLKVKHDNITIETDFIDINRGIFQGDALSPLWFCLALNPLSSLINQSKNGFKLRYNNTSQIISHLMYMDDIKLFGGTLKEMESLAEITQLFSSDICMQFGLNKCRMQSVHRGVIKRNSYQISNDEFIEALDQEEGYKYLGFQQSQQIHQKETKKTLIDKFKNRLQKVLNTQLNARNIVKAINTFAIPILTYSFGVIRWTQSELQKLQRIVNTTMTKHRKHHPRACIQRLVLPRSEGGRGIIDIKNLHSKQLKTLRTFFHNRAERSRIHNAIVQADKKLTPLNLNDFSIAVNETSREQKLDAWMQKSLHGRHRSDLINQNVDKVSSNAWLKMGNLFPETEGFMIAIQDQVIETKNYRKHIIRDPGALNDLCRHCCSSSETIQHITGACKSRAQTDYKHRHDQVASIIHQYLAYKYKLIANKTSYYKYSPEVILDSANYKLYWDRTIITDKTVHCNRPDITFHDKRSKTVYLIDIAIPNTHNLQTTYLEKLAKYTELSIELKAQWKVDTVRTVPIIISSTGVIPRTLHSSLKTLQIHPMTFITMQKAVILNTCRIVRKFLSMDTPNIT

SEQ ID NO: 23818 - protein, 1134 aa, Dalla cyprius
MIWTPQLNEAIIRIYLEVTELESNLTTYRKKMYDKFIEVFPHLSHITEQRVADQKRVIVHNKMILETKMEEIRQEVALKLNRDHINSHQTQSHNQTQHFNSVNHTQDPHTIHPQAPTPYVQQTIVHMPEHEITQIENSFSEALELFKNTHPTLRPPLPKQKMSRKLINAVEHINISLLPNFLISNTDFETVQLGIYCAAYSAVIYCGGKIQNEQTKNTYIDRKPKWQLNLENRIEKLRIHIGRLTEYNKGIRNKTLDRKIEDIKRRYQIHSQHENPNTDLSHFLDTLKQKLSALASRLRRYKKTTLRKTQNKLFQNNEKSFYRSLTETNQTISPTSNTSIPTKDDLTQFWSKLWSDNVQHKDSEWIRNDKDRLTDLPQMQFENISLDLLKRVIAKTHNWKASGSDKIHNYWYKKFTSTHPILHTHINNFIKLPHNIPDYITQGVTYMIPKDLTAMNNPAKYRPITCLQNIYKIITSCISEIIYTHTEQNNILAEEQKGCRRNRQGCKEQLIIDAVTSKQAYTKKRNIFTMYIDYQKAFDSVPHSWLTYILEHYNVHPTIISFLKSVMTNWKTKLKLHSNLGSTETDLININRGIFQGDALSPLWFCLALNPLSNLLNTSNKGFNIKYNHTQHTISHLMYMDDIKLFGSSLNQINNLASITETFSDDICMQFGIDKCKIQSVRKGVIEYNSYTITNADVISPVDPSTGYKYLGYQQSQQIHQKQTKITLTENFKSRLHKILNTQLNARNTIKAINTYAIPILTYSFGVIQWTQTDIQKLQRLINTTMTKYRKHHPRSCIQRLSLPRLEGGRSLIDIQNLHNKQLTSLRNYFHNRAQYSPIHQAIVQADTKLTPLNLRDSNFNLPVITPDQKISTWTQKSLHGRHRIDLNNPNIDKTSSNAWLRRGELFPETEGFMLAIQDQVIDTRNYRKHIIKDSSLVNDSCRHCHSSSETIQHITGACRSIAQTDYKHRHDQVAAIIHQYLALKYKLITEKTNYYKYSPATTLDTQQFKLYWDRTIITDKTVHHNRPDITFHDKVNKIVYLIDIAIPNTHNLQTTYTEKLTKYTDLTIELKTQWKVNTVRTIPIIISSTGVIPKTLHGSLKTLLIHPLTFLTIQKAVILNTCRIVRKFLSIDS

SEQ ID NO: 23819 - protein, 1367 aa, Narcosius parisi
MTNGALVFTKYAMRLRSRQLPQAGTREGESRPGPSSSGSPTYSGGGNASHMTTQSHAVVVDNSFINSHTSSPIPSINTTSSPISSVESYSANSVTSPSSNNSHLSDNVVQEAHAKNPVPITDSKRARKKWSKEMNIFIWRTYLEITQIESCTRGYLDELYSQFSKKFPHMDVSKQRVGDQRRTIVRNKLLPQQLLDDIKEDVTLNIHRTNNLPQTQTDTLNYQTTVTEKRRMIWTTKMNEVIIQTYYEVTELETNLTTYRKKLFDKFLEHFPHLTHLTEQRIADQRRVIMNSKMLPETKIDQIRHEVSLKLYGQNVTNLQTHSHIDTESSIHKNSMQNIQTMQTQIQVSEREKEDIEIILHAQNQIEEYFSEALKAFKNSEPTLRPSLPKQRITKRLTTAVQYLNSTLIPNIANNETNFETLQLVIYCAAYAAVKYNGSKIRDIHTDVQYSTQKPTWQLILEERIGKLRAHIGRLTEYNRGMRSKGLQRKVDEIKRKYKLHSQHENPNTELLHFLDTLKQKLNALASRLRRYKKTTLRKTQNKLFHNNEKIFYRTLTQHNINSSSVTNNTPTPPSKNDLTDFWSNIWSKSQQHKDASWIRKDKESLTDLPEMSFEDIDLDLLKRVIARSHNWKATGSDKIHNYWYKKFTSTHSLLHTHINKFIKSPNTLPHYITQGITYMLPKDPTDMSNPAKYRPITYLQNIYKIITSCISEIIYTHAEQNHILAEEQKGCRKNRQGCKEQLTIDAVISKQAFEKKRNIYTMYIDFQKAFDSIPHSWLLYILEHYNIHPSIIHFLKFAMSSWKTQLKLNTGAGNIESELLAINRGIFQGDSLSPLWFCLALNPLSRLLNNSKKGFKIKYDNKQHTISHLIYMDDIKLYGSTLNEINTLANITQSFSTDICMQFGVDKCKIQSVRRGIIEDNSYTLNTQNLIEPIDHIIGYKYLGYQQSRQIHQKQTKATLTENFKTRLHKILNTQLNARNTIKAINTYAISILTYSFGIIQWTRTDIQKLQRLINTTMTKYRKHHPRGCTQRLTLSRQEGGRNLIDIQNLYNRQLTTLRTYFHNRAQDSILHQAIVQADNKYTPLRLRDSTINLPIVTTEQKLHTWLQKSLHGRHYTDLNNPIVDKDASNAWLRRGELFPETEGFMLAIQDQVIDTRNYRKHIIRDKSLVTDHCRHCHTNSETIQHITGACRSIVQTDYKHRHDQVAAIIHQYLAYKYKLISEKTSYYKYTPEIILESPKIKLYWDRTIITDKTIHYNRPDITLHDKENKTVYLIDIAIPNTHNIQTTYTEKLTKYADLTIELKTQWRVNAVRTIPIIISSTGIVPKNLHTSLKAIGIHPLTFLTIQKAAILNTCRIVRKFLSIDT

SEQ ID NO: 23820 - protein, 1441 aa, Telegonus anausis
MRLRSRQLPQAGTREGESRPGPLSPGCPTYSGGGNASHLTTRSHTVVVHNSFINSNTSPIPSAPIRSSPIPPSSIPSSSIPSSSIPSSSISSSSIPSSSIPSSSIPSSPIPSSSIPSSLIPSRVFLSTKSAQVVGNKKNPKEDQTLNRRRSDITSSPISSIESSSGYYVTSSSSNSSDLSDNVVQEAHAANPPPITDSKRARKKWSEEMNIFIWRTYLEITQIESCTRGYLDELYFQFCKKFPNMDVSKQRVGDQRRAIVRNKLLSQQLLKVIKEEVTLNIHKTNHLPIAQTGTLNLHADSTDKRRMTWTTKMNEVIIQIYYEVTELETNLTTYRKKLFDKFMLHFPHLTHVTEQRIADQRRVIMNNKMLPETKMDQIRQEVSLKLHRDKVATNLQTDEYSHIESSIHQNNTHNQQTIQSQIQVTEYEGEGIQITSHAQNQIEEYFLEALKIFENSEPTHRPSLPKQKVTKRLNSAVQYLNSNLIPNTVNDGTDFETLQFVIYCAAYAAVKYNGSKIRDVNTGIQFNTQTPRWQLTLEDRIGKLRTHIGRLTEYSKGTRSKRLERKVEEIKRKYKLHSQHENPNTELPHFLDTLKQKLNALASRLRRYKKTTLRKTQNKLFHNNEKMFYRTLTQHSTQHLTSNTPVLPSKDDLTEFWSNIWSISQQHRDASWIRKDKDSLIDLPEMPFENIDLDLLKRVIARSHNWKATGSDKIHNYWYKKFTYTHSLLHTHINNFIKSPNTLPLYITQGITYMLPKDPNDMSNPAKYRPITCLQNIYKIITSCISEIIYIHTEENNILAEEQKGCRRNTQGCKEQLTIDAVISKQAYEKKRNIYTMYIDFQKAFDSIPHSWLLYILEHYNIHPTIILFLKSAMSNWKTQLKLKNGPGTLESDFLTINRGIFQGDSLSPLWFCLALNPLSRLLNNTKKGFKIRYDNKQHIISHLVYMDDIKLYGSTLNEINTLATITQSFSTDICMQFGIDKCKMQSVKRGILEDNSYLLDNQNQIDAVDQISGYKYLGYQQSRQIHQKHTKATLTENFKTRLHKILNTQLNACNTIKAINTYAISILTYSFGIIQWTRTDIQKLQRIINTTMTKYRKHHPRACVQRLTLSRQEGGRSLIDLQNLHNKQLTGLRTYFHNRAQHSLLHQAIVQADNKYTPLRLRNTIINLSTVTHEQKIHTWLQKSLHGRHRIDLNNPIVDKDASNAWLRRGELFPETEGFMIAIQDQVIDTRNYRKHIIRDKSLVTDVCRHCHSCSETIQHITGACRSIVQTDYKHRHDQVAAIIHQYLAYKYKLISEKTSYYKYTPEVILESPKIKLYWDRTIITDKTVHFNRPDITLHDKENKIVYLIDIAIPNTHNIQSTYTEKLTKYTDLTIELKTQWKVNTVRTIPIIISSTGIIPKTLEASLKAIDIHPLTFLTIQKAAILNTCRIVRKFLSIDT

SEQ ID NO: 23821 - protein, 1393 aa, Urbanus proteus
MPREGRTLDSISLHYSSDQQSNSISKYAMRLRSRQLPQAGTRQGESRPEPSSSGCPTYSGGGNASHMTTQSHTVVVDNSFINSHSSSSIPSRVFRSTKRAQIACNKETSKIEQESDKPGSDSDTDAFSPPISPVESYSANSITFPSSNNKNLSDNVVQEAHAANPSPITDSKRARKKWDTDLNIFIWRTYLEITQLEYCTRGYLDELYLQFCKKFPNIDVSKQRIGDQRRAIVRNKLLPQQVLDNIKEEVKLNINKTNHLPHAQTDTHNSQTNPTDKRRMIWTTKMNEVIIQTYYEVTDLETNLTTYRTKLFNTFIKHFPHLSHLTEQRIADQRRIIMNNKMLPDTKIDQIRQEVALKLHREKVTTNTQIHSHTHENITQNIQTIQTLVQNPDREEEGTQITSHIKNQVEEYFSEAIKQFENLEPTLRPSLPKQKITKKLTNAVQYLNNTLIPNIVCSETNFERLQLIIYCAAYAAVKYNGSKIKDHHTNKRFNARIPGWQLILEKRIAELRANIGRLTEYNKGTRSIGLQRKVENIKRKYKLHSQHENPNTELPHFLDTLKQKLNALSSRLRRYKKTTLRKTQNKLFYNNEKMFYRTLTQHINSSSSRNNSSTLLSKNDLTEFWSNIWSKPQQHAKASWIQQDKDSLIDLPEMPFENISLDLVKRVITRTHNWKATGSDKIHNYWYKTFTCTHSLLHTHINNFIKSPNTLPHYITQGITYMLPKDPTDMNNPAKYRPITCLQNIYKIITTCISELIYIHAEQNNILAEEQKGCRKNTQGCKEQLTIDAVISKQAYDKKRSIYTMYIDYEKAFDSVPHSWLLYILEHYNIHPTIIHFLKSAMGNWKTKLKLHSDAETIETELLPIHRGIFQGDSLSPLWFCLALNPLSRLLNNSKKGFKIKYDNKQHTISHLIYMDDIKIYGSTLNEINTLANITQSFSTDICMQFGVDKCKMQSVKRGIIQDNSYALDTQNTIDPVDHIYGYKYLGYQQSRQIHQKQTKTTLIENFKTRLHKILNTQLNARNTIKAINTYAIPTLTYSFGIIHWTKSDIQKLQRIINTTMTKYRKHHPRACIQRLTLSRQEGGRNLIDIQNLHNRQLTTLRTYFHNRAQHSVIHQAVVRADIKFTPLRLGNNTINLPIITTDQKTHSWIQKSLHGRHRADLNNPSVDKDASNAWLRRGELFPETEGFMIAIQDQVIDTRNYRKHIIKDKSLITDLCRHCHSNSETIQHITGACRSIVQTDYKHRHDQVAAIIHQYLACKYNLITEKTSYYKYIPQVILESPKIKLYWDRTIITDKTIHYNRPDITLHDKENKIVYLIDIAIPNTHNMQTTYTEKLTKYTDLTIELKTQWKVNTVRTIPIIVSSTGIIPKNLHTSLKAIDIHPLTYLTIQKAT

SEQ ID NO: 23822 - protein, 1212 aa, Cecropterus evenus
MNNKLRSSTFSKKFPQMDVSKQRLGDQRRAIVRNKLLPQQLLDDIKKEVTLNIQNTNNLPLSQTNTLNLHTDATDKRRMIWTTKMNEVIIQTYYEVTELETNLTSYRKKLFDKFIGHFPHLSHLTEQRIADQRRVIMNNKMLPVTKIDQIRHEVSLKLHIDKLAKNSQTDSHTQTEPLIHEKNRQNTQTHIEVPERVEPDIQITSQAQNQIEEYFSEALKVFKNSEPTLRPSLPKQKITKRLTNAVEYLNSTLIPNIANKDTDFETLQLVIYCAAYAAVKYNGSKIMDRNTDVQYKTQIPRWQYILEERIANLRKHIGRLTEFNKGIRSKGLQRKVEEIKHKYKLHSHHENPNTETPHFLDTLKQKLNALASRLRRYKKTTQRKTQNKLFYYNEKMFYRTLTTHTNNNSTVSNNSLNLPSKKDLTEFWSSIWSKSQQHTDASWIQKDKSSLADLPGMPFENIDLDLLKRVIARTHNWKATGSDKIHNYWYKKLTCTHPLLHTHINNFIKSPNALPHYITQGITYMLPKDEADISNPAKYRPITCLQNIYKIITSCISEVIYTHVERNNILDEAQKGCRKNTHGCKEQLTIDAVISKQALEKKRNIYTMYIDFQKAFDSIPHSWLLYILDHYNIHPTIIYFLKTAMSNWKTQLKLNSGAGTVQSELLAINRGIFQGDSLSPLWFCLALNPLSRLLNNSKKGFKLKYDNKHHIISHLVYMDDIKLYGSTLNEINTLANITQTFSRDICMQFGIDKCKMQSVKRGILEDNSYSLDNHNIIDTVDHVNGYKYLGYQQSRQIHQKVTKETLTENFKTRLHKILNTQLSARNTTKAINTYAISTLTYSFGIINWTRTDIQKLQRIINTTMTKYRKHHPRACVQRLTLPRQEGGRSLIDIQNLHSRQLIALRTYFHNRAQYSLIHQAIVQADNKYTPLRLKDSTINLPNVTTEQKVHTWLQKPLHGRHRTDLNNPAVDKDASNAWLRRGELFPETEGFAIAIQDQVIDTRNYRKHIIRDKSLVSDVCRHCRSCSETIQHITGACRSIVQTDYKHRHDQVAAIIHQYLAYKYKLISEKTSYYKYKPEVILESSEVKLYWDRTILTDKTIHYNRPDITLHDKENKIVYLIDIAIPNTHNIQTTYTEKLTKYTDLTIELKTQWKVDTVRTIPIIISSTGIVPKTLHTSLKAIGIHPLTFLTIQKAAILNTCRIVRKFLSIDT

SEQ ID NO: 23823 - protein, 1234 aa, Chioides vintra
MHLRSRKLPQAGTQEGESRPGPSSSGSPTYSGGGKASHTTTRSRTVVVDNSFINSHTSSPIPSIDITSSPISSGESYSAHSVTSPSSNSSYLSDNVVQEASAKNPPPITGSKRARKKWSNDMNIFIWRTYLEITQIETCTRGYLDELYFQFCKKFPHMDVSKQRVGDQRRAIIRNKLLSQQILDNIKEEVTLNINKINHLPQAQTNTHINTLNSQTDVTDKRRMTWTTKMNEVIIETYYEVTELETNLTTYRKKLFDKFIEHFPHLSHLTEQRIADQRRVIMYNKMLPQTKIDQIRQDISLKLHKENVSTNSTHSHIHTESLIHENNTQNIQTIQNQVQVQEHEEEEIQITSHTQDQIHEDFSEALRVFKNLEPTLRPSLPKQLITKRLNSAVQYLNNTLIPNIINNETDFETLQLVIYSAAYAAVKHNGGKIRDKHINAQYNTQTPRWQLVLEERIEKLRAHIGRLTEYNKGIRSKGLQKKVEEIKVKYKLHSQHEQPNTELPHFLDTLKQKLNALASRLRRYKKATLRKTQNKLFHNNEKMFYRNLTHNNITSVNNTPTLPSKNNLTDYWSNIWAKSQQHKEASWIQKDKESLLDLPEMTFENIDIDLLKRVIARSHNWKATGSDKIHNYWYKKFTCTHFLLHLHINNFIKSPNTLPDYITQGITYMLPKDPTDMSNPAKYRPITCLQNIYKIITSCISEIIYNHAEQNNILAEEQKGCRKKSQGCKEQLTIDAVISKQAFEKKRSIYTMYIDFQKAFDSIPHSWLLYILEHYNIHPTIIHFLKYAMSNWNTQLKLHSNTGTIESELIAINRGIFQGDSLSPLWFCLALNPLSRLLNNSKKGFKVRYDNKQHTISHLIYMDDIKLYGSTLNEINSLANITQTFSTDICMQFGIDKCKIQSVRKGVIENNSYSLDTHNLIDPVDQITGYKYLGYQQSRQIHEKQTKATLIEHFKTRLHKLLNTQLNARNTIKAINTYAISILTYSFGIIQWTRTDIQKLQRIINTTLTKYRKHHPRACVQRLTLSRQEGGRSLIDIQNLHNRQLAALRTYFHNKARDSLIHQAIVQADTKYTPLRLKDTSINFPIVTTQHKADTWLQKSLHGRHRTDLNNPTVDKDASNAWLRRGELFPETEGFMIAIQDQVIDTRNYRKHIIRDKSLITDHCRHCHSSSETIQHITGACRSIVQTDYKHRHDQVAAIIHQYLAYKYKLISDKTSYYKYTNKQTNKKSNVSSL

SEQ ID NO: 23824 - protein, 1225 aa, Piruna aea
MNIFIWRTYLKVTHLESSIRGHLDELHFQFHQKFPQMDASKQRVGDQRRAIDRNKLLPHKLLDDIREEVKTELGDTTQLPIINTQPDSLNKRRMIWTPQLNEPIIRIYFEVTELESNLTTYRKKMYDKFIEAFPHLTHITEQRIADQRRVIVNNKMILETKIDQIRQEVAIKLNSINTHRTQTHNETELNTSSSCMQDDHITQQQLPIPYTQEVTTSMPEYQKLELEKLLCETLELFKNTHPTSRPPIPKQKITKKFTNAVQYINMSILPKFLNNDIDFANLQLLIYSGAYTAVTFNGAKIRDRQTEITNHNRKPMWQLNLEKRIEQLRIHIGRLTEYKNGIRSKALDRKVEDIKRRYKIHSQHEDPNKDLSHFLDTLKQKLNALSSRLRRYKKTTLRKTQNRLFQNNEKMFYRTLTQTNNNTSPSCSDNPIPTKDDLTQFWSNLWSEKVEHKNSEWIREDKNRLAGLPEMQFENISLDLLKRAIAKTHNWKATGSDKIHNYWYKKFTSIHTILHTHINNFIQSPNTTPHYITHGVTYMIPKDPTAMKNPAKYRPITCLQNIYKIITSCITEIIYTHTEQNNILAEEQKGCRKNSQGCKEQLIIDAVISKQAYTKKRNICTMYIDYQKAFDSVPHSWLLYILEHYNVHPTIITFLKSVMNTWKTELKLHSSVGTIETDLININRGIFQGDSLSPLWFCLALNPLSNLLKNSNKGFNIKYNNTQHTISHLMYMDDIKLFGSSFSQINILANITQTFSDDIRMQFGIDKCKIQSVHRGVIENNSYILNNEDCICPVDPTTGYKYLGYQQSQQIHQKQTKTTLTEHFKSRLHRILNTQLNARNTIKAVNTYAIPILTYSFGIIQWTRTDIQKLQRLINTTMTKYRKHHPRACIQRLSLPRLEGGRSLIDIQNLHNRQLTTLRSYFYNKAQDSQVHRATVQADTKLTPLNLRDSTFSVPEITPEQKINIWTQKSLHGRHRSDLTNQHIDKIGSNAWLRRGELFPETEGFMIAIQDQVIDTRNYRKHIIKDSSLINDLCRHCHSSSETIQHITGACRSIVQTDYKHRHDQVAAIVHQYLALKYKLITEKTNYYKYTPATILDTDNFKLYWDRTIITDKTVHYNRPDITLHDKANKVVYLIDIAIPNTHNLQTTYTEKLTKYTDLAIELKTQWRVNTVKTIPITISSTGVVPKTLHSSLKTLQIHPLTYLTIQKAVILNTCRIVRKFLSLD

SEQ ID NO: 23825 - protein, 1331 aa, Cephise aelius
MRLRNRQIPQAGTREGESRSEPSGSGCPTYSGGGIVSHTTTQTSAAVVNKTYITSPSSSPTFSTSSVSFSASTVTSSRHSVLSDNVVQEAYAENPAPITDNKRARKKWSKDMNIFIWRTYLIITQVESRTRGYLDELYLQFRKEFPDMDVSKQRVGDQRRTIIRNKLLSSQLLDNIKEDVRLHLQNTNQLPHVQSNTINTHTDKRRMIWTTEMNEVIIRIYYEVTELESNLTTYRQKLFDKFIKHFPHLAHLTEQRIADQRRVIICNKMLSQTKLDEIRQEVALKLHRETNMTNLQVRSHTQRESLIDSNQQISECEVETTSMTSHVQRQIDEYFSEALKVFKNSEPTLRPTLPKQKISKKLTNAVLYLNSTLIPNILCNETDFETLQLIIYCAAYAAIKYNGGKVKDLQTGGQFNERKPGWQIVLEKRIDELRAHIGRLTEYNKGIRSKRLQIKVENIKRKYKIHSQHENPNTELPHFIDTLKQKLNALASRLRRYKKTTLRKTQNNLFSNNEKVFYRTLSQHTNIPSIPNNTSNLPTKNSLTEFWSNIWSNSLQHKDATWISEDKKNLLDLPEMPFVDINIDLLKRVIARSHNWKATGSDKIHNYWYKKFTSTHPLLHTHINSFIKSPNSLPHYITQGITYMIPKDATDMSNPAKYRPITCLQNIYKIITSCISEIIYTHAEQHNLLAEEQKGCRKNTQGCKEQLTIDAVILKQAYEKKRNIYTMYIDFQKAFDSVPHSWLLYILEHYKIHPTIINFLKSAMTNWKTKLKLHNSTGSIETDLVAINRGIFQGDSLSPLWFCLALNPLSNLLNKSKKGFKIKYDNQQHTVSHLIYMDDIKLFGSTRYEINTLTNITESFSTDICMQFGIEKCKMQSVRRGIIENNSYSLSNHNLIDPVDHMNGYKYLGYQQSRQIHQRQTKSTLTEHFKTRLHQILNTQLNARNTVKAINTYAISILTYSFGIIQWTRTDIQKLQRIINTTMTKYRKHHPRACIQRQLLSRQEGGRSLINIQNLHNRQITALRTYFYNRAQHSVVHQAIVQADNKYTPLNLRDTTVNLPNVTTEQNINTWAQKSLHGRHRLDLVNPNVDKTASNAWLRRGELFPETEGFMIAIQDQVIETRNYRKHIIRDKSLVTDQCRHCHSSSETIQHITGACRSIVQTDYKHRHDQVAAIIHQYLAYKYKLISEKTSYYKYSPAKILESSKFKIYWDRTIITDKTVHYNRPDITLHDRENKIVYLIDIAIPNTHNLQSTYTDKLTKYTDLTIELKTQWQVNTVKTIPIIISSTGVVPKNLHSGLRALQIHPLTFLTIQKAVILNTCRIVRKFLSIES

SEQ ID NO: 23826 - protein, 816 aa, Astraptes hopfferi
MFYRILNQHGNSSSGNNNTSNLPSKNNLTEFWSNIWSKPQQHVDASWIRKDKDSLKDLPEMSFESINLEIVKRVIARTHNWKATGSDKLHNYWYKKFTCTHSLLHIHINNFIKSPDSIPHYITQGITYMLPKDPTDMSNPAKYRPITCLQNIYKIITSCISELIYTHAEENNILAEEQKGCRKNTQGCKEQLTIDAVISKQAYEKKRNIYTMYIDYQKAFDSVPHSWLLYILKHYNIHPTIIHFLKSVMSNWKTELKLYNGAESLETELLPINRGIFQGDSLSPLWFCLALNPLSTLLNNSKKGFKIRYDNKQHTISHLIYMDDIKIYGSTLNEINTLANVTQSFSTDICMQFGVDKCKMQSIKRGVIEDNSFTLSTHNTIDPLDHINGYRYLGYHQSRQIHQKQTKIILIENFKTRLHKILNSQLNARNTIKAINTYAISTLTYSFGIIHWTRTDIQKLQRIINTTMTKYRKHHPRACVQRLTLSRQEGGRSLINIQNLHNRQITTLRTYFHNRAQHSLIHQAIVRADIKHTPLKLRDNTINLPIITTDQQIHTWMQKSLHGRHRTDLNNPTVDKDASNAWLRRGELFPETEGFMIAIQDQVIDTRNYRKYIIRDNSLVTDLCRHCHSSSETIQHITGACRSIVQTDYKHRHDQVAAIIHQYLAYKYKLISEKTTYYKYKPEVILESPKIKLYWDRTIITDKTIHHNRPDITLHDKENKIVYLIDIAIPNTHNIQTTYTEKLTKYTDLTIELKSQWKVNTVRTIPIIISSTGIVPKNLHASLKALEIHPLTFLTIQKASILNTCRIVRKFLSIDT

SEQ ID NO: 23827 - protein, 1270 aa, Cephise aelius
MSDTVVQKANADNSVPVSDIPCARKKWSKEMNIFIWRTYLTITKVETCIRGHLDLLHQQFQNAFPHMDVSKQRIGDQRRAITRSKLLPQALLDEIRQEVTLYLRENNAQSSNMDTGITQITTSDRRRLVWSTEMNETIIRHYFEVTENETNLTAYRKNLHKKFIEHYPNLSHLTEQRISDQKRVIINNKQLSESRIEEIRQETVIKLQNYRHVNTELLNNIENTDNTQDTHNTEVIDNAHDRSIVQEIRKVLHEPNNDVPNISVDIQNQIESTFLNCLSTYENTDPTLRPVLPKQKSSKKFANIVHFINHNLIPKIINNDISFERTQLIIYCGAYTAVKHNDPRFSTKIDRNNKMIPTWQVKLEKRIQELRGHIGRITAYMQGTRNNALQRKIDIIKNKYKIHTQHEHLNTDLSHFLDTLKQKLNALANRLRRYKKTSLRKNQNKLFTNNEKLFYRNISQSNNTSTIDTIGIPTKEIFLDYWSKIWSESVTHKHSSWIEEDKRKLKDLPQMAYECIDISLLKQVIAKTHSWKATGSDNLHNYWYKKFTNIHPLLHIHINKFINSPETLPHYITQGITYMIPKDKTDINDPAKYRPITCLQNIYKILNSCIQEILYRFIDENNILAEEQKGCRRGTHGCKEQLTIDAVAMQQAYTKKRNIFTMYIDYQKAYDSVPHSWLLYILQHYNISPKLIIFLESAMSKWSTKLKIRCNNETIESDFININRGIFQGDSLSPLWFCLALNPLSSLLNSKNKGFKIKYDNTSETLTHLMYMDDIKLFGSTLSEIQLLADITQLFSSDICMRFGVDKCRMQSVHRGVIKKNSYQINNEQFIEALDQVEGYKYLGYQQTQQIHQKETKNTLKDKFKNRLHKIFNTELNARNSCKAINTYAIPALTYSFGVIRWTQSELQKLQRIINTTMTRHRKHHPRACIQRLLLPRNEGGRGIVDIQNLHNKQFRSLRIFFHNKAEQSRIHKAVVQADKRLTPLNLSNKSVTIAETTKEQKLDAWKKKSLHGRHRIDLINQNVDKTASNAWLKVGALFPETEGFMIAIQDQVIDTKNYRKHIIRDPGAYNDLCRHCYSSSETIQHITGACKSRAQTDYKHRHDQVASIIHQYLAYKYKLITDRTSYYKYSPNIILDSTNYKLYWDRTIITDKTVHCNRPDITLHDKRNKTVYLIDIAIPNTHNLQTTHAEKIAKYTELSIEIKAQWKVDTVRTVPIIISSTGVVPRSLHTSLKTLNIHPMTLITMQKAVILNTCRIVRKFLSIDTPNSN

SEQ ID NO: 23828 - protein, 1252 aa, Nicephellus nicephorus
MQHNQKNKKYNLRSLSKASQARSVQTNDEELSRKNRNGQVPDVDSITSSSVSTNSPYLSLSSSPLSHTSSFSMPGNVVQKAKAVNPAPVSDTHRTRKKWSKEMNIFIWRTYLIITKVETCIRGHLDLLHQQFQSTFPHMDVSKQRIGDQRRAIIRSKLLPQSLLDDIKQEVILHLQGSNPQSTQIDTRNIQTPTANRCRIAWSNEMNETIIRLYFEVTENETNLTAYRKNLYTKFIEHYPDLSHLTEQRISDQRRVIINNKQLSESRIEQIRQETEIKLQNLRRSDPYNINAHKTSNTQNIPNREVSDNNVQNSNVMQYINSLHEENNERNHITLDSQDQIEATFLETLKLFENTDPTLRPFIPKQKSSKKFANIVHFINNELIPKIINNDTSFEKTQLIIYCAAYTAVKHNDARLLTKIDRNRKAIPAWQEKLEKRILDLRANIGRITEYMKGIRSHALQRKIEIIKSKYKIHSRHENLNTELSHFLDTLKQKLNALANRLRRYKKTTLRKTQNTLFTNNEKIFYRNLTHNDNSSLSNNTPTPSKENFSEYWSKIWSNPVMHKPNRWIDDDREKLKDLPQMEYDSINIELLKQIIAKTHNWKATGSDNLHNFWYKKFTSIHTLLHIHINNFIKSPETLPHYITQGITYMVSKDKTDINNPAKYRPITCLQNIYKIISSCINEIIYRHIQNNNIISEEQKGCRRGSHGCKEQLTIDAVVLQQAYTKKRNIYTMYIDYQKAYDSVPHSWLLYILQHYNINPILIQFLKSVMATWKTKLKVNYNSETIETDFININRGIFQGDALSPLWFCLALNPLSGLLNSSRKGFKIKYDKTSQTISHLMYMDDIKLFGSTLNEIQALADITKLFSTDICMQFGVDKCKMQSVHRGVIKRNSYQLNNDECIEPLDQVKGYKYLGYQQSQRINQNQTKNTLTEKFRNRLNKIFTTELNARNVIKAINTYAIPILTYSFGVIRWTQSELKKLQRIINTTMTRHRKHHPRACVQRLVLPRNEGGRGIIDIQNLHNKQIKTLRTFFHHKSELSLIHKAIVQADKKLTPLNLNDYSLVLAETTKEQKLDAWTQKSLHGRHRLDLVNQNVDKIASNEWLKRGELFPETEGFMIAIQDQVIDTKNYRKHIIRDPGAYNDLCRHCCSSSETIQHITGACKSRAQTDYKHRHDQVASILHQYLAYKYKLIPDKTSYYKYSPQVILDSTNYKLYWDRTIITDKTIHCNRPDITFSSHSKCMYFCIRIQSFR

SEQ ID NO: 23829 - protein, 1334 aa, Camptopleura auxo
MRLRNREIPQAGTPLPCGEESGPGSSNSGCPTYSGGGNVSHSIDTMSTSTLHDPYNSSSSNSHCSFSSISISSSISDNVVQVADAVEPAPVADTQRARKKWSNEMNIFIWRTYLIVTKLETSLRGHLDLLHQEFRNKFPDMKVSKQRIGDQRRAIVRSKMLTQTQLNEIKQEVIVYLSHEHPHDNSNVQTNTTNKRRMIWSNEMNETILRTYFEVTEIETNLTGYRKHLYNKFIECYPHLSHLTEQRIADQRRSIVNNKQISESRVAEIRQETEIKLKTILTPHDEVVSGQTNIPKPNDIGDTNLTQNITENESNKNMHLALDIQQQIESTFLDSLSSFSNTNPTTRPIIPKQKSSKTFACIVSFINNKLIPKVIHDELSFEETQLIIYCAAYTAVKHNGSRFPTEGISATKKKPAWQEKLEKRIEDLRANIGRITEYMKGVRNSSLERKVEIIKYKYKVHSQHENINTDLTHFLDTLKQKLNALANRLRRYKKTTLRKTQNAQFAKNEKLFYRNILQKQAYSDITTNTTTPLHTSPTKESFVEYWAKIWSEPVTHNVNDWVRQDKETLKNLPQMRFENIDIDLLRRIIARTHNWKATGSDNIHNFWYKKLTSIHTLLHKHVNNFINSPQTLPHYITQGITYMIPKDKNDIENPAKYRPITCLQNIYKIITSCINEVIYKHIKEGRILAEEQKGCRRGSHGCKEQLIIDSVVLQQAYSNKRNIFTMYIDYQKAYDSVPHSWLLYILQHYNVNPTIIYFLETAMTNWETKLRIHSNSETIETDFIHINRGIFQGDAFSPLWFCLALNPLSNLLNNSNAGFKIKYDNTSQTITHLLYMDDIKLISRTLQGIKTLTDITHSFSSDICMQFGIDKCRMQSVHRGIVKDLTYTLNENECIDSLNQEDGYKYLGFQQSQKIHQKHTKATLTDKFKSRIHRILNTELNARNTIKAINTFAIPILTYSFGVICWTQTELKNLQRIINTTMTKYRQHHPRSCFQRLILPRAEGGRGVVDIQNLHNTQISTLRAFFHDKAEHSSIHKAIVQADNKVTPLNLKETSVALPENNKEQKLNTWIQKSLHGRHRLDLTNQNVDKVASNAWLKKGELFPETEGFMIAIQDQVIDTKNYRKHIIRDPSAYNDLCRHCYSSPETIQHITGACRSRAQTDYKHRHDQVAAIIHQYLAFKYKLIDNKVSYYKYTPQIILDSENYKLYWDRTIITDKTVHYNRPDITFHDKKNKAVYFVDIAVPNTHNLQSTYAEKLAKYTDLSIEIKTQWKVDTVKTIPIIISSTGIIPKTLHISLRTLKIHPLTFITMQKAVILNTCRIVRKFLSIDSARIT

SEQ ID NO: 23830 - protein, 1334 aa, Aethilla lavochrea
MKMENKPIRKIYNLRSLSKGSQIPGSVRTTGKEQSRISSAELISNSDTESAISPISSIALHDFLTSSASSLSSNSSYSSMSDNVVEEACATKPPPVSDISRTRKKWSTEMNIFIWRTYLIITKVESNIRGHLDILYKEFQNKFPHMNASKQRVGDQRRAIVRSKMLPQTLLDEIKQEVILHLQKNSSQQINTTTIHSNTDTRRMAWSNEINETIIRLYLEVTDNETNLTAYRKNLHKKFIEHYPNLAHLSEQRIADQRRFIINNKQISEKRIQEIKMEIIKMLKNTRLIENSIEYRQNNNQIADNPESTENISELGLEYEQNNEIKLPQNVQDEIESTFLNTLKIFDRTDPTIRPYIPKQKSSKKFSMIIHFINTKLIPKVINDKTNFEKTHLIIYCAAYTAVKHNGAKIMKESTRNVKKIPLWQEKLEKRIKDLRANIGRITEYMKGVRSYTLEKKIEIIKHKYKIHSQHENTNTDLAHYLDTLKQKLNALANRLRRYKKTTLRKSQNSLFANNEKIFYRKLTQHNTHNTASNNTPLPTKEDILKYWSTIWSEPVIHKSSKWIQEDKEILKDLPQMIFENIDLELLKRVISRTHNWKTTGSDNLHNFWFKKLTSIHNLLHIHVNKFIQSPETLPQFITQGVTYMIPKDTNDTSNPAKYRPITCLQNIYKIITSCINEVIYRHIQKGNILSEEQKGCRRGSYGCKEQLTIDAVVLQQAYSKKRNIFTMFIDYQKAYDSVPHSWLLYILQHYNINPTIIKFLGSTMLNWKTKLRIRNKTETFETDFISIKRGIFQGDALSPLWFCLAINPLSNLLNNSNKGFQLKHENTSQLISHLMYMDDIKLYSSTLQGIKTLTNITQSFSSDICMQFGIDKCGMQSVHRGIIKKNSYHLNDHELIDPLDQVQGYKYLGFQQSQQIHQKQTKSTLTEKFKSRIHKILNTELNARNTIKALNTFAIPTLTYSFGVIRWSQVELIKLQRLINTTMTKYRQHHPRSCVQRLILPRCEGGRGIIDIQNLHNKQVKTLRIFFHNKAEHSLIHKAVVQADKKLTPLNLKEPSVLIPINTKEEKLDAWIQKSLHGRHRLDLTNQNVDKIASNSWLKRGELFPETEGFMVAIQDQIIDTRNYRKFIIKDPGSFNDICRHCHSSPETIQHITGACKSRAQTDYKYRHDQVAAIIHQFLAYKHKLISDKTPYYKYTPQVILDSPNYKLYWDRTIITDKTVHYNRPDITLHDKRNKTVYLIDIAIPNTHNLQSTFTEKLAKYTDLAIEIKAQWKVDTVRMIPLVISSTGVIPKSLHKSLKTLQIHPMTYLTMQKAVILNTCRIVRKFLSMDSTQ

SEQ ID NO: 23831 - protein, 1324 aa, Celaenorrhinus opalinus
MRLRSGSKLPQAGTEANRNGESRPDLPGSGSPSYSGGDTVSQTLPQNTSNFNSSSSSVSKQTHIFNYESVSSTASVSSVISENVVQAANAVHPVPISDTFRARKKWSKEMNIFIWRTYLIITKVETCVRGHLDLLHQQFQNKFPHMDVSKQRIGDQRRAIIRSKLLSQTILDDIRQEVTHSLQDPNSQINSLDNITSNTTNKQRIAWSVDMNETIIKLYYEVTEIETNFTTYRKNLHKRFIEHYPHLTHLTEQRIADQKRVIINNKQLSESRIAQLKYEVEVQLHSKEIQIQTNMRHTGEIINKDTTQYTEEQQNNTKGHLAEDTQNQIKATFQNSLKIFSTIDPTSRPVIPKQKTSKMFSRIVDFINSNLIPKEITTNTDFFQTQLLIYCAAYTAAKYNGAKFSNETGHTKRVPIWQLKLEKRVQEMRVCIGRITEYMKGTRNRALDRKVEIIKSKYKIHTQHENLNTDLSHFLDTLKQKLNALANRLRRYKKAALRKTQNALFSKNEKIFYRNITQHNPSSTCNNSSLPSTNSFLEYWTKVWAVPVTHKLNGWIQEDKERIKDLPEMRYESIDINLLKLTIHKTHNWKATGSDNIHNFWYKKLTSIHPLLHIHINNFIAFPETLPQYITHGITYMIPKDNADTANPSKYRPITCLQNIYKIITSCINEIIYTHIHRENILAEEQKGCRRGSHGCKEQLTIDAVALQQAYSKKRNIYTMYIDYQKAYDSVPHSWLLYILEHYNINPTLINFLGSAMKHWKTKIKVHCNNEIIETEFINIKRGIFQGDALSPLWFCLALNPLSCLLNSCGKGFKIKHDNTSQIISHLLYMDDIKLYGSTLHQIKSLVNITQLYSTDICMQFGINKCKMQSVQRGVIKSNSHKINDEEIIEPIDQEIGYKYLGYQQSQQIHQKQTKNTLIQKFTYRLHKIFNTELNARNTIKAINTFAIPILTYSFGIIRWTQTELKKTQKIINTSMTRYRQHHPRSCSQRLVLPRIEGGRGIIDILNLHNKQIKTLRTFFYDKAQQSPIHKAIIKADKKLTPLNLNDTSVVLAENTKENKLNAWVQKSLHGRHRLDLTNQNVDKTASNAWLNRGELFPETEGFVIAIQDQIIDTKNYRKHIMRLPGAQNDLCRHCYSSPETIQHITGACKSRAQTDYKHRHDQIASIIHQYLALKYKLINEKVPFYKYSPKVILDTNDYKLYWDRTIITDKTVHYNRPDITFHDKRRSTVYLIDIAVPNTHNLQSTHTEKIAKYTDLSIELKKQWKVDTVRTVPVIISSTGVIPKSLHASLKTLQVHPLTYLTMQKAVLLNTCRIVRKFLSLDS

SEQ ID NO: 23832 - protein, 1343 aa, Grais stigmaticus
MKMENKQTHRYNLRSLSQFSQVTESVPMTNGEEAGRISPIEQTPDTETEVASSPVSSVTLYQSSSSPSSSSSPSSSSSSSFIISHSLISENVVEEANALEPPPVSVYCRTRKKWSMEMNIFIWRTYLIVTKLETCIRGHLDILYQEFQNKFPNMDVSKQRVGDQRRAIGRSKMLPQPLLDKIKQEVTLYLREKSSEPSQTDTTNIDTRRMAWSNEMNETVIRSYFEVTEIETNLTAYRKNLHKKFIEYYPHLVHLTEQRIADQRRVIINNKQISESRIMEIRNETIVKLKSTVAVESNITAHEQTEVQRLNTVENTHTIQDENVGNEQNESIYLPSHLKDQIELTFLDSLKNFEETDPTTRPKIPKQKSSKKFAYIVNFINSKLIPKVIAEHTNFEKTQLVIYCAAFTAVKHNGARFFTEINTNAKRIPAWQEKLEKRIQDLRANIGRITEYIRGVRNNALERKVETIKRKYKIHSQHENINTDLSHFLDTLKQKLNALANRLRRYKKTTHRKTQNSLFAKNEKIFYRKLVQQNNTSAANSNAPVPTKDNFLQYWSKIWSEPVTHKTNKWVQEDKERLKDLLQMSFLSIDLNTLKRVIARTHNWKATGSDNIHNFWIKKFTSIHNLLHKHVNKFIQSPETMPHYITEGITYMIPKDTTDPSNPAKYRPITCLQNIYKIISACINETIYKHIHDANILAEEQKGCRRGSYGCKEQLTIDAVVLQQAYTKKRNIHTTFIDYQKAYDSVPHSWLIYILQHYNINPILTHFLQTTMSNWKTKLRVHSNNETFETDFINIKRGIFQGDAFSPLWFCLALNPLSSILNNCNEGFKVKYDNTFQVISHLMYMDDIKLYSSSLQGIENLINVTQSFSSDICMQFGVDKCRMQSIHRGVVKSNSYKLNDVDYIDPLDPVDGYRYLGFQQSQQIHQKQTKINLIGKFKSRIHKILNTELNARNTIKALNTFAIPTLTYSFGVIRWTQAELRKLQRLINTTMTRYRQHHPRSCVQRLVLPRSEGGRGIIDIQNLHSKQITTLRTFFHNKAEQSHIHKAIVKADIKLTPLNLKESSVIAPEITKEQKLDAWTQKSLHGRHRLDLISQNVDKVASNAWLKQGELFPETEGFMIAIQDQVIETKNYRKYIIRDPGSFNDLCRHCYSSPETIQHITGACKSRAQTDYKYRHDQVAAILHQYLAYKHKLIAEKCPYYKYTPSVILDSDNYKLYWDRTIITDKTVHYNRPDITLHDKRNKIVYLIDIAIPNTHNLQSTYAEKIAKYTDLSIEIKSQWKADTVRTIPIIVSSTGVIPISLHASLKTLQIHPMTFITLQKAVILNTCRIVRKFLSMDSSNTM

SEQ ID NO: 23833 - protein, 1297 aa, Satarupa nymphalis
MRLRSTSKLPQAGTRTNSDGESRPEPSGSGCPTYSGGDTVSQSSSQIRLINVNNSSTTTPIVANNTLSKSPYQLSQVSPSSSISENVVQEAKAVHPEPISDTLRARKKWSKEMNIFIWRTYLIATKVETCIRGHLDILHQQFQNKFPHMDASKQRVGDQRRAIVRSKLLPQTLLDEIKQEVTLLLQNTHAQSNEVETNTHVNTTDRRRMAWSTEMNETIIRLYFEVTDIETNFTTYRKILYNKFIEHYPHLSHLTEQRIADQRRVIINNKQLSNNRIDQIKHEVEIKLQRKGNYTDTNIQDTTGIENTNVTPINDTPINENQQNKNNLLLDDQKQIELTFLNTLKIFDKTDPTSRPAIPKQKASKKFTNIVDFINTRVIPEAITPNTNFEKTQLIIYCAAYTAVKHNGTRFRTETEKYRKKTPAWQVKLEFRIKELRANIGRITEYMKGTRSRALQRKVDIVKSKYQIHSRHENVNTDLSHFLDTLKQKLNALANRLRRYKKTTLRKTQNALFNRNEKIFYRNITEHNSSTVSDKSSVPTKDRFFEYWTKIWAEPATHKLNNWIQEDKEKIKDLPQMGYESINIDLLKRMINKTHNWKSTGSDNIHNYWYKKFTSVHSLLLIHINNFISSPETLPSYITHGITYMIPKDKADTGDPAKYRPITCLQNIYKIITSCINVIIYEHIHKGNILAEEQKGCRKGSHGCKEQLIIDSVALQQAYSKKRNIYTMYIDYQKAYDSVPHSWLIYILHHYNINSKIINFLGSAMNKWKTKLKVNCNSESIETGFIDIKRGIFQGDALSPLWFCLALNPLSSLLNRANKGFKIRFDNNSQLLSHLMYMDDIKLFGSTSHEIRTLANITQLFSSDISMQFGINKCRMQSVQRGVVKSISHRTDDNQHIEPVDQEVGYKYLGYQQSQRIHQKETKTTLTQKFRWRLHKIFNSQLNARNTIKAINSFAIPSLTYSFGVIRWTQSELTKLQRLINTTMTKHRQHHPRSCIQRLVLPRIEGGRGLVDIKNLHNKQIKMLRAFFYDKAEKSPIHKAIVQADMKLTPLNLKNTTVVIAENTKEHKIDTWVQKSLHGRHRLDLTNQNVDKIASNAWLKRGELFPETEGFMVAIQDQVIDTKNYRKHIIRHTSSQNDLCRHCYSSPETIQHITGACKSRAQTDYKHRHDQVASIIHQYLAYKYKLINVKVPYYKYSPQVILDSTNYKLYWDRTIITDKTVHYNRPDITFHDKINSIIYLIDIAIPNTHNLQSSHTEKLAKYSDLSIELRTQWKVNTVRTVPIVISSTGVIPKSYQP

SEQ ID NO: 23834 - protein, 1361 aa, Epargyreus clarus
MTNGALVFIKYAMHLRSRKLPQAGTQEGESRPGPSSSGSPTYSGGGKASHMTTRSRAVVVDNSFNNFHTSSPIPSIDITSSPTSSEESYSVDSVTSPSSNNSYLSDNVVQEAYAENPPPITDSKRARKKWSNEMNIFIWRTYLEITQIEACTRGYLDELYSQFCKKFPHMDVSKQRVGDQRRAIVRNKLLSQQLLDNIREEIKLNIQKTNHLPQTQTNVLNPQTDVTNKRRMIWTTEMNEVIIQTYYEVTELETNLTTYRKKLFDKFIEHFPHLSHLTEQRIADQRRVIIYNKMLPETKIDQIRQEVSLKLHKQNISTNLTYSHIHTESLTHENNTQDIQTIQILEHEEEEIQITSHTQNQIQEYFSEALKVFKNSEPTLRPSLPKQKITKRLTSAVQYLNKTLIPNIINNETDFETLQLVIYCAAYAAVKYNGTKIRDIQTDIHYNKQKPRWQIVLEERIGKLRAEIGRLTEYNNGIRSKGLQRKVEEIKRKYKLHSQHKQPNTQLSHFLDTLKQKLNALSSRLRRYKKTTLRKTQNKLFHNNEKMFYRTLTQNTNNTSATTLPLPSKNTLTDFWSNIWSKSQEHKEASWIQKDKDSLTDLPEMPFENIDIDLLKRVIARSHNWKATGSDKIHNYWYKKFTCTHVLLHTHINNFIKSPNTLPHYVTHGITYMLPKDPTDTSNPAKYRPITCLQNIYKIITSCISEIIYIHAEQNNILAEEQKGCRKNSQGCKEQLTIDAVISKQACEKKRSIYTMYIDFQKAFDSIPHSWLLYILKHYNIHPTIIHFLKSAMRNWKTQLKLHSSAGNIESELLSINRGIFQGDFLSPLWFCLALNPLSRLLNNSKKGFKIKYDNNKQQTISHLIYMDDIKLYGSTLNEINSLTNITQSFSQDICMQFGIDKCKMQSVKRGVIEDNSYSLDTHNLIDPIDQINGYKYLGYQQSRQIHQKQTKAALTEHFKTRLHKILNTQLNARNTIKAINTYAISILTYSFGIIQWTRTDIQKLQRIINTTMTKYRKHHPRACIQRLTLPRQEGGRSLIDIQNLHNRQLTSLRTYFHNKARDSLIHQAIVQADNKYTPLRLKDSSINFTTVTTQHKVDTWLQKSLHGRHLTDLNNPIVDKHASNAWLRRGELFPETEGFMIAIQDQVIDTRNYRKHIIRDKSLVTDHCRHCHSSSETIQHITGACRSIVQTDYKHRHDQVAAIIHQYLAYKYKLIPEKNSYYKYIPQVILESPKIKLYWDRTIITDKTIHYNRPDITLHDKENKIVYLIDIAIPNTHNMQTTYTEKLTKYTDLTIELKTQWKVNTVRTIPIIISSTGVVPKTLHSSLKAIQIHPLTFLTIQKAAILNTCRIVRKFLSIDA

SEQ ID NO: 23835 - protein, 1361 aa, Epargyreus clarus
MTNGALVFIKYAMHLRSRKLPQAGTQEGESRPGPSSSGSPTYSGGGKASHMTTRSRAVVVDNSFNNFHTSSPIPSIDITSSPTSSGESYSVDSVTSPSSNNSYLSDNVVQEAYAENPPPITDSKRARKKWSNEMNIFIWRTYLEITQIEACTRGYLDELYSQFCKKFPHMDVSKQRVGDQRRAIIRNKLLSQQLLDNIREEIKLNIQKTNHLPETQTNVLNPQTDVTNKRRMIWTTEMNEVIIQTYYDVTELETNLTTYRKKLFDKFIEHFPHLSHLTEQRIADQRRVIIYNKMLPETKIDQIRQEVSLKLHKQNISTNLTYSHIHTESLTHENNTQDIQTIQILEHEEEEIQITSHTQNQIQEYFSEALKVFKNSEPTLRPSLPKQKITKRLTSAVQYLNKTLIPNIINNETDFETLQLVIYCAAYAAVKYNGTKIRDIQTDIHYNKQKPRWQVVLEERIGKLRAEIGRLTEYNNGIRSKGLQRKVEEIKRKYKLHSQHEQPNTQLSHFLDTLKQKLNALSSRLRRYKKTTLRKTQNKLFHNNEKMFYRTLTQNTNNTSATTLPLPSKNTLTDFWSNIWSKSQEHKEASWIQKDKDSLTDLPEMPFENIDIDLLKRVIARSHNWKATGSDKIHNYWYKKFTCTHVLLHTHINNFIKSPNTLPHYVTHGITYMLPKDPTDTINPAKYRPITCLQNIYKIITSCISEIIYIHAEQNNILAEEQKGCRKNSQGCKEQLTIDAVISKQACEKKRSIYTMYIDFQKAFDSIPHSWLLYILKHYNIHPTIIHFLKSAMRNWKTQLKLHSSAGNIESELLSINRGIFQGDSLSPLWFCLALNPLSRLLNNSKKGFKIKYDNNKQQTISHLIYMDDIKLYGSTLNEINSLTNITQSFSQDICMQFGIDKCKMQSVKRGVIEDNSYSLDTHNLIDPIDQINGYKYLGYQQSRQIHQKQTKAALTEHFKTRLHKILNTQLNARNTIKAINTYAISILTYSFGIIQWTRTDIQKLQRIINTTMTKYRKHHPRACIQRLTLPRQEGGRSLIDIQNLHNRQLTSLRTYFHNKARDSLIHQAIVQADNKYTPLRLKDSSINFTTVTTQHKVDTWLQKSLHGRHLTDLNNPIVDKHASNAWLRRGELFPETEGFMIAIQDQVIDTRNYRKHIIRDKSLVTDHCRHCHSSSETIQHITGACRSIVQTDYKHRHDQVAAIIHQYLAYKYKLIPEKNSYYKYIPQVILESPKIKLYWDRTIITDKTIHYNRPDITLHDKENKIVYLIDIAIPNTHNMQTTYTEKLTKYTDLTIELKTQWKVNTVRTIPIIISSTGVVPKTLHSSLKAIQIHPLTFLTIQKAAILNTCRIVRKFLSIDA

SEQ ID NO: 23836 - protein, 1361 aa, Epargyreus clarus
MTNGALVFIKYAMHLRSRKLPQAGTQEGESRPGPSSSGSPTYSGGGKASHMTTRSRAVVVDNSFNNFHTSSPIPSIDITSSPTSSGESYSVDSVTSPSSNNSYLSDNVVQEAYAENPPPITDSKRARKKWSNEMNIFIWRTYLEITQIEACTRGYLDELYSQFCKKFPHMDVSKQRVGDQRRAIIRNKLLSQQLLDNIREEIKLNIQKTNHLPQTQTNVLNPQTDITNKRRMIWTTEMNEVIIQTYYEVTELETNLTTYRKKLFDKFIEHFPHLSHLTEQRIADQRRVIINNKMLPETKIDQIRQEVSLKLHKQNISTNLTYSHIHTESLTHENNTQDIQTIQILEHEEEEIQITSHTQNQIQEYFSEALKVFKNSEPTLRPSLPKQKITKRLTSAVQYLNKTLIPNIINNETDFETLQLVIYCAAYAAVQYNGTKIRDIQTDIHCNKQKPRWQVVLEERIGKLRAEIGRLTEYNNGIRSKGLQRKVEEIKRKYKLHSQHEQPNTQLSHFLDTLKQKLNALSSRLRRYKKTTLRKTQNKLFHNNEKMFYRTLTQNTNNTSATTLPLPSKNTLTDFWSNIWSKSQEHKEASWIQKDKDSLTDLPEMPFENIDIDLLKRVIARSHNWKATGSDKIHNYWYKKFTCTHVLLHTHINNFIKSPNTLPHYVTHGITYMLPKDPTDTSNPAKYRPITCLQNIYKIITSCISEIIYIHAEQNNILAEEQKGCRKNSQGCKEQLTIDAVISKQACEKKRSIYTMYIDFQKAFDSIPHSWLLYILKHYNIHPTIIHFLKSAMRNWKTQLKLHSSAGNIESELLSINRGIFQGDSLSPLWFCLALNPLSRLLNNSKKGFKIKYDNNKQQTISHLIYMDDIKLYGSTLNEINSLTNITQSFSQDICMQFGIDKCKMQSVKRGVIEDNSYSLDTQNLIDPIDQINGYKYLGYQQSRQIHQKQTKAALTEHFKTRLHKILNTQLNARNTIKAINTYAISILTYSFGIIQWTRTDIQKLQRIINTTMTKYRKHHPRACIQRLTLPRQEGGRSLIDIQNLHNRQLTSLRTYFHNKARDSLIHQAIVQADNKYTPLRLKDSSINFTTVTTQHKVDTWLQKSLHGRHLTDLNNPIVDKHASNAWLRRGELFPETEGFMIAIQDQVIDTRNYRKHIIRDKSLVTDHCRHCHSSSETIQHITGACRSIVQTDYKHRHDQVAAIIHQYLAYKYKLIPEKNSYYKYIPQVILESPKIKLYWDRTIITDKTIHYNRPDITLHDKENKIVYLIDIAIPNTHNMQTTYTEKLTKYTDLTIELKTQWKVNTVRTIPIIISSTGVVPKTLHSSLKAIQIHPLTFLTIQKAAILNTCRIVRKFLSIDA

SEQ ID NO: 23837 - protein, 1238 aa, Microceris patrobas
MGKEMNIFIWRTFLKITKLESSTKGHLDQLHAQFHQCYPHMDVSTHRIGDQRRAIVRNKLLSQTMLDEIKEDIRIELQNSNQSPLVSLNTQTNSTNRCRMSWTTELNEAIIRIYLEVTELESDLTTYRKKMYNKFIEQFPYLSHITEQRIADQKRVIINNKMIPDTRLEEIKQEVALKLDKSDVNTSQTQIHDNNQTETSINIFHTQDTTQVRPTTHTQLHTTQQNRTLVPENEENQIDNLFTNALEIFKNIHPTLRPSLPKQRVTKKLINTVKYLNLILIPKFILSDIDFERVQLIIYCAAHTAVTYNGGKVNHQQTQTTYNEKKPGWQINLEKRIGQLRIHIGRLTEYNRGIRNKALERKVAKIKQRYKIHSQHENPNTDLSHFLDTLKQKLNALANRLRRYKTTTLRKTQNKLFQNNEKIFYRSLIQPTNNNNHINSTSTVLPNKEEFTMFWSKLWSEIKEHNDSEWIREDKHRLADLPEMHFEGISLDLLKRVIARTQNWKATGSDKIHNYWYKQFTSIHSILHSHINNFIKSPQTIPQYITQGITYMIPKDINNLNNPAKYRPITCLQNIYKIITSCISELIYDHAEQNNLLTEEQKGCRKNRQGCKEQLIIDTTILKQAYNKKRNIFTMYIDYQKAFDSVPHSWLLYILRHYNIHPSIITFLKSAMNNWKTEIRAHSNAETIKTDLIKINRGIFQGDALSPLWFCLALNPLSGLLNNSEKGFKIKYNNTQHTISHLMYMDDIKLFGSSLSEINALASITEKFSNDIHMQFGIDKCQIQSVRKGIVENNSYTLENEEIIYPVDTTVGYKYLGFQQSRQIHQKQAKSALTQNFKNRLHKILNTQLNARNTVKAINTFAIPVLTYSFGVIQWTQTDIQKLQRLINTTMTKYRKHHPRACIQRLFLSRQEGGRSLIDIQNLHNRQITALRTYFYNRATQSRTHQAIVHADIKLTPLNLNNTTLNLPQNTVDQKINIWIEKSLHGRHRKDLIKSDVDKNASNAWLRRGELFPETEAFMIAIQDQVIDTRNYKKHIIKDSLTSDLCRHCHSNSETIQHITGACKSIAQTDYKHRHDQVAAIIHQYLGIKYKLITEKTNYYKYSPATTLENKQFKLYWDRTIITDKTVHHNRPDITLHDKVNKTAFLIDIAIPNTHNLHTSYTEKLAKYVDLSIELKSQWKVNTVKTVPIIISSTGIVPHSLHNSLKILQIHPLTYITIQKAVILNTCRIVRKFLSIDT

SEQ ID NO: 23838 - protein, 1058 aa, Microceris merops
MTWTTELNEAIIRIYLEVTELESDLTTYRKKMYNKFIEQFPYLSHITEQRIADQKRVIINNKMIPDTRFEEIKQEVASKLDKPNVNTSQTQIHDNSQTETSINIFHTQDTIQERPTSHTQLHTTQQNRTPVPENEENQIDNLFTKALEIFKNIHPTLRPSLPKQRVTKKLINTVKYLNLTLIPKCTLSDVDFERVQLIIYCAAHTAVTYNGGKVNHQQTQTTYNEKIPGWQINLEKRIGQLRIHIGRLTEYNRGIRNKALERKVANIKHRYKIHSQHENPNTDLSHFLDTLKQKLNALANRLRRYKKTTLRKTQNKLFQKNEKIFYRSLIQPTNNNNHINSTSTFLPNKEDFTIFWSKLWSEIKEHNDSEWIREDKRRLANLPEMHFEGISLDLLKRVIARTQNWKATGSDKIHNYWYKKFTSIHSILHSHINNFIKSPHTIPQYITQGITYMIPKDINNLNNPAKYRPITCLQNIYKIITSCISELIYNHAEQNNLLTEEQKGCRKNRQGCKEQLIIDATILKQAYNKKRNIFTMYIDYQKAFDSVPHSWLLYILRHYNIHPSIITFLKTAMNNWKTEIRVHSNAETIKTDLIKINRGIFQGDALSPLWFCLALNPLSGLLNNSEKGFKIKYNNTQHTISHLMYMDDIKLFGSSFSEINALASITEKFSNDIHMQFGIDKCQIHSVRKGIVENNSYTLENDEIINPVDTTVGYKYLGFRQSRQIHQKQAKSALTQNFKNRLHKILNTQLNARNTVKAINTFAIPVLTYSFGVIQWTQTDIQKLQRLINTTMTKYRKHHPRACIQRLLLSRQEGGRSLIDIQNLHNRQLTALRTYFYNRATQSRTHQAIVHADMKLTPLNLNNTTLNLPQNTVDQKINIWIEKSLHGRHRKDLIKSDVDKNASNAWLRRGELFPETEAFMIAIQDQVIDTRNYKKHIIKECLPSELCRHCHSSSETIQHITGACKSIAQTDYKHRHDQVAAIIHQYLGIKYKLITEKTNYYKYSPATTLENKQFKLYWDRTIITDKTVHHNRPDITLHDKVNKTAFLIDIAIPNTHNL

SEQ ID NO: 23839 - protein, 1360 aa, Microceris scylla
MRLRSRNTLPQAGTRNGESRPEITSSGSPTYSGGGTVSHLSARSNTVADRKTNALTNQSSSSAYSETPEGLSSDLGGSKTSSHSASQVEPPSNNIHLSDNVVQEAHASNLAPITDTKCTRKKWSKEMNIFIWRTYLKITKLESSIKGHLDELHAQFHQYFPHMDVSKQRVGDQRRAIVRNKLLSQTMLDEIKEDIRIELQNSNQSPLVSLNTQTNSTNRCRMSWTTELNEAIIRIYLEVTELESDLTTYRKKMYNKFIEQFPYLSHVTEQRIADQKRVIINNKMIPDTRLEEIKQEVALKLDKSNVNTSQTQIHDNNQTETSINIFHTQDTTQERPTTHTQLHTTLQNRTLVPEYEENQIDNLFTNALEMFKNIHPTLRPSLPKQRVTKKLINTVKYLNLILIPKFILSDIDFERVQLIIYCAAHTAVTYNGSKVNHQQTQTTYNKKIPDWQINLEKRIGQLRIHIGRLTEYNRGIRNKALERKVANIKHRYKIHSQHENPNTDLSHFLDTLKQKLNALANRLRRYKTTILRKTQNKLFQNNEKIFYRSLIQPTNNNNHINSTSTVLPNKEDFTTFWSKLWSEIKEHNDSEWIREDKRRLADLPEMHFEGISLDLLKRVIARTQNWKATGSDKIHNYWYKQFTSIHSILHSHINNFIKSPHTIPQYITQGITYMIPKDINNLNNPAKYRPITCLQNIYKIITSCISELIYDHAEQNNLLTEEQKGCRKNRQGCKEQLIIDTTILKQAYNKKRNIFTMYIDYQKAFDSVPHSWLLYILRHYNIHPSIITFLKTAMNNWKTEIRAHSNAETLKTDLIKINRGIFQGDALSPLWFCLALNPLSGLLNNSEKGFKIKYNNTQHTISHLMYMDDIKLFGSSLIDIKALASITEKFSNDIHMQFGIDKCQIQSVRKGIVENNSYTLENEEIINPVDTTVGYKYLGFQQSRQIHQKQAKSALTENFKNRLHKILNTQLNARNTVKAINTFAIPVLTYSFGVIQWTQTDIKKLQRLINTTMTKYRKHHPRACIQRLFLSRQEGGRSLIDIQNLHNTQITALRTYFYNRATQSRTHQAIVHADVKLTPLNLNNTTLNLPQNTVDQKINIWIEKSLHGRHRKDLIKSDVDKNASNTWLRRGELFPETEAFMIAIQDQVIDTRNYKKHIIKDSLTSDLCRHCHSNSETIQHITGACKSIAQTDYKHRHDQVAAIIHQYLGIKYKLITEKTNYYKYCPATTLENKQFKLYWDRTIITDKTVHHNRPDITFHDKVNKTAFLIDIAIPNTHNLHTSYTEKLAKYVDLSIQLKSQWKVNTVKTVPIIISSTGIVPHSLHNSLKILQIHPLTYITIQKTVILNTCRIVRKFLSIDS

SEQ ID NO: 23840 - protein, 1336 aa, Quadrus cerialis
MKNSKPQNITYNLRSLSRAHSGSTNVLTIGDGERDLHLQRTSLESYPESDTAPYLTSPTSSTSNSTTDVTPSLSDTSSLSANVVEEAYAVCPAPITDNKCTRKKWSTEMNIFIWRTYLSITQLEVYIRGYPDILYSKFNEKFPHMEVSKQRVSDQRRAIVRNKLIPQKMLDEIREEVRLMLQNSNQSITQNNSCKNDTHLPGKRRMVWTSQMNEAIILIYYEVTELESNLTTYRKKLYDKFIEQFPHLAHLNEQRIADQRRVIVNNKMLSESKILELKQEIAKKLSKINLESHPRSLTQLDMSENIHISNSEEAEDISTHTDEIVVITQNTQNKLDEYFSEALTEFKDINPTSRPSIPKQKQTKKLFNAVNYLNHTLIPRVISPDSDFELTQLVIYCGAYTAAKYNSLKVINSQSNTRTNLQKPVWQVKLEKRIEELRIHIGRLTEYVKGIRSNYLLKKVENIKQKYKIHAQHENPNSDIVHFVDTLKQKLSALASRLRRYKRTTQRKTQNKLFNNNEKTFYRTLTQHTVTPNTNNNNTIPTKEELVGFWSNLWANPAEYNKSSAWIGEDKDKLKEVPYMRFDNISLELLKRVIHRTHNWKATGSDNIHNYWYKKFTSVHSLLQTHINKFISSPDIIPHYITEGISYMLPKDNNNMNDPSKYRPITCLQNIYKIITSCISEIIYTHVEENSILTEEQKGCRKNRQGCKEQLTIDAVVLKQAYSNKRNIYSMYIDYQKAYDSIPHSWLLYILKHYNIHPTIVNFLDSVMKNWKTKLKLHNSIGSIETDLINIRRGIFQGDALSPLWFCLALNPLSNQLNDSKKGFKIKFNKKHHTISHLMYMDDIKLFGSTLNEINILANITQKFSSDISMQFGIDKCKIQSVKRGNIEENTYNVDNINQIIEPVDQTKGYKYLGYQQSRQIHQKDTKTTLTDKFKTRLHKIFNSQLNARNTIKAINTFAIPILTYSFGIIHWTQTELQKLQRIINTMMTKYRKHHPRSCIQRQTLSRLEGGRGLIDVKNLHNRIINSLRTYFYKRAEHSPIHQAIVQADDRLTPLSLKNSSIHLEELATDQKINTWTQKSLHGRHRTDLTNPNFDKAASNAWLRRGELFPETEGFMIAIQDQVIDTKNYRKHIIRDPKLVNDMCRQCHSSSETIQHITGACRAIVQTDYKHRHDQVGAIIHQYLAHKYNLIREKTNYYKYTPEVVLESPKFKLYWDRTIITDRTVHFNRPDITFHDKENKLVYLIDIAIPNTHNLHTTYTTKLTKYTDLAIELKTQWKVNSVKTVPILISSTGIIPKTLHTSLRILNIHPLTYLTMQKAVILNTCRIVRKFLNLDS

SEQ ID NO: 23841 - protein, 1328 aa, Zera sp.
MKNSKPQNIKYNLRSIARANQATINMHTVGDRELNSNSDTALYSISPPSSTPMSIEDLTSSSTNTSYLSDNVVEEALATCLTPITDNKRARKKWSTEMNIFIWRTYLIITQMEVNIRGYPEELYSKFREKFPHMDVSKQRVSDQRRAIVRNKLIPQNMLDEISEEIKALLQTHTIESNTQNDPSNTETQSVGKRRMIWTTKMNEAIIQIYYEVTELETNLTTYRKKLYDKFITQFPHLSHLNEQRIADQRRVIINNKMMSESKILELRHEIAKKLNNVNVERQLVNSTQAEMLNTNIRHIETEENLGSIGTHTDEALIISHNSQNEIEEYYLEAFTEFKNTNPTLRPSIPKQKQSKKLYIAVQYLNRTLIPRVISKDSDFETTQLIIYCAAYAAAKYNNTKIIKSPSNTIKAQKPNWQIKLEKRIEELRIHIGRLTEYNKGTRSNYLMKKVENIKVKYKLHAQHENPNTDIIHFVDTLKQKLSALASRLRRYKKTTLRKTQNKLFNNNEKTFYRTLTQHIITPNTSSSHNAIPTKEKLEEFWANLWSNPADYNNGSTWIKEDRNKLINLPHMPFENISLDVMKRVIHRTHNWKATGSDKIHNYWYKKFTSIYPSLLTHINQFITSPDIIPHYITQGITYMLPKDVNNMNDPSKYRPITCLQNIYKIITSCISEIIYKHIDQHNILTEEQKGCRKNSQGCKEQLTIDAVVLKQAYIKKRNIYSMYIDYQKAYDSVPHSWLLYILKHYNIHPTIIGFLESVMNNWRTKLRLNSSIGSIETDLISIKRGIFQGDALSPLWFCLALNPLSNQLNNSKIGFKVKYVKEQHIISHLMYMDDIKLFGSTLKEINTLANITQNFSSDISMQFGIDKCKIQSVKRGNIEENTYNIDSTNQVIQPVDQTQGYKYLGYQQSRQIHQKETKATLTNNFKSRLHKIFNSQLNSRNTIKAVNTFAIPLLTYSFGIIQWTQTDLQNLQRIINTMMTKYRKHHPRSCIQRQTLSRLEGGRGVIDIKNLHNRSITSLRTYFYKRAEHSPIHQAIVEADNKLTPLNLANHTVDLGELTTEQKINIWTQKSLHGRHRNDLSNPNVDKVASNAWLRRGELFPETEGFMVAIQDQVIDTKNYRKHIIRNPSLVNDMCRQCHSNSETIQHITGACRAIVQTDYKHRHDQVGAIIHQYLAYNCNLITEKTNYYKYTPEVVLESQKFKLYWDRTILTDRTVHYNRPDITLHDKENKIVYLIDIAVPNTHNLHTTYTNKLTKYTDLTIELKTQWKVNTVKTVPIVISSTGVIPKTLHTSLKILNIHPLTYISMQKAVIINTCRIVRKFLSLDT

SEQ ID NO: 23842 - protein, 1238 aa, Zera sp.
MSCTRKKWSTEMNIFIWRIYLTITQLEVNIRGYPDILYSKFNEKFPHMEVSKQRVSDQRRAIIRNKLIPQNILDEIREEVRLLLQNSIQSITQNDTTNITQLLGKRRMIWTSQMNEAIIRIYYEVTELESNLTTYRKKLYDKFIEQFPYLSHLNEQRIADQRRVIVNNKMIPDTKILQLKQEIANKLPNINLESYPRRITQLDILNTTLISNSEEENTGIYAEKAVIITQSTQDKLDEYFSEALKEFKNVNPTCRPSIPKLKQTKKLFNTVQYLNHTLIPRVISPDSDFELTQLVIYCGAYAAAKYNSYKTLNSQPNTKLNLQKPMWQIKLEKRIEELRIYIGRLTEYVKGIRSNYLLKKVENIKQKYKVHAQHENTNTDIVHFVDTLKQKLSALASRLRRYKRTTLRKTQNKLFNNNEKTFYRSLTQHTVTPNTSNNNNAIPTKDELIGFWSNLWANPAEYNKNSAWIEEDKNKLKEVPYMRFDNISLELLKRVIHRTHNWKATGSDNIHNYWYKKFTSVHSLLQTHINKFITSPDIIPHYITEGISYMVPKDNNNLNDPSKYRPITCLQNIYKIITSCISEIIYTHIEENSILTEEQKGSRKNRQGCKEQLTIDAVVLKQAYANKRNIYSMYIDYQKAYDSIPHSWLLYILNHYNIHPTIVNFLESVMNNWKTKLKLHSSIGSIETDLINIRRGIFQGDALSPLWFCLALNPLSNQLNDSKKGFKIKYNKTQHTISHLMYMDDIKLFGSSLKEINILANITQTFSSDISMQFGIDKCKIQSVKRGNIEENTYKVDNINQIIEPVDQIKGYKYLGYQQSRQIHQKETKITLTDKFKTRLHKIFNSQLNGRNTIKAINTFAIPILTYSFGIIHWTQTDLQKLQRVINTMMTKYRKHHPRSCTQRQTLSRLEGGRGLIDIKNLHNRLVNSLRTYFYTKAEHSPIHRAIVQADNKHTPLSLKNHSIHLEELTTEQKINTWTQKSLHGRHRTDLTNPNIDKAASNAWLRRGELFPETEGFMIAIQDQVIDTRNYRKHIIRDPGLVNDMCRQCHGSSETIQHITGACRAIVQTDYKHRQDQVGAIIHQYLAHKYNLIREKTNYYKYTPEVVLESSKFKLYWDRTIITDRTVHFNRPDITFHDKENKIIYLIDIAIPNTHNLHTTYTTKLAKYTDLATELKTQWKVSTVKTVPILISSTGIIPKTLHNSLKILNIHPLTYLTMQKAVILNTCRIVRKFLSLDS

SEQ ID NO: 23843 - protein, 1332 aa, Hasora chromus
MKMENVNKKVSSRYNLRSLSKARSMRTDDDGEGRTENTQVDDTPNDIRPYTSSPVTSDSFINSPLSSSVSSPSFTHSTSTSPLPDNVVQKANAEISAPIADNIRARKKWTTAMNIFIWRTYLIITKLESCTRGYLDELYQKFQEAFPQMDASKQRIGDQRRAIVRNKLLTKKQIDDTTDEVRVYLQNTNGALASSNTETNNIDKRRLIWTTEMNETILRLYYEITELESNFTSYRTNLYTKFIEHYPQLSHLSEQRIADQRRVIVNNKMLPEMKINQIRQDVELLLYRERNLNERSHTRQTDEGHTGNEQNEDELEELESRERTLNSLLPPNLQNQIEHSFSDNLKLFENTDAPSRPPIPKQKISKKFVSIVQFINSHVIPKVLTSDTDFETLQLVIYCAAHTAVTYNGNQIRDSRTQTRFIGCTPAWQEKLQNRIKELRVHIGRLTEYSEGKRSEALQRKIEKIKQKYKVHSHHENPNTEISHFLDTLKQKLNALASRLRRYKKTTLRKNQNKLFCYNEKIFYRTLTQPTNKNTLETSLPSKDTLKDFWSNLWSNPVEHQVSDWIQEERARLGYLPEMQFDDINLDLLQRVITRTHNWKATGSDKIHNYWYKHLTSIHPLLLTHVNNFIKSPHTLPHYITEGITYMIPKDTTDLTNPSKYRPITCLQSIYKIITSCITELIYFHTNENNLLAEEQKGCRKKSKGCKEQLIIDAVAMNQAFSRKRSIYTMYIDYRKAYDSVPHSYLLYILKHYKIHPIIINFLNSVMNNWKTELKLYSSTGIIETDFIRIKRGIFQGDALSPLWFCLALNPLSNLLNNAGDGFNIKYGRAQHKISHLIYMDDIKLFGSTLNQLNSLANITQSFSSDIGMQFGVNKCKIQSVNRGKVENNSYQLNNKESIDPVDEIEGYKYLGFQQSRKIHQKQVKNTLINKFKTRLHKILKTQLNARNTIKAINTYAIPTLTYSFGVIHWSQTELKKLQTVINTTMTKYRKHHPRACTQRLTLPRKEGGRGLIDIQNLHNRQIKSLWTFFHNKAQNSLLHKAIVEADNKHTPLNLKSDTVNLKEVTAKEKIDNWTQKSLHGRHRLDLTNPSVDKIASNAWLKQGVLFPETEGFMIAIQDQVIDTRNYRRHIIRDPINDTCRHCRSSSETIQHITGACRAIVQTDYKHRHDQVASVVHQYLAFKYKLIDEKTNYYKYSPKVILDSTKYKLYWDRTIITDKTIHCNRPDITLHDKENKTVYLIDISIPNTHNLQATYSEKLTKYADLSIELKTQWKVDIVKTIPIIISSTGVIPKSLHTSLKTLQIHPLTYLTLQKAVILNTCRIVRKFLSIDA

SEQ ID NO: 23844 - protein, 1346 aa, Euriphellus phraxanor
MKENVGSKKYNLRSLSKASQSTRSMRINNEEPSRRTQIGQAPDTDSCTSLISSPVSTDSLYDTPYTSPQSTSTSSQSQYTSPMSDSVVQKANACNSVPVSDTFRTRKKWSKEMNIFIWRSYLTITKVETFIRGHLNILHQQFQSTFPHMDASKQRVGDQRRAIIRNKLLPQTLLDEIKQEVIVYLQCKNQQSSQMDTTSTSVTTTDKRRMAWTSEMNEAIIRSYFEVTENETNLTAYRKNLHTKFIEHYPHLSHLTEQRISDQRRVIINNKQLSENRIEQIRLETEIWLQNNWHANVQNLNTTENTNSIQVEVSDKAHTRDETQESNTLDGENNEGNHLPLDIQQQIESTFFDTLKLFENSDPTLRHYIPKQKSSKQFADIVNFINSVLIPKVTNRDTNFDQSQLIIYCAAYTAVKHNDPKCLSITNNNKKVMPAWQEKLEKRIQDLRANIGRITEYMKGMRSHALKRKIEIIKSKYKIHSRHDNLNTELTHFLDTLKQKLNALANRLRRYKKTTLRKTQNTLFKNNERIFYRNLTHNNNIPLINNKPTPTKDSYLGYWSKIWSEPVTHKSNSWVEEDKQKLKDLPQMQYDSIDIDLLKRMIAKTHNWKAAGSDNIHNFWYKKFTSMHTLLHIHINHFIKSPEIIPRYITHGITYMIPKDKTDINDPSKYRPITCLQSLYKIITSCINEIIYKHIQEKNILAEEQKECRRDSHGCKEQLTIDAVALQQAYAKKRNIYTMYIDYQKAYDSVPHTWLIYILQHYNINPTLIQFLKTAMINWKTKLKVRYNNETIETDFININRGIFQGDALSPLWFCLALNPLSSLLNSKNKGFKIKYDNTSQTLSHLMYMDDIKLFGSTINELHALADVTQLFSSDICMEFGINKCKIQSVHRGVIKSNSYKLNNDEYIESLDQVGYKYLGYQQFQRINHNQTKTTLIEKFKNRLNKICNTQLNARNTVKAVNTYAIPILTYSFGIIRWTQSELKKLQRIINTTMTRYRKHHPRACFQRLVLPRNEGGRGIVDIQNLHNQQLKSLRFFFIRKSEQSNIHKAVVQADKKLTPLNLNNPSVELIQNTKEQKLEVWMQKSLHGRHRLDLTNQNVDKLASNAWLKRGELFPETEGFMIAIQDQVIETKNYRKHIIRDPGAYNDLCRHCCCSSETIQHITGACKSRAQTDYKHRHDQVAAIIHQYLAYKYKLITDKMSYYKYSPQIILDSANYKLYWDRTIITDRTIHSNRPDITFHDKRNKTVYLIDIAIPNTHNIQTTHREKLSKYTELSIELKAQWKVDTVMTIPIIISSTGVIPKSLHISLKTLRIHPLTYITMQKAVILNTCRIVRKFISIDTPNSI

SEQ ID NO: 23845 - protein, 1282 aa, Pseudonascus paulliniae
MQENQSNKKYNLRSLAKTLQGARSLRNNDDELSSRSNIGQGSDIRSTIVTPNRTSPISPNNLNNSPYSSPQYSPTSSISDSVVQKAKAGNSVPVSDTIRARKKWSKEMNIFIWRTYLIITKVETCIRGHLDLLHQRFQNKFPHMNASKQRIGDQRRAIIRSKLLPQQLLEEIKQEVILFLSGSNTEPVLMDIINTQTTATDKRRIAWSKEMNETIIRYYFEVTENETNLTGYRKNLYIKFIEQYPNLSHLNEQRISDQRRVILNNKLLSESRIEQIRQEIEIKLQNRRRNNPQQVNYTENRNDVPETLNVDNRDHRNEIQNTVNEHNYEMSYLQLDIQEQIEVTFSETLKMFENTDPTLRPFIPKQKSSKNLAKIVQFINNRLIPKVINNNTNFEQTQLVIYCAAYTVVKHNDARCLLKSDRNNKGKPAWQAKLEKRIQDLRVHIGRITEYMKGVRSHALRRNIEIIKNKYKVHSRHEHSNTELSHFLDTLKQKLNALANRLRRYKKTSLRKTQNKLFINNEKIFYRNLTHHNNICSSNNTPPPSKDCFLEYWSQIWSKPVTHKLNTWIVDDKQKFKDLPQMEYECIDIELLKRVIAKTHNWKATGSDNIHNYWYKKFTSIHTLLHTHINNFIKSPETLPHYITQGLTYMIPKDKADLTDPAKYRPITCLQNIYKIISSCINEIIYRYIEKNNILAEEQKGSRRGSHGCKEQLTIDAVAMQQAYSKKRNIYTMYIDYQKAYDSVPHSWLLYILQHYNINLTLIQFLETAMSNWKTKLKVQYNSEIIETDLININRGIFQGDALSPLWFCLALNPLSSLLNNSNKGFKIKYENTSQVISHLMYMDDIKLFGSTLKEIRELADVTQLFSSDICMKFGIDKCRMQSVQKGVIKRNSYKLNNNEYIEPLDSTEGYKYLGVEQSQRINHIQTKNTLTENFKNRLHKIFNTELNALNTVKAINTYAIPILTYSFGVIRWTQSELNKLQRIINTTMTRYRKHHPRACVQRLVLPRNEGGRGIVDIQNLHNKQIKTLRNFFYLRSEQSPVHKAVVKADRKLTPLNLGNNSIVIAEITKDQKFDAWIQKPLHGRHRVDLTNQNVDKIASNAWLKRGELFPETEGFMIAIQDQVVNTKNYRKHIIHDPGANNDLCRHCCCGSETIQHITGACKSRAQTDYKHRHDQVASIIHQYLAYKYKLIADKISYYKYSPQVVLDSTHYKLYWDRTIITDKTIHCNRPDITVHDKRNKTVYLIDIAIPKTHNLQTTFSEKLAKCQSFLLSLGAMESRCC

SEQ ID NO: 23846 - protein, 1353 aa, Myscelus epimachia
MHLRSRNTLPQAGTSNGESRPETTSSGCPTYSGGGKVSLEPAQSKTVAGRTSDASTRMQSHLPAKPMILGDPKTDKADYATPTIASSFNSVSQFKTPVVKSLHKSDNVVQEADADNLAPIADKKCARKKWSTEMNIFIWRTYLKITQLESSTKGYLDELHDQFHHKFPHMNASKQRLGDQRRAIVRSNLLPQTLLNNISEEVRTELYNTNQIPKAAINTQTNITDRRRMIWTTHLNETIIRIYLEVTELESNLTTYRKKLHEKFIESFPHLSHITEQRIADQRRAIINNRMLLETRIIEIRQEVALKLNMHNVHTDSQTHTQHDQTEQLTNVCCTEDATQEKAVLPCNDQDEGFMPENEKIVLEKLFFEALETFRNFEPTVRPLLPKQKVTKKLINAVKYLNLTLIPKILFSDTNFETVQLIIYCAAYSAVIYNGGKVNYEQSKGTHEYRVPAWQINLEKRIETLRIHIGRLTEYNKGIRNKRLEKKVADIKRRYRIHSQHEQPNTDLTHFLDTLKQKLNALAGRLRRYKMTTLRKTQNKHFQNNEKTFYRSLSQPKNSNQSISTNTSTPNKDDFAKFWSNIWSETVEHNEGEWIQEDKARLEGVQEMQFKEISLELLQRVISRTHNWKATGSDKIHNYWYKKFTNTHPILHTHINNFIKSPNTVPHYVTQGITYMIPKDATAMSNPAKYRPITCLQNIYKIITSCISELIYTHAEQNNILAEEQKGCRRNTQGCKEQLIIDTVMLKQAYTKKRNIFTMYIDYQKAFDSVPHSWLIYILKHYNIHPKIITFLKTAMSNWKTKLKIHGTPGATETDLININRGIFQGDALSPLWFCLALNPLSILLNNSRKGFNIKYNNNTQHTISHLMYMDDIKLFGSSLNQINTLANITETFSNDIHMQFGIDKCKILSVRKGVVEQNSYTLNNEEVIRPVDQTIGYKYLGYQQSRQIHQKQTKITLTEHFKSRLHKILNTQLNARNTVKAINTFAIPVLTYSFGVIYWTQTDIQKLQRLINTTMTKYRKHHPRACIQRLSLSRQEGGRSLIDIQNLHNRQITALRTYFHNRALHSQIHQATVQADTKLTPLNLRDTTINLPQNTTDQKIHIWTQKSLHGRHRTDLTNTNVDKNASNAWLKRGELFPETEAFMIAIQDQVIDTRNYRKHIIKDSTLVSDMCRHCHSSSETIQHITGACRSIVQTDYKHRHDQVAAIIHQYLGLKYKLITEKTNYYKYTPATALETKQFKLYWDRTIITDKTIHHNRPDITLHDKTNKIVYLIDIAIPNTHNLQTSFTEKLSKYTDLSIALKSQWKVNTVRTIPIVISSTGIIPKSLHTSLKSLQIHPLTYLTIQKAVILNTC

SEQ ID NO: 23847 - protein, 1323 aa, Achlyodes mithridates
MKNSQNKNIKYNLRSLSRVDGNTTSVLTENNEELNSTLHTGPLGQNQTDHISCSTSPMSTTSSSISKFTSDTSSLSDNVVEEASATCPSPITDDNNTRTRKKWSTEMNIFIWRSYLTITQLDTYTRGYPDVLYNKFHEKFPHMDVSKQRVCDQRRAIVRNKLLPQIILDKIKEEVTLLLQNKMLPSHSHTDIAHNQTHNSNNSRMVWTNRINEVIVEIYYEVTELESNLTTYRKKLHNKFIEIFPHLSHLTEQRIADQRRVIFNNKMVPENKILEIRQEVARKLSNVNPVIQILDKTQDDILTDTPDINIEEPQTIQNTPTELHKLFSDTLKEFENTNPTCRPIIPKQKVTKKFSRAVQYLNNEIIPKYITQNTDFSTTQLVIYCGAYTAAKYNGSKIRESLNNNSTHQLQKPFWQVKLEKRIDDLRVHIGRLTEYSKGIRSNKLLKKVEDIKRKYKIHSQHENPNTDISHFLDTLKQKLNALASRLRRYKKTTLRKTQNKLFINNEKTFYRSLTQHRNSNNTSNNNNSTPTKEQLEGFWSNLWSNPIEHNYSSGWIEEDKERLKEVPYMQFENISLDLLKSIIHRTHNWKATGSDKIHNYWYKKFTNLHSLLLTHINNFIKSPDTIPQYITQGITYMLPKDNTNLNDPSKYRPITCLQNIYKIITSCISELIYRHIDQNNILAEEQKGCRKNRQGCKEQLTIDAVTLKQAYGNKRSIYTMYIDYQKAFDSVPHSWLLYILKHYNIHPAIIFFLKSVMSTWQTKIKLCNGSKTIESDLLKIQRGIFQGDALSPLWFCLALNPLSRLLNNSNKGFKIKYNKKHHTISHLMYMDDIKLYGSTLKEIHTLTDITQTFSSDICMQFGIDKCKIQSVKRGIIEQNTHNISNSEQIIQPVDQSEGYKYLGYQQSRQIHQKETKYTLTEKFRSRLHKILNTELNGRNTVQAINSYAIPILTYSFGIIQWTKTDLLKLQRIINTTMTKYRKHHPRSCSQRQTLPRLEGGRNIIDIQNLHNKQINKLRKYFHNRAEHSLIHQATVEADTKYTPLNLRDRDMNLTEITSEQKINSWSQKSLHGRHRLELKNPTVDKVASNAWLRQGELFAETEGFMIAIQDQVIETKNYRKHIIKDPTLVNDMCRHCHSNSETIQHITGACRSIVQTDYKHRHDQVAAIVHQYLAYKYKLIPEKTNYYKYTPAVILESQKFRLYWDRTIITDKTVHYNRPDITLHDKENKIVYLIDIAIPNTHNIHTTYTNKLTKYTDLTIELKTQWKVNTVKTIPTTGIVPKTLQPNLKILNIHPLTFLTIQKAVILNTCRIVRKFLSIDTS

SEQ ID NO: 23848 - protein, 1335 aa, Eantis tosta
MKNSKNKVIKYNLRSLSRVNEYYTTSVRTEDNEKFNSTFHTGPTGQNQRANETDTSSCSTSSISLASSSITKFTSVTSSLSDNVVEEASATYPAPITDDKTRTRKKWSTEMNIFIWRSYLTITQLETCIRGYPDALYTKFHENFPQMDVSKQRVCDQRRAIVKNKLLPQKKLDEIKEEVKLLLQNTLKQTSHLHTDTADNQAHTVNNRRMVWTNKMNEVIVQIYYEVTQLESNLTTYRKKLYDEFIEIFPHLSHLTEQRIADQRRVIFNNKMVPERKILEIRQEVAKKLSNIIPVTQKLDKSHDEVLTDTPYVYKENIEESRIKQNTPTELLNLFSEAFKEFENTDPTSRPIIPKQKVTKKLSHAVQYLNNEIIPKFIAADTDFMTTQLVIYCGAYTAAKYNGSKITDLRNNNNKPNLQKPFWQVKLEKRIDDIRIHIGRLTEYSNGIRSNKLLKKVEDIKRKYKIHTQHDNPNTDISHFLDTLKQNLNALASRLRRYKKTTLRKTQNKLFVNNEKTFYRSLTQHTNTTNTSYNHNCTPTKEQLEGFWSNLWSNPIEHNHNTNWIYEDKDRLKEVPRMQFENISLDLMRSIIHRTHNWKATGSDKIHNYWYKKFTSIHSILQTHINDFIKSPDTIPQYITQGITYMLPKDNTNLNDPSKYRPITCLQNIYKIITSCISELIYRHIDQNNILAEEQKGCRKNRQGCKEQLTIDAVALKQAYAKKRSIYTMYIDYQKAFDSVPHTWLLYILKHYNIHPAILLFLESVMSTWQTKLKLCNRSETIESDLIKIRRGIFQGDALSPLWFCLALNPLSTLLSNSNKGFQIKYDKKHYTISHLMYMDDIKLYGSTLKEIHTLADITQTFSTDICMQFGIDKCKILSVNRGIIEQNTHSIRNSEQIIQPVDQSEGYKYLGYQQSRQIHQKETKCTLTEKFRSRLHKILNTELSGRNTIQAINSYAIPVLTYSFGIIQWSQTDLQKLQRIINTTMTKYRKHHPRSCSQRQTLPRLEGGRNIIDIQNLHSKQINNLRKYFYNRAEHSSIHQATVEADTKYTPLNLRDRDITLAEITLEQKINSWSQKSLHGRHRLELKNPTVDKVASNAWLRRGELFAETEGFMIAIQDQVIETKNYRKHIIKDPTLLNDTCRHCHSNSETIQHITGACRSIVQTDYKHRHDQVAAIIHQYLAHKYKLIPEKTNYYKYTPSVILESQKFRLYWDRTIITDKTVHYNRPDITLHDKENKIVYLIDVAIPNSHNVHTTYTNKLTKYTDLTIELKTQWKVNTVKTIPIVISSTGIVPKTLQSNLKTLNIHPLTFLTIQKAVILNTCRIVRKFLSIDTS

SEQ ID NO: 23849 - protein, 1332 aa, Udranomia kikkawai
MNKPKNIRYNLRSLSKPHQSAFIVQNEDKEEPDLAINQGTDARVSENIFTDFISSNSTPISSLHNSFTTFSSSSSSSSSSMSDNVVEAVSTENPPPIADIKRARKKWSTEMNIFIWRTYLTITQLESCTRGYLDELFLQFNKKFPTMNVSKQRISDQRRTIIRNKLLSQKQLDDIKEEVRVYIHSSNHLTHTQSSNNSTHTANRPRMTWTNNMNETIIKNYLEVTHLESNLTCYRKKLYDKFMECYPDLTHLTEQRIADQRRVIINNKMLTEERIMQIRQQIALKISKENVSIENYTPNHNQEEILDNSNSNAMLGENTDTQECVGLQIAQDFNDLQKYFTDALQEFKHTDPTCRPTIPKQKLTKRLSNAVQYLNQTLIPKVTSSDTDFETTQLVIYCAAYATAKYNGSQIKDTPTNTQFTRQMPAWQIQLEKRINNLRTHIGRLTEFINGNRSNSLNKKVENIKQRFKFHSSHEHPNTDLTHFLDTLKQKLNVLASRLRRYKKTTLRKTQNKLFSNNEKTFYRNLTNSTLTYCQSLPKKEDLVNFWSNLWSKPVEHRKDSSWIKEDKNKLSELPEMEFGNVSLDLIKRVISRTHNWKATGSDKIHNYWYKKFTSIHTLLHTHINNFIRSPNTLPQYITQGITYMLPKDRENMNNPANYRPITCLQNIYKIITSCISDIIHTHVEQNNILAEEQKGCRRNMKGCKEQLTIDAVVLKQAFTNKRSIYSMYVDYQKAFDSVPHSWLIYILDHYNIHPMIIYFFKSVMSTWQTKLKLYSSTESIETEFLKINRGIFQGDAFSPLWFCLALNPLSKLLNNCKKGFKIKYDNKQHTISHLMYMDDIKLFGSTLNEIKSLANTTHSFSLDICMQFGIDKCKIQSVNKGVIQDNSYSTNSEELIQPVDQILGYKYLGYQQSRQIHQKETKSTLTEKFKTRLHKILNTELNARNTIKAINTYAISILTYSFGIINWTQTDLQRLQRTINTTMTKFRKHHPRACVQRQILPRLEGGRSIIDIYNLHNRQIKSLRTYFYNRAEHSQIHLAVVHADNKLTPLNLKDHTKHCKQITIEEKINTWSQKSLHGRHRLDLNNPNIDKTASNAWLKRGELFSETEGFMIAIQDQVIDTRNYRKHIIKDPSLVNDLCRHCHNSSETIQHITGACRCIVQTDYKHRHDQVAAIVHQYLAYKFKLISEKTNYYKYKPAIILESSTFKLYWDRTILTDKTVHFNRPDILLHDKVNKKVYLIDIAIPNTHNLQSTYTEKLTKYTDLSIELKTQWRVDTVQTIPIVISSTGIVPKSLHVSLKTLQIHPLTFLTIQKAVIINTCRIVRKFLSIDT

SEQ ID NO: 23850 - protein, 1207 aa, Doberes anticus
MNNSKHKNRRYNLRSLSRADQGTTSVRTVDDDLEGHKTYNNSSSNSPSPSTTTSLSYDTSPATSTSTLLDNVVQEACAADSAPVTDNKRARKKWSTEMNIFIWRTYLTITQMEACIRGHPDELYFKFQEKFPHMDVSKQRVCDQRRTIVRNKLLPQRTLDQIKEEVKLELQNTIHSPQTLMDTLSTQTRITDKRRMIWTTKMNETIIQIYYEITELEANLTTYRKKLYDKFIEHFPQLSHLTEQRIADQRRVIINNKMVTENRILEIRQEVAKKLTNINPDTETFDSTIINDTPVNRNEVTEDVFTQEHEKILLTEDAQNKLQELFSEALREFKNTDPTLRPSIPKQKITKKHTNVVQYLNHTIIPKVISQDTDFATIQLIIYCGAHTAAKYNGSKIKDSQPLNKTNTQKPFWQIKLEKRIEVLRVHIGRLTEFKNGIRSYKLLKKVEIIKRIYKIHAQHENPNTEILHFLDTLKQKLNALASRLRRYKKTSLRKTQNKLFNHNEKTFYRNLNQHTVTSHTPSSHNTIPTKEALVGFWSNLWSNPVEHNNGSSWIQEDKKRLLELPQMRFENISLDLIKRVIHRTHNWKATGSDKIHNYWYKKFTSTHPLLQTHINNFITSPETIPCYITQGITYMLPKDDTNTSDPSKYRPITCLQNIYKIITSCINEIIYTHIDENKILAEEQKGCRKNRQGCKEQLTIDAVALKQAYTKKRNIYTMFIDYQKAYDSVPHTWLLYILKHYNIHPTVIHFLESVMNTWKTKLRLHSSTGTIETDLLTIKRGIFQGDALSPLWFCLALNPLSNLLNNSKKGFQIKYDNKQHTISHLMYMDDIKLFGSTLTEINTLANTTETFSLDICMQFGVDKCKIQSVKKGIIEKNTYNMNSNDQIMHPVDQTIGYKYLGYQQSRQIHQRETKLTLTNNFKSRLHKILNTQLNARNTTKAINSFAIAILTYSFGIIQWTQTDLQKLQRIINTTMTKYRKHHPRSCVQRQTLPRPEGGRGLIDIKNLHNRLINSLRAYFHSIAEHSSIHQAIVQADNKLTPLNLRDRNIHLDEVTAEQKINSWTQKSLHGRHRLDLNNSNFDKTASNAWLKRGEMFPETEGFMIAIQDQVIDTKNYRKHIIRDPTLVSDLCRHCHSNSETIQHITGACRSIVQTDYKHRHDQVGAIIHQYLAHKYKLITERTNYYKYSPAVILESQKFRLYWDRTI

SEQ ID NO: 23851 - protein, 1347 aa, Abrostola tripartita
MRLRNRTLPQVGTGANHDGESHPGPSSPGRPTYSGEGTVSYQSAQSQTVAVTHDPPPSCSSPTSSLFSSIPSSPPSYLDIVHETSSLNSSPSPSFQSALDVVQEATSANVTAPAKNGRRTRMTWTKDMNIFIMRHYFILTELEINTRTYLTPLHARFTAEFPEMQVGKQRVGDQRRAIVQRNFLTTQEIDNIKDEVKTLLQNQPPETNIHTDNTQPKRIRWSDYLNETIMRSYYRLTNLETDLTTYRTLLHQDIVTKCPTIAHLSAQRIADQRRSIVNNRLLSEDKLNEIRDEVRNELGSIDTYSPEVVTTAADENLVSEATEQTQNIEIHEQNSPPEHLLYTNLPTELQQQLNDIFIETFNRFKDTHPTSRPYLPKLKPSKKLASIISHVNLNIIPKFLTLDTDFDTMQSVIYCAAFTTAKFNGARILEVNISHKKPPVSPWWQRRLEGRIKELRANIGRLTEYSRGVRSQALEKHMSKIKHLYKIHSRHESENTDITHYLDTLKQKLNALTSRLRRYKETTNRKTQNKQFCNNEKLFYRKLTHTHSTSENTLLPTPESLHAFWSDIWSNPIEHEHNQWIDDDKDRLKDIPEMQFEHIHLDLLTTVISRTHNWKAAGSDNIHNFWYKKFTSIHTLLLKHINAYIHAPDTMPLYITQGTTYMLPKDSSDSVNPAKYRPITCLQNIYKIITSCLSETIYRHTNEHNILAEEQKGCRKNSQGCKEQLTIDAVVSTQAHRQKRDIHTMYIDYKKAFDSVPHSWLIYILKHYKIHPTITYFLEKTMSNWNTKLKICQSDKTAETDFIQIKRGIFQGDSLSPLWFCLALNPLSKMLNINNIGIKIKHNIQETTLSHLMYMDDIKLFGSTLNEIHALADITQTFSNNIRMEFGIDKCKIQSVVKGIVEPVSYELPNRNIIDAVDPVEGYKYLGYHQTQQIHHKETKKTLQQNFKTRLHKILHTHLNARNTIKAINTFAIPILTYSFGVIRWTQTDLQSLQRVINTTMTKHRKHHPRACIQRLTLPKSEGGRGLIDIANLHSKQIALLRSFFYKRAHLSTLHKAISLADTYTPLSLADQNKQLKTINKQQKMDAWTQKSLHGRHRLDLINPTVDKIASNAWLKRGELFPETEGFMLAIQDQVIDTKNYRKYIIRDSTLGSDHCRHCHKQPETIQHITGACSSITQTDYKHRHDQVAAIIHQTLAHKHKLITEKIPYYKYTPQIILDSPDYRMYWDRTILTDKTIHFNRPDITLHDKHNKTVYLIDIAIPNTHNLLSTHTNKLSKYADLTIEVKTQWKVNTVKTIPIIISSTGVIPKTLHSSLKTLNIHPLTFTLLQKAVILNTCRIVRKFLSID

SEQ ID NO: 23852 - protein, 1351 aa, Amphipyra tragopoginis
MRLRNRILPQAGTGANRDGESRPGPSSPGCPSYSGEGTVPHQSAQSRTVAVQHGKSSSCSSPTSSLFSSIPSSPPSYLETIQDSNSPISSPSPSLQSTMDVVQEATSAEVTAPVQGGRRTRKTWTKDMNIFIMRHYFILSELESNTKIYLTPLHARFIAEFPEMDVRKQRVGDQRRAIIQRGFLTKQEIANIKEEVRLLLQNQHPSDINTPIHHTQSQRIRWSDNLNETIMRSYYRLTKLETDLTTYRPLLHQDITAKCPEIAHLSAQRIADQRRSIVNNRLLSTDQLNKIREEVRNELGSIITHTPVDITQHTEENLTLSSTDQIQTSTNDLNSEPEQATNESPNFPTELHLQLEEMFMETFSKFKDTHPITRPYLPKLKPSKKLASIISHLNSDILPKTLTSDTDFNTLQTTIYSAAYTSAKFNGARISEGNKTNNKPQSVPWWQRRLQGRIDDLRANIGRLTEYTRGVRSQALQKHINKIKLQYKIHTQHETQNTDIAHFLDTLKQKLNTLSSRLRRYKETTLRKTQNKQFCSNEKLFYRKLTQQHNTSPENSSTLPTPESLHAFWSNIWSNPIEHEQNQWIDEDRERLKDMPEMEFEQIHLDLLRTVILRTHNWKAAGSDNIHNFWYKKFTCTHTLLLKHINAFIHSPDTMPPYITQGITYMLPKDSSDLANPAKYRPITCLQNIYKIITSCLSECIYKHTHEHHVLAEEQKGCRKHSQGCKEQLTIDAVASKQAISQKRNIHTMYIDYKKAFDSVPHSWLIYILKHYKINSAITCFLEKTMLNWNTKLKICNSNENAETDFIPIKRGIFQGDALSPLWFCLALNPLSNMLNKNNIGFKIKHDTQQTSLTHLMYMDDIKLFGSTLDEIHTLADVTQIFSNDIRMEFGIDKCKIQSVNKGIVEPASYELANHDVIDAVDPVEGYKYLGYHQTQEIHHKDTKNILQQKFKNRLHKILHTHLNARNTIKAINTYAIPILTYSFGIIRWTQTDLKNLQRIINTTMTKLRKHHPRACIQRLTLPKKEGGRGLIDITNLHNKQIILLRTFFHGHSQQSTLHKAISQADKFTPLSLANHTKQMKINTKQQKIDTWTQKSLHGRHRLNLTDPNVDKIASNAWLKRGELFPETEGFMLAIQDQVIDTKNYRKYIIRDSSLSSDHCRHCHKQPETIQHITGACSSITQTDYKHRHDQVAAIIHQTLAYKHKLITEKIPYYKYTPQIILDSPDYKMYWDRTILTDKTIHHNRPDITLHDKQNKIVYLIDIAIPNTHNLTSTHTNKLSKYTDLTIELKTQWRVHTVKTIPIIISSTGVIPKTLHTSLKTLNLHPLTFILLQKAVILNTCRIVRKFLSID

SEQ ID NO: 23853 - protein, 1223 aa, Abrostola tripartita
MTWTKDMNIFIMRHYFILTELEINTRTYLTPLHARFTAEFPEMQVGKQRVGDQRRAIVQRKFLTTQEIDNIKDEVKTLLQNQPPETNIHTDNTQPKRIRGSDYLNETIMRSYYRLTNLETDLTTYRTLLHQDIVTKCPTIAHLSAQRIADQRRSIVNNRLISEDKLNEIRDEVRNELGSIDTYSPEVVTTAADENLVSEATEQTQNIEIHEQNSPPEHTNLPTELQQQLNDIFIETFNRFKNTHPTSRPYLPKLKPSKKLASIISHVNLNIIPKFLTLDTDFDTMQSVIYCAAFTTAKFNGARILEVNISHKKPPVSPWWQRRLEGRIKELRANIGRLTEYSRGVRSQALEKHMSKIKHLYKIHSRHESENTDITHYLDTLKQKLNALTNRLRRYKETTIRKTQNKQFCNNEKLFYRKLTHTHSTSENTLLPTPESLHAFWSDIWSNPIEHEHNQWIDDDKDRLKDIPEMQFEHIHLDLLTTVISRTHNWKAAGSDNIHNFWFKKFTSIHTLLLKHINAYIHAPDTMPLYITQGTTYMLPKDLSDSVNPAKYRPITCLQNIYKIITSCLSETIYRHTNEHNILAEEQKGCRKNSQGCKEQLTIDAVVSTQAHRQKRDIHTMYIDYKKAFDSVPHSWLIYILKHYKIHPTITYFLEKTMSNWNTKLKICQSDKTAETDFIQIKRGIFQGDSLSPLWFCLALNPLSKMLNINNIGIKIKHNIQETTLSHLMYMDDIKLFGSTLNEIHALADITKTFSNNIRMEFGIDKCKIQSVVKGIVEPVSYELPNRNIIDAVDPVEGYKYLGYHQTQQIRHKETKKTLQQNFKTRLHKILHTHLNARNTIKAINTFAIPILTYSFGVIRWTQTDLQSLQRVINTTMTKHRKHHPRACIQRLTLPKSEGGRGLIDIANLHSKQIALLRSFFYKRAHLSTLHKAISLADTYTPLSLADQNKQLKTTNKQQKMDAWTQKSLHGRHRLDLINPTVDKIASNAWLKRGELFPETEGFMLAIQDQVIDTKNYRKYIIRDSTLGSDHCRHCHKQPETIQHITGACSSITQTDYKHRHDQVAAIIHQTLAHKHKLITEKIPYYKYTPQIILDSPDYRMYWDRTILTDKTIHFNRPDITLHDKHNKTVYLIDIAIPNTHNLLSTHTNKLSKYADLTIEVKTQWKVNTVKTIPIIISSTGVIPKTLHSSLKTLNIHPLTFTLLQKAVILNTCRIVRKFLSID

SEQ ID NO: 23854 - protein, 1294 aa, Amphipyra tragopoginis
MFFTNIIIIFIHPFIPSYLETIQDSSSPISSPSPSLQSTMDVVQEATSAEVTAPVQGGRRTRKTWTKDMNIFIMRHYFILSELESNTKIYLTPLYARFIAEFPEMDVGKQRVGDQRRAIIQRGFLTKQEIANIKEEVRLLLQNQHPSDKNTPIHHTQSQRIRWSDNLNEAIMRSYYRLTKLETDLTTYRPLLHQDITSKCPDIAHLSAQRIADQRRSIVNNRLLSTDQLNRIREEVRNELGSIITHTPVDITQHTEENLTLSSTDQIQTLTNDLNSEPEQATNESPNFPTELHLQLEEMFMETFSKFKDTHPTTRPYLPKLKPSKKLASIISHLNSDILPKTLTSDTDFNTLQTTIYSAAYTSVKFNGARISEGNKTNNNPQSVPWWQRRLQGRIDDLRANIGRLTEYTRGVRSQALQKHINKIKQQYKIHTQHETQNTDIAHFLDTLKQKLNTLSSRLRRYKETTLRKTQNKQFCSNEKLFYRKFTQQHNTSPENNSTLPTPESLHAFWSNIWSNSIEHEQNQWIDEDRERLKDMPEMEFEQIHLDLLRTVILRTHNWKAAGSDNIHNFWHKKFTCTHTLLLKHINAFIHSPDTMPLYITQGITYMLPKDSSDLANPAKYRPITCLQNIYKIITSCLSESIYKHTHEHHVLAEEQKGCRKHSQGCKEQLTIDAVASKQAITQKRNIHTMYMYIDYKKAFDSVPHSWLIYILKHYKINSAITCFLEKTMLNWKTKLKICNSNENTETDFIPIKRGIFQGDALSPLWFCLALNPLSNMLNKNNIGFKIKHDTQQTSLTHLMYMDDIKLFGSTLDEIHTLADVTQIFSNDIRMEFGIDKCKIQSVNKRIVEPASYELANHDVIDAVDPVEGYKYLGYHQTQEIHHKDTKNILQQKFKNRLHKILHTHLNARNTIKAINTYAIPILTYSFGIIRWTQTDLKNLQRIINTTMTKHRKHHPRACIQRLTLPKKEGGRGLIDITNLHNKQIILLRTFFHGHSQQSTLHKAISQADKFTPLSLANHTKQMKINTKQQKIDTWTQKSLHGRHRLNLTDPNVDKIASNAWLKRGELFPETEGFMLAIQDQVIDTKNYRKYIIRDSSLSSDHCRHCHKQPETIQHITGACSSITQTDYKHRHDQVAAIIHQTLAYKHKLITEKTPYYKYTPQIILDSPDYKMYWDRTILTDKTIHHNRPDITLHDKQNKIVYLIDIAIPNTHNLTSTHTNKLSKYTDLTIELKTQWRVHTVKTIPIIISSTGVIPKTLHTSLKTLNLHPLTFILLQKAVILNTCRIVRKFLSID

SEQ ID NO: 23855 - protein, 1351 aa, Amphipyra tragopoginis
MRLRNRILPQAGTGANRDGESRPGPSSPGCPSYSGEGTVPHQSAQSRTVAVQHGKSSSCSSPTSSLFSSIPSSPPSYLETIQDSNSPISSPSPSLQSTMDVVQEATSAEVTAPVQGGRRTRKTWTKDMNIFIMRQYFILSELESHTKTYLTPLHARFIAEFPEMDVGKQRVGDQRRAIIQRGFLTKQEIANIKEEVRLLLQNQHPSDINTPIHHTQSQRIRWSDNLNETIMRSYYRLTKLETDLTTYRPLLHQDITAKCPEIAHLSAQRIADQRRSIVNNRLLSTDQLNKIREEVRNELGSIITHTPVDITQHTEENLTLSSTDQIQTPTNDLNSEPEQATNESPNFPTELHLQLEEMFIETFSKFKDTHPTTRPYLPKLKPSKKLASIISHLNSDILPKTLTSDTDFNTLQTTIYSAAYTSAKFNGARISEGNKTNNKPQSVPWWQRRLQGRIDDLRANIGRLTEYTRGVRSQTLQKHINKIKLQYKIHTQHETQNTDIAHFLDTLKQKLNTLSSRLRRYKETTLRKTQNKQFCSNEKLFYRKLTQQHNTSPENSSTLPTPESLHAFWSNIWSNPIEHEQNQWIDEDRERLKDMPEMEFEQIHLDLLRTVILRTHNWKAAGSDNIHNFWYKKFTCTHTLLLKHINAFIHSPDTMPPYITQGITYMLPKDSSDLANPAKYRPITCLQNIYKIITSCLSECIYKHTHEHHVLAEEQKGCRKHSQGCKEQLTIDAVASKQAISQKRNIHTMYIDYKKAFDSVPHSWLIYILKHYKINSAITGFLEKTMLNWNTKLKICNSNENAETDFIPIKRGIFQGDALSPLWFCLALNPLSNMLNKNNIGFKIKHDTQQTSLTHLMYMDDIKLFGSTLDEIHTLADVTQIFSNDIRMEFGIDKCKIQSVNKGIVEPASYELANHDVIDAVDPVEGYKYLGYHQTQEIHHKDTKNILQQKFKNRLHKILHTHLNARNTIKAINTYAIPILTYSFGIIRWTQTDLKNLQRIINTTMTKHRKHHPRACIQRLTLPKKEGGRGLIDITNLHNKQIILLRTFFHGHSQQSTLHKAISQADKFTPLSLANHTKQMKLNTKQQKIDTWTQKSLHGRHRLNLTDPNVDKIASNAWLKRGELFPETEGFMLAIQDQVIDTKNYRKYIIRDSSLSSDHCRHCHKQPETIQHITGACSSITQTDYKHRHDQVAAIIHQTLAYKHKLITEKTPYYKYTPQIILDSPDYKMYWDRTILTDKTIHHNRPDITLHDKQNKIVYLIDIAIPNTHNLTSTHTNKLSKYTDLTIELKTQWRVHTVKTIPIIISSTGVIPKTLHTSLKTLNLHPLTFILLQKAVILNTCRIVRKFLSID

SEQ ID NO: 23856 - protein, 1347 aa, Amphipyra tragopoginis
MRLRNRILPQAGTGANRDGESRPGPSSPGCPSYSGEGTVPHQTAQSRTVAVQHGKSSSCSSPTSSLFSSIPSSPPSYLETIQDSSSPNSSPSPSLQSTMDVVQEATSAEVTAPVQGGRRTRKTWTKDMNIFIMRHYFILSELESNTKIYLTPLHARFIAEFPEMDVGKQRVGDQRRAIIQRGFLTKQEIGNIKEEVRLLLHNQHSSDINTPIHHTQSQRIRWSDNLNETIMRSYYRLTKLETDLTTYRPLLHQDITSKCPEIAHLSAQRIADQRRSIVNNRLLSTDQLNRIREEVRNELGSTITHTPVDITQHIEENLTLSSTDQIQTLNSEPEQATNESPNFPTELHLQLEEMFMETFSKFKDTHPTTRPYLPKLKPSKKLASIISHLNSDILPKTLTSDTDFNTLQTTIYSAAYTSAKFNGARISEGNNTNNKPQSAPWWQRRLQGRIDDLRANIGRLTEYTRGVRSQALQKHINKIKQQYKIHTQHETQNTDIAHFLDTLKQKLNTLSSRLRRYKETTLRKTQNKQFCSNEKLFYRKLTQQHNTSPENNSTLPTPESLHAFWSNIWSNPIEHEQNQWIEEDREKLKDLPEMEFEQINLDLLRTVILRTHNWKAAGSDNIHNFWYKKFTCTHTLLLKHINAFIHSPDTMPLYITQGITYMLPKDLSDLANPAKYRPITCLQNIYKIITSCLSESIYKHTHEHHVLAEEQKGCRKHSQGCKEQLTIDAVASKQAISQKRNIHTMYIDYKKAFDSVPHSWLIYILKHYKINSAITCFLEKTMLNWNTKLKICNSNENAETDYIPIKRGIFQGDALSPLWFCLALNPLSNMLNKNNIGFKIKHDTQQTSLTHLMYMDDIKLFGSTLDEIHTLADATQIFSNDIRMEFGIDKCKIQSVNKGIVEPASYELANHDVIDAVDPVEGYKYLGYHQTQEIHHKDTKNILQQKFKNRLHKILHTHLNARNTIKAINTYAIPILTYSFGIIRWTQTDLQNLQRIINTTMTKHRKHHPRACIQRLTLPKKEGGRGLIDITNLHNKQIILLRTFFHGLSQQSTLHKAISQADKFTPLSLANHTKQMKINTKQQKIDTWTQKSLHGRHRLNLTDPNVDKIASNAWLKRGELFPETEGFMLAIQDQVIDTKNYRKYIIRDSSLSSDHCRHCHKQPETIQHITGACSAITQTDYKHRHDQVAAIIHQTLAYKHKLITEKTPYYKYSPQIILDSPDYKMYWDRTILTDKTIHHNRPDITLHDKQNKIVYLIDIAIPNTHNLTSTHTNKLSKYTDLTIELKTQWRVHTVKTIPIIISSTGVIPKTLHTSLKTLNLHPLTFILLQKAVILNTYRIVRKFLSID

SEQ ID NO: 23857 - protein, 1351 aa, Amphipyra tragopoginis
MRLRNRILPQAGTGANRNGESRPGPSSPGRPSYSGEGTVPHQSAQSRTVAVQHGKSSSCSSPTSSLFPSIPSSPPSYLETIQDSSSPISSPSPSLQSTMDVVQEATSAEVTAPVQGGRRTRKTWTKDMNIFIMRHYFILSELESNTKIYLTPLHARFIAEFPEMDVGKQRVGDQRRAIIQRGFLTKQEIANIKDEVRLLLQNQHPSDINTPIHHTQSQRIRWSDNLNEAIMRSYYRLTKLETDLTTYRPLLHQDITSKCPEIAHLSAQRIADQRRSIVNNRLLSTDQLNRIREEVRNELGSNITHTPVDITQHTEENLTLSSTDQIQTLTNDLNSEPEQATNESPNFPTELHLQLEEMFMETFSKFKDTHPTTRPYLPKLKPSKKLASIISHLNSDILPKTLTSDTDFNTLQTTIYSAAYTSAKFNGARISEGNKSNNKPQSVPWWQRRLQGRIDDLRANIGRLTEYTRGVRSQALQKHINKIKQQYKIHTQHETQNTDIAHFLDTLKQKLNTLSSRLRRYKETTLRKTQNKQFCSNEKLFYRKLTQQHNTSPENSSTLPTPESLHAFWSNIWSNPIEHEQNQWIDEDRERLKDMPEMEFEKIHLDLLRTVILRTHNWKAAGSDNIHNYWYKKFTCTHTLLLKHINAFIHSPDTMPLYITQGITYMLPKDSSDLANPAKYRPITCLQNIYKIITSCLSESIYKHTHEHHVLAEQQKGCRKHSQGCKEQLTIDAVASKQAISQKRNIHTMYIDYKKAFDSVPHSWLIYILKHYKINSAITCFLEKTMLNWNTKLKICNSNENAETDYIPIKRGIFQGDALSPLWFCLALNPLSNMLNKNNIGFKIKHDTQQTSLTHLMYMDDIKLFGSTLDEIHTLADVTQTFSNDIRMEFGIDKCKIQSVNKGIVEPASYELANHDVIDAVDPVEGYKYLGYHQTQEIHHKDTKNILQQKFKNRLHKILHTHLNARNTIKAINTYAIPILTYSFGIIRWTQTDLKNLQRIINTTMTKHRKHHPRACIQRLTLPKKEGGRGLIDITNLHNKQIILLRTFFHGHSQQSTLHKAISQADKFTPLSLANHTKQMKINTKQQKIDTWTQKSLHGRHRLNLTDPNVDKIASNAWLKRGELFPETEGFMLAIQDQVIDTKNYRKYIIRDSSLSSDHCRHCHKQPETIQHITGACSSITQTDYKHRHDQVAAIIHQTLAHKHKLITEKIPYYKYTPQIILDSPDYKMYWDRTILTDKTIHHNRPDITLHDKQNKIVYLIDIAIPNTHNLTSTHTNKLSKYTDLTIELKTQWRVHTVKTIPIIISSTGVIPKTLHTSLKTLNLHPLTFILLQKAVILNTCRIVRKFLSID

SEQ ID NO: 23858 - protein, 1351 aa, Amphipyra tragopoginis
MRLRNRILPQAGTGANRDGESRPGPSSPGCPSYSGEGTVPHQSAQSRTVAVQHGKSSSCSSPTSSLFSSIPSSPPSYLETIQDSNSPISSPSPSLQSTMDVVQEATSAEVTAPVQGGRRTRKTWTKDMNIFIMRHYFILSELESNTKIYLTPLHARFIAEFPEMDVGKQRVGDQRRAIIQRGFLTKQEIANIKEEVRLLLQNQHPSDINTPIQHTQSQRIRWSDNLNETIMRSYYRLTKLETDLTTYRALLHQDITAKCPEIAHLSAQRIADQRRSIVNNRLLSTDQLNKIREEVRNELGSIITHTPVDITQHTVENLILSSTDQIQTPTNDLNSEPEQATNESPNFPTELHPQLEEMFMETFSKFKDTHPTARPYLPKLKPSKKLASIISHLNSDILPKTLTSDTDFNTLQTTIYSAAYTSAKFNGARISEGNKTNNKPQSVPWWQRRLQGRIDDLRANIGRLTEYTRGVRSQALQKHINKIKLQYKIHTQHETQNTDIAHFLDTLKQKLNTLSSRLRRYKETTLRKTQNKQFCSNEKLFYRKLTQQPNTSPENSSTLPTPESLHAFWSHIWSNPIEHEQNQWIDEDRERLKDMPEMEFEQIHLDLLRTVILRTHNWKAAGSDNIHNFWYKKFTCTHTLLLKHINAFIHSPDTMPPYITQGITYMLPKDSSDLANPAKYRPITCLQNIYKIITSCLSECIYKHTHEHHVLAEEQKGCRKHSQGCKEQLTIDAVASKQAISQKRNIHTMYIDYKKAFDSVPHSWLIYILKHYKINSAITCFLEKTMLNWNTKLKICNSNENAETDFIPIKRGIFQGDALSPLWFCLALNPLSNMLNKNNIGFKIKHDTQQTSLTHLMYMDDIKLFGSTLDEIHTLADVTQIFSNDIRMEFGIDKCKIQSVNKGIVEPASYELANHDVIDAVDPVEGYKYLGYHQTQEIHHKDTKIILQQKFKNRLHKILHTHLNARNTIKAINTYAIPILTYSFGIIRWTQTDLKNLQRIINTTMTKHRKHHPRACIQRLTLPKKEGGRGLIDITNLHNKQIILLRTFFHGNSQQSTLHKAISQADKFTPLSLANHTKQMKINTKQQKIDTWTQKSLHGRHRLNLTDPNVDKIASNAWLKRGELFPETEGFMLAIQDQVIDTKNYRKYIIRDSSLSSDHCRHCHKQPETIQHITGACSSITQTDYKHRHDQVAAIIHQTLAYKHKLITEKTPYYKYTPQIILDSPDYKMYWDRTILTDKTIHHNRPDITLHDKQNKIVYLIDIAIPNTHNLTFTHTNKLSKYTDLTIELKTQWRVHTVKTIPIIISSTGVMPKTLHTSLKTLNLHPLTFILLQKAVILNTCRIVRKFLSID

SEQ ID NO: 23859 - protein, 1351 aa, Amphipyra tragopoginis
MRLRNRILPQAGTGANRDGESRPGPSSPGCPSYSGEGTVPHQSAQSRTVAVQHGKLSSCSSPTSSLFSSIPSSPPSYLETIQDSSSPISSPSPSLQPAIDVVQEATSAEVTAPIQGGRRTRKTWTKDMNIFIMRHYFILSELESNTKIYLTPLHARFIAEFPEMDVGKQRVGDQRRAIIQRGFLTKQEIANIKEEVRLLLQNQHPSDINTPIHHTQSQRIRWSDNLNEAIMRSYYRLTKLETDLTTYRPLLHQDITSKYPEIAHLSAQRIADQRRSIVNNRLLSTDQLNRIREEVRNELGSIITHTPVDITQHTEENLTLSSTDQIQTLTNDLNSEPEQATNESPNFPTELHLQLEDMFMETFSKFKDTHPTTRPYLPKLKPSKKLASIISHLNSDILPKTLTSDTDFNTLQTTIYSAAYTSAKFNGARISEGNKTNNNPQSVPWWQRRLQGRIDDLRANIGRLTEYTRGVRSQALQKHINKIKQQYKIHTQHETQNTDIAHFLDTLKQKLNTLSSRLRRYKETTLRKTQNKQFCSNEKLFYRKLTQQHNTSPENNSTLPTPESLHAFWSNIWSNPIEHEQNQWIDEDRERLKDMPEMEFEQIHLDLLRTVILRTHNWKAAGSDNIHNFWYKKFTCTHTLLLKHINAFIHSPDTMPLYITQGITYMLPKDSSDLANPAKYRPITCLQNIYKIITSCLSESIYKHTHEHHVLEEEQKGCRKHSQGCKEQLTIDAVASKQAISQKRNIHTMYIDYKKAFDSVPHSWLIYILKHYKINSAITCFLEKTMLNWKTKLKICNSNENAETDFIPIKRGIFQGDALSPLWFCLALNPLSNMLNKNNIGFKIKHDTQQTSLTHLMYMDDIKLFGSTLDEIHTLADVTQIFSNDIRMEFGIDKCKIQSVNKGIVEPASYELANHDVIDAVDPVEGYKYLGYHQTQEIHHKDTKNILQQKFKNRLHKILHTHLNARNTIKAINTYAIPILTYSFGIIRWTQTDLKNLQRILNTTMTKHRKHHPRACIQRLTLPKKEGGRGLIDITNLHNKQIILLRTFFHGHSQQSTLHKAISQADKFTPLSLANHTKQMKINTKQQKIDTWTQKSLHGRHRLNLTDPNVDKIASNAWLKRGELFPETEGFMLAIQDQVIDTKNYRKYIIRDSSLSSDHCRHCHKQPETIQHITGACSSITQTDYKHRHDQVAAIIHQTLAYKHKLITEKTPYYKYTPQIILDSPDYKMYWDRTILTDKTIHHNRPDITLHDKQNKIVYLIDIAIPNTHNLTSTHTNKLSKYTDLTIELKTQWRVHTVKTIPIIISSTGVIPKTLHTSLKTLNLHPLTFILIQKAVILNTCRIVRKFLSID

SEQ ID NO: 23860 - protein, 1347 aa, Amphipyra tragopoginis
MRLRNRILPQAGTGANRDGESRPGPSSPGCPSYSGEGTVPHQSAQSRTVAVQHGKSSSCSSPTSSLFSSIPSSPPSYLETIQDSSSPNSSPSPSLQSTMDVVQEATSAEVTAPVQGGRRTRKTWTKDMNIFIMRHYFILSELESNTKIYLTPLHARFIAEFPEMDVGKQRVGDQRRAIIQRGFLTKQEIGNIKEEVRLLLHNQHSSDINTPIHHTQSQRIRWSDNLNETIMRSYYRLTKLETDLTTYRPLLHQDITSKCPEIAHLSAQRIADQRRSIVNNRLLSTDQLNRIREEVRNELGSTITHTPVDITQHIEENLTLSSTDQIQTLNSEPEQATNESPNFPTELHLQLEEMFMETFSKFKDTHPTTRPYLPKLKPSKKLASIISHLNSDILPKTLTSDTDFNTLQTTIYSAAYTSAKFNGARISEGNNTNNKPQSAPWWQRRLQGRIDDLRANIGRLTEYTRGVRSQALQKHINKIKQQYKIHTQHETQNTDIAHFLDTLKQKLNTLSSRLRRYKETTLRKTQNKQFCSNEKLFYRKLTQQHNTSPENNSTLPTPESLHAFWSNIWSNPIEHDQNQWIEEDREKLKDLPEMEFEQINLDLLRTVILRTHNWKAAGSDNIHNFWYKKFTCTHTLLLKHINAFIHSPDTMPLYITQGITYMLPKDLSDLANPAKYRPITCLQNIYKIITSCLSESIYKHTHEHHVLAEEQKGCRKHSQGCKEQLTIDAVASKQAISQKRNIHTMYIDYKKAFDSVPHSWLIYILKHYKINSAITCFLEKTMLNWNTKLKICNSNENAETDYIPIKRGIFQGDALSPLWFCLALNPLSNMLNKNNIGFKIKHDTQQTSLTHLMYMDDIKLFGSTLDEIHTLADATQIFSNDIRMEFGIDKCKIQSVNKGIVEPASYELANHDVIDAVDPVEGYKYLGYHQTQEIHHKDTKNILQQKFKNRLHKILHTHLNARNTIKAINTYAIPILTYSFGIIRWTQTDLQNLQRIINTTMTKHRKHHPRACIQRLTLPKKEGGRGLIDITNLHNKQIILLRTFFHGLSQQSTLHKAISQADKFTPLSLANHTKQMKINIKQQKIDTWTQKSLHGRHRLNLTDPNVDKIASNAWLKRGELFPETEGFMLAIQDQVIDTKNYRKYIIRDSSLSSDHCRHCHKQPETIQHITGACSSITQTDYKHRHDQVAAIIHQTLAYKHKLITEKTPYYKYSPQIILDSPDYKMYWDRTILTDKTIHHNRPDITLHDKQNKIVYLIDIAIPNTHNLTSTHTNKLSKYTDLTIELKTQWRVHTVKTIPIIISSTGVIPKTLHTSLKTLNLHPLTFILLQKAVILNTCRIVRKFLSID

SEQ ID NO: 23861 - protein, 1351 aa, Amphipyra tragopoginis
MRLRNRILPQAGTGANRDGESRPGPSSPGCPSYSGEGTVPHQSAQSRTVAVQHGKLSSCSSPTSSLFSSIPSSSPSYLETIQDSSSPISSPSPSLQSTMDVVQEATSAEVTAPVQGGRRTRKTWTKDMNIFIMRHYFILSELESNTKIYLTPLHARFIAEFPEMDVGKQRVGDQRRAIIQRGFLTKQEIANIKEEVRLLLQNQHPSDINTPIHHTQSQRIRWSDNLNEAIMRSYYRLTKLETDLTTYRPLLHQDITSKCPEIAHLSAQRIADQRRSIVNNRLLSTNQLNRIREEVRNELGCIITHTPVDITQHTEENLTLSSTDHIQTPTDDLNSEPEQATNESPNFPTELHLQLEEMFMETFSKFKDTHPTIRPYLPKLKPSKKLASIISHLNSDILPKTLTSDTDFNTLQTTIYSAAYTSAKFNGARISEGNKTNNNPQSVPWWQRRLQGRIDDLRANIGRLTEYTRGVRSQALQKHINKIKQQYKIHTQHETQNTDIAHFLDTLKQKLNTLSSRLRRYKETTLRKTQNKQFCSNEKLFYRKLTQQHNTSPENNSTLPTPESLHAFWSNIWSNPIEHEQNQWTEEDRERLKDMPEMEFEQIHLDLLRTVILRTHNWKAAGSDNIHNFWYKKFTCTHTLLLKHINAFIHSPDTMPLYITQGITYMLPKDSSDLANPAKYRPITCLQNIYKIITSCLSESIYKHTHEHHVLAEEQKGCRKHSQGCKEQLTIDAVASKQAISQKRNIHTMYIDYKKAFDSVPHSWLIYILKHYKINSAITCFLEKTMLNWKTKLKICNCNENAETDFIPIKRGIFQGDALSPLWFCLALNPLSNMLNKNNIGFKIKHDTQQTSLTHLMYMDDIKLFGSTLDEIHTLADVTQIFSNDIRMEFGIDKCKIQSVNKGIVEPASYELANHDVIDVVDPVEGYKYLGYHQTQEIHHKDTKNILQQKFKNRLHKILHTHLNARNTIKAINTYAIPILTYSFGIIRWTQTDLKNLQRIINTTMTKHRKHHPRACIQRLTLPKKEGGRGLIDITNLHNKQIMLLRTFFHGHSQQSTLHKAISQADKFTPLSLANHTKQMKINTKQQKIDTWTQKSLHGRHRLNLADPNVDKIASNAWLKRGELFPETEGFMLAIQDQVIDTKNYRKYIIRDSSLSSDHCRHCHKQPETIQHITGACSSITQTDYKHRHDQVAAIIHQTLAYKHKLITEKTPYYKYTPQIILDSPDYKMYWDRTILTDKTIHHNRPDITLHDKQNKIVYLIDIAIPNTHNLTSTHTNKLSKYTDLTIELKTQWRVHTVKTIPIIISSTGVIPKTLHTSLKTLNLHPLTFILLQKAVILNTCRIVRKFLSID

SEQ ID NO: 23862 - protein, 1351 aa, Amphipyra tragopoginis
MRLRNRILPQAGTGANRDGESRPGPSSPGCPSYSGEGTVPHQSAQSRTVAVQHGKLSSCSSPTSSLFSSIPSSPPSYLETIQDSSSPISSPSPSLQSTMDVVQEATSAEVTAPVQGGRRTRKTWTKDMNIFIMRHYFILSELESNTKIYLTPLHARFIAEFPEMDVGKQRVGDQRRAIIQRGFLTKQEIANIKEEVRLLLHNQHPSDINTPIHHTQSQRIRWSDNLNEAIMRSYYRLTKLETDLTTYRPLLHQDITSKCPEIAHLSAQRIADQRRSIVNNRLLSTDQLNRIREEVRNELGSIMTHTPVDITQHTEENLTLSRSDQIQTLTNDLNSEPVQATNESPNFPTELHLQLEEMFMETFSKFKDTHPTTRPYLPKLKPSKKLASIISHLNSDILPKTLTSDTDFNTIQTTIYSAAYTSAKFNGARISEGNKMNNNPQSVPWWQRRLQGRIDDLRANIGRLTEYTRGVRSQALQKHINKIKQQYKIHTQHETQNTDIAHFLDTLKQKLNTLSSRLRRYKETTLRKTQNKQFCSNEKLFYRKLTQQHNTSPENNNTLPTPESLHAFWSNIWSNSIEHEQNQWIDEDRERLKDMPEMEFEQIHLDLLRTVILRTHNWKAAGSDNIHNFWYKKFTCTHTLLLKHINAFIHSPDTMPLYITQGITYMLPKDSSDLANPAKYRPITCLQNIYKIITSCLSESIYKHTHEHHVLAEEQKGCRKHSQGCKEQLTIDAVASKQAISQKRNIHTMYIDYKKAFDSVPHSWLIYILKHYKINSAITCFLEKTMLNWKTKLKICNSNENAETDFIPIKRGIFQGDALSPLWFCLALNPLSNMLNKNNIGFKIKHDTQQTSLTHLMYMDDIKLFGSTLDEIHTLADVTQIFSNDIRMEFGIDKCKIQSVNKGIVEPASYELANHDVIDAVDPVEGYKYLGYHQTQEIHHKDTKNILQQKFKNRLHKILHTHLNARNTIKAINTYAIPILTYSFGIIRWTQTDLKNLQRIINTTMTKHRKHHPRACIQRLTLPKKEGGRGLIDITNLHNKQIILLRTFFHGHSQQSTLHKAISQADKFTPLSLANHTKQMKINTKQQKIDTWTQKSLHGRHRLNLTDPNVDKIASNAWLKRGELFPETEGFMLAIQDQVIDTKNYRKYIIRDSSLSSDHCRHCHKQPETIQHITGACSSITQTDYKHRHDQVAAIIHQTLAYKHKLITEKTPYYKYTPQIILDSPDYKMYWDRTILTDKTIHHNRPDITLHDKQNKIVYLIDIAIPNTHNLTSTHTNKLSKYTDLTIELKTQWRVHTVKTIPIIISSTGVIPKTLHTSLKTLNLHPLTFILLQKAVILNTCRIVRKFLSID

SEQ ID NO: 23863 - protein, 1348 aa, Amphipyra tragopoginis
MRLRNRILPQAGTGANRDGESRPGPSSPGCPSYSGEGTVPHQSAQSRTVAVQHGKSSSCSSPTSSLFSSIPSSPPSYLETIQDSNSPISSPSPSLQSTMDVVQEATSAEVTAPVQGERRTRKTWTKDMNIFIMRQYFILSELESHIKTYLTPLHARFIAEFPEMDVGKQRVGDQRRAIIQRGFLTKQEIANIKEEVRLLLQNQHPSDINTPIHHTQSQRIRWSDNLNETIMRSYYRLTKLETDLTTYRPLLHQDITAKCPEIAHLSAQRIADQRRSIVNNRLLSTDQLNKIREEVRNELGSIITHTPVDITQHTEENQSTDQIQTLTNDLNSEPEQATNESLNFPTELHLQLEETFMETFSKFKDTHPTTRPYLPKLKPSKKLASIISHLNSDILPKTLTSDTDFNTLQTTIYSAAYTSAKFNGARISEGNKTNNNPQSVPWWQRRLQGRIDDLRANIGRLTEYTRGVRSQALQKHINKIKQQYKIHTQHETQNTDIAHFLDTLKQKLNTLSSRLRRYKETTLRKTQNKQFCSNEKLFYRKLTQQHNTSPENNSTLPTPESLHAFWSNIWSNPIEHEQNQWIDEDRERLKDMPEMEFEQIHLDLLRTVILRTHNWKAAGSDNIHNFWYKKFTCTHTLLLKHINAFIHSPDTMPLYITQGITYMLPKDSSDLANPAKYRPITCLQNIYKIITSCLSESIYKHTHEHHVLAEEQKGCRKHSQGCKEQLTIDAVASKQAISQKRNIHTMYIDYKKAFDSVPHSWLIHILKHYKINSAITCFLEKTMLNWKTKLKICNSNENAETDFIPIKRGIFQGDALSPLWFCLALNPLSNMLNKNNIGFKIKHDTQQTSLTHLMYMDDIKLFGSTLGEIHTLADVTQIFSNDIRMEFGIDKCKIQSVNKGIVEPASYELANHDVIDAVDPVEGYKYLGYHQTQEIHHKDTKNILQQKFKNRLHKILHTHLNARNTIKAINTYAIPILTYSFGIIRWTQTDLKNLQRILNTTMTKHRKHHPRACIQRLTLPKKEGGRGLIDITNLHNKQIILLRTFFHGHSQQSTLHKAISQTDKFTPLSLANHTKQMKINTKQQKIDTWTQKSLHGRHRLNLTDPNVDKIASNAWLKRGELFPETEGFMLAIQDQVIDTKNYRKYIIRDSSLSSDHCRHCHKQPETIQHITGACSSITQTDYKHRHDQVAAIIHQTLAYKHKLITEKTPYYKYTPQIILDSPDYKMYWDRTILTDKTIHHNRPDITLHDKQNKIVYLIDIAIPNTHNLTSTHTNKLSKYTDLTIELKTQWRVHTVKTIPIIISSTGVIPKTLHTSLKTLNLHPLTFILLQKAVILNTCRIVRKFLSID

SEQ ID NO: 23864 - protein, 1351 aa, Amphipyra tragopoginis
MRLRNRILPQAGTGANRDGESRPGPSSPGCPSYSGEGTVPHQSAQSRTVAVQHGKSSSCSSPTSSLFSSIPSSPPSYLETIQDSSSPNSSPSPSLQSTMDVVQEATSAEVTAPVQGGRRTRKTWTKDMNIFIMRHYFILSELESNTKIYLTPLHARFIAEFPEMDVGKQRVGDQRRAIIQRGFLTKQEIGNIKEEVRLLLQNQHPSDINTPMHHTQSQRIRWSDNLNETIMRSYYRLTKLETDLTTYRPLLHQDITSKCPEIAHLSAQRIADQRRSIVNNRLLSTDQLNRIREEVRNELGSTITHTPVDITQHIEENLTLSSTDQIQTLNNDFNSEPEQATNESPNFPTELHLQLEEMFMETFSRFKDTHPTTRPYLPKLKPSKKLASIISYLNSDILPKTLTSDTDFNTLQTTIYSAAYTSTKFNGARISEGNNTNNKPQSVPWWQRRLQGRIDDLRANIGRLTEYTRGVRSQALQKHIIKIKQQHKIHTQHETQNTDIEHFLDTLKQKLNTLSSRLRRYKETTLRKTQNKQFCSNEKLFYRKLTQQRNTSPENNSTLPTPESLHAFWSNIWSNPIEYEQNQWIEEDREKLKDIPEMEFEQIHLDLLRTVILRTHNWKAAGSDNIHNYWYKKFTCTHTLLLKHINAFIHSPDTMRLYITQGITYMLPKDLSDLANPAKYRPITCLQNIYKIITSCLSESIYKHTHEHHVLAEEQKGCRKHSQGCKEQLTIDAVASKQAISQKRNIHTMYIDYKKAFDSVPHSWLIYILKHYKINSAITCFLEKTMLNWNTKLKICNSNENAETDYIPIKRGIFQGDALSPLWFCLALNPLSNMLNKNNIGFKIKHDTQQTSLTHLMYMDDIKLFGSTLDEIHTLADVTQIFSNDIRMEFGIDKCKIQSVNKGIVEPASYELANHDVIDAVDPVEGYKYLGYHQTQEIHHKDTKNILQQKFKNRLHKILHTHLNARNTIKAINTYAIPILTYSFGIIRWTQTDLQNLQRIINTTMTKHRKHHPRACIQRLTLPKKEGGRGLIDITNLHNKQIILLRTFFHGHSQQSTLHKAISQADKFTPLSLANHTKQMKINTKQQKIDTWTQKSLHGRHRLNLTDPNVDKIASNAWLKRGELFPETEGFMLAIQDQVIDTKNYRKYIIRDSSLSSDHCRHCHKQPETIQHITGACSSITQTDYKHRHDQVAAIIHQTLAYKHKLIPEKTPYYKYTPQIILDSPDYKMYWDRTILTDKTIHHNRPDITLHDKQNKIVYLIDIAIPNTHNLTSTHTNKLSKYTDLTIELKTQWRVHTVKTIPIIISSTGVIPKTLHTSLKTLNLHPLTFILLQKAVILNTCRIVRKFLSIE

SEQ ID NO: 23865 - protein, 1351 aa, Amphipyra tragopoginis
MRLRNRILPQAGTGANRDGESRPGPSSPGCPSYSGEGTVPHQSAQSRTVAVQHGKSSSCSSPTSSLFSSIPSSPPSYLETIQDSNSPISSPSPSLQSTMDVVQEATSAEVTAPVQGGRRTRKTWTKDMNIFIMRHYFILSELESNTKIYLTPLHARFIAEFPEMDVGKQRVGDQRRAIIQRGFLTKQEIANIKEEVRLLLQNQHPSDINTPIQHTQSQRIRWSDNLNETIMRSYYRLTKLETDLTTYRPLLHQDITAKCPEIAHLSAQRIADQRRSIVNNRLLSTDQLNKIREEVRNELGSIITNTPVDITQHTVENLTLSSTDQIQTPTNDLNSEPEQATNESPNFPTELHPQLEEMFMETFSKFKDTHPTARPYLPKLKPSKKLASIISHLNSDILPKTLTSDTDFNTLQTTIYSAAYTSAKFNGARISEGNKTNNKPQSVPWWQRRLQGRIDDLRANIGRLTEYTRGVRSQALQKHINKIKLQYKIHTQHETQNTDIAHFLDTLKQKLNTLSSRLRRYKETTLRKTQNKQFCSNEKLFYRKLTQQPNTSPENSSTLPTPESLHAFWSHIWSNPIEHEQNQWIDEDRERLKDMPEMEFEQIHLDLLRTVILRTHNWKAAGSDNIHNFWYKKFTCTHTLLLKHINAFIHSPDTMPPYITQGITYMLPKDSSDLANPAKYRPITCLQNIYKIITSCLSECIYKHTHEHHVLAEEQKGCRKHSQGCKEQLTIDAVASKQAISQKRNIHTMYIDYKKAFDSVPHSWLIYILKHYKINSAITCFLEKTMLNWNTKLKICNSNENAETDFIPIKRGIFQGDALSPLWFCLALNPLSNMLNKNNIGFKIKHDTQQTSLTHLMYMDDIKLFGSTLDEIHTLADVTQIFSNDIRMEFGIDKCKIQSVNKGIVEPASYELANHDVIDAVDPVEGYKYLGYHQTQEIHHKDTKIILQQKFKNRLHKILHTHLNARNTIKAINTYAIPILTYSFGIIRWTQTDLKNLQRIINTTMTKHRKHHPRACIQRLTLPKKEGGRGLIDITNLHNKQIILLRTFFHGHSQQSTLHKAISQADKFTPLSLANHTKQMKINTKQQKIDTWTQKSLHGRHRLNLTDPNVDKIASNAWLKRGELFPETEGFMLAIQDQVIDTKNYRKYIIRDSSLSSDHCRHCHKQPETIQHITGACSSITQTDYKHRHDQVAAIIHQTLAYKHKLITEKTPYYKYTPQIILDSPDYKMYWDRTILTDKTIHHNRPDITLHDKQNKIVYLIDIAIPNTHNLTSTHTNKLSKYTDLTIELKTQWRVHTVKTIPIIISSTGVIPKTLHTSLKTLNLHPLTFILLQKAVILNTCRIVRKFLSID

SEQ ID NO: 23866 - protein, 994 aa, Amphipyra tragopoginis
MFMETFSKFKDTHPTTRPYLPKLKPSKKLASIISHLNSDILPKTLTSDTDFNTLQTTIYSAAYTSAKFNGARISEGNNTNNKPQSAPWWQRRLQGRIDDLRANIGRLTEYTRGVRSQALQKHINKIKQQYKIHTQHETQNTDIAHFLDTLKQKLNTLSSRLRRYKETTLRKTQNKQFCSNEKLFYRKLTQQHNTSPENNSTLPTPESLHAFWSNIWSNPIEHEQNQWIEEDREKLKDLPEMEFEQINLDLLRTVILRTHNWKAAGSDNIHNFWYKKFTCTHTLLLKHINAFIHSPDTMPLYITQGITYMLPKDLSDLANPAKYRPITCLQNIYKIITSCLSESIYKHTHEHHVLAEEQKGCRKHSQGCKEQLTIDAVASKQAISQKRNIHTMYIDYKKAFDSVPHSWLIYILKHYKINSAITCFFEKTMLNWNTKLKICNSNENAETDYIPIKRGIFQGDALSPLWFCLALNPLSNMLNKNNIGFKIKHDTQQTSLTHLMYMDDIKLFGSTLDEIHTLADATQIFSNDIRMEFGIDKCKIQSVNKGIVEPALYELANHDVIDAVDPVEGYKYLGYHQTQEIHHKDTKNILQQKFKNRLHKILHTHLNARNTIKAINTYAIPILTYSFGIIRWTQTDLQNLQRIINTTMTKHRKHHPRACIQRLTLPKKEGGRGLIDITNLHNKQIILLRTFFHGHSQQSTLHKAISQADKFTPLSLANHTKQMKINTKQQKIDTWTQKSLHGRHRLNLTDPNVDKIASNAWLKRGELFPETEGFMLAIQDQVIDTKNYRKYIIRDSSLSSDHCRHCHKQPETIQHITGACSSITQTDYKHRHDQVAAIIHQTLAYKHKLITEKTPYYKYSPQIILDSPDYKMYWDRTILTDKTIHHNRPDITLHDKQNKIVYLIDIAIPNTHNLTSTHTNKLSKYTDLAIELKTQWRVHTVKTIPIIISSTGVIPKTLHTSLKTLNLHPLTFILLQKAVILNTCRIVRKFLSID

SEQ ID NO: 23867 - protein, 1352 aa, Amphipyra tragopoginis
MRLRNRILPQAGTGANRNGESRPGPSSPGCPSYSGEGTVPHQSAQSRTVAVQHGKSSSCSSPTSSLFPSIPSSPPSYLETIQDSSSPISSPSPSLQSAMDVVQEATSAEVTAPVQGGRRTRKTWTKDMNIFIMRHYFILSELESNTKIYLTPLHAQFIAEFPEMDVGKQRVGDQRRAIIQRSFLTKQEIANIKDEVRLLLQNQHPADINTPINHTQSQRIRWSDNLNEAIMRSYYRLTKLETDLTTYRPLLHQDITSKCPEIAHLSAQRIADQRRSIVNNRLLSTDQLNRIREEVRNELGSIITHTPVDITQHTEENLTLSSTDQIQTPTNDLNSDPEQGTNESPNFPTELHLQLEEMFMETFSKFKDTHPTTRPYLPKLKPSKKLASIISHLNSDILPKTLTSDTDFNTLQTTIYSAAYTSAKFNGARISERSKSNNKPQSVPWWQRRLQGRIDDLRANIGRLTEYTRGVRSQALQKHINKIKQQYKIHTQHETQNTDIAHFLDTLKQKLNTLSSRLRRYKETTLRKTQNKQFCSNEKLFYRKLTQQHNNTSPENSSTLPTPESLHAFWSNIWSNPIEHEQNQWIDEDRERLKDMPEMEFEQIHLDLLRTVILRTHNWKAAGSDNIHNYWYKKFTCTHTLLLKHINAFIHSPDTMPLYITQGITYMLPKDSSDLANPAKYRPITCLQNIYKIITSCLSESIYKHTHEHHVLAEEQKGCRKHSQGCKEQLTIDAVASKQAISQKRNIHTMYIDYKKAFDSVPHSWLIYILKHYKINSAITCFLEKTMLNWNTKLKICNSNENAETDCIPIKRGIFQGDALSPLWFCLALNPLSNMLNKNNIGFKIKHDTQQTSLTHLMYMDDIKLFGSTLDEIHTLADVTQIFSNDIRMEFGIDKCKIQSVNKGIVEPASYELANYDVIDAVDPVEGYKYLGYHQTQEIHHKDTKNILQQKFKNRLHKILHTHLNARNTIKAINTYAIPILTYSFGIIRWTQTDLKNLQRIINTTMTKHRKHHPRACIQRLTLPKKEGGRGLIDITNLHNKQIILLRTFFHGHSQQSTLHKAISQADKFTPLSLANHTKQMKINTKQQKIDSWTQKSLHGRHRLNLTDPNVDKIASNAWLKRGELFPETEGFMLAIQDQVIDTKNYRKYIIRDSSLSSDHCRHCHKQPETIQHITGACSSITQTDYKHRHDQVAAIIHQTLAHKHKLITEKTPYYKYTPQIILDSPDYKMYWDRTILTDKTIHHNRPDITLHDKQNKIVYLIDIAIPNTHNLTSTHTNKLSKYTDLTIELKTQWRVHTVKTIPIIISSTGVIPKTLHTSLKTLNLHPLTFILLQKAVILNTCRIVRKFLSID

SEQ ID NO: 23868 - protein, 1351 aa, Amphipyra tragopoginis
MRLRNRILPQAGTGANRNGESRPGPSSPGCPSYSGEGTVPHQSAQSRTVAVQHGKSSSCSSPTSSLFPSTPSSPPSYLETIQDSSSPISSPSPSLQSTMDVVQEATSAEVTAPVQGGRRTRKTWTKDMNIFIMRHYFILSELESNTKIYLTPLHARFIAEFPEMDVGKQRVGDQRRAIIQRGFLTKQEIANIKDEVRLLLQNQHPSDINTPIHHTQSQRIRWSDNLNEAIMRSYYRRTKLETDLTTYRPLLHQDITSKCPEIAHLSAQRIADQRRSIVNNRLLSTDQLNRIREEVRNELGSIITHTPVDITQHTEENLTLSSTDQIQTLTNDLNSEPEQATNESPNFPTELHLQLEEMFMETFSKFKDTHPTTRPYLPKLKPSKKLASIISHLNSDILPKTLTSDTDFNTLQTTIYSAAYTSAKFNGARISEGNKSNNKPQSVPWWQRRLQGRIDDLRANIGRLTEYTRGVRSQALEKHINKVKQQYKIHTQHETQNTDIAHFLDTLKQKLNTLSSRLRRYKETTLRKTQNKQFCSNEKLFYRKLTQQHNTLPENSSTLPTPESLHAFWSNIWSNPIEHEQNQWIDEDRERLKDMPEMEFEQIHLDLLRTVILRTHNWKAAGSDNIHNYWYKKFTCTHTLLLKHINAFIHSPDTMPLYITQGITYMLPKDSSDLANPAKYRPITCLQNIYKIITSCISESIYKHTHEHHVLAEEQKGCRKHSQGCKEQLTIDAVASKQAISQKRNIHTMYIDYKKAFDSVPHSWLIYILKHYKINSAITCFLEKTMLNWNTKLKICNSNENAETDFIPIKRGIFQGDALSPLWFCLALNPLSNMLNKNNIGFKIKHDTQQTSLTHLMYMDDIKLFGSTLDEIHTLADVTQIFSNDIRMEFGIDKCKIQSVNKGIVEPASYELANHDVIDAVDPVEGYKYLGYHQTQEIHHKDTKNILQQKFKNRLHKILHTHLNARNTIKAINTYAIPILTYSFGIIRWTQTDLKNLQRIINTTMTKHRKHHPRACIQRLTLPKKEGGRGLIDITNLHNKQILLLRTFFHGHSQQSTLHKAISQADKFTPLSLANHTKQMKINTKQQKIDTWTQKSLHGRHRLNLTDPNVDKIASNAWLKRGELFPETEGFMLAIQDQVIDTKNYRKYIIRDSSLSSDHCRHCHKQPETIQHITGACSSITQTDYKHRHDQVAAIIHQTLAHKHKLITEKTPYYKYTPQIILDSPDYKMYWDRTILTDKTIHHNRPDITLHDKQNKIVYLIDIAIPNTHNLTSTHTNKLSKYTDLTIELKTQWRVHTVKTIPIIISSTGVIPKTLHTSLKTLNLHPLTFILLQKAVILNTCRIVRKFLSID

SEQ ID NO: 23869 - protein, 994 aa, Amphipyra tragopoginis
MFMETFSKFKDTHPTARPYLPKLKPSKKLASIISHLNSDILPKTLTSDTDFNTLQTTIYSAAYTSAKFNGARISEGNKTNNKPQSVPWWQRRLQGRIDDLRANIGRLTEYTRGVRSQALQKHINKIKLQYKTHTQHETQNTDIAHFLDTLKQKLNTLSSRLRRYKETTLRKTQNKQFCSNEKLFYRKLTQQPNTSPENSSTLPTPESLHAFWSHIWSNPIEHEQNQWIDEDRERLKDMPEMEFEQIHLDLLRTVILRTHNWKAAGSDNIHNFWYKKFTCTHTLLLKHINAFIHSPDTMPPYITQGITYMLPKDSSDLANPAKYRPITCLQNIYKIITSCLSECIYKHTHEHHVLAEEQKGCRKHSQGCKEQLTIDAVASKQAISQKRNIHTMYIDYKKAFDSVPHSWLIYILKHYKINSAITCFLEKTMLNWNTKLKICNSNENAETDFIPIKRGIFQGDALSPLWFCLALNPLSNMLNKNNIGFKIKHDTQQTNLTHLMYMDDIKLFGSTLDEIHTLADVTQIFSNDIRMEFGIDKCKIQSVNKGIVEPASYELANHDVIDAVDPVEGYKYLGYHQTQEIHHKDTKIILQQKFKNRLHKILHTHLNARNTIKAINTYAIPILTYSFGIIRWTQTDLKNLQRIINTTMTKHRKHHPRACIQRLTLPKKEGGRGLIDITNLHNKQIILLRTFFHGHSQQSTLHKAISQADKFTPLSLANHTKQMKINTKQQKIDTWTQKSLHGRHRLNLTDPNVDKIASNAWLKRGELFPETEGFMLAIQDQVIDTKNYRKYIIRDSSLSSDHCRHCHKQPETIQHITGACSSITQTDYKHRHDQVAAIIHQTLAYKHKLITEKTPYYKYTPQIILDSPDYKMYWDRTILTDKTIHHNRPDITLHDKQNKIVYLIDIAIPNTHNLTSTHTNKLSKYTDLTIELKTQWRVHTVKTIPIIISSTGVIPKTLHTSLKTLNLHPLTFILLQKAVILNTCRIVRKFLSID

SEQ ID NO: 23870 - protein, 1356 aa, Celastrina argiolus
MMRLRNRIIPQAGTGALRDGESRPGPSGLGCPSYSGEGNESHQAAQSGTAAECNNHLSPNSSPISSLFPSLESSPQSYLDLRESRSSISSYFSSSSQPEDVVQAINTAKVPVPAKGQRRTRKMWTKEENTFIMRHYFILTNLEKNTKSYLSQLHSIFTSKYPHMEVSKQRIGDQRRAIIHCKLLSEQEINHIREEARDTIQTRHPSPNKITSTPHNLVRKMRWTDDLNENIMTCYYRITKLETDFTTYRPLLHQEVTSRCPEIAHLSAQRIADQRRSIVNNRLLSIDHLEILKDQVRCELTSSLPENTEPATNDMTEMTVTENQQLLPQINVEHNNDIQITQSTSNHYLTPDLNKQLEEMLSETINIFKNTDPTTRPRLPKLKYSKKLLAIINNINTKILPKILQEDTDFNTLQTTIYSVAYTTVKFSGARIFMHTNQTNKKTKEAPWWQKRLEVKISELRASIGRLHEYKRGTRSPALERHINKIKEQYKIHSTHETENIDISHFLDTLKQKLNLLANRLKRYQETTNRKKQNKEFFNNEKLFYRNLSQQTSSNTRENSIIAPSTQSLLEFWSNIWSKPIEHKQNNWIEEDKKRLENVPEMMFEQIDLDLIRTVINRTHNWKATGSDNIHNFWYKKLSCTHMLLHKHINSFIITPYAMPPYITQGITYMLPKDLNDTENPSKYRPITCLQNLYKIITACLSESIYKHTQEHNILSEEQKGCRKKSQGCKEQLTIDAVATKQAMKQKRNIYTMFIDYRKAFDSVPHSWLVYIFKHYKIHPVIIGFLEKIMPQWSTKLKICNNTNDSIETDYFPIKRGIFQGDALSPLWFCLALNPLSSMLNSNKTGLKINHNAQHTRMTHLMYMDDIKLFASTLHELHTLADITQLFSNDICMQFGIDKCKIEAVSKGKLKHTTYELANHEIIDALDPAEGYKYLGYYQSQGINRKNVKKTLQEKFKTRLHRILHTHLNSKNTIKAINTFAIPILTYSFGIISWSQTDLKTLQRVISTAMTKHRKHHPRACIQRLTLPKIEGGRGLIDIFNLHNKQITLLRTYFHNHSHSSPLHNAVCQADSFTPLLLANHSKEIKIITNQDKIDAWAQKSLHGRHRTDLINTGVDKTASNAWLRRGELFPETEGFMMAIQDQVIDTKNYRKHIIRTSGVSSDHCRHCHKHPETIQHITGACSSITQTDYKHRHDQVAAIIHQILALKHNLILDKTPYYKYTPQIILDSPDYKLYWDRTILTDKTVHYNRPDIVLHDKRNRTVYFIDIAIPNSHNLTTTHTNKVTKYTDLTIEIKSQWKVNTVKTIPIIISTTGIIPKTLHTSLKTLNIHPLTYITLQKTVILNTCRIVRKFLTIN

SEQ ID NO: 23871 - protein, 1234 aa, Celastrina argiolus
MWTKEENTFIMRHYFILTNLEKNTKSYLSQLHSIFTSKYPHMEVSKQRIGDQRRAIIHCKLLSEQEINHIREEARDTIQTRHPSPNKITSTPHNLVRKMRWTDDLNENIMTCYYRITKLETDFTTYRPLLHQEVTSRCPEIAHLSAQRIADQRRSIVNNRLLSIDHLERLKDQVRCELTSSLPENTEPATNDMTEMTVTENQQLLPQINVEHNNDIQITQSTSNHYLTPDLNKQLEEMLSETINIFKNTDPTTRPRLPKLKYSKKLLAIINNINTKILPKILQEDTDFNTLQTTIYSVAYTTVKFSGARIFMHTNQTNKKTKEAPWWQKRLEVKISELRASIGRLHEYKRGTRSPALERHINKIKEQYKIHSTHETENIDISHFLDTLKQKLNLLANRLKRYQETTNRKKQNKEFFNNEKLFYRNLSQQTSSNTRENSIIAPSTQSLLEFWSNIWSKPIEHKQNNWIEEDKKRLENVPEMMFEQIDLDLIRTVINRTHNWKATGSDNIHNFWYKKLSCTHMLLHKHINSFIITPYAMPPYITQGITYMLPKDLNDTENPSKYRPITCLQNLYKIITACLSESIYKHTQEHNILSEEQKGCRKKSQGCKEQLTIDAVATKQAMKQKRNIYTMFIDYRKAFDSVPHSWLVYIFKHYKIHPVIIGFLEKIMPQWSTKLKICNNTNDSIETDYIPIKRGIFQGDALSPLWFCLALNPLSSMLNSNKTGLKINHNAQHTRMTHLMYMDDIKLFASTLHELHTLADITQLFSNDICMQFGIDKCKIEAVSKGKLKHTTYELANHEIIDALDPAEGYKYLGYYQSQGINHKNVKKTLQEKFKTRLHRILHTHLNSKNTIKAINTFAIPILTYSFGIISWSQTDLKTLQRVISTAMTKHRKHHPRACIQRLTLPKIEGGRGLIDIFNLHNKQITLLRTYFHNHSHSSPLHNAVCQADSFTPLLLANHSKEIKIITNQDKIDAWAQKSLHGRHRTDLINTGVDKTASNAWLRRGELFPETEGFMMAIQDQVIDTKNYRKHIIRTSGVSSDHCRHCHKHPETIQHITGACSSITQTDYKHRHDQVAAIIHQILALKHNLILDKTPYYKYTPQIILDSPDYKLYWDRTILTDKTVHYNRPDIVLHDKRNRTVYFIDIAIPNSHNLTTTHTNKVTKYTDLTIEIKSQWKVNTVKTIPIIISTTGIIPKTLHTSLKTLNIHPLTYITLQKTVILNTCRIVRKFLTIN

SEQ ID NO: 23872 - protein, 1193 aa, Celastrina argiolus
MEVSKQRIGDQRRAIIHCKLLSEQEINHIREEARDTIQTRHPSPNKITSTPHNLVRKMRWTDDLNENIMTCYYRITKLETDFTTYRPLLHQEVTSRCPEIAHLSAQRIADQRRSIVNNRLLSIDHLERLKDQVRCELTSSLPENTEPATNDMTEMTVTENQQQLPQINEEHNNDIQRTQSTSNHYLTPDLNKQLEEMLSETINIFKNTDPTTRPRLPKLKYSKKLLAIINNINTKILPKILQEDTDFNTLQTTIYSVAYTTVKFSGARIFMHTNQTNKKTKEAPWWQKRLEVKISELRASIGRLHEYKRGTRSPALERHINKIKEQYKIHSTHETENIDISHFLDTLKQKLNLLANRLKRYQETTNRKKQNKEFFNNEKLFYRNLSQQTSSNTRENSIIAPSTQSLLEFWSNIWSKPIEHKQNNWIEEDKKRLENVPEMMFEQIDLDLIRTVINRTHNWKATGSDNIHNFWYKKLSCTHMLLHKHINSFIITPYAMPPYITQGITYMLPKDLNDTENPSKYRPITCLQNLYKIITACLSESIYKHTQEHNILSEEQKGCRKKSQGCKEQLTIDAVATKQAMKQKRNIYTMFIDYRKAFDSVPHSWLVYIFKHYKIHPVIIGFLEKIMPQWSTKLKICNNTNDSIETDYIPIKRGIFQGDALSPLWFCLALNPLSSMLNSNKTGLKINHNAQHTRMTHLMYMDDIKLFASTLHELHTLADITQLFSNDICMQFGIDKCKIEAVSKGKLKHTTYELANHEIIDALDPAEGYKYLGYYQSQGINHKNVKKTLQEKFKTRLHRILHTHLNSKNTIKAINTFAIPILTYSFGIISWSQTDLKTLQRVISTAMTKHRKHHPRACIQRLTLPKIEGGRGLIDIFNLHNKQITLLRTYFHNHSHSSPLHNAVCQADSFTPLLLANHSKEIKIITNQDKIDAWAQKSLHGRHRTDLINTGVDKTASNAWLRRGELFPETEGFMMAIQDQVIDTKNYRKHIIRTSGVSSDHCRHCHKHPETIQHITGACSSITQTDYKHRHDQVAAIIHQILALKHNLISDKTPYYKYTPQIILDSPDYKLYWDRTILTDKTVHYNRPDIVLHDKRNRTVYFIDIAIPNSHNLTTTHTNKVTKYTDLTIEIKSQWKVNTVKTIPIIISTTGIIPKTLHTSLKTLNIHPLTYITLQKTVILNTCRIVRKFLTIN

SEQ ID NO: 23873 - protein, 1245 aa, Curetis bulis
MRKKWTKSMNTFIMRTYFILTSTSNQPYLSQLHTKFIEQFPEMHTVSKQRVGDQRRAIINKKMLTTQEINIIKEEVETLLESQPTLHTDAIPVTQSNRIRWTDEINEAIIRSYFRITNLENNITAYRPLLHREITSKFPNISHVSIQRIADQRRVIINNKLISSEKLQQIKEEVANELSENNTSTTNNTIIPSQFTEINAPLPEIDHESAENNTQLQNTPIETEGDIPQAANEQACELPPEIEDQITQLFMESFNTFCNTDPTSRPYLCKQKSSRKLAAIVNYLNLKVLPNHLSSDTNFQTLQTIIYSAAFTATKINGARIFDANISIYHKKKEPAWQKRLQNRIDILRIKIGRLTEYAKGNRSPTLIKHVEAIQAQYKIHSHHEDPNTDVPHYLDTLKQKLNTLSSRLRRYKQTTLRKTQNRHFNTNEKLFYRSLAQNQNDTPSYANTDYPTPENLQRYWSNIWSTPVEHNQGNALAKDKERLHSLPEMHYEEISIELLKSVIAQTHNWKATGSDNIHNYWLKKFTSTHTLLATHINNFINAPETLPSYITQGTTYMLPKDSLDTKNPAKYRPITCLQNIYKIITSCISKIIFKHTHDYNILSEEQKGCRKHSQGCKEQLTIDAVASKSALKYKRNIYTMYVDYKKAFDSVPHSWLIAILEHYKVHPIITRFLSETMLNWTTTLKINCNGTFINTDLINIKRGIFQGDALSPLWFCLALNPLSTLLNNSNTGYKIRNNESEATLTHLMYMDDIKLFATSLDDLYILADITQTFSSEIKMEFGIDKCKIQSINRGKLEQNTYQLSNLEQIDPVDPVEGYKYLGYQQTQQIHHKQTKSTLTQKFKTRLHKILNSHLNARNTIKAINTYAIPILTYSFGIIYWSKTELKNLQRIINTHMTKYRKHHPRACTQRLTLPRHEGGRGLIDIQNLHSKQIHTLKLFFHDRATQSPLHKAVAESDNKFTPLNLRDHTNTFDPITKEHKIMEWTQKSLHGRHRLDLTNLNVDKKASNAWLKRGELFPETEGFMIAIQDQVIDTRNYRKYIIKDKNLQTDICRHCQSNPETIQHITGACKTIAQTDYKHRHDQVASIIHQYLAHKYKLITEKVAYYKYVPQIVLENCNYKMYWDRTILTDKTIHYNRPDITLHDKNNKTVYLIDIAIPNTHNLTTTHSEKIAKYTDLAIELKTQWRVTTVRTVPIILSTTGIIPKLLHNSLKTLSIHPLTYMLLQKAVILNTCRIVRKFLSLDK

SEQ ID NO: 23874 - protein, 1342 aa, Curetis bulis
MRTVGDGGLSRRVPLEKLTTAETSSVSLDCPSPSSLFSSIPSSPPSYFENIQSPESSTSSTIMSSYNATEDVVQEVIEAIDTAPTTVGQRTRKKWTKSMNIFIMRTYFILTSTSNQSYLTQLHAKFIQQFPEMQAVSKQRVGDQRRAIINKNMLTAQELNDIKLEVEATLQSGSTLLTDTITTTQTQRMRWTDEINEAIISSYYKITNLENNLTAYRILLHREITSKFPSLSHVSIQRIADQRRVIINNKLLSPERLKDIRDRVAEELTEQPFSQIPPNNRNCSMSEAELENLPIQDSPESLPNDRRLSNSVIESENNTQHNIEQNNTSVYGYKLPCEIENEITQIFSDTVNTFVDTEPTTRPNLFKQKPSKNLASIVNYINLNVLPKYLSTNTDFKTLQTLIYCGAFTATKINGGRIVNDNTNKNNTNKIPAWQKRLKNRINQLRVKIGRLTEFINGNRSISLVRHVENIQRQYRIHSRHENPNTDPSHHLDTLKQKLNTLASRLRRYKQTTLRKTQNRQFENNEKLFYRKLNQNHNTAAHSNDTEYPTPENLQTFWSNIWSNPVEHVPSNVLEIEEDRVSGVPEMDFEDINVDLLKTVIAKTHNWKATGSDNIHNYWIKKFTSIHTLLAVHINKFIKAPETLPCYITQGTTYMLPKDTSDTKDPAKYRPITCLQNIYKIITSCISEIISRHINQHNILAEEQKGCRKYSQGCKEQLTIDAVTSKSALKRKGDIYSMYIDYKKAFDSVPHTWLITVLELYKIHPIIVKFLKNSMQNWKTKLMINCEGSFIHTNLINIKRGIFQGDALSPLWFCLALNPLSTLLNNSNIGYIIKNNEMQETLTHLMYMDDIKLFATTLEDIHQLANITHTFSENIKMEFGIDKCKIQSINRGKVDQNTHQISTLEQIDPVDPIEGYKYLGYQQSRQIHHKQTKSTLTQKFRTRLHKILNSHLNARNTIKAINTYAIPILTYSFGIINWSQTELKNLQRIINTLMTKYRKHHPRACIQRLTLPRQEGGRGLIDIQNLHNKQIYSLQMFFHNRSEQSPIHKAIVLADCKLTPLNLKEKTTSLKQNTIEQKVKDWTQKSLHGRHRLDLANLNVDMTASNAWLKRGELFPETEGFIIAIQDQVIDTRNYRKHIIRDHNLQSDICRHCQSNPETIQHITGACKTIAQTDYKHRHDQVASIIHQYLAYKCKLITDKIAYYKYKPQIILDNHNYKIYWDRTILTDKTIHFNRPDITFHDKINKTVYLIDIAIPNTHNLMTTHSEKIAKYTDLAIELKTQWRVTTVRTVPIILSTTGIIPKSLHVSLKTLSIHPLTYILLQKAVILNTCRIVRKFLSLDK

SEQ ID NO: 23875 - protein, 1366 aa, Curetis bulis
MSVRNNRYNLRPLPGGRRGASGADAGCLSMRTVGDGGLSRRVPLEKLTTAETSSSSSNCSSPSSLFPSIPSSPPSYVEHIQSPVSSMSSITSSHHPAEDVVQEATYAVDTAPATDGQRTRRKWTKPMNTFIMRTYFILTTTSSQPYLPQLHRKFIEQFPEMHTVSKQRVGDQRRAIVNKQMLTMQEIDKIKEDVEILLQSQPTLHTDTIATTQNKRMKWTNEINEAIIRTYYIITNLETNKTAYRTLLHREIISKFPSISHVSIQRIADQRRAIIDNKLITLQKLQEIKEEVASELSEHNTNVVPRQSNDVDSPLTESRTPGLQVVCRDLANNIQSLNTPNETEDNIQQATNDHNFKLPTEIEDQIIQIFTDSLNTFLQSDPTTRPYLYKQRSSKKLAAIVNYLNLNVLPKHISSETDFKTLHAIIYSAAFTATKINGGYTHDQNNNKFYRNREPAWQKRLQNRINQLRIKIGRLTEYTNGNRSPILIRHVESIQRQYRVHSHHENDNTDLTHYLDTLKQKLNALSSRLRRYKQTTLRKTQNRQFNANEKIFYRSLTHNQNNTPATTNTDYPTPEDLQEYWSNIWSNPVKHNIQSSALEKDKERLQEVPQMCFDNISIDLLKSVLAKTHNWKATGSDNIHNYWLKKFTSIHTLLATHINNFINAPDTLPQYITQGTTYMLPKDSLDTKNPAKYRPITCLQNIYKIITSCISTIISKHTHEHSILAEEQKGCRKYSQGCKEQLTIDAVASKSALKHKGNIHTMYIDYKKAFDSVPHSWLISILEHYKIHPVITKFLRDTMLNWTTTLKIKCNGSFINTDLITIKRGIFQGDALSPLWFCLALNPLSTLLNESNTGYKIKSNDTEATLTHLMYMDDIKLFATSLEDLHILADITQTFSSDIKMEFGIDKCKTQSIKNGKLEQNIYLTSDLEQIDPVDPVEGYKYLGYQQSQQIHHNQTKSTLTQKFKTRLHKILNSHLNARNTIKAINTFAIPTLTYSFGIIFWSQTELKNLQRIINTHMTKYRKHHPRACIQRLTLPRKEGGRGLIDIQNLHNKQIHTLQVFFHDRAIQSPLHTAVTQSDNKFTPLNLRKHTNSYNPTTTEQKIINWTQKSLHGRHRLDLTNVNVDKIASNAWLKRGELFPETEGFMVAIQDQVIDTRNYRKYIIKDRKLQSDICRHCQSNPETIQHITGACKTIAQTDYKHRHDQVASVIHQYLAHKYKLITEKVAYYKYVPQTVLDNSNYKIYWDRTILTDKTIHYNRPDITLHDKINKTVYLIDIAIPNTHNLTTTHSEKIAKYTDLAIELKTQWRVTTVRTVPIIVSTTGIIPKSLHNSLRTLSIHPLTYILLQKAVILNTCRIVRKFLSLDK

SEQ ID NO: 23876 - protein, 1367 aa, Cyclargus thomasi
MMRLRNRVIPQAGTGAICDGESRPGPSGSGCPSYSGEGNESHQAAQCQAAAVDNYRLSLSSSSTSSVFSSLQSSPKSYLDLRESRSSTSSSLSTSSQAGVVVQEAVTTAKFTAPTQGKRRTRKIWTKEINSFIMRQYFIITKLETNTRTYLSQLHSEFITKYPEMEASKQRIGDQRRAIINCKLLSDKEILKIKKEVEKTLQIRQSSCNNISKPPNSSCKMRWTDELNETIMTCYYRITRLETDLTTYRPLLHQEVTSRCPELAHLSVQRLADQRRSIVHNRLLSLDHLNKIKEQVRLELDQNNLTDNFPEIEGQLVETYDINEETIADNNNHQQSLQENNEIHNSSTTLNETASRQNYSLTPELRKQLEEMLTETILKFKETEATARPRLPKLKYSKKIWAIIKDLDTFILPKIISEELDFITIQTIIYSAAYTTAKFSGARIFTESNTINKEPKEAPSWQKRLEIRINKLRTNIGRLTAYKNGTRSLTLNMHVNNIKDQYKIHSTHESENRDIEHFLDTLKQKLNALANRLKRYKETTVRKRQNKEFINNEKIFYRNLLSNINSDKSENNSLPPSTQSLQEFWSNIWSKPIEHKQGYWIENDKKTLLNIQDMEFEHIDFGLFKTVISRTHNWKATGTDNIHNFWYKKLTCTHRLLHRHINSFITLPNTVPSYILQGITYMIPKDLNDTQNPAKYRPITCLQTIYKIITSCICETIYKHTQKYNILSEEQKGCRKNSQGCKEQLTIDAVATNQALKQKRNIYTMFIDYKKAYDSVPHSWLLYILKHYKIHPLIIGFLENIMSQWSTKLKLSNPKNPIETENIPIKRGIFQGDSLSPLWFCLALNPLSSMLNSNYVGFKIKYDTVYTRITHLMYMDDIKLFANTMEELNILADIAQLFSNDICMQFGIDKCKIQAINKGQLENATYKLDNHEVINSIDPLEGYKYLGYKQSKGIHHKNTKKLLKDKFKTRVHRILNTYLNSKNTIKAINTFAIPILTYSFGIISWSQTDLRTLQRVINTAMTKHRKHHPRACVQRLTLPKLEGGRGLIDITNLHNKQITLLRKYFHDHSDSSPLHNAICRADTFTPISLANHSKNLKISSNQEKIDAWARKSLHGRHLADLTSLNIDKKASNAWLKQGELFPETEGFMMAIQDQVIDTKNYRKHIIHNVDGGSDHCRHCHKQPETIQHITGACSSITQTDYKHRHDQVAAIIHQTLAHKYNLITDKIPYYKYTPQIILDSPNFKLYWDRTILTDKTVHHNRPDITFHDKQSRTVYLIDIAIPNSHNLTSTHTNKMTKYIDLTIEIKSQWKVTTVKTIPIIISSTGIIPKTLHTSLKTLDIHPLTYITLQKAVIINTCRIVRKFLSTN

SEQ ID NO: 23877 - protein, 1364 aa, Cyaniris semiargus
MRLRNRVIPQAGTGAIRDGESRPGPSGSGCPSYSGEGNESQQAFQSRADPGSKYHQSPSSSTSSLFPSLQSSPQSYLGLRESRSSSSSSYLSYSSRTEDVVQEAMITAKITAPTPGKRRSRKLWTKDMNIFIMRHYFILTDLEKNTKTYLTQLHSLFTSKYPDMEASKQRVGDQRRAIINCKLLSNKEILLIKEEVKNTLQSTHTSTDNNIHTPNTITRKMRWTDELNEAIMTCYYRITKLETDFTTYRPLLHQEVISRCPEIAHLSVQRISDQRRSIVNNRLLPTDLLERLKEKVRREIQNNRTEHLLENIDHLEGPSDITNTIEIIENLEHLPSTCTAEPNCNTVQVANYTPNITLTPELTKQLDDMLNETIDTFRHTDPTTRPRLPKLKYSRKLLTIVNDLNSNVLPKKLTEEMHFTELQTIIYCAAYTTVKFSGARIYLSTDEIKKKTKEAPGWQKRLEIRISKLRANIGRLTEYRRGTRSPDLENHITKIKEQFKIHSKHETENTDILHFLDTLKQKLNTLASRLKRYKETTNRKKQNKEFFNNEKLFYRNLLKQNNNDTTENSSVPSAQSLQEFWSNIWSKPIEHNQNSWIQEDKERLENLPLMDFEHIELDLLKTVINKTHNWKATGSDNIHNFWYKKLTCTHKLLHNHINAFIRSPDTMPPYITQGTTYMLPKDFNDTGNPTKYRPITCLQNIYKIITACLSELIYKHIQQNNILSEEQKGCRKKSQGCKEQLTIDAVATKQALKQKRNIYTMFIDYQKAFDSVPHSWLVYILRHYKINPVIIGFLERIMRQWSTKLKLGNNNNPIETEHIPIRRGIFQGDALSPLWFCLALNPLSSILNSNSIGFKIKHNRQQTRLTHLMYMDDIKLFASSLNEIHRLADITHLFSNDICMQFGIDKCKIQAVTKGKLDPSSYHVLPNQEVINAVDPIEGYKYLGYYQGQGINHKNTKKLLKEKFKTRIHRILHTHLNSRNTIKAINTFAIPILTYSFGVISWSQTDLKILQRAINTAMTKHRKHHPRACVQRLTLPKIEGGRGLIDISNLHNKQLSLLRTYFHNHSSLSPLHNAVCQADTYTPLSLANHSKHIKIITNQEKVDAWMHKSLHGRHRTDLADTNVDKTASNAWLRRGELFPETEGFMMAIQDQVIDTKNYRKYIIRSSDTNSDHCRHCHKHPETIQHITGACSSITQTDYKHRHDQVAAIIHQTLALKYNLITDSTPYYKYTPQTILESSEYKLYWDRTILTDKTVHHNRPDITLHDKINRTVYLIDIAIPNTHNLTTTHTNKVTKYTDLTIELKSQWKINTVKTVPIIISSTGVIPKTLHNSLKILNMHPLSYITMQKAVILNTCRIVRKFLSIN

SEQ ID NO: 23878 - protein, 1364 aa, Cyaniris semiargus
MRLRNRVIPQAGTGAIRDGESRPGPSGSGCPSYSGEGNESQQAFQSRADPGSKYHQSPSSSTSSLFPSLQSSPQSYLGLRESRSSSSSSYLSYSSRTEDVVQEAMITAKITAPTPGKRRSRKLWTKDMNIFIMRHYFILTDLEKNTKTYLTQLHSLFTSKYPDMEASKQRVGDQRRAIINCKLLSNKEILLIKEEVKNTLQSTHTSTDNNIHTPNTITRKMRWTDELNEAIMTCYYRITKLETDFTTYRPLLHQEVISRCPEIAHLSVQRISDQRRSIVNNRLLPTDLLERLKEKVRREIQNNRTEHLLENIDHLEGPSDITNTIKIIENLEHLPSTCTAEPNCNTVQVANYTPNITLTPELTKQLEDMLNETIDTFRHTDPTTRPRLPKLKYSRKLLTIVNDLNSNVLPKKLTEEMHFTELQTIIYCAAYTTVKFSGARIYLSTDEIKKKTKEAPGWQKRLEIRISKLRANIGRLTEYRRGTRSPDLENHITKIKEQFKIHSKHETENTDILHFLDTLKQKLNTLASRLKRYKETTNRKKQNKEFFNNEKLFYRNLLKQNNNDTTENSSVPSAQSLQEFWSNIWSKPIEHNQNSWIQEDKERLENLPLMDFEHIELDLLKTVINKTHNWKATGSDNIHNFWYKKLTCTHKLLHNHINAFIRSPDTMPPYITQGTTYMLPKDFNDTGNPTKYRPITCLQNIYKIITACLSELIYKHIQQNNILSEEQKGCRKKSQGCKEQLTIDAVATKQALKQKRNIYTMFIDYQKAFDSVPHSWLVYILRHYKINPVIIGFLERIMRQWSTKLKLGNNNNPIETEHIPIRRGIFQGDALSPLWFCLALNPLSSILNSNSIGFKIKHNRQQTRLTHLMYMDDIKLFASSLNEIHRLADITHLFSNDICMQFGIDKCKIQAVTKGKLDPSSYHVLPNQEVINAVDPIEGYKYLGYYQGQGINHKNTKKLLKEKFKTRIHRILHTHLNSRNTIKAINTFAIPILTYSFGVISWSQTDLKILQRAINTAMTKHRKHHPRACVQRLTLPKIEGGRGLIDISNLHNKQLSLLRTYFHNHSSLSPLHNAVCQADTYTPLSLANHSKHIKIITNQEKVDAWMHKSLHGRHRTDLADTNVDKTASNAWLRRGELFPETEGFMMAIQDQVIDTKNYRKYIIRSSDTNSDHCRHCHKHPETIQHITGACSSITQTDYKHRHDQVAAIIHQTLAPKYNLITDSTPYYKYTPQTILESSEYKLYWDRTILTDKTVHHNRPDITLHDKINRTVYLIDIAIPNTHNLTTTHTNKVTKYTDLTIELKSQWKVNTVKTVPIIISSTGVIPKTLHNNLKILNMHPLSYITMQKAVILNTCRIVRKFLSIN

SEQ ID NO: 23879 - protein, 1052 aa, Aricia agestis
MDLEETNDITNTIEIIENLEHLPSTCTEELNCNTVQVANYSPNITLTPELTKQLEDILNETIDTFRHTDPTTRPHLPKLKYSKKLLAIINDLNSNVLPKKLSEEIDFTELQTIIYCAAYTTVKFSGARIYHRTDKINKKTKEAPGWQKRLEIRISKLRASIGRLTEYRRGTRSPALENHITKIKEQFKIHSKHETENTDILHFLDTLKQKLNTLASRLKRYKETTNRKKQNKEFFNNEKLFYRNLLKQHNNDTTENSSVPSAQSLQEFWSKIWSKPIEHNINSWIQEDKERLENLPVMDFEQIELGLLKTVINKTHNWKATGSDNIHNFWYKKLTCTHKLLHNHINAFIRSPDTIPPYITQGTTYMLLKDFNDTGNPAKYRPITCLQNIYKIITACLSELIYKHTQLNNILSEEQKGCRKKSQGCKEQLTIDAVATKQALKQKRNIYTMFIDYQKAFDSVPHSWLVYILRHYKINPVIISFLERIMRQWSTKLKLGNNNNPIETDHIPIRRGIFQGDALSPLWFCLALNPLSSILNSNNIGFKIKHNRQQTRLTHLMYMDDIKIFASSLNEIHRLADITHLFSNDICMRFGIDKCKIQAVTKGKFDPSSYHILPNEEVINAVDPIEGYKYLGYYQGQGINHKNTKKLLKEKFKTRLHRILNTHLNSRNTIKAINTFAIPILTYSFGVISWSQTDLKTLQRAINTAMTKHRKHHPRACVQRLTLPKIEGGRGLIDISNLHNKQLSLLRTYFHNHSSLSPLHNAVCQADTYTPLSLANHSKHIKIITNQEKIDAWMHKSLHGRHRTDLADTNVDKTASNAWLRRGELFPETEGFMMAIQDQVIDTKNYRKYIIRASNTNSDHCRHCHKHPETIQHITGACSSITQTDYKHRHDQVAAIIHQTLALKHNLITDSTPYYKYTPQTILESSEYKLYWDRTILTDKTVHHNRPDITLHDKINRTVYLIDIAIPNTHNLTTTHTHKVTKYTDLTIELKSQWKVNTVKTVPIIISSTGIIPKTLHNSLKILNMHPLSYITIQKAVILNTCRIVRKFLSIN

SEQ ID NO: 23880 - protein, 1364 aa, Cyaniris semiargus
MRLRNRVIPQAGTGAIRDGESRPGPSGSGCPSYSGEGNESQQAFQSRADPGSKYHQSPSSSTSSLFPSLQSSPQSYLGLRESRSSSSSSYLSYSSRTEDVVQEAMITAKITAPTPGKRRSRKLWTKDMNIFIMRHYFILTDLEKNTKTYLTQLHSLFTSKYPDMEASKQRVGDQRRAIINCKLLSNKEILLIKEEVKNTLQSTHTSTDNNIHTPNTITRKMRWTDELNEAIMTCYYRITKLETDFTTYRPLLHQEVISRCPEIAHLSVQRISDQRRSIVNNRLLPTDLLERLKEKVRREIQNNRTEHLLENIDHLEGPSDITNTIEIIENLEHLPSTCTAEPNCNTVQVANYTPNITLTPELTKQLEDMLNETIDTFRHTDPTTRPRLPKLKYSRKLLTIVNDLNSNVLPKKLTEEMHFTELQTIIYCAAYTTVKFSGARIYLSTDEIKKKTKEAPGWQKRLEIRISKLRANIGRLTEYRRGTRSPDLENHITKIKEQFKIHSKHETENTDILHFLDTLKQKLNTLASRLKRYKETTNRKKQNKEFFNNEKLFYRNLLKQNNNDTTENSSVPSAQSLQEFWSNIWSKPIEHNQNSWIQEDKERLENLPLMDFEHIELDLLKTVINKTHNWKATGSDNIHNFWYKKLTCTHKLLHNHINAFIRSTDTMPPYITQGTTYMLPKDFNDTGNPTKYRPITCLQNIYKIITACLSELIYKHIQQNNILSEEQKGCRKKSQGCKEQLTIDAVATKQALKQKRNIYTMFIDYQKAFDSVPHSWLVYILRHYKINPVIIGFLERIMRQWSTKLKLGNNNNPTETEHIPIRRGIFQGDALSPLWFCLALNPLSSILNSNSIGFKIKHNRQQTRLTHLMYMDDIKLFASSLNEIHRLADITHLFSNDICMQFGIDKCKIQAVTKGKLDPSSYHVLPNQEVINAVDPIEGYKYLGYYQGQGINHKNTKKLLKEKFKTRIHRILHTHLNSRNTIKAINTFAIPILTYSFGVISWSQTDLKILQRAINTAMTKHRKHHPRACIQRLTLPKIEGGRGLIDISNLHNKQLSLLRTYFHNHSSLSPLHNAVCQADTYTPLSLANHSKHIKIITNQEKVDAWMHKSLHGRHRTDLTDTNVDKTASNAWLRRGELFPETEGFMMAIQDQVIDTKNYRKYIIRSSDTNSDHCRHCHKHPETIQHITGACSSITQTDYKHRHDQVAAIIHQTLALKYNLITDSTPYYKYTPQTILESSECKLYWDRTILTDKTVHHNRPDITLHDKINRTVYLIDIAIPNTHNLTTTHTNKVTKYTDLTIELKSQWKVNTVKTVPIIISSTGVIPKTLHSGLKILNMHPLSYITMQKAVILNTCRIVRKFLSIN

SEQ ID NO: 23881 - protein, 755 aa, Aricia agestis
MDFEQIELGLLKTVINKTHNWKATGSDNIHNFWYKKLTCTHKLLHNHINAFIRSPDTMPPYITQGTTYMLLKDFNDTGNPAKYRPITCLQNIFKIITACLSELIYKHTQLNNILSEEQKGCRKKSQGCKEQLTIDAVATKQALKQKRNIYTMFIDYQKAFDSVPHSWLVYILRHYKINPVIIGFLERIMRQWSTKLKLGNNNNPIETDHIPIRRGIFQGDALSPLWFCLALNPLSSILNSNNIGFKIKHNRQQTRLTHLMYMDDIKIFASSLNEIHRLADITHLFSNDICMRFGIDKCKIQAVAKGKFDPSSYHVLPNEEVINAVDPIEGYKYLGYYQGQGINHKNTKKLLKEKFKTRLHRILNTHLNSRNTIKAINTFAIPILTYSFGVISWSQTDLKTLQRAINTAMTKHRKHHPRACVQRLTLPKIEGGRGIIDISNLHNKQLSLLRTYFHNHSSLSPLHNAVCQADTYTPLSLANHSKHIKIITNQEKIDAWMHKSLHGRHRTDLADTNVDKTASNAWLRRGELFPETEGFMMAIQDQVIDTKNYRKYIIRASNTNSDHCRHCHKHPETIQHITGACSSITQTDYKHRHDQVAAIIHQTLALKHNLITDSTPYYKYTPQTILESSEYKLYWDRTILTDKTVHHNRPDITLHDKINRTVYLIDIAIPNTHNLTTTHTHKVTKYTDLTIELKSQWKVNTVKTVPIIISSTGVIPKTLHNSLKILNMHPLSYITIQKAVILNTCRIVRKFLSIN

SEQ ID NO: 23882 - protein, 1364 aa, Cyaniris semiargus
MRLRNRVIPQAGTGAIRDGESRPGPSGSGCPSYSGEGNESQQAFQSRADPGSKYHQSPSSSTSSLFPSLQSSPQSYLGLRESRSSSSSSYLSYSSRTEDVVQEAMITAKITAPIPGKRRSRKLWTKDMNIFIMRHYFILTDLEKNTKTYLTQLHSLFTSKYPDMEASKQRVGDQRRAIINCKLLSNKEILLIKEEVKNTLQSTHTSTDNNIHTPNTITRKMRWTDELNEAIMTCYYRITKLETDFTAYRPLLHQEVISRCPEIAHLSVQRISDQRRSIVNNRLLPTDLLERLKEKVRREIQNNRTEHLLENIDHLEGPSDITNTIEIIENLEHLPSTCTAEPNCNTVQVANYTPNITLTPELTKQLEDMLNETIDTFRHTDPTTRPRLPKLKYSRKLLTIVNDLNSNVLPKKLTEEMHFTELQTIIYSAAYTTVKFSGARIYLSTDEIKKKTKEAPGWQKRLEIRISKLRANIGRLTEYRRGTRSPDLENHITKIKEQFKIHSKHETENTDILHFLDTLKQKLNTLASRLKRYKETTNRKKQNKEFFNNEKLFYRNLLKQNNNDTTENSSVPSAQSLQEFWSNIWSKPIEHNQNSWIQEDKERLENLPLMDFEHIELDLLKTVINKTHNWKATGSDNIHNFWYKKLTCTHKLLHNHINAFIRSPDTMPPYITQGTTYMLPKDFNDTGNPTKYRPITCLQNIYKIITACLSELIYKHIQQNNILSEEQKGCRKKSQGCKEQLTIDAVATKQALKQKRNIYTMFIDYQKAFDSVPHSWLVYILRHYKINPVIIGFLERIMRQWSTKLKLGNNNNPIETEHIPIRRGIFQGDALSPLWFCLALNPLSSILNSNSIGFKIKHNRQQTRLTHLMYMDDIKLFASSLNEIHRLADITHLFSNDICMQFGIDKCKIQAVTKGKLDPSSYHVLPNQEVINAVDPIEGYKYLGYYQGQGINHKNTKKLLKEKFKTRIHRILHTHLNSRNTIKAINTFAIPILTYSFGVISWSQTDLKILQRAINTAMTKHRKHHPRACVQRLTLPKIEGGRGLIDISNLHNKQLSLLRTYFHNHSSLSPLHNAVCQADTYTPLSLANHSKHIKIITNQEKVDAWMHKSLHGRHRTDLSDTNVDKTASNAWLRRGELFPETEGFMMAIQDQVIDTKNYRKYIIRSSDTNSDHCRHCHKHPETIQHITGACSSITQTDYKHRHDQVAAIIHQTLALKYNLITDSTPYYKYTPQTILKSSEYKLYWDRTILTDKTVHHNRPDITLHDKINRTVYLIDIAIPNTHNLTTTHTNKVTKYTDLTIELKSQWKVNTVKTVPIIISSTGVIPKTLHNSLKILNMHPLSYITMQKAVILNTCRIVRKFLSIN

SEQ ID NO: 23883 - protein, 1317 aa, Cyclargus thomasi
MMRLRNRNIPQAGTEASSDGESRPGPSGLGCPAYSGEGTVSQNENIANNSDNSLHSLSSLFSSPTSSPASYVIGNESDSSFIINSSFLSEPTVDVVQKAKSAKVTTPVHGIKGCKRKKWSKEMNTYIMHQYYILTKLETDTKSYVTQLHSLFSSKFPDMTATKQRVSDQRRAIVQRKLLTTKEILNIKKEVQILLSQNELGNNTSTQSNNTTQVQRMRWSDEINETIMRTYYRITKIETDLTSYRPLLHREVITKCPSIAHLSVQRIADQRRAIVNNQLLTNDYLSRVREEVKQELDTHSTLIAENISMHINDSRLIQHTTDENLPSETNRTDQSPCSHHTDKNEELSIEVQTQINDTFNETFSTFKDLEPTVRPSLPKLKMSKKISMIINYLNTTLLPNLLNSETDFPTLQTYIYTAAYTAATVCGIRIKQNTLNIRQNNKPTWQQRLENKIGDLRKSIGRLTEHARGIRSTRLEKHVDNIKEKYKIHTQHETENTDTIHFLDTLKQKLNSLSNRLKRYKQCAIRKAQNKQFSNNEKVFYRQLTKQQNNSELNTDRLTPTPETMHSFWSQIWSNPTEHESNNKWIDDDKKRLIDLPEMAFDEINIAQMKAIISKTHNWKATGTDKIHNFWYKKLSCTHTLLQKHINSFLHSPDTMPPFITQGVTYMIPKDRTDTANPAKYRPITCLQSIYKIITACISELIYTHIDTNNILAEEQKGCRKNSQGCKEQLIIDSVASQQALKQKRSIYTMYIDYKKAYDSVPHSWLIYILQHYKINPIIIKYLKHIMPQWNTRLKIINSDKTIETDFIPVRRGIFQGDSLSPLWFCLALNPLSHILNKKNIGFKIKYNQQLAVLSHLMYMDDIKLFANTLKDIHNLADLIQTFSNNIRMEFGIDKCKIHSVKKGIVQYTPYKLNNDEIIEPVDPVDGYKYLGYYQTQQIHYKETKRTLQQKFKERLHKILYTQLNSKNTVKAINTYAVPILTYSFGIIRWTQTELKSLQRIVNTSMTKHRKHHPRACIQRLILPKTEGGRGLIDILNLHNKQITHLREFFQKRSHTSTLHNAVFHADTYTPLHLADSNKQIHLYTNQQKIDTWTQKTLHGRHRLELTNPNVDKIASNAWLKRGELFPETEGFMLAIQDQVIDTKNYRKHIIRDTNVESDHCRHCHKHPETIQHITGACSFITQTDYKHRHDQVAAIIHQILAFKYHLIPEKLPYYKYTPQIILESPDYKIYWDRTILTDKTVHHNRPDITLHDKQNKIVYLIDVAIPNSHNLTSTHTTKLTKYTDLSIELKAQWKVNTVKTIPIIISTTGIIPKTLH

SEQ ID NO: 23884 - protein, 1364 aa, Lycaena phlaeas
MRLRNRIIPQAGTETKSDGESRPGPLGSGCSSYSGGSNESRQSVQPSAAAEQCYHHSLSSSPTVSLFSSIPSSPQSFSFAGIDKAFSSPNSSNFSSPLRVEDVVQEARAAEITAPIQSSRRIRKTWTRDMNIFIMRHYFILTNIETNTRSYLTPLHSLFHTKYPQMEVCRQRIGDQRRAIINRNLLTKQEISDIKKEAKEFIQNKQQLPINNINLPQTRNNRMQWSPELNELIMRIYYRITKLETDLTTYRPLLHQEFVLKRPELSHCSVQRIADQRRTIVNNKLLSLERLNNIKEEVRNELQQSIANTEVEETGSELNTDISLTQTTNDNQLHETQLDINIDIEPENRQNNTHTQNLSSEAALQLETMFTDVIDKFRETDPTSRPNLPKLKTSKKLALIINHLNSKTIPNIIRSDIDFETLQTIIYCAAYTTVKFSGTKIFEHAQNFNTKREAPWWQKRLEKRINNLRANIGRLTEYIRGTRSPALEKHIDRIKQHFKIHSQHETQNTEIPHYLDTLKQKLNTLANRLRRYRETTNRKRQNKEFSNNEKLFYRNLNKQQNDPSEKPLPTTQALHDFWSKIWSTPKEHSHCQWIEKEKDKIFDIIPEMKFENIELAQLQTVITKTHNWKATGTDKIHNFWYKKLTCTHLLLHQHINTFIQSPDKMPKYITEGITYMLPKDLKDSENPSKYRPITCLQNIYKIITSCLSEAIYKHTQEHNILAEEQKGCRKHSQGCKEQLTIDAVASNQAFKHKKNLHTMFVDYKKAFDSVPHSWLIYILKHYRISPIIINFLEKIMLHWNTKLKICADMNTTVETDVIPIRRGIFQGDALSPLWFCLSLNPLSSLLNSTETGYKIKYNSLHARLTHLMYMDDIKIFANSIQDLHYLADITQNFSNNICMEFGVDKCKIQSVNKGKIENSTYRLNNNEVIGPVDQAEGYKYLGYNQTQIIHHKDTKKILRDKFKNRIHKILKTHLNSKNTIKAINTFAIPILTYSFGIIKWTKTDLKSLQTSINTALTKHRKHHPRSCVQRLTLPKIEGGRGLIDITNLHNKQVTLLRSYFYNRSKESPIHNAICQSDTYTPLMLADHSKPITIISNQQKIDAWTQKSLHGRHRMDLTSINVDKVASNMWLKRGELFPETEGFMIAIQDQVIDTKNYRKYIIRDNTTGSDHCRHCHRQPETIQHITGACSSITQTDYKHRHDQVAAIIHQILALNHNLITDKNPYYKYTPQIILESPEFKLYWDRTLLTDKTVHHNRPDITLHDKQNKIVYFIDIAIPNSHNLTTTHTNKLTKYTDLTIEIKTQWKVNTVKTIPIVISTTGIVPKTLHTSLKTLNIHPLTYITLQKAVILNTCRIVRKFLVNNNN

SEQ ID NO: 23885 - protein, 1364 aa, Glaucopsyche alexis
MRLRNRNIPQAGTGALRDGESRPGPSGSGCPSYSGGGNESRQAAQSSTGAEQCYHRSPNSSPTLSLFSSVPSSPPSFADIHESSSSSSSLTFSSSIRAKDVVQEANTAKITAPVQGLRRTRKTWTRDMNIFIMRHYFILTKLETNLRSYLTPLHSLFTTKYPEMEASKQRIGDQRRAITYRNLLTKQEILDIKEEAKRLIQNQELLPNIDTNLPQTQTHRMQWSYELNELIIKSYYRITKLETDLTSYRPLLHQAVVSKCPELAHLSVQRIADQRRTIVSNKLLSVDHLNHLKEEVRTELDRNSNINVTEETEMDRNTDVSLLQTLTTDNQHQMIPIDTSNQTTPEIIQSRNTCVPTLSPEMVIQLEEMLTETINEFKETDPTQRPYIPKLKTSKRLSIIINHLNSKIIPKILNSDTDFHTLQTIIYSAAYATAKFNGARINKDTDRIYKKFEAPWWQKRLEKRINNIRANIGRLTEYIRGVRSSKLDKHIHNIKQQYKIHSQYETQNTETSHYLDTLKQKLNTLTNRLRRYRETTNRKTQNKEFSNNEKLFYRKLAKQENKDSTENKALPTPQTLYEFWSKIWSTSIEHKQNSWIEEDKEKLRDVTEMKFEDIGLDLLKSIIARTHNWKATGSDNIHNFWYKKLTCTHDLLHQHINTFIQSPDSLPHYITQGITYMLPKDLKETENPAKYRPITCLQNIYKIITSCLSESIYKHTLEHNILAEEQKGCRKHSQGCKEQLTIDAVALNQALKDKRNIHTMFIDYKKAFDSVPHSWLIYILKHYRIHPLIISFLENIMPRWNTKLKICTDINNTVETDLIPIRRGIFQGDALSPLWFCLALNPLSSLLNNTEIGFTIKHNAQQTRLTHLMYMDDIKLFANTINDLHCLADITQSFSNDICMEFGVDKCKMQSVNRGKIEQTSYELESHEIIGSVDQAEGYKYLGYNQTQAIHHKDTKKLLREKFRNRLHKILHTHLNSKNTIKAINTFAIPILTYSFGIIKWSKTDLKTLQTTINTALTKHRKHHPRACIQRLTLPKIEGGRGLIDITNLHNKQITLLRTYFYNRSQESLIHNATCQSDSFTPLMLTDHTKPITIISNQQKIDSWTQKSLHGRHRMDLTDTNVDKVASNTWLKRGELFPETEGFMIAIQDQVIDTKNYRKYIIRDSGTGSDHCRHCHRQPETIQHITGACSSITQTDYKHRHDQVAAIIHQTLALKHNLITDKTPYYKYTPQIILDSPDYKLYWDRTILTDKTVHHNRPDITLHDKQNRTVYLIDIAIPNSHNLASTHTNKVTKYTDLTIEIKTQWKVNVVKTIPIIISTTGIIPKTLHSSLKTLNIHPLTYITLQKAVILNTCRIVRKFLSINN

SEQ ID NO: 23886 - protein, 1363 aa, Plebejus argus
MKIYEMRLRNRNIPQAGTETKSDGESRPEPTGSGCPSYSGGGNESRQSAQPSAAAVQCYHPSPNLSPTVSLFSSVSSSPQPFADTYKSLSSPNSSNASSSSRVVDVVQEAPAAEITAPVKGFRRIRKTWTRDMNIFILRHYYILTNIETNTRSYLTPLHSLFTTKYPEMEACRQRIGDQRRAIINRNLLTKQEITDIKKEAKEYLQKQQKLPHLDTSMLQIHNNRMQWSSELNELIMKCYYRITKLETDLTTYRPILHQEIVSKRPELAHLSTQRIADQRRTIVNNNLLSIDRLKSIKEEVRIELEQTTAEIDVEYTGTAVTDIPTIHTTNNDDQPQDLHECVNINNRRTLNPEMILQPEMILQLEAMFTEAIDKFRETEPTNRPHIPKLRTSRKLTLIINHLNSNTIPKLINSDTDFQTLQVIIYSAAYTTAKFSGAKLSDDALRINTKREVPWWQQRLDRRINNLRADIGRLTEYERGVRSSALEKHIENIKQRFKIHSQHETLNTEISHYLDTLKQKLNLLANRLRRYRETTDRKKQNKEFYSNEKLFYRKLSKQENDSAERKALPTTQALHDFWSKIWSSPIEHKQSQWIEEEKDKICENIPEMKFDYIELALLKTVLAKTHNWKATGSDKIHNYWYKKLTSTHHLLHYHINRFIQSPEEMPNYITQGITYMLPKDIKDTENPAKYRPITCLQNIYKIITSCLSESIYKHTQDHNILAEEQKGCRKHSQGCKEQLTIDAVASNHALKNKKNIHTMFVDYKKAFDSVPHSWLIFILKHYKIHPLIINFLEKIMKHWNTKLKICTDKNTTIETDAIPIRRGIFQGDALSPLWFCLSLNPLSFLLNSTEIGYQIRHNSLQTRLTHLMYMDDIKLFANSINDLYRLAEITQTFSNDICMEFGVDKCKIQSVNKGKIETTSYKLNNNEIIGPVDEAEGYKYLGYNQTQTIHHKDTKKILREKFKNRVHKILNTRLNSKNTIKAVNTFAIPILTYSFGIIRWTKTDLKSLQTTINTAFTKHRKHHPRACIQRLTLPKIEGGRGLIDITNLHNKQITLLRTYFYNRSQESLIHNVICQSDTYTPLLLADHTKPITTITNQEKIDAWAQKSLHGRHRTDLTNMNVDKVASNAWLKRGELFPETEGFMIAIQDQVIDTKNYRRYIIRDSGAGSDHCRNCHRQPETIQHITGACSSITQTDYKHRHDQVAAIIHQILALKHNLIKEKTSYYKYTPQIILDSPDYKLYWDRTILTDKTVHHNRPDITLHDKQNKTVYLIDIAIPNSHNLTTTHTNKLTKYTDLTIEIKTQWKVNTVKTIPIVISTTGIIPKTLHTSLKTLNIHPLTYITLQKAAILNTCRIVRKFLAINN

SEQ ID NO: 23887 - protein, 1357 aa, Aricia agestis
MYVMRLRNRNIPQAGTEAQCDGESRPEPSGSGCPSYSGGGNEPRQSAQPSAAAVQCYHPSPSSSPTVSLFSSVTSSPQSFADTYKSLSSPNSSNSSSPPRVVDVVQKAPAAEITAPVRGSRRIRKTWTRDMNIFILRHYYILTNIETNTRSYLTPLHSLFTTEYPEMEACRQRIGDQRRAIINRNLLSKQEITDIKEEAKQYLQNQQHLPQIDTSILHTQNNRMQWSSELNELIMKCYYRITKLETDLTTYRPILHQEIVSKRPDLANLSIQRIADQRRTIVNNKLLSIDRLRSIKEEVRMELEQITSEINVEYTGTAVTALPTIQTTNNDDQLQDLQEDVNSNNRRTLNLPPEMILQLEAMFTEAIDKFRETEPTNRPHIPKLRTSKKLTLIVNYLNSNTIPKFINLNTDFQTLQLIIYSAAYTTAKFSGAKLFEDDVRINTKREVPWWQQRLDRRINSLRADIGRLTEYERGVRSSALEKHIENIKQKFKIHSQHETQNMEISHYLDTLKQKLNLLANRLRRYRETTDRKKQNKEFYSNEKLFYRKLSKQENDSSERKPLPTTQALHDFWSKIWSSPIEHKQSQWIEKEKNKICENIPDMKFDNIELALLKTVIAKTHNWKATGSDKIHNYWYKKLTCTHHLLHHHINRFIQSPEDMPNYITQGITYMLPKDIKDTENPAKYRPITCLQNIYKIITSCLSESIYKHTQDHNILAEEQKGCRKHSQGCKEQLTIDAVAANQALKNKKNIHTMFVDYKKAFDSVPHSWLIFILKHYKIHPLIINFLEKAMNHWNTKLKICTDKNMTVETDAIPIRRGIFQGDALSPLWFCLSLNPLSFLLNSNEMGYKIKHNSLQTRLTHLMYMDDIKLFANSINDLYRLADITQTFSNDVCMEFGVDKCKIQSVNKGKIETTSYKLNNNEIIGPVDEAEGYKYLGYNQTQTIHHKDTKKILREKFRNRIHKILNTHLNSKNTIKAVNTFAIPILTYSFGIIKWTKTDLKSLQTTINTALTKHRKHHPRACIQRLTLPKIEGGRGLIDITNLHNKQIILLRSYFYNRSKESLIHNVICQSDTFTPLLLADHTKPITTITNQEKIDAWTQKSLHGRHRTDLTNMNVDKVASNAWLKRGELFPETEGFMIAIQDQVIDTKNYRKYIIRDNTAGSDHCRHCHRQPETIQHITGACSSITQTDYKHRHDQVAAIIHQILAFKHNLITEKIPYYKYTPQIILDSPDYKLYWDRTILTDKTVHHNRPDITLHDKQNKIVYLIDIAIPNSHNLTTTHTNKLTKYTDLTIEIKTQWKVNTVKTIPIVISTTGIIPKTLHTSLKTLNIHPLTYITLQKAVILNTCRIVRKFLAINN

SEQ ID NO: 23888 - protein, 1358 aa, Lysandra coridon
MYVMRLRNRNIPQAGTEAQCDGESRPEPTGSGCPSYSGGGNESRQSAQPSAAAVQCYHPSPSSSPTVSLFSSVPSSPQSFAGTYKSLSSPNSSNTSSPSRVVDVVQEAPAAKITAPVQGFRRIRKTWTRDMNIFILRHYYILTNIETNTRSYLTSLHSLFTTKYPEMEACKQRIGDQRRAIVNRNLLTKQEITDIKEEAKQYLQNQQQLTHDIDTSMLQTQNNRMQWSSEVNELIMKCYYRITKLETDLTTYRPILHQEIVSKRPELAHLSIQRIADQRRTIVNNKLLSIERLRSIKEEVRIELEQTTTEIDVEYTGTTVTALHTIQTTNNADQLQDLQEDVNINNKRSLNLPPEMILQLETIFTEAIDKFRETEATNRPHIPKLRTSKKLSLIINHLNSNTIPKLINSDTDFQKLQVIIYSAAYTTAKFNGAKIFEDDVRINTKREVPWWQQRLDRRINSLRADIGRLTEYERGVRSAALEKHIENIKQKFKIHSQHEMQNTEIPHYIDTLKQKLNSLASRLRRYRETTNRKKQNKEFYSNEKLFYRKLSKQENDSTERKALPTTQALHDFWSKIWSSPIEHKQSHWIEKEKDKICENISEMKFDNIELTLLKTVIAKTHNWKATGSDKIHNYWYKKLTCTHHLLHHHINRFIQSPEEMPNYITQGITYMLPKDIKDTENPAKYRPITCLQNIYKIITSCLSESIYKHIQEHNILAEEQKGCRKHSQGCKEQLTIDAVASNQALKNKKNIHTMFVDYKKAFDSVPHSWLIFILKHYKVHPHIINFLEKIMNHWNTKLKICTDKNMTIETDVISIRRGIFQGDALSPLWFCLSLNPLSFLLNSTEIGYKIKHNSLQTRLTHLMYMDDIKLFASSINDLYRLADITQTFSNDICMEFGVDKCKIQSVNKGKIETTSYKLNNNEIIGPVDEAEGYKYLGYNQTRTIHHKNTKKILREKFKNRIHKILNTHLNSKNTIKAVNTFAIPILTYSFGIIKWTKTDLKSLQTTINTAFTKHRKHHPRACIQRLTLPKIEGGRGLIDITNLHNKQITLLRSHFYNRSQESLIHNVICQSDTFTPLSLADYTKPITTITNQEKIDTWTQKSLHGRHRTDLTNINVDKVASNAWLKRGELFLETEGFMIAIQDQVIDTKNYRRYIIRDSGAGSDHCRHCHRQPETIQHITGACSSITQTDYKHRHDQVAAIIHQILALKHNLITEKIPYYKYTPQIILDSPDYKLYWDRTILTDKTVHHNRPDITLHDKQNKTVYLIDIAIPNSHNLTTTHTNKLTKYTDLTIEIKTQWKANTVKTIPIVISTTGIVPKTLHISLKTLNIHPLTYITLQKAVILNTCRIVRKFLAINN

SEQ ID NO: 23889 - protein, 1389 aa, Lysandra coridon
MFYLSFITFVSSYTIFPYLVNSSFVFTFQLRMYVMRLRNRNIPQAGTEAQCDGESRPEPTGSGCPSYSGGGNESRQSAQPSAAAVECYHPSPSSSPTVSLFSSVPSSPQSFAGTYKSLSSPNSSNTSSSSRVVDVVQEAPAAKITAPVQGFRRIRKTWTRDMNIFILRHYYILTDIETNTRSYLTSLHSLFTTKYPEMEACKQRIGDQRRAIVNRSLLTKQEITDIKEEAKQYLQNQQQLTHDIDTSMLQTQNNRMQWSSELNELIMECYYRITKLETDLTTYRPTLHQEIVSKRPELAHLSIQRIADQRRTIVNNKLLSIERLRSIKEEVRIELEQTTTEIDIEYTGTTVTALHTIQTTNNADQLQDLQEDVNINNKRSLNLPPEMILQLETIFTEAIDKFRETEPTNRPHIPKLRTSKKLSLIINHLNSNTIPKLINSDTDFQKLQVIIYSAAYTTAKFSGAKIFEDDVRINTKREVPWWQQRLDRRINSLRADIGRLTEYERGVRSAALEKHIENIKQKFKIHSQHETQNTEIPHYIDTLKQKLNSLANRLRRYRETTNRKKQNKEFYSNEKLFYRKLSKQENDSTERKALPTTQALHDFWSKIWSSPIEHKQSHWIEKEKDKICENISEMKFDNIELTLLKTVIAKTHNWKATGSDKIHNYWYKKLTCTHHLLHHHINRFIQSPEEMPNYITQGITYMLPKDIKDTENPAKYRPITCLQNIYKIITSCLSESIYKHTQEHNILAEEQKGCRKHSQGCKEQLTIDAVASNQALKNKKNIHTMFVDYKKAFDSVPHSWLIFILKHYKVHPHIINFLEKIMNHWNTKLKICTDKNMTIETDVISIRRGIFQGDALSPLWFCLSLNPLSFLLNSTKIGYKIKHNSLQTRLTHLMYMDDIKLFASSINDLYRLADITQTFSNDICMEFGVDKCKIQSVNKGKIETTSYKLNNNEIIGPVDEAEGYKYLGYNQTRTIHHKNTKKILREKFKNRIHKILNTHLNSKNTIKAVNTFAIPILTYSFGIIKWTKTDLKSLQTTINTAFTKHRKHHPRACIQRLTLPKIEGGRGLIDITNLHNKQITLLRSHFYNRSQESLIHNVICHSDTFTPLSLADYTKPITTITNQEKIDTWTQKSLHGRHRTDLTNINVDKVASNAWLKRGELFPETEGFMIAIQDQVIDTKNYRRYIIRDSGAGSDHCRHCHRQPETIQHITGACSSITQTDYKHRHDQVAAIIHQILALKHNLITEKIPYYKYTPQIILDSPDYKLYWDRTILTDKTVHHNRPDITLHDKQNKTVYLIDIAIPNSHNLTTTHTNKLTKYTDLTIEIKTQWKANTVKTIPIVISTTGIIPKTLHTSLKTLDIHPLTYITLQKAVILNTCRIVRKFLAINN

SEQ ID NO: 23890 - protein, 1360 aa, Lysandra bellargus
MRLRNRIIPQAGTEAKSNGESRPGPSGSGCPSYSGGGNESRQSAQPSAAADDHPSLSSSPSVSLFSSVPSSPQSFSFAGIDKAFSSPSSSKFSSPVRVEDVVQEARAAEITAPIQSSRRIRKTWTRDMNIFIMRHYFIITNIETNTRSYLTPLHSLFHTKYPEMEACRQRIGDQRRAIINRNLLTKQEISDIKKEAKEFIQNKQQLPINNTNLPRTQNNKMQWSPELNELIMRIYYRITKLETDFTTYRPLLHQEFILKCPELSHFSVQRIADQRRTIVNNKLLSLERLNNIKEEVRNELQQSITNTEVEETGSELNTELSLTQTTNDSQLHEIQLDIDTEHENTQNNTHTQSLSPEVALQLEAMFTDVIVKFSETDPTSRPNIPKLKTSKKLTLIINHLNSKTIPNIIKSDTDFKTLQTIIYSAAYTTAKFSGTKIFEHTQNFNTKREAPWWQKRLEKRINNLRANIGRLTEYIRGTRSPALEKHIDRIKQQFKTHSQHETQNTEISHYLDTLKQKLNTLANRLRRYREMTNRKRQNKEFSNNEKLFYRNLNKQQNDPSEKPLPTTQALHEFWSKIWSTPKEHSHCQWIEKEKEKLFDVIPEMKFENIELAQLKTVIAKTHNWKATGTDKIHNFWYKKLTCTHLLLHHHINIFIQSPDKMPKYITQGITYMLPKDLKDSENPSKYRPITCLQNIYKIITSCLSEAIYKHTQEHNILAEEQKGCRKHSQGCKEQLTIDAVASNQAFKHKKNLHTMFVDYKKAFDSVPHSWLIYILKHYRISPLIINFLEKIMVHWNTKLKICTDMNTTVETDVISIRRGIFQGDALSPLWFCLSLNPLSSLLNSTEIGYKIKHNSLHARLTHLMYMDDIKIFANSIQDLHYLADITQNFSNNICMEFGVDKCKIQSVNKGKIEKTSYRLNNNEVIGPVDQAEGYKYLGYNQTQVIHHKDTKKILRDKFKNRIHKILNTHLNSKNTIKAVNTFAIPILTYSFGIIKWTKTDLKSLQTSINTALTKHRKHHPRSCVQRLTLPKIEGGRGLIDITNLHNKQVTLLRSYFYNRSKESPIHNVICQSDTYTPLMLADQSKPITIISNQQKIDAWTQKSMHGRHRMDLTSTNVDKVASNMWLKRGELFPETEGFMIAIQDQVIDTKNYRKYIIRDNTAGSDHCRHCHRQPETIQHITGACSSITQTDYKHRHDQVAAIIHQILALKHNLITDKNPYYKYTPQIILESPDFKLYWDRTILTDKTVHHNRPDITLHDKQNKTVYLIDIAIPNTHNITTTHTNKLTKYTDLTIEIKTQWKVNTVKTIPIVISTTGIVPKTLHTSLKTLNIHPLTYITLQKAVILNTCRIVRKFLAINYN

SEQ ID NO: 23891 - protein, 1357 aa, Aricia agestis
MYVMRLRNRNIPQAGTEAQCDGESRPEPSGSGCPSYSGGGNEPRQSAQPSAAAVQCYHPSPSSSPTVSLFSSVTSSPQSFADTYKSLSSPNSSNSSSPPRVVDVVQKAPAAEITAPVRGSRRIRKTWTRDMNIFILRHYYILTNIETNTRSYLTPLHSLFTTEYPEMEACRQRIGDQRRAIINRNLLSKQEITDIKEEAKQYLQNQQHLTQIDTSILHTQNNRMQWSSELNELIMKCYYRITKLETDLTTYRPILHQEIVSKRPDLANLSIQRIADQRRTIVNNKLLSIDRLRSIKEEVRMELEQITSEMNVEYTGTAVTALPTIQTTNNDDQLQDLQEDVNSNSRRTLNLPPEMILQLEAMFTEAIDKFRETEPTNRPHIPKLRTSKKLTLIVNYLNSNTIPKFINLNTDFQTLQLIIYSAAYTTAKFSGAKLFEDDVRINTKREVPWWQQRLDRRINSLRADIGRLTEYERGVRSSALEKHIENIKQKFKIHSQHETQNMEISHYLDTLKQKLNLLANRLRRYRETTDRKKQNKEFYSNEKLFYRKLSKQENDSSERKPLPTTQALHDFWSKIWSSPIEHKQSQWIEKEKNKICENIPDMKFDNIELALLKTVIAKTHNWKATGSDKIHNYWYKKLTCTHHLLHHHINRFIQSPEDMPNYITQGITYMLPKDIKDTENPAKYRPITCLQNIYKIITSCLSESIYKHTQDHNILAEEQKGCRKHSQGCKEQLTIDAVAANQALKNKKNIHTMFVDYKKAFDSVPHSWLIFILKHYKIHPLIINFLEKAMNHWNTKLKICTDKNMTVETDAIPIRRGIFQGDALSPLWFCLSLNPLSFLLNSNEIGYKIKHNSLQTRLTHLMYMDDIKLFANSINDLYRLADISQTFSNDVCMEFGVDKCKIQSVNKGKIETTSYKLNNNEIIGPVDEAEGYKYLGYNQTQTIHHKDTKKILREKFRNRIHKILNTHLNSKNTIKAVNTFAIPILTYSFGIIKWTKTDLKSLQTTINTALTKHRKHHPRACIQRLTLPKIEGGRGLIDITNLHNKQIILLRSYFYNRSKESLIHNVICQSDTFTPLLLADHTKPITTITNQEKIDAWTQKSLHGRHRTDLTNMNVDKVASNAWLKRGELFPETEGFMIAIQDQVIDTKNYRKYIIRDNTAGSDHCRHCHRQPETIQHITGACSSITQTDYKHRHDQVAAIIHQILAFKHNLITEKIPYYKYTPQIILDSPDYKLYWDRTILTDKTVHHNRPDITLHDKQNKIVYLIDIAIPNSHNLTTTHTNKLTKYTDLTIEIKTQWKVNTVKTIPIVISTTGIIPKTLHTSLKTLNIHPLTYITLQKAVILNTCRIVRKFLAINN

SEQ ID NO: 23892 - protein, 756 aa, Plebejus argus
MKFDYIELALLKTVLAKTHNWKATGSDKIHNYWYKKLTCTHHLLHYHINRFIQSPEEMPNYITQGITYMLPKDIKDTENPAKYRPITCLQNIYKIITSCLSESIYKHTQDHNILAEEQKGCRKHSQGCKEQLTIDAVASNHALKNKKNIHTMFVDYKKAFDSVPHSWLIFILKHYKIHPLIINFLEKIMKHWNTKLKICTDKNTTIETDAIPIRRGIFQGDALSPLWFCLSLNPLSFLLNSTEIGYQIRHNSLQTRLTHLMYMDDIKLFANSINDLYRLAEITQTFSNDICMEFGVDKCKIQSVNKGKIETTSYKLNNNEIIGPVDEAEGYKYLGYNQTQTIHHKDTKKILREKFKNRIHKILNTRLNSKNTIKAVNTFAIPILTYSFGIIRWTKTDLKSLQTTINTAFTKHRKHHPRACIQRLTLPKIEGGRGLIDITNLHNKQITLLRTYFYNRSQESLIHNVICQSDTYTPLLLADHTKPITTITNQEKIDAWAQKSLHGRHRTDLTNMNVDKVASNAWLKRGELFPETEGFMIAIQDQVIDTKNYRRYIIRDSGAGSDHCRHCHRQPETIQHITGACSSITQTDYKHRHDQVAAIIHQILALKHNLIKEKTSYYKYTPQIILDSPDYKLYWDRTILTDKTVHHNRPDITLHDKQNKTVYLIDIAIPNSHNLTTTHTNKLTKYTDLTIEIKTQWKVNTVKTIPIVISTTGIIPKTLHTSLKTLNIHPLTYITLQKAVILNTCRIVRKFLAINN

SEQ ID NO: 23893 - protein, 1142 aa, Lycaena phlaeas
MQWSPELNELIMRIYYRITKLETDLTTYRPLLHQEFVLKRPELSHCSVQRIADQRRAIVNNKLLSLERLNNIKEEVRNELQQSIANTEVEETGSELNTELSLTQTTNDNQLHETQLDINIDIEPENRQNNTHTQNLSSEAALQLETMFTDVIDKFRETDPTSRPNLPKLKTSKKLALIINHLNSKTIPNIIRSDIDFETLQTIIYCAAYTTVKFSGTKIFEHTQNFNTKREAPWWQKRLEKRINNLRANIGRLTEYIRGTRSPALEKHIDRIKQHFKIHSQHETQNTEIPHYLDTLKQKLNTLANRLRRYRETTNRKRQNKEFSNNEKLFYRNLNKQQNDPSEKPLPTTQALHDFWSKIWSTPKEHSHCQWIEKEKDKIFDIIPEMKFENIELAQLQTVIAKTHNWKATGTDKIHNFWYKKLTCTHLLLHQHINTFIQSPDKMPKYITEGITYMLPKDLKDSENPSKYRPITCLQNIYKIITSCLSEAIYKHTQEHNILAEEQKGCRKHSQGCKEQLTIDAVASNQAFKHKKNLHTMFVDYKKAFDSVPHSWLIYILKHYRISPIIITFLEKIMLHWNTKLKICADMNTTVETDVIPIRRGIFQGDALSPLWFCLSLNPLSSLLNSTETGYKIKYNSLHARLTHLMYMDDIKIFANSIQDLHYLADITQNFSNNICMEFGVDKCKIQSVNKGKIENSTYRLNNNEVIGPVDQAEGYKYLGYNQTQVIHHKDTKKMLRDKFKNRIHKILKTHLNSKNTIKAVNTFAIPILTYSFGIIKWTKTDLKSLQTSINTALTKHRKHHPRSCVQRLTLPKIEGGRGLIDITNLHNKQVTLLRSYFYNRSKESPIHNAICQSDTYTPLMLADHSKPITIISNQQKIDAWTQKSLHGRHRMDLTSINVDKVASNMWLKRGELFPETEGFMIAIQDQVIDTKNYRKYIIRDNTAGSDHCRHCHRQPETIQHITGACSSITQTDYKHRHDQVAAIIHQILALNHNLITDKNPYYKYTPQIILESPDFKLYWDRTLLTDKTVHHNRPDITLHDKQNKIVYFIDIAIPNSHNLTTTHTNKLTKYTDLTIEIKTQWKVNTVKTIPIVISTTGIVPKTLHTSLKTLNIHPLTYITLQKAVILNTCRIVRKFLANNNN

SEQ ID NO: 23894 - protein, 757 aa, Lysandra bellargus
MKFENIELAQLKTVIAKTHNWKATGTDKIHNFWYKKLTCTHLLLHHHINIFIQSPDKMPKYITQGITYMLPKDLKDSENPSKYRPITCLQNIYKIITSCLSEAIYKHTQEHNILAEEQKGCRKHIQGCKEQLTIDAVASNQAFKHKKNLHTMFVDYKKAFDSVPHSWLIYILKHYRISPLIINFLEKIMVHWNTKLKICTDVNTTVETDVISIRRGIFQGDALSPLWFCLSLNPLSSLLNSTEIGYKIKHNSLHARLTHLMYMDDIKIFANSIQDLHYLADITQKFSNNICMEFGVDKCKIQSVNKGKIEKTSYRLNNNEVIGPVDQAEGYKYLGYNQTQVIHHKHTKKILRDKFKNRIHKILNTHLNSKNTIKAVNTFAIPILTYSFGIIKWTKTDLKSLQTSINTALTKHRKHHPRSCVQRLTLPKIEGDRGLIDITYLHNKQVTLLRSYFYNRSKESPIHNVICQSDTYTPLMLADQSKPITIISNQQKIDAWTQKSMHGRHRMYLTSTNVDKVASNMWLKRGELLPETEDFMIAIQDQVIDTKNYRKYIIRDNTAGSDHCRHCHRQPETIQHITGACSSITQTDYKHRHDQVAAIIHQILALKHNLITDKNPYYKYTPQIILESPDFKLYWDMTILTDKTVHHNRPDITLHDKQNKTVYLIDIAIPNTHNITTTHTNKLTKYTDLTIEIKTQWKVNTVKTIPIVISTTGIVPKTLHTSLKTLNIHPLTYITLQNAVILNTCRIVHKFLAIHYN

SEQ ID NO: 23895 - protein, 1389 aa, Lysandra bellargus
MFYLSFIIFVSSYTIFPYLVNSSFVFTFQLRMYVMRLRNRNIPQAGTEAQCDGESRPEPTGSGCPSYSGGGNESRQSAQPSAAAVECYHPSPSSSPTVSLFSSVPSSPQSFAGTYKSLSSPNSSNTSSSSRVVDVVQEAPAAKITAPVQGFRRIRKTWTRDMNIFILRHYYILTDIETNTRSYLTSLHSLFTTKYPEMEACKQRIGDQRRAIVNRNLLTKQEITDIKEEAKQYLQNQQQLTHDIDTSMLQTQNNRMQWSSELNELIMECYYRITKLETDLTTYRPILHQEIVSKRPELAHLSIQRIADQRRTIVNNKLLSIERLRSIKEEVRIELEQTTTEIDIEYTGTTVTALHTIQTTNNADQLQDLQEDVNINNKRSLNLPPEMILQLETIFTEAIDKFRETEPTYRPHIPKLRTSKKLSLIINHLNSNTIPKLINSDTDFQKLQVIIYSAAYTTAKFSGAKIFEDDVRINTKREVPWWQQRLDRRINSLRADIGRLTEYERGVRSAALEKHIENIKQKFKIHSQHETQNTEIPHYIDTLKQKLNSLANRLRRYRETTNRKKQNKEFYSNEKLFYRKLSKQENDSTERKALPTTQALHDFWSKIWSSPIEHKQSHWIEKEKDKICENISEMKFDSIELTLLKTVIAKTHNWKATGSDKIHNYWYKKLTCTHHLLHHHINRFIQSPEEMPNYITQGITYMLPKDIKDTENPAKYRPITCLQNIYKIITSCLSESIYKHTQEHNILAEEQKGCRKHSQGCKEQLTIDAVASNQALKNKKNIHTMFVDYKKAFDSVPHSWLIFILKHYKVHPHIINFLEKIMNHWNTKLKICTDKNITIETDVISIRRGIFQGDALSPLWFCLSLNPLSFLLNSTKIGYKIKHNSLQTRLTHLMYMDDIKLFASSINDLYRLADITQTFSNDICMEFGVDKCKIQSVNKGKIETTSYKLNNNEIIGPVDEAEGYKYLGYNQTRTIHHKNTKKILREKFKNRMHKILNTHLNSKNTIKAVNTFAIPILTYSFGIIKWTKTDLKSLQTTINTAFTKHRKHHPRASIQRLTLPKIEGGRGLIDITNLHNKQITLLRSHFYNRSQESLIHNVICQSDTFTPLSLADYTKPITTITNQEKIDTWTQKSLHGRHRTDLTNINVDKVASNAWLKRGELFPETEGFMIAIQDQVIDTKNYRRYIIRDSGAGSDHCRHCHRQPETIQHITGACSSITQTDYKHRHDQVAAIIHQILAIKHNLITEKIPYYKYTPQIILDSPDYKLYWDRTILTDKTVHHNRPDITLHDKQNKTVYLIDIAIPNSHNLTTTHTNKLTKYTDLTIEIKTQWKANTVKTIPIVISTTGIIPKTLHTSLKTLDIHPLTYITLQKAVILNTCRIVRKFLAINN

SEQ ID NO: 23896 - protein, 1364 aa, Lycaena phlaeas
MRLRNRIIPQAGTETKSDGESRPGPLGSGCSSYSGGSNESRQSVQPSAAAEQCYHHSLSSSPTVSLFSSIPSSPQSFSFAGIDKAFSSPNSSNFSSPLRVEDVVQEARAAEITAPIQSSRRIRKTWTRDMNIFIMRHYFILTNIETNTRSYLTPLHSLFYTKYPQMEACRQRIGDQRRAIINRNLLTKQEISDIKKEAKEFIQNKQQLPINNINLPQTRNNRMQWSPELNELIMRIYYRITKLETDLTTYRPILHQEFVLKRPELSHCSVQRIADQRRTIVNNKLLSLERLNNIKEEVRNELQQSIANTEVEETGSELNTELSLTQTTNDNQLHETQLDINIDIEPENRQNNTHTQNLSSEAALQLETMFTDVIDKFRETDPTSRPNLPKLKTSKKLALIINHLNSKTIPNIIRSDIDFETLQTIIYCAAYTTVKFSGTKIFEHTQNFNTKREAPWWQMRLEKRINNLRANIGRLTEYIRGTRSPALEKHIDRIKQHFKIHSQHETQNTEIPHYLDTLKQKLNTLANRLRRYRETTNRKRQNKEFSNNEKLFYRNLNKQQNDPSEKPLPTTQALHDFWSKIWSTPKEHSHCQWIEKEKDKIFDIIPEMKFENIELAQLQTVIAKTHNWKATGTDKIHNFWYKKLTCTHLLLHQHINTFIQSPDKMPKYITEGITYMLPKDLKDSENPSKYRPITCLQNIYKIITSCLSEAIYKHTQEHNILAEEQKGCRKHSQGCKEQLTIDAVASNQAFKHKKNLHTMFVDYKKAFDSVPHSWLIYILKHYRISPIIINFLEKIMLHWNTKLKICADMNTTVETDVIPIRRGIFQGDALSPLWFCLSLNPLSSLLNSTETGYKIKYNSLHARLTHLMYMDDIKIFANSIQDLHYLADITQNFSNNICMEFGVDKCKIQSVNKGKLENSTYRLNNNEVIGPVDQAEGYKYLGYNQTQVIHHKDTKKILRDKFKNRIHKILKTHLNSKNTIKAVNTFAIPILTYSFGIIKWTKTDLKSLQTSINTALTKHRKHHPRSCVQRLTLPKIEGGRGLIDITNLHNKQVTLLRSYFYNRSKESPIHNAICQSDTYTPLMLADHSKPITIISNQQKIDAWTQKSLHGRHRMDLTSINVDKVASNMWLKRGELFPETEGFMIAIQDQVIDTKNYRKYIIRDNTAGSDHCRHCHRQPETIQHITGACSSITQTDYKHRHDQVAAIIHQILALNHNLITDKNPYYKYTPQIILESPEFKLYWDRTLLTDKTVHHNRPDITLHDKQNKIVYFIDIAIPNSHNLTTTHTNKLTKYTDLTIEIKTQWKVNTVKTIPIVISTTGIVPKTLHTSLKTLNIHPLTYITLQKAVILNTCRIVRKFLANNNN

SEQ ID NO: 23897 - protein, 996 aa, Lysandra coridon
MFTDVIEKFSETDPTSRPNIPKLKTSKKLTLIINHLNSKTIPNIIKSDTDFKTLQTIIYSAAYTTAKFSGTKIFEHTQNFNTKREAPWWQKRLEKRINNLRANIGRLTEYIRGTRSPALEKHIDRIKQQFKTHSQHETQNTEISHYLDTLKQKLNTLANRLRRYRETTNRKRQNKEFSNNEKLFYRNLNKQQNDPSEKPLPTTQALHEFWSKIWSTPKEHSHCQWIEKEKEKLFDVIPEMKFENIELAQLKTVIAKTHNWKATGTDKIHNFWYKKLTCTHLLLHHHINIFIQSPDKMPKYITQGITYMLPKDLKDSENPSKYRPITCLQNIYKIITSCLSEAIYKHTQEHNILAEEQKGCRKHSQGCKEQLTIDAVASNQAFKHKKNLHTMFVDYKKAFDSVPHSWLIYILKHYRISPLIINFLEKIMVHWNTKLKICTDMNTTVETDVISIRRGIFQGDALSPLWFCLSLNPLSSLLNSTEIGYKIKHNSLHARLTHLMYMDDIKIFANSIQDLHYLADITQNFSNNICMEFGVDKCKIQSVNKGKIEKTSYRLNNNEVIGPVDQAEGYKYLGYNQTQVIHHKDTKKILRDKFKNRIHKILNTHLNSKNTIKAVNTFAIPILTYSFGIIKWTKTDLKSLQTSINTALTKHRKHHPRSCVQRLTLPKIEGGRGLIDITNLHNKQVTLLRSYFYNRSKESPIHNVICQSDTYTPLMLADQSKPITIISNQQKIDAWTQKSMHGRHRMDLTSTNVDKVASNMWLKRGELFPETEGFMIAIQDQVIDTKNYRKYIIRDNTAGSDHCRHCHRQPETIQHITGACSSITQTDYKHRHDQVAAIIHQILALKHNLITDKNPYYKYTPQIILESPDFKLYWDRTILTDKTVHHNRPDITLHDKQNKTVYLIDIAIPNTHNITTTHTNKLTKYTDLTIEIKTQWKVNTVKTIPIVISTTGIVPKTLHTSLKTLNIHPLTYITLQKAVILNTCRIVRKFLAINYN

SEQ ID NO: 23898 - protein, 1360 aa, Lysandra coridon
MRLRNRIIPQAGTEAKSNGESRPGPSGSGCPSYSGGGNESRQSAQPSAAADDHPSLSSSPSVSLFSSVPSSPQSFSFAGIDKAFSSPSSSKFSSPVRVEDVVQEARAAEITAPIQSSRRIRKTWTRDMNIFIMRHYFIITNIETNTRSYLSPLHSLFHTKYPEMEACRQRIGDQRRAIINRNLLTKQEISDIKKEAKEFIQNKQQLPINNTNLPRTQNNRMQWSPELNELIMRIYYRITKLETDFTTYRPLLHQEFILKCPELSHFSVQRIADQRRTIVNNKLLSLERLNNIKEEVRNELQQSITNTEVEETGSELNTELSLTQTTNDSQLHEIQLDIDTEHENTQNNTHTQSLSPEVALQLEAMFTDVIVKFSETDPTSRPNIPKLKTSKKLTLIINHLNSKTIPNIIKSDTDFKTLQTIIYSAAYTTAKFSGTKIFEHTQNFNTKREAPWWQKRLEKRINNLRANIGRLTEYIRGTRSPTLEKHIDRIKQQFKTHSQHETQNTEISHYLDTLKQKLNMLANRLRRYRETTNRKRQNKEFSNNEKLFYRNLNKQQNDPSEKPLPTTQALHEFWSKIWSTPKEHSHCQWIEKEKEKLFDVIPEMKFENIELAQLKTVIAKTHNWKATGTDKIHNFWYKKLTCTHLLLHHHINIFIQSPDKMPKYITQGITYMLPKDLKDSENPSKYRPITCLQNIYKIITSCLSEAIYKHTQEHNILAEEQKGCRKHSQGCKEQLTIDAVASNQAFKHKKNLHTMFVDYKKAFDSVPHSWLIYILKHYRISPLIINFLEKIMVHWNTKLKICTDMNTTVETDVISIRRGIFQGDALSPLWFCLSLNPLSSLLNSTEIGYKIKHNSLHARLTHLMYMDDIKIFANSIQDLHYLADITQNFSNNICMEFGVDKCKIQSVNKGKIEKTSYRLNNNEVIGPVDQAEGYKYLGYNQTQVIHHKDTKKILRDKFKNRIHKILNTHLNSKNTIKAVNTFAIPILTYSFGIIKWTKTDLKSLQTSINTALTKHRKHHPRSCVQRLTLPKIEGGRGLIDITNLHNKQVTLLRSYFYNRSKESPIHNVICQSDTYTPLMLADQSKPITIISNQQKIDAWTQKSMHGRHRMDLTSTNVDKVASNMWLKRGELFPETEGFMIAIQDQVIDTKNYRKYIIRDNTAGSDHCRHCHRQPETIQHITGACSSITQTDYKHRHDQVAAIIHQILALKHNLITDKNPYYKYTPQIILESSDFKLYWDRTILTDKTVHHNRPDITLHDKQNKTVYLIDIAIPNTHNITTTHTNKLTKYTDLTIEIKTQWKVNTVKTIPIVISTTGIVPKTLHTSLKTLNIHPLTYITLQKAVILNTCRIVRKFLAINYN

SEQ ID NO: 23899 - protein, 1293 aa, Cyclargus thomasi
MRLRNRNVPQAGTGTRSEGESRPGPSGPGCPSYSGGGNESRQPAQPSAAAGRCYHPSPCSSPTVSLFSSISSSPQSFAEPYNSFSSPNSSSSLSPLQVLDVVQEAPAAEITEPVQDLRRTRKTWTRDMNIFILRHYYIFTNIGTNTRSYLTPLHSLFTTKYPEMGACRQRIGDQRRAIINRNLLTKQEISDIKEEAKQYLQNQQQLNHTETSLPQTQNKRMQWPSELNEFIMKCYYRITKLETDLTTYRPLLHQEIISKRPELAHLSIQRIADQRRTIVKNKLLSIDRLNSIKEEIRIELGHTIHTIAESSEEYTGNAVTLTETAHHNNQLQDVTRDIIDNTHKLPRETILQLEAMFTETVDKFRETDPVSRPIIPKLRTSKKLTLIINQLNSKTIPNIIHSNTDYQSIQLIIYSAAYTTAKFSGAKIFEHTVKLNAKREVPWWQQRLERKIDSLRVDIGRLTEYERGTRSSILIRHIQNIKQRFRVHSQHENDNTETSHYLDTLKQKLNSLASRLRRYRETTNRKKQNKDFYNNEKIFYRKLTKHENDSNGNQTLPTTQALHDFWSKIWSSPIEHKQNQWINQEKEKVCEKIPEMKFDSIELSLLKSVIAKTHNWKATGSDKIHNFWYKKLTCTHPILHHHINRFIQSPDKIPNYIMQGTTYMLPKDIKDTENPANYRPITCLQTIYKIITSCLSESIYKHTQDHNILAEEQKGCRKHSQGCKEQLTIDAVISNQALKNRRNIHTMFVDYKKAFDSVPHSWLIYILKHYKIHPLIINFLEKIMLQWNTKLKVYADNNTIVETDVIPIRRGIFQGDALSPIWFCLALNPLSYLLNSAEKGYQIKNDSQIVRLTHLMYMDDIKLFANTINNLYCLADITQIFSNDICMEFGVDKCKIQSVHKGKIETTSYQLNNNEIIGPVDEAEGYKYLGYNQTRTIHHKNTKKILREKFKNRIHKILNTHLNSKNTTKALNTFAIPILTYSFGIIKWTQTDLKSLQTVINTTLTKHRKHHPRACLQRMTLPKLEGGRGLIDITNLHSKQIVLLRSYFYNRSKESIIHNAICQSDTFTPLMLADYSKPFITTSNQQKIDTWAQKSLHGRHRMDLTNANVDKLASNMWLKRGELFPETESFMIAIQDQIIDTKNYRKHIIRDNTVYSDHCRNCHRQPETIQHITSACSSITQTDYKHRHDQVAAIIHQILALKHNLITDKYPYYKYTPQIILESSDFKLYWDRTILTDKTVHHNRPDITLHDKQNKAVYLIDIAIPNSHNLTTTHTSKLTKYTDLAIEIKTQWK

SEQ ID NO: 23900 - protein, 1354 aa, Aricia agestis
MRLRNRNISQAGTEAQCDGESRPEPSGSGCPSYSGGGNEPWQSAQPSADAVQCYHPSPSSSPTVSLFSSVPSSPQSFADTYKSLSSPNSSNASSPPRVVDVVQEAPAAKITAPVRGSRRIRKTWTRDMNIFILRHYYILTNIETNTRSYLTPLHSLFTTEYPEMEACRQRIGDQRRAIINRKLLSKQEITDIKEEAKQYLQNQQHLPQIDTSILHTQNNRMQWSPELNELIMKCYYRITKLETDLTTYRPILHQEIVSKRPDLAHLSIQRIADQRRTIVNNKLLSIDRLRSIKEEVRMELEQITSEINVEYTGTAVTALSTIQTTNNDDQLQDLQEDVNSNNIRTPNLPPEMILQLEAMFTEAIDKFRETEPTNRPHIPKLRTSKKFKLIVNHLNSNTIPKFINSDTDFQTLQVIIYSAAYTTAKFSGAKLFEDDVRINTKREVPWWQQRLDRRINNLRADIGRLTEYERGIRSSALEKHIENIKQRFKIHSQHETQNTEISHYLDTLKQKLNLLANRLRRYRETTDRKKQNKEFYSNEKLFYRKLSKQENDPSERKALPTTQALHDFWSKIWSSPIEHKQSQWIEKEKNKICENISDMKFDNIELALLKTVIAKTHNWKATGSDKIHNYWYKKLTCTHHLLHHHINRFIQSPENMPNYITQGLTYMLPKDIKDTENPAKYRPITCLQNIYKIITSCLSESIYKHTQDHNILAEEQKGCRKHSQGCKEQLTIDAVASNQALKNKKNIHTMFVDYKKAFDSVPHSWLIFILKHYKIHPLIINFLEKTMNHWNTKLKICTDKNMTVETDAIPIRRGIFQGDALSPLWFCLSLNPLSFLLNSKEIGYKIKHNSLQTRLTHLMYMDDIKLFANSINDLYRLADITQTFSNDVCMEFGVDKCKIQSVNKGKIETTSYKLNNNEIIGPVDEAEGYKYLGYNQTQAIHHKDTKIILRKKFRNRIHKILNTHLNSKNTIKAVNTFAIPILTYSFGIIKWTKTDLKSLQTTINTALTKHRKHHPRACIQRLTLPKIEGGRGLIDITNLHNKQIILLRSYFYNRSKESLIHKVICQSDTFTPLLLADHTKPITTITNQEKIDAWTQKSLHGRHRTDLTNMNVDKVASNAWLKRGELFPETEGFMIAIQDQVIDTKNYRKFIIRDNTAGSDHCRHCHRQPETIQHITGACSSITQTDYKHRHDQVAAIIHQILALKHNLITEKIPYYKYTPQIILDSPDYKLYWDRTILTDKTVHHNRPDITLHDKQNKIVYLIDIAIPNSHNLTTTHTNKLTKYTDLTIEIKTQWKVNTVKTIPIVISTTGIIPKTLHTSLKTLNIHPLTYITLQKAVILNTCRIVRKFLAINN

SEQ ID NO: 23901 - protein, 1354 aa, Lysandra coridon
MRLRNRSIPQAGTGARSEGESRPGPSGLGCPSYSGGGNESRQSVQLSAVAEQCYHPSPSSSPTVSLFSSVPSSPQSFAETNKSFPSPNSSIFSSPLRAADVAQEAPAAEIAAPIQGLRRTRKTWTRDMNIFIMRHYFILTKIETNTRSYLTPLHSLFTTKYPEMEACRQRIGDQRRAIINRNLLTKQEIKNIKEEAKKFIIQNQQQLPYTDTSLPLTQSQNSRMQWSSELNELIMRSYYRITKIETDLTTYRPLLHQEIVSKCPELAHLSIQRIADQRRTIINNKLLSIERLNSIKEEIRIELEQTTAEIEVEYTETELNTDLPLLQTANDDDEPPGPQLEINNDSTRTQNLPPEMILQIEAMFTGAIDKFRETDPTSRPHIPKLRTSKKLTCIIKHLNSITIPNIITPNTDFITLQTIIYSAAYTTAKLSGAKIFEHTERLSTKREAPWWQKRLERRINNLRANIGRLTEYNRGTRSPALEKHIDKIKQQFKIHSQHENQNTEISHYLDTLKQKLISLANRLRRYRETTNRKRQNKEFYNNEKLFYRNLSKEQNNFTEKALPSTQALHDFWSNIWSIPKEHTQSQWIEVEKEKVSNISEMKFEKIELSLLKSVIAKTHNWKATGSDKIHNFWFKKFTCTHLLLLQHINTFIHSPDKMPYYITQGVTYMLPKDLQDTENPAKYRPITCLQNIYKIITSCLSEVIYKHTQEHNILSEEQKGCRKHSQGCKEQLTIDAVASNQAFKHKKNIHTMFIDYKKAFDSVPHSWLIYILKHYRINPLIINFLKKIMLHWNTKLKICTDKTVETDTIPIKRGIFQGDSLSPLWFCLSLNPLSSLLNATEMGYKIKYNSLQIRLAHLMYMDDIKLFANNINDLHHLADITQNFSNNICMEFGVDKCKIQSINKGKIEATSYQLSNSEIIGPLDQAEGYKYLGYNQTRAIHHKDTKKILREKFKSRIHKILNTHLNSKNMIKAINTFAIPILTYSFGIIKWTKTDLKSLQTTINTALTNHRKHHPRACVQRLTLPKIEGGRGLIDITNLHNKQITLLRTFFYSRSNESIIHNAICQSDTFTPLMLADHTKPITTISNQQKIDEWAQKSLHGRHRMDLTNSNVDKVASNMWLKRGELFPETEGFMIAIQDQVIDTKNYRKYIIRDNTAGSDHCRHCHRQPETIQHITGACSSITQTDYKHRHDQVAAIIHQILALKHNLITERNPYYKYTPQIILDSPDYKLYWDRTILTDKTVHHNRPDITLHDKQNKVVYLIDIAIPNSHNLTTTHTNKLTKYTDLTIEIKTQWKANTVKTIPIVISTTGIISKSLHTSLKTLNIHPLTYITLQKAVILNTCRIVRKFLAINN

SEQ ID NO: 23902 - protein, 1359 aa, Cyaniris semiargus
MEYATAKQKYTPGGYRSEKRRRIPPRTLGSGLPLVFWGGGGGNESRQTAQLSAVAEQCYHPSPSSSPTVSLFSSVSSSPQSFADTNKSFSSPNSSIFSSPSRAADVVQEAPAAEITAPIQGPRRTRKTWTRDMNIFIMRHYFILTKIETNTRSYLTPLHSLFSTKYPEMEACRQRIGDQRRAIINRNLLTKQEIKNIKEEAKQFIIQKQQQLPHTDTSLPQTQSQNSRMQWSSELNELIMRSYYRITKLETDLTTYRPLLHQEIVSNCPELAHLSVQRIADQRRTIVNNKLLSIERLRSIKEEIRIELEQTTAEVEVEYTETELNNDLPLLQTSNDDDQPPGLQLEINNDNTRTQNLPPEMILQIEAMFTEAIDKFRGTDPTSRPHIPKLRTSKKLTYIIKHLNSITIPNIITSDTDFITLQTIIYSAAYTTAKFSGAKIFEHTERLNTKREAPWWQKRLERRINNLRANIGRLTEYIRGTRSPALEVHINKIKQQFKIHSQHENHNTEISHYLDTLKQKLNSLANRLRRYRETTNRKKQNKEFYNNEKLFYRNLSKEKNDFTEKALPSSQALHDFWSNIWSIPKEHTQGQWIEVEKEKVSNISEMKFENIELSLLKSVIAKTHNWKATGSDKIHNFWFKKFTCTHLLLLQHINTFIHSPDKIPYYITAGVTYMLPKDLKDTENPAKYRPITCLQNIYKIITSCVSEAIYKHTQEHNILAEEQKGCRKHSQGCKEQLTIDAVASNQAFKHRKNIHTMFIDYKKAFDSVPHSWLIYILKHYKISPLIINFLEKIMLHWNTKLKICTDKTVETDTIPIRRGIFQGDALSPLWFCLSLNPLSSLLNSTETGYKIKYNSLQTRLTHLMYMDDIKLLANNINDLHYLADITQTFSNDICMEFGVDKCKIQSINKGKIEATSYQLNNSEIIGPVDQAEGYKYLGYNQTRAIHHKGTKKILREKFKNRIHKILNTHLNSKNSIKAINTFAIPILTYSFGIIKWTKTDLKSLQTTINTALTKHRKHHPRACVQRLTLPKIEGGRGLMDITNLHNKQITLLRTYFYNRSNESVIHNAICQSDTFTPLMLADHTKPITTISNQQKIDEWTQKSLHGRHRTDLTNTNVDKVASNIWLKRGELFPETEGFMIAIQDQVVDTKNYRKYIIRDNTAGSDHCRHCHRQPETIQHITGACSSITQTDYKHRHDQVAAIIHQILALKHNIITERNPYYKYTPQIILESPDYKLYWDRTILTDKTVHHNRPDITLHDKQNKTVYLIDIAIPNSHNLTTTHTNKLTKYTDLTIEIKTQWKVNTVKTIPIVISTTGIIPKTLHTSLKTLNIHPLTYITLQKAVILNTCRIVRKFLAIKN

SEQ ID NO: 23903 - protein, 1227 aa, Cyaniris semiargus
MNIFIMRHYFILTKIETNTRSYLTPLHSLFSTKYPEMEACRQRIGDQRRAIINRNLLTKQEIKNIKEEAKQFIIQKQQQLPHTDTSLPQTQSQNSRMQWSSELNELIMRSYYRITKLETDLTTYRPLLHQEIVSNCPELAHLSIQRIADQRRTIVNNKLLSIERLRSIKEEIRIELEQTTAEVEVEYTETELNNDLPLLQTSNDDDQPPGLQLEINNDNTRTQNLPPEMILQIEAMFTEAIDKFRETDPTSRPHIPKLRTSKKLTYIIKHLNSITIPNIITSDTDFITLQTIIYSAAYTTAKFSGAKIFEHTERLNTKREAPWWQKRLERRINNLRANIGRLTEYIRGTRSPALEVHINKIKQQFKIHSQHENHNTEISHYLDTLKQKLNSLANRLRRYRETTNRKKQNKEFYNNEKLFYRNLSKEKNDFTEKALPSTQALHDFWSNIWSIPKEHTQGQWIEVEKEKVSNISEMKFENIELSLLKSVIAKTHNWKATGSDKIHNFWFKKFTCTHLLLLQHINTFIHSPDKIPYYITEGVTYMLPKDLQDTENPAKYRPITCLQNIYKIITSCVSEAIYKHTQEHNILAEEQKGCRKHSQGCKEQLTIDAVASNQAFKHRKNIHTMFIDYKKAFDSVPHSWLIYILKHYKISPLIINFLEKIMLHWNTKLKICTDKTVETDTIPIRRGIFQGDALSPLWFCLSLNPLSSLLNSTEMGYKIKYNSLQTRLTHLMYMDDIKLLANNINDLHYLADITQTFSNDICMEFGVDKCKIQSINKGKIEATSYQLNNSEIIGPVDQAEGYKYLGYNQTRAIHHKDTKKILREKFKNRIHKILNTHLNSKNSIKAINTFAIPILTYSFGIIKWTKTDLKSLQTTINTALTKHRKHHPRACVQRLTLPKIEGGRGLMDITNLHNKQITLLRTYFYNRSNESVIHNAICQSDTFTPLMLADHTKPITTISNQQKIDEWTQKSLHGRHRTDLTNTNVDKVASNIWLKRGELFPETEGFMIAIQDQVIDTKNYRKYIIRDNTAGSDHCRHCHRQPETIQHITGACSSITQTDYKHRYDQVAANIHQILALKHNLITERNPYYKYTPQIILESPDYKLYWDRTILTDKTVHHNRPDITLHDKQNKTVYLIDIAIPNSHNLTTTHTNKLTKYTDLTIEIKTQWKVNTVKTIPIVISTTGIIPKTLHTSLKTLNIHPLTYITLQKAVILNTCRIVRKFLAINN

SEQ ID NO: 23904 - protein, 1354 aa, Cyaniris semiargus
MRLRNRSIPQAGTGARSEGESRPGLSGPGFPSYSGGGNESRQTAQLSAVAEQCYHPSPSSSTTVSLFSSVSSSPQSFADTNKSFSSPNSSIFSSPSRAADVVQEAPAAEITAPIQGPRRTRKTWIRDMNIFIMRHYFILTKIETNTRSYLTPLHSLFSTKYPEMEACRQRIGDQRRAIINRNLLTKQEIKNIKEEAKQFIIQKQQQLPHTDTSLPQTQSQNSRMQWSSELNELIMRSYYRITKLETDLTTYRPLLHQEIVSNCPELAHLSIQRIADQRRTIVNNKLLSIERLRSIKEEIRIELEQTTAEVEVEYTETELNNDLPLLQTSNDDDQPPGLQLEINNDNTRTQNLPPEMILQIEAMFTEAIDKFRETDPTSRPHIPKLRTSKKLTYIIKHLNSITIPNVITSDTDFITLQTIIYSAAYTTAKFSGAKIFEHTERLNTKREAPWWQKRLERRINNLRANIGRLTEYIRGTRSPALEVHINKIKQQFKIHSQHENHNTEISHYLDTLKQKLNSLANRLRRYRETTNRKKQNKEFYNNEKLFYRNLSKEKNDFTEKALPSTQALHDFWSNIWSIPKEHTQGQWIEVEKEKVSNISEMKFENIELSLLKSVIAKTHNWKATGSDKIHNFWLKKFTCTHLLLLQHINTFIHSPDKIPYYITEGVTYMLPKDLQGTENPAKYRPITCLQNIYKIITSCVSEAIYKHTQEHNILAEEQKGCRKHSQGCKEQLTIDAVASNQAFKHRKNIHTMFIDYKKAFDSVPHSWLIYILKHYKISPLIINFLEKIMLHWNTKLKICTDKTVETDTIPIRRGIFQGDALSPLWFCLSLNPLSSLLNSTEMGYKIKYNSLQTRLTHLMYMDDIKLLANNINDLHYLADITQTFSNDICMEFGVDKCKIQSINKGKIEATSYQLNNSEIIGPVDQAEGYKYLGYNQTRAIHHKDTKKILREKFKNRIHKILNTHLNSKNSIKAINTFAIPILTYSFGIIKWTKTDLKSLQTTINTALTKHRKHHPRACVQRLTLPKIEGGRGLIDITNLHNKQITLLRTYFYNRSNESVIHNAICQSDTFTPLMLADHTKPITTISNQQKIDEWTQKSLHGRHRTDLTNTNVDKVTSNIWLKRGELFPETEGFMIAIQDQVIDTKNYRKYIIRDNTADSDHCRHCHRQPETIQHITGACSSITQTDYKHRHDQVAAIIHQILALKHNLITERNPCYKYTPQIILESPDYKLYWDRTILTDKTVHHNRPDITLHDKQNKTVYLIDIAIPNSHNLTTTHTNKLTKYTDLTIEIKTQWKVNTVKTIPIVISTTGIIPKTLHTSLKTLNIHPLTYITLQKAVILNTCRIVRKFLAINN

SEQ ID NO: 23905 - protein, 1120 aa, Lysandra coridon
MRSYYRITKIETDLTTYRPLLHQEIVSKFPELAHLSIQRIADQRRTIINNKLLSIERLNSIKEEIRIELEQTTAEIEVEYTETELNTDLPLLQTANDDDEPPGPQLEINNDSTRTQNLPPEMILQIEAMFTGAIDKFRETDPTSRPHIPKLRTSKKLTCIIKHLNSITIPNIITPNTDFITLQTIIYSAAYTTAKLSGAKIFEHTERLSTKREAPWWQKRLERRINNLRANIGRLTEYNKGTRSPALEKHIDKIKQQFKIHSQHENQNTEISHYLDTLKQKLISLANRLRRYRETTNRKRQNKEFYNNEKLFYRNLSKEQNNFTEKALPSTQALHDFWSNIWSIPKEHTQGQWIEVEKEKVSNISEMKFEKIELSLLKSVIAKTHNWKATGSDKIHNFWFKKFTCTHLLLLQHINTFIHSPDKMPYYITQGVTYMLPKDLQDTENPAKYRPITCLQNIYKIITSCLSEVIYKQTQEHNILSEEQKGCRKHSQGCKEQLTIDAVASNQAFKHKKNIHTMFIDYKKAFDSVPHSWLIYILKHYRINPLIINFLKKIMLHWNTKLKICTDKTVETDTIPIKRGIFQGDSLSPLWFCLSLNPLSSLLNATEMGYKIKYNSLQIRLAHLMYMDDIKLFANNINDLHHLADITQNFSNNICMEFGVDKCKIQSINKGKIETTSYQLSNSEIIGPLDQAEGYKYLGYNQTRAIHHKDTKKILREKFKSRIHKILNTHLNSKNMIKAINTFAIPILTYSFGIIKWTKTDLKSLQTTINTALTKHRKHHPRACVQRLTLPKIEGGRGLIDITNLHNKQITLLRTFFYSRSNESIIHNAICQSDTFTPLMLADHTKPITTISNQQKIYEWAQKSLHGRHRMDLTNSNVDKVASNMWLKRGELFPETEGFMIAIQDQVMDTKNYRKYIIRDNTAGSDHCRHCHRQPETIQHITGACSSITQTDYKHRHDQVAAIIHQILALKHNLITERNPYYKYTPQIILDSPDYKLYWDRTILTDKTVHYNRPDITLHDKQNKVVYLIDIAIPNSHNLTTTHTNKLTKYTDLTIEIKTQWKANTVKTIPIVISTTGIISKSLHTSLKTLNIHPLTYITLQKAVILNTCRIVRKFLAINN

SEQ ID NO: 23906 - protein, 1354 aa, Lysandra coridon
MRLRNRSIPQAGTGARSEGESRPGPSGLGCPSYSGGGNESRQSVQLCAVAEQCYHPSPSSSPTVSLFSSVPSSPQSFAETNKSFPSPNSSIFSSPLRAADVAQEAPAAEIAAPIQGLRRTRKTWTRDMNIFIMRHYFILTKIETNTRSYLTPLHSLFTTKYPEMEACRQRIGDQRRAIINRNLLTKQEIKNIKEEAKKFIIQNQQQLPYTDTSLPLTQSQNSRMQWSSELNELIMRSYYRITKIETDLTTYRPLLHQEIVSKCPELAHLSIQRIADQRRTIINNKLLSIERLNSIKEEIRIELEQTTAEIEVEYTETELNTDLPLLQTANDDDEPPGPQLEINNDSTRTQNLPPEMILQIEAMFTGAIDKFRETDPTSRPHIPKLRTSKKLTCIIKHFNSITIPNIITSNTDFITLQTIIYSAAYTTAKLSGAKIFEHTERLSTKREAPWWQKRLEKRINNLRANIGRLTEYNRGTRSPALEKHIDKIKQQFKIHSQHENQNTEISHYLDTLKQKLNSLANRLHRYRETTNRKRQNKEFYNNEKLFYRNLSKEQNNFTEKALPSTQALHDFWSNIWSIPKEHTQGQWIEVEKEKVSNISEMKFEKIELSLLKSVIAKTHNWKATGSDKIHNFWFKKFTCTHLLLLQHINTFIHSPDKMPYYITQGVTYMLPKDLQDTENPAKYRPITCLQNIYKIITSCLSEVIYKHTQEHNILSEEQKGCRKHSQGCKEQLTIDAVASNQAFKHKKNIHTMFIDYKKAFDSVPHSWLIYILKHYRINPLIINFLKKIMLHWNTKLKICTDKTVETDTIPIKRGIFQGDSLSPLWFCLSLNPLSSLLNATEMGYKIKYNSLQIRLAHLMYMDDIKLFANNINDLHHLADITQNFSNNICMEFGVDKCKIQSINKGKIEATSYQLSNSEIIGPLDQAEGYKYLGYNQTRAIHHKDTKKILREKFKSRIHKILNNHLNSKNMIKAINTFAIPILTYSFGIIKWTKTDLKSLQTTINTALTKHRKHHPRACVQRLTLPKIEGGRGLIDITNLHNKQITLLRTFFYSRSNESIIHNAICQSDTFTPLMLADHTKPITTISNQQKIDEWAQKSLHGRHRMDLTNSNVDKVASNMWLKRGELFPETEGFMIAIQDQVIDTKNYRKYIIRDNTAGSDHCRHCHRQPETIQHITGACSSITQTDYKHRHDQVAAIIHQILALKHNLITERNPYYKYTPQIILDSPDYKLYWDRTILTDKTVHHNRPDITLHDKQNKVVYLIDIAIPNSHNLTTTHTNKLTKYTDLTIEIKTQWKANTVKTIPIVISTTGIISKSLHTSLKTLNIHPLTYITLQKAVILNTCRIVRKFLAINH

SEQ ID NO: 23907 - protein, 1354 aa, Cyaniris semiargus
MRLRNRSIPQAGTGARSEGESRPGLSGPGCPSYSGGGNESRQTAQLSAVAEQCYHPSPSSSPTVSLFSSVSSSPQSFADTNKSFSSPNSSIFSSPSRAADVVQEAPAAEITAPIQGPRRTRKTWTRDMNIFIMRHYFILTKIETNTRSYLTPLHSLFSTKYPEMEACRQRIGDQRRAIINRNLLTKQEIKNIKEEAKQFIIQKQQQLPHTDTTLPQTQSQNSRMQWSSELNELIMRSYYRITKLETDLTTYRPLLHQEIVSNCPELAHLSIQRIADQRRTIVNNKLLSIERLRSIKEEIRIELEQTTAEVEVEYTETELNNDLPLLQTSNDDDQPPGLQLEINNDNTRTQNLPPEMILQIEAMFTEAIDKFRETDPTSRPHIPKLRTSKKLTYIIKHLNSITIPNVITSDTDFITLQTIIYSAAYTTAKFSGAKIFEHTERLNTKREAPWWQKRLERRINNLRANIGRLTEYIRGTRSPALKVHINKIKQQFKIHSQHENHNTEISHYLDTLKQKLNSLANRLRRYRETTNRKKQNKEFYNNEKLFYRNLSKEKNDFTEKALPSTQALHDFWSNIWSIPKEHTQGQWIEVEKEKVSNISEMKFENIELSLLKSVIAKTHNWKATGSDKIHNFWFKKFTCTHLLLLQHINTFIHSPDKIPYYITEGVTYMLPKDLQDTENPAKYRPITCIQNIYKIITSCVSEAIYKHTQEHNILAEEQKGCRKHSQGCKEQLTIDAVASNQAFKHRKNIHTMFIDYKKAFDSVPHSWLIYILKHYKINPLIINFLEKIMLHWNTKLKICTDKTVETDTIPIRRGIFQGDALSPLWFCLSLNPLSSLLNSTEMGYKIKYNSLQTRLTHLMYMDDIKLLANNINDLHYLADITQTFSNDICMEFGVDKCKIQSINKGKIEATSYQLNNSEIIGPVDQAEGYKYLGYNQTRAIHHKDTKKILREKFKNRIHKILNTHLNSKNSIKAINTFAIPILTYSFGIIKWTKTDLKSLQTTINTALTKHRKHHPRACVQRLTLPEIEGGRGLMDITNLHNKQITLLRTYLYNRSNESVIHNAICQSDTFTPLMLADHTKPITTISNQQKIDEWTQKSLHGRHRTDLTNTNVDKVASNIWLKRGELFPETEGFMIAIQDQVIDTKNYRKYIIRDNTAGSDHCRHCHRQPETIQHITGACSSITQTDYKHRHDQVAAIIHQILALKHNLITEKNPYYKYTPQIILESPDYKLYWDRTILTDKTVHHNRPDITLHEKQNKTVYLIDIAIPNSHNLTTTHTNKLTKYTDLTIEIKTQWKVNTVKTIPIVISTTGIIPKTLHTSLKPLNIHPLTYITLQKAVILNTCRIVRKFLAINN

SEQ ID NO: 23908 - protein, 1142 aa, Cyaniris semiargus
MQWSSELNELIIKSYYRITKLETDLTSYRPLLHQEIVTKHPELAHLSVQRIADQRRIIINNQLLSKDHINRIKEEVQIELDRNEDLQFTEVTQNEADVSSLQMLTDLDQYQETPTNTNNEMSPNTIVQSSSRRVPNLSPEIVTQLEEIFAKTIDEFKESDPTKRPYIPKLKTSKRLSVIISHLNSYTIPKILNSKTDFNTLQTIIYSAAYTIAKFSGAKMNNDKNRINKKVEAPWWQRRLEKRIGNLRANIGRLTEYIKGTRSTKLEKHILTITQQFKMHFQYETQNTEISHFLDTLKQKLNTLTNRLRRYKETTNRKTQNKEFNTNEKSFYRKLSNHESNNSIENKALPTSEALHEFWTKIWSTPIKHNQNYWIGEDKEKLKDVTEMKFEKIGLDLLKNVIAKTHNWKAAGSDNIHNFWYKKLTCTHNLLEQHINTFIQSPDKMPHFITQGITYMLPKDQKDTENPAKYRPITCLQNIYKIITSCISESIYKHTQDHNILAEEQKGCRKHSQGCKEQLTIDAVASNQALKEKRNIHTMFVDYKKAFDSVPHSWLIYILQHYKIHPLIINFLKNIMSRWNTKLKICNHNNTAETDFIPIKRGIFQGDALSPLWFCLALNPLSSLLNSTKIGFTIKHNSQQTRLTHLMYMDDIKLFANTIYDLHRLADITQTFSKDICMEFGVDKCKIQSVNKGKIEPTSYELDNQEIIGPIDQAEGYKYLGYNQTQTIHHKDTKKIMREKFKSRLHKILHTHLNAQNTIKAINTFAIPILTYSFGIIKWTKSDLKSLQTTINTALTKHRKHHPRACVQRLTLPKIEGGRGLIDITNLHNKQITILRTYFYNRSQQSPIHNAICQSDSFTPLMLVDHTKPITLISNQQKIDTWTQKSLHGRHRMDLTSANVDKVASNMWLKRGELFPETEGFMVAIQDQIIDTKNYRKHIIRERGAGSDHCRHCHRQPETIQHITGACSSITQTDYKHRHDQVAAIIHQTLALKHNLITEKTTYYKYTPQIILDTPDYKLYWDRTILTDKTVHHNRPDITLHDKQNRTVYLIDIAIPNTHNLTSTHTSKVTKYTDLTIEIKSQWKVNSVKTVPIIISTTGIIPKTLHTSLKTLDIHPLTYITLQKAVILNTCRIVRKFLSIND

SEQ ID NO: 23909 - protein, 1022 aa, Aricia agestis
MSPNTIVQSSSRKVPNLSPEIVTQLEEMFSKTIDEFKESNPTKRPYIPKLKTSKRLSVIISHLNSNTIPKILNSETDFNTLQTIIYSSAYTIAKFSGAKMNNDKNRINKNVEAPWWQRRLEKRIGNLRANIGRLTEYIKGTRSTKLEKHILTIKQQFKMHSQYETQNTEISHFLDTLKQKLNTLTSRLRRYKETTNRKTQNKEFNINGKSFYRKLSNHESNNSTENKALPTSEALHEFWTKIWSTPIEHNQNYWIGEDKEKIKYVTEMKFEKIGLDQLKKAIAKTHNWKAAGSDNIHNFWYKKLTCTHELLEQHINTFIQLPDKMPNFITQGITYMLPKDQKDTENPAKYRPITCLQNIYKIITSCISESIYKHTQDHNILAEEQKGCRKHSQGCKEQLTIDAVASNQALKEKRNIHTMFVDYKKAFDSVPHSWLIYILQHYKIHPLIINFLKNIMSRWNTKLKICNHNNTAETDFIPIKRGIFQGDALSPLWFCLALNPLSSLLNSTKIGFTIKHNSQQTLLTHLMYMDDIKLFANTIYDLHRLADITQIFSKDICMEFGVDKCKIQSVNKGKIDPTSYELDNQEIIGPIDQAEGYKYLGYNQTQTIHHKDTKKLLREKFKSRLHKILHTYLNAQNTIKAINTFAIPILTYSFGIIKWTKSDLKSLQTTINTALTKHRKHHPRACVQRLTLPKIEGGRGLIDITNLHNKQIIILRTYFYNRSQQSPIHNAICQSDSFTPLMLVDHTKPITLTSNQQKIDTWTQKSLHGRHRMDLTSANVDKVASNMWLKRGELFPETEGFMVAIQDQIIDTKNYRKHIIRDRGAGSDHCRHCHRQSETIQHITGACSSITQTDYKHRHDQVAAIIHQTLALKHNLITEKTPYYKYTPQIILDTPDYKLYWDRTILTDKTVHHNRPDITLHDKQNRTVYLIDIAIPNTHNLTSTHTSKVTKYTDLTIEIKTQWKVNSVKTVPIIISTTGIIPKTLHTSLKTLDIHPLTYITLQKAVILNTCRIVRKFLSIND

SEQ ID NO: 23910 - protein, 1358 aa, Plebejus argus
MRLRNRNIPQAGTETKSDGESRPGPSGSGCPSYSGGGNESHQSAQPSAAAELCYHPSPSSSPTASLFSSVPSSPQSFAEAYKSFSSTNPSNISSPSRADDVVQKALVAEITAPVQGKRRMRKTWTKDMNIFIMRQYFILTKLETNIRSYLTPLHSLFTTKYPQMEASKQRIGDQRRAITYRNFLTKQEILDIKEEAKQFLQSQEQVSDINLHQTPSRRMQWSSELNELIMKSYYRITKLEMDLTSYRPLLHQEIVTKHPELAHLSVQRIADQRRIIVNNKLLSKDHIDRIKKKVQIELDRNKDLPSAEVTQSEANFDVSLSQMLTNSDQYQETPTNTNNEISPNTIIQSRSNLSPEIVTQLEEMFSKTIDEFKGTDPTKRPYIPKLKTSKKLSVTISHLNSYTIPNILNLETDFNTLQTIIYSAAYTIAKFSGAKINIDKNKINKKVETPWWQRRLEKRIDNLRANIGRLTEYIKGTRSTKLENHILNIRKQFKMHSQHETQNTEISHFLDTLKQKLNTLTNRLRRYKETTNRKTQNKEFNINEKSFYRKLSKQESNNSTENKALPTPEALHEFWTKIWSTSVEHTQNYWIEEDKEKHKDVTEMKFEKIGLDLLKNVIAKTHNWKAAGSDNIHNFWYKKLTCTHDLLEKHINTFIQSPDKMPYYITQGITYMLPKDLKDTENPAKYRPITCLQNIYKIITSCISESIYRHTQDHNILAEEQKGCRKHSQGCKEQLTIDAVASNQALKEKRNIHTMFVDYKKAFDSVPHSWLIYILQHYKIHPIIINFLKNIMSRWNTKLKICNDSNTAETDFIPIKRGIFQGDALSPIWFCLALNPLSFLLNSTNIGFTIKHNTQQTSLTHLMYMDDIKLFANTIYDLHRLADITQTFSKDICMEFGVDKCKIQSVNKGKIENTAYELDNQEIIGPIDQAEGYKYLGYNQTQTIHHKDTKKMLREKFKSRVHKILRTHLNAQNTIKAINTFAIPILTYSFGIIKWSKSDLKSLQTTINTALTKHRKHHPRACVQRMTLPKMEGGRGLIDITNLHMKQITILRTYFYNRSQQSPIHNAICQSDSFTPLMLVDHTKPITLTSNQQKIDTWTQKSLHGRHRMDLTSTNVDKVASNMWLKRGELFPETEGFMVAIQDQVIDTKNYRKHVIRDRGAGSDHCRHCHRQPETIQHITGACSSITQTDYKHRHDQVAAIIHQKLALKHNLITEKTPYYKYTPQIIIDTPDYKLYWDRTILTDKTVHHNRPDITLHDKQNRTVYLIDIAIPNTHNLTSTHTNKVTKYTDLTIEIKSQWKVNSVKTVPIIISTTGIIPKTLHTSLKTLDIHPLTYITLQKAVILNTCRIVRKFLSIND

SEQ ID NO: 23911 - protein, 1360 aa, Cyaniris semiargus
MRLRNRNIPQAGTETKSDGESRPVPSGSGCPSYSGGGNESLQPAQPSAAADLCYHHSPSSSPTVSLFSTVPSSPQSFAETYKSFSSTNPSYSSPSRADDVVQEAPAEITAPVQGKRRTRKTWTKDMNIFIMRQYFILTKLETNIRSYLTPLHSLFTTKYPEMEASKQRIGDQRRAITYRNFLTEQEILDIKEEAKQFIQSQEQVSDININLHQTPSHRMQWSSELNELIIKSYYRITKLETDLTSYRPLLHQEIVTKHPELAHLSVQRIADQRRIIINNQLLSKDHINHIKEEVQIELDRNEDLQFTEVTQNEADVSSLQMLTDLDQYQETPTNTNNEMSPNTIVQSSSRRVPNLSPEIVTQLEEIFAKTIDEFKESDPTKRPYIPKLKTSKRLSVIISHLNSYTIPKILNSKTDFNTLQTIIYSAAYTIAKFSGAKMNNDKNRINKKVEAPWWQRRLEKRIGNLRANIGRLTEYIKGTRSRKLEKHILTITQQFKMHSQYETQNTEISHFLDTLKQKLNTLTNRLRRYKETTNRKTQNKEFNTNKKSFYRKLSNHESNNSIENKALPTSEALHEFWTKIWSTPIKHNQNYWIGEDKEKLKDVTEMKFEKIGLDLLKNVIAKTHNWKAAGSDNIHNFWYKKLTCTHNLLEQHINTFIQSPDKMPHFITQGITYMLPKDQKDTENPAKYRPITCLQNIYKIITSCISESIYKHTQDHNILAEEQKGCRKHSQGCKEQLTIDAVASNQALKEKRNIHTMFVDYKKAFDSVPHSWLIYILQHYKIHPLIINFLKNIMSRWNTKLKICNHNNTAETDFIPIKRGIFQGDALSPLWFCLALNPLSSLLNSTKIGFTIKHNSQQTRLTHLMYMDDIKLFANTIYDLHRLADITQTFSKDICMEFGVDKCKIQSVNKGKIKPTSYELYNQEIIGPIDQAEGYKYLGYNQTQTIHHKDTKKIMREKFKSRLHKILHTHLNAQNTIKAINTFAIPILTYSFGIIKWTKSDLKSLQTTINTALTKHRKHHPRACVQRLTLPKIEGGRGLIDITNLHNKQITILRTYFYNRSQQSPIHNAICQSDSFTPLMLVDHTKPINLISNQQKIDTWTQKSLHGRHRMDLTSANVDKVASNMWLKRGELFPETEGFMVAIQDQIIDTKNYRKHIIRERGAGSDHCRHCHRQPETIQHITGACSSITQTDYKHRHDQVAAIIHQTLALKHNLITEKTPYYKYTPQIILDTPDYKLYWDRTILTDKTVHHNRPDITLHDKQNRTVYLIDIAIPNTHNLTSTHTSKVTKYTDLTIEIKSQWKVNSVKTVPIIISTTGIIPKTLHTSLKTLDIHPLTYITLQKAVILNTCRIVRKFLSLND

SEQ ID NO: 23912 - protein, 1342 aa, Plebejus idas
MYYVMRLRNRVIPQAGTGAIRDGESRPGPSGSGCPSYSGEGNESHQAAQSQADAESNYRLSQSSSPSSLFSSLQSSPQSYLNLRESRPSTSSYLSSSRAEDVVQEAMITAKITAPTSGKRRTRKLWTKDMNIFIMRQYFILTNLEKNTKTYLTQLHSIFTSKYPDMEATKQRIGDQRRAIVNCKLLTDKEIDHIKEEVKNTLQTRQTLPDYNINSPNNLTRKMRWTDELNETIMTCYYKITKLETDLTTYRPLLHQEVICKCPEIAHLSVQRIADQRRSIVNNRLLPTDHLARLKEQVRREIQDCITEHLPEDIDQLGETNTTNSIELLENLEHSPQTYNEEINSNITQVADNIPNKMLTSELSKELEDMLNETIDKFKYTDPTARPRLPKLKYSKKLSAIIKDLNSNLLPKKLNEEIDFNELQTLIYSAAYTTVKFSGAKIYVDSENITKKAKEAPWWQRRLEDRIRNLRASIGRLTEYRKGTRSPALENHINKIKEQFKIHSRHEVGNTDIAHFLDTLKQKLNTLANRLKRYKETTNRKKQNKEFFNNEKLFYRNLLKHTNSDTTENISIPSTQSLQEFWSNIWSKPIEHNQNSWIQEDKERLNNVSEMAFEQIELDLLRAVINKTHNWKATGSDNIHNFWYKKLACTHKILHTHINTFIRSPDSMPLYITQGTTYMLPKDLDDTGNPAKYRPITCLQNIYKIITACLSESIYKHTQQNNILSEEQKGCRKKSQGCKEQLTIDAVATKQALKQKRNIYTMFIDYQKAFDSVPHSWLIYILKHYKIHPVIISFLEKIMPQWSTKLKLGSTSNPIETEYIPIRRGIFQGDALSPLWFCLALNPLSSLLNLNSTGFKINHNRQQTRITHLMFMDDIKLFASTLAEIHTLADITHLFSSDICMQFGIDKCKIQAVNKGKLENTSYELPNQEIINAIDPIEGYKYLGYYQVQGINHKNAKKLLKEKFKTRLHRILHTHLNSRNTIKAINTFAVPILTYSFGVISWSQTDLKTLQRAINTAMTKHRKHHPRSCVQRLTLPKTEGGRGLIDITNLHNKQIKLLRTYFHNHSSSSPLHHAVCQADTFTPLSLANHSKNINVTTDQEKIDAWTHKSLHGRHRTDLTNQYVDKAASNVWLRRGELFPETEGFMMAIQDQVIDTKNYRKHIIRSSDTNSDHCRHCHKYPETIQHITGACSSITQTDYKHRHDQVAAIVHQTLALKHNLITDSTPYYKYTPQVILESSDCKLYWDRTILTDKTVHHNRPDITLHDKINRIVYLIDVAIPNSHNLTTTHTNKVTKYTDLTIELKSQWKVNTVKTVPIIISSTGVIPKTLHNSLKVLDMHPLSY

SEQ ID NO: 23913 - protein, 1365 aa, Celastrina argiolus
MRLRNRNIPQAGTGARSDGESRPGPSGLGCPSYSGGGNESHQAAQSRTVADQCYHPSPSASPTLSLFSSVPSSPQSFAKTQESYSSTSSLTFSSPIRAEDVVQEATTAEITVPVQGTRRTRKTWTRDMNIFIMRHYFIFTKLETNKRAYLTPLHSLFTTKYPEMEASKQRIGDQRRAITYRNLLTEQEITDIKEEAKQFMQNQEPFINTNLQETQTHRMQWSSELNELIMKSYYRITKLETDLTTYRPLLHQDIILKCPELSHLSIQRIADQRRIIVNNRLLSLDHLNRIKEEVRIELGNNSDQHFIEEAETGLNINLSQNFNTQRRVIPIDNNNYEIRPEIIQPGHTYTPNLSPEMVIQLDSSSCMTILFTETINEFKMIEPTKRPHIPKLKTSKKLSIIISHLNSKTIPNILNSDTDYNTLQTIIYSAAYTIAKFSGARILKDTDRINKKTKDPWWQRRLENRISNLRADIGRLTEHIRGVRSSKLDKHIHNIKQKFKIHSQHETQNTEISHYLDTLKQKLNTYTNRLRRYRETTDRKIQNKEFNNNEKLFYRKLCKQENNNSTENKALPTPQALHEFWSKIWSIPIEHKQGYWIEEEKEKLKDITEMKFEKIGLGLLKTVIAKTHNWKATGSDNIHNFWYKKLTCTHDVLHQHINTFIHSPDKMPHYITQGITYMLSKDLKDTENPAKYRPITCLQNIYKIMTSCLSESIYKHAQEHNILAEEQKGCRKHSQGCKEQLTIDAVASNQALKEKRNIHTMFIDYKKAFDSVPHSWLINILKLYKIHPLIVSFLENIMPHWNTKLKICNDNMNKTSETDFIPIRRGIFQGDALSPLWFCLALNPLSSLLNTTEIGFTIKHNSQQTRLTHLMYMDDIKLFSNTINDLHRLADITQSFSNDICMEFGVDKCKTQSVINGKIKNTIYELENHEIIGAVDQAEGYKYLGYNQTQAIKHKETKKILKDKFKCRIHKILHTHLNSQNTIKAINTFAIPILTYSFGIIKWSKTDLKALQTTINTALTKHRKHHPRACVQRLTLPKIEGGRGLIDITNLHNKQIILLRSYFYNRLHESTIHKAVCQSDSFTPLLLADQSKINTLVTNQQKIDAWTQKSLHGRHRMDLTNTNVDKLASNTWLKRGELFPETEGFIIAIQDQVIDTKNYRKYIIRDSSAGSDHCRHCHRQPETIQHITGACSSITQTDYKHRHDQVAAIIHQILALNHNLITDKTPYYKYTPQIILDSSDYKLYWDRTILTDKTVHHNRPDITLHDKRKRIVYLIDIAIPNTHNLTTTHTNKVTKYTDLTIEIKSQWKVNTVKTIPIIISTTGIIPKTLHTSLKTLDIHPLTYITIQKAVILNTCRIVRKFLAIN

SEQ ID NO: 23914 - protein, 1359 aa, Celastrina argiolus
MRLRNRNIPQAGTGARSDGESRPGPSGLGCPSYSGGGNESHQAAQSRTVADQCYHPSPSASPTLSLFSSVPSSPQSFAKTQESYSSTSSLTFSSPIRAEDVVQEATTAEITVPVQGTRRTRKTWTRDMNIFIMRHYFIFTKLETNKRAYLTPLHSLFTTKYPEMEASKQRIGDQRRAITYRNLLTEQEITDIKEEAKQFMQNQEPFINTNLQETQTHRMQWSSEHNELIMKSYYRITKLETDLTTYRPLLHQDIILKCPELSHLSIQRIADQRRIIVNNRLLSLDHLNRIKEEVRIELGNNSDQHFIEEAETGLNINLSQNFNTQRRVIPIDNNNYEIRPEIIQPGHTYTPNLSPEMVIQLEEMFTETINEFKMIEPTKRPHIPKLKTSKKLSIIISHLNSKTIPNILNSDTDYNTLQTIIYSAAYTIAKFSGARILKDTDRINKKTKDPWWQRRLENRISNLRADIGRLTEHIRGVRSSKLDKHIHNIKQKFKIHSQHETQNTEISHYLDTLKQKLNTYTNRLRRYRETTDRKIQNKEFNNNEKLFYRKLCKQENNNSTENKALPTPQALHEFWSKIWSIPIEHKQGYWIEEEKEKLKDITEMKFEKIGLGLLKTVIAKTHNWKATGSDNIHNFWYKQLTCTHDVLHQHINTFIHSPDKMPHYITQGITYMLSKDLKDTENPAKYRPITCLQNIYKIMTSCLSESIYKHAQEHNILAEEQKGCRKHSQGCKEQLTIDAVASNQALKEKRNIHTMFIDYKKAFDSVPHSWLINILKLYKIHPLIVSFLENIMPHWNTKLKICNDNMNKTSETDFIPIRRGIFQGDALSPLWFCLALNPLSSLLNTTEIGFTIKHNSQQTRLTHLMYMDDIKLFSNTINDLHRLADITQSFSNDICMEFGVDKCKPQSVINGKIKNTIYELENHEIIGAVDQAEGYKYLGYNQTQAIKHKETKKILKDKFKCRIHKILHTHLNSQNTIKAINTFAIPILTYSFGIIKWSKTDLKALQTTINTALTKHRKHHPRACVQRLTLPKIEGGRGLIDITNLHNKQIILLRSYFYNRLHESTIHKAVCQSDSFTPLLLADQSKINTLVTNQQKIDAWTQKSLHGRHRMDLTNTNVDKLASNTWLKRGELFPETEGFIIAIQDQVIDTKNYRKYIIRDSSAGSDHCRHCHRQPETIQHITGACSSITQTDYKHRHDQVAAIIHQILALNHNLITDKTPYYKYTPQIILDSSDYKLYWDRTILTDKTVHHNRPDITLHDKRKRIVYLIDIAIPNTHNLTTTHTNKVTKYTDLTIEIKSQWKVNTVKTIPIIISTTGIIPKTLHTSLKTLDIHPLTYITIQKAVILNTCRIVRKFLAIN

SEQ ID NO: 23915 - protein, 1361 aa, Celastrina argiolus
MRCDFEIETYPRRVPEREAMENPAPGLRVWAAPRILGGGNESHQAAQSRTVADQCYHPSPSASPTLSLFSSVPSSPQSFAKTQESYSSTSSLTFSSPIRAEDVVQEATTAEITVPVQGTRRTRKTWTRDMNIFIMRHYFIFTKLETNKRAYLTPLHSLFTTKYPEMEASKQRIGDQRRAITYRNLLTEQEITDIKEEAKQFMQNQEPFINTNLQETQTHRMQWSSELNELIMKSYYRITKLETDLTTYRPLLHQDIILKCPELSHLSIQRIADQRRIIVNNRLLSLDHLNRIKEEVRIELGNNSDQHFIEEAETELNISFSQHFNTQRRVIPIDNNNYEIRPEIIQAGHTYTPNLSPEMVIQLEEMFTETINEFKMIEPTKRPHIPKLKTSKKLSIIISHLNSKTIPNILNSDTDYNTLQTIIYSAAYTIAKFSGARILKDTDRINKKNKDPWWQRRLENRISDLRADIGRLTEHIRGVRSSKLDKHIHNIKQKFKIHSQHETQNTEISHYLDTLKQKLNTYTNRLRRYRETTDRKIQNKEFNNNEKLFYRKLCKQENNNSTENKALPTPQALHEFWSKIWSIPIEHKQGYWIEEEKEKLKDITEMKFEKIGLGLLKTVIAKTHIWKATGSDNIHNFWYKKLTCTHDVLHQHINTFIHSPDKMPHYITQGITYMLSKDLKDTENPAKYRPITCLQNIYKIMTSCLSESIYKHAQEHNILAEEQKGCRKHSQGCKEQLTIDAVASNQALKEKRNIHTMFIDYKKAFDSVPHSWLINILKLYKIHPLIVSFLENIMLHWNTKLKICNDNMNKTSETDFIPIRRGIFQGDALSPLWFCLALNPLSSLLNTTEIGFTIKHNSQQTCLTHLMYMDDIKLFSNTINDLHRLADITQSFSNDICMEFGVDKCKTQSVINGKIKNTIYELENHEIIGAVDQAEGYKYLGYNQTQAIKHKETKKILKDKFKCRIHKILQTHLNSQNTIKAINTFAIPILTYSFGIIKWRKTDLKALQTTINTALTKHRKHHPRACVQRLTLPKIEGGRGLIDITNLHNKQIILLRSYFYNRLHESTIHKAVCQSDSFTPLLLADQSKINTLVTNQQKIDAWTQKSLHGRHRMDLTNTNVDKLASNTWLKRGELFPETEGFMIAIQDQVIDTKNYRKYIIRDSSAGSDHCRHCHRQPETIQHITGACSSITQTDYKHRHDQVAAIIHQILALNHNLITDKTPYYKYTPQIILDSSDYKLYWDRTILTDKTVHHNRPDITLHDKRKRIVYLIDIAIPNTHNLTTTHTNKVTKYTDLTIEIKSQWKVNTVKTIPIIISTTGIIPKTLHTSLKTLDIHPLTYITIQKAVILNTCRIVRKFLAIN

SEQ ID NO: 23916 - protein, 863 aa, Celastrina argiolus
MYSFYPQLRPRGIMIVAKTLPNNITGTVPIIIIIIIIKIQNKEFHNNEKLFYRKLCKQENNDSTENKALPTPQALHEFWSKIWSIPIEHKQGYWIEEEKEKLKDITEMKFENIGLGLLKTVIAKTHNWKATGSDNIHNFWYKKLTCTHDVLHQHINTFIHSPDKMPHYITEGITYMLSKDLKDTENPAKYRPITCLQNIYKIMTSCLSESIYKHAQEHNILAEEQKGCRKHSQGCKEQLTIDAVASNQALKEKRNIHTMFIDYKKAFDSVPHSWLINILKLYKIHPLIVSFLENIMPHWKTKLKICNDNMNKTSETDFIPIRRGIFQGDALSPLWFCLALNPLSSLLNTTEIGFTIKHNSQQTRLTHLMYMDDIKLFSNTINDLHRLADITQSFSNDICMEFGVDKCKTQSVNKGKIENTIYELENHEIIGAVDQAEGYRYLGYNQTQAIKHKETKKILKDKFKCRIHKILHTHLNSQNTIKAINTFAIPILTYSFGIIKWSKTDLKALQTTINTALTKYRKHHPRACVQRLTLPKIEGGRGLIDITNLHNKQIILLRSYFYNRLHESTIHKAVCQSDSFTPLLLADQSKINTLVTNQQKIDAWTQKSLHGRHRMDLTNTNVDKLASNTWLKRGELFPETEGFMIAIQDQVIDTKNYRKYIIRDSSTGSDHCRHCHRQPETIQHITGACSSITQTDYKHRHDQVASIIHQILALNHNLITDKTPYYKYTPQIILDSSDYKLYWDRTILTDKTVHHNRPDITLHDKRKRIVYLIDIAIPNTHNLTTTHTNKVTKYTDLTIEIKSQWKVNTVKTIPIIISTTGIIPKTLHTSLKTLDIHPLTYITIQKAVILNTCRIVRKFLAIN

SEQ ID NO: 23917 - protein, 1363 aa, Celastrina argiolus
MRLRNRNIPQAGTGARSDGESRPGPSGLGCPSYSGGGNESHQAAQSSTVADQCYHPSPSASPTLSLFSSVPSSPQSFAKTQESYSSTSSLDFSSPIRAEDVVQEATIAEITVPVQGTRRTRKTWTRDMNIFIMRHYFIFTKLETNKRAYLTPLHSLFTTKYPEMEASKQRIGDQRRAITYRNLLTEQEITDIKEEAKQFMQNQEPFINTNLQETQTHRMQWSSELNELIMKSYYRITKLETDLTTYRPLLHQDIILKCPELSHLSIQRIADQRRIIVNNRLLSLDHLNRIKEEVRIELGNNSNQHFIEEAETGLNINLSQLQTQNFNTQRRVIPIDSNNYEIRPEIIQPGHTYTPNLSPEMVIQLEEMFTETINEFKMIEPTKRPHIPKLKTSKKLSIIISHLNSKTIPNILNSDTDYNTLQTIIYSAAYTIAKFSGARILKDTDRINKKTKDPWWQRRLENRISNLRADIGRLTEHIRGVRSSKLDKHIHNIKQKFKIHSQHETQNTEISHYLDTLKQKLNTYTNRLRRYRETTDRKIQNKEFNNNEKLFYRKLCKQENNDSTENKALPTPQALHEFWSKIWSIPIEHKQGYWIEEEKEKLKDITEMKFENIGLGLLKTVIAKTHNWKATGSDNIHNFWYKKLTCTHDVLHQHINTFIHSPDKMPHYITQGITYMLSKDLKDTENPAKYRPITCLQNIYKIMTSCLSESIYKHAQEHNILAEEQKGCRKHSQGCKEQLTIDAVASNQALKEKRNIHTMFIDYKKAFDSVPHSWLINILKLYKIHPLIVSFLENIMPHWNTKLKICNDNMNKTSETDFIPIRRGIFQGDALSPLWFCLALNPLSSLLNTTEIGFTIKHNSQQTRLTHLMYMDDIKLFSNTINDLHRLADITQSFSNDICMEFGVDKCKTQSVNKGKIENTIYELENHEIIGAVDQTEGYRYLGYNQTQAIKHKETKKILKDKFKCRIHKILHTHLNSQNTIKAINTFAIPILTYSFGIIKWSKTDLKALQTIINTALTKHRKHHPRACVQRLTLPKIEGGRGLIDITNLHNKQIILLRSYFYNRLHESTIHKAVCQSDSFTPLLLADQSKINTLVTNQQKIDAWTQKSLHGRHRMDLTNTNVDKLASNTWLKRGELFPETEGFMIAIQDQVIDTKNYRKYIIRDSSAGSDHCRHCHRQPETIQHITGACSSITQTDYKHRHDQVAAIIHQILALNHNLITDKTPYYKYTPQIILDSSDYKLYWDRTILTDKTVHHNRPDITLHDKRKRIVYLIDIAIPNTHNLTTTHTNKVTKYTDLTIEIKSQWKVNTVKTIPIIISTTGIIPKTLHTSLKTLDIHPLTYITIQKAVILNTCRIVRKFLAIN

SEQ ID NO: 23918 - protein, 1359 aa, Celastrina argiolus
MRLRNRNIPQAGTGARSDGESRPGPSGLGCPSYSGGGNESHQAAQSRTVADQCYHPSPSASPTLSLFSSVPSSPQSFAKTQESYSSTSSLTFSSPIRAEDVVQEATTAEITVPVQGTRRTRKTWTRDMNIFIMRHYFIFTKLETNKRAYLTPLHSLFTTKYPEMEASKQRIGDQRRAITYRNLLTEQEITDIKEEAKQFMQNQEPFINTNLQETQTHRMQWPSELNELIMKSYYRITKLETDLTTYRPLLHQDIILKCPELSHLSIQRIADQRRIIVNNRLLSLDHLNRIKEEVRIEIGNNSDQHFIEEAETGLNINLSQNFNTQRRVILIDNNNYEIRPEIIQPGHTYTPNLSPEMVIQLEEMFTETINEFKMIEPTKRPHIPKLKTSKKLSIIISHLNSKTIPNILNSDTDYNTLQTIIYSAAYTIAKFSGARILKDTDRINKKTKDPWWQRRLENRISDLRADIGRLTEHIRGVRSSKLDKHIHNIKQKFKIHSQHETQNTEISHYLDTLKQKLNTYTNRLRRYRETTDRKIQNKEFNNNEKLFYRKLCKQENNNSTENKALPTPQALHEFWSKIWSIPIEHKQGYWIEEEKEKLKDITEMKFEKIGLGLLKTVIAKTHNWKATGSDNIHNFWYKKLTCTHDVLHQHINTFIHSPDKMPHYITQGITYMLSKDLKDTENPAKYRPITCLQNIYKIMTSCLSESIYKHAQEHNILAEEQKGCRKHSQGCKEQLTIDAVASNQALKEKRNIHTMFIDYKKAFDSVPHSWLINILKLYKIHPLIVSFLENIMPHWNTKLKICNDNMNKTSETDFIPIRRGIFQGDALSPLWFCLALNPLSSLLNTTEIGFTIKHNSQQTRLTHLMYMDDIKLFSNTINDLHRLADITQSFSNDICMEFGVDKCKTQSVINGKIKNTIYELENHEIIGEVDQAEGYKYLGYNQTQAIKHKETKKILKDKFKCRIHKILHTHLNSQNTIKAINTFAIPILTYSFGIIKWSKTDLKALQTTINTALTKHRKHHPRACVQRLTLPKIEGGRGLIDITNLHNKQIILLRSYFNNRLHESTIHKAVCQSDSFTPLLLADQSKINTIVTNQQKIDAWTQKSLHGRHRMDLTNTNVDKLASNTWLKRGELFPETEGFMIAIQDQVIDTKNYRKYIIRDSSAGSDHCRHCHRQPETIQHITGACSSITQTDYKHRHDQVAAIIHQILALNHNLITDKTPYYKYTPQIILDSSDYKLYWDRTILTDKTVHHNRPDITLHDKRKRIVYLIDIAIPNTHNLTTTHTNKVTKYTDLTIEIKSQWKVNTVKTIPIIISTTDIIPKTLHTSLKTLDLHPLTYITIQKAVILNTCRIVRKFLAIN

SEQ ID NO: 23919 - protein, 1003 aa, Celastrina argiolus
MVIQLEEMFTETINEFKMIEPTKRPHIPKLKTSKKLSIIISHLNSKTIPNILNSDTDYNTLQTIIYSAAYTIAKFSGARILKDTDRINKKTKDPWWQRRLENRISNLRADIGRLTEHIRGVRSSKLDKHIHNIKQKIKIHSQHETQNTEISHYLDTLKQKLNTYTNRLRRYRETTDRKIQNKEFHNNEKLFYRKLCKQENNDSTENKALPTPQALHEFWSKIWSIPIEHKQGYWIEEEKEKLKDITEMKFENIGLGLLKTVIAKTHNWKATGSDNIHNFWYKKLTCTHNVLHQHINTFIHSPDKMPHYITQGITYMLSKDLKDTENPAKYRPITCLQNIYKIMTSCLSESIYKHAQEHNILAEEQKGCRKHSQGCKEQLTIDAVASNQALKEKRNIHTMFIDYKKAFDSVPHSWLINILKLYKIHPLIVSFLENIMPHWNTKLKICNDNMNKTSETDFIPIRRGIFQGDALSPLWFCLALNPLSSLLNTTEIGFTIKHNSQQTRLTHLMYMEDIKLFSNTINDLHRLADITQSFSNDICMEFGVDKCKTQSVNKGKIENTIYELENHEIIGAVDQAEGYRYLGYNQTQAIKHKETKKILKDKFKCRIHKILHTHLNSQNTIKAINTFAIPILTYSFGIIKWSKTDLKALQTTINTALTKHRKHHPRACVQRLTLPKIEGGRGLIDITNLHNKQIILLRSYFYNRLHESTIHKAVCQSDSFTPLLLADQSKINTLVTNQQKIDAWTQKSLHGRHRMDLTNTNVDKLASNTWLKRGELFPETEGFMIAIQDQVIDTKNYRKYIIRDSSAGSDHCRHCHRQPETIQHITGACSSITQTDYKHRHDQVAAIIHQILALNHNLITDKTPYYKYTPQIILDSSDYKLYWDRTILTDKTVHHNRPDITLHDKRKRIVYLIDIAIPNTHNLTTTHTNKVTKYTDLTIEIKSQWKVNTVKTIPIIISTTGIIPKTLHTSLKTLDIHPLTYITIQKAVILNTCRIVRKFLAIN

SEQ ID NO: 23920 - protein, 754 aa, Colias croceus
MKFEQIHLDLFKNVIAKTHNWKATGTDNIHNFWYKKLTSTHELLLKHINTFISSPDTMPQYITQGITYMLPKDPSDTSNPAKYRPITCLQNIYKIITSALSETIHRHIQEHNILSEEQKGCRKNSQGCKEQLTIDAVVSKLALKQKRSIYTMYIDYKKAFDSIPHSWLLYILKHYKINPIIIHFLKNTMLNWYTKLKICNFDKTTETDFIPIRRGIFQGDALSPLWFCLALNPLSHMLNKNNIGFKITQYTENITLSHLMYMDDIKLFAGTLNEIHTLVDITQIFSKDVCMEFGIDKCKIQSINRGVIEHNVYQLANHDTIETVDPAEGYKYLGYYQSQEIHHKDTKKLLQDNFRQRLHKILHTHLNAKNTIKAINTFAIPVLTYSFGIIRWTKTELATLQRIINTTMTKHRKHHPRACIQRLTLPKIEGGRGIIDITNLHNKQITLLRAFFHNRSHQSRLHQVICQADTYTPLTLSDFNKQINIITKQEKIDLWTQKSLHGRHRLDLTNPIVDKVASNAWLKRGELFPETEGFMLAIQDQIIDTKNYRKYIIRDSSSRSDHCRHCHKQPETIQHITGACSSITQTDYKHRHDQVAAIIHQTLAYKYQLITEKVPYYKYTPQIILDTADFKIYWDRTILTDKTIHHNRPDITLHDKKNKTVYLIDVAIPNTHNLNTTHTSKLTKYTDLTIELKSQWQVNTVKTIPIIISSTGVIPKTLHASLKILNLHPLTFILLQKAVILNTCRIVRKFLSID

SEQ ID NO: 23921 - protein, 1355 aa, Colias croceus
MRLRNRVLPQAGTKANRDGESRPEPMSSGCPSYSGGGTVSPIVSCPTATTQPVESISCSSPSSLFSSIPSSPLSLLHYQESSSSNVSPSSSLQSIGDVVQEATSAKVTAPAPDGRRTRKTWTKEMNIFIMRHYFILTNLESNTRTYLTPLHARFTAEYPEMNVGKQRIGDQRRAIVQRNFLTKQEINNIKEEIRILLQNPTSAEVNAATEHTQQGRIRWSDNLNETIMRSYYRLTNLETDLTTYRPLLHQDIITKCPSIAHLSVQRIADQRRSIVNNHLLSNDRLNRIREEVRNELNTSALQLQSQHIDENISVSTIHPSQIHNEHQTLQSTQTTTNDDITNPMQITDDPPCLTLELAQQLEDMYAETYNKFKDSNPTTRPYIPKLKSSKKLSSIINHLNNVTLPNIFTPDTSFNIIQTSIYCAAYTSAKFYGARIRDTSLNTIKPQAPWWQRRLEDRISDLRANIGRLTEYARGIRSPALEKHLSKIKQKYKIHTQHETQNTDIAHFLDTLKQKLNALANRLKRYKLTTLRKTQNKQFCNSEKLFYRKLTQHQSQQENSATLPTPESLKAFWSNIWSNQIEHQHNHWIEEDKERLKDTPEMKFEQIHLDLFKNVIAKTHNWKATGTDNIHNFWYKKLTSTHELLLKHINTFISSPDTMPQYITQGITYMLPKDPSDTSNPAKYRPITCLQNIYKIITSALSETIHRHIQEHNILSEEQKGCRKNSQGCKEQLTIDAVVSKLALKQKRSIYTMYIDYKKAFDSIPHSWLLYILKHYKINPIIIHFLKNTMLNWYTKLKICNFDKTTETDFIPIRRGIFQGDALSPLWFCLALNPLSHMLNKNNIGFKITHNTENITLSHLMYMDDIKLFAGTLNEIHTLVDITQIFSKDVCMEFGIDKCKIQSINRGVIEHNVYQLANHDTIETVDPAEGYKYLGYYQSQEIHHKDTKKLLQDNFRQRLHKILHTHLNAKNTIKAINTFAIPVLTYSFGIIRWTKSELATLQRIINTTMTKHRKHHPRACIQRLTLPKIEGGRGIIDITNLHNKQITLLRAFFHNRSHQSRLHQVICQADTYTPLTLSDFNKQINIITKQEKIDLWTQKSLHGRHRLDLTNPIVDKVASNAWLKRGELFPETEGFMLAIQDQIIDTKNYRKYIIRDSSSRSDHCRHCHKQPETIQHITGACSSITQTDYKHRHDQVAAIIHQTLAYKYQLITEKVPYYKYTPQIILDTADFKIYWDRTILTDKTIHHNRPDITLHDKKNKTVYLIDVAIPNTHNLNTTHTSKLTKYTDLTIELKSQWQVNTVKTIPIIISSTGVIPKTLHASLKILNLHPLTFILLQKAVILNTCRIVRKFLSID

SEQ ID NO: 23922 - protein, 1353 aa, Colias croceus
MRLRNRVLPQAGTKANRDGESRPEPTSSGCPSYSGGGTVSPIVSCPTATTQSVESISCSSPSSLFSSVPSSPLSLLHYQESSSSNVSPSSSLQSIGDVVQEATSAKVTAPAPDGRRTRKTWTKEMNIFIMRHYFILTNLESNTRTYLTPLHARFTAEYPEMNVGKQRIGDQRRAIVQRNFLTKQEINNIKEEIRILLQNPTPAEVNATTEHTQQGRIRWSDNLNETIMRSYYRLTNLETDLTTYRPLLHQDIITKCPSIAHLSVQRIADQRRSIVNNHLLSIDRLNRIREEVRNELNTSALQSQHIDENISVSTIHPSQIHNEHQTLQSTQTTTNDDITNPMQITDDPPSLTLELAQQLEDMYAETYNKFKDSNPTTRPYIPKLKSSKKLSSIINHLNNVTLPNIFTPDTSFNIIQTSIYCAAYTSAKFYGARIRDTSLNTIKPQAPWWQRRLEDRISELRANIGRLTEYARGIRSPALEKHLSKIKQKYKIHTQHETQNTDIAHFLDTLKQKLNALANRLKRYKLTTLRKTQNKQFANSEKLFYRKLTQHQSQRENSATLPTPESLKAFWSNIWSNQIEHQHNHWIEEDKERLKDTPEMKFEQIHIDLFKNVIAKTHNWKATGTDNIHNFWYKKLTSTHELLLKHINTFISSPDTMPQYITQGITYMLPKDPSDTSNPAKYRPITCLQNIYKIITSALSETIHRHIQEHNILSEEQKGCRKNSQGCKEQLTIDAVVSKLALKQKRSIYTMYIDYKKAFDSIPHSWLLYILKHYKINPIIIHFLKNIMLNWYTKLKICNFDKTTETDFIPIRRGIFQGDALSPLWFCLALNPLSHMLNKNNIGFKITHNTENITLSHLMYMDDIKLFAGTLNEIHTLVDITQIFSKDVCMEFGIDKCKIQSINRGVIEHNVYQLANHDTIETVDPAEGYKYLGYYQSQEIHHKDTKKLLQDNFRQRLHKILHTHLNAKNTIKAINTFAIPVLTYSFGIIRWTKSELATLQRIINTTMTKHRKHHPRACIQRLTLPKIEGGRGIIDITNLHNKQITLLRAFFHNRSHQSRLHQVICQADTYTPLTLSDFNKQINIITKQQKIDLWTQKSLHGRHRLDLTNPIVDKVASNAWLKRGELFPETEGFMLAIQDQIIDTKNYRKYIIRDSSSRSDHCRHCHKQPETIQHITGACSSITQTDYKHRHDQVAAIIHQTLAYKYQLITEKVPYYKYTPQIILDSADFKIYWDRTILTDKTIHHNRPDITLHDKKNKTVYLIDVAIPNTHNLNTTHTSKLTKYTDLTIELKSQWQVNTVKTIPIIISSTGVIPKTLHASLKILNLHPLTFILLQKAVILNTCRIVRKFLSID

SEQ ID NO: 23923 - protein, 1353 aa, Colias croceus
MRLRNRVLPQAGTKANRDGESHPEPMSSGCPSYSGGGTVSPIVSCPTATTQPVESISCSSPSSLFSSIPSSPLSLLHYQESSSSNVSPSSSLQSIGDVVQEATSAKVTAPAPDGRRTRKTWTKEMNIFIMRHYFILTNLESNTRTYLTPLHARFTAEYPEMNVGKQRIGDQRRAIVQRNFLTKQEINNIKEEIRILLQNPTSAEVNAATEHTQQGRIRWSDNLNETIMRSYYRLTNLETDLTTYRPLLHQDIITKCPSIAHLSVQRIADQRRSIVNNHLLSNDRLNRIRKEVRNELNTSALQSQHIDENISVSTIHPSQIHNEHQTLQSTQTTTNDDITNPMQITDDPPCLTLELAQQLEDMYAETYNKFKDSNPTTRPYIPKLKSSKKLSSIINHLNNVTLPNIFTPDTSFNIIQTSIYCAAYTSAKFYGARIRDTSLNTIKPQAPWWQRRLEDRISDLRANIGRLTEYARGIRSPALEKHLSKIKQKYKIHTQHETQNTDIAHFLDTLKQKLNALANRLKRYKLTTLRKTQNKQFCNSEKLFYRKLTQHQSQQENSATLPTPESLKAFWSNIWSNQIEHQHNHWIEEDKERLKDTPEMKFEQIHLDLFKNVIAKTHNWKATGTDNIHNFWYKKLTSTHELLLKHINTFISSPDTMPQYITQGITYMLPKDPSDTSNPAKYRPITCLQNIYKIITSALSETIHRHIQEHNILSEEQKGCRKNSQGCKEQLTIDAVVSKLALKQKRSIYTMYIDYKKAFDSIPHSWLLYILKHYKINPIIIHFLKNTMLNWYTKLKICNFDKTTETDFIPIRRGIFQGDALSPLWFCLALNPLSHMLNKNNIGFKITHNTENITLSHLMYMDDIKLFAGTLNEIHTLVDITQIFSKDVCMEFGIDKCKIQSINRGVIEHNVYQLANHDTIETVDPAEGYKYLGYYQSQEIHHKDTKKLLQDNFRQRLHKILHTHLNAKNTIEAINTFAIPVLTYSFGIIRWTKSELATLQRIINTTMTKHRKHHPRACIQRLTLPKIEGGRGIIDITNLHNKQITLLRAFFHNRSHQSRLHQVICQADTYTPLTLSDFNKQINIITKQEKIDLWTQKSLHGRHRLDLTNPIVDKVASNAWLKRGELFPETEGFMLAIQDQIIDTKNYRKYIIRDSSSRSDHCRHCHKQPETIQHITGACSSITQTDYKHRHDQVAAIIHQTLAYKYQLITEKVPYYKYTPQIILDTADFKIYWDRTILTDKTIHHNRPDITLHDKKNKTVYLIDVAIPNTHNLNTTHTSKLTKYTDLTIELKSQWQVNTVKTIPIIISSTGVIPKTLHASLKILNLHPLTFILLQKAVILNTCRIVRKFLSID

SEQ ID NO: 23924 - protein, 1012 aa, Colias croceus
MQITDDPPSLTLELAQQLEDMYAETYNKFKDSDPTTRPYIPKLKSSKKLSSIINHLNNVTLPNIFTPDTSFNIIQTSIYCAAYTSAKFYGARIRDTSLNTIKPQAPWWQRRLEDRISELRANIGRLTEYARGIRSPALEKHLSKIKQKYKIHTQHETQNTDIAHFLDTLKQKLNALANRLKRYKLTTLRKTQNKQFCNSEKLFYRKLTQHQSQRENSATLPTPESLKAFWSNIWSNQIEHQHNHWIEEDKERLKDTPEMKFEQIHIDLFKNVIAKTHNWKATGTDNIHNFWYKKLTSTHELLLKHINTFISSPDTMPQYITQGITYMLPKDPSDTSNPAKYRPITCLQNIYKIITSALSETIHRHIQEHNILSEEQKGCRKNSQGCKEQLTIDAVVSKLALKQKRSIYTMYIDYKKAFDSIPHSWLIYILKHYKINPIIIHFLKNIMLSWYTKLKICNFDKTTETDFIPIRRGIFQGDALSPLWFCLALNPLSHMLNKNNIGFKITHNTENITLSHLMYMDDIKLFAGTLNEIHTLVDITQIFTKDVCMEFGIDKCKIQSINRGVIEHNVYQLANHDTIETVDPAEGYKYLGYYQSQEIHHKDTKKLLQDNFRQRLHKILHTHLNAKNTIKAINTFAIPVLTYSFGIIRWTKSELATLQRIINTTMTKHRKHHPRACIQRLTLPKIEGGRGIIDITNLHNKQITLLRAFFHNRSHQSRLHQVICQADTFTPLTLSDFNKQINIITKQEKIDLWTQKSLHGRHRLDLTNPIVDKVASNAWLKRGELFPETEGFMLAIQDQIIDTKNYRKYIIRDSSSRSDHCRHCHKQPETIQHITGACSSITQTDYKHRHDQVAAIIHQTLAYKYQLITEKVPYYKYTPQIILDSADFKIYWDRTILTDKTIHHNRPDITLHDKKNKTVYLIDVAIPNTHNLNTTHTSKLTKYTDLTIELKSQWQVNTVKTIPIIISSTGVIPKTLHASLKILNLHPLTFILLQKAVILNTCRIVRKFLSID

SEQ ID NO: 23925 - protein, 1363 aa, Plebejus argus
MRLRNRCIPQAGTEANSDGESRPGPSGPGCPSYSGGGNESRQTAQSSAAADQCYHPSPSSSATVSLFSSAPSSPQSFTEIYKSFSSSNSSNSSPTTRPEDVVQEARTAEIAAPIQGKTCKRKTWTKDMNIFIMHHYFILTKLETNMRSYLTPLHALFISKYPEMEASKQRIGDQRRAITYRNLLTKKEILDIKEEAKQFIQTKKQLPDTDLHHTPPRRMQWSSELNELIIRTYYRITKLETDLTSYRPLLHQEIVSKCPELAHLSVQRIADQRRIIINNKLLSLDHINRIKEEVKIELNHNTDTHFIEETQSQANVDISLSQFLTPDLNNYQEIPIDNNSVIGPDTAAEPSSINVTNLPAETVAQMEEMLLQTIEEFKETDPTKRPYIPKLKTSKKLTIIVNHLNSNTVPKLLNSNTDFNTLQTIIYSVAYTTAKFNGAKINRDINKVNKKVEAPSWQKRLEKRIGNLRANIGRLSQYIRGTRSNKLEKHIKIIKQQFKIHSQHETPNTEISHFLDTLKQKLNTLTNRLRRYKESTNRKTQNKEFNSNERSFYRKLSRQENNDPPENKILPTPQALKEFWTKVWSTPIEHKQNYLIEKGKEKLTDVTEMKFEKIGIDLLKNVIAKTHNWKAPGSDNIHNYWYKKLTCTHNLLEQHINKFIHSPDEMPHYITQGITYMLPKDQEDTENPAKYRPITCLQNIYKIITSCLSQSIYKHTEDHNILAEEQKGCRKHSQGCKEQLTIDAVVSNLAHKEKRNIHTMFVDYKKAFDSVPHSWLIYVLEYYKIHPLIISFLKNIMSRWNTKIKISSDGKTAETDLIPIRRGIFQGDALSPLWFCLALNPLSSLLNTTEIGFTIKHNSQQTRLTHLMYMDDIKLFADSIDELHRLADITQTFSNDICMEFGVDKCKIQSVHKGKIEQTSYELENKQIIGPVDQAEGYKYLGYHQTQTIHHKNTKKILREKFKCRIHKILYTHLNAHNTIKAINTFAIPILSYSFGIIKWSKTDLKSLQTSINTALTKHRKHHPRACVQRVTLPKMEGGRGLIDITNLHNKQITLLRTYFYNRSQQSPIHNAICQSDSFTPLMLVDHTKPITLASNQQKIDAWTQKSLHGRHRMDLTSTNVDKVASNMWLKRGELFPETEGFMVAIQDQVIDTKNYRKYIIRDRGAGSDHCRHCHRQPETIQHITGACSSITQTDYKHRHDQVAAIIHQKLALKHNLITERTPYYKYTPQIIIDTPDYKLYWDRTILTDKTIHHNRPDITLHDKLNRTVYLIDIAIPNTHNLTSTHTNKVTKYTDLTIEIKSQWKVNSVKTVPIIISTTGIIPKTLHMSLKTLDIHPLTYITLQKAVILNTGRIVRKFLSIND

SEQ ID NO: 23926 - protein, 1351 aa, Cyclargus thomasi
MRLRNRNIPQAGTEAKCDGESRPGPSGSGCPSYSGGGNESRESAQPRAVAEHFYHHSPSSSPPVSLFSSVPSSPQSFAEIHKSFSSSNSSNSSSPSRPEDVVQEAPVAQITAPIQGKTRIRKTWTKDMNIFIMRQYLILTKLETNTRSYLTPLHSLFTSKYPEMDASKQRIGDQRRAITGRNFLTNQEILDIKEEAKQFIQSQKQMSDININSHQISSHRMQWSNELNELIIKSYYRITKLETDLTSYRPLLHQEIVTKCPDLAHLSVQRIADQRRLIINNKLLSSDHINRIKKEVQIELNRNSEVSFDVSLSQMLHYSNQETPIDINDEIRPIDTVQTQSRNVPNLSPEIAAQLEQMFLKTIDEFKDTDPTKRPYIPKIKTSKRLFVILNYLNSYTIPNILNPDTDFNTLQTIIYSAAYTIAKFCGAKINNNKTIHKKAETPWWQRRLEKKIGNLRANIGRLTEYIKGTRSRKLESHIYKIKQQFKTHSQYETQNTEIAHFLDTLKQKLNTLTNRLRRFREMTNRKKQNKEFNTNEKSFYRKLSRQENDNSTENKALPSPQALQEFWTNIWSTPIEHHANYWIKEDKEKLKYVTEMKFENIGLDLLKKVIAKTHNWKAAGSDNIHNFWYKKLTCTHDLLNQHINTFMKSPDKMPNYITQGVTYMLPKDHTDTENPAKYRPITCLQNIYKIITSCLSETIYKHAQEHNILAEEQKGCRKHSQGCKEQITIDAVASNQALKDKRNIHTMFIDYKKAFDSVPHSWLIYILQHYKINPLIINFLKNIMTRWNTKLKLSNNSETAETDFIPIKRGIFQGDALSPLWFCLALNPLSSLLNATKIGFTIKHNLERTSLTHLMYMDDIKLFANTIVDLHRLADITQTFSKDICMEFGVDKCKIQSVNKGKIENTSYELDSQEIIGPVDQAEGYKYLGYNQTQTIHHKDTKNILRDKFKCRLHKILNTNLNAQNITKAINTFAIPILTYSFGIIKWSKSDLKSLQTTINTALTKHRKHHPRACVQRLTLPKIEGGRGLIDIGNLHNKQITLLRTYFHNRSQESPIHNAICQSDSFTPLMLVDHTKPITLTSNQQKIDAWTQKSLHGRHRMDLTNTNVDKAASNMWLKRGELFPETEGFMLAIQDQVIDTKNYRKYIIRDQGAGSDHCRHCHQKAETIQHITGACSSITQTDYKHRHDQVAAIIHQKLALTHNLITEKTPYYKYAPQIILDSPDYKLYWDRTILTDKTVHHNRPDITLHDKQNKIVYLIDIAIPNTHNLTSTHANKITKYTDLTIEIKSQWKVNSVKTVPIIISTTGIIPKTLHTSLKTLDIHPLTYITLQKAVILNTCRIVRKFLSLND

SEQ ID NO: 23927 - protein, 1356 aa, Aricia agestis
MRLRNRIIPQAGTGALRDGESRPGPSGLGCPAYSGEGTVSHNNNVIIRQYHSRDNSPTSLSSISSLFSSPPSSPASYIMATHSSSSNTLSPITIRSTVDVVQEAIPARVTAPAYSMVCKRKKWSKQMNIFIMRHYFILTNLESDTKSYLSHLHTLFSSQYPEMEASKQRVGDQRRAIVQRHLLSPQEILGIKNDVKILLQNQNQHLTPQNMTQLETTDTNGRSRKMRWTTEINETIMRTYYRITKLETDLTTYRPLLHKEITTICPSIAHLSIQRIADQRRSIVNNHLLSKDHLKRIRDEVQQQLNTSNEEQTDDLTRPPDLNSTENVLNECIHLPTEDCPNILPSPLKLSSELETQLKEMFTDTYNIFKDTDPTTRPSLPKLKPSRKIKQIVHYLNTEILPNILTDDTDFNTLHTYIYTAAYTTIKFNGVRINNYNSANFNKPRTKPWWHRRLERRINELRACIGRLTAYAKGTRSAYLEKQIEKIKQRYKIHSQHEAQNSDITHFLDTLKQKLNILSNRLKRYNECTIRKTQNKEFTNNEKLFYRKLTQNNDSQQNNYSPVPSSESMHTYWSNIWSYPVQHENSQWIDKDKDRVKDIPVMKFEEIQLENMKAVISKTHNWKATGSDHIHNYWFKKFTSTHTILLKHINSFIKSPDTIPSFITQGITYMLAKDNSDTSNPAKYRPITCLQNIYKIITACISNLIYTHINEHNILAEEQKGCRKFSQGCKEQLIIDSVISQQALKQKRNIYTMYIDYKKAFDSVPHSWLIYILKHYKINPVIINCLEIIMPNWHTKLKIFDSTKAIETDFIYIKRGIFQGDSLSPLWFCLALNPLSFILNQNDYGFKIKYNSHHTSLSHLLYMDDIKIFANTLNHLHALADRTQSFSNDIKMEFGIDKCKIQSINKGKIEHNIQYKLNNDEIIDPVDPLEGYKYLGFYQSQQIHHKETKNLLKQKFKARLHKILHTHLNAKNTIKAINTYAIPILTYSFGVIRWNLTELKTLQRLINTTMTKYRKHHPRACFQRLILPKIEGGRGLIDILNLHNRQLTLLRTFFYNHAHTKTLHLAICHADTYTPLALADKAKTIKTYTKQQKIEAWAQKSLHGRHRLDLTNNAVDKIASNAWLKQGELFPETEGFMLAIQDQVIDTKNYRKHIIRDRNVSSDHCRHCHKQPETIQHITGACSSITQTDYKHRHDQVAAIIHQILAHKHNLISEKIPYYKYTPQILLESPDYKLYWDRTILTDKTVHHNRPDITLHDKHNKTVYLVDVAIPNSHNLTSTHITKLTKYTDLSIELKAQWRVSTVKIIPIIISTTGIIPKTLHTSLKTLNIHPLTYIILQKAVILNTCRIVRKFLSIT

SEQ ID NO: 23928 - protein, 1356 aa, Aricia agestis
MRLRNRIIPQAGTGALRDGESRPGPSGLGCPAYSGEGTVSHNNNVIIRQYHSRDNSPTSLSSISSLFSSPPSSPASYIMATHSSSSNTLSPMTIRSTVDVVQEAIPARVTAPAYSMVCKRKKWSKQMNIFIMRHYFILTNLESDTKSYLSHLHTLFSSQYPEMEASKQRVGDQRRAIVQRHLLSPQEIIGIKNDVKILLQNQNQHLTPQNMTQLETTDTNGRSRKMRWTTEINETIMRTYYRITKLETDLTTYRPLLHKEITTICPSIAHLSIQRIADQRRSIVNNHLLSKDHLKRIRDEVQQQLNTSNEEQTDDLTRPPDLNSTENVLNECIHLPTEDCPNILPSPLKLSSELEAQLKEMFTDTYNIFKDTDPTTRPSLPKLKPSRKIKQIVHYLNTEILPNILTDDTDFNTLHTYIYTAAYTTIKFNGVRINNNNSANFNKPRTKPWWHRRLERRINELRACIGRLTAYAKGTRSAYLEKQIEKIKQRYKIHSQHEAQNSDITHFLDTLKQKLNILSNRLKRYNECTIRKTQNKEFTNNEKLFYRKLTQNNDSQQNNYSPVPSSESMHTYWSNIWSYPVQHENSQWIDKDKDRVKDIPVMKFEEIQLENMKAVISKTHNWKATGSDHIHNYWFKKFTSTHTILLKHINSFIKSPDTIPSFITQGITYMLAKDNSDTSNPAKYRPITCLQNIYKIITACISNLIYTHINEHNILAEEQKGCRKFSQGCKEQLIIDSVISQQALKQKRNIYTMYIDYKKAFDSVPHSWLIYILKHYKINPVIINCLEIIMPNWHTKLKIFDSTKAIETDFIYIKRGIFQGDSLSPLWFCLALNPLSFILNQNDYGFKIKYDSHHTSLSHLLYMDDIKIFANTLNHLHALADRTQSFSNDIKMEFGIDKCKIQSINKGKIEHNIQYKLNNDEIIDPVDPLEGYKYLGFYQSQQIHHKETKNLLKQKFKARLHKILHTHLNAKNTIKAINTYAIPILTYSFGVIRWNLTELKTLQRLINTTMTKYRKHHPRACFQRLILPKIEGGRGLIDILNLHNRQLTLLRTFFYNHAHTKTLHLAICHADTYTPLALADKAKTIKTYTKQQKIEAWAQKSLHGRHRLDLTNNAVDKIASNAWLKQGELFPETEGFMLAIQDQVIDTKNYRKHIIRDRNVSSDHCRHCHKQPETIQHITGACSSITQTDYKHRHDQVAAIIHQILAHKHNLIPEKIPYYKYTPQILLESPDYKLYWDRTILTDKTVHHNRPDITLHDKHSKTVYLVDVAIPNSHNLTSTHITKLTKYTDLSIELKAQWRVSTVKIIPIIISTTGIIPKTLHISLKTLNIHPLTYIILQKAVILNTCRIVRKFLSIT

SEQ ID NO: 23929 - protein, 1359 aa, Cyclargus thomasi
MRLRSRVIPQAGTGALRDGESRPGPSGLGCPSYSGEGNVSQNNNVITHSPTRDNSPTGLSLMSSLFSSPTSSPASYIIDNQSSSSNSSSPILTKSTVDVVQRATSATISAPAHSKGCKRKKWSKLMNIFIMRHYFILTKLEADTTSYLTQLHMLFSSQFPEMEASKQRIGDQRRAIVQRHLLSHQEILSIKNDVTALLQNQNQQLTQGHTAPLVFSESDPNRRTQRMTWTTEINEMIMRTYYRITRLETDLTTYRPLLYKEITTIYPSIAHVSIQRIADQRRSIVNNHLLSNDHLKRIRDEVQQQLNISTVEQTDDLTRLPDLNLTQNLLNGSIQLPTEDCSIDMLAPIKLSSELASQLKEMFTETFNTFRDTDPTIRPSLPKLKPSKKLKQIIHNLNTEILPHLLTDDTDFNTLHTYIYTSAYTLTKFIGVRINHNNTVNSNKARTKPWWQTRLEHRINDLRASIGRLTAYAKGARSVHLEKEIEKIRQQYKVHSQHEAQNSDVTHFLDTLKQKLNLLSNRLKRFNECTIKKNQNKEFSNNEKLFYRKLAQNKNNRQNNPGYRSAPSPESMHTYWSNIWSHSVQHKSGQWLEEEKDKVKDIPIMEFEEIQEEQMKAVLNRTHNWKATGSDHIHNYWYKKLTSTHKLLLKHINSFIRSPDTTPSFITQGITYMLTKDNSDPTNPAKYRPITCLQNIYKIITACISSLIYTHIHEHNILAEEQKGCRKFSQGCKEQLIIDSVISQQALKSKRNIYTMYIDYKKAFDSVPHSWLIYILKHYKINPVIINCLETLMPNWHTKLKIFDSTKAIETDFIYIRRGIFQGDSLSPLWFCLALNPLSNILNKNDYGFKLKYNSHHTTLSHLLFIDDIKIFANTLNHLHILADRTQIFSSDIQMEFGIDKCKIQAIKKGKIEENTQYKLDNYEIIDAVDPVEGYKYLGFYQSQQIYHKETKKLLKQKFKDRLHKILHTHLNAKNTTKAINTYAIPILTYSFGVIRWNLTELKTLQRLINTTMTKNRKHHPRACSQRLTLPKIEGGRGLIDILNLHNRQLKLLRTFFYHQAHTKTLHLAVCHADFYTPLALADKVKSIKNYTNQDKIEAWTQKALHGRHRLDLTNNAVDKIASNAWLKQGELFPETEGFMLAIQDQVIDTKNYRKHIIRDRSISSDHCRKCHNQPETIQHITGACSFITQTDYKHRHDQVAAIIHQILAYKYHLVTEKLPYYKYTPQIILDSSDYKLYWDRTILTDKTVHHNRPDITLHDKQNKIVYLIDVAIPNSHNLTSTHTTKITKYTDLSIELKTQWKVNTVKTIPIIISTTGIIPKTLHTSLKTLNIHPLTYITLQKAVILNTCRIVRKFLSVT

SEQ ID NO: 23930 - protein, 1329 aa, Aricia agestis
MENPALGLRAQAALRILGGGTVSQNKNIIHNQDNSSACLSPLSSLFSSPPSSPASYLIANVSSSSNSSFSTLTENTVDVEQKATSAKLTAPIHGTKGCKRRKWSNDMNAYIMHQYYVLTKLESDTKSYVTQLHDSFSSKYPEMAATKQRVSDQRRAIVKRQLLTKEELLKIKKEAENILKSELSKTINTTQHTQSERMRWSAEINEIIMKSYYQVTKLETDLTSYTPLLHKEVITKCPSIAHLSCQRIADQRRSIVNNHLLTDDQLKRIREEVRLELETHTTQNTTQNIEDDRTIQNTTYYDNTLILAETNPNSPHQSDNIQTEKLSTESQKQIGDLFTKTFHTFKNTDPTSRPSLPKLKPTKKLALIVNHLNKNILPNVLNNDTDFITLQTYIYTAAYTSVTSCGVKIKQNAQSDRIHTTPCWQKRLENKIGDLRKCIGRLTEYCRGVRTARLETHIHKIKEKYKIHTQHEIENTDNIHFLDTLKQKLNSLSNRLKRYKECTLRKTQNNQFINNEKQFYRKLTQDQTNLEDNPNKVTPLPEAMHTFWSQIWSNPVEHAPNDWIAEDRERLIDLAEMTFEQIHIDQMKAIINRTHNWKATGSDNIHNFWYKKLSCTHTLLHKHINVFIQSADIMPPYITQGITYMVPKVNSDTENPAKYRPITCLQNIYKIITACISELIYNHTHKNNILAEEQKGCRKNSQGCKEQLIIDSVASQQALKQKRNIYTMYIDYKKAYDSVPHSWLIYILKHYKISPTIVNFLQNIMSQWNTRLKIMNSNKTIETDYIPIRRGIFQGDSLSPLWFCLSLNPLSHILNKNSIGFNIKHNRQQTSLSHLMYMDDIKLLANTQKDLVTLADLTQIFSNDIRMEFGIDKCKIQAINKGKVEYTAYKLNNEDIIESVDPVDGYKYLGYNQSTQIHHKDTKKLLQQKFRARLHQILHTHLNAKNCIKAINTYAIPILTYSFGIIRWNQTELKTLQRIINTVMTKHRKHHPRACIQRLILPKNEGGRGIIDIVNLHNKQITLLKKFFQNKAHTSTLHNTVCQADNYTPLQLATDKQIHIYTSQEKIDTWTQKSLHGRHRLDLTNDTVDKIASNAWLKQGELFPETEGFMLAIQDQVIDTKNYRKHIIRDTNVVSDHCRHCHKQSETIQHITGACSSITQTDYKHRHDQVAAIIHQILAHKYNLITEKLPYYKYTPQIILESPDYKLYWDRTILTDKTVHHNRPDITLHDKQNKIVYLIDVAIPNSHNLTSTHTTKLTKYTDLTIELKSQWKVNTVKTIPIIISTTGIIPKTLHTSLKTLNIHPLTYITLQKAVILNTCRIVRKFLSIN

SEQ ID NO: 23931 - protein, 1186 aa, Plebejus argus
MAATKQRVSDQRRAIIKRQLLTKEELLNIKKEVENILQSEFSKTISTIQHTQSQRMRWSDEINEMIMKSYYQITKLETDLTSYRPLLHKEVITKCPSIAHLSCQRIADQRRSIVNNHLLTDDQLKRIREEVRLELETHITVNATQNIEDDRTIQNTTYDNTLILAETSPNSPHQVDNIHIEQLCTETQKQVEDLFTKTFHTFKDIDPTLRPALPKLKPTKKLALIVNHLNKNILPNVLNNDTDFITLQTYIYTAAYTSVTSCGVKIKQNAHSDRIHTTPYWQKRLENKIGDLRKCIGRLTEYCRGVRSTRLETHIHKIKEKYKIHTQHEIENTDNIHFLDTLKQKLNSLSNRLKRYKDCTLRKTQNKQFNNNEKQFYRKLTQDQINLEDNSNKVTPSPEAMHTFWSQIWSTPVEHTPNDWIAEDRERFIDLTEMTFEQIHIDQMKAIINKTHNWKATGSDNIHNFWYKKLSCTHTLLHKHINTFIQSADTMPLYITQGITYMVPKDKSDTENPAKYRPITCLQNIYKIITACISELIYNHIHKNNILAEEQKGCRKNSQGCKEQLIIDSVATQQALKQKRNIYTMYIDYKKAYDSVPHSWLIYILKHYKISPTIINYLQNIMSQWNTRLKIINSNKTIETDYIPIRRGIFQGDSLSPLWFCLSLNPLSHILNKKSIGFKIKYNRQHTSLSHLMYMDDIKLLANTQKDLFTLADLTQIFSNDIRMEFGIDKCKIQAIKRGKVEHTAYKLNNEDIIESVDPVDGYKYLGYNQSTQIHHKDTKKLLQQKFRARLHQILHTHLNAKNCTKAINTYAIPILTYSFGIIRWNQTELKTLQRIINTVMTKHRKHHPRACIQRLILPKNEGGRGIIDIVNLHNKQITLLKKFFQNQAHTSTLHNTICQADTYTPLQLATDKQIHIYSNQEKIDTWTQKALHRRHRLDLTDDTVDKIASNAWLKQGELFPETEGFMLAIQDQVIDTKNYRKHIIRDMNIVSDHCRHCHKHPETIQHITGACSSITQTDYKHRHDQVAAIIHQILAHKYNLITEKLPYYKYTPQIILDSPDYKLYWDRTILTDKTVHHNRPDITLHDKQNKIVYLIDVAIPNSHNLTSSHTTKLTKYTDLTIELKAQWKVNTVKTIPIIISTTGIIPKTLHTSLKTLNIHPLTYITLQKAVILNTCRIVRKFLSIN

SEQ ID NO: 23932 - protein, 1000 aa, Lysandra bellargus
MFTYTYNIFKDTDPTTRPSLPKLKPSKKLKQIIYHLNTETLPNILTDDIDFNTLHTYIYTAAYTATKFSGVRINNNNIPKSNKAQTKPWWHRRLERRINDLRTSIGRLTAYAKGTRSSHLEKHIEKIKQQYKIHSQHEAQNSDITHFLDTLKQKLNILSNRLKRYTECTIRKTRNKEFTNNEKLFYRKLTQNNNNQHNNPNCSPAPSPESMHTYWSNIWSHSVQHENSQWIDEDKNRVKDIPVMEFGEIQLEQMKAVISKTHNWKATGSDHIHNYWYKKFTSTHTLLLKHINSFIQSPDTIPSFITQGITYMIAKDNSDTTNPAKYRPITCLQNIYKIITACISNLIYTHIQENNILAEEQKGCRKFSQGCKEQLLIIDSVISQQALKQKRNINTMYIDYKKAFDSVPHSWLIYILKHYKISPVIINWLENIMPNWQTKLKIFDSTKSIETDFICIRRGIFQGDSLSPLWFCLALNPLSVILNQNDYGFKIKYNSHHTSLSHLLYMDDIKLFANTLNHLHALADRTQTFSNDIKMEFWIDKCKIQSINKGKIEHNIQYKLNNDEIIDPVDPLEGYKYLGFYQSQQIHHKESKKLLKQKFKARLHKILHTHLNAKNTIKAINTYAIPILTYSFGVIRWNLTELKTLQRLINTTMTKHRKHHPRACFQRLSLPKIEGGRGLIDILNLHNRQLTVLRTFFYNHAHTKTLHLAICHADTNYTPLALADKTKNIKTYTNQQKIEAWTQKSLHGRHRLDLTNNAVDKIASNAWLKQGELFPETEGFMLAIQDQIIDTKNYRKHIIRDRNLSSDHCRHCHKQPETIQHITGACSSITQTDYKHRHDQVAAIIHQILAHKHNLITEKLSYYKYTPQIILESPDYKLYWDRTILTDKTVHHNRPDITLHDKQNKIVYLIDIAIPNSHNLTSTHTNKLTKYTDLAIELKAQWKVNTVKTIPIIISTTGIIPKTLHTSLKTLNIHPLTFITLQKAVILNTCRIVRKFLSIT

SEQ ID NO: 23933 - protein, 1358 aa, Plebejus argus
MRLRNRNIPQAGTGALRDGESRPGPSGLGCPAYSGEGTVSHNNNVIIHGSRDNSPTSFSSISSLFSSPPSSPASYIMATQSSSSNSSSPMSIKSTVDVAQEAIPARVTAPAHSMGCKRKKWSKQMNIFIMHHYFILTKLESDTKSYLSHLHSLFSSQYPEMEASKQRVGDQRRAIVKRNLLSHQEILSIKNDVKTLLQNQNQQLTQGQNMTQLETLATNSRSQKMRWTTEINEMIMRTYYRITKLETDLTTYRPLLHKEIATICPAIAHLSIQRIADQRRSIVNNHLLSKDHLKRIRDEVQQQLETSNGEQTDDITRLPDLNSTQNLLNESIHLPTEDCPNILPVPLKLTSELEAELKEMFTDTYNIFKDTDPTTRPSLPKLKPSKKLKQIIYHLNTETLPNILTDDTDFNTLHTYIYTAAYTATKFYGVRINNNNTPNSNKAQTKPWWHRRLERKINDLRTSIGRLTAYAKGTRSSHLEKHIEKIKQQYKIHSQHETQNSDITQFLDTLKQKLNILSNRLKRYNECTIRKTQNKEFTNNEKLFYRKLTQNNNNQQNNPNYSPAPSSESMHTYWSNIWSHPVQHENSQWIDEDKNRVKDIPVMEFGEIELEQMKAVISKTHNWKATGSDHIHNYWYKKFTSTHTLLLKHINSFIQSPDTIPAFITQGITYMIAKDNSDTTNPAKYRPITCLQNIYKIITACISNLIYTHIQENNILAEEQKGCRKFSQGCKEQLIIDSVISQQALKQKRNINTMYIDYKKAFDSVPHSWLIYILKHYKISPVIINWLENIMPNWHTKLKIFDSTKAIETDFIYIRRGIFQGDSLSPLWFCLALNPLSFILNQNDYGFKIKYNSHHTSLSHLLYMDDIKIFANTLNHLHALADRTQTFSNDIKMEFGIDKCKIQSINKGKIEHNIQYKLNNDQIIDPVDPLEGYKYLGFYQSQQIHHKETKKLLKQKFKARLHKILHTHLNAKNTIKAINTYAIPILTYSFGVIRWNLTELKTLQRLINTTMTKHRKHHPRACFQRLSLPKIEGGRGLIDILNLHNRQLTVLRTFFYNHAHTKTLHLAICHADTNYTPLALADKTKSIKTYTNQQKIEAWAQKSLHGRHRLDLTNNAVDKNASNAWLKQGELFPETEGFMLAIQDQVIDTKNYRKHIIRDHNMSSDHCRHCHKQPETIQHITGACSSITQTDYKHRHDQVAAIIHQILAHKHNLITEKLPYYKYTPQIILESPDYKLYWDRTILTDKTVHHNRPDITLHDKQNKIVYLIDIAIPNSHNLTSTHTNKLTKYTDLTIELKAQWKVNTVKTIPIIISTTGIIPKTLHTSLKTLNIHPLTFITLQKAVILNTCRIVRKFLSIT

SEQ ID NO: 23934 - protein, 789 aa, Lysandra coridon
MHTYWSNIWSHSVQHENSQWIDEDKNRVKDIPVMEFGEIQLEQMKAVISKTHNWKATGSDHIHNYWYKKFTSTHTLLLKHINSFIQSPDTIPSFITQGVTYMIAKDNSDTTNPAKYRPITCLQNIYKIITACISNLIYTHIQENNILAEEQKGCRKFSQGCKEQLIIDSIISQQALKQKRNINTMYIDYKKAFGSVPHSWLIYILKHYKISPVIINWLENIMPNWHTKLKIFDSTKSIETDFICIRRGIFQGDSLSPLWFCLALNPLSVILNQNDYGFKIKYNSHHISLSHLLYMDDIKLFANTLNHLHALADRTQTFSNDIKMEFGIDKCKIQSINKGKIEHNIQYKLNNDEIIDPVDPLEGYKYLGFYQSQQIHHKETKKLLKQKFKARLHKILHTHLNAKNTIKAINTYAIPILTYSFGVIRWNLTELKTLQRLINTTMTKHRKHHPRACFQRLSLPKIEGGRGLIDILNLHNRQLTVLRTFFYNHAHTKTLHLAICHADTNYTPLALADKTKSIKTYTNQQKIEAWTQKSLHGRHRLDLTNNAVDKIASNAWLKQGELFPETEGFMLAIQDQVIDTKNYRKHIIRDRNLSSDHCRHCHKQPETIQHITGACSSITQTDYKHRHDQVAAIIHQILAHKHNLITEKISYYKYTPQIILESPDYKLYWDRTILTDKTVHHNRPDITLHDKQNKIAYLIDIAIPNSHNLTSTHTNKLTKYTDLAIELKAQWKVNTVKTIPIIISTTGIIPKTLHTSLKTLNIHPLTFITLQKAVILNTCRIVRKFLSIT

SEQ ID NO: 23935 - protein, 1358 aa, Lysandra coridon
MRLRNRNIPQAGTEALRDGESRPGPSGLGCPAYSGEGTESHNNNVNLYHSRDNSPTSFSSISSLFSSPSSSPASYIIATQSSSSNSSSPMSIKSTVDVVQEAIPARVTAPAHSVGCKRKKWSKQMNIYIMHHYFILTRLESDTKSYLTHLHSLFSSQYPEMEASKQRVGDQRRAIVKRNLLSHQEILSIKNDVKTLLQNQNQQLTQGQNMTQLETLTTNSRSQKMRWTTEINEMIMRTYYRITKLETDLTTYRPLLHKEITTLCPAIAHLSIQRIAVQRRSIVNNHLLSKDHLKRIRDEVQQQLETSNGEQTDDITGLPDLNSTQNLLNESIHLPTEDCPNILPVPLKLTSELEAELKEMFTYTYNIFKDTDPTTRPSLPKLKPSKKLKQIIYHLNTETLPNILTDDIDFNTLHTYIYTAAYTATKFSGVRINNNNTPNSNKAQTKPWWHRRLERRINDLRTSIGRLTAYAKGTRSSHLEKHIEKIKQQYKIHSQHEAQNSDITHFLDTLKQKLNILSNRLKRYNECTIRKTQNKEFTNNEKLFYRKLTQNNNNQHNNPNCSPAPSPESMHTYWSNIWSHSVQHENSQWIDEDKNRVKDIPVMEYGEIQLEQMKAVISKTHNWKATGSDHIHNYWYKKFTSTHTLLLKHINSFIQSPDTIPSFITQGITYMIAKDNSDTTNPAKYRPITCLQNIYKIITACISNLIYTHIQENNILAEEQKGCRKFSQGCKEQLIIDSIISQQALKQKRNINTMYIDYKKAFDSVPHSWLIYILKHYKISPVIINWLENIMPNWHTKLKIFDSTKSIETDFICIRRGIFQGDSLSPLWFCLALNPLSVILNQNDYGFKIKYNSHHTSLSHLLYMDDIKLFANTLNHLHALADRTQTFSNDIKMEFGIDKCKIQSINKGKIEHNIQYKLNNDEIIDPVDPLEGYKYLGFYQSQQIHHKETKKLLKQKFKARLHKILHTHLNAKNTIKAINTYAIPILTYSFGVIRWNLTELKTLQRLINTTMTKHRKHHPRACFQRLSLPKIEGGRGLIDILNLHNRQLTVLRTFFYNHAHTKTLHLAICHADTNYTPLALADKTKSIKTYTNQQKIEAWTQKSLHGRHRLDLTNNAVDKIASNAWLKQGELFPETEGFMLAIQDQVIDTKNYRKHIIRDRNLSSDHCRHCHKQPETIQHITGACSSITQTDYKHRHDQVAAIIHQILAHKHNLITEKLSYYKYTPQIILESPDYKLYWDRTILTDKTVHHNRPDITFHDKQNKIVYLIDIAIPNSHNLTSTHTNKLTKYTDLAIELKAQWKVNTVKTIPIIISTTGIIPKTLHTSLKTLNIHPLTFITLQKAVILNTCRIVRKFLSIT

SEQ ID NO: 23936 - protein, 789 aa, Lysandra bellargus
MHTYWSNIWSHSVQHENNQWIDEDKNRVKDIPVMEFGEIQLEQMKAVISKTHNWKATGSDHIHNYWYKKFTSTHTLLLKHINSFIQSPDTIPSFITQSITYMIAKDNSDTTNPAKYRPITCLQNIYKIITACISNLIYTHIQENNILAEEQKGCRKFSQGCKEQLIIDSVISQQALKQKRNINTMYIDYKKAFDSVPHSWLIYILKHYKISPVIINWLENIMPNWHTKLKIFDSTKSIETDFICIRRGIFQGDSLSPLWFCLALNPLSVILNQNDYGFKIKYNSHHTSLSHLLYMDDIKLFANTLNHLHALADRTQTFSNDIKMEFGIDKCKIQSINKGKIEHNIQYKLNNDEIIDPVDPLEGYKYLGFYQSQQIHHKETKKLLKQKFKARLHKILHTHLNAKNTIKAINTYAIPILTYSFGVIRWNLTELKTLQRLINTTMTKHRKHHPRACFQRLSLPKIEGGRGLIDILNLHNRQLTVLRTFFYNHAHTKTLHLAICHADTNYTPLALADKTKSIKTYTNQQKIEAWTQKSLHGRHRLDLTNNAVDKIASNAWLKQGELFPETEGFMLAIQDQVIDTKNYRKHIIRDRNLSSDHCRHCHKQPETIQHITGACSSITQTDYKHRHDQVAAIIHQILAHKHNLITEKLSYYKYTLQIILESPDYKLYWDRTILTDKTVHHNRPDITLHDKQNKIVYLIDIAIPNSHNLTSTHTNKLTKYTDLAIELKAQWKVNTVKTIPIIISTTGIIPKTLHTSLKTLNIHPLTFITLQKAVILNTCRIVRKFLSIT

SEQ ID NO: 23937 - protein, 1358 aa, Lysandra bellargus
MRLRNRNIPQAGTEALRDGESRPGPSGLGCPAYSGEGTESHNNNVIIYHSRDNSPTSFSSISSLFLSPSSSPASYIIATQSSSSNSSSPMSIKSTVDVVQEAIPARVTAPAHSVGCKRKKWSKQMNIYIMHHYFILTRLESDTKSYLTHLHSLFSSQYPEMEASKQRVGDQRRAIVKRNLLSHQEILSIKNNVKTLLQNQNQQLPQGQNMTQLETLATNSRSQKMRWTTEINEMIMRTYYRITKLETDLTTYRPLLHKEITTICPAIAHLSIQRIADQRRSIVNNHLLSKDHLKIIRDEVQQQLETSNGEQTDDITRLPDLNSTQNLLNESIHLSTEDCPNILPVPLKLTSELEAELKEMFTYTYNIFKDTDPTTRPSLPKLKPSKKLKQIIYHLNTETLPNILTDDIDFNTLHTYIYTAAYTATKFSGVRINNNNTPNSNKAQTKPWWHRRLERRINDLRTSIGRLTAYAKGTRSSNLEKHIEKIKQQYKIHSQHETQNSDITHFLDTLKQKLNILSNRLKRYNECTIRKTQNKEFTNNEKLFYRKLTQNNNNQHNNPNFSPAPSPESMHTYWSNIWSHSVQHENSQWIDEDKNRVKDIPVMEFGEIQLEQMKAVISKTHNWKATGSDHIHNYWYKKFTSTHTLLLKHINSFIQSPNTMPSFITQGITYLIAKDNSDTTNPAKYRPITCLQNIYKIITACISNLIYTHIQENDILAEEQKGCRKFSQGCKEQLIIDSVISQQAHKQKRNINTMYIDYKKAFDSVPHSWLIYILKHYKISPVIINWLENIMPNWHTKLKIFDSTKSIETDFICIRRGIFQGDSLSPLWFCLALNPLSVILNQNDYGFKIKYNSHHRSLSHLLYMDDIKLFANTLNHLHALADRTQTFSNDIKMEFGIDKCKIQSINKGKIEHYIQYKLNNDEIIDPVDPLEGYKYLGFYQSQQIHHKETKKLLKQKFKARLHKILHTHLNAKNTIKAINTYAIPILTYSFGVIRWNLTELKTLQRLINTTMTKHRKHHPRACFQRLSLPKIEGGRGLIDILNLHNRQLTVLRTFFYNHAHTKTLHLAICHADTNYTPLALADKTKSIKTYTNQQKIEAWTQKSLHGRHRLDLTNNAVNKIASNAWLKQGELFPETEGFMLAIQDQVIDTKNYRKHIIRDRNLSSDHCRHCHKQPETIQHITGACSSITQTDYKHRHDQVAAIIHQILAHKHNLITEKLSYYKYTPQIILESPDYKLYWDRTILTDKTVHHNRPDITLHDKQNKIVYLIDIAIPNSHNLTSTHTNKLTKYTDLAIELKAQWKVNTVKTIPIIISTTGIIPKTLHTSLKTLNIHPLTFITLQKAVILNTCRIVRKFLSIT

SEQ ID NO: 23938 - protein, 1358 aa, Lysandra bellargus
MRLRNRNIPQAGTEALRDGESRPGPSGLGCPAYSGEGTESHNNNVIIYHSRDNSPTSFSSISSLFSSPSSSPASYNIATQSSSSNSSSPMSIKSTVDVVQEAIPARVTAPAHSVGCKRKKWSKQMNIFIMHHYFILTRLESDTKSYLTHLHSLFSSQYPEMEASKQRVGDQRRAIVKRNLLSHQEIISIKNDVKTLLQNQNQQLTQGQNMTQLETLATNSRSQKMRWTTEINEMIMRTYYRITKLETDLTTYRPLLHKEITTICPAIAHLSIQRIADQRRSILNNHLLSKDHLKRIRDEVQQQLETSNGEQTDDITRLPDLNSTQNLLNESIHLPTEDCPNILPVPLKLTSELEAELKEMFTYTYNIFKDTDPTTRPSLPKLKPSKKLKQIIYHLNTETLPNILTDDIDFSTLHTYIYTAAYTATKFSGVRINNNNIPKSNKAQTKPWWHRRLERRINDLRTSIGRLTAYAKGTRSSHLEKHIEKIKQQYKIHSQHEAQNSDITHFLDTLKQKLNILSNRLKRYTECTIRKTQNKEFTNNEKLFYRKLTQNNNNQHNNPNCSPAPSPESMHTYWSNIWSHSVQHENSQWIDEDKNRVKDIPVMEFGEIQLEQMKAVISKTHNWKATGSDHIHNYWYKKFTSTHTLLLKHINSFIQSPDTIPSFITQGITYMIAKDNSDTTNPAKYRPITCLQNIYKIITACISNLIYTYIQENNILAEEQKGCRKFSQGCKEQLIIDSVISQQALKQKRNINTMYIDYKKAFDSVPHSWLIYILKHYKISPVIINWLENIMPNWQTKLKIFDSTKSIETDFICIRRGIFQGDSLSPLWFCLALNPLSVILNQNDYGFKIKYNSHHTSLSHLLYMDDIKLFANTLNHLHALADRTQTFSNDIKMEFGIDKCKIQSTNKGKIEHNIQYKLNNDEIIDPVDPLEGYKYLGFYQSQQIHHKESKKLLKQKFKARLHKILHTHLNAKNTIKAINTYAIPILTYSFGVIRWNLTELKTLQRLINTTMTKHRKHHPRACFQRLSLPKIEGGRGLIDILNLHNRQLTVLRTFFYNHAHTKTLHLAICHADTNYTPLALADKTKNIKTYTNQQKIEAWTQKSLHGRHRLDLTNNAVDKIASNAWLKQGELFSETEGFMLAIQDQVIDTKNYRKHIIRDRNLSSDHCRHCHKQPETIQHITGACSSITQTDYKHRHDQVAAIIHQILAHKHNLITEKLSYYKYTPQIILESPDYKLYWDRTILTDKTVHHNRPDITLHDKQNKIVYLIDIAIPNSHNLTSTHTNKLTKYTDLAIELKAQWKVNTVKTIPIIISTTGIIPKTLHTSLKTLNIHPLTFITLQKAVILNTCRIVRKFLSIT

SEQ ID NO: 23939 - protein, 999 aa, Lysandra coridon
MFTYTYNIFKDTDPTTRPSLPKLKPSKKLKQIIYHLNTETLPNILTDDIDFNTLHTYIYTAAYTATKFSGVRINNNNTPNSNKAQTKPWWHRRLEHRINDLRTSIGRLTAYAKGTRSSHLEKHIEKIKQQYKIHSQHEAQNSDITHFLDTLKQKLNILSNRLKRYNECTIRKTQNKEFTNNEKLFYRKLTQNNNNQHNNPNCSPAPSPESMHTYWSNIWSHSVQHENSQWIDEDKNRVKDIPVMEFGEIQLEQMKAVISKTHNWKATGSDHIHNYWYKKFTSTHTLLLKHINSFIQSPDTIPSFITQGITYMIAKDNSDTTNPAKYRPITCLQNIYKIITACISNLIYTHIQENNILAEEQKGCRKFSQGCKEQLIIDSIISQQALKQKRNINTMYIDYKKAFDSVPHSWLIYILKHYKISPVIINWLENIMPNWHTKLKIFDSTKSIETDFICIRRGIFQGDSLSPLWFCLALNPLSVILNQNDYGFKIKYNSHHISLSHLLYMDDIKLFANTLNHLHALADRTQTFSNDIKMEFGIDKCKIQSINKGKIEHNIQYKLNNDEIIDPVDPLEGYKYLGFYQSQQIHHRETKKLLKQKFKARLHKILHTHLNAKNTIKAINTYAIPILTYSFGVIRWNLTELKTLQRLINTTMTKHRKHHPRACFQRLSLPKIEGGRGLIDILNLHNRQLTVLRTFFYNHAHTKTLHLAICHADTNYTPLALADKTKSIKTYTNQQKIEAWTQKSLHGRHRLDLTNNAVDKIASNAWLKQGELFPETEGFMLAIQDQVIDTKNYRKHIIRDRNLSSDHCRHCHKQPETIQHITGACSSITQTDYKHRHDQVAAIIHQILAHKHNLITEKLSYYKYTPQIILESLDYKLYWDRTILTDKTVHYNRPDITLHDKQNKIVYLIDIAIPNSHNLTSTHTNKLTKYTDLAIELKAQWKVNTVKTIPIIISTTGIIPKTLHTSLKTLNIHPLTFITLQKAVILNTCRIVRKFLSIT

SEQ ID NO: 23940 - protein, 1358 aa, Lysandra coridon
MRLRNRNIPQAGTEALRDGESRPGPSGLGCPAYSGEGTESHNNNVIIYHSRDNSPTSFSSISSLFSSPSSSPASYIIATQSSSSNSSSPMSIKSTVDVVQEAIPARVTAPAHSVGCKRKKWSKQMNIYIMHHYFILTRLESDTKSYLTHLHSLFSSQYPEMEASKQRVGDQRRAIVKRNLLSHQEILSIKNDVKTLLQNQNQQLTQGQNMTQLETLATNSRSQKMRWTTEINEMIMRTYYRITKLETDLTTYRPLLHKEITTICPAIAHLSIQRIADQRRSIVNNHLLSKDHLKRIRDEVQQQLETSNGEQTDDITRLPDLNSTQNLLNESIHLPTEDCPNILPVPLKLTSELEAELKEMFTYTYNIFKDTDPTTRPSLPKLKPSKKLKQIIYHLNTETLPNILTDDIDFNTLHTYIYTAAYTATKFSGVRINNNNTPNSNKAQTKPWWHRRLERRINDLRTSIGRLTAYAKGTRSSHLEKHIEKIKQQYKIHSQHESQNSDITHFLDTLKQKLNILSNRLKRYNECTIRKTQNKEFTNNEKLFYRKLTQNNNNQHNNPNCSPAPSPESMHTYWSNIWSHSVQHENSQWIDEDKNRVKDIPVMEFGEIQLEQMKAVISKTHNWKATGSDHIHNYWYKKFTSTHTLLLKHINSFIQSPDTIPSFITQGVTYMIAKDNSDTTNPAKYRPITCLQNIYKIITACISNLIYTHIQENNILTEEQKGCRKFSQGCKEQLIIDSIISQQALKQKRNINTMYIDYKKAFDSVPHSWLIYILKHYKISPVIINWLENIMPNWHTKLKIFDSTKSIETDFICIRRGIFQGDSLSPLWFCLALNPLSVILNQNDYGFKIKYNSHHISLSHLLYMDDIKLFANTLNHLHALADRTQTFSNDIKMEFGIDKCKIQSINKGKIEHNIQYKLNNDEIIDPVDPLEGYKYLGFYQSQQIHHKETKKLLKQKFKARLHKILHTHLNAKNTIKAINTYAIPILTYSFGVIRWNLTELKTLQRLINTTMTKHRKHHPRACFQRLSLPKIEGGRGLIDILNLHNRQLTVLRTFFYNHAHTKTLHLAICHADTNYTPLALADKTKSIKTYTNQQKIEAWTQKSLHGRHRLDLTNNAVDKIASNAWLKQGELFPETEGFMLAIQDQVIDTKNYRKHIIRDRNLSSDHCRHCHKQPETIQHITGACSSITQTDYKHRHDQVAAIIHQILAHKHNLITEKLSYYKYTPQIILESPDYKLYWDRTILTDKTVHHNRPDITLHDKQNKIAYLIDIAIPNSHNLTSTYTNKLTKYTDLAIELKAQWKVNTVKTIPIIISTTGIIPKTLHTSLKTLNIHPLTFITLQKAVILNTCRIVRKFLSIT

SEQ ID NO: 23941 - protein, 1269 aa, Lysandra bellargus
MSIKSTVDVVQEAIPARVTAPAHSVGCKRKKWSKQMNIYIMHHYFILTRLESDTKSYLTHLHSLFSSQYPEMEASKQRVGDQRRAIVKRNLLSHQEILSIKNDVKTLLQNQNQQLTQGQNMTQLETLATNSRSQKMRWTTEINEMIMRTYYRITKLETDLTTYRPLLHKEITTICPAIAHLSIQRIADQRRSIVNNHLLSKDHLKRIRDEVQQQLETSNGEQTDDITRLPDLNSTQNLLNESIHLPTEDCPNILPVPLKLTSELEAELKEMFTYTYNIFKDTDPTTRPSLPKLKPSKKLKQIIYHLNTETLPNILTDDIDFNTLHTYIYTAAYTATKFSGVRINNNNTPNSNKAQTKPWWHRRLERRINDLRTSIGRLTAYAKGTRSSHLQKHIEKIKQQYKIHSQHEAQNSDITHFLDTLKQKLNILSNRLKRYNECTIRKTQNKEFTNNEKLFYRKLTQNNNNQHNNPNCSPAPSPESMHTYWSNIWSHSVQHENSQWIDEDKNRVKDIPVMEFGEIQLEQMKAVISKTHNWKATGSDRIHNYWYKKFTSTHTLLLKHINSFIQSPDTIPSFITQGITYMIAKDNSDTTNPAKYRPITCLQNIYKIITACISNLIYTHIQENNILAEEQKGCRKFSQGCKEQLIIDSIISQQALKQKRNINTMYIDYKKAFDSVPHSWLIYILKHYKISPVIINWLENIMPNWHTKLKIFDSTKSIETDFICIRRGIFQGDSLSPLWFCLALNPLSVILNQNDYGFKIKYNSHHTSLSHLLYMDDIKLFANTLNHLHALADRTQTFSNDIKMEFGIDKCKIQSINKGKIEHNIRYKLNNDEIIDPVDPLVGYKYLGFCQSQQIHHKETKKLLKQKFKARLHKILHTHLNAKNTIKAINTYAIPILTYSFGVIRWNLTELKTLQRLINTTMTKHRKHHPRACFQRLSLPKIEGGRGLIDILNLHNRQLTVLRTFFYNHAHTKTLHLAICHADTNYTPLALADKTKSIKTYTNQQKFEAWTQKSLHGRHRLDLTNNAVDKIASNAWLKQGELFPETEGFMLAIQDQVIDTKNYRKHIIRDRNLSSDHCRHCHKQPETIQHITGACSSITQTDYKHRHDQVAAIIHQILAHKHNLITEKLSYYKYTPQIILESPDYKLYWDRTILTDKTVHHNRPDITLHDKQNKIVYLIDIAIPNSHNLTSTHTNKLTKYTDLAIELKAQWKVNTVKTIPIIISTTGIIPKTLHTSLKTLNIHPLTFITLQKAVILNTCRIVRKFLLIT

SEQ ID NO: 23942 - protein, 1358 aa, Plebejus argus
MRLRNRNIPQAGTGALRDGESRPGPSGLGCPAYSGEGTVSHNNNVIIHRSRDNSPTSFSSISSLFSSPPSSPASYIMATQSSSSNSSSPISIKSTVDVVQEAIPARVTAPAHSMGCKRKKWSKQMNIFIMHHYFILTKLESDTKSYLSHLHSLFSSQYPEMEASKQRVGDQRRAIVKRNLLSHQEILSIKNDVKTLLQNQNQQLTQGQNMTQLETLATNSRSQKMRWTTEINEMIMRTYYRITKLETDLTTYRPLLHKEIATICPAIAHLPIQRIADQRRSIVNNHLLSKDHLKRIRDEVQQQLETSNGEQTDDITRLPDLNSTQNLLNESIHLPTEDCPNILPVPLKLTSELEAELKEMFTDTYNIFKDTDPTTRPSLPKLKPSKKLKQIIYHLNTETLPNILTDDTDFNTLHTYIYTAAYTATKFYGVRINNNNTPNSNKAQTKPWWHRRLERKINDLRTSIGRLTAYAKGTRSSHLEKHIEKIKQQYKIHSQHEAQNSDITQFLDTLKQKLNILSNRLKRYNECTIRKTQNKEFTNNEKLFYRKLTQNNNNQQNNPNYSPAPSSESMHTYWSDIWSHPVQHENSQWIDEDKNRVKDIPVMEFGEIELEQMKAVISKTHNWKATGSDHIHNYWYKKFTSTHTLILKHINSFIQSPDTIPAFITQGITYMVAKDNSDTTNPAKYRPITCLQNIYKIITACISNLIYTHIQENNILAEEQKGCRKFSQGCKEQLIIDSVISQQALKQKRNINTMYIDYKKAFDSVPHSWLIYILKHYKISPVIINWLENIMPNWHTKLKIFDSTKAIETDFIYIRRGIFQGDSLSPLWFCLALNPLSFILNQNDYGFKIKYNSHHTSLSHLLYMDDIKIFANTLNHLHALADRTQTFSNDIKMEFGIDKCKIQSINKGKIEHNIQYKLNNDQIIDPVDPLEGYKYLGFYQSQQIHHKETKKLLKQKFKARLHKILHTHLNAKNTIKAINTYAIPILTYSFGVIRWNLTELKTLQRLINTTMTKHRKHHPRACFQRLSLPKIEGGRGLIDILNLHNRQLTVLRTFFYNHAHTKTLHLAICHADTNYTPLALADKTKSIKTYTNQQKIEAWAQKSLHGRHRLDLTNNAVDKIASNAWLKQGELFPETEGFMLAIQDQVIDTKNYRKHIIRDHNMSSDHCRHCHKQPETIQHITGACSSITQTDYKHRHDQVAAIIHQILAHKHNLITDKLPYYKYTPQIILESPDYKLYWDRTILTDKTVHHNRPDITLHDKQNKIVYLIDIAIPNSHNLTSTHTNKLTKYTDLTIELKAQWKVNTVKTIPIIISTTGIIPKTLHTSLKTLNIHPLTFITLQKAVILNTCRIVRKFLSIT

SEQ ID NO: 23943 - protein, 1202 aa, Celastrina argiolus
MFHARFLSEFPDVAATKQRVSDQRRAIVQRKLLTTEEILNIKKEVEIILLQNDSDTTLQTECTNSQRMRWSDEINEIIMRSYYKITNLETDLTTYRPLLHAEIINKCPSIAHLSIQRIADQRRSIVNNRLLTRDHLKRIQEEVRQELHSHTAQITGNSTQFIEDHLHTLDNTVQLIETNTTDQGLSTHQVDNNLEKLPANVQKEMEDLFIEIFHTFKDTDATTRPSLPKLKTSKKLAMIIAHLNTTILPNLLNNDTDFFTLQTYIYTAAYTSVISCGVKIKQNTYINRIRGIPSWQKRLENKISKLRKSIGRLTEYTKGVRSTKLEKHIQLIKEQYKIHTQHETENTEIIHFLDTLKQKLNALSNRLKRYKECTLRKTQNKQFSNNEKLFYRKLTQQQTNNTENNTNNLTPTPEAMHTFWSQIWSNTAEHETNIWIEEDRDRLADLPEMIFEQIDIDQMRAVINKTHNWKATGSDNIHNFWYKKLSSTHTLLHKHINIFIHSLDTMPTYITQGITYMIPKDKLDATNPAKYRPITCLQNIYKIITACISELIYTHINNNNILAEEQKGCRKNSQGCKEQLLIDSVASQQALKQKRNIYTMYIDYKKAYDSVPHSWLIYILQHYKISPTITKYLENIMPQWNTRLKIMNSDKTIETDFIPIRRGIFQGDSLSPLWFCLALNPLSYILNKNSLGLKIKYNRQHTALSHLMFMDDIKLFANTQKDIHTLADITQIFSNNIRMEFGIDKCKIQAVKKGIVEHASYKLSNDNIIEPVDQVYGYKYLGYYQSQQIHHKDTKKSLQLKFRQRLHTILHTYLNAKNSTKAINTYAIPILTYSFGIIRWNQTELKALQRIVNTTMTKHRKHHPRACIQRQVLPKIEGGRGIIDIVNLHNKQITLLRKFFQTRAHTSTLHNAVCQADTYTPLHLADDNRQIHIYTNQEKIDTWSQKSLHGRHRLDLTITTVDKIASNAWLKQGELYPETVGFMLAIQDQVIDTKNYRKHIIRDSTVRSDHCRHCHKQPETIQHITGACSSITQTDYKHRHDQVAAIIHQILALKYNLITDKTPYYKYTPQIILDSTDYKLYWDRTILTDKTVHHNRPDITLHDKRNKTVYLIDIAIPNSHNLTTTHTTKVTKYTDLTIELKSQWQVNTVKTIPIIISSTGIIPKTLHTSLHTLNIHPLTFITLQKAVILNTCRIVRKFLSIS

SEQ ID NO: 23944 - protein, 991 aa, Celastrina argiolus
MFHTFKDTDATTRPSLPKLKTSKKLAMIIAHLNTTILPNLLNNDTDFFTLQTYIYTAAYTSVISCGVKIKQNTCINRIRGIPSWQKRLENKISKLRKSIGRLTEYTKGVRSTKLEKHIQLIKEQYKIHTQHETENTEIIHFLDTLKQKLNALSNRLKRYKECTLRKTQNKQFSNNEKLFYRKLTQQQTNNTENNTNNLTPTPEAMHTFWSQIWSNTAEHETNIWIEEDRDRLADLPEMIFEQIDIDQMRAVINKTHNWKATGSDNIHNFWYKKLSSTHTLLHKHINIFIHSLDTMPTYITQGITYMIPKDKLDATNPAKYRPITCLQNIYKIITACISELIYTHINNNNILAEEQKGCRKNSQGCKEQLLIDSVASQQALKQKRNIYTMYIDYKKAYDSVPHSWLIYILQHYKISPTIIKYLENIMPQWNTRLKIINSDKTIETDFIPIRRGIFQGDSLSPLWFCLALNPLSHILNKNSLGLKIKYNRQHTALSHLMYMDDIKLFANTQKDIHTLADITQIFSNNIRMEFGIDKCKIQAVKKGIVEHASYKLSNDNIIEPVDQVYGYKYLGYYQSQQIHHKDTKKSLQLKFRQRLHTILHTYLNAKNSTKAINTYAIPILTYSFGIIRWNQTELKALQRIVNTTMTKHRKHHPRACIQRQVLPKIEGGRGIIDIVNLHNKQITLLRKFFQTRAHTSTLHNAVCQADSYTPLHLADDNRQIHIYTNQEKIDTWSQKSLHGRHRLDLTNTTVDKIASNAWLKQGELYPETVGFMLAIQDQVIDTKNYRKHIIRDSTVRSDHCRHCHKQPETIQHITGACSSITQTDYKHRHDQVAAIIHQILALKHNLITDKTPYYKYTPQIILDSTDYKLYWDRTILTDKTVHHNRPDITLHDKRNKTVYLIDIAIPNSHNLTTTHTTKVTKYTDLTIELKSQWQVNTVKTIPIIISSTGIIPKTLHTSLHTLNIHPLTFITLQKAVILNTCRIVRKFLSIS

SEQ ID NO: 23945 - protein, 1349 aa, Celastrina argiolus
MRLRTRNIPQAGTGARSDGESRPGPSGSGSPTYSGEGTVSHNENIIHHRRDNSSSRLSPISSLFSSPPSSPASYLIANVSSSSESSLTSSIENTVDVVQEAITAKDTAPTYSKGCKRKKWSKEMNAYIMHQFYILTKLGTDTKSYVTQLHARFSSEFPDVAATKQRVSDQRRAIVQRKLLTTEEILNIKKEVEIILLQNDSDISLQTECTNSQRLRWSDEINEIIMRSYYKITNLETDLTTYRPLLHAEIINKCPSIAHLSIQRIADQRRSIVNNRLLTSDHLKRIQEEVRQELHSHTAQITENSTQFIEDDLHTLDNTVQLIETNTTDQSLSTHQVDNNLEKLPTNVQKQIEDLFIEMFHTFKDSDATTRPSLPKLKTSKKLAMIIAHLNTTILPNLLNNDTDFITLQTYIYTAAYTSVISCGVKIKQNTCINRIRGIPSWQKRLENKISKLRKSIGRLTEYTRGVRSTKLEKHIQLIKEQYKIHTQHETENTEIIHFLDTLKQKLNALSNRLKRYKECTLRKTQNKQFSNNEKLFYRKLTQQQTNNTGNNTNNLTPTPEAMHTFGSQIWSNTAEHETNIWIEEDRDRLADLPEMIFEQIDIDQMRAVINKTHNWKATGSDNIHNFWYKKLSSTHTLLHKHINIFIHSLDTMPTYITQGITYMIPKDKLDATNPAKYRPITCLQNIYKIITACISELIYTHINNNNILAEEQKGCRKNSQGCKEQLLIDSVASQQALKQKRNIYTMYIDYKKAYDSVPHSWLIYILQHYKISPTITKYLENIMPQWNTRLKIINSDKTIETDFIPIRRGIFQGDSLSPLWFCLALNPLSYILNKNSLGLKIKYNRQHTALSHLMYMDDIKLFANTQKDIHTLADITQIFSNNIRMEFGIDKCKIQAVKKGIVEHASYKLSNDNIIEPVDQVYGYKYLGYYQSQQIHHKDTKKLLQLKFRQRLHTILHTYLNAKNSTKAINTYAIPILTYSFGIIRWNQTELKALQRIVNTTMTKHRKHHPRACIQRQILPKIEGGRGIIDIVNLHNKQITLLRKFFQTHAHTSTLHNAVCQADTYTPLHLADDNRQIHIYTNQEKIDTWSQKSLHGRHRLVLTNTAVDKIASNAWLKQGEMFPETVGFMLAIQDQVIDTKNYRKHIIRDSTVRSDHCRHCHKQTETIQHITGACSSITQTDYKHRHDQVAAIIHQTLALKHNLITDKTPYYKYTPQIILDSTDYKLYWDRTILTDKTVHHNRPDITLHDKRNKTVYLIDIAIPNSHNLTTTHTTKVTKYTDLTIELKSQWQVNTVKTIPIIISSTGIIPKTLHTSLHTLNIHPLTFITLQKAVILNTCRIVRKFLSIS

SEQ ID NO: 23946 - protein, 924 aa, Glaucopsyche alexis
MYNNTADTKKSRIIPWWQKRLERRINNLRASIGRLTEYARGTRSNHLEKQINKITQQYKIHSQHEAQNSDITHFLDTLKQKLNLLSNRLKRYNECTIRKTQNKEFSNNEKLFYRKLTQKNSNQHNNPNNNLTPTAESMHIYWSNIWSYATQHETSKWIEEDKERLKDMPEMEFGQIQLEQIKAVIAKTHNWKATGSDNIHNFWYKKLTSTHTLLHKHINSFIQSPDTIPSFITEGITYMLPKDNSDTINPAKYRPITCLQNIYKIITACISNLIYTHIHKHNILAEEQKGCRKFSQGCKEQLIIDSVISQQALKQKRSIYTMYIDYKKAFDSVPHSWLIYILKHYKISPTIRSCLEKTMPNWHTKLKIFDSTQTIETDYIYIRRGIFQGDSLSPLWFCLALNPLSFILNENDRGFKIKYNSHHTSLSHLMYMDDIKLFANTQNDIHILADLTQTFSNDIHMDFGIDKCKIQAVKKGTIEHAQYKLNNDEIIESVDPLDGYKYLGYNQSQQIHYKETKKLLQQKFKERLHKILHTHLNSKNTIKAINTYAIPILTYSFGIIRWNQTEMKNLQRLMNTIMTKHRKHHPRACVQRLTLPKIEGGRGLIDILNLHNRQITLLRTFFYNHAQTKTLHQAICFADTHTPLTLADKTKKINTYTNHQKIDAWTQKSLHSRHRLDLTSNAVDKIASNAWLRQGELFPETEGFMLAIQDQVIDTKNYRKHIIRDRNLSNDHCRHCHKQPETIQHITGACSSITQTDYKHRHDQVAAIIHQILALKYNFITDKTPYYKYTPQIILDSPDYKLYWDRTILTDKTIHHNRPDITLHDKRNRTVYLIDIAIPNSHNLTTTHTTKVTKYIDLTIELKSQWKVNAVKTLPIIISSTGIIPNTLHNSLKTLNIHPLTYITLQKAVILNTCRIVRKFLSIT

SEQ ID NO: 23947 - protein, 1346 aa, Plebejus argus
MRLRNRDIPQAGTEAESNGESRPGPSGPGCPPYSGVGTVSQNHNITIQRGTSSPCLSPISSLFSSLPSSPASYLMTYQSSSSNSSPSIESTMDVVQEASLARVTAPARSVKCKRQKWSKEMNIFIMHQYFILTKLETDTKSYLTQLYTLFSSQFPEIEATKQRVGDQRRAIVKRHLLSHEEILQIKNDANLFLHNQNLHTNGQDMTQLDSTTHTQRMRWTTDINEKIMKAYYRITRLETDLTTYRPLLHQEITATCPSIAHLSIQRIADQRRSIVSNNLLSNDQLKAIREDVQKEIDILATERSLEHVEQPQSPLNNSAPTLTEDCIHNLNDIIVPTQNHLSVKLPKELQTQLKEMFTETYEVFKDTDPTSRPPLPKLKSSKKLYQIVTYINTDILPNLLEDDTDFNTLHTYLYTAAYTSTKFYGVRINTNTDCAHRMRTTPWWHKRLEDKINKLRASIGRLTAYAKGTHSPHLEKEITKIKEQYKIHSQHESENSDIAHFLDTLKQKLNILSNRLKRYNQCTTRKIQNKEFNNNEKLFYRKLTQKENNKNNPTPSPESMHTYWSNIWSHPTQHENSKWIEEDKDRLKDLPEMEFEEIQLEQMKAVIARSHNWKATGSDNIHNFWFKKFTSIHILLHKHINSFIQSPDTIPSFITQGITYMLPKDNSDTTNPEKYRPITCLQNIYKIITACITDLIYTHISKHNILAEEQKGCRKFSQGCKEQLIIDSVISQQALKQKRSIYTMYIDYKKAFDSVPHSWLIYILKHYKISPIITNCLEKTMPNWQTKLKFFDSSKAAETDIISIRRGIFQGDSLSPLWFCLALNPLSHILNQSNRGFKIKHNSHHTSLSHLMFMDDIKIFANTQNNIHTLADLTLTFSNDIHMNFGIDKCKIQAVKNGTIEHTEYKLSNDEIIEAVDPIEGYKYLGYYQSQQIHYKETKNILRQKFKERLHRILHTHLNAKNTIKAINTYAIPILTYSFGIIRWNQTELKNLQRIINTTMTKHRKHHPKACVQRLTLSRNEGGRGLIDILNLHNKQITLLRTFFYNQAQYKTLHQAICNSDTYTPLTLADNTKKINTYTNQQKIDAWSQKSLHGRHRLDLTNNAVDRIASSAWLKQGELFPETEGFMLAIQDQVIDTKNYRKHIIKDSNYRNDHCRHCHKHPETIQHITGACSSITQTDYKHRHDQVAAIIHQTLALKHKLITDKTPYYKYTPQIILDSPDYKLYWDRTILTEKTVHHNRPDITLHDKLNSTVYLIDIAIPNSHNLATTHTTKVTKYIDLTIELKSQWKVNVVKTIPIVISSTGIIPKTLHSSLKTLNIHPLTYITLQKAVILNTCRIVRKFLSIT

SEQ ID NO: 23948 - protein, 1371 aa, Glaucopsyche alexis
MRLRNRNIPQAGTGASSNGESRPGPSGPGCPTYSGVGTVSHNDIILHSRDNSLSRMSPISSLFSSPPSSPASYLIANQSSSPNSSLPSIESTVDVVQEAISARISAPAHSNRCKRKKWSKEMNIFIMHHYFILTKLETNTQSYLTQLHTLFSSQFPEMEASKQRIGDQRRAIVQRHLLSHQEILSIKNDVKAFLHNLNEHLTNGQDMTQLDSTDIDCTQQRMRWSTEINETIMRTYYRITKLETDLTTYRPLLHQEITTTCPSIAHLSIQRIADQRRSIVSNHLLSSDKLKRIREEVQKELDILAAENIEHTEQQTDDITTLPNVPDVNPTQSPLGDSIPLPIEDGCNNLNDNPVPLQNRVPVKLSTELETQIKRIFTETYNLFKDAAPTTRPSLPKLKTSKKLYQIVDHLNTEILPNILKDDTDFSTLHTYIYTAAYTSAKISGVKMYNNTADTKKSRIIPWWQKRLERRINNLRASIGRLTEYARGTRSNHLEKQINKITQQYKIHSQHEAQNSDITHFLDTLKQKLNLLSNRLKRYNECTIRKTQNKEFSNNEKLFYRKLTQKNSNQHNNPNNNLTPTAESMHTYWSNIWSYATQHETSKWIEEDKERLKDMPEMEFGQIQLEQIKAVIAKTHNWKATGSDNIHNFWYKKLTSTHTLLHKHINSFIQSPDTIPSFITEGITYMLPKDNSDTINPAKYRPITCLQNIYKIITACISNLIYTHIHKHNILAEEQKGCRKFSQGCKEQLIIDSVISQQALKQKRSIYTMYIDYKKAFDSVPHSWLIYILKHYKISPTIISCLEKTMPNWHTKLKIFDSTQTIETDYIYIRRGIFQGDSLSPLWFCLALNPLSFILNENDRGFKIKYNSHHTSLSHLMYMDDIKLFANTQNDIHTLADLTQTFSNDIHMEFGIDKCKIQAVKKGTIEHAQYKLNNDEIIESVDPLDGYKYLGYNQSQQIHYKETKKLLQQKFKERLHKILHTHLNSKNTIKAINTYAIPILTYSFGIIRWNQTELKNLQRLINTIMTKHRKHHPRACVQRLTLPKIEGGRGLIDILNLHNRQITLLRTFFYNHAQTKTIHQAICFADTHTPLTLADKTKKINTYTNHQKIDAWTQKSLHSRHRLDLTSNAVDKIASNAWLRQGELFPETEGFMLAIQDQVIDTKNYRKHIIRDRNLSSDHCRHCHKQPETIQHITGACSSITQTDYKHRHDQVAAIIHQILALKYNFITDKTPYYKYTPQIILDSPDYKLYWDRTILTDKTIHHNRPDITLHDKRNRTVYLIDIAIPNSHNLTTTHTTKVTKYIDLTIELKSQWKVNAVKTIPIIISSTGIIPNTLHNSLKTLNIHPLTYITLQKAVILNTCRIVRKFLSIT

SEQ ID NO: 23949 - protein, 1352 aa, Glaucopsyche alexis
MRLRTRNIPQAGTGAKSNGESRPGPSGPGCPAYSGEGTVSHNDNITLHERDNSSSRLSPISSLFSSPPSSPASYLIANESRSSHSSLSPPIEFSVDVVQEAIPARDTAPAHSKVCKRKKWSKEMNAYIMHQYYILTKLGTDTKSYVTQLHTRFSSKFPDMAATKQRVSDQRRAIAQRQLLTNEELLNIKKEVEILLQNESGNSVSTAECTPFQRMRWSDEINEIIMRSYYQITKLETDLTTYRPLLHKEIITKCPSIAHLSIQRIADQRRAIVNNHLLRNDHLNRIREEVRQELETHTALITENTTQLTEDDQSTIIQHTIDDNTGILMQTNPTYQNVSLDQVNNNSEKLPNDLQKQIEDQFFEMFHTFKDTDPTTRPSLPKLKTSKKLYLIINHLNATILPNLLNNDTDFNTLQTYIYTAAYASITSYGVKIKHNVCSNNIRTIPSWQKRLENKISNLRKSIGRLTEYGRGVRSTRLEKYIHKIKEQYRIHTQHETENTDIIHFLDTLKQKLNALSNRLKRYKECTLRKTQNKQFSNNEKLFYRKLTQQINTEDSSDKVTPTPESMHTFWSQIWSNPVEHEPNNWIEEDKERLTDLPEMTFEQIHIDQIKAVINKTHNWKATGSDNIHNFWYKKLSCTHTLLHKHINTFIQSPETMPLYITQGITYMLPKDKLDATNPAKYRPITCLQTIYKIITACLSELIYTHIHKNNILADEQKGCRKNSQGCKEQLIIDSVASQQALKQKRSIYTMYIDYKKAYDSVPHSWLIYILHHYKISPIITKYLENIIPQWNTRLKIIDSDKTIETDFIPIRRGIFQGDSLSPLWFCLALNPLSYILNKNNIGFNIKYNRQHTSLSHLMYMDDIKLFANTQKNLHTLADLTQIFSNNIRMGFGIDKCKIQAVKKGIVEHTSYKLNNDDIIEPVDPVDGYKYLGYYQSQQIHHKETKKSLQQKFRERLHKILHTHLNAKNSTKAINTYAIPILNYSFGIIRWNQTELKALQRIVNTTMTKHRKHHPRACIQRLILPKIEGGRGLIDIVNLHNKQITLLRNFFQRNAHTSILHNAVCQADTYTPLQLATNKQIHIYTNQEKIDTWIKKSLHGRHRLDLTNDAVDKIASNAWLKQGELFPETEGFMIAIQDQVIDTKNYRKYIIRDMTDGSDHCRHCHKQPETIQHITGACSSITQTDYKHRHDQVAAIIHQTLALKHNLITEKTPYYKYTPQIILDSSDYKLYWDRTILTDKTVHHNRPDITLHDKLNRTVYLVDIAIPNSHNLTTTHTNKVTKYTDLTIELKSQWHVNTVKTIPIIISSTGIIPKTLHTSLRTLNIHPLTYITLQKAVILNTCRIVRKFLSIN

SEQ ID NO: 23950 - protein, 1352 aa, Glaucopsyche alexis
MRLRTRNIPQAGTGAKSNGESRPGPSGPGCPAYSGEGTVSHNDNITLHERDNSSSRLSPISSLFSSPPSSPASYLIANESRSSQSSLSPPIEFSVDVVQEAIPARDTAPAHSKVCKRKKWSKEMNAYIMHQYYILTKLGTDTKSYVTQLHTRFSSKFPDMAATKQRVSDQRRAIAQRQLLTNEELLNIKKEVEILLQNESGNSVSTAECTPFQRMRWSDEINVIIMRSYYQITKLETDLTTYRPLLHKEIITKCPSIAHLSIQRIADQRRAIVNNHLLRNDHLNRIREEVRQELETHTALITENTTQLTEDDQSIIIQHTIDDNTGILMQTNPTDQNVSLDQVNNNSEKLPNDLQKQIEDLFFEMFHTFKDTDPTTRPSLPKLKTSKKLYLIINHLNATILPNLLNNDTDFNTLQTYIYTAAYASITSYGVKIKHNVCSNNIRTIPSWQKRLENKISNLRKSIGRLTEYGRGVRSTRLEKYIHKIKEQYSIHTQHETENTDIIHFLDTLKQKLNALSNRLKRYKECTLRKTQNKQFSNNERLFYRKLTQQINTEDSSDKVTPTPESMHTFWSQIWSNPVEHEPNNWIEEDKERLTDLPEMTFEQIHIDQIKAVINKTHNWKATGSDNIHNFWYKKLSCTHTLLHKHINTFIQSPETMPLYITQGITYMFPKYKLDATNPAKYRPITCLQTIYKIITACLSELIYTHIHKNNILADEQKGCRKNSQGCKEQLIIDSVASQQALKQKRSIYTMYIDYKKAYDSVPHSWLIYILHHYKISPIITKYLENIIPQWNTRLKIIDSDKTIETDFIPIRRGIFQGDSLSPLWFCLTLNPLSYILNKNNIGFNIKYNRQHTSLSHLMYMDDIKLFANTQKNLHTLADLTQIFSNNIRMEFGIDKCKIQAVKKGIVEHTSYKLNNDDIIEPVDPVDGYKYLGYYQSQQIHHKETKKSLQQKFRERLHKILHTHLNAKNSTKAINTYAIPILTYSFGIIRWNQTELKALQRIVNTTMTKHRKHHPRACIQRLILPKIEGGRGLIDIVNLHNKQITLLRNFFQRNAHTSILHNAVCQADTYTPLQLATNKQIHIYTNQEKIDTWIKKSLHGRHRLDLTNDAVDKIASNAWLKQGELFPETEGFMIAIQDQVIDTKNYRKHIIRDRTDGSDHCRHCHKQPETIQHITGACSSITQTDYKHRHDQVAAIIHQTLALKHNLITEKTPYYKYTPQIILDSSDYKLYWDRTILTDKTVHHNRPDITLHDKLNRTVYLIDIAIPNSHNLTTTHTNKVTKYTDLTIELKSQWHVNTVKTIPIIISSTGIIPKTLHTSLRTLNIHPLTYITLQKAVILNTCRIVRKFLSIN

SEQ ID NO: 23951 - protein, 1247 aa, Phlogophora meticulosa
MRLRSRVLPQAGTVANRDGESRPGPPGPGSPTYSGEGTVSHQPAQCRTVAVQHVQLSPCSSPKSSLFSSIPSSPPSYLDIDHESISSNPSSPSPPLQPAMNVVQEANPAEITAPVQGGRRTRKKWTKEMNSFIMRHYFILSELETNTKTYLTPLHARFIEEFPEMKIGKQRVGDQRRAIVQRQFLTKQEIETIKEEVRVLLQNQPPSHTDTDNTQTRRIRWSDNLNTAIIKSYYRITKLETDLTTYRPLLHQDITSKYPEIAHLSAQRIADQRRSIINNRLLSVDQLKRIREEVQNEIGTIITHTPEDITQHVEDNLTPQTTQPLQTNNIELNPEAEQTTNVETPNLSTELQQQLQEMYTETFDKFKDTIPTNRPYLPKLKPSKKLAVITKHLNSDILPKTLSSDTDFNTLQTAIYSAAYTVAKFNGARIQKGNRLNNKPQSLPWWQRRLQGRINDLRADIGRLTEYTRGVRSQALEKHIIKIKQQYKIHTQHENENTDIEHFLDTLKQKLNTLSSRLRRYKQTTIRKTQNKQFCNNEKLFYRNLTQQHNNSPENNSTSPTPESLYTFWSNIWSNPVEHVHSQWVADDRDRLNDVPEMKFEKIKPDLLGTVIGKTHNLKATGSDNIHNFWYKKFTCTHTLLLEHINAFIQTPDTLPPYITQGITYMLPKDPSDMANPAKYRPITCLQNIYKIITSCLSECIYKHTHEHQVLAEEQKGCRKYSQGCKEQLTIDAVASKQALSQKRNIHTMYIDYKKAYDSVPHSWLVYILKHYKIHPTITAFLENTLLNWNTKLKICNSGSSTETNFIPIKRGIFQGDALSPLWFCLALNPLSNMLNTTDLGFKIKHDTHRTSFSHLMYMDDIKLFGSTLNEIYTLADTTQIFSKDICMEFGIDKCKIQSVHKGIVQPTSYELANHDVIDAVDPVEGYKYLGYSIYQSQQIHQKNTKKSLQQKFKNRLHKILHSHLNARNTIKAINTFAIPILTYSFGIIRWTQTDLKNLQRMINTSMTTHRKHHPRACIQRLTLPKIEGGRGLIDIINLHNKQITSLRTFFHTQSQHSTLHKAISQADTFTPLCLSDHTKSMETITNQQKIDTWTQKSLHGRHRLDLTNPNVDKIASNAWLKRGELFPETEGFMLAIQDQVIDTKNYRKFIIRDSTLRSDHCRHCHKQPETIQHITGACSSITQTDYKHRHDQVAAIIHQTLAYKHKLITEKTAYYKYTPQTILDSANYKMYWDRTILTDKTTPQPT

SEQ ID NO: 23952 - protein, 1356 aa, Spodoptera exigua
MRLRSRVIPQAGTGVNNDGESRPGPSSPGCPSYSGEGTVSQAAQSQAVAARHAPLSTCSSPTSSLFSSIPSSPASYINHQQSSSTNSSPLSLQSIGDVVQEAISAEITAPAHGGRRTRKTWTKQMNIFIMRHYFILTDLELNTKTYLTPLHARFTAEFPEMNASKQRIGDQRRAIVQRNLLTEQELQNIKKDVRLLLQNQPSLSQNNINNNHTQTGRIRWSAELNEAIMRSYYRLTNLETDLTTYRPLLHQDIISKCPSIAHLSAQRISDQRRSIVNNQLLSVDRLNQIREEVRSELASICTYSPELTTPQLTLQETQTTSTPININDNNPELTMSTITNEQNTQPLAQNTLNLSADLLGQLEQLYKDHYNKFKESDPTTRPYIPKLKSSRKLAAITTHLNAHILPNILTSETDFYTLQTHIYCAAYTTAIFNGARIKENNVIANKPGKAPWWQRRLEHRISELRANIGRLTEYTKGTRSQALENHISNIKKIYKTHTRHESENSDITHFLDTLKQKLNALANRLRRYKETTTRKTQNTQFNNNEKLFYRKLNQQHSQENNTPLPSPESLHTFWSNIWSNSVTHHQNSWIAEDRERWIDTPEMKFDQINLQLLQTVIARTHNWKTPGSDNIHNFWYKKLTCTHTLLLKHINTFIQSPDTMPPYITRGTTYMLPKDLSDTANPAKYRPITCLQNVYKIITSCLSELIYKHTQEHNILAEEQKGCRKNSRGCKEQLTIDAVACKQALKQKRDIHTMYIDYKKAYDSIPHSWLIYILKHYKIHPIIIQFLEKILPTWKTKLKIRHGNQNTETEFIPIKRGIFQGDALSPLWFCLALNPLSNILNKNNIGFKIKHNSQHTGLTHLMYMDDIKLFAGTLNDIHILADITQRFSDDICMEFGIDKCKIQSVIKGTVEPTSYELRNNEIVDAVDPNEGYKYLGYYQSTEIHHNNTKKVLQQNFRHRLHKILHTHLNSRNTIKAINTFAIPILTYSFGIIRWTQTDLTTLQRIINTTMTKHRKHHPRACIQRLTLPKIEGGRGLIDITILHHNQILGLRKFFFNRSEHSPLHKAICEADTATPLCLGDHTKQITTITRQQKIQTWSQKSLHGRHRLDLTNPIVDKVASNAWLKRGELFPETEGFMLAIQDQVIDTKNYRKYIIRDSTLGSDHCRHCHRQPETIQHITGSCSSITQTDYKHRHDQVAAIIHQALAYKHKLIAEKIPYYKYTPQIILDSPEFKMYWDRTILTDKTVHHNRPDITFHDKINKIVYLIDIAIPNTHNLSSTHTNKLTKYVDLTIELKTQWQVHTVKTIPIIISSTGVIPKTLHTSLKTLDLHPLTFTLLQKAVILNTCRIVRKFLSIN

SEQ ID NO: 23953 - protein, 1349 aa, Spodoptera frugiperda
MRLRSRVIPQAGTEVNNDGESRPGPSSPGCPSYSGEGTVSHAAQPQAVAAQLDQVSICSSPTSSLFSSIPSSPASYLNNHQSSSANSSPLSFHSARDVVQEAIPAEVTAPAQGGRRTRKTWTKQMNIFIMRHYFILTDLESNTRTYLTPLHARFTAEFPEMNASKQRIGDQRRAIVQRNFLTNEEISNIKEEVRLLLQHDPSASHNTDTTHTSSRRMRWTDHLNETIMRSYYRLTNLETDFTTYRTLLHEDIIAKCPSIAHLSAQRIADQRRSIVNNQLLSTDRLDQIREEVRSELALIRSNSPDYTNIIPQQSTPETLTQHIESTTPTNTNDQNIQQLAQNTVNLSPEIIEQLEQMYNETYNKFKNSDPTARPYIPKLRSSRKLAAITNCLNTHILPMTLTSDTDFNTLQTTIYCAAYTVAKFNGARIRENTQCNYQPEKVPWWQKRLERRISELRVNIGRLSEYAKGVRSEALEIHVHNIKRIYKTHTQHEAENTDITHFLDTLKQKLNTLANRLRRYRETTIRKKQNTQFCNNEKLFYRKLTQQNNAQGNNTALPTPESLHTFWSNIWSNPVTHHQNIWIEEDKERWRDIPEMKFDQIDLQLLQIVIARTHNWKAAGSDNIHNFWYKKLTCTHTLLLKHINTFIQSPDTLPPYITQGTTYMLPKDPADTVNPAKYRPITCLQNIYKIISSCLSESIYKHTQEQNILAEEQKGCRKNSKGCKEQLTIDAVVSKQALKQKRDIHTMYIDYKKAYDSVPHSWLIYILKHYRIHPTIIQFLEKIMPNWNTKLKIQNANQTTETEFISIKRGIFQGDALSPLWFCLALNPLSSMLNKNDLGFKIKHDSQHTRLTHLMYMDDIKLFAGTLNDIHTLADITQTFSNDICMEFGIDKCKIQSIINGTVEPTSYELRNHEIIESLDPNEGYKYLGYYQSTEIHHKNTKNTLQQNFKNRLHKILHTHLNSKNTIKAINTFAIPILTHSFGIVRWTKTDLTTLQRLINTTMTKHRKHHPRACIQRLTLPKTEGGRGLIDIANLHNNQITSLRRYFFNRSQHSPLHKAICQADTHTPLSLADHTKQFTTISKQQKIQTWTEKSLHGRHRLDLTNPIVDKIASNAWLKRGELFPETEGFMLAIQDQVIDTKNYRKYIIRDSTLGSDHCRHCHRQPETIQHITGACSSITQTDYKHRHDQVAAIIHQALAYKHKLIPEKTPYYKYTPQIILNSPEFKMYWDRTILTDKTIHHNRPDITLHDKKNKIVYLIDIAIPNTHNLSSTHTNKLSKYADLTIELKTQWQVHTVKTVPIIISSTGVIPKTLHTSLKTLDLHPLTFTLLQKAVILNTCRIVRKFLSID

SEQ ID NO: 23954 - protein, 1352 aa, Spodoptera frugiperda
MRLRSRVIPQAGTEVNNDGESRPGPSSPGCPSYSGEGTVSHAAQPQAVAAQHDQVSICSSPTSSLFSSLPSSPASYLNNHQSSSTNSSPLSFHSARDVVQEAIPAEVTAPAQGGRRTRKTWTKQMNIFIMRHYFILTDLESNTRTYLTPLHARFTAEFPEMNASKQRVGDQRRAIVQRNFLTNEEISNIKAEVRLLLQHDPSASHNTDTTHIVSRRMRWTDHLNETIMKSYYRLTNLETDFTTYRTLLHEDIISKCPSIAHLSAQRIADQRRSIVNNQLLSTDRLNQIREEVRNELALIRSNSPDYTNIIPQQITPETITQHNDNIESTTPTNTDNQDTQQLAQITANLSPEIIEQLKQMYSETYNKFKNSDPTARPYIPKLRSSRKLAAITNCLNTHILPMTLTSDTDFNTLQTTIYCAAYTAAKFNGAKIRENTQCNYQPEKVPWWQKRLERRISELRANIGRLSEYAKGVRSEALEIHVHNIKRIYKTHTQHEAENTDITHFLDTLKQKLNTLANRLRRYKETTTRKKQNTQFSNNEKLFYRKLSQQNNSQRNNTTLPTPESLHTFWSNIWSNPVTHHQNSWIEEDKERWRDIPEMKFDQINLQLLQTVIARTHNWKAAGSDNIHNFWYKKLTCTHTLLLKHINTFIQSPDTMPPYITQGTTYMLPKDPSDTVNPAKYRPITCLQNIYKIISSCLSESIYKHTQEQNILAEEQKGCRKNSKGCKEQLTIDAVVSKQALKQKRDIHTMYIDYKKAYDSVPHSWLIYILKHYRIHPTIIQFLEKIMPNWNTKLKIQNANQTTETEPISIKRGIFQGDALSPLWFCLALNPLSNMLNKNDLGFKIKHDSQHTRLTHLMYMDDIKLFAGTLNDIHTLADITQTFSNDICMEFGIDKCKIQSIINGTVEPTSYELRNHEIIESLDPNEGYKYLGYYQSTEIHHKNTKNTLQQNFKNRLHKILHTHLNSKNTTKAINTFAIPILTYSFGIVRWTKTDLTTLQRLINTTMTKHRKHHPRACIQRLTLPKTEGGRGLIDIANLHNNQITSLRRFFFNRSQHSPLHKAICQADTYTPLVLADHTKQLTVTSKQQKIQTWTEKSLHGRHRLDLTNPIVDKIASNAWLKRGELFPETEGFMLAIQDQVIDTKNYRKYIIRDSTLGSDHCRHCHRQPETIQHITGACSSITQTDYKHRHDQVAAIIHQALAYKHRLIPEKTPYYKYTPQIILNSPEFKMYWDRTILTDKTIHHNRPDITLHDKKNKIVYLIDIAIPNTHNLSSTHTNKLSKYADLTIELKTQWQVHTVKTVPIIISSTGVIPKTLHTSLKTLDLHPLTFTLLQKAVILNTCRIVRKFLSID

SEQ ID NO: 23955 - protein, 1414 aa, Spodoptera exigua
MHLAQSQVKCIFFQPNFLITSSIVPHSFLFPLSFNMYYSFTHAYSWTFPITTKSFHIYAMRLRSRVIPQAGTGVNNDGESRPGPSSPGCPSYSGEGTVSRAAQSQAVAARHAQSSTCSSPTSSLFSSIPSSPASYLNTQQSSPTNSSSSSLEAIRDVVQEATSAEITAPAQGGRRTRKTWTKDMNIFIMRHYFILTDLEVNTKTYLTPLHARFTAEFPEMNASKQRIGDQRRAIVQRNFLSEQERDNIKEEVRLLLQNQPSMPQYTDHNQTRRMRWTTNLNEAIMRSYYRLTNLETDLTTYRPLLHQDIILKCPSIAHLSAQRISDQRRSIVNNHLLSSDRLKQIKEEVRLELSSVNIDNTEFMTPQPATLETQTPLTPTHTNNNNIELATPTTTNDLNPQSTTQNTLNLPTDILGQLEEMYIDNYNKFRESDPTTRPYIPKLKSSRKLAAIIANINSHILPKVLSSDTDFHTLQTSIYCAAYTTAVFNGARIKENHEISNPSEKIPWWQKRLERRIRELRANIGRLTEYSKGVRSQALAHHIYKIKRKYKIHTHHETENTDIAHFLDTLKQKLNTLANRLRRYKETTNRKIQNTQFKNNERLFYRKLTQQNNRSQVNNTSLPTPETLHAFWSNIWSNPVTHHQSSWIDEDKQRWKDTPEMQFDQINLQLLQLVIGRTHNWKAAGSDNIHNFWYKKLSSIHPLLLKHINTFIQSPDTMPPYITQGTTYMLPKDPSDTANPAKYRPITCLQNIYKIITSCLSETIYKYIQEHNILTEEQKGCRKNSKGCKEQLTIDAVACEQALKQKRNIHTMYIDYKKAFDSVPHSWLIYILKHYKIHPRIINFLESTMPNWNTKLKIHNPNQITETDFIFIKRGIFQGDALSPLWFCLALNPLSNMLNKNNYGFKIKNNSEYTGLSHLMYMDDIKLFASTLSEIHSLADITETFSNDICMEFGIDKCKIQSVINGSAVPTSFELRNHEIIESVDPNDGYKYLGYYQSTALHHKNTKKTLQQNFKQRLHKILNTHLNSKNTIKAINTFAIPILTYSFGVVRWTKTDLTTLQRLINTTMTRRRKHHPRACIQRLTLPKIEGGRGIIDITNLHNNQIIGLRNFFYNCSQHSPLHKAVCQADTYTPLSLANPTKQIITTTKQQKIQTWTQKSLHGRHRLDLTNSIVDKTASNAWLKRGELFPETEGFMLAIQDQAIDTKNYRKYIIRDSTLGSDHSRHCHRQPETIQHITGACSSITQTDYKHRHDQVAAIIHQALAYKHKLILEKIPYYKYTPQIILNSPEFKMYWDRTILTDKTIHHNRPDITLHDKKNKIVFLIDIAIPNTHNLSSTHSNKLSKYADLTIELKTQWQVHTVKTVPIIISSTGVIPKTLHTSLKSLDLHPLTFTLLQKAVILNTCRIVRKFLTIE

SEQ ID NO: 23956 - protein, 1351 aa, Spodoptera frugiperda
MRLRSRVIPQAGTEVSNDGESRPGPSSPGCPSYSGEGTVSHAAQPQAVAAQHDQVSTCSSPTSSLFSSVPSSPASYLNNHQSSSANSSPLSFHSARDVVQEAIPAEVTAPAQGGRRTRKTWTKQMNIFIMRHYFILTDLESNTRTYLTPLHARFTAEFPEMNASKQRIGDQRRAIVQRNFLTNEEISNIKAEVRLLLQHDPSASHDTDTTHTSSRRMRWTDHLNETIIRSYYRLTNLETDFTTYRTLLHEDIISKCPSIAHLSAQRIADQRRSIVNNQLLSTDRLNQIREEVRNELALIRSNSPDYTNIIPQQITPEITQHNDNIESTTPTNTNDQNTQQLAQITANLSPEIIEQLEQMYSETYNKFKNSDPTARPYIPKLRSSRKLAAITSCLNTHILPMTLTSDTDFNTLQTTFYCAAYTAAKFNGAKIRENTQSNYQPEKVPWWQKRLERRISELRANIGRLSEYAKGVRSEALEIHIHNIKRIYKTHTQHEAENTDITHFLDTLKQKLNTLANRLRRYRETTIRKKQNTQFCNNEKLFYRKLSQQNNSQGNNSTLPTPESLHTFWSNIWSNPVTHHQNSWIEEDKERWRDIPEMKFDQIDLQLLQTVIARTHNWKAAGSDNIHNFWYKKLTCTHTLLLKHINTFIQSPDTMPPYITQGTTYMLPKDPSDTVNPAKYRPITCLQNIYKIISSCLSESIYKHTQEQNILAEEQKGCRKNSKGCKEQLTIDAVVSKQALKQKRDIHTMYIDYKKAYDSVPHSWLIYILKHYRIHPTIIQFLEKIMPNWNTKLKIQNANQTTETEFISIKRGIFQGDALSPLWFCLALNPLSNMLNKNDLGFKIKHDSQHTRLTHLMYMDDIKLFAGTLNDIHTLADITQTFSNDICMEFGIDKCKIQSIINGNVEPTSYQLRNHEIIESLDPNEGYKYLGYYQSTEIHHKNTKNTLQLNFKNRLHKILHTHLNSKNTIKAINTFAIPILTYSFGIVRWTKTDLTTLQRLINTTMTKHRKHHPRACIQRLTLPKIEGGRGLIDISNLHNNQITSLRRFFFNRSQHSPLHKAICQADTYTPLVLADHTKQLTITSKQQKIQTWTEKSLHGRHRLDLTNPIVDKIASNAWLKRGELFPETEGFMLAIQDQVIDTKNYRKYIIRDSTLGSDHCRHCHRQPETIQHITGACSSITQTDYKHRHDQVAAIIHQALAYKHRLIPEKTPYYKYTPQIILNSPEFKMYWDRTILTDKTIHHNRPDITLHDKKNKIVYLIDIAIPNTHNLSSTHTNKLSKYADLTIELKTQWQVHTVKTVPIIISSTGVIPKTLHTSLKTLDLHPLTFTLLQKAVILNTCRIVRKFLSID

SEQ ID NO: 23957 - protein, 1371 aa, Laothoe populi
MTNEAIVKNNIHAMRLRNRTIPQAGTGANGNGESRPGPSSPGCPTYSGEGTVSQQTAQFQTVAAQREQSTSSCSSPTSLFSSIPSSPPSYLDIIQESHSLNSSNSSLSLQSASDVVQEAILAKVTAPAEAGRRIHKKWTKEMNIFIMRHYFILTDIETNTKVYLTPLHERFNAQFPNMQVGKQRIGDQRRAIVQRKFLSEQEIRLIKEEVRNLLTQRELSAQINTDITNRHNRPTNRMRWTSDLNETIMRSYYRLTKLETDFTTYRPLLHQDIITKCPSIAHLSAQRISDQRRSIVNNRLLTLEQLDRIRKEVQRELASTSTPIFQDTIPLTPENSLPINTKSTETIITYRDCSPEQIINSNDLLNLSTELQQQLAEMFLETFNTFKDMHPTSRPSLPKLNPSKRLALIIKHLNTDLLPKTLTPDCDFNRIHTIIYCAAYTATKFNGAKMFDTDRLNSKVERIPTWQRRLERKINNLRVNIGRLTEYTRGGRSKALQIHIDKIKQQYKIHSQHETHNTDLTHYLDTLKQKLCALASRLRRYKETTLRKAQNKQFSNNEKNFYRKLTSTNNSSPESKKSLPTSESIHQFWSNIWSNPVPHIENTWIEKDRHGFKDLPGMEFDEIHIDLLTAVIAKTHNWKAPGSDNIHNFWYKKFSCTHPLLLKHINAFIRSPDTMPHYITQGITYMLPKDLSDTENPAKYRPITCLQNIYKIITACLSEIIYKYTNEHHILAEEQKGCRKNSQGCKEQLTIDAVVSKQAVSQKHNIHTMYIDYKKAFDSVPHTWLIYILKHYKIHPAIILFLERTMVNWSTKLKISNSDDIIETDFILIKRGIFQGDALSPLWFCLALNPLSNMLNKIDSGYKIQHDTNQTTLTHLMYMDDIKLFASTLNELHTLADIVQTFSHDIHMELGVDKCKIQSVNKGMVVPVMYKLANHNVIDAVDPVEGYKYLGYHQSQQIHHKEIKQILQQNFKTRLHKILHTHLNARNTIKAINTFAVPILTYSFGIIRWTQTDLKNLQRTINTTMTKHRKHHPRACIQRLTLPKHEGGRGLIDITNLHSKQITSLRTFFHNRSLHSTLHKAICEADKFTPLALANSTKQMMLNTNQQKIDHWTQKTLHGRHRHDLTSSNVDKIASNAWLKRGELFPETEGFMQAIQDQVIDTKNYRKYIIRDSSLSSDHCRHCHKHPETIQHITGACSSITQTDYKHRHDQVAAIIHQTLAFKYKLITEKTAYYKYTPKIILESPDYKLYWDRTLLTDKTVHHNRPDITLYDKHSKTVYLVDIAIPNTHNLTTTHTNKLSKYADLTIELKTQWRVQTIKTVPIIISSTGVIPKTLHTSLQTLNIHPLTFTLLQKAVILNTCRIVRKFLSIQ

SEQ ID NO: 23958 - protein, 1371 aa, Laothoe populi
MTNEAIVKNNIHAMRLRNRTIPQAGTGANGNGESRPGPSSPGCPTYSGEGTVSQQTAQFQTVAAQREQSTSSCSSPTSLFSSIPSSPPSYLDIIQESHSLNSSNSSLSLQSASDVVQEAIPAKVTAPAEAGRRIHKKWTKEMNIFIMRHYFILTDIETNTKVYLTPLHERFNAQFPNMQVGKQRIGDQRRAIVQRKFLSEQEIRLIKEEVRNLLTQRELSAQINTDITNRHNRPTNRMRWTSDLNETIMRSYYRLTKLETDFTTYRPLLHQDIITKCPSIAHLSAQRISDQRRSIVNNRLLTLEQLDRIRKEVQRELASTSTPIFQDTIPLTPENSLPINTKSTETIITYRDCSPEQIINSNDLLNLSTELQQQLAEMFLETFNTFKDMHPTSRPSLPKLNPSKRLALIIKHLNTDLLPKTLTPDCDFNRIHTIIYCAAYTATKFNGAKMFDTDRLNSKVERIPTWQRRLERKINNLRVNIGRLTEYTRGGRSKALQIHIDKIKQQYKIHSQHETHNTDLTHYLDTLKQKLCALASRLRRYKETTLRKAQNKQFSNNEKNFYRKLTSTNNSSPESKKSLPTSESIHQFWSNIWSNPVPHIENTWIEKDRHGFKDLPGMEFDEIHIDLLTAVIAKTHNWKAPGSDNIHNFWYKKFSCTHPLLLKHINAFIRSPDTMPHYITQGITYMLPKDLSDTENPAKYRPITCLQNIYKIITACLSEIIYKYTNEHHILAEEQKGCRKNSQGCKEQLTIDAVVSKQAVSQKHNIHTMYIDYKKAFDSVPHTWLIYILKHYKIHPAIILFLERTMVNWSTKLKISNSDDIIETDFILIKRGIFQGDALSPLWFCLALNPLSNMLNKIDSGYKIQHDTNQTTLTHLMYMDDIKLFASTLNELHTLADIVQTFSHDIHMELGVDKCKIQSVNKGMVVPVMYKLANHNVIDAVDPVEGYKYLGYHQSQQIHHKEIKQILQQNFKTRLHKILHTHLNARNTIKAINTFAVPILTYSFGIIRWTQTDLKNLQRTINTTMTKHRKHHPRACIQRLTLPKHEGGRGLIDITNLHSKQITSLRTFFHNRSLHSTLHKAICEADKFTPLALANSTKQMMLNTNQQKIDHWTQKTLHGRHRHDLTSSNVDKIASNAWLKRGELFPETEGFMQAIQDQVIDTKNYRKYIIRDSSLSSDHCRHCHKHSETIQHITGACSSITQTDYKHRHDQVAAIIHQTLAFKYKLITEKTAYYKYTPKIILESPDYKLYWDRTLLTYKTVHHNRPDITLYDKHSKTVYLVDIAIPNTHNLTTTHTNKLSKYADLTIELKTQWRVQTIKTVPIIISSTGVIPKTLHTSLQTLNIHPLTFTLLQKAVILNTCRIVRKFLSIQ

SEQ ID NO: 23959 - protein, 1349 aa, Spodoptera frugiperda
MRLRSRVIPQAGTEVNNDGESRPGPSSPGCPSYSGEGTVSHAAQPQAGAAQHDQVSTCSSPTSSLFSSVPSSPASYLNNHQSSSANSSPLSFHSARDVVQEAIPAEVTAPAQGGRRTRKTWTKQMNIFIMRHYFILTDLESNTRTYLTPLHARFTAEFPEMNASKQRIGDQRRAIVQRNFLTNEEISNIKEEVRLLLQHDPSASHDTDTTHTSSRRMRWTDHLNETIMRSYYRLTNLETDFTTYRTLLHEDIIAKCPSIAHLSAQRIADQRRSIVNNQLLSTDRLDQIREEVRSELALIRSNSPDYTNIIPQQSTPETLTQHIESTTPTNTNDQNTQQLAQNTVNLSPEIIEQLEQMYSETYNKFKNSDPTARPYIPKLRSSRKLAAITSCLNTHILPMTLTSDTDFNTLQTTIYCAAYTVAKFNGARIRENTQCNYQPEKVPWWQKRLERRISELRANIGRLSEYAKGVRSEALEIHVHNIKRIYKTHTQHEAENTDITHFLDTLKQKLNTLANRLRRYRETTIRKKQNTQFCNNEKLFYRKLTQQNNAQGNNTALPTPESLHTFWSNIWSNPVTHHQNIWIEEDKERWRDIPEMKFDQIDLQLLQTVIARTHNWKAAGSDNIHNFWYKKLTCTHTLLLKHINTFIQSPDTLPPYITQGTTYMLPKDPADTVNPAKYRPITCLQNIYKIISSCLSESIYKHTQEQNILAEEQKGCRKNSKGCKEQLTIDAVVSKQALKQKRDIHTMYIDYKKAYDSVPHSWLIYILKHYRIHPTIIQFLEKIMPNWNTKLKIQNANQTTETEFISIKRGIFQGDALSPLWFCLALNPLSSMLNKNDLGFKIKHDSQHIRLTHLMYMDDIKLFAGTLNDIHTLADITQTFSNDICMEFGIDKCKIQSIINGTVEPTSYELRNHEIIESLDPNEGYKYLGYYQSTEIHHKNTKNTLQQNFKNRLHKILHTHLNSKNTIKAINTFAIPILTYSFGIVRWTKTDLTKLQRLINTTMTKHRKHHPRACIQRLTLPKTEGGRGLIDIANLHNNQITSLRRYFFNRSQHSPIHKAICQADTHTPLSLADHTKQFTTISKQQKIQTWTEKSLHGRHRLDLTNPIVDKIASNAWLKRGELFPETEGFMLAIQDQVIDTKNYRKYIIRDSTLGSDHCRHCHRQPETIQHITGACSSITQTDYKHRHDQVAAIIHQALAYKHKLIPEKTPYYKYTPQIILNSPEFKMYWDRTILTDKTIHHNRPDITLHDKKNKIVYLIDIAIPNTHNLSSTHTNKLSKYADLTIELKTQWQVHTVKTVPIIISSTGVIPKTLHTSLKTLDLHPLTFTLLQKAVILNTCRIVRKFLSID

SEQ ID NO: 23960 - protein, 1351 aa, Phlogophora meticulosa
MRLRSRVLPQAGTVANRDGESRPGPPGPGSPTYSGEGTVSHQPAQCRTVAVQHVQSSPCSSPKSSLFSSIPSSPPSYLDIDHESISSNPSSPSPPLQPAMNVVQEANPAEITAPVQGGRRTRKKWTKEMNSFIMRHYFILSELETNTKTYLTPLHARFIEEFPEMKIGKQRVGDQRRAIVQRQFLTKQEIETIKEEVRVLLQNQPPSHTNTDNTQTRRIRWSDNLNTAIIKSYYRITKLETDLTTYRPLLHQDITSKYPEIAHLSAQRIADQRRSIINNRLLSVDQLKRIREEVQNEIGTIITHTPEDITQHVEDNLTPQTTQPLQTNNIELNPEAEQTTNVETPNLSTELQQQLQEMYTETFDKFKDTIPTNRPYLPKLKPSKKLAVITKHLNSDILPKTLSSDTDFNTLQTAIYSAAYTVAKFNGARIQEGNRLNNKPQSLPWWQRRLQGRINDLRADIGRLTEYTRGVRSQALEKHIIKIKQQYKIHTQHENENTDIEHFLDTLKQKLNTLSSRLRRYKQTTIRKTQNKQFCNNEKLFYRNLTQQHNNSPENNSTSPTPESLYTFWSNIWSNPVEHVHSQWVADDRDRLNDVPEMKFEKIKPDLLGTVIGKTHNWKATGSDNIHNFWYKKFTCTHTLLLEHINAFIQTPDTLPPYITQGITYMLPKDPSDMANPAKYRPITCLQNIYKIITSCLSECIYKHTHEHQVLAEEQKGCRKYSQGCKEQLTIDAVASKQALSQKRNIHTMYIDYKKAYDSVPHSWLVYILKHYKIHPTITAFLENTMLNWNTKLKICNSGSSTETDFIPIKRGIFQGDALSPLWFCLALNPLSNMLNTTDLGFKIKHDTHQTTFSHLMYMDDIKLFGSTLNEIYTLADTTQIFSKDICMEFGIDKCKIQSVHKGIVQPTSYELANHDVIDAVDPVEGYKYLGYYQSQQIHQKNSKKLLQQKFKNRLHKILHSHLNARNTIKAINTFAIPILTYSFGIIRWTQTDLKNLQRMINTSMTTHRKHHPRACIQRLTLPKIEGGRGLIDIINLHNKQITSLRTFFHTQSQHSTLHKAISQADTFTPLCLSDHTKSMETITNQQKIDTWTQKSLHGRHRLDLTNPNVDKIASNAWLKRGELFPETEGFMLAIQDQVIDTKNYRKFIIRDSTLRSDHCRHCHKQPETIQHITGACSSITQTDYKHRHDQVAAIIHQTLAYKHKLITEKTAYYKYTPQTILDSAYYKMYWDRTILTDKTIHHNRPDITLHDKQNKTVYLIDIAIPNTHNLTPTHTNKLSKYVDLTIELKTQWKVNKVKTIPIIISSTGVIPKTLHKSLKILDIHPLTFTLLQKAVILNTCRLVRKFLSID

SEQ ID NO: 23961 - protein, 1344 aa, Deilephila porcellus
MRLRNRTLPQAGTGVEYDGEPRPGPSGSGCPTYSGEGTVSHRTAQSRTAAVPHDQFLSCSSQSSLFSSAPSSPPSFLATYSSRSSSSSSFQSDHDVVQEAISAEDTAPVTGGRRTRKTWTKEMNIFIMRQYFILTDLETNTRQYLTHLHTRFTEQFPKMEVGKQRVGDQRRAIVQRSFLTQNEIDTIKAEVRNLLQNQPPSDVTNLEQTQSRRMRWTVELNEAIMRTYYKLTKLETDLTSYRPQLHQEIISKYPTLAHLSAQRISDQRRSIVNNKLLSSEQLNRILEEVRNEIGNADINYTVNTTLPVVDNPITTASEPRQIITDQPNSLSRPVTQDIRELTTDLQQQLELMFLDAINTFQDTSPISRPSLPKLKPSKKLSTIISHLNFNLLPRLLSSETDFKTTQTIIYCGAYTAAKFNGARISEKNSLLPKKHKIPWWQRRLEERINNLRINIGRMTEYARGVRSKTLEKHIDKLKQQYKIHSQHETQNTDLTHYLDTLKQKLITLASRLRRYKETTLRKTQNKQFYTNEKLFYRKLAQEHNSTIDTASLPTPEALHTFWSNIWSNPVEHNNNKWIEEDKQHVGNIPEMEFDQIDIDLLKSVISKTHNWKATGSDNIHNFWYKKFTCTHILLLKHINSFIQSPQTMPHYITQGITYMIPKDLSDTANPAKYRPITCLQNIYKIITSCLNESIYHYTHKYHILAKEQKGCRKHSQGCKEQLIIDAVVSNQALSQKRNIHTMYIDYKKAFDSVPHSWLIYILKHYKIHPTITSFLENTMLNWNTKLKICNNYKTTETEFIPIKRGIFQGDALSPLWFCLALNPLSNMLNKNNIGFNIRYNTQQTTLSHLMYMDDIKLFGSTLNEIHTLADITHTFSQDIHMEFGINKCKIQSVNQGIVESAPYELGNQEIIDVVDPTEGYKYLGYYQSRHIHHKEIKTTLQQNFKHRLHKILHTHLNARNTIKAINTYAIPILTYSFGIINWTQTDLKNLQRVINTTMTKHRKHHPRACIQRLILPKHEGGRGLIDITNLHNKQISKLRTFFHTHSQHSILHKAVSQADKYTPLKLTDQTKQLKIVTNHERIDTWSKKSLHGRHRLDLINPNVDKVASNAWLKKGELFPETEGFMLAIQDQVIDTKNYRKYIIRDSTLVSDHCRHCHKQPETIQHITGACSFITQTDYKHRHDQVAAIIHQTLAHKHKLITEKTSYYKYTPQIILESSDFKLYWDRTILTDKTIHHNRPDITLHDKQNKTVYLIDIAIPNTHNLASTHTTKLTKYTDLSIELKTQWRVQSVKTIPIIISSTGVIPKTLHISLKTLNIHPLTYILLQKAIILNTCRIVRKFLSID

SEQ ID NO: 23962 - protein, 1351 aa, Phlogophora meticulosa
MRLRSRVLPQAGTVANRDGESRPGPPGPGSPTYSGEGTVSHQPAQCRTVAVQHVQSSPCSSPKSSLFSSIPSSPPSYLDIDHESISSNPSSPSPPLQPAMNVVQEANPAEITAPVQGGRRTRKKWTKEMNSFIMRHYFILSELETNTKTYLTPLHARFIEEFPEMKIGKQRVGDQRRAIVQRQFLTKQEIETIKEEVRVLLQNQPPSHTNTDNTQTSRIRWSDNLNTAIIKSYNRITKLETDLTTYRPLLHQDITSKYPEIAHLSAQRIADQRRSIINNRLLSVDQLKRIREEVQNEIGTIITHTPEDITQHVEDNLTPETTQPLQTNNIELNPEAEQTTNVETPNLSTELQQQLQEMYTETFDKFKDTIPTNRPYLPKLKPSKKLAVITKHLNSDILPKTLSSDTDFNTLQTAIYSAAYTVAKFNGARIQEGNRLNNKPQSLPWWQRRLQGRINDLRADIGRLTEYTRGVRSQALEKHIIKIKQQYKIHTQHENENTDILHFLDTLKQKLNTLSSRLRRYKQTTIRKTQNKQFCNNEKLFYRNLTQQHNNSPENNSTSPTPESLYTFWSNIWSNPVEHVHSQWVADDRDRLNDVPEMKFEKIKPDLLGTVIGKTHNWKATGSDNIHNFWYKKFTCTHTLLLEHINAFIQTPDTLPPYITQGITYMLPKDPSDMANPAKYRPITCLQNIYKIITSCLSECIYKHTHEHQVLAEEQKGCRKYSQGCKEQLTIDAVASKQALSQKRNIHTMYIDYKKAYDSVPHSWLVYILKHYKIHPTITAFLENTMLNWNTKLKICNSGSSTETDFIPIKRGIFQGDALSPLWFCLALNPLSNMLNTTDLGFKIKHDTHQTTFSHLMYMDDIKLFGSTLNEIYTLADTTQIFSKDICMEFGIDKCKIQSVHKGIVQPTSYELANHDVIDAVDPVEGYKYLGYYQSQQIHQKNTKKLLQQKFKNRLHKILHSHLNARNTIKAINTFAIPILTYSFGIIRWTQTDLKNLQRMINTSMTTHRKHHPRACIQRLTLPKIEGGRGLIDIINLHNKQITSLRTFFHTQSQHSTLHKAISQADTFTPLCLSDHTKSMETITNQQKIDTWTQKSLHGRHRLDLTNPNVDKIASNAWLKRGELFPETEGFMLAIQDQVIDTKNYRKFIIRDSTLRSDHCRHCHKQPETIQHITGACSSITQTDYKHRHDQVAAIIHQTLAYKHKLITEKTAYYKYTPQTILDSAYYKMYWDRTILTDKTIHHNRPDITLHDKQNKTVYLIDIAIPNTHNLTSTHTNKLSKYVDLTIELKTQWKVNKVKTIPIIISSTGVIPKTLHKSLKILDIHPLTFTLLQKAVILNTCRLVRKFLSID

SEQ ID NO: 23963 - protein, 754 aa, Phlogophora meticulosa
MKFEKIKPDLLGTVIGKTHNWKATGSDNIHNFWYKKFTCTHTLLLEHINAFIQTPDTLPPYITQGITYMLPKDPSDMANPAKYRPITCLQNIYKIITSCLSECIYKHTHEHQVLAEEQKGCRKYSQGCKEQLTIDAVASKQALSQKRNIHTMYIDYKKAYDSVPHSWLVYILKHYKIHPTITAFLENTMLNWNTKLKICNSGSSTETDFIPIKRGIFQGDALSPLWFCLALNPLSNMLNTTDLGFKIKHDTHQTTFSHLMYMDDIKLFGSTLNEIYTLADTTQIFSKDICMEFGIDKCKIQSVHKGIVQPTSYELANHDVIDAVDPVEGYKYLGYYQSQQIHQKNTKKLLQQKFKNRLHKILHSHLNARNTIKAINTFAIPILTYSFGIIRWTQTDLKNLQRMINTSMTTHRKHHPRACIQRLTLPKIEGGRGLIDIINLHNKQITSLRTFFHTQSQHSTLHKAISQADTFTPLCLSDHTKSMETITNQQKIDTWTQKSRHGRHRLDLTNPNVDKIASNAWLKRGELFPETEGFMLAIQDQVIDTKNYRKFIIRDSTLRSDHCRHCHKQPETIQHITGACSSITQRDYKHRHDQVAAIIHQTLAYKYKLITEKTAYYKYTPQTILDSANYKMYWDRTILTDKTIHHNRPDITLHDKQNKTVYLIDIAIPNTHNLTSTHTNKLSKYVDLTIELKTQWKVNKVKTIPIIISSTGVIPKILHKSLKILDIHPLTFTLLQKAVILNTCRLVRKFLSID

SEQ ID NO: 23964 - protein, 1351 aa, Phlogophora meticulosa
MRLRSRVLPQAGTVANRDGESRPGPLGPGSPTYSGEGTVSHQPAQSRTVAVQHVQSSPCSSPKSSLFSSIPSSPPSYIDIEHESISSNPSSPSPSLQPAMNVVQEATPAEISAPVQGGRRTRKKWTKEMNSFIMRHYFILSELETNTKTYLTPLHARFIEEFPEMKIGKQRVGDQRRAIIQRQFLTEQEIETIKEEVRVLLQNQPLSHTNVDNTQNRRIRWSDNLNTAIIKSYYRITKLETDLTTYRPLLHQDITSKYPEIAHLSEQRIADQRRSIVNNRLLSADQLNKIREEVQNEIGTIITHTPEDITQHVEDNLTPQTTQPLQTNNTELNPEAEPTINGETLNLTTELQQQLQEMYTETFDKFKDTNPTSRPYLPKLKPSKKLAVITKHLNSDILPKTLSSDTDFNTLQTAIYSAAYTVAKFNGARILEGNRLNNKPQSLPWWQRRLQGRINDLRADIGRLTEYTRGVRSQALEKHIIKIKQQYKIHTQHENENTDIEHFLDTLKQKLNTLSSRLRRYKQTTIRKTQNKQFCNNEKLFYRNLTQQHNNSPENNSTSPTSESLHTFWSNIWSNPVEHVHSQWVADDRDRLNDVPEMKFEKIKPDLLATIIVKTHNWKATGSDNIHNFWYKKFTCTHTLLLKHINSFIQAPDTLPPYITQGITYMLPKDPSDMANPAKYRPITCLQNIYKIITSCISECIYKHTHEHQVLAEEQKGCRKHSQGCKEQLTIDAVASKQALSQKRNIHTMYIDYKKAYDSIPHSWLVYILKHYKIHPTITDFLENTMLNWNTKLKICNSDSSTETDFIPIKRGIFQGDALSPLWFCLALNPLSNMLNTTDLGFKIKHDTHQTTLSHLMYMDDIKLFGSTLNEIHTLADTTQIFSKDICMEFGIDKCKIQSVHKGIVQPASYELANHDVIDAVDPVEGYKYLGYYQSQQIHQKNTKNVLKQKFKNRLHKILHSHLNARNTIKAINTFAIPILTYSFGIIRWTQTDLKNLQRMINTTMTTHRKHHPRACIQRLTLPKAEGGRGLIDIINLHNKQITSLRTYFHTQSQHSTLHKAISQADTFTPLYLSDHTKSMETITNQQNIDTWTQKSLHGRHRLDLTNPNVDKIASNAWLKRGELFPETEGFMLAIQDQVIDTKNYRKYIIRDSSLRSDHCRHCHKQPETIQHITGACSSITQTDYKHRHDQVAAIIHQTLAYKHKLITEKTTYYKYTPQTILDSPNYKMYWDRTILTDKTIHHNRPDITLHDKQNKTVYLIDIAIPNTHNLTSTHTNKLSKYVDLTIELKTQWKVNKVKTIPIIISSTGVIPKTLHKSLKILDIHPLTFTLLQKAVILNTCRLVRKFLSID

SEQ ID NO: 23965 - protein, 1190 aa, Phlogophora meticulosa
MLIIKIGKQRVGDQRRAIVQRQFLTKQEIETIKEEVRVLLQNQPPSHTNTDNTQTRRIRWSDNLNTAIIKSYYRITKLETDLTTYRPLLHQDITCKYPEIAHLSAQRIADQRRSIINNRLLSVDQLKRIREEVQNEIGTIITHTPEDITQHVEDNLTPQTTQPLQTNNIELNPEAEQTTNVETPNLSTELQQQLQEMYTETFDKFKDTIPTNRPYLPKLKPSKKLAVITKHLNSDILPKTLSSDTDFNTLQTAIYSAAYTVAKFNGARIQEGNRLNNKPQSLPWWQRRLQGRINDLRADIGRLTEYTRGVRSQALEKHIIKIKQQYKIHTQHENENTDIEHFLDTLKQKLNTLSSRLRRYKQTTIRKTQNKQFCNNEKLFYRNLTQQHNNSPENNSTSPTPESLYTFWSNIWSNPVEHVHSQWVADDRDRLNDVPEMKFEKIKPDLLGTVIGKTHNWKATGSDNIHNFWYKKFTCTHTLLLEHINAFIQTPDTLPPYITQGITYMLPKDPSDMANPAKYRPITCLQNIYKIITSCLSECIYKHTHEHQVLAEEQKGCRKYSQGCKEQLTIDAVASKQALSQKRNIHTMYIDYKKAYDSVPHSWLVYILKHYKIHPTITAFLENTMLNWNTKLKICNSGSSTETDFIPIKRGIFQGDALSPLWFCLALNPLSNMLNTTDLGFKIKHDTHQTTFSHLMYMDDIKLFGSTLNEIYTLADTTQIFSKDICMEFGIDKCKIQSVHKGIVQPTSYELANHDVIDAVDPVEGYKYLGYYQSQQIHQKNSKKLLQQKFKNRLHKILHSHLNARNTIKAINTFAIPILTYSFGIIRWTQTDLKNLQRMINTSMTTHRKHHPRACIQRLTLPKIEGGRGLIDIINLHNKQITSLRTFFHTQSQHSTLHKAISQADTFTPLCLSDHTKCMETITNQQKIDTWTQKSLHGRHRLDLTNPNVDKIASNAWLKRGELFPETEGFMLAIQDQVIDTKNYRKFIIRDSTLRSDHCRHCHKQPETIQHITGACSSITQTDYKHRHDQVAAIIHQTLAYKHKLITEKTAYYKYTPQTILDSAYYKMYWDRTILTDKTIHHNRPDITLHDKQNKTVYLIDIAIPNTHNLTSTHTNKLSKYVDLTIELKTQWKVNKVKTIPIIISSTGVIPKTLHKSLKILDIHPLTFTLLQKAVILNTCRLVRKFLSID

SEQ ID NO: 23966 - protein, 1351 aa, Phlogophora meticulosa
MRLRSRVLPQAGTVANRDGESRPGPPGPGSPTYSGEGTVSHQPAQCRTVAVQHVQSSPCSSPKSSLFSSIPSSPPSYLDIDHESISSNPSSPSPPLQPAMNVVQEANPAEITAPVQGGRRTRKKWTKEMNSFIMRHYFILSELETNTKTYLTPLHARFIEEFPEMKIGKQRVGDQRRAIVQRQFLTKQEIETIKEEVRVLLQNQPPSHTNTDNTQTSRIRWSDNLNTAIIKSYNRITKLETDLTTYRPLLHQDITSKYPEIAHLSAQRIADQRRSIINNRLLSVDQLKRIREEVQNEIGTIITHTPEDITQHVEDNLTPETTQPLQTNNIELNPEAEQTTNVETPNLSTELQQQLQEMYTETFDKFKDTIPTNRPYLPKLKPSKKLAVITKHLNSDILPKTLSSDTDFNTLQTAIYSAAYTVAKFNGARIQEGNRLNNKPQSLPWWQRRLQGRINDLRADIGRLTEYTRGVRSQALEKHIIKIKQQYKIHTQHENENTDIEHFLDTLKQKLNTLSSRLRRYKQTTIRKTQNKQFCNNEKLFYRNLTQQHNNSPENNSTSPTPESLYTFWSNIWSNPVEHVHSQWVADDRDRLNDVPEMKFEKIKPDLLGTVIGKTHNWKATGSDNIHNFWYKKFTCTHTLLLEHINAFIQTPDTLPPYITQGITYMLPKDPSDMANPAKYRPITCLQNIYKIITSCLSECIYKHTHEHQVLAEEQKGCRKYSQGCKEQLTIDAVASKQALSQKRNIHTMYIDYKKAYDSVPHSWLVYILKHYKIHPTITAFLENTMLNWNTKLKICNSGSSTETDFIPIKRGIFQGDALSPLWFCLALNPLSNMLNTTDLGFKIKHDTHQTTFSHLMYMDDIKLFGSTLNEIYTLADTTQIFSKDICMEFGIDKCKIQSVHKGIVQPTSYELANHDVIDAVDPVEGYKYLGYYQSQQIHQKNTKKLLQQKFKNRLHKILHSHLNARNTIKAINTFAIPILTYSFGIIRWTQTDLKNLQRMINTSMTTHRKHHPRACIQRLTLPKIEGGRGLIDIINLHNKQITSLRTFFHTQSQHSTLHKAISQADTFTPLCLSDHTKSMETITNQQKIDTWTQKSLHGRHRLDLTNPNVDKIASNAWLKRGELFPETEGFMLAIQDQVIDTKNYRKFIIRDSTLRSDHCRHCHKQPETIQHITGACSSITQTDYKHRHDQVAAIIHQTLAYKHKLITEKTAYYKYTPQTILDSAYYKMYWDRTILTDKTIHHNRPDITLHDKQNKTVYLIDIAIPNTHNLTSTHTNKLSKYVDLTIELKTQWKVNKVKTIPIIISSTGVIPKTLHKSLKILDIHPLTFTLLQKAVILNTCRLVRKFLSID

SEQ ID NO: 23967 - protein, 1344 aa, Deilephila porcellus
MRLRNRTLPQAGTGVEYDGEPRPGPSGSGCPTYSGEGTVSHRTAQSRTAAVPHDQFLSCSSQSSLFSSAPSSPPSFLATYSSRSSSSSSFQSDHDVVQEAISAEVTAPVTGGRRTRKTWTKEMNIFIMRQYFILTDLETNTRQYLTHLHTRFTEQFPKMEVGKQRVGDQRRAIVQRSFLTQNEIDTIKAEVRNLLQNQPPSDVTNLEQTQSRRMRWTVELNEAIMRTYYKLTKLETDLTSYRPQLHQEIISKYPTLAHLSAQRISDQRRSIVNNKLLSSEQLNRILEEVRNEIGNADINYTVNTTLPVVENPITTASEPRQIITDQPNSLSRPVTQDIRELTTDLQQQLEVMFLDAINTFQDTSPISRPSLPKLKPSKKLSTIICHLNSNLLPRLLSSETDFKTTQTIIYCGAYTAAKFNGARISEKNSLLPKKHKIPWWQRRLEERINNLRINIGRMTEYARGVRSKTLEKHIDKLKQQYKIHSQHETQNTDLTHYLDTLKQKLNTLASRLRRYKETTLRKTQNKQFYTNEKLFYRKLAQEHNSTIDTASLPTPEALHTFWSNIWSNPVEHNNNKWIEEDKQHVGNIPEMEFDQIDIDLLKSVISKTHNWKATGSDNIHNFWYKKFTCTHILLLKHINSFIQSPQTMPHYITQGITYMIPKDLSDTANPAKYRPITCLQNIYKIITSCLNESIYHYTHKYHILAKEQKGCRKHSQGCKEQLIIDAVVSSQALSQKRNIHTMYIDYKKAFDSVPHSWLIYILKHYKIHPTITSFLESTMLNWNTKLKICNNYKTTETEFIPIKRGIFQGDALSPLWFCLALNPLSNMLNKSNIGFNIRYNTQQTTLSHLMYMDDIKLFGSTLNEIHTLADITHTFSQDIHMEFGINKCKIQSVNQGIVESAPYELGNQEIIDVVDPTEGYKYLGYYQSRHIHHKEIKTTLQQNFKHRLHKILHTHLNARNTIKAINTYAIPILTYSFGIINWTQTDLKNLQRVINTTMTKHRKHHPRACIQRLILPKHEGGRGLIDITNLHNKQISKLRTFFHTHSQHSILHKAVSQADKYTPLKLTDQTKQLKIVTNHERIDTWSKKSLHGRHRLDLINPNVDKVASNAWLKKGELFPETEGFMLAIQDQVIDTKNYRKYIIRDSTLVSDHCRHCHKQPETIQHITGACSFITQTDYKHRHDQVAAIIHQTLAHKHKLITEKTSYYKYTPQIILESSDFKLYWDRTILTDKTIHHNRPDITLHDKQNKTVYLIDIAIPNTHNLASTHTTKLTKYTDLSIELKTQWRVQSVKTIPIIISSTGVIPKTLHTSLKTLNIHPLTYILLQKAIILNTCRIVRKFLSID

SEQ ID NO: 23968 - protein, 1351 aa, Phlogophora meticulosa
MRLRSRVLPQAGTVANRDGESRPGPPGPGSPTYSGEGTVSHQPAQCRTVAVQHVQSSPCSSPKSSLFSSIPSSPPSYLDIDHESISSNPSSPSPPLQPAMNVVQEANPAEITAPVQGGRRTRKKWTKEMNSFIMRHYFILSELETNTKTYLTPLHARFIEEFPEMKIGKQRVGDQRRAIVQRQFLTKQEIETIKEEVRVLLQNQPPSHTNTDNTQTRRIRWSDNLNTAIIKSYYRITKLETDLTTYRPLLHQDITSKYPEIAHLSAQRIADQRRSIINNRLLSVDQLKRIREEVQNEIGTIITHTPEDITQHVEDNLTPQTTQPLQTNNIELNPEAEQTTNVETPNLSTELQQQLQEMYTETFDKFKDTIPTNRPYLPKLKPSKKLAVITKHLNSDILPKTLSSDTDFNTLQTAIYSAAYTVAKFNGARIQEGNRLNNKPQSLPWWQRRLQGRINDLRADIGRLTEYTRGVRSQALEKHIIKIKQQYKVHTQHENENTDIEHFLDTLKQKLNTLSSRLRRYKQTTIRKTQNKQFCNNEKLFYRNLTQQHNNSPENKSTSPTPESLYTFWSNIWSNPVEHVHSQWVADDRDRLNDVPEMKFEKIKPDLLGTVIGKTHNWKATGSDNIHNFWYKKFTCTHTLLLEHINAFIQTPDTLPPYITQGITYMLPKDPSDMANPAKYRPITCLQNIYKIITSCLSECIYKHTHEHQVLAEEQKGCRKYSQGCKEQLTIDAVASKQALSQKRNIHTMYIDYKKAYDSVPHSWLVYILKHYKIHPTITAFLENTMLNWNTKLKICNSGSSTETDFIPIKRGIFQGDALSPLWFCLALNPLSNMLNTTDLGFKIKHDTHQTTFSHLMYMDDIKLFGSTLNEIYTLADTTQIFSKDICMEFGIDKCKIQSVHKGIVQPTSYELANHDVIDAVDPVEGYKYLGYYQSQQIHQKNSKKILQQKFKNRLHKILHSHLNARNTIKAINTFAIPILTYSFGIIRWTQTDLKNLQRMINTSMTTHRKHHPRACIQRLTLPKIEGGRGLIDIINLYNKQITSLRTFFHTQSQHSTLHKAISQADTFTPLCLSDHTKSMETITNQQKIDTWTQKSLHGRHRLDLTNPNVDKIASNAWLKRGELFPETEGFMLAIQDQVIDTKNYRKFIIRDSTLRSDHCRHCHKQPETIQHITGACSSITQTDYKHRHDQVAAIIHQTLAYKHKLITEKTAYYKYTPQTILDSAYYKMYWDRTILTDKTIHHNRPDITLHDKQNKTVYLIDIAIPNTHNLTSTHTNKLSKYVDLTIELKTQWKVNKVKTIPIIISSTGVIPKTLHKSLKILDIHPLTFTLLQKAVILNTCRLVRKFLSID

SEQ ID NO: 23969 - protein, 1252 aa, Phlogophora meticulosa
MNVVQEANPAEITAPVQGGRRTRKKWTKEMNSFIMRHYFILSELETNTKTYLTPLHARFIEEFPEMKIGKQRVGDQRRAIVQRQFLTKQEIETIKEEVRVLLQNQPPSHTNTDNTQTRRIRWSDNLNTAIIKSYYRITKLETDLTTYRPLLHQDITSKYPEIAHLSAQRIADQRRSIINNRLLSVDQLKRIREEVQNEIGTIITHTPEDITQHVEDNLTPQTTQPLQTNNIELNPEAEQTTNVETPNLSTELQQQLQEMYTETFDKFKDTIPTNRPYLPKLKPSKKLAVITKHLNSDILPKTLSSDTDFNTLQTAIYSAAYTVAKFNGARIQEGNRLNNKPQSLPWWQRRLQGRINDLRADIGRLTEYTRGVRSQALEKHIIKIKQQYKIHTQHENENTDIEHFLDTLKQKLNTLSSRLRRYKQTTIRKTQNKQFCNNEKLFYRNLTQQHNNSPENNSTSPTPESLYTFWSNIWSNPVEHVHSQWVADDRDRLNDVPEMKFEKIKPDLLGTVIGKTHNWKATGSDNIHNFWYKKFTCTHTLLLEHINAFIQTPDTLPPYITQGITYMLPKDPSDMANPAKYRPITCLQNIYKIITSCLSECIYKHTHEHQVLAEEQKGCRKYSQGCKEQLTIDAVASKQALSQKRNIHTMYIDYKKAYDSVPHSWLVYILKHYKIHPTITAFLENTMLNWNTKLKICNSGSSTETDFIPIKRGIFQGDALSPLWFCLALNPLSNMLNTTDLGFKIKHDTHQTTFSHLMYMDDIKLFGSTLNEIYTLADTTQIFSKDICMEFGIDKCKIQSVHKGIVQPTSYELANHDVIDAVDPVEGYKYLGYYQSQQIHQKNSKKLLQQKFKNRLHKILHSHLNARNTIKAINTFAIPILTYSFGIIRWTQTDLKNLQRMINTSMTTHRKHHPRACIQRLTLPKIEGGRGLIDIINLHNKQITSLRTFFHTQSQHSTLHKAISQADTFTPLCLSDHTKSMETITNQQKIDTWTQKSLHGRHRLDLTNPNVDKIASNAWLKRGELFPETEGFMLAIQDQVIDTKNYRKFIIRDSTLRSDHCRHCHKQPETIQHITGACSSITQTDYKHRHDQVAAIIHQTLAYKHKLITEKTAYYKYTPQTILDSAYYKMYWDRTILTDKTIHHNRPDITLHDKQNKTVYLIDIAIPNTHNLTSTHTNKLSKYVDLTIELKTQWKVNKVKTIPIIISSTGVIPKTLHKSLKILDIHPLTFTLLQKAVILNTCRLVRKFLSID

SEQ ID NO: 23970 - protein, 1350 aa, Laothoe populi
MRLRNRSIPQAGTGANGDGESRPGPSSPGCPTYSGEGTVSQQPAQFHTAADQHDQPTSSCSSPTSLFSSIPSSPPSYLERIQESCTSNSSPSLSFHSSMDVVQEATSAKVTAPAKEGRRTHKTWTKEMNIFIMRHYFIITNLEANRRAYLTPLHARFITQFPDMQVGKQRVGDQRRAILQRNFLSKEELKNIKEEVRTLLQNQPQPDITIDTENTQSRRMRWNDKLNETIMKCYYRLTKLETDFTTYRPLLHQEIISKCPAIARLSAQRISDQRRSIVNNQLLSSDRLIRIQEEVRFELDSLTAHSNKDTAQQTHNISLQTTTAHTQTTTNQENLAPEQMTNDTIEFPSDLQQELENMFLETYDKFKDTNPTSRPHLPKLKSSKKLAIIITHLNSDILPKSLSSDTDFETTQTIIYCGAYTAAKFNGARILREHTVNNWTQGVPRWQKRLEERIKVLRVSIGRLTEYARGVRSQALLRHIDKIKQQFKIHSQHENQNTDITHYLDTLKQKLNTLASRLRRYKQTTVRKAQNKLFSNNEKLFYRKITQHNSLLGNNVPLPTPESLHTYWSNIWSNPVKHNQNLWINHDKNTLTHIPEMEFAQIHIDTLTIVLKKIHNWKATGSDNIHNFWYKKFTCIHPLLLKHINTFIRSPDSLPHYITQGTTYMLPKDLSDPTNPAKYRPITCLQNIYKIITSCLSETIYKHVHEHQILAEEQKGCRKNSQGCKEQLTIDAVASKQAISQKRNIHTMYIDYKKAFDSIPHSWLIYILKHYKIHPVITTFLEKAMLNWNTKLKIHSPDKTTETDFIPIKRGIFQGDALSPLWFCLALNPLSNMLNENKLGFKIKHETQLTTLSHLMYMDDIKLFGSTLDDIHTLTDIVQKFSNDICMEFGIDKCKIQSVTEGKVVPASFTLASHDVIDAVDPVEGYKYLGYRQSQQIHHKETKKTLQHNFRSRLIKILQSHLNARNTIKAINTFAIPILTYSFGIIRWTKTDLTNLQRIINTTMTKYRKHHPRACIQRLTLPKGEGGRGLIDITNLHNKQVESLRTFFHIHSLHSTLHKAISQADKYTPLSLSDHNKQICKVTNQQKINSWAVKSLHGRHRLDLISANVDKIASNAWLQRGELFPETEGFMLAIQDQVIDTKNYRRYIIRDSSLNSDHCRHCHKHPETIQHITGACSSITQTDYKHRHDQVAAIIHQTLAYKHKLITETTAYYKYTHQIILDSHDYKLYWDRTILTDKTIHHNRPDITLHDKQNKIVYLIDVAIPNTHNLTATHTNKLSKYADLTIEIKTQWKVQTVKTVPIILSSTGVIPKTLHTSLKSLHIHPLTYTILQKAVILNTCRIVRKFLSID

SEQ ID NO: 23971 - protein, 1344 aa, Deilephila porcellus
MRLRNRTLPQAGTGVEYDGEPRPGPSGSGCPTYSGEGTVSHRTAQSRTAAVPHDRFLSCSSQSSLFSSAPSSPPSFLATYSSRSSSSSSFQSDHDVVQEAISAEVTAPVTGGRRTRKTWTKEMNIFIMRQYFILTDLETNTRQYLTHLHTRFTEQFPKMEVGKQRVGDQRRAIVQRSFLTQNEIDTIKAEVRNLLQNQPPSDVTNSEQTQSRRMRWTVELNEAIMRTYYKLTKLETDLTSYRPQLHQEIISKYPTLAHLSAQRISDQRRSIVNNKLLSSEQLNRILEEVRNEIGNADINYTVNTTLPVVENPITTASEPRQIITDQPNSLSRPVTQDIRELTTDLQQQLEVMFLDAINTFQDTSPISRPSLPKLKPSKKLSTIISHLNSNLLPRLLSSETDFKTTQTIIYCGAYTAAKFNGARISEKNSLLPKKHKIPWWQRRLEERINNLRINIGRMTEYARGVRSKTLEKHIDKLKQQYKIHSQHETQNTDLTHYLDTLKQKLNTLASRLRRYKETTLRKTQNKQFYTNEKLFYRKLAQEHNSTIDTASLPTPEALHTFWSNIWSNPVEHNNNKWIEEDKQHMGNIPEMEFDQIDIDLLKSVISKTHNWKATGSDNIHNFWYKKFTCTHILLLKHINSFIQSPQTMPHYITQGITYMIPKDLSDTANPAKYRPITCLQNIYKIITSCLNESIYHYTHKYHILAKEQKGCRKHSQGCKEQLIIDAVVSSQALSQKRIIHTMYIDYKKAFDSVPHSWLIYILKHYNIHPTITSFLESTMLNWNTKLKICNNYKTTETEFIPIKRGIFQGDALSPLWFCLALNPLSNMLNKSNIGFNIRYNTQQTTLSHLMYMDDIKLFGSTLNEIHTLADITHTFSQDIHMEFGINKCKIQSVNQGIVESAPYELGNQEIIDVVDPTEGYKYLGYYQSRHIHHKEIKTTLQQNFKHRLHKILHTHLNARNTIKAINTYAIPILTYSFGIINWTQTDLKNLQRVINTTMTKHRKHHPRACIQRLILPKHEGGRGLIDITNLHNKQISKLRTFFHTHSQHSILHKAVSQADKYTPLKLTDQTKQLKIVTNHERIDTWSKKSLHGRHRLDLINPNVDKVASNAWLKKGELFPETEGFMLAIQDQVIDTKNYRKYIIRDSTLVSDHCRHCHKQPETIQHITGACSFITQTDYKHRHDQVAAIIHQTLAHKHKLITEKTSYYKYTPQIILESSDFKLYWDRTILTDKTIHHNRPDITLHDKQNKTVYLIDIAIPNTHNLASTHTTKLTKYTDLSIELKTQWRVQSVKTIPIVISSTGVIPKTLHTSLKTLNIHPLTYILLQKAIILNTCRIVRKFLSID

SEQ ID NO: 23972 - protein, 1351 aa, Phlogophora meticulosa
MRLRSRVLPQAGTVANRDGESRPGPPGPGSPTYSGEGTVSHQPAQCRTVAVQHVQSSPCSSPKSSLFSSIPSSPPSYLDIDHESISSNPSSPSPPLQPAMNVVQETNPAEITAPVQGGRRTRKKWTKEMISFIMRHYFILSELETNTKTYLTPLHARFIEEFPEMKIGKQRVGDQRRAIVQRQFLTKQEIETIKDEVRVLLQNQPPSHTNTDNTQTRRIRWSDNLNTAIIKSYYRITKLETDLTTYRPLLHQDITSKYPEIAHLSAQRIADQRRSIINNRLLSVDQLKRIREEVQNEIGTIITHTPEEITQHVEDNLTPQTTQPLQTNNIELNPEAEQTTNVETPNLSTELQQQLQEMYTETFDKFKDTIPTNRPYLPKLKPSKKLAVITKHLNSDILPKTLSSDTDFNTLQTAIYSAAYTVAKFNGARIQEGNRLNNKPQSLPWWQRRLQGRINDLRADIGRLTEYTRGVRSQALEKHIIKIKQQYKIHTQHENENTDIEHFLDTLKQKLNTLSSRLRRYKQTTIRKTQNKQFCNNEKLFYRNLTQQHNNSPENNSTSPTPESLYTFWSNIWSNPVEHVHSQWVADDRDRLNDVPEMKFEKIKPDLLGTVIGKTHNWKATGSDNIHNFWYKKFTCTHTLLLEHINAFIQTPDTLPPYITQGITYMLPKDPSDISNPAKYRPITCLQNIYKIITSCLSECIYKHTHEHQVLAEEQKGCRKYSQGCKEQLTIDAVASKQALSQKRNIHTMYIDYKKAYDSVPHSWLVYILKHYKIHPTITAFLENTMLNWKTKLKICNSGSSTETDFIPIKRGIFQGDALSPLWFCLALNPLSNMLNTTDLGFKIKYDTHQTTFSHLMYMDDIKLFGSTLNEIYTLADTTQIFSKDICMEFGIDKCKIQSVHKGIVQPTSYELANHDVIDAVDPVEGYKYLGYYQSQQIHQKNTKKLLQQKFKNRLHKILHSHLNARNTIKAINTFATPILTYSFGIIRWTQTDLKNLQRMINTSMTTHRKHHPRACIQRLTLPKIEGGRGLIDIINLHNKQITSLRTFFHTQSQHSTLHKAISQADSFTPLCLSDHTKSMETITNQHKIDTWTQKSLHGRHRLDLTNPNVDKIASNAWLKRGELFPETEGFMLAIQDQVIDTKNYRKFIIRDSTLRSDHCRHCHKQPETIQHITGACSSITQTDYKHRHDQVAAIIHQTLAYKHKLITEKTAYYKYTPQTILDSANYKMYWDRTILTDKTIHHNRPDITLHDKQNKTVYLIDIAIPNTHNLTSTHTNKLSKYVDLTIELKTQWKVNKVKTIPIIISSTGVIPKTLHKSLKILDIHPLKFTLLQKAVILNTCRLVRKFLSID

SEQ ID NO: 23973 - protein, 1351 aa, Phlogophora meticulosa
MRLRSRVLPQAGTVANRDGESRPGPPGPGSPTYSGEGTVSHQPAQCRTVAVQHVQSSPCSSPKSSLFSSIPSSPPSYLDIDHESISSNPSSPSPPLQPALNVVQEANPAEITAPVQGGRRTRKKWTKEMNSFIMRHYFILSELETNTKTYLTPLHARFIEEFPEMKIGKQRVGDQRRAIVQRQFLTKQEIETIKEEVRVLLQNQPPSHTNTDNTQTRRIRWSDNLNTAIIKSYYRITKLETDLTTYRPLLHQDITSKYPEIAHLSAQRIADQRRSIINNRLLSVDQLKRIREEVQNEIGTIITHTPEDITQHVEDNLTPQTTQPLQTNNIELNSEAEQTTNVETPNLSTELQQQLQEMYTETFDKFKDTIPTNRPYLPKLKPSKKLAVITKHLNSDILPKTLSSDTDFNTLQTAIYSAAYTVAKFNGARIQEGNRLNNKPQSLPWWQRRLQGRINDLRADIGRLTEYTRGVRSQALEKHIIKIKQQYKIHTQHENENTDIEHFLDTLKQKLNTLSSRLRRYKQTTIRKTQNKQFCNNEKLFYRNLTQQHNNSPENNSTSPTPESLYTFWSNIWSNPVEHVHSQWVADDRDRLNDVPEMKFEKIKPDLLGTVIGKTHNWKATGSDNIHNFWYKKFTCTHTLLLEHINAFIQTPDTLPPYITQGITYMLPKDPSDMANPAKYRPITCLQNIYKIITSCLSECIYKHTYEHQVLAEEQKGCRKYSQGCKEQLTIDAVASKQALSQKRNIHTMYIDYKKAYDSVPHSWLVYILKHYKIHPTITAFLENTMLNWNTKLKICNSGSSTETDFIPIKRGIFQGDALSPLWFCLALNPLSNMLNTTDLGFKIKHDTHQTTFSHLMYMDDIKLFGSTLNEIYTLADTTQIFSKDICMEFGIDKCKIQSVHKGIVQPTSYELANHDVIDAVDPVEGYKYLGYYQSQQIHQKNTKKLLQQKFKNRLHKILHSHLNARNTIKAINTFAIPILTYSFGIIRWTQTDLKNLQRMINTSMTTHRKHHPRACIQRLTLPKIEGGRGLIDIINLHNKQITSLRTFFHTQSQHSTLHKAISQADTFTPLCLSDHTKSMETITNQQKIDTWTQKSLHGRHRLDLTNPNVDKIASNAWLKRGELFPETEGFMLAIQDQVIDTKNYRKFIIRDSTLRSDHCRHCHKQPETIQHITGACSSITQTDYKHRHDQVAAIIHQTLAYKHKLITEKTAYYKYTPQTILDSANYKMYWDRTILTDKTIHHNRPDITLHDKQNKTVYLIDIAIPNTHNLTSTHTNKLSKYVDLTIELKTQWKVNKVKTIPIIISSTGVIPKTLHKSLKILDIHPLTFTLLQKAVILNTCRLVRKFLSID

SEQ ID NO: 23974 - protein, 1351 aa, Phlogophora meticulosa
MRLRSRVLPQAGTVANRDGESRPGPPGPGSPTYSGEGTVSHQPAKCRTVAVQHVQSSPCSSPKSSLFSSIPSSPPSYLDIDHESISSNPSSPSPPLQPAMNVVQEANPAEITAPVQGGRRTRKKWTKEMNSFIMRHYFILSELETNTKTYLTPLHARFIEEFPEMKIGKQRVGDQRRAIVQRQFLTKQEIETIKEEVRVLLQNQPPSHTDTDNTQTRRIRWSDNLNTAIIKSYYRITKLETDLTTYRPLLHQDITSKYPEIAHLSAQRIADQRRSIINNRLLSVDQLKRIREEVQNEIGTIITHTPEDITQHVEDNLTPQITQPLQTNNIELNPEAEQTTNVETPNLSTELQQQLQEMYTETFDKFKDTIPTNRPYLPKLKPSKKLAVITKHLNSDILPKTLSPDTDFNTLQTAIYSAAYTVAKFNGARIQEGNRLNNKPQSLPWWQRRLQGRINDLRADIGRLTEYTRGVRSQALEKHIIKIKQQYKIHTQHENENTDIEHFLDTLKQKLNTLSSRLRRYKQTTIRKTQNKQFCNNEKLFYRNLTQQHNNSPENNSTSPTPESLYTFWSNIWSNPVEHVHSQWVADDRDRLNDVPEMKFEKIKPDLLGTVIGKTHNWKATGSDNIHNFWYKKFTCTHTLLLEHINAFIQTPDTLPPYITQGITYMLPKDPSDMANPAKYRPITCLQNIYKIITSCLSECIYKHTHEHQVLAEEQKGCRKYSQGCKEQLTIDAVASKQALSQKRNIHTMYIDYKKAYDSVPHSWLVYILKHYKIHPTITAFLENTMLNWNTKLKICNSGSSTETNFIPITRGIFQGDALSPLWFCLALNPLSNMLNTTDLGFKIKHDTHQTTFSHLMYMDDIKLFGSTLNEIYTLADTTQIFSKDICMEFGIDKCKIQSVHKGIVQPTSYELANHDVIDAVDPVEGYKYLGYYQSQQIHQKNTKKLLQQKFKNRLHKILHSHLNARNTIKAINTFAIPILTYSFGIIRWTQTDLKNLQRMINTSMTTHRKHHPRACIQRLTLPKIEGGRGLIDIINLHNKQITSLRTFFHTQSQHSTLHKAISQADTFTPLCLSDHTKSMETITNQQKIDTWTQKSLHGRHRLDLTNPNVDKIASNAWLKRGELFPETEGFMLAIQDQVIDTKNYRKFIIRDSTLRSDHCRHCHKQPETIQHITGACSSITQTDYKHRHDQVAAIIHQTLAYKHKLITEKTAYYKYTPQTILDSANYKMYWDRTILTDKTIHHNRPDITLHDKQNKTVYLIDIAIPNTHNLTSTHTNKLSKYVDLTIELKTQWKVNKVKTIPIIISSTGVIPKTLHKSLEILDIHPLIFTLLQKAVILNTCRLVRKFLSID

SEQ ID NO: 23975 - protein, 1349 aa, Laothoe populi
MTNEALVKNNIHAMRLRNRTIPQAGTGANGDGESRPGPSSPGCPTYSGEGTVSQQPAQFHTAADQHDQPTSSCSSPTSLFSSIPSSPPSYLERIQESCTSNSSPSLSLHSSMDVVQEATSAKVTAPAKEGRRTHKTWTKEMNMFIMRHYFIITNLEANRRAYLTPLHARFITQFPDMQVGKQRVGDQRRAILQRNFLTKEELKNIKEEVRTLLQNQPQPDITIDTENTQSRRMRWNDKLNESIMKCYYRLTKLETDFTTYRPLLHQEVISKCPAIAHLSAQRISDQRRSIVNNQLLSSDRLIRIQEEVRLELDSLTAHSNKDTTQQTHNISLQTTTAHTQTTTNQENLAPEQMTNDTIEFPSDLQQELENMFLETYAKFKDTNPTSRPQLPKLKSSKKLAIIITHLNSDILPKSLSFDTDFETTQTIIYCGAYTAAKFNGARILGEHTVKNWTQGVPRWQKRLEERIKVLRVSIGRLTEYARGVRSQALLRHIDKIKQQFKIHSQHENQNTDITHYLDTLKQKLNTLASRLRRYKQTTVRKAQNKLFSNNEKLFYRKITQHNSLLGNNVPLPTPESLHTYWSNIWSNPVKHNQNLWINHDKNTLTHIPEMEFAQIHIDTLTIVLKKIHNWKATGSDNIHNFWYKKFTCIHPLLLKHINTFIRSPDSLPHYITQGTTYMLPKDLSDPTNPAKYRPITCLQNIYKIITSCLSETIYKHVHEHQILAEEQKGCRKNSQGCKEQLTIDAVASKQAISQKRNIHTMYIDYKKAFDSIPHSWLIYILKHYKIHPVITTFLEKAMLNWNTKLKIHSPDKKTETDFIPIKRGIFQGDALSPLWFCLALNPLSNMLNENKLGFKIKHETQLTTLSHLMYMDDIKLFGSTLDDIHTLTDIVQNFSNDICMEFGIDKCKIQSVTEGKVVPASFTLASHDVIDAVDPVEGYKYLGYRQSQQIHHKETKKTFQHNFRSRLIKILQSHLNARNTIKAINTFAIPILTYSFGIIRWTKTDLTNLQRIINTTMTKYRKHHPRACIQRLTLPKGEGGRGLIDITNLHNKQIESLRTFFHIRSLHSTLHKAISQADKYTPLSLSDHNKQICKVTNQQKINSWAVKSLHGRHRLDLISANVDKIASNAWLQRGELFPETEGFMLAIQDQVIDTKNYRRYIIRDSSLNSDHCRHCHKHPETIQHITGACSSITQTDYKHRHDQVAAIIHQTLAYKHKLITETTAYYKYTPQIILDSHDYKLYWDRTILTDKTIHHNRPDITLHDKQNKIVYLIDVAIPNTHNLTATHTNKLTKYADLTIEIKTQWRVQTVKTVPIILSSTGVIPKTLHMSLKSVILNTCRIVRKFLSID

SEQ ID NO: 23976 - protein, 1096 aa, Mimas tiliae
MSFNCPPLCSKNSYQRRSIVNNQLLSSGQLNKIREEVRDELEMLSTITSEATTQLAHENLTPNVSEPTRIMTTTDQQTSGLEQIIHSNSTLNLAAEIQQQLEDMFMETFNKFKMTHPTSRPYLPKLKPSKKLVLIITHLNSDILPKTLDPDIDFNTTQTIIYCAAYTAAKFIGARISEGDKPNIKSQDKPRWQKRLEGRIDALRVNIGRLTEYSRGVRSQSLQNHINKITQQYKIHSQHEAHNTDITHYLDTLKQKLNTLANRLRRYKETTVRKTQNKQFCNNEKLFYRKLTQQNNSSKSNIPMPTSETLYTYWSDIWSNPVEHEENQWIEEDKERLRDTPEMEFEQINIDLLKAVISKSHNWKAAGSDNIHNFWYKKLTSTHTLLLKHINKFIRSPDTMPHYITQGTTYMLPKDLSDSANPAKYRPITCLQNIYKIITSCLSESIYKHTHEHHTLAEEQKGCRKHSQGCKEQLTIDAVVSKQAISQKRDIHTMYIDYKKAFDSVPHSWLIFILKHYKIHPAITLFLEKTMLHWSTKLKICQQYTTTETDFIPIKRGIFQGDALSPLWFCLALNPLSNMLNKNNTGFKIKHDTQQTTLSHLMYMDDIKLFGNTLDEIHTLADITQQFSQDIRMEFGVDKCKIQSIYKGTTVPASYELANHDIIDAVDPVEGYKYLGYHQSQQIHHKKVKQLLQTKFRSRLHKILHTHLNARNTVKAINTFAVPILTYSFGIIRWTQTDLNSLQRIINTTMTKHRKHHPRACIQRLTLPKSEGGRGLSDLTNLHNKQIASLRAFFHNRSLHSTLHKAISQADSFTPLSLANHSKQIKITTNQQKIEIWTQKSLHGRHRLDLTNPSVDKIASNSWLKRGELFPETEGFMQAIQDQVIDTKNYRKYIIRDSTLTSDHCRHCHKQPETIQHITGACSSITQTDYKHRHDQVAAIIHQILAYKHKLITEKTAYYKYIPQIILETPHYKLYWDRTILTDKTVHHNRPDITLHDKHNKTVYLIDIAIPNTHNLTATHTNKLSKYADLTIELKSQWKVQTVKTVPIILSSTGVIPKTLHTSLKTLNIHPLTFTLLQKAVILNTCRIVRKFLSIE

SEQ ID NO: 23977 - protein, 754 aa, Hyles vespertilio
MEFDQIEIDLLKSVISKTHNWKATGSDNIHNFWYKKFTCTHTLLLKHINSFIQSPQTMPHYITQGITYMIPKDLNDTANPAKYRPITCLQNIYKIITSCLNESIYHHTNTYQILAEEQKGCRKHSQGCKEQLIIDAVASNQALSQKRNIHTMYIDYKKAFDSVPHSWLIYVLKHYKIHPTITFFLENTMLNWSTKLKICNHNKTSETELIPIRRGIFQGDALSPLWFCLALNPLSNMLNKNNIGFNIKYNTQQTTLSHLMYMDDIKLFGSTLNDIHTLADITLTFSQDIHMEFGINKCKIQSVQGGIVESTPFELGNHEIIDAVDPTEGYKYLGYYQSRHIHHKEIKTTLQQNFKDRLHKILHTYLNARNTTKAINTYAVPILTYSFGIIRWTQTDLKKLQRIINTTMTKHRKHHPRACIQRLTLPKHEGGRGLIDITNLHNKQISTLRTFFHTQSQHSILHKAVSQADTYTPLKLTDHTKQIKIITNHEQIDTWIKKSLHGRHRLDLINPIVDKVASNAWLKRGELFPETEGFMLAIQDQVIDTKNYRKYIIRDSTLNSDHCRHCHKQPETIQHITGACSFITQTDYKHRHDQVAAIIHQTLAHKHKLITDKTPYYNYTPQIILESSEYKLYWDRTILTDKTVHHNRPDITLHDKQNKTVYLVDIAIPNTHNLASTHTNKLTKYTDLSIELKTQWRVQSVKTIPIIISSTGVIPKTLHTSLKTLNLHPLTYMLLQKAVILNTCRIVRKFLSID

SEQ ID NO: 23978 - protein, 1351 aa, Phlogophora meticulosa
MRLRSRVLPQAGTVANRDGESRPGPPGPGSPTYSGEGTVSHQPAQCRTVAVQHVQSSPCSSPKSSLFSSIPSSPPSYLDIDHESISSHPSSPSPPLQPAMNVVQEANPAEITAPVQGGRRTRKKWTKEMNSFIMRHYFILSELETNTKTYLTPLHARFIEEFPEMKIGKQRVGDQRRAIVQRQFLTKQEIETIKEEVRVLLQNQPPSHTNTDNTQTRRIRWSDNLNTAIIKSYYRITKLETDLTTYRPLLHQDITSKYPEIAHLSAQRIADQRRSIINNRLLSVDQLKRIREEVQNEIGTIITHTPEDITQHVEDNLTPQTTQPLQTNNIELNPEAEQTTNVETPNLSTELQQQLQEMYTETFDKFKDTIPTNRPYLPKLKPSKKLAVITKHLNSDILPKTLSSDTDFNTLQTAIYSAAYTVAKFNGARIQEGNRLNNKPQSLPWWQRRLQGRINDLRADIGRLTEYTRGVRSQALEKHIIKIKQQYKIHTQHENENTDIEHFLDTLKQKLNTLSSRLRRYKQTTIRKTQNKQFCNNEKLFYRNLTQQHNNSPENNSTSPTPESLYTFWSNIWSNPVEHVHSQWVADDRDRLNDVPEMKFEKIKPDLLGTVIGKTRNWKATGSDNIHNFWYKKFTCTHTLLLEHINAFIQTPDTLPPYITQGITYMLPKDPSDMANPAKYRPITCLQNIYKIITSCLSECIYKHTHEHQVLAEEQKGCRKYSQGCKEQLTIDAVASKQALSQKRNIHTMYIDYKKAYDSVPHSWLVYILKHYKIHPTITAFLENTMLNWNTKLKICNSGSSTETDFIPIKRGIFQGDALSPLWFCLALNPLSNMLNTTDLGFKIKHDTHQTTFSHLMYMDDIKLFGSTLNEIYTLADTTQIFSKDICMEFGIDKCKIQSVHKGIVQPTSYELANHDVIDAVDPVEGYKYLGYYQSQQIHQKNTKKLLQQKFKNRLHKILHSHLNARNTIKAINTFAIPILTYSFGIIRWTQTDLKNLQRMINTSMTTHRKHHPRACIQRLTLPKIEGGRGLIDIINLHNKQITSLRTFFHTQSQHSTLHKAISQADTFTPLCLSDHTKSMETITNQQKIDTWTQKSLHGRHRLDLTNPNVDKIASNAWLKRGELFPETEGFMIAIQDQVIDTKNYRKFIIRDSTLRSDHCRHCHKQPETIQHITGACSSITQTDYKHRHDQVAAIIHQTLAYKHKLITEKTAYYKYTPQTILDSANYKMYWDRTILTDKTIHHNRPDITLHDKQNKTVYLIDIAIPNTHNLTSTHTNKLSKYVDLTIELKTQWKVNKVKTIPIIISSTGVIPKTLHKSLKILDIHPLTFTLLQKAVILNTCRLVRKFLSID

SEQ ID NO: 23979 - protein, 1230 aa, Phlogophora meticulosa
MRLRSRVLPQAGTVANRDGESRPGPPGPGSPTYSGEGTVSHQPAQCRTVAVQHVQSSPCSSPKSSLFSSIPSSPPSYLDIDHESISSNPSSPSPPLQPAMNVVQEANPAEITAPVQGGRRTRKKWTKEMNSFIMRHYFILSELETNTKTYLTPLHARFIEEFPEMKIGKQRVGDQRRAIVQRQFLTKQEIETIKEEVRVLLQNQPPSHTNTDNTQTRRIRWSDNLNTAIIKSYYRITKLETDLTTYRPLLHQDITSKYPEIAHLSAQRIADQRRSIINNRLLSVDQLKRIREEVQNEIGTIITHTPEDITQHVEDNLTPQTTQPLQTNNIELNPEAEQTTNVETPNLSTELQQQLQEMYTETFDKFKDTIPTNRPYLPKLKPSKKLAVITKHLNSDILPKTLSSDTDFNTLQTAIYSAAYTVAKFNGARIQEGNRLNNKPQSLPWWQRRLQGRINDLRADIGRLTEYTRGVRSQALEKHIIKIKQQYKIHTQHENENTDIEHFLDTLKQKLNTLSSRLRRYKQTTIRKTQNKQFCNNEKLFYRNLTQQHNNSPENNSTSPTPESLYTFWSNIWSNPVEHVHSQWVADDTDRLNDVPEMKFEKIKPDLLGTVIGKTHNWKATGSDNIHNFWYKKFTCTHTLLLEHINAFIQTPDTLPPYITQGITYMLPKDPSDMANPAKYRPITCLQNIYKIITSCLSECIYKHTHEHQVLAEEQKGCRKYSQGCKEQLTIDAVASKQALSQKRNIHTMYIDYKKAYDSVPHSWLVYILKHYKIHPTITAFLENTMLNWNTKLKICNSGSSTETDFIPIKRGIFQGDALSPLWFCLALNPLSNMLNTTDLGFKIKHDTHQTTFSHLMYMDDIKLFGSTLNEIYTLADTTQIFSKDICMEFGIDKCKIQSVHKGIVQPTSYELANHDVIDAVDPVEGYKYLGYYQSQQIHQKNSKKLLQQKFKNRLHKILHSQINARNTIKAINTFAIPILTYSFGIIRWTQTDLKNLQRMINTSMTTHRKHHPRACIQRLTLPKIEGGRGLIDIINLHNKQITSLRTFFHTQSQHSTLHKAISQADTFTPLCLSDHTKSMETITNQQKIDTWTQKSLHGRHRLDLTNPNVDKIASNAWLKRGELFPETEGFMLAIQDQVIDTKNYRKFIIRDSTLRSDHCRHCHKQPETIQHITGACSSITQTDYKHRHDQVASIIHQTLAYKHKLITEKTAYYKYTPQTILDSAYYKMY

SEQ ID NO: 23980 - protein, 793 aa, Mimas tiliae
MPTSETLYTYWSDIWSNPVEHEENQWIEEDKERLRDTPEMEFEQINIDLLKAVISKSHNWKAAGSDNIHNFWYKKLTSTHTLLLKHINKFIRSPDTMPHYITQGTTYMLPKDLSDSANPAKYRPITCLQNIYKIITSCLSESIYKHTHEHHILAEEQKGCRKHSQGCKEQLTIDAVVSKQAISQKRDIHTMYIDYKKAFDSVPHSWLIFILKHYKIHPAITLFLEKTMLHWSTKLKICQQYTTTETDFIPIKRGIFQGDALSPLWFCLALNPLSNMLNKNNTGFKIKHDTQQTTLSHLMYMDDIKLFGNTLDEIHTLADITQQFSQDIRMEFGVDKCKIQSIYKGTTVPASYELANHDIIDAVDPVEGYKYLGYHQSQQIHHKKVKQLLQTKFRSRLHKILHTHLNARNTVKAINTFAVPILTYSFGIIRWTQTDLNSLQRIINTTMTKHRKHHPRACIQRLTLPKSEGGRGLSDLTNLHNKQIASLRAFFHNRSLHSTLHKAISQADSFTPLSLANHSKQIKITTNQQKIEIWTQKSLHGRHRLDLTNPSVDKIASNSWLKRGELFPETEGFMQAIQDQVIDTKNYRKYIIRDSTLTSDHCRHCHKQPETIQHITGACSSITQTDYKHRHDQVAAIIHQILAYKHKLITEKTAYYKYIPQIILETPHYKLYWDRTILTDKTVHHNRPDITLHDKHNKTVYLIDIAIPNTHNLTATHTNKLSKYADLTIELKSQWKVQTVKTVPIILSSTGVIPKTLHTSLKTLNIHPLTFTLLQKAVILNTCRIVRKFLSIE

SEQ ID NO: 23981 - protein, 1351 aa, Phlogophora meticulosa
MRLRSRVLPQAGTVANRDGESRPGPPGPGSPTYSGEGTVSHQPAQCRTVAVQHVQSSPCSSPKSSLFSSIPSSPPSYLDIDHESISSNPSSPSPPLQPAMNVVQEANPAEITAPVQGGRRTRKKWTKEMNSFIMRHYFILSELETNTKTYLTPLHARFIEEFPEMKIGKQRVGDQRRAIVQRQFLTKQEIETIKEEVRVLLQNQPPSHTNTDNTQTRRIRWSDNLNTAIIKSYYRITKLETDLTTYRPLLHQDITSKYPEIAHLSAQRIADQRRSIINNRLLSFDQLKRIREEVQNEIGTIITHTPEDITQHVEDNLTPQTTQPLQTNNIELNPEAEQTTNVETPNLSTELQQQLQEMYTETFDKFKDTIPTNRPYLPKLKPSKKLAVITKHLNSDILPKTLSSDTDFNTLQTAIYSAAYTVAKFNGARIQEGNRLNNKPQSLPWWQRRLQGRINDLRADIGRLTEYTRGVRSQALEKHIIKIKQQYKIHTQHENENTDIEHFLDTLKQKLNTLSSRLRRYKQTTIRKTQNKQFCNNEKLFYRNLTQQHNNSPENNSTSPTPESLYTFWSNIWSNPVEHVHSQWVADDRDRLNDVPEMKFEKIKPDLLGTVIGKTHNWKATGSDNIHNFWYKKFTCTHTLLLEHINAFIQTPDTLPPYITQGITYMLPKDPSDMANPAKYRPITCLQNIYKIITSCLSECIYKHTHEHQVLAEEQKGCRKYSQGCKEQLTIDAVASKQALSQKRNIHTMYIDYKKAYDSVPHSWLVYILKHYKIHPTITAFLENTMLNWNTKLKICNSGSSTETDFIPIKRGIFQGDALSPLWFCLALNPLSNMLNTTDLGFKIKHDTHQTTFSHLMYMDDIKLFGSTLNEIYTLADTTQIFSKDICMEFGIDKCKIQSVHKGIVQPTSYELANHDVIDAVDPVEGYKYLGYYQSQQIHQKNSKKLLQQKFKNRLHKILHSHLNARNTIKAINTFAIPILTYSFGIIRWTQTDLKNLQRMINTSMTTHRKHHPRACIQRLTLPKIEGGRGLIDIINLHNKQITSLRTFFHTQSQHSTLHKAISQADTFTPLCLSDHTKSMETITNQQKIDTWTQKSLHGRHRLDLTNPNVDKIASNAWLKRGELFPETEGFMLAIQDQVIDTKNYRKFIIRDSTLRSDHCRHCHKQPETIQHITGACSSITQTDYKHRHDQVAAIIHQTLAYKHKLITEKTAYYKYTPQTILDSAYYKMYWDRTILTDKTIHHNRPDITLHDKQNKTVYLIDIAIPNTHNLTSTHTNKLSKYVDLTIELKTQWKVNKVKTIPIIISSTGVIPKTLHKSLKILDIHPLTFTLLQKAVILNTCRLVRKFLSID

SEQ ID NO: 23982 - protein, 993 aa, Deilephila porcellus
MFFDAINTFQDTSPISRPSLPKLKPSKKLSTIISHLNSNLLPRLLSSETDFKTTQTIIYCGAYTAAKFNGARISERNSLLPIKHKIPWWQRRLEERINNLRINIGRMTEYARGIRSKTLEKHIDKLKQQYKIHSQHETQNTDLTHYLDTLKQKLNTLASRLRRYKETTLRKTQNKQFYTNEKLFYRKLAQEHNSTIDTASLPTPEALHTFWSNIWSNPVEHHNNKWIEEDKQHVGNIPEMEFDQIDIDLLKSVISKTHNWKATGSDNIHNFWYKKFTCTHILLLKHINSFIQSPQTMPHYITQGITYMIPKDLSDTANPAKYRPITCLQNIYKIITSCLNESIYHYTHKYHILAMEQKGCRKHSQGCKEQLIIDAVVSNQALSQKRNIHTMYIDYKKAFDSVPHSWLIYILKHYKIHPTITSFLENTMLNWNTKLKICNNYKTTETEFIPIKRGIFQGDALSPLWFCLALNPLSNMLNKNNIGFNIRYNTQQTTLSHLMYMDDIKLFGSTLNEIHTLADITHTFSQDFHMEFGINKCKIQSVNQGIVESAPYELGNQEIIDVVDPTEGYKYLGYYQSRHIHHKEIKTTLQQNFKHRLHKILHTHLNARNTIKAINTYAIPILTYSFGIINWTQTDLKNLQRVINTTMTKHRKHHPRACIQRLILPKHEGGRGLIDITNLHNKQISKLRTFFYTHSQHSILHKAVSQADKYTPLKLTDQTKQLKIVTNHERIDTWSKKSLHGRHRLDLINPNVDKVASNAWLKKGELFPETEGFMLAIQDQVIDTKNYRKYIIRDSTLVSDHCRHCHKQPETIQHITGACSFITQTDYKHRHDQVAAIIHQTLAHKHKLITEKTSYYKYTPQIILESSDFKLYWDRTILTDKTIHHNRPDITLHDKQNKTVYLIDIAIPNTHNLASTHTTKLTKYTDLSIELKTQWRVQSVKTIPIIISSTGVIPKTLHTSLKTLNIHPLTYILLQKAIILNTCRIVRKFLSID

SEQ ID NO: 23983 - protein, 1363 aa, Laothoe populi
MTNEALVKNNIHAMRLRNRTIPQAGTGANGDGESRPGPSSPGCPTYSGEGTVSQQPAQFHTAADQHDQPTSSCSSPTSLFSSIPSSPPSYLERIQESCTSNSSPSLSLHSSMDVVQEATSAKVTAPAKEGRRTHKTWTKEMNMFIMRHYFIITNLEANRRAYLTLLHARFITQFPDMQVGKQRVGDQRRAILQRNFLTKEELNNIKEEVRTLLQNQPQPDITIDTENTQSRRMRWNDKLNESIMKCYYRLTKLETDFTTYRPLLHQEVISKCPAIAHLSAQRISDQRRSIVNNQLLSSDRLIRIQEEVRLEIDSLTAHSNKDTTQQTHNISLQTTTAHTQTTTNQENLAPEQMTNDTIEFPSDLQQELENMFLETYAKFKDTNPTSRPQLPKLKSSKKLAIIITHLNSDILPKSLSFDTDFETTQTIIYCGAYTAAKFNGARILGEHTVKNWTQGVPRWQKRLEERIKVLRVSIGRLTEYARGVRSQALLRHIDKIKQQFKIHSQHENQNTDITHYLDTLKQKLNTLASRLRRYKQTTVRKAQNKLFSNNEKLFYRKITQHNSLLGNNVPLPTPESLHTYWSNIWSIPVKHNQNLWINRDKNTLTHIPEMEFAQIHIDTLTIVLKKIHNWKATGSDNIHNFWYKKFTCIHPLLLKHINTFIRSPDSLPHYITQGTTYMLPKDLSDPTNPAKYRPITCLQNIYKIITSCLSETIYKHVHEHQILAEEQKGCRKNSQGCKEQLTIDAVASKQAISQKRNIHTMYIDYKKAFDSIPHSWLIYILKHYKIHPVITTFLEKAMLNWNTKLKIHSPDKKTETDFIPIKRGIFQGDALSPLWFCLALNPLSNMLNENKLGFKIKHETQLTTLSHLMYMDDIKLFGSTLDDIHTLTDIVQNFSNDICMEFGIDKCKIQSVTEGKVLPASFTLASHDVIDAVDPVEGYKYLGYRQSQQIHHKETKKTLQHNFRSRLIKILQSHLNARNTIKAINTFAIPILTYSFGIIRWTKTDLTNLQRIINTTMTKYRKHHPRACIQRLTLPKGEGGRGLIDITNLHNKQIESLRTFFHIRSLHSTLHKAISQADKYTPLSLSDHNKQICKVTNQQKINSWAVKSLHGRHRLDLISANVDKIASNAWLQRGELFPETEGFMLAIQDQVIDTKNYRRYIIRDSSLNSDHCRHCHKHPETIQHITGACSSITQTDYKHRHDQVAAIIHQTLAYKHKLITETTAYYKYTPQIILDSHDYKLYWDRTILTDKTIHHNRPDITLHDKQNKIVYLIDVAIPNTHNLTATHTNKLTKYADLTIEIKTQWRVQTVKTVPIILSSTGVIPKTLHMSLKSLHIHPLTYTILQKAVILNTCRIVRKFLSID

SEQ ID NO: 23984 - protein, 1351 aa, Phlogophora meticulosa
MRLRSRVLPQAGTVANRDGESRPGPPGPGSPTYSGEGTVSHQPAQCRTGAVQHVQSSPCSSPKSSLFSSIPSSPPSYLDIDHESISSNPSSPSPPLQPAMNVVQEANPAEITAPVQGGRRTRKKWTKEMNSFIMRHYFILSELETNTKTYLTPLHARFIEEFPEMKIGKQRVGDQRRAIVQRQFLTKQEIETIKEEVRVLLQNQPPSHTNTDNTQTRRIRWSDNLNTAIIKSYYRITKLETDLTTYRPLLHQDITSKYPEIAHLSAQRIADQRRSIINNRLLSVDQLKRIREEVQNEIGTIITHTPEDITQHVEDNLTPQTTQPLQTNNIELNPEAEQTTNVETPNLSTELQQQLQEMYTETFDKFKDTIPTNRPYLPKLKPSKKLAVITKHLNSDILPKTLSSDTDFNTLQTAIYSAAYTVAKFNGARIQEGNRLNNKPQSLPWWQRRLQGRINDLRADIGRLTEYTRGVRSQALEKHIIKIKQQYKIHTQHENENTDIEHFLDTLKQKLNTLSSRLRRYKQTTIRKTQNKQFCNNEKLFYRNLTQQHNNSPENNSTSPTPESLYTFWSNIWSNPVEHVHSQWVADDRDRLNDVPEMKFEKIKPDLLGTVIGKTHNWKATGSDNIHNFWYKKFTCTHTLLLEHINAFIQTPDTLPPYITQGITYMLPKDPSDMANPAKYRPITCLQNIYKIITSCLSECIYKHTHEHQVLAEEQKGCRKYSQGCKEQLTIDAVASKQALSQKRNIHTMYIDYKKAYDSVPHSWLVYILKHYKIHPTITAFLENTMLNWNTKLKICNSGSSTETDFIPIKRGIFQGDALSPLWFCLALNPLSNMLNTTDLGFKIKHDTHQTTFSHLMYMDDIKLFGSTLNEIYTLADTTQIFSKDICMEFGIDKCKIQSVHKGIVQPTSYELANHDVIDAVDPVEGYKYLGYYQSQQIHQKNSKKILQQKFKNRLHKILHSHLNARNTIKAINTFAIPILTYSFGIIRWTQTDLKNLQRMINTSMTTHRKHHPRACIQRLTLPKIEGGRGLIDIINLHNKQITSLRTFFHTQSQHSTLHKAISQADTFTPLCLSDHTKSMETITNQQKIDTWTQKSLHGRHRLDLTNPNVDKIASNAWLKRGELFPETEGFMLAIQDQVIDTKNYRKFIIRDSTLRSDHCRHCHKQPETIQHITGACSSITQTDYKHRHDQVAAIIHQTLAYKHKLITEKTAYYKYTPQTILDSAYYKMYWDRTILTDKTIHHNRPDITLHDKQNKTVYLIDIAIPNTHNLTSTHTNKLSKYVDLTIELKTQWKVNKVKTIPIIISSTGVIPKTLHKSLKILDIHPLTFTLLQKAVILNTCRLVRKFLSID

SEQ ID NO: 23985 - protein, 1351 aa, Phlogophora meticulosa
MRLRSRVLPQAGTVANRDGESRPGPPGPGSPTYSGEGTVSHQPAKCRTVAVQHVQSSPCSSPKSSLFSSIPSSPPSYLDIDHESISSNPSSPSPPLQPAMNVVQEANPAEITAPVQGGRRTRKKWTKEMNSFIMRHYFILSELETNTKTYLTPLHARFIEEFPEMKIGKQRVGDQRRAIVQRQFLTKQEIETIKEEVRVLLQNQPPSHTDTDNTQTRRIRWSDNLNTAIIKSYYRITKLETDLTTYRPLLHQDITSKYPEIAHLSAQRIADQRRSIINNRLLSVDQLKRIREEVQNEIGTIITHTPEDITQHVEDNLTPQITQPLQTNNIELNPEAEQTTNVETPNLSTELQQQLQEMYTETFDKFKDTIPTNRPYLPKLKPSKKLAVITKHLNSDILPKTLSPDTDFNTLQTAIYSAAYTVAKFNGARIQEGNRLNNKPQSLPWWQRRLQGRINDLRADIGRLTEYTRGVRSQALEKHIIKIKQQYKIHTQHENENTDIEHFLDTLKQKLNTLSSRLRRYKQTTIRKTQNKQFCNNEKLFYRNLTQQHNNSPENNSTSPTPESLYTFWSNIWSNPVEHVHSQWVADDRDRLNDVPEMKFEKIKPDLLGTVIGKTHNWKATGSDNIHNFWYKKFTCTHTLLLEHINAFIQTPDTLPPYITQGITYMLPKDPSDMANPAKYRPITCLQNIYKIITSCLSECIYKHTHEHQVLAEEQKGCRKYSQGCKEQLTIDAVASKQALSQKRNIHTMYIDYKKAYDSVPHSWLVYILKHYKIHPTITAFLENTMLNWNTKLKICNSGSSTETNFIPIKRGIFQGDALSPLWFCLALNPLSNMLNTTDLGFKIKHDTHQTTFSHLMYMDDIKLFGSTLNEIYTLADTTQIFSKDICMEFGIDKCKIQSVHKGIVQPTSYELANHDVIDAVDPVEGYKYLGYYQSQQIHQKNTKKLLQQKFKNRLHKILHSHLNARNTIKAINTFAIPILTYSFGIIRWTQTDLKNLQRMINTSMTTHRKHHPRACIQRLTLPKIEGGRGLIDIINLHNKQITSLRTFFHTQSQHSTLHKAISQADTFTPLCLSDHTKSMETITNQQKIDTWTQKSLHGRHRLDLTNPNVDKIASNAWLKRGELFPETEGFMLAIQDQVIDTKNYRKFIIRDSTLRSDHCRHCHKQPETIQHITGACSSITQTDYKHRHDQVAAIIHQTLAYKHKLITEKTAYYKYTPQTILDSANYKMYWDRTILTDKTIHHNRPDITLHDKQNKTVYLIDIAIPNTHNLTSTHTNKLSKYVDLTIELKTQWKVNKVKTIPIIISSTGVIPKTLHKSLEILDIHPLIFTLLQKAVILNTCRLVRKFLSID

SEQ ID NO: 23986 - protein, 1419 aa, Cydia splendana
MQLRSRNLRPGPLPEGNRRGASGAVAGCHSMRSNGDAELSRRAPIEESVTAADGPLPEGDRRGAPGAAAGCHSMRSSGDVELSRRVSIEEYTTAEKHPTRESTPTSLCPSIPSSTVSLFSSVPSSPASYLNISGSERTSACSSPSINTAEDVVQEASTANQPAPAADRQNARKKWSRDMNIFILRAYFRITALETETRKYLPQLHAEFSEKFPTHEASRQRLGDQRRAIMRNKLLSDKDIAEIKKLAENDLKNYSIPSQQAYTHNSSQRMIWTNEINEAIIKEYYRITQLETNITAYRKPLHQAIIAMHPQVSHVSEQRIADQRRAIINNKYISEQRLQEIRAEISQGLALEGDNLQNRNNLPHVTEPIPTEPTDDLPINENFFEINHDSPSNNLDHSEPSIPQYSLPTATQEEIEQTFLTAVSLFQNSDPTTRPIIPKQKISKKFTSIVHFINNIILPKYLPQDSNFENTHSTLYCAVFAAATQNGSKITDSHNIRQHNNQPPLWQKRLQNRITDLRAKIGRVTEFINGNSSPRLLRHIDAVKRQYKLHSRHENENTLLSHFLDTLKQKLSALTSRLRRYKLTTLRQKQNKQFINNEKVFYRNLQDSNTNEFEQNSGPDCVTPTVQDLHHFWSEIWSKPVEHRNAQWIEADKEFLKSVPDMVFDQISIDLLQSVIGKAHNWKATGSDKIHNYWLKKFTYMHPILLRQINEFINSPETLPKYITQGVTYMLIKDKLDRTNPAKYRPITCLQTIYKIITSCISKLIYRHVEAHNILAEQQKGCRQNSQGCKEQLTIDAIISKQAKRNKKDIYTMYIDYKKAFDSVPHSWLIHILKHYKIHSSIILFLKNTMLHWSTVLKIISNTTNVETEPINIRRGIFQGDALSPLWFCLALNPLSTLLNNSKSGYKIYYESNPYTISHLMYMDDIKLYSNNICNIHNLADITQSFSSDIHMEFGIDKCKIQSVRGGNIERNSYTLNNGEQVDPVDEETGYKYLGYQQTQQIHHKITKASLKQKFTGRLHKILNTYLNSRNTIKAINTYAVPILTYSFGIIQWSQTDLCNHQRIINTLMTKYRKHHPRSCVQRLTLPKSEGGRGLIDIKNLHNRQVSSLRNFFHNRSNNSEIHQAIVNADQKCTPLNLNDRRTQVSEVIVDHQQKQQAWIQKSLHGRHRLDLMNPGVDKLASNMWLKRGELFPETEGFIIAIQDQIIDTKNYRKYIIRDSNLQTDLCRRCHAASETIQHITGACRSIAQTDYKHRHDQVAAIIHQYLAFKYHLINNRSPYYKYTPQIILDSTDYKLYWDRTIITDKTIHCNRPDITLHDKAAKTVYLIDVAIPNTHNLTPTHTEKISKYADLSIEIKTQWRVNTVKTIPIIISSTGVIPRTLHTSLKTLDIHPLTYTLLQKAVILNTCRIVRKFLALEN

SEQ ID NO: 23987 - protein, 1427 aa, Notocelia uddmanniana
MQLRSRSLRSGPLPEGNRRGASGAVAGCHSMRTNGDAELSRRTPIVQCVTAAVGPLPEGDRRGAPGAAAGCHSKRSSGDAKLSRRASIEEYITAEYNPTRESAPTPLCPSSPSSLASLFSSVPSSPASYLNNFDSENTSACTSPSPSINTAEDVVQEASIANKPAPAMARQNVRKKWSREMNIFILRTYFRITALESETRKYLPQLHEEFSQKFPLFKVSRQRLGDQRRAIVGNKLLSDVDIAEIRKLAENDLKHSPPPSHQSQVGTQNSNQRMCWTQEINESIIREYYRITRLETITTAYRKPLLLTIIAKHPQLSHVSEQRIADQRRAIISNKYLSEQRLQEIRHEITHELILDDDISGQNTDDLPHNNTITETPQSDTFNKLPVTVNHQEIRHDNPNPGEVETLQSQNNSIQTLPLTVQEEIEQVFLTAKERFINSDPTCRPSIPKQKQLRKLASIVHFINNAILPKYIADDSNFEITESTLYCAAFTAATQNGSKITDSHHSLHYNNELPNWQKRLQDRITDFRAKIGRLTEFINGNISSRLTRHVNAIKRQYKLHSRHENENTQLTHFLDTLKQKLSALTNRLRRYKLTTLRKTQNKLFLNNEKVFYRSLLNPHEAERNPHVESEAPSAEGLHQFWSAIWSNPVEHRCAEWIEADNETLDSLPNMTFDQISLDLLQSVIGKTHNWKASGSDKIHNYWLKKFTYFHPILLRQINEFIHAPETLPQYITRGTTYMLPKDTTDRKNPAKYRPITCLQNIYKIMTSCISKLIYRHIDTHNILAEQQKGCRQNSQGCKEQLTIDAVISKQALKNKEDIYTMYIDYQKAFDSVPHSWLIHVLKHYKIHHTIIQFLQTTMLHWSTVLKICSNTTNIETDPITIRRGIFQGDALSPLWFCLALNPLSNLLNNTTSGFNLKYGISSHTISHLLYMDDIKLYSNNLTGIHKLADITQTFSTDINMEFGIDKCKIQSIRGGKVEHNTYTLTNGEQIEPVNDELGYKYLGYQQSQQIHHKTTKTTLKQKFSGRLHKILNTHLNARNTIKAINTYAIPILTYSFGIIQWSQTDLCNLQRIINTLMTKYRKHHPRSCIQRLTLPKAEGGRGLIDIKNLHNRQVSTLRKFFIEKSSHSQIHQAIVKADKKNTPLNLNDNTKQKSEEITEPKQKLQTWIQKTLHGRHRLDLINPHVDKLASNMWLKRGELFPETEGFMIAIQDQVIDTRNYRKHIIRDPNFSTDLCRRCHAASETIQHITGACRSITQSDYKHRHDQVAAIIHQYLAFKYHLIETRTPYYKYTPQIVLESTEYKIYWDRTIITDKTVHYNRPDITLHDKAAKTVYLIDIAIPNTHNLATTHTEKISKYTDLSVEIKAQWKVNNVKTIPIIISSTGVIPRTLHSGLKTLDIHSLTYIILQKAIIMNTCRIVRKFLALEQ

SEQ ID NO: 23988 - protein, 758 aa, Cydia splendana
MVFDQISIDLLQSVIGKAHNWKATGSDKIHNYWLKKFTYMHPILLRQINEFINSPETLPKYITQGVTYMLIKDKLDRTNPAKYRPITCLQTIYKIITSCISKLIYRHVEAHNILAEQQKGCRQNSQGCKEQLTIDAIISKQAKRNKKDIYTMYIDYKKAFDSVPHSWLIHILKHYKIHSSIILFLKNTMLHWSTVLKIISNTTNVETEPINIRRGIFQGDALSPLWFCLALNPLSTLLNNSKSGYKICYESNPYTISHLMYMDDIKLYSNNICNIHNLADITQSFTSDIHMVFGIDKCKIQSVRGGNIERNSYTLNNGEQVDPVDEETGYKYLGYQQTQQIHHKITKASLKQKFTGRLHKILNTYLNSRNTIKAINTYAVPILTYSFGIIQWSQTDLCNHQRIINTLMTKYRKHHPRSCVQRLTLPKSEGGRGLIDIKNLHNRQVSSLRNFFHNRSNNSEIHQAIVNADQKCTPLNLNDRRTQVSEVIVDHQQKQQAWIQKSLHGRHRLDLMNPSVDKLASNMWLKRGELFPETEGFIIAIQDQIIDTKNYRKYIIRDSNLQTDLCRRCHAASETIQHITGACRSIAQTDYKHRHDQVAAIIHQYLAFKYHLINNRSPYYKYTPQIILDSTDYKLYWDRTIITDKTIHCNRPDITLHDKAAKTVYLIDGAIPNTHNLTPTHTEKISKYADLSIEIKTQWRVNTVKTIPIIISSTGVIPRTLHTSLKTLDIHPLTYTLLQKAVILNTCRIVRKFLALEN

SEQ ID NO: 23989 - protein, 1366 aa, Lysandra coridon
MRLRNRTIPQAGTGADSNGESRPGPSGPGSPAYSGVGTVSHNDNVTHHRETSSSCFSPLSSLFSSPPSSPASYVIANQSTSSNSSMSSSSESTVDVVREATSARVTAPIHSSKCKRKKWSKEMNIFIMHKYFIITKLETDTQSYLTQLHSLFSTQFPEMEASKQRVGDQRRAIAQRHLLSHQEILSIKNNVKSLLQNQNEHSIDEQDMTQLGNTDTNCTLQRMRWTTEINEKIMRAYYRITKLETDLTTYRPILHQEIITTCPSIAHLSIQRIADQRRSIVSNCLLSSEQLKRIREEVQTELDEISVENIEHQPDENFTPPNLNVTQSLLGDHSPTPNQQNYTASTQNRVPVKLSIELETQLKEMFLESFNIFNDIHPIARPSLPKLKPSKKLFQIVDCLNSNIIPNMIHEDTDFNTLHTYIYTAAYTSTKFSGVRINIKNNTTNVNKSQMIPWWQKRLEGRIGDLRANIGRLTEYIRGTRSPYLEKQIQKIKQQYKIHTQHESENSDLIHFLDTLKQKLNILTNRLKRYKDCSNRKTQNKEFYYNEKLFYRKLAQKDTSQHNNPNGSLSPTPESMHTYWSNIWSHPKHHENSPWIEEDKSRFADIPEMEFDQIQLEQLKSVIAKTHNWKATGSDNIHNFWYKKLTCIHNLLLKHINSFIRSPNLIPNFITQGITYMLLKDKSDTTNPEKYRPITCLQNIYKIITACISNLIYTHIENHNILAEEQKGCRKYSQGCKEQLIIDSVISNQARKQKRSIYTVYIDYKKAFDSVPHSWLIYILKHYKISPKIINCLEKIMPNWQTRLKIFDPAKTIETGLIPIKRGLFQGDSLSPLWFCLALNPLSNILNKSERGFKTKHNTQHNIISLSHLMYMDDIKIFANTLNNIHTLVDLTQIFSNTIHMEFGIDKCKIQAIKKGKIEDTQYKLDNENIIESVDPLEGYKYLGYYQSHQIHHKQIKKQLKHKLRARLHKILVTQLNSKNTIKAINTYAIPILTYSFGVIRWNQTELKSLQRLINTTMTKHRKHHPRACIQRLILPKAEGGRGLIDIVNLHNRQIDLLRKFFYNRAKTKKTLHQAICQTDTHTPLTLADNTKKINIYTNQQKIEVWTNKTLHGRHRMDLTNNTVDKIASNAWLKYGELFPETEGFMLAIQDQVIDTKNYRKHIIRDHNIGSDHCRHCHKQPETIQHITGACSSITQTDYKHRHDQVAAIIHQILAFKYNLITEKSPYYKYTPQIILDSPDYKLYWDRTILTDKTVHHNRPDITLHDKRNRTVYLIDIAIPNTHNLSSTHTTKLAKYTDLTVEIKLQWKVNTVKTIPIIISTTGVIPKTLHTSLKTLNIHPLTFITLQKAAILNTCRIVRKFLSVNN

SEQ ID NO: 23990 - protein, 1364 aa, Celastrina argiolus
MRLRNRNIPQAGTGAKSNGESRPGPSGLGCSSYSGGSTVPQNDIILQSRDNSSSRLSPISSLFSSPPSSPASYLSEIESSSPNSSSSSSTEPTVDVVQEAISAIVTAPVHSKECKRKKWSKEMNIFIMHQYFILTKLGTDTKSYLTQLHILFSSQFPDMEASKQRVGDQRRAIVQRNLLNLTEISRIKNDVKTFLHNQNQHVTNGHDKTYNESTNTNCTLQRIRWTTDINETIMKIYYRITKLETDLTTYRPLLHQELIAKFPSIAHLSVQRIADQRRSIVSNHLLASEQLKRIREEVQKELDILTSENLEHTEQMTDENSTQPNITATQSLLGFHIPVQNDLIDSVPSQNCEHVKLPTELEIQLKEMFMEAYNIFKDTTPVMRPSLPKLKPSKKLYQIVNCLNSYIIPNIIEDNTDFSTLHTYIYTAAYTSTKFSGVRININKTPDINKSKKIPWWQKRLECRINDLRASIGRLTEYARGTRTNHLERQIQKIKQQYKIHSQHETQNSGITHFMDTLKQKLNLLSNRLKRYKDCTIRKTQNKEFSNNEKLFYRKLSQKNIQHNNSNNNHTPTPESMHTYWSNIWSYPKQHKNNPWIEEDKARFTEIPEMEFEQIQLEQMKVVIARTHNWKATGSDNIHNFWYKKLTCLHTLLHKHINSFIHSPDTIPSFITQGITYMLPKDNSDTTNPAKYRPITCLQNIYKIITACISELIYAHINNHNILAEEQKGCRKYSQGCKEQLIIDSIISQQALKQKHSIYTMYIDYKKAFDSVPHSWLIYILKHYKINPLITNCLEKIMPNWHTKLKICDSSKTIETDYISIKRGIFQGDSLSPLWFCLALNPLSYVLNENEHGFKIKHDLHHTSLSHLMYMDDIKLFANTENDIHTLADLTQTFSNTIHMEFGIDKCKIQAVNKGVIEHTQYKLDNDDIIEPVDPLDGYKYLGYYQSQQIHYKETKKILQQKFRDRLHKILLTHLNAKNTIKAINTYAIPILTYSFGIIRWNQTELKTLQRVINTTMTKHRKHHPRACIQRLILPKIEGGRGLIDILNLHNRQITLLRTFFYNHAQTKTLHQAICHADTYTPLTLADNTKKINNYTNQQKIEAWSQKSLHGRHRLDLTNNAVDEIASNAWLKQGELFPETEGFMLAIQDQVIDTKNYRKHIIRDRNFNSDHCRHCHKHPETIQHITGACSSITQTDYKHRHDQVAAIIHQILAHKYNLITEKSPYYKYSPQIVLESPDYKLYWDRTILTDKTVHHNRPDITLHDKQNKIVYLIDIAIPNTHNLTTTHTTKVTKYTDLTIELKTQWKVNSVKTIPIIISTTGIIPKTLHTSLKILNIHPLTYITMQKAVILNTCRIVRKFLSINS

SEQ ID NO: 23991 - protein, 1336 aa, Aricia agestis
MFPTRESNSRPPSQKPRSIPLDLKLWKIRLRNREIPQTGAGAESNGESRPGPPGLGCPPYSGVGTVSQNHNITLQRGTSSPCLSPISSLFSSPPSSPASYLMTYKSSSSNSSPSMESTMDVVQEACIARVTAPARSIKCKRQKWSKEMNIFIMHQYFVLTKLETDTKSYLTQLHILFSSQFPEIVATKQRVGDQRRAIIQRHLLSHEEILQIKNDANLFLHNRNLLLTNGQDMTQLDSTGHTQRMRWTTEINEKIMRAYYRITRLETDLTTYIPLLHQKITATCPSIAHLSIQRIADQRRSIVSNNLLSNDQLKAIREDVQKEIDILAMENSLEYVEQPQSPLNNSVPTLTEDCIQNINDIIVPTQNLLSIKLPKELETQLKEMFTETYTVFKDTDPTSRPPLPKLKPSKKLYQIVTHINTDILPNFLEDDTDFNTLHTYLYTAAYTSTKFYGVRINTNTDCAHRMRTTPWWHKRLEDRINKLRASIGKLTAYAKGARSPHLEKEITKIHSQHETENSDISHFLDTLKQKLNILSNRLKRYNECTTRKTQNKEFDNNEKLFYRKLTQKENNKHSPTPSPESMHTYWSNIWSHPTQHENSKWIEEDKDRLKDLPEMEFEEIQLEQMKAVIGRTHNWKATGSDNIHNFWFKKFTSIHTLLHKHINSFIQSPDTIPSFITQGITYMLPKDNSDTTNPANYRPITCLQNIYKIITACITDLIYTHISKHSILAEEQKGCRKFSQGCKEQLIIDSVISQQALKQKRSIYTMYIDYKKAFDSVPHSCLIYILKHYKISPIITNCLEKTMPNWQTKIKFFDSSKAAETDIISIRRSIFQRDSLSPLWFCLALNPLSHILNQSNCGFKIKYNSHHTSLSHLMFMDDIKIFANTQNNIHTLADLTLTFSNDIHMDFGIDKCKIQAVKNGTIEHTEYKLSNDEIIEVVDPIEGYKYLGYYQSQQIHYKETKNILRQKFKERLHRILHTHLNAKNTIKAINTYAIPILTYSFGIIRWNQTELKNLQRIINTTMTKHRKHHPKACVQRLTLARNEGGRGLIDILNLHNRQITLLRTFFYNHAQTKTLHQAICNSDTYTPLTLTDNTKKINTYTNQQKIDAWTQKSLHGRHRLDLTNNAVDKIASNAWLKQGKLFPETEGFMLAIQDQVIDTKNYRKHIIKDSNYRSDHCRHCHKHPETIQHITGACSSITQTDYKHRHDQVATIIHQTLALKHQLITDKTPYYKYTPQIILDSPDYKLYWDRTILTDKTVHHNRLDITLHDKRNRTVYLIDIAIPNTHNLTTTHTTKITKYIDLTIELKSQWKVNIVKTIPIVISSTGIIPNTLHSSL

SEQ ID NO: 23992 - protein, 1240 aa, Celastrina argiolus
MNIFIMHQYFILTKLETDTKSYLTQLHILFSSQFPDMQASKQRVGDQRRAIVQRNLLNQTEISRIKNDVKTFLQNQHVTNGHDKTYNESTNTNCTLQRIRWTTDINETIMKIYYRITKLETDLTTYRPLLHQELIAKFPSIAHLSVQRIADQRRSIVSNHLLSSEQLKRIREEVQKELDILSSENLEHTEQLTDEKSTQPNVTATQSLLGFHIPVQNDLIDSLPSQNREHVKLLTELETQLKEMFMEAYNIFKDTTPVMRPSLPKLKPSKKLYQIVNCLNSYIIPNIIEDNTDFSTIHTYIYTAAYTSTKFSGVRININKTADINKSKKIPWWQKRLECRINDLRASIGRLTEYARGTRTNHLERQIQKIKQQYKIHSQHETQNSDITHFMDTLKQKLNLLSNRLKRYKDCTVRKTQNKEFSNNEKLFYRKLSQENIQHNNSNNNHTPTPVSMHTYWSNIWAYPKQHKNNPWIEEDRARFTEIPEMEFEQIQLEQMRLVIARTHNWKATGSDNIHNFWYKKLTCLHTLLHKHINSFIHSPDTIPSFITQGITYMLPKDNSDTTNPAKYRPITCLQNIYKIITACISELIYAHINNHNILAEEQKGCRKYSQGCKEQLIIDSIISQQALKQKHSIYTMYIDYKKAFDSVPHSWLIYILKHYKINPLITNCLEKIMPNWHTKLKICDSSKTIETDYISIKRGIFQGDSLSPLWFCLALNPLSYILNENEHGFKIKHDLHHTSLSHLMYMDDIKLFANTENDIHTLADLTQTFSNTIHMEFGIDKCKIQAVNKGVIEHTQYKLNNDDIIEPVDPLDGYKYLGYYQSQQIHYKETKKILQQKFRDRLHKILLTHLNAKNTIKAINTYAIPILTYSFGIIRWNQTELKTLQRLINTTMTKHRKHHPRACIQRLILPKIEGGRGLIDILNLHNRQITLLRTFFYNQAQTKTLHQAICHADTYTPLTLADNTKKINNYTNQQKIEAWSQKSLHGRHRLDLTNNAVDKIASNAWLKQGELFPETEGFMLAIQDQVIDTKNYRKHIIRDRNFNSDHCRHCHKHPETIQHITGACSSITQTDYKHRHDQVAAIIHQILAHKYNLITEKSPYYKYAPQIVLESPDYKLYWDRTILTDKTVHHNRPDVTLHDKQNKIVYLIDIAIPNTHNLTTTHTTKVTKYTDLTIELKTQWKVNSVKTIPIIISTTGIIPKTLHTSLKILNIHPLTYITLQKAVILNTCRIVRKFLSINS

SEQ ID NO: 23993 - protein, 1349 aa, Plebejus argus
MRLRNREIPQAGTGAESNGESRPGPSGPGCPPYSGVGTVSQNHNITLQRGTSSPCLSPISSLFSSPPSSPASYLMTYQSSSSNSSPSIESTMDVVQEASLARVTAPARSIKCKRQKWSKEMNIFIMHQYFILTKLETDTKSYLTQLHTLFSSQFPEIEATKQRVGDQRRAIVKRHLLSHDEILQIKNDANLFLHNQNLHLTNGQDMTQLNSTSHTQRMRWTTDINEKIMRTYYRITRLETDLTTYRPLLHQEITATCPSIAHLSVQRIADQRRSIVNNRLLSNDQLKTIREDVQKELDILATENELEHNIEQPQSPLNNNSIPTITENCTQNLGDTLVPSDNHESVKLPIELETPLKEMFTETYHTFKDTDPTTRPPLPKLKPSKKLYQIITHINTDILPNILEDDVDFNTLHTYLYTAAYTSTKFSGVKINNNKTHANETRSKPRWQKRLENRINKLRTSIGRLTAYAKGTRSVHLEKQINKIKQQYKIHSQHETQNYDIAHFLDTLKQKLNILSNRLRRYNECTTRKTQNKEFNNNEKQFYRKLTQQNNNEHSPQPSPESMHKYWSNIWSHPTQHENNHWIEEDKARVKDIPEMEFGEIQLEQMKAVIARTHNWKATGSDNIHNFWFKKFTSLHTLLHKHINSFIQSPDTIPSFITQGITYMLPKDNSDTLNPAKYRPITCLQNIYKIITACISDLIYTHINKHNILAEEQKGCRKFSQGCKEQLIIDSVVSQQALKQTRSIYTMYIDYKKAFDSVPHSWLIYILKHYKISPIIINCLEKIMPNWHTKLKIFDSSSTIETDLISIKRGIFQGDSLSPLWFCLALNPLSYILNQNNHGFKIKYSTHHTSLTHLMYMDDIKIFANTLNNLHTLANLTQTFSNDIHMEFGIDKCKIQAIKKGTIEHTQYKLSNEEIIDSLDPIVGYKYLGYYQSQQIHYKDTKNVLRQKFKERLHKILHTHLNAKNTIKAINTYAIPILTYSFGVIRWNQTELKALQRLINTTMTKHRKHHPKACVQRLTLPKNEGGRGLIDILNLHNKQITLLRTFFYSHAQTKTLHQTICHSDTYTPLMLADKTKQLNTYTYQQKIEAWAQKSLHGRHRLDLTSNAVDKIASNAWLKQGELYPETEGFMLAIQDQVIDTKNYRKYIIKDRNFINDHCRHCHKQSETIQHITGACSSITQTDYKHRHDQVAAIIHQILALKHKLITDKTPYYKYTPQIILDSPHYKLYWDRTILTDKTVHHNRPDITLHDKRNKTVYLIDIAIPNSHNLTTTHAMKITKYTDLTIELKSQWKVNVVKTIPIVISSTGIIPKTLHHSLETLNIHPLTYITLQKAVILNTCRIVRKFLSIM

SEQ ID NO: 23994 - protein, 1364 aa, Celastrina argiolus
MRLRNRNIPQAGTGAKSNGESRPGPSGLGCSSYSGGSTVPQNDIILQSRDNSSSRLSPISSLFSSPPSSPASYLSEIESSSPNSSSSSSTEPTVDVVQEAISAIVTAPVHSKECKRKKWSKEMNIFIMHQYFILTKLGTDTKSYLTQLHILFSSQFPDMEASKQRVGDQRRAIVQRNLLNLTEISRIKNDVKTFLHNQNQHVTNGHDKTYNESTNTNCTLQRIRWTTDINETIMKIYYRITKLETDLTTYRPLLHQELIAKFPSIAHLSVQRIADQRRSIVSNHLLASEQLKRIREEVQKELDILTSENLEHTEQMTDENSTQPNITATQSLLGFHIPVQNDLIDSVPSQNCEHVKLPTELEIQLKEMFMEAYNIFKDTTPVMRPSLPKLKSSKKLYQIVNCLNSYIIPNIIEDNTDFSTLHTYIYTAAYTSTKFSGVRININKTPDINKSKKIPWWQKRLECRINDLRASIGRLTEYARGTRTNHLERQIQKIKQQYKIHSQHETQNSGITHFMDTLKQKLNLLSNRLKRYKDCTIRKTQNKEFSNNEKLFYRKLSQKNIQHNNSNNNHTPTPESMHTYWSNIWSYPKQHKNNPWIEEDKARFTEIPEMEFEQIQLEQMKVVIARTHNWKATGSDNIHNFWYKKLTCLHTLLHKHINSFIHSPDTIPSFITQGITYMLPKDNSDTTNPAKYRPITCLQNIYKIITACISELIYAHINNHNILAEEQKGCRKYSQGCKEQLIIDSIISQQALKQKHSNTMYIDYKKAFDSVPHSWLIYILKHYKINPLITNCLEKIMPNWHTKLKICDSSKTIETDYISIKRGIFQGDSLSPLGFALLSIHYHISLMKKNEHGFKIKHDLHHTSLSHLMYMDDIKLFANTENDIHTLADLTQTFSNTIHMEFGIDKCKIQAVNKGVIEHTQYKLNNDDIIEPVDPLDGYKYLGYYQSKQIHYKETKKILQQKFRDRLHKILLTHLNAKNTIKAINTYAIPILTYSFGIIRWNQTELKTLQRVINTTMTKHRKHHPRACIQRLILPKIEGGRGLIDILNLHNRQITLLRTFFYNHAQTKTLHQAICHADTYTPLTLADNTKKINNYTNQQKIEAWSQKSLHGRHRLDLTNNAVDKIASNAWLKQGELFPETEGFMLAIQDQVIDTKNYRKHIIRDRNFNSDHCRHCHKHPETIQHITGACSSITQTDYKHRHDQVAAIIHQILAHKYNLITEKSPYYKYSPQIVLESPDYKLYWDRTILTDKTVHHNRPDITLHDKQNKIVYLIDIAIPNTHNLTTTHTTKVTKYTDLTIELKTQWKVNSVKTIPIIISTTGIIPKTLHTSLKILNIHPLTYITLQKAVILNTCRIVRKFLSINS

SEQ ID NO: 23995 - protein, 850 aa, Celastrina argiolus
MDTLKQKLNLLSNLLKRYKDCTIRKTQNKEFSNNEKLFYRKLSQKNIQHNNSNNNHTPTPESMHTYWSNIWSYPKQHKNNPWIEEDKARFTEIPEMEFEQIQLEQMKVIIARTHNWKATGSDNIHNFWYKKLTCLHTLLHKHINSFIHSPDTIPSFITQGITYMLPKDNSDTTNPAKYRPITCLQNIYKIITACISELIYAHINNHNILAEEQKGCRKYSQGCKEQLIIDSIISQQALKQKHSIYTMYIDYKKAFDSVPHSWLIYILKYYKINPLITNCLEKIMPNWHTKLKICDSSKTIETDYISIKRGMFQGDSLSPLWFCLALNPLSYILNENEHGFKIKHDLHHTSLSHLMYMDDIKLFANTENDIHTLADLTQTFSNTIHMEFGIDKCKIQAVNKGVIEHTQYELNNDDIIEPVDPLDGYKYLGYYQSQQIHYKETKKILQQKFRDRLHKILLTHLNAKNTIKAINTYAIPILTYSFGIIRWNQTELKTLQRVINTTMTKHRKHHPRACIQRLILPKIEGGRGLIDILNLHNRQITLLRTFFYNHAQTKTLHQAICHADTYTPLTLADNTKKINNYTNQQKIEAWSQKSLHGRHRLDLTNNAVDKIASNAWLKQGGLFPETEGFMLVIQDQVIDTKNYRKHIIRDRNFNSDHCRHCHKHPETIQHITGACSSITQTDYKHRHDQVAAIIHHILAHKYNLITEKSPYYKYSPQIVLESPDYKLYWDRTILTDKTVHHNRPDITLHDKQNKIVYLIDIAIPNTHNLTTTHTTKVTKYTDLTIELKTQWKVNSVKTIPIIISTTGIIPKTLHTSLKILNIHPLTYITLQKAVILNTCRIVRKFLSINS

SEQ ID NO: 23996 - protein, 1349 aa, Cyclargus thomasi
MRLRNRDIPQAGTGATRNGESRPGPLGPGCPTYSGVGTVSQNENITQRDTSSPCASSISSLFSSPPSSPASYLMSYEANSSNLSPLIEPTVDVVQEATSARLTAPAHSLKCKRKKWSKEMNIYLMREYFILTKLETETKSYLSKLHSLFSSQFPEMEASKQRVGDQRRAIVQRHFLSHEEILQIKDDVKNVLSSQNLQLTHGQDISQLDTTDRTQRMRWNTEINEKIMRTYYRITRLETDLTTYRPLLHEEITATCPSIAHLSVQRIADQRRSIVRNNLLSSDQLKTIREDVQKELDTLATENSLEHVEQPQSPLNNINNSIPELTENYTQNLSEIQVPLQNNTPIELPTEHRIQLKEMFIETYNIFKDTDPTARPPLPKLKSSKKLNKIVTYVNTEIIPNMLDDDTDFNTLHTYLYTAAYTSTKFSGVRINSNIIHAHKPRSSPWWHKRLEQKIKNLRASIGRLTAYANGNRSTHLEKQINKIKEQYKNHSTHETQNSDIPHFLDTLKQKLNILSNRLKRYTECTTRKAQNKEFTKNEKLFYRKLTQNNNNEHSLKPNPDTMHTYWSNIWAHPVQHENNQWIEEDKDRFKDMPEMELGEIQLEQMKAVISRTHNWKATGSDNIHNFWFKKLTSIHTLLHKHINSFIQSPDTIPLFITQGITYMLPKDNLDSNNPAKYRPITCLQNIYKIITACIRDLIYTHINKHSILAEEQKGCRKFSQGCKEQLIIDSVISQQALKQKRSIYTMYIDYKKAFDSVPHSWLIYILKHYKINPNITNFLQKVMLSWQTKLKLFDSSKTIETDKIPIRRGIFQGDSLSPLWFILALNPLSHILNQSNRGFKIKHNSSHTSLTHLMFMDDIKLFANTQQDIYTLADLTQTFSNDIHMDFGIDKCKLQAVKNGTIEHTQYKLSNEEVIEAVDPIKGYKYLGYYQSQKIHYTETKNILRQKFKERLHRILHTHLNAKNTIKAINTYAIPVLTYSFGIIRWNQTELKYLQRIINTTMTRYRKHHPKACVQRMILSRNEGGRGLIDILNLHNRQITLLRTFFYNRAQTNTLHQAICNSDTYTPLTLANNLKKINTYTNQQKIDDWTEKSLHGRHRLDLTSNAVDKIASNAWLKQGELFPETEGFMLAIQDQVIDTKNYRKHIIKDSQYSSDHCRQCHRHPETIQHITGACSSITQTDYKHRHDQVAAIIHQTLALKHKLITDKTPYYKYTPQIILDSPDYKLYWDRTILTDKTVHHNRPDITLHDKRNKTVYLIDIAIPNSHNLTTTHTTKVTKYIDLTIELKSQWRVNTVKTIPVIISSTGIIPKTLHDSLKTLNIHPLTYITLQKAVILNTCRIVRKFLSIS

SEQ ID NO: 23997 - protein, 1346 aa, Cyaniris semiargus
MRLRNRDIPQAGTGAESNGESRPGPSGLGCPPYSGVGTVSQNHNITLQRGTSPCLSPISSLFSSPPSSPASYLMTYQSSSSNSSPSIESTMDVVQEASLARVTAPARSIKCKRQKWSKEMNIFIMHQYFILTKLETDTKSYLTQLHTLFSSQFPGIEASKQRVGDQRRAIVQRHLLSHEEILQIKNDANLFLHNQNLHFTNGQDMTQLDSTGHTQRMRWTTDINEKIMRAYYRITRLETDLTTYRPLLHQEITAVCLSIAHLSIQRIADQRRSIVSNNLLSKDQLKAIREDVQKEIDILATENSLEHVEQPQSLLNNSAPTLTEDCIQNLNDIIVPTQNHLSVKLPKELETQLKEMFTETYTVFKDTDPTSRPPLPKLKPSKKLYQIVTHINTDILPNLLEDDTDFNTLHTYLYTAAYTSTKFYGVRINNNTNCTHRLRTTPWWHKRLEDRINKLRASIGRLTAYARGTRSSHLEKEITKIKQQYKIHSQHETQNSDIAHFLDTLKQKLNILSNRLKRYNECTTRKTQNKEFNNNEKLFYRKLTQKENNKHNPTPSPESMHTYWSNIWSHPTQHENNQWIEEDKDRLKDIPEMEFEEIQLEQMKAVIARTHNWKATGSDNIHNFWFKKFTSIHTLLHKHINSFIQSPDTIPSFITQGITYMLPKDNSDTTNPAKYRPITCLQNIYKIITACISDLIYTHISKHNILAEEQKGCRKFSQGCKEQLIIDSVISQQALKQKRSIYTMYIDYKKAFDSVPHSWLIYILKHYKISPIITNCLEKTMPNWQTKLKIFDSSKTAETDIISIRRGIFQGDSLSPLWFCLALNPLSHILNQSNRGFKIKYNSHHTSLSHLMFMDDIKIFANTQNNIHTLADPTLTFSNDIHMDFGIDKCKIQAVKNGTIEHTEYKLSNDEIIEAVDPIEGYKYLGYYQSQQIHYKETKNILRQKFKERLHRILHTHLNAKNTIKAINTYAIPILTYSFGIVRWNQTELKKLQRIINTTMTKHRKHHPKACVQRLTLSRNEGGRGLIDILNLHNRQITLLRTFFYNQAQTKTLHQAICNSDTYTPLTLADNTKKINTYTNQQKIDAWTQKSLHGRHRLDLTDNAVDKIASNAWLKQGELFSETEGFMLAIQDQVIDTKNYRKHIIKDSNYRSDHCRHCHKHPETIQHITGACSSITQTDYKHRHDQVAAIIHQTLALKHKLITDKTPYYKYTPQIILDSPDYKLYWDRTILTDKTVHHNRPDITLHDKRNRTVYLIDIAIPNSHNLTTTHTTKVTKYIDLTIELKSQWKVNVVKTIPIVISSTGIIPKTLHSSLKTLNIHPLTYITLQKAIILNTCRIVRKFLSIT

SEQ ID NO: 23998 - protein, 1365 aa, Plebejus argus
MRLRNRIIPQAGTGADSNGESRPGPSGPGCPTYSGVGTVSHNDNVTQPRETSSSCFSPISSLFSSPPSSPASYHNANQSISSNSSISPSLKSTVDVVREAIPARVTAPIHSSKCKRKKWSKEMNIFIMHKYFIITKLETDTKSYLTQLHSLFSTQFPEMEASKQRVGDQRRAIVQRRLLSHQEILSIKNDVKTLLQNQNEQLTDEQDMAQLRNSDTNCTLQRMRWTTEINETIMRAYYRITKLETDLTTYRPILHQEIIATCPSIAHLSIQRIADQRRSIVSNCLLSSEQLKKIREEVQTELDEISVENIQHQPDENFTQPGLDVTQSLLGDHSSIPNQQNDIDNLVPIQNRAPVNLATELETELKEMFLESFNIFKEIHPTARPSLPKLKPSKKLFQIVNCLNTNIIPNIIREDTDFNTLHTYIYTAAYTSTKFSGVRININNNTTNVNKTQVIPWWQKRLEGRIGDLRANIGRLTEYIRGTRSPYLEKQIQKIKHQYKIHAQHESENSDAIHFLDTLKQKLNILTNRLKRYKDCSNRKIQNKEFYFNEKLFYRKLAQKDTSQHNHPNNNLSPTPESMHTYWSNIWSHPKQHENSPWIEEDRARFADIPEMEFDQIQLEQLKSVIAKTHNWKASGSDNIHNFWYKKLTCIHSILLKHINSFIRSPDLMPHFITQGITYMLLKDNSDTTNPEKYRPITCLQNIYKIITACISNLIYTHIEKHNILAEEQKGCRKYSQGCKEQLIIDSVISNQARKQKRSIYTMYIDYKKAFDSVPHSWLIYILKHYKINPIIINYLEKIMPNWQTSLKICNLTKTIETDLIPIKRGIFQGDSLSPLWFCLALNPLSYILNESKRGFKIKHNTQHTLLSHLMYMDDIKIFANTLNNIHTLADLTQIFSNTIHMEFGIDKCKIQAIKKGKIEDTQYKLNNDDIIESVDPLEGYKYLGYYQSQQLHYKQIKTQLKHKLRARLHKILVTQLNSKNTIKAINTYAIPILTYSFGVIRWNQTELKSLQRIINTTMTKHRKHHPRACTQRLILPKAEGGRGLIDIVNLHNRQIDLLRKFFYNRAKTVTLHQAICQTDTHTPLTLADNTKRINIYTNQQKIEAWTNKTLHGRHRLDLNNNAVDKIASNAWLKHGELFPETEGFMLAIQDQVIDTKNYRKHIIRDRNLGSDHCRHCHKQPETIQHITGACSSITQTDYKHRHDQVASIIHQILAHKHNLITEKSPYYKYTPQIILDSPDYKLYWDRTILTDKTVHHNRPDITLHDKRNRTVYLIDVAIPNTHNLTSTHTTKLAKYTDLTIEIKSQWKVTTVKTIPIIISTTGVIPKTLHTSLKTLNIHPLTFITLQKAVILNTCRIVRKFLSIN

SEQ ID NO: 23999 - protein, 1365 aa, Lysandra bellargus
MRLRNRTIPQAGTGADSNGESRPGPSGPGSPAYSGVGTVSHNDNVTHHRETSSSCFSPLSSLFSSPPSSPASYVIANQSTSSNSSMSSSSESTVDVVREATSARVTAPIHSSKCKRKKWSKEMNIFIMHKYFIITKLETDTQSYLTQLHSLFSTQFPEMEASKQRVGDQRRAIAQRHLLSHQEILSIKNNVKSLLQNQNEHSTDEQDMTQLGNTDTNCTLQRMRWTTEINEKIMRAYYRITKLETDLTTYRPILHQEIITTCPSIAHLSIQRIADQRRSIVSNCLLSSEQLKRIREEVQTELDEISVENIEHQPDENFTPPNLNVTQSLLGDHSPTPNQQNNTASTQNRVPVKLSIELETQLKEMFLESFNIFNDIHPIARPSLPKLKPSKKLFQIVDCLNSNIIPNMIHEDTDFNTLHTYIYTAAYTSTKFSGVRINIKNNTTNVNKSQMIPWWQKRLEGRIGDLRANIGRLTEYIRGTRSPYLEKQIQKIKQQYKIHAQHESENSDLIHFLDTLKQKLNILTNRLKRYKDCSNRKTQNKEFYYNEKLFYRKLAQKDTSQHNNPNGNLSPAPESMHTYWSNIWSHPKHHENSPWIEEDKSRFADIPEMEFDQIQLEQLKSVIAKTHNWKATGSDNIHNFWYKKLTCIHYLLLKHINSFIRSPNLIPNFITQGITYMLLKDKSDTTNPEKYRPITCLQNIYKIITACISNLIYTHIENHNILAEEQKGCRKYSQGCKEQLIIDSVISNQARKQKRSIYTVYIDYKKAFDSVPHSWLIYILKHYKISPKIINCLEKIMPNWQTRLKIFDPAKTIETGLIPIKRGLFQGDSLSPLWFCLALNPLSNILNESERGFKTKHNTQHNIISLSHLMYMDDIKIFANTLNNIHTLVDLTQIFSNTIHMEFGIDKCKIQAIKKGKIEDTQYKLDNENIIESVDPLEGYKYLGYYQSHQIHHKQIKKQLKHKLRARLHKILVTQLNSKNTIKAINTYAIPILTYSFGVIRWNQTELKSLQRLINTTMTKHRKHHPRACIQRLILPQAEGGRGLIDIVNLHNRQIDLLRKFFYNRAKTVTLHQAICQTDTHTPLTLADNTKKINIYTNQQKIEVWTNKTLHGRHRMDLTNNTVDKIASNAWLKYGELFPETEGFMLAIQDQVIDTKNYRKHIIRDHNIGSDHCRHCHKQPETIQHITGACSSITQTDYKHRHDQVAAIVHQILAFKYNLITEKSPYYKYTPQIILDSPDYKLYWDRTILTDKTVHHNRPDITLHDKRNRTVYLIDIAIPNTHNLSSTHTTKLAKYTDLSVEIKLQWKVNTVKTIPIIISTTGVIPKTLHTSLKTLNIHPLTFITLQKAAILNTCRIVRKFLSVNN

SEQ ID NO: 24000 - protein, 1365 aa, Lysandra coridon
MRLRNRTIPQAGTGADSNGESRPGPSGPGSPAYSGVGTVSHNDNVTHHRETSSSCFSPLSSLFSSPPSFPASYVIANQSTSSNSSMSSSSESTVDVVREATSARVTAPIHSSKCKRKKWSKEMNIFIMHKYFIITKLETDTQSYLTQLHSLFSTQFPEMEASKQRVGDQRRAIAQRHLLSHQEILSIKNNVKSLLQNQNEHSTDEQDMTQLGNTDTNCTLQRMRWTTEINEKIMRAYYRITKLETDLTTYRPILHQEIITTCPSIAHLSIQRIADQRRSIVSNCLLSSEQLKRIREEVQTELDEISVENIEHQPDENFTPPNLNVTQSLLGDHSPTPNQQNYTASTQNRVPVKLSIELETQLKEMFLESFNIFNDIHPIARPSLPKLKPSKKLFQIVDCLNSNIIPNMIHEDTDFNTLHTYIYTAAYTSTKFSGVRINIKNNTTNVNKSQMIPWWQKRLEGRIGDLRANIGRLTEYIRGTRSPYLEKQIQKIKQQYKIHTQHESENSDLIHFLDTLKQKLNILTNRLKRYKDCSNRKTQNKEFYYNEKLFYRKLAQKDTSQHNNPNGSLSPTPESMHTYWSNIWSHPKHHENSPWIEEDKSRFADIPEMEFDQIQLEQLKSVIAKTHNWKATGSDNIHNFWYKKLTCIHNLLLKHINSFIRSPNLIPNFITQGITYMLLKDKSDTTNPEKYRPITCLQNIYKIITACISNLIYTHIENHNILAEEQKGCRKYSQGCKEQLIIDSVISNQARKQKRSIYTVYIDYKKAFDSVPHSWLIYILKHYKISPKIINCLEKIMPNWQTRLKIFDPAKTIETGLIPIKRGLFQGDSLSPLWFCLALNPLSNILNESERGFKTKHNTQHNIISLSHLMYMDDIKIFANTLNNIHTLVDLTQIFSNTIHMEFGIDKCKIQAIKKGKIEDTQYKLDNENIIESVDPLEGYKYLGYYQSHQIHHKQIKKQLKHKLRARLHKILVTQLNSKNTIKAINTYAIPILTYSFGVIRWNQTELKSLQRLINTTMTKHRKHHPRACIQRLILPKAEGGRGLIDIVNLHNRQIDLLRKFFYNRAKTVTLHQAICQTDTHTPLTLADNTKKINIYTNQQKIEVWTNKTLHGRHRMDLTNNTVDKIASNAWLKYGELFPETEGFMLAIQDQVIDTKNYRKHIIRDHNIGSDHCRHCHKQPETIQHITGACSSITQTDYKHRHDQVAAIIHQILAFKYNLITEKSPYYKYIPQIILDSPDYKLYWDRTILTDKTVHHNRPDITLHDKRNRTVYLIDIAIPNTHNLSSTHTTKLAKCTDLTVEIKLQWKVNTVKTIPIIISTTGVIPKTLHTSLKTLNIHPLTFITLQKAAILNTCRIVRKFLSVNN

SEQ ID NO: 24001 - protein, 1357 aa, Aricia agestis
MRLRNRTIPQAGTGADSNGESRPGPSGPGCPTYSGVGTVSHNDNVTHHRETSSSCFSPLSSLFSSPPSSPASYLIANQSTSSNSSMSSSIESTADVVREAISARVTAPIHSSKCKRKKWSKEMNIFIMHKYFILTKLETDTKSYLTQLHSLFSSEFPEMEASKQRVGDQRRAIVQRHFLTRQEILSIKNDVRTFLQNQNEHLTDEQDMTQPGTIETYYTLNRMKWTTEINKTIMTAYYRITKLETDLTTYRPILHQEITATCPSIAHLSIQRIADQRRAIVSNHLLSSEELKRIREEARRELDEISVENTEHTVHQPVNVTQNLLDDHSFLSNQQNDIVNLVTIQNRVPVKLSIELETQLKEMFLESYNIFKDITPTARPSLPKLKPSKKLFLIVDCLNSNIIPNMTHEDTDFNTLHTYIYTAAYTATKFSGVRINVNNNTTSANKSQMTPRWQKRLEGRIGDLRANIGRLTEYIRGTRSSYLEKQIQKIKQQYKIHAQHESENSDVTHFLDTLKQKLNILTNRLKRYKDCSNRKTQNKEFNNNEKLFYRKLAQDTAQHNNPSPTPESMHTYWSNIWSHPKHHETSPWIEKDRARFADIPEMKFDQIHAEQLKSVIAKTHNWKATGSDNIHNFWYKKLTCTHSLLLKHINTFIRSPDLIPNFITQGITYMLPKDNSDTANPEKYRPITCLQNIYKIITACISNLIYTHIEKNNILAKEQKGCRKYSQGCKEQLIIDSVISNQARKKKSSIYTMYIDYKKAFDSVPHSWLIYILKHYKICPTIINCLAKIMPNWQTRLKICDSSKTIETDLIPIKRGIFQGDSLSPLWFCLALNPLSYILNEKERGFKIKHNTQHTSLSHLMYMDDIKIFANTLNNIHILADLTQIFSNTIHMEFGIDKCKIQAIKKGKIQETQYKLNNDCIIESVDPLEGYKYLGYYQSQQLHHKQIKKQLKHKFRARLHKILVTQLNSKNTIKAINTYAIPILTYSFGVIRWNQTELKSLQRLINTTMTKHRKHHPRACIQRLILPKAEGGRGLIDIVNLHNRQIELLRKFFYNRAQTVNLHQAICHTDTHTPLTLADNTKRINIYTNQQKIEAWTNKTLHGRHRMDLTNNAVDKIASNAWLKHGELFPETEGFMLAIQDQVIDTKNYRKHIIRDRDIGSDHCRHCHKQPETIQHITGACSSITQTDYKHRHDQVAAIIHQILAQKYNLITEKTPYYMYTPQIILDSPDYKLYWDRTILTDKTVHHNRPDITLHDKRNRTVYLIDIAIPNTHNLPSTHTTKLAKYTDLTVEIKSQWQVNTVKTIPIIISTTGVIPKTLHTSLKILNIHPLTFITLQKAVILNTCRIVRKFLSINNN

SEQ ID NO: 24002 - protein, 1365 aa, Lysandra coridon
MRLRNRTIPQTGTGADSNGESRPGPSGPGSPAYSGVGTVSHNDNVTHHRETSSSCFSPLSSLFSSPPSSPASYVIANQSTSSNSSMSSSSESTVDVVREATSARVTAPIHSSKCKRKKWSKEMNIFIMHKYFIITKLETDTQSYLTQLHSLFSTQFPEIEASKQRVGDQRRAIAQRHLLSHQEILSIKNNVKSLLQNQNEHSTDEQDMTQLGNTDTNCTLQRMRWTTEINEKIMRAYYRITKLETDLTTYRPILHQEIITTCPSIAHLSIQRIAEQRRSIVSNCLLSSEQLKRIREEVQTELDEISVENIEHQPDENFTPPNLNVTQSLLGEHSPTPNQQNYTASTQNRVPVKLSIELETQLKEMFLESFNIFNDIHPIARPSLPKLKPSKKLFQIVDCLNSNIIPNMIHEDTDFNTLHTYIYTAAYTSTKFSGVRINIKNNTTNVNKSQMIPWWQKRLEGRIGDLRANIGRLTEYIRGTRSPYLEKQIQKIKQQYKIHAQHESENSDLIHFLDTLKQKLNILTNRLKRYKDCSNRKTQNKEFYYNEKLFYRKLAQKDTSQHNNPNGNLSPTPESMHTYWSNIWSHPKHHENSPWIEEDKSRFADIPEMEFDQIQLEQLKSVIAKTHNWKATGSDNIHNFWYKKLTCIHNLLLKHINSFIRSPNLIPNFITQGITYMLLKDKSDTTNPEKYRPITCLQNIYKIITACISNLIYTHIENHNILAEEQKGCRKYSQGCKEQLIIDSVISNQARKQKRSIYTVYIDYKKAFDSVPHSWLIYILKHYKISPKIINCLEKIMPNWQTRLKIFDPAKTIETGLIPIKRGLFQGDSLSPLWFCLALNPLSNILNESERGFKTKHNTQHNIISLSHLMYMDDIKIFANTLNNIHTLVDLTQIFSNTIHMEFGIDKCKIQAIKKGKIEDTQYKLDNENIIESVDPLEGYKYLGYYQSHQIHHKQIKKQLKHKLRARLHKILVTQLNSKNTIKAINTYAIPILTYSFGVIRWNQTELKSLQRLINTTMTKHRKHHPRACIQRLILPKAEGGRGLIDIVNLHNRQIDLLRKFFYNRAKTVTLHQAICQTDTHTPLTLADNTKKINIYTNQQKIEVWTNKTLHGRHRMDLTNNTVDKIASNAWLKYGELFPETEGFMLAIQDQVIDTKNYRKHIIRDHNIVSDHCRHCHKQPETIQHITGACSSITQTDYKHRHDQVAAIIHQILAFKYNLITEKSPYYKYTPQIILDSPDYKLYWDRTILTDKTVHHNRPDITLHDKRNITVYLIDIAIPNTHNLSSTHTTKLAKYTDLTVEIKLQWKVNTVKTVPIIISTTGVIPKTLHTSLKTLNIHPLTFITLQKAAILNTCRIVRKFLSVNN

SEQ ID NO: 24003 - protein, 1365 aa, Lysandra bellargus
MRLRNRTIPQAGTGADSNGESRPGPSGPGSPAYSGVGTVSHNDNVTHHRETSSSCFSPLSSLFSSPQSSPASYVIANQSTSSNSSMSPSSESTVDVVREATSARVTAPIHSSKCKRKKWSKEMNIFIMHKYFIITKLETDTQSYLTQLHSLFSTQFPEMEASKQRVGDQRRAIAQRHLLSHQEILSIKNNVKSLLQNQNEHSTDEQDMTQLGNTDTNCTLQRMRWTTEINEKIMRAYYRITKLETDLTTYRPILRQEIITTCPSIAHLSIQRIADQRRSIVSNCLLSSEQLKRIREEVQTELDEISVENIEHQPDENFTPPNLNVTQSLLGDHSPTPNQQNNTASTQNRVPVKLSLELETQLKEMFLESFNIFNDIHPIARPSLPKLKPSKKLFQIVYCLNSNIIPNMIHEDTDFNTLHTYIYTAAYTSTKFSGVRINIKNNTTNVNKSQMIPWWQKRLEGRIGDLRANIGRLTEYIRGTRSPYLEKQIQKIKQQYKIHAQHESENSDVIHFLDTLKQKLNILTNRLKRYKDCSNRKTQNKEFYYNEKLFYRKLAQKDTSQHNNPNGNLSPTPESMHTYWSNIWSHPKHHENSPWIEEDKSRFADIPEMEFDQIQLEQLKSVIAKTHNWKATGSDNIHNFWYKKLTCIHNLLLKHINSFIRSPNLIPNFITQGITYMLLKDKSDTTNPEKYRPITCLQNIYKIITACISNLIYTHIENHNILAEEQKGCRKYSQGCKEQLIIDSVISNQARKQKRSIYTVYIDYKKAFDSVPHSWLIYILKHYKISPKIINCLEKIMPNWQTRLKIFDPAKTIETGLIPIKRGLFQGDSLSPLWFCLALNPLSNILNESERGFKTKHNTQHNIISLSHLMYMDDIKIFANTLNNIHTLVDLTQIFSNTIHMEFGIDKCKIQAIKKGKIEDTQYKLDNENIIESVDPLEGYKYLGYYQSHQIHHKQIKKQLKHKLRARLHKILVTQLNSKNTIKAINTYAIPILTYSFGVIRWNQTELKSLQRLINTTMTKHRKHHPRACIQRLILPKAEGGRGLIDIVNLHNRQIDLLRKFFYNRAKTVTLHQAICQTDTHTPLTLADNTKKINIYTNQQKIEVWTNKTLHGRHRMDLTNNTVDKIASNAWLKYGELFPETEGFMLAIQDQVIDTKNYRKHIIRDHNIGSDHCRHCHKQPETIQHITGACSSITQTDYKHRHDQVAAIIHQILAFKYNLITEKSPYYKYTPQIILDSPDYKLYWDRTILTDKTVHHNRPDITLHDKRNRTVYLIDIAIPNTHNLSSTHTTKLAKYTDLTVEIKSQWKVNTVKTIPIIISTTGVIPKTLHTSLKTLNIHPLTFITLQKAAILNTCRIVRKFLSINN

SEQ ID NO: 24004 - protein, 1394 aa, Cyaniris semiargus
MFISAIFHHLCFVLYCLSRLVNSSFETKTYVMRLRNRTIPQAGTGADSNGESRPGPSGPGCPTYSGAGTVSHNDNVSHHRETSSSCFSPLSSLFSSPPSSPASYVIANKSTSSNSSMSLSIESTVDVVREAISARVTAPIHSSKCKRKKWSKEMNIFIMHKYFLITKLETDTQSYLTQLHSLFSTQFPEMEASKQRVGDQRRAIVQRHLLSHQEILSIKNDVKTLLQNQNEHSTEEQDMTQLGNTDTNCTLQRMRWTTEINEKIMRAYYRITKLETDLTTYRPILHQEIIAICPSIAHLSIQRIADQRRSIVSNCLLSSEQLKRIREEVQTELDEISVENIEHQPDENFTQPNLNVTQSLLGDHSFTPNQQNNIAPIQNRVPVNLSIELETQLKEMFLKSFNIFNDIHPIARPSLPKLKPSKKLFQIVDCLNSNIIPNMIHEDTDFNTLHTYIYTAAYTSIKFSGIRININNNSTNVNKSKMIPWWQKRLEGRIGDLRANIGRLTEYIRGTRSPYLEKQIQKIKQQYKIHGQHESENSDVIHFLDTLKQKLNILTNRLKRYKDCSNRKTQNKEFNYNEKLFYRKLVQKDTSQHNNPNSNLSPTPESMHTYWSNIWSHPKYHENSPWIEEDRARFADIPEMEFDQIQLEQLKSVIAKTHNWKATGSDNIHNFWYKKLTCIHNLLLKHINSFIRSPNLIPNFITQGITYMLLKDNSDTTNPEKYRPITCLQNIYKIITACISNLIYTHIENHNILAEEQKGCRKYSQGCREQLIIDSVISNQARKQKRSIYTVYIDYKKAFDSVPHSWLIYILKHYKISPTIINCLEKIMPNWQTSLKICDSAKTIETDLIPIKRGIFQGDSLSPLWFCLALNPLSYILNESERGFKIKLNTQHTSLSHLMYMDDIKIFANTLNNIHTLVDLTQIFSNTIHMEFGIDKCKIQAIKKGKIEDTQYKLDNDDIIESVDPLEGYKYLGYYQSQQIHHKQIKKQLKHKLRTRLHKILVTQLNSKNTIKAINTYAIPILTYSFGVIRWNQTELKSLQRLINTTMTKHRKHHPRACIQRLILPKAEGGRGLIDIVNLHNKQIDLLRKFFYNRAKTVTLHQAICQTDTHTPLTLADNTKRINIYTNQQKIEVWTNKTLHGRHRMDLTNNAVDKIASNAWLKHGELFPETEGFMLAIQDQVIDTKNYRKHIIRDRNIGSDHCRHCHKQPETIQHITGACSSITQTDYKHRHDQVAAIIHQILAYKYNLITEKSPYYKYTPQIILDSPDYKLYWDRTILTDKTVHHNRPDITLHDKRNKTVYLIDIAIPNTHNLSSTHTTKLAKYTDLTLEIKSQWKVNTVKTIPIIISTTGVIPKTLHTSLKTLNLHPLTFITLQKAAILNTCRIVRKFLSINN

SEQ ID NO: 24005 - protein, 1394 aa, Cyaniris semiargus
MFISSIFHQLCFVLYCLSRLVNSSFETKTYVMRLRNRTIPQAGTGADSNGESRPGPSGPGCPTYSGAGTVSHNDNVSHHRETSSSCFSPLSSLFSSPPSSPASYVIANKSTSSNSSMSLSIESTVDVVREAISARVTAPIHSSKCKRKKWSKEMNIFIMHKYFLITKLETDTQSYLTQLHSLFSTQFPEMEASKQRVGDQRRAIVQRHLLSHQEILSIKNDVKTLLQNQNEHSTDEQDMTQLGNTDTNCTLQRMRWTTEINEKIMRAYYRITKLETDLTTYRPILHQEIIAICPSIAHLSIQRIADQRRSIVSNCLLSSEQLKRIREEVQTELDEISVENIEHQPDENFTQPNLNVTQSLLGDHSFTPNQQNNIAPIQNRVPVNLSIELETQLKEMFLESFNIFNNIHPIARPSLPKLKPSKKLFQIVDCLNSNIIPNMIHEDTDFNTLHTYIYTAAYTSVKFSGIRININNNSTNVNKSKMIPWWQKRLEGRIGDLRANIGRLTEYIRGTRSPYLEKQIQKIKQQYKIHGQHESENSDVIHFLDTLKQKLNILTNRLKRYKDCSNRKTQNKEFNYNEKLFYRKLVQKDTSQQNNPNSNLSPTPESMHTYWSNIWSYPKYHENSPWIEEDRARFADIPEMEFDQIQLEQLKSVIAKTHNWKATGSDNIHNFWYKKLTCIHNLLLKHINSFIRSPNLIPNFITQGITYMLLKDNSDTTNPEKYRPITCLQNIYKIITACISNLIYTHIENHNILAEEQKGCRKYSQGCREQLIIDSVISNQARKQKRSIYTVYIDYKKAFDSVPHSWLIYILKHYKISPTIINCLEKIMPNWQTSLKICDSAKTIETDLIPIKRGIFQGDSLSPLWFCLALNPLSYILNESERGFKIKLNTQHTSLSHLMYMDDIKIFANTLNNIHTLVDLTQIFSNTIHMEFGIDKCKIQAIKKGKIEDTQYKLDNDDIIESVDPLEGYKYLGYYQSQQIHHKQIKKQLKHKLRTRLHKILVTQLNSKNTIKAINTYAIPILTYSFGVIRWNQTELKSLQRLINTTMTKHRKHHPRACIQRLILPKAEGGRGLIDIVNLHNKQIDLLRKFFYNRAKTVTLHQAICQTDTHTPLTLADNTKRINIYTNQQKIEVWTNKTLHGRHRMDLTNNAVDKIASNAWLKHGELFPETEGFMLAIQDQVIDTKNYRKHIIRDRNIGSDHCRHCHKQPETIQHITGACSSITQTDYKHRHDQVAAIIHQILAYKYNLITEKSPYYKYTPQIILDSPDYKLYWDRTILTDKTVHHNRPDITLHDKRNKTVYLIDIAIPNTHNLSSTHTTKLAKYTDLTLEIKSQWKVNTVKTIPIIISTTGVIPKTLHTSLKTLNLHPLTFITLQKEAILNTCRIVRKFLSINN

SEQ ID NO: 24006 - protein, 1348 aa, Lysandra bellargus
MENPAPGPRARAALRILGWAPYRTMIMLHITEKPRHLVSPPCHHFFHHRNLPQLHMLLPINPLHQIHQCHRHPNLLWMLCGRLLQPELLHPSIVLSANVKKWSKEMNIFIMHKYFITTKLETDTQSYLTQLHSLFSTQFPEMEASKQRVGDQRRAIAQRHLLSHQEILSIKNNVKSLLQNQNEHSTDEQDMTQLGNTDTNCTLQRMRWTTEINENIMRAYYRITKLETDLTTYRPILRQEIITTCPSIAHLSIQRIADQRRSIVSNCLLSSEQLKRIREEVQTELDEISVENIEHQPDENFTPPNLNVTQSLLGDHSPTPNQQNNTASTQNRVPVKLSIELETQLKEMFLESFNIFNDIHPIARPSLPKLKPSKKLFQIVDCLNSNIIPNMIHEDTDFNTLHTYIYTAAYTSTKFSGVRINIKNNTTNVNKSQMIPWWQKRLEGRIGDLRANIGRLTEYIRGTRSPYLEKQIQKIKQQYKIHAQHESENSDVIHFLDTLKQKLNILTNRLKRYKDCSNRKTQNKEFYYNEKLFYRKLTQKDTSQHNNPNGNLSPTPESMHTYWSNIWSHPKHHENSPWIEEDKSRFADIPEMEFDQIQLEQLKSVIAKTHNWKATGSDNIHNFWYKKLTCIHNLLLKHINSFICSPNLIPNFITQGITYMLLKDKSDTTNPEKYRPITCLQNIYKIITACISNLIYTHIENHNILAEEQKGCRKYSQGCKEQLIIDSVISNQARKQKRSIYTVYIDYKKAFDSVPHSWLIYILKHYKISPKIINCLEKIMPNWQTRLKIFDPAKTIETGLIPIKRGLFQGDSLSPLWFCLALNPLSNILNESERGFKTKHNTQHNIISLSHLMYMDDIKIFANTLNNIHTLVDLTQIFSNTIHMEFGIDKCKIQAIKKGKIEDTQYKLDNENIIESVDPLEGYKYLGYYQSHQIHHKQIKKQLKHKLRARLQKILVTQLNSKNTIKAINTYAIPILTYSFGVIRWNQTELKSLQRLINTTMTKHRKHHPRACIQRLILPIGEGGRGLIDIVNLHNRQIDLLRKFFYNRAKTVTLHQAICQTDTHTPLTLADNTKKINIYTNQQKIEVWTNKTLHGRHRMDLTNNTVDKIASNAWLKYGELFPETEGFMLAIQDQVIDTKNYRKHIIRDHNIGSDHCRHCHKQPETIQHITGACSSITQTDYKHRHDQVAAIIHQILAFKYNLITEKSPYYKYTPQIILDSPDYKLYWDRTILTDKTVHHNRPDITLHDKRNRTVYLIDIAIPNTHNLSSTHTTKLAKYTDLTVEIKSQWKVNTVKTIPIIISTTGVIPKTLHTSLKTLNIHPLTFITLQKAAILNTCRIVRKFLSINN

SEQ ID NO: 24007 - protein, 1359 aa, Cyclargus thomasi
MRLRNRVIPQAGTGATRDGESRPEPSGSGCPSYSGEGNESQQTTQSQAVVEGHRSLSSSTISSLFSSLQSSPLSFFDLRDSRSSTSSNFSSSSSAEDVVQEAITAELTAPIPGKRRSRKMWTKEMNIFIMRQYFIITKLGTNTRSYLSQLHSMFTTKYPDMEASKQRIGDQRRAIVNCKLLSEQEVLNIREEAKNILQIEQQPPHFSTITPQNTSCKMRWTDYLNEIIMTCYYKITKLETDFTTYRPLLHQEVTTKCPEIAHLSVQRIADQRRSIVNNRLLSLNCLNNIKEQVRQELNGNNVAQELSEETGQFVGTCDMTQVSDGQQSIQQTNNNEDINISTACNIIHNRQYNSFTPDLSKQLEEMLTKTIDKFSQTDATNRPRLPKLKYSKKLTGIIHELNTNILPKILDGEVTFNTLQTIIYSAAYVTVEFSGARIYNDSYNIKKKTKEAPWWQKRLELKIDKLRASIGRLTAYNKGMRSPALEAHLSKIKEQYKIHSKHESENTDISQFLDTLKQKLNILSNRLKRYKETTLRKIQNKEFSNNEKLFYRNLVNKSNSYSEENDNLPPDAQSLQQFWSTIWSKPTEHKQNDWIEKDQEKIRNISEMEYEEIELDLLKTVIKKTHNWKATGSDNIHNFWFKKLTCTHTLLLKHINSFINLPDTLPAYITQGITYLIPKDPNDIHNPAKYRPITCLQTIYKIITACLSESIYKHMQKYNILSEEQKGCRKYSQGCKEQLTIDAVVTNQALKQKRNIYTMFIDYKKAFDSVPHSWLVYILKHYKIHPIIIGFLKNTMTHWKTKLRLSNSTNIPIETEFIPIRRGIFQGDALSPLWFCLALNPLSSLLNVNDTGFQIDQNTNLSHLMYMDDIKLFANTLEELHVLADITQIFSNDICMQFGIDKCKIQAINKGRLEHTTYELTDNEIIDSVDPAEGYKYLGYNQSQRIHHKNIKKVLKEKFKTRLHKILHTHLNSKNTIKSINTFAVPILTYSFGVITWTQSDLKTLQRLINTTMTKHRKHHPRSCTQRLTLPKTEGGRGLIDISNLHNKQIMCLRTYFHNRSHSSPIHSSICQADTFTPLSLANKRKLIKFTSEQEKIASWAQKSLHGRHRTDLTNTNVDKIASNAWLRKGDLFPETEGFMMAIQDQVIDTKNYRKHIIRTAGAASDHCRHCHQQPETIQHITGACSSITQTDYKHRHDQVAAIIHQTLAYKYKLITEKTPYYKYTPTTILDTPEFKLYWDRTILTDKTVHHNRPDITLHDKRNKTVYLIDIAVPNSHNLTSTHTNKLTKYIDLTIELKTQWRVTTVKTIPIVISSTGIIPKTLHASLKTLDIHPLTYITLQKAVILNTCRIVRKFLSIN

SEQ ID NO: 24008 - protein, 1367 aa, Plebejus argus
MRLRNRIIPQAGTGAIRDGESRPGPSGSGCPSYSGEGNESHEATQSRAVAERNHHRSPSSSTTSSLFPSLQSSPQSYLDLRASRSSTSSYFSSSSRTEDVVQEALTAAESTAPIPGKRRSRKMWTKEMNVFIMRQYFIITKLETNTRSYLTQLHAMFTTKYPEMEASKQRIGDQRRAIVNCKLLSELEIINIKKEAKNTIQTEQQSLNNNTNTLLNSSSKMRWTNELNETIMKCYYKITKLETDFTTYRPLLHQEVTSRCPEIAHLSAQRIADQRRSIVNNRLLSINYLNKIKEQVKRELDCSNATQDLPDDTGWLEGTCDRTRAAVLDRHQNLQQINNNEDHNISTTSNTAHSIQCNPLTPDLARQLEEKLTETINKFKQTDATNRPRLPKLKYSKKLAVTIHALNTNILPKILDEELNFRTLQTIIYSAAYTTATFIGYRICEDNNTINRRTKEAPWWQKRLENKIGNLRANIGRLTSYSKGTRSPTLEAHVHKIKEQYKIHSSHESENTDISHFLDTLKQKLNSLSNRLKRYKETTIRKKQNKEFSNNEKLFYRNLTNKKSNDREENNTLPPDAQSLQHFWSNIWSTPTEHKQNYWIEKDKEKLGNISEMEYEQIELDLLKAVIKKTHNWKATGSDNIHNFWYKKLTCTHTLLHKHINTFINSPDTLPAYITQGTTYMLPKDLNDTQNPAKYRPITCLQTIYKIITACLSETIYKHTQKYNILAEEQKGCRKYSQGCKEQLTIDAVATNQALKQKRNIYTMFIDYKKAFDSVPHSWLIYILKHYKIHPTIIGFLENTMQHWNTKLRLFNSINTPIETECIPIRRGIFQGDALSPLWFCLALNPLSSLLNSNNIGFKINHHTQYTRISHLMYMDDIKLLANTLEELHLLADITQTFSNDICMQFGIDKCKIQAINKGKLEHVTYELVDHEIIDSVDPVEGYKYLGYYQSQRIHHKNIKKLLKEKFKTRLHLILHTHLNSKNTIKAINTFAVPILTYSFGVISWTQTDLKTLQRLISTTMTKYRKHHPRACIQRLTLPKIEGGRGLIDISNLHNKQIIRLRTYFHNHSLSSPLHNTVCLADSFTPLSLANNSEQIKLTSESEKIDAWAQKSLHGRHRTDLVNTNVDKIASNAWLRRGELFPETEGFMMAIQDQVIDTKNYRKHIIRTAGAGNDHCRHCHKQPETIQHITGACSSITQTDYKHRHDQVAAIIHQTLAHKYNLITDKIPYYKYTPQIILDSPDFKLYWDRTILTDKTIHHNRPDITLHDKRNKTVYLIDIAIPNSHNLTSTHTNKMTKYVDLTIELKTQWKVTAVKTIPIIISSTGIIPKTLHTSLKTLDIHPLTYITLQKAVILNTCRIVRKFLSIN

SEQ ID NO: 24009 - protein, 1235 aa, Plebejus argus
MRQYFIITKLETNTRSYLTQLHAMFTTKYPEMEASKQRIGDQRRAIVNCKLLSELEIINIKKEAKNTIQTEQQSLNNNTNTLLNSSSKMRWTNELNETIMKCYYKITKLETDFTTYRPLLHQEVTSRCPEIAHLSAQRIADQRRSIVNNRLLSINYLNKIKEQVKRELDCSNATQDLPDDTGWLEETCDRTRAAVLDRHQNLQQINNNEDHNVSTTSNTAHSIQCNPLTPDLARQLEEKLTETINKFKQTDATNRPRLPKLKYSKKLAVTIHALNTNILPKILDEELNFRTLQTIIYSAAYTTATFIGYRICEDNNTINRRTKEAPWWQKRLENKIGNLRANIGRLTSYSKGTRSPTLEAHVHKIKEQYKIHSSHESENTDISHFLDTLKQKLNSLSNRLKRYKETTIRKKQNKEFSNNEKLFYRNLTNKKSNDREENNTLPPDAQSLQHFWSNIWSTPTEHKQNYWIEKDKEKLENISEMEYEQIELDLLKAVIKKTHNWKATGSDNIHNFWYKKLTCMHTLLHKHINTFINSPDTLPAYITQGTTYMLPKDLNDTQNPAKYRPITCLQTIYKIITACLSETIYKHTQKYNILAEEQKGCRKYSQGCKEQLTIDAVATNQALKQKRNIYTMFIDYKKAFDSVPHSWLIYILKHYKIHPTIIGFLENAMQHWNTKLRLFNSINTPIETECIPIRRGIFQGDALSPLWFCLALNPLSSLLNSNNTGFKINHHTQYTRISHLMYMDDIKLLANTLEELHLLADITQTFSNDICMQFGIDKCKIQAINKGKLEHVTYELVDHEIIDSVDPVEGYKYLGYYQSQRIHHKNIKKLLKEKFKTRLHLILHTHLNSKNTIKAINTFAVPILTYSFGVISWTQTDLKTLQRLISTTMTKYRKHHPRACIQRLTLPKIEGGRGLIDISNLHNKQIIRLRTYFHNHSLTSPLHNTVCLADSFTPLSLANNSEQIKLTSESEKIDAWAQKSLHGRHRTDLVNTNVDTIASNAWLRRGELFPETEGFMMAIQDQVIDTKNYRKHIIRTAGAGNDHCRYCHKQPETIQHITGACSSITQTDYKHRHDQVAAIIHQTLAHKYNLITDKIPYYKYTPQIILDSPDFKLYWDRTILTDKTIHHNRPDITLHDKRNKTVYLIDIAIPNSHNLTSTHTNKMTKYVDLTIELKTQWKVTAVKTIPIIISSTGIIPKTLHTSLKTLDIHPLTYITLQKAVILNTCRIVRKFLSIN

SEQ ID NO: 24010 - protein, 1346 aa, Cyclargus thomasi
MRLRNRDIPQAGTGAIREGESRPGPSGSGCPSYSGEGNESHQALRSRANTGSKYHLSPSSSTSSLFSSPLSSPQSYFYLRESRSSTSSYFSSPSQAADVVQQAITAKVTAPTPGKRRTRKMWTREMNIFILRHYFIITNLESNTKNYLPQLHSIFTSKYPEMDASKQRIGDQRRAIIHCKLLSDKEIVQIKEEAKSTIQNQTHQSADNHTNILPNSASKMRWTDDLNEIIMACYYKITKMETDFTTYRPLLHQEVILRCPAISHLSVQRIADQRRSIINNRLLSLKQLEKIKEQIQRELNLNEIDHLPKDTDDIEQLNRITDTSNTENQQTQLHTDDEEHNSYTTPYMRVQHNRHQTLTSDLTKQLQEMVFETLEKFKQTEPTARPRLPKLKYSKKLSATLKELDTNILPKLLDAKMDFFTFQTIIYSAAYTSVKFCGARILSDTDQKNKKTKESPWWQKRLEIKINKLRANIGRLTEYNRGTRSPGLEAHINSIKEQYKIHSKYEVENSDIPQFIDTLKQKLNALANRLKRYKETTNRKKQNKEFINNEKLFYRNLSKQSISDNRANTTLLPSAESLKEFWSNIWSKPIEHKENEWIETGKEESQRIPEMKFEKIDIETLKAVLNRTHNWKATGSDKIHNFWYKKLSCTHKLLHTHINSFIHAPETMPPYITQGITYMLPKDPNDTQNPAKYRPITCLQNIYKIMTACLSEYIYKHTHEHNILSEEQKGCRKRSQGCKEQLTIDAVATKQAHEQKRNIYTMFIDYKKAFDSVPHSWLLYILKHYKIHPIIIHFLKNIMLQWSTKLRLGNSNDNSVETDYITIRRGIFQGDSLSPLWFCLALNPLSTLLNSNIIGFKIKYNREYTCITHLMYMDDIKLFASTLEEIHTLANITLRFSNDICMQFGVDKCKVQAIIKGKLEDTTYELPNHEIIDTVDPVEGYKYLGYNQSQGIHHKSIKKLLKEKFKTRLHRILNTHLNSRNTIKAINTFAVPILTYSFGIITWSQTDLKTLQRVINTAMTKHRKHHPRSCVQRLTLPKVEGGRGLIDITNLHNKQITKLRTYFHNHSHSSQLHNAVSLADTFTPLSLANHSKQVKITSKQEKIEAWSQKSLHGRHRTDLTNTNVDKIASNAWLRRGELFPETEGFMLAIQDQVIDTKNYRKHIIRSTAADSDHCRHCHKHPETIQHITSACPSITQTDYKHRHDQVAAIIHQILAFKHNLITDKIPYYKYTPQIILESSDYKLYWDRTILTDKTVHYNRPDITFHDKRNKTVYLIAIAVPNSHNLSFTHTTKLTKYTDLTIELKSLWKAYFKTIPIIISSTGIIPKTLHTSLENTRHSPTHVHNTA

SEQ ID NO: 24011 - protein, 1307 aa, Ebrietas anacreon
MRLRSGYKLPQASTGANREGESCPGPTSSGCPTYSGGDTVSKTSAQLSTAAERNTTPTTPTPSMENIFESPASSPHSYEELSQYSSRSTTVSPKSDVLRTRKKRRAKATYSQSTADCSEAQVHTNTNATSIQANPTRSVLQVMKPATTLAGRERQRMKWTDEVNRQLLRCYYTVTNSERNLTGYRPQLRKMFIEHYPDLSFITEQRLSDQIRVIYRNNRISEADRQTMKQQIESHNITEPTNVTTHTLESTQATEDTQRTQHTISPVDFNTITPINERVNNISEITSHAQLLTTTQTVESTTKHKTDDYIDLKNTFQENYEKFKNSDPVSRPPIKRFQISYKSKKMIQNLNYILEEHLTNNCVTKLEEIHEIIYCGAISLVSFMNKKSIKKNTENQPITRDRSKPAWETRLQNRILKLRKEIGQYTQYLQGNLSQKKQNKINSNRDKDQDIVEKLDSLKQRLQALAKRLRRYQKGNQRYRENKIFEKNQKLAYRNLNTHQRILNPPDIQDIENYWGNIWSNPVNHTENLSWIQLEEKSMEQIGSMPEFKIDIKDVRIATRKILNWKAPGSDKIQNYWLKHLTATHKTLTIIFNDIIQNPSTIPHFFTQGITYLKPKDTDTSNPSNFRPITCLPTLYKLLTSIISNKINTHISQNNIICEAQKGCRTGSRGCKEQLVIDTEVHAQVKQKHRNLYYAYIDYQKAFDSVPHSWLVQVLKLYKIDASLINFLQHTMTKWSTTLNFTIDNKHMKSSPIKISRGIFQGDSLSPLWFCLALNPLSKIINNSGHGYIVDRANNIKISHLFYMDDIKLYTSTRQQLDSLLKITESFSGDIKMNFGIKKCKINSIIKGSHKLIEPHNLTLSQEQITSMDYNEYYKYLGFHQNTFIDHTKIKQDLTTQYKHRLNQIFKTHLSARNKVKAVNTYAVPILTYSFGIIKWTDTDLDALNALTRTTAYKHHIHHIHSAVERFTLKRKLGGRGFIDIKNLHYSQVENLRTYFFNKSKDSSLHKAITELSTSGTSLQFRDKDFRPENKIVKEELKLENWKKKSLHGKYRNNLEQSHIDKEGSCFWLTKGNIFAETEGFIIAIQDQIIKTRNYAKHILKDSNVTNDKCRLCSLSNETIDHITGGCKVLSGKEYINRHNNVAKQIHQYLALQYKLIENKLPYYRYTPKNVLENSVAKLYWDRDIFTDKTINCNRPDITLTIKNTKTTYLIDISIPNTENIKQKHFDKIQKYLPLADEIKEMWHQNVVRIIPIILSSTGVIPKSLYVSLKELYLRESIFVELQKSVILDTAAIVRRFLNLSNTVTNS

SEQ ID NO: 24012 - protein, 1315 aa, Agara michaeli
MKMSNPIENKRYNLRSNSSVQKAVSLPTTHNEVLNRRALISQNLEKATAEPTQERSASTTSSVESLFESPISSPRSYEESGLQQSRSTTLSPMSEVEATPRKRFIRNRNTSNRLINSHTQQKIVEQKAQNSIESHSRSRLRQTKPTGSVLQAMKPTTTLAGRDRQRMKWTNEVNHHLLRCYYIVTNLERNLTSYRPQLREKFIEHFPELYFITEQRLSDQIRVIHRNNRIPLDERTQLKLNVEIYLNLNTNIDNTHTLQILPTTDPSQCPQTINSISDSETIPPEPSNNITQTPQVPKPINRESHTIETEHEVNETIKKLENMFKDNLIKYKNSDPVSRPSIPKLEITYNNKKYVSYLNNIIAKYLTENSVKRLEEIHEIIYCAALTLVKLNINKSTLDKTNKQNDKVSRSTPAWEKRLENRITKLRKEIGQHTQYLRENLSQKKQLKLNPTGKEKQEIIDRLDTLKQKLQALAKRLKRYRKSKQRYKQNKLFESNQKLLYQNLNPQQLIKSPPNLDEVQSYWEKIWSEPVNHNANPSWISSEEKPTQQIDPMPLVSIDLEDIRTATSKMLNWKAPGPDKIQNYWLKYLTATHKTIADIFNNLIRYPENLPKFMTQGVTYLKPKDSDTSKPENYRPITCLPTLYKLLTSIIASKINTHITLNKIIDEEQKGCRKGSRGCKEQLVIDTEIHSQVKTKHRNLYFAYIDYKKAFDSVPHSWLIHILKLYKIDVTIVNFLQHTMTKWSTILNIRTEYKCLQSTPISISRGIFQGDSLSPIWFCLAINPLSKILNNTGHGYIIDRLNKIKLTHLLYMDDIKLYASTRRQLNDLLKLTETFSNDIKMEFGIKKCKINSIIKGRHKQTEAYNLTLHHEKICSMDSTDYYKYLGYKQNVAIEHTKIKQDLTEQYKQRLNKILKTQLSARNKVKAVNTYAVPILTYSFGIIKWTDTDLDALNILTRTTANKHNIHHIHSATERFTLKRKLGGRGFIDIKNLHYKQIENLRTYFISKATDSSLHKAIIDLPTSGTALHFENNDFNPKNKLVTEDDKIEKWRKKSLHGKYRHSIEQDYVDKESSFCWLTKGNIFAETEGFIVAIQDQIIKTRNYAKHILKDSNITNDKCRLCNIANETIDHITGGCKVLASKEYVNRHNNVAKQIHQYLALKYKLIDNKVPYYKYLPKNVLENNAAKLYWDRDIITDRTINCNRPDVTLTLKNTKTTYLIDISIPNNANLKSKHFDKIQKYLSLADEMKQMWHQDNVRIIPIILSSTGVIPHNLHKSLKELQLRKSIFIELQKSTVLDTAAIVRRFLNLSSTVSIL

SEQ ID NO: 24013 - protein, 1243 aa, Cycloglypha thrasibulus
MESLFESPASSPHSYEELSQYSSRSTTVSPISDVVRPRKKRRAKATYSQSTTDCSETQIHTNTNSTSIQTNPTRSVLQDMKPATTLAGRDRQRMKWTDEVNRQLLRCYYTVTNSERNLTGYRPQLRKMFIEHYPDLDFITEQRLSDQIRVIYRNNRISETDRQVMKQQIESHNVTEPVNVIPDTLKSTQASENTHPIKNTILPVDLSNITPIKEIVHDISEQTPRTQLLTIKQTIESSTKNETDDYIDLKSKFQQNLEKFKNSDPVSRPSINKFQISYKSKKMLQNLNYILEEHLTSNNITKLEEMHEIIYCAAISLVSFMSKNAMENTENQPIIQNRSRPAWETRLQNRILKLRKEVGQYTQYLRGNLSQKKQNKINKNRERDQDIVEKLDSLKQRLQALAKRLRRYQKGNQRYRENKTFERNQKLIYRNFNTQEKPLNPPDLQNIENYWGNIWSNPVNHTANLSWIHLEEKSMAQVGSMPEFKIDIKDVRVATRKILNWKAPGPDKIQNYWLKHLTATHKTLTAIFNDIVQNPSIVPHFFTQGVTYLKPKDTDTSNPANFRPITCLPTLYKLLTSIISNKINAHISQNSIINEAQKGCRAGSKGCKEQLVIDTEVHAQVKQKHRNLYYAYIDYQKAFDSVPHSWLVQVLKLYKIDPNLITFLQHTMTKWSTTLNLTIGNKYMKSSPISISRGIFQGDSLSPLWFCLALNPLSKIINNSGHGYIVDRTNNIKISHLFYMDDIKLYASTRQQLDNLLKLTESFSDDIKMNFGIKKCKINSIIKGSHKLMEPHNLTLTQEQITSIDYNEYYKYLGFQQNTFIEHTKIKQDLTTQYKHRLNQIFKTHLSARNKVKAVNTYAVPILTYSFGIIKWTDTDLDALNALTRTTAYKHHIHHIHSAVERFTLKRKLGGRGFIDIKNLHYSQVENLRTYFLNKSKDSSLHKAITELSTSGTSLQFRDKHFRPESKIVKEDVKLESWKKKSLHGKYRNNLEQNHIDKEGSCFWLTKGNIFAETEGFIIAIQDQIIKTRNYSKHILKDSNVTNDKCRLCNLTNETIDHITGGCRVLSGKEYIRRHNNVAKQIHQYIALQYKLIENKLPYYRYTPKNVLENNVVKLYWDRDIVTDKTINCNRPDITLTIKNTKTTYLIDISIPNTENIKQKHFDKIQKYLPLADEIREMWHQDVVRIIPIILSSTGIIPKSLYVSLKELHLRESIFVELQKSVILDTAALVRRFLNLSNIVTNS

SEQ ID NO: 24014 - protein, 1160 aa, Carcharodus alceae
MKWTNEVNQNLLRCYYTVTNCERNLTGYRTQLHQKFIEYYPELHFVTEQRLSDQIRVIHRNNRISESERALIKENIERQLNTTTNTNIINNSPNTLHTLQCSSLTETCHNTLPFSEPLNTDILINTSNIPQEPQPILPDLINTDYNEDVQNENQEILKLKSTFQENLIKFKNSDPISRPTIPKIRLMARTSKLIKYINRIIDSYLKENSITTLEEIHEIIYCAAVTIVKSIDETPKHKNSENNERRCKKPAWEKRLERRISKLRKEIGKHTQYLRGNLSEKKQNKLNLASKERQDIIDKLDTLKQKLQALAKRLKRYKKTYQRFRENKIFEVNQKSVYQSLNQQPKYTQLPDMQELESYWKNIWSKDVKHTTDTTWIGMEENESERINAMEKFTVDSQDIKSATSKMLNWKAPGPDKIQNFWIKYLTATHKTIAEIFNTLVQNPDITPNFLTHGVTYLKPKAANTSNPKNLRPITCLPTLYKLLTSIIANKINTHLVQNEVIYEEQKGCRKGSRGCKEQLIIDTEIHCQVKQKHRNLFYAYIDYQKAFDSVPHSWLIHILKLYKTDSSLIDFLRCIMSKWSTTLNISFNYKCLQSSTINISRGIFQGDSLSPLWFCLALNPLSRILNSSGYGYIVDRSKKIKISHLLYMDDIKLYASTRHELDKLLKLTESFSNDIKMEFGVKKCKINSIIKGSHKHTDSYNLSLGQESIDSMDYNEYYKYLGFQQRTYLDHTKIKQDLILQYKQRLNRIFKTHLSAKNKAKAVNTYAVPILTYSFGIIKWTDTDLDSLNTLTRTTAYKHHIHHIHSAVERFTLHRKIGGRGFIDIKNLHYKQVDNLRTYFLNKATSSILHKAITDLSTSGTPLQFNNKNFKPEDKIVKQETKIESWKKKTIHGKYRSNIEQDHIDREGSCSWLTKGNIFAETEGFIIAIQDQIVNTRNYAKYILKDNNITNDKCRLCNLTSETIDHITGGCKILSNKEYINRHNNVAKQIHQYLALKYKLIENKLPYYKYSPKNVLENNMAKLYWDRDIITDKSINCNRPDLTLTLKNSQITYLIDISVPNTENLKQKHLDKIQKYLPLAEEIKEMWHQKSVRIIPIILSSTGVIPKTLHKSLNELNIKNTTYIELQKSAILDTSAIVRRFPSPKKKKNLAYARIPRSK

SEQ ID NO: 24015 - protein, 1218 aa, Tagiades litigiosa
MSDVVKARKKTRSIKHKIPTQAIQSSREQDITTLGTSHEQDITTSDPTRSVLQDMRPTTTLAGRDRQRMKWTKEVNQELLRCYYIVTNLENNLTGYRSQLREKFIESYPELHFITEQRLSDQIRAIHRSNRISEHERQIIKNKLETHSTICINTSQSSQSVQQANTITEELEELNKDPPSNDNNNHVIEETSNLQHNTVNIKLNSIFTENLSKFKNLDPQLRPPIPKLYMMYQTKKIINSLNCIINQYLIENCITTLEEINTIIYSAALTAVAVNNDTEKTKENTTRNNNRKYNSTKPAWERRLENRISNIRKEIGQYTQYLKGNLSQKKQIKINPNKQANQDIIDKLDLLKQKLQALAKRLKRYRKSSQRYKQNKLFENNQKLVYRTFKPQQKILHLPNMEEVHSYWENIWSKPINHNSNPPWLPLEETSVKEIVSMPRLSIDLQDINIALRKMLNWKAPGPDKVQNFWLKYFTSTHKNIVDSFNTLIENPQNLPTFITQGVTYLKPKDTDTSNPANYRPITCLPTLYKLLTSIIATKINLHITQNNIIQEEQKGCCKGSRGCKEQLVIDTEIHYQVKQKHRNLYYAYIDYKKAFDSVPHSWLIQILRLYKIDDILINFLQHTMSKWSTTLNITTQNSSLKSSIIHIARGIFQGDSLSPLWFCLAINPLSKILNNTGYGYIIDRPSKIKLSHLLYMDDIKLYASTRQQLTNLLKLTETFSNDIKMEFGINKCKINCIAKGKHKFTKPYDLTSCKDKIVAMECTDYYRYLGYSQSTSIDHTKIKQDLTTQYKQRLNQIFKTHLSARNKVKAVNTFAVPILTYSFGIIKWSDSDLEALNTLSRMTAYKHHIHHIHSAVERFTLKRKLGGRGFIDIKNLHYKQVENLREYFLNKAKSSLLHKAITDLPSSGTPLNFRDKDFKPELKIVTQDVKVENWKKKKLHGKYPNNIEQEHIDREASSCWLMKGNIFAETEGFLVAIQDQIIKTKNYAKYILKDNTVVNDTCRLCHSSKETIDHITGGCKILAPKEYVNRHNNVAKQVHQYLALKYKLIDHKEPYYKYSPKNVLENNDVKLYWDRDIITDKTIHCNRPDLTLTIKNTKTTYLIDISIPNTENLKQKYFEKIQKYLPLAEEMKEMWHQDLVRILPIILSSTGVIPKTLHTSLKELQLRKSIFIELQSNQINIFKHFIHSSTIFKLSTAVTSYTNSRIKILGLRPYLIS

SEQ ID NO: 24016 - protein, 1296 aa, Epargyreus clarus
MKMQNQNTNNNYRYNLRSLSRVQHTQNIQNSGNEELDRRASTCLNQEDNITDCQTRSSTPTTSVESLFESPASTPRSYEKSRSSTTSPMSDVSQPTSRNERTLTNTSTKSKSRSKAQEPQRHIENRPTSRQTNPTRSVLQDMRPTTTLAGRDRQRMKWTNEVNHQLLRCYYIVTDLETNVTGYRTQLREKFIEHYPELHFISEQRLSDQIRVIHRNNRISVVDRDNIKKDVEAQINLINSNLPGHTPQSSLLTQTTHYEQVSNLLTEIETSSIDTEIIANTVTTNTEPRIETATIEETEESTLKNTFAENILKYKNSNPYLRPTIPKLQITYKTKKIISDLNNIIENYLIDNNITTLEEIHEVIYSAAIAAVTVNNKVTKESENIKKQHDKLKLYKPAWERRLENRILKLRKEIGQQTQYLKGNLSQRKQSKINSGKTDDQEVVDRLDTLKQKLQALAKRLRRYRKTNQRYKQNKTFEANQKQVYRSFNPQQKIIQSPDIKEIQNYWEKIWSNPVGHASNISWMEDTELESIEPMPQFIIDKEDIKIATNKMFNWKAPGPDKIQNYWLKYLTATHKTIVDIFNGFIQDPSNIPDFLTRGVTYLKPKDIDTSNPAKYRPITCLPTLYKLLTSIIANKINTHTTFNKIVQEEQKGCCKGSRGCKEQLIIDTEIHQQVKQKHRNLYYAYIDYQKAFDSVPHSWLIHVLKLYKIDNSLIRFLKHAMTKWTTTLNITIENKSLKSDPINISRGIFQGDSLSPLWFCLAINPLSKILNNSGHGYIIDRQANIKLSHLLYMDDIKLYASTRQQLNNLLNLTESFSNDIKMNFGIEKCKINSIVKGHHKLTEPHKLTISNNTISSMEYKDYYKYLGFQQSTCIEHTKIKQELTELYKQRLNKIFKTFLSARNKVKAVNTYAVPILTYSFGIVKWSETDLEALNTLTRTTAYKHHIHHIHSAVERFTLKRKLGGRGFIDIKNLHYKQIENLRTYFLTKAKDSLLHKAITDIPTSGTPLQFKDKKFKPENKIVKQEVKIENWKKKSLHGKHPHNIELDHIDREASNCWLMKGNIFAETEGFIIAIQDQIIKTRNYSKHILKDSSIINDKCRLCNLTNETIDHITGGCKVLAGKDYINRHNNVAKQIHQYLALKYKLINDKVPYYKYSPKNVLENNAVKLYWDRDIITDKTINCNRPDITLTLKLTKTTYLIDISIPNTDNVKQKHFDKIQKYLPLADEIKEMWHQNIVRIVPIILSSTGIIPKNLHTSIRELDLRKSIFIELQKSTVLDTASIVRRFLNMSTLVSN

SEQ ID NO: 24017 - protein, 1360 aa, Venada nevada
MRTRNKQIPQAGTREGESRPGPSGSGCPTYSGGGNVSHNTAQPNTVAVDNAHNPHSSSPVSSTQRLFPSPSSSPHSHLFQPSSLRSSSRYNLRSLSRAQNMQNIRNIMCLDQEYTEADRHTHSCTPTSSESIFKSPASTPRSYEESRSTTTSPMSDVTLPTSRNKRITKGNTNKPSSKITTQSAVQENPPHIENTTTTMQANPTRSVLQDMRPTTTLAGRDRQRMKWTNEVNHQLLRCYYIVTKLESNLTGYRTQLREKFIENYPDLHFLTEQRLSDQIRVIHRNNRISVVDRENIKKNVGAHINFINHNISCHTSQSPLTTQYEQDSNLLTNTTSTNTDTIQDTATINNGPTIETATIEVNDTLILKNTFIENILKFKNSNPILRPVIPKLQIGYKTKNLINSLNNIIENYLAETNIITLEVIHEIIYSAALTAVTINNKVEKTHENTKKQHDKQIIYKPAWESRLENRISKLRKEIGQYTQYLKGNLSQKKQSKMNLKTTEEQELVDRIDTLKQKLQALAKRLRRYRKTSQRYRQNKTFEANQKLVYRSFKPQQKIIHPPDIKEVQNYWEKIWSNPVNHTANASWIEQTESENIQVMPQFVIDIEDIKVATTKMLNWKAPGPDKIQNYWLKYLTATHKKIVDIFNALIREPVNMPDFLTQGITYLKSKDMDTLNPAKYRPITCLPTIYKLLTSIIANKINTHTTQNNIIEEEQKGCCKGSRGCKEQLIIDTEIHSQVKQKHRNLYFAYIDYQKAFDSVPHSWLIHVLKLYKIDNRLISFLKHAMTKWTTTLNITVENKSLRSAPINIARGIFQGDSLSPLWFCLAINPLSKILNRSGYGYLIDRQLNTKLSHLLYMDDIKLYASTRHQLNSLLKLTESFSDHIKMDFGIEKCKINSIVKGRHKLTEPYNLTIVTNTISPMEYKDYYKYLGYQQNTSIEHTKIKQDLTTQYKQRLNKIFTTHLSARNKVKAVNTYAVPVLTYSFGIIKWTDTDLDALNTLTRTTAYKHHIHHIHSAVERFTLKRKLGGRGFVDIKNLHYIQVQNLRIYFLNKAKDSLLHKAIINLTTSGTALQFKDKDFKPENKIVKQEVKIENWKNKSLHGKYRHNIEQDHIDSEASNFWLIKGNIFAETEGFLIAIQDQIIKTRNYSKHILKDSSIINDKCRLCNLTNETIDHITGGCRVLASKEYINRHNNVAKQIHQYLALKHKLINDKVPYYKYTPKNVLENNTAKLYWDRDIITDRTINCNRPDLTLTLKTTKITYLIDISVPNTENLKQKHLDKIQKYLPLADEIKEMWHQNSVRIIPIILSSTGVIPKNIHTSLRELELRHSIFVELQKSAVLDTTSIVRRFLNISSLGSN

SEQ ID NO: 24018 - protein, 1279 aa, Muschampia musta
MPHYPNDKRSSSMYKHAMRLRSRFVPQAGTRKGESRPEPSSSGCPSYSGVGTASHTITQPSADAVDNPTASTCSPRSTSSLESLFESPPSSPCSYEEAGRNTSRSTTSSPKSDVVNLPHTSTTSRLTNPTSSVLQDMRPATTLAGRERQRMKWTMEVNKNLLRCYYIVTNCESNLTGYRSQLHQKFIKYYPDLHFITEQRLSDQIRVIHRNNRISEAERAQIKQNIARHNNLNITNDSPNKNYSLQCSSSTEICHNIPPHSEPLNTNTLINTTNATQEPQPVYPDVINTEHDEEAQNETEDILKLKKSFQDNLVKFKNSDPISRPTIPKIRVITRTIKLIQYINRIIDNYLTENNVTTLAEIHEIIYCAAVAVVKSIDETSKYQNTKYNVKRRKNTKPAWEKRLERKISKLRKEIGQHTQYLRGNLSEKKKNKLKLEKKQRQDIIDTLDTLKQKLQALAKRLKRYRKTYQRFRENKLFEVNQKSVYQNLNPQLKYTQLPDMQELESYWKNIWSNDVKHTSNSTWMVMEEDESERINSMAEFTVDPQDIKLATSKMLNWKAPGPDKIQNYWIKYLTATHKTIAEIFNTLIQNPDTTPNFLTHGVTYLKPKTADTSNPTNFRPITCLPTLYKLLTSIIANKINTHVVKNEIINEEQKGCRKGSRGSKEQLIIDTEIHCQVKQKHRNLFYAYIDYQKAFDSVPHSWLIQILKLYKIDSNLINFLQHTMSKWSTTLNITLDHKCLQSSPINISRGIFQGDSLSPIWFCLALNPLSKTLNSSGYGYIIDRSKKIKISHLLYMDDIKLYASTRHELDKLLKLTELFSNDIKMEFGIKKCKINSIIKGSHKQTQPYNLSLRQESIDPMDYNEYYKYLGFQQRTYIEHTKIKQDLMIKYKQRLNKIFKTHLSAKNKVKAVNTYAVPILTYSFGIIKWTDTDLDSLNTLTRTTAYKHHIHHIHSAVERFTLHRKVGGRGFIDIKNLHYKQVDDLRTYFLNKATSSILHKAITDLPTSGTPLQFKNINFKPKDKIVTQEAKVESWKKKTIHGKYRLNIEQDHVDREGSCYWLTKGNIFAETEGFIIAIQDQIINTRNYAKYILKDNNVTNDKCRLCNLTSETIDHITGGCKILSSKEYINRHNNVAKQIHQYLALKYKLIENKLPYYKYSPKNVLENNLAKLYWDRDIITDKTINCNRPDLTLTLKNSQTTYLIDISVPNTDNLKQKHFDKIQKYLPLAEEIKEMWHQNSVRILPIILSSTGVIPKTLHTSLKQLKLKKSTFIELQKSV

SEQ ID NO: 24019 - protein, 1298 aa, Epargyreus clarus
MKMQKQNQNTNNSYRYNLRSLSRVQHTQNIQNSGNEELGRRASTCLNQEDNITDCQTRSSTPTTSVESLFESPASTPRSYEKSRSSTTSPMSDVSQPTSRNERTLTNTNTKSKSRSKAQEPQRHIENRPTSRQTNPTRSVLQDMRPTTTLAGRDRQRMKWTNEVNHQLLRCYYIVTDLETNITGYRTQLREKFIEHYPELHFISEQRLSDQIRVIHRNNRISVVDRDNIKKDVEAQINLINSNLPCHTPQSSLLTQTTHYEQVSNLLTEIETSSIDTEIIANTVTTNTEPRIETATIEETEESTLKNTFAENILKYKNSNPYLRPTIPKLQITYKTKKIISDLNNIIENYLIDNNITKLEEIHEVIYSAAIAAVTVNNKVTKESENIKKQHDKLKLYKPAWERRLENRILKLRKEIGQQTQYLKGNLSQRKQSKINSGKTDDQEVVDRLDTLKQKLQALAKRLRRYRKTNQRYKQNKTFEANQKQVYRSFNPQQKIIQSPDIKEIQNYWEKIWSNPVGHASNISWMEDTELESIEPMPQFIIDKEDIKIATNKMFNWKAPGPDKIQNYWLKYLTATHKTIVDIFNGFIQDPSNIPDFLTRGVTYLKPKDIDTSNPAKYRPITCLPTLYKLLTSIIANKINTHTTFNKIVQEEQKGCCKGSRGCKEQLIIDTEIHQQVKQKHRNLYYAYIDYQKAFDSVPHSWLIHVLKLYKIDNSLIRFLKHSMTKWTTTLNITIENKSLKSDPINISRGIFQGDSLSPLWFCLAINPLSKILNNSGHGYIIDRQVNIKLSHLLYMDDIKLYASTRQQLNNLLNLTESFSNDIKMNFGIEKCKINSIVKGHHKLTEPHKLTNSNNTISSMEYKDYYKYLGFQQSTCIEHTKIKQELTELYKQRLNKIFKTFLSARNKVKAVNTYAVPILTYSFGIVKWSETDLEALNTLTRTTAYKHHIHHIHSAVERFTLKRKLGGRGFIDIKNLHYKQIENLRTYFLTKAKDSLLHKAITDIPTSGTPLQFKDKKFKPENKIVKQEVKIENWKKKSLHGKHPHNIELEHIDREASNCWLMKGNIFAETEGFIIAIQDQIIKTRNYSKHILKDSSIINDKCRLCNLTNETIDHITGGCKVLAGKDYINRHNNVAKQIHQYLALKYKLINDKVAYYKYSPKNVLENNAVKLYWDRDIITDKTINCNRPDITLTLKLTKTTYLIDISIPNTDNVKQKHFDKIQKYLPLADEIKEMWHQNIVRIVPIILSSTGIIPKNLHTSIRELDLRKSIFIELQKSTVLDTASIVRRFLNMSTLVSN

SEQ ID NO: 24020 - protein, 1306 aa, Mimoniades versicolor
MKMSKPNNNNNKIYNLRSHSRGQSMTSMRITDGQESNRRALIKHKQENATPVQIQICSPTSTSSLESHFESLASTPRSYEDVNQPRSPSSSSLSDERQTPRKRRTTKRKTCKQSINLVKEKFAEPETSGRAPIHSYTTSGLTNPTRSVLQDMRPATTLAGRGRQRMKWTNQVNQQLLRCYYIATNLETNLTSYRPQLREKFIECYPELHFMTEQRLSDQVRVIHRNNRISAVERAQIKLNVKTHINLNANIDNYNISQSELTHPTQRDNTPIDSETVSLIPTIHTTETTQATNTINNEQTLEIETENETTKLENAFKENLTKYKNSDPTSRPLIPKLQITYNTKKYIKTLNTIIEKHLTENIVTKLEEIHEIIYSAAQTMVTLNNKKIKLDQTIQTPKTTTSKPAWERRLENRISKLRKEIGQHTQYLRGNLSQKKLFKLNPTKKETQEIVDRLDILKQKLQALAKRLRRYRKTHQRYKQNKLFETNQKLLYQQFNTQQKITSPPSLQEVQSYWQNIWSNPINHTADPSWITIENKKSHQIDPMPQITINLDDIKFATSKMLNWKAPGLDKIQNYWLKYLTATHKTIANIFDTLVRHPENVPQFLTQGITYLKPKDSDTSNPANYRPITCLPTLYKLLTSVIANKVNTHIMRNNIINEEQKGCRKGSRGCKEQLVIDTEIHNQVKQKHRNLYFAYIDYKKAFDSVPHSWLIYILKLYKIDDNLITFLQNTMTKWSTTLTIAAEHKCLKSSPISISRGIFQGDSLSPIWFCLALNPLSTILNNTEHGYIIDRANKIKLTHLLYMDDIKLYASTRKQLNHLLKLTETFSNDIKMEFGIEKCKINSIIKGKHKLIDPYKRTLRQENISSMDCNDYYKYLGYPQNVAIEHTKIKHDLIKHYKQRLSQIFRTQLSARNKVKAINTYAVPILTYSFGIIKWTDTDLDALNILTRTTAYKNKLHHIHSAIERFTLNRKVGGRGFLDIKNLHYKQIQNFRTYFLNKASDSSLHKAITELSNIGTPRQFKDKDFQPENKIVKESDKIESWKKKSLHGKYRCYIEQDHIDRNGSMCWLTKGNIFAETEGFIIAIQDKIIKTKNYAKHILKDISITNDKYRLCSQSNETVDHITGGCKVLAGKEYINRHNNVAKQIHQYLALKYKLIDTKTPYYKYLPKNVLENNTAKLYWDRDIITDKSVNCNRPDITLTVKATKTTYLVDISIPNTENLKQKHFEKIQKYLPLADEMKEMWHQDNIRIIPIILSSTGVVPKTLHESLKELQLRGSIFVELQKSTVLDTAAIVRRFLNLSLIISTS

SEQ ID NO: 24021 - protein, 1014 aa, Agara belti
MNRENIIETENEVNETIKLENIFKDNLIKYKNSDPASRPSIPKLQITYNNKQNVSYLNSIIVKYLAENSVKRLEELHEIIYCAASTLVKFNINKSTLDKTNKQNDKVSKPTSAWERRLENRITKLRKEIGQHTQYLRENLSQKKQLKLNPTGKEKQEIIDRLDKLKQKLQALAKRLKRYRKTKQRYKQNKLFESNQKLLYQNLNPQQLIKSPPNLDEVQSYWEKIWSEPVNHNANPAWISSEEKQTQHIDPMPLISIDLEDIRTATSKMLNWKSPGPDKIQNYWLKYLPATHKTIADIFNNLIRYPENLPKFMTQGITYLKPKDSDTSNPANYRPITCLRTLYKLLTSIIASKINTHITLNKIIDEEQKGCRKGSRGCKEQLVIDTEIHSQVKTKHRNLYFAYIDYKKAFDSVPHSWLIHILKLYKIDVTIVNFLQHTMAKWSTILNITTEHKCLKSTPINISRGIFQGDSLSPIWFCLAINPLSKILNNTGYGYIIDRLNKIKLTHLLYMDDIKLYASTRRQLNDLLKLTETFSNDIKMEFGIKKCKINSIIKGRHKQTEPYNLTLHHEKICSMDSTDYYKYLGYKQNVAIEHTKLKQDLTVQYKQRLNKILKTQLSARNKVKAVNTYAVPILTYSFGIIKWTDTDLDALNILTRTTANKHNIHHIHSAAERFTLRRKLGGRGFIDIKNLHYKQIENLRTYFINKATDSSLHKAIIDLPTSGTALHFGNNNFNPKNKIVTEDDKIEKWRKKSLHGKYRHSIEQEYVDKESSFCWLTKGNIFAETEGFIVAIQDQIIKTRNYAKHILKDSNITNDKCRLCNIANETIDHITGGCKVLASKEYVNRHNNVAKQIHQYLALKYKLIDNKVPYYKYLPKNVLENNAAKLYWDRDIITDRTINCNRPDVTLTLKNTKTTYLIDISIPNNANLKNKHFDKIQKYLSLADEMKQMWHQDNVRIIPIILSSTGVIPHNLHKSLKELQLRRSIFIELQKSTVLDTAAIVRRFLNLSSTVSIL

SEQ ID NO: 24022 - protein, 1308 aa, Jonaspyge jonas
MKMSKPKNNKIYNLRSHSRRQNTTSMRITDGQELNRRALISHKQDNETPVQLHTCSSTSTSSLESHSESLASTPRSYEDVNQYIPQSPSSSSMSDERPTPRKRPTIKRNTFIRSTNLAKEQSAVHQETLNRAPIHAYTTSRLSNPTRSVLQDMSPATTLAGRSRQRMKWTNEVNQQLLRCYYITTDLERNLTSYRPQLREKFIEYYPELHFMTEQRLSDQIRVIHRNNRIPAVERAQIKLNVATYTNLNTNIDNSNTPQSLPLTCPTQRKNTPIDSETVSSIPTIHTTESPQATNTINSEPIIGIETENEVTKLENAFKENLTKYKNSDPMSRPSIPKLQITYNTRKYIINVNTIIEKHLTKNSVTKLEEIHEIIYSAAHTIVTLNNKKPKLEQTNAIPKTTTSKPAWERRLENRILNLRKEIGQHTQYLRGNLSQKKYFKLNPTKKETQEIVDKLDTLKQKLQALAKRLRRYRKTNQRYKQNKLFEINQKLVYQQFNPQQKIISPPDLQEVQSYWENIWSNPTNHTADPSWIAIEDKKIQHIDPMPQLTINSEDIKFATSKMLNWKAPGSDKIQNYGLKYLTATHKTIAGIFDTLIRHPENVPQFMTQGVTYLKPKDSDTSNPANYRPITCLPTLYKLLTSVIANKVNTHVTRNKIINEEQKGCRKGSRGCKEQLVIDTEIHNQVKQKHRNLYFAYIDYKKAFDSVPHSWLIHILKLYKIDDTLITFLQHTMTKWSTTLNIATEHKCLKSSPINISRGIFQGDTLSPIWFCLAINPLSTILNNTGHGYIIDRPNKIKLTHLLYMDDIKLYASTREQLNHLLKLTETFSNDIKMEFGIKKCKINSIIKGKHKLIDPYNLTLRQEKISSLDFNDYYKYLGYPQNVAIEHTKIKHDLTSHYKQRLNQIFRTQLSARNKVKAVNTYAVPILTYSFGIIKWTDTDLDALNILTRTTAYKNKLHHIHSAIERFTLNRKVGGRGFIDIKNLHYKQIQNLRTYFLNKATDSSLHKAITDLPTIGTPLHFKDKDFHPENKIVKQGDKIETWKKKSLHGKYRCNIEQDHIDCDGSFCWLTKGNVFAETEGFIIAIQDKVIKTRNYAKHILKDISITNDKCRLCSQSNETIDHITGGCKVLAGKEYINRHNNVAKQIHQYLALRYKLIDTKTPYYKYSPKNVLENNTAKLYWDRDIITDRTINCNRPDITLTVKATKTTYLVDISIPNTENLKQKHFEKIQKYLPLADEMKEMWHQDNIRIIPIILSSIGVIPKNLHESLKELQLRGSIFIELQKSTVLDTAAIVRRFLNLSSIISTP

SEQ ID NO: 24023 - protein, 1272 aa, Polyctor polyctor
MRLRSRVIPQAGTHEGESRPGPSGPGSPAYSGVGTASHITTQLSADAVDSSPVSICSSTSSESSFESLPSSPRSYEVVGETASRSSTLSPMLDSVQSQQRKTRVHKTRIYHNSTKRPHNNCDQLTTEQEVTSSSQLQITERHINPDRSVLQNMLPATTLAGRNRQRMKWTNEVNQNLLRCYYVVTDCERNLTGYRTQLHQKFTEYYPDLHFLTEQRLSDQIRVIHRNNRISPAERSQIKHSIENINSHIISEPFSIETYNTLNDDEPTNTTIQTLQEPQFLDSINTTNVETNSENTDILNLKSTFDNNLTKFKNSDPVSRPHIPKIQITVKTRKLIKYLNDIIENYLRDNSITTLEQIHEIIYCAATTLINTVNITDNYKKKKNQENGYRKTKPAWVIRLEYRICKLRKEIGQHTQYLRGNLSEKKQKKLNPERKQTQDIVVTLDTLKQKLQALAKRLKRYQKTSQRFKENKLFEVNQKSVYRKLNPQPKYTQMPDMQELEKYWTNIWSKDIIHTPDTTWIATEEKETQRIKTMAKFTIDIEDIKLATSKMLNWKAPGPDKIQNYWLKYLTATHKTMADIFNNLIHNPDTVPNFLTHGVTYLKPKAHDTSNPTNFRPITCLPTLYKLLTSIIASKINTHITQNEIIDEEQKGCRKGSRGCKEQLIIDTEIHYQVKQKHRNLFYAYIDYQKAFDSVPHSWLVKILKLYKIDESLVNFLKHMMSNWSTTLNITVDYKCLQSSPINISRGIFQGDSLSPIWFCLALNPLSKILNNTGHGYVIDRSKNIKISHLLYMDDIKLYASTRKQLEELLKLTESFSSDIKMEFGLNKCKINSIVKGIHKITEPHSLALSQEWINSLDHNDYYKYLGFQQSTHIEHTKIKQDLILTYKQRLNKIFKTHLSARNKVKAVNTYAIPVLTYSFGIIKWTDTDLDALNTLTRTTAHKHRIHHIHSAIERFTLHRKLGGRGFIDIRNLHYKQVDNLRTYFINKANDSTLHKAITNLLTSGTPLQFNNKDFKPEEKIVKHGEKIEKWKMKKIHGKYRSNIEQDHIDKNGSCYWLTKGNIFAETEGFIIAIQDQIVNTRNYAKYILKDINVKNDKCRLCNLSSETIDHITGGCKALSNREYINRHNNVAKQIHQYLALKYKLIDNKLPYYKYIPKTILENEIAKLYWDRDIITDKSINCNRPDLTLTLKNSKTTYLIDISIPNTENLKQKHFEKIQKYLPLAEEIREMWHQNSVRTIPIILSSTGVIPKNLHTSLNELKLNKSIFIELI

SEQ ID NO: 24024 - protein, 1297 aa, Cecropterus confusis
MKMKATNTNISYRYNLRSLSRLHRMQNTQNSGNEEISRQATICLEQENTAADHQVYSSTSTTSSESLFESPASTPRSYEKSRSNTTSPMSDVTQPILRNKRIFKRSITQSLSKTSSKVQEPHLNSENNSTSRQVNPTRSVLQDMRPTTTLAGRDRQRMKWTSEVNKQLLRCYYIVTNLERNLTGYRTQLREKFIEHYPELHIITEQRLSDQIRVIHRNNRISAVERENIKKDVELHINLTNSNMSYQIPQSSLITHSTQCEQATNLQTITETNSIDTEIIYHTDTVNTEPIVETVTLKENDTLTLKNTFTENIIKYKNSNPHFRPNIPKLQITYKTNKIINDLNNIIQNYLTDNNVVTLEGIHEIIYSAAMAAVTLNNKTTEKRINIDKHNTENKSKPAWERRLENRIVKLRKEIGQYTQYLKGNLSQRKQSKINPRKIDDQEIIDKLDILKQKLQALAKRLRRYKKTNQRYNQNKTFESNQKQVYRSFNPQQNITQPPDIEQIKQYWEKIWSNPENHSSNLSWIEDNDLESIESMPQFVIDIEDIKIATSKMLNWKAPGPDKIQNYWLKYLTATHKIIVDIFNDLIQEPSNIPDFLTQGVTYLKPKDIDTSNPAKYRPITCLPTLYKLLTSIIANKINTHTMLNKIIPEEQKGCCKGSRGCKEQLIIDTEIHNQVKQKHRNLYYAYIDYQKAFDSVPHSWLVHVLKLYKVDDSLIRFLSHVMTKWATTLNITIKNKSFKTPTINIARGIFQGDSFSPLWFCLAINPLSKILNNSGHGYIIDRQVNTKLSHLLYMDDIKLYASTRQQLNNLLKLTESFSNDIKMDFGIEKCKINSIVKGRHKLLESYKLTIFNDTISAMEYKDYYKYLGFQQSTSIEHTKIKQDLTTEYKQRLNKIFTSYLSARNKVKAVNTYAVPILTYSFGIVKWTDTDLDALNILTRTTASKHHIHHIHSAVERFTLRRKLGGRGFIDIKNLHYKQVANLRTYFLNKSKDSLIHKAITDIPTSGTPLQFKDREFKPENKIVKEEVKMEMWKKKSLHGKHMNNILQNHIDSEASNYWLMKGNIFAETEGFIVAIQDQIIKTRNYSKYILKDSSIINDKCRLCSLTSETIDHITGGCKVLAGKEYLNRHNNVAKQIHQYLALKYKLINDKVPYYKYSPKNVMENNLAKLYWDRDIFTDRTINCNRPDLTLTLKTTKTTYLIDISIPNTENLKQKHFDKIQKYLPLADEIKQIWHQDTVRIVPIILSSTGVIPKTLHTSIQELGLRKSIFIELQKSTVLDTTSIVRRFLNISTLVSR

SEQ ID NO: 24025 - protein, 1304 aa, Cycloglypha thrasibulus
MRLRSGYKLPQASTGANRTGESCPEPTSSGCPTYSGGDTVSQTSAQLCTAAERITPTSSMESLFESPASSPHSYEELSQYSSRSTTVSPMSDVVRTQAKQKRNNLTKATYSQSTANGSEEQVHIDTTSTQTNPTRSVLQDMKPATTLAGRERQRMKWTDEVNRQLLRCYYTVTNSERNLTGYRPQLHKMFIEHYPDLDFITEQRLSDQIRVIYRHNRISEAERQVMKQQMEDHNFTEPENITQHTLESTQISENTQHTQNTTSPMDPSNIKPHNKTVNDISEKPTHTQLKNTKQTESGIKSKSDGYLDLKITFQQNLEKFKNSDPVSRPSIKKFQITYKSKKLIQNLNYILEEHLSNNNVIKLEELHEIIYCAAISLVSFLNKKSIQENEENRPIIQNRTRPTWETRLQNRISKLRKEIGQYTQYLRGNLSQKKQNKINPNREKDQDIVEKLDSLKQRLQALAKRLRRYQKGNQRYRENRIFERNQKLIYRNFNTQQRILNPPDIKDIENYWGNIWSNPVNHTTNPFWIHLEEKSMEQIGCMPEFKIDIKDVRVATRKILNWKAPGPDKIQNYWLKHLTATHKTLTVLFNDILQNPSNVPHFLTQGVTYLKPKDTDTSNPANFRPITCLPTLYKLLTSIISNKINTHITQNNIIYEAQKGCRTGSRGCKEQLVIDTEVHAQVKQKHRNLYYAYIDYQKAFDSVPHSWLVQVLKLYKIDANLITFLQHIMTKWSTILNFTIDNKCMKSSQINISRGIFQGDSLSPLWFCLALNPLSNIINNSGHGYTVDRTNNIKISHLFYMDDIKLYASTRQQLDNLLMLTESFSDDIKMNFGVKKCKINSIIKGSHKLIEPHNLTLTQGQITSMDYNEYYKYLGFQQKTFIEHTKIKHDLTTQYKHRLNQIFKTNLSARNKVKAVNTYAVPILTYSFGIIKWTDTDLDALNALTRTTAYKHHIHHIHSAVERFTLKRKLGGRGFIDIKNMHYSQVENLRTYFLNKSKDSSIHKAITELPTSGTSLQFRDKDFRPESKIIKEDDKLESWKKKSLHGKYRNNLEQNHIDKEGSCVWLTKGNIFAETEGFIIAIQDQIIKTRNYSKHILKDSNVTNDKCRLCHLANETIDHITGGCKVLSGKEYINRHNNVAKQIHQYIALQYKLIENKLPYYRYTPKNVLENNEVKLYWDRDIVTDKTINCNRPDITLTIKNTKTTYLIDISIPNTENIKQKHFDKIQKYLPLADEIREMWHQDVVRIIPIILSSTGVIPKSLYVSLKELHLRESIFVELQKSVILDTAAIVRRFLNLSNIVTNS

SEQ ID NO: 24026 - protein, 1335 aa, Thymelicus lineola
MAEGELSRERSLHENRRNHGVVSLISASGALLGWTFISLANFKYCMDNSQKHNFNSSSSSRRYNLRSLSRGAQSNNTKLINTNKELSRRILISQDAIVDHNSDSSLFQTPTSSPRSYEESYRYESRSTTVSPNTDVGQTHEVPRNTRRLSTSIQEAPHQSHSGIGATSSQINPTRSVLQVMRPATTLGGRDRQRMKWTKEVNEQLLRCYYIATNLESDLTGYRTILREKFIEIYPDLHFITEQRLSDQIRVIHRNNRITPNEREKIKRNLFHFIDTSRPLQLTPEHILEQHHDQIGSTQTITDNINIEELSSIEHMEENLQSAQIETRIEEVSNEENYLIEIENIFKENLNKFKNSEPNVRLRIPKLQISYKTKNIIRNINIQIERHLAENNITSLEELHVIIYSAALTAVTVNNKVINYEKKVNTIIAKNKKPAWEKRLENRIIKLRKEIGQHTQYLNGNLSKKKGTKLKLTIVAEERIIEQLDTLKQKLQALAKRLRRYRKTNARYRQNKIFETNEKLIYRQFNPSPKPENAPNIKIINDYWSNIWTNSVTHDSALDWILLEEKEYQNIEPMPQFKIDLEDIKIATSKMLNWKAPGPDQIQNYWLKNFTATHKKLAEILNLVIHEPEKLPLFLTHGITYLQPKETNTTDPAKYRPITCLPTLYKLLTSIIAAKINLHITRNKIIQEEQKGCCKGSRGCKEQLVIDSEIHYQVKQKHRNLFFAYIDYQKAFDSVPHSWLIQILKLYKINTNLISFLQYTMNNWATTLNITTQNNHIKSPPIKIERGIFQGDSLSPLWFCLALNPLSKILNRSGHGYLIDRIHKTKISHLLYMDDIKLYSSNRQQLNALLKLTETFSNDIKMEFGINKCKINSIIKGKHNITEPYKLTTCNDLIKSMESKDYYKYLGYQQNTSIEHNKIKQDLTALYKKRLNQVFKTHLSARNKVKAVNTYAVPILTYSFGIIKWTDTDLEALNTLTRTTAYSHHTHHIHSAVERFTLPRKLGGRGFIDIKNLHYKQILNLRTYFFNKAKESSIHKAITDLPTSGTALLFKDEQFEPANKIVKHEFKLEKWKNKSLHGKFPLNLEQEHIDREASCGWLVKGNIFAETEGFLIAIQDKIIKTRNYAKHILKDNSIVNDKCRLCNISNETIEHITGGCKVLASKEYTNRHNNVAKQIHQYLALKYKLIDNKLPYYKYTPKNVLENNMAKLYWDRDIITDKTVHCNRPDITLTLKLTKTTYLIDISIPNTDNLKQKHFDKIQKYLPLADEVKDMWHQDNVRIIPIILSSTGVIPKNLHTSLKELKLQKSIFFQLQKSTVLDTASITRRFLNLSPLINI

SEQ ID NO: 24027 - protein, 1305 aa, Atarnes sallei
MKMSIPINDKRYNLRSLSKNIKSRSTQINEGEELSRLAPTRQNPESTTEPSETHYSPCSSPAESLFNTPSSSPRSYENQSENRSRSSSLSPILAQSIPRKSHQIKRRAPQRLTPPNNQVPAKQHRALNTMQAQTNIIIGHTKPTRSVLLDMRPVTTLAGRNRQRMKWTNEVNQHLLRCYYIVTNLETNLTNYRPQLYKKFIEIYPELDFLTEQRLSDQIRVIHRNNRVHESERALIRKDVEENTHLDTVILSPERNLSCPLQSTQFNHNTLCETEQIISQSLINVNLVETESDVNTEQTSETEKIERDLENTFKDNLHKFKNSDPIHRPFITKLQTTYYTRKLIQNLNNIINRYLKENNVTKLEEIHEIIYCAATTLVTHNNNVQKDINIKTQGKTEYKDNKKPKWERRIENKIAKLRKQIGQHTQYLKGNLSKKKYPKVNPTKKAEQDLVDHLDALKQKLQALAKRLKRYRKTYRRYKQNKLFETNQKLIYRTFDKQHKYTHQHDVKKIQSYWESIWSNPIEHTSNADWISIQEKELHEIDPMPQFKVDLEDIKTATSKLLNWKTPGPDKIQNYYIKYLTATHQTITNIFNNFILKPQSVPQFLTQGVTYLKPKDSDTLNPANFRPITCLPTLYKLFTSIIAHKVNTHITRNKIIEEEQKGCRKGSRGCKEQLVIDTEIHNQVRQKHRNIYFAYIDYQKAFNIVPHSWLIHILKLYKIDNKLVECLQHIMSKWCTTLNVNTDHRCCTTSPISISRGIFQGDSLSPIWFCLAINPLSRILNNTGHGYVIDRPNKIKLSHLLYMDDIKLYASTRQQLNELLKHTESFSIDIKMEFGVKKCKINSIIKGNHRLTEPYNLTDNNAQIKAMAFNDYYKYLGYPQNTAINHTKIKQDLTTQYKQRINNIFRTHLSGRNKVKAVNTYAVPILTYSFGIIKWTDTDLDALNTLTRTTAYKHHIHHIHSAVERFSLNRKLGGRGFIDIKNLHYRQIENLRTYFLNKALDSSLHKAITSMATSGTPLYFKDKKYTPLSKIVKDDIKIASWKEKTLHGKFRRNIDEPHIDKEGSFGWLTKGNIFAETEGFIVAIQDQIIKTRNYAKHILKDSSVLNDKCRLCNLSNETIDHITGGCKVLSSKEYVNRHNNVAKQIHQYLALKYKLLNNKVPYYKYSPKNVLDNKVAKLYWDRDIITDKTINCNRPDLTLTLKNSKTTYLIDISIPNTENLKQKHLEKIQKYLPLADEIKEMWHQNNIRVIPIILSSTGVIPLSLHKCIKELELPKSVFIELQKSTVLDTSAIVRRFLNFTSADKT

SEQ ID NO: 24028 - protein, 1324 aa, Heliopetes ericetorum
MRLRSRVIPQAGTREGESRPGPSSSGSPAYSGVGTASHLTAQSQAVAVSNQTPSLTASNRQIGSSTSMSSMESLFESPASSVRSYEESRLHSSRSTTLSPMSDATPRKRRIIKRKNTKRTNNAIRNKVSEDQETVTSAPSQSNIPTSGHDIPTRSVLQDMRPATTLAGRDRQRMKWTDEVNQKLLRCYYLATNMETNLTGYRPQLREKFIECFPELHFLTEQRLSDQIRVIHRNNRISAVDRAKIRQEVDIHIRNLNSDSNIALSLPPPTPSQTIYKIDIPLDSGQEITEPLHNMIETSHNLNASSTDDIAVTHINENGNRNTTEFTQLESAFMENLTKFNNSDPILRPNIPKLQLRYNTRKYILDLNNIIKKYLTENSVTTLEQIHNIIYCSAITLVTVNNTIRKVNNLDKQETINSKKKPAWEKRLENRIAKLRKQIGQLTQYLRGNLSKKKETKLISANKEKQEQVDRLDELKQKLQSLCKRLRRYKKTNQRYRQNKLFEMNQKLIYRNFNPQQKLTEPPDIQVVQKYWENIWSNSLNHNTHLSWITLEEKEAEKITPMPEFTIDLEDIKSATRKMLNWKAPGPDKIQNYYLKYLTSTHATIADIFNGLIKNPDKVPGFFVQGLTYLKPKASDTSHPANYRPITCLTTLYKLLTSIIANKINTHITLNKIIPEEQKGCQKGSRGCKEQLVIDTEIHNQIKQKHRNLYYAYIDYRKAFDSVPHSWLIHILKIYKVDNSLVTFLYHTMSKWSTTLNITAERNNLQSAPIKISRGIFQGDSLSPLWFCLAINPLSKLLNNTGYGYIIDRTNKIQITHLLYMDDIKLYAKTRQQLNSLLSITESFSVDIKMDFGISKCKINSIIKGKHNLTEPYNLAANNEQITSMNLTEYYKYLGFNQNTGIDHTKIKQELTMQFKHRLSQIFKTHLSARNKVKAINSYAVPILTYSFGIIKWTETDLDTLNTLIRTISYKHHIHHIHSAVERFSLKRTLGGRGFIDIKNLHYGQIDNLRTYFLNKATSSAIHKAITDLDTSGTALQFKDIDFKPENKIVKDDTKIDNWRKKSLHGKYRNNIEQNHIDTEASFAWLTKGNIFAETEGFIIAIQDQIIKTRNYAKYILKDSNVTSDKCRLCNLANETIDHITGGCKVLSSKEYINRHNNVAKQIHQHLALKYKLVDIKIPYYKYQPKNVLENNTAKLYWDRDIITDKTINCNRPDLSLTVKSTKTTYLIDISIPNTDNLKQKHFEKIQKYLPLADEIKEMWKQNTVRIIPIILSSTGVIPKTLHTSLKELQLQKSIFIELQKSALLDTSAIVRRFLNFSSLVSNY

SEQ ID NO: 24029 - protein, 1160 aa, Zera sp.
MRPATTLAGRDRQRMKWTNEVNHELLRCYYIVTNLETNLTNYRPQLREKFIEHFPELQFITEQRLSDQIRVIHRCNRISASERTQIKLNLEKSHNFNPDRNCTNTHDSVTLTEPTQNSQILNIIADIETNTNTSININLSETLQETDIIVNQTSHTHNEPKETEIENTFANNLIKFKNSDPTLRPSIPKLRVTYITRKLTQTLNNVIKKHLDENNVTKLEELHEVIYCAASALVTHNNQILKDTNTKNLPNRPNNKKPAWERRIENRITLLRKEIGQYTQYLNGKLSQKKKHKVNPTKKEDQFIVDKLDELKQKLQALAKRLRRYRKTNLRYKQNKLFNVNQKLIYRNFNPQEKYTEQPNLQEVQRYWESIWSNPVNHRENPSWISIEANETQQITDMPKFIIDIEDVKTATARMLNWKAPGVDKIQNYYLKYFTATHKTIADIFNQLTREPERIPHFLTQGVTYLIPKDSDTSNPSNFRPITCLPTLYKLLTSIIAYKINTHITNNNIIQEEQKGCRKGSRGCKEQLVIDTEIHNQVKQKHRNLYFAYIDYQKAFDSVPHSWLIHILKIYKIDNNLIDFLQHTMSKWTTTLNIKMKEEYLKSSPISISRGIFQGDSLSPIWFCMAINPLSRILNNTGHGYIIDRPNKIKLSHLLYMDDIKLYASTRQQLNDLLQHTESFSSDIKMEFGIKKCKINGIIKGRHKQIDSYNLTISTNKISSMNHSDYYKYLGFQQNATIDHTKIKQDLTKQYKMRLHQIFKTHLSGRNKVKAANTYAIPILTYSFGVIKWSDTDLDALNTLTRTIAHEHYIHHIHSATERFSLNRKLGGRGFIDIKNMHYNQVENLRTYFQNKAVDSELHKAIIELTTSGTPLHFNDKDFKPQTKIIKQDVKIENWKKKSLHGKYRHNIEQEHIDQQGSFCWLTNGNIFAETEGFIIAIQDQIIKTRNYAKYILKDNTISNDKCRLCNLTNETIDHITGGCKVLSSKEYINRHNNVAKQIHQYLAIKYKLLDSKTPYYKYSPKNVLENKIAKLYWDRDIITDRTIHCNRPDLTLTLKNTKTTYLIDISIPNTENLKQKHFDKIQKYLPLADEIKGMWHQDVVKIIPIILSSTGVIPLNLHKSLKELDLKKHIFIQLQKSVVLDTAAIVRRFLNLSSSILKS

SEQ ID NO: 24030 - protein, 977 aa, Dalla costala
MNKLQFLFNTKKLINDLNTIIQKHLTENNITTLEEIHEIIYSAALVAVTVGNTKFKHRNTEGQSDTPKRTKPAWEQRLENRISNLRKEIGQLTQYLNNNLSQKKKSKLNPTNLEKQEIIDRLDKLKQKLQALAKRLRRYRKTNQRYRQNKMFENNQKLVYQSFNQQQNSRSSLHQPDISEVHRYWKNVWSQPVTHNSHPSWVSIEEKGSQNIDNMPQFQIELDDVKTAVRKMLNWKAPGPDKIHNYWIKYFTSTHTTIVDLFNSLILTPEKLPGFLTKGITYLKPKDTDTSDPAKYRPITCLPTLYKLLTSIIANRINKHVILNNIIQEEQKGCCKGSRGCKEQLVIDTEVHSQVKQKHRNLHYAYIDYKKAFDSVPHSWLIQVLQLYKIDNSLINFLEHTMNKWSTTLSITIKNKCIKSSPIDIARGIFQGDSLSPLWFCLAINPLSNILNNSGYGYIIDKVNKVKLSHLLYMDDIKLYSSTRQELNHLLKLTESFSNDIKMEFGINKCKINSIVKGNHKLTEPYNLTICNDTISAMEYKEYYKYLGYLQNTSIEHTKIKKDLTTQYTNRLIQIFKTYLSARNKVKAVNTYAVPILTYSFGIVKWSDTDLEALNTLTRTTAYKHHIHHIHSAVERFTLKRKLGGRGFIDIKNLHYKQIENLRNYFLNKAQDSSLHKAIIDLTTSGTALKFREKDFKPEHKIVKQETKLENWKKKSLHGKYPHNIDQDHVDRESSCSWLTKGNIFAETEGFIIAIQDKIINTRNYSKHILKDKNITNDKCRLCNLSNETIEHITGGCKVLATKEYINRHNNVAKQIHQYLALKYNLINNRLPYYKYQPKNVLENNKAKLYWDREIITDKTINCNRPDITLTLKNIKTTYLIDISIPNTENLKQKHFDKIQKYLPLADEMKQMWHQDNVRIVPIILSATGVIPKNLHTSLKELQLRKSIFTELQKSAILDTSSIVRRFLNLSPLVTNS

SEQ ID NO: 24031 - protein, 1291 aa, Spathilepia clonius
MKMQNSNTNSSYRYNLRSLSRIKKSGNEDLSRPAPACVNSEDNVPDCQSHSLTPTTSLESLFESPASTPRSYERSRSSIISPMSDVIQPTSRNKGITQTNITKSLLNTSSKVHKPHIHIQNRLTSRQTNLTRSVLQDMRPTTTLAGRDRQRMKWTNEVNHQLLRCYYIVTNLEKNLTGYRTGLREKFIEYYPELHFITEQRLSDQIRVIHRNNRISAIDRENIKKKVEADINVINSNVSNHTPQSSILTQTTQDEQDSNLHTEIETNNMDNETISNTVKINIEQGIETVIEENHTFTLKNIFTENILKFKNSIPNLRPNIPKLQTTYNTKKLISDLNNIIENYIADNNIATLEDIHEVIYSAAITAVTINNKVTKEHENSKKQQNKQKMYKPTWERRLENRIYKLRKEIGQYTQYLNGNLSQRKQSKIIAEKTEDQEIVNRLDTLKQKLQALAKRLRRYRKTNQRYKQNKMFEANQKQIYRSFSPQQKVIQAPDITEIQKYWKSIWSNPVSHASNLSWIEENELENIAPMPQFLIDIEDVKIATAKMFNWKTPGPDKIQNYWLKYFTATHEKIVEIFNGLIQEPNNIPDFLTQGITYLKPKDMDTSNPAKYRPITCLPTLYKLLTSIIANKINTHTTLNKIVHEEQKGCCKGSRGCKEQLIIDTEVHNQVKQKHRNLYYAYIDYLKAFDSVPHSWLIHVLKLYKIDDILIKFLNHTMTKWNTTLNITTENKSLKSEPINIARGIFQGDSLSPLWFCLAINPLSKILNNSGHGYIIDRQVNTKLSHLLYMDDIKLYASTRQQLNNLLKLTESFSNSIKMDFGIEKCKINSIVKGRHKLTEPYKLTNFNNMISSMEYRDYYKYLGFQQSTSLEHTKIKQDLTSQYKQRLNKIFKTHLSARNKVKAVNTYAIPVLTYSFGIVKWSETDLEALNTLTRTTAYKHHIHHIHSAVERFTLKRKLGGRGFIDVKNLHYKQVENLRTYFLNKAKDSLLHKAIIDIPTSATPLQFKDKNFKPENKIVKQDVKIENWKKKSLHGKYPKNIEQEHIDSEASNYWLMKGNIFAETEGFIIAIQDQIIKTRNYSKYILKDSSITNDKCRLCNSANETIDHITGGCKVLAGKEYINRHNNVAKQIHQYLALKYKLINEKVPYYKYSPKNVLENKLVKLYWDRDIITDKSINCNRPDITITLKSIKTTYLIDVSIPNTDNLKQKHFDKIQKYLQLADEIKEMWHQNIVRIIPIILSSTGIIPKTLHTSIRELDLRKSIFVELQKSTVLDTASIVRRFLNISSLINN

SEQ ID NO: 24032 - protein, 1289 aa, Autochton potrillo
MKMQNSNSSISYRYNLRSRVRGTQNIRNLSSQASICHEQEDVSNPYQIRSSTSTTSLESLFESPASTRRSYETSRSNTTSPMSDISQPTSRKERILKRNITKSLLKTKSKVQEPHSHTENRPTPKQINPTRSVLQDMRPTTTLAGRDRQRMKWTNEVNHQLLRCYYIVTDLENNLTGYRTHLRDKFIECYPELHFITEQRLSDQIRVIHRHNRINAVDRERMKKDLEAHINLTNSDLSCHTPQSSLRTQTTQYVPVSNLLTNSETTSKDTEETHNTVTINTETTLETITTNDTLALKNTFIENIRKYNKSNPILRPSIPKLQITYKTKKLINDLNNIIDNYLTDNNIATLEEIHEIIYSAAITAVTVNNNTTKEHQTNEKQCNKQKVYKPAWEKRLENRIFKLRKEIGQYTQYLKGNLSQRKKTKINSTKLVDQEIVDRLDTLKQKLQALAKRLRRYRKTNQRYKQNKIFNTNQKQIYRSFNPQQNIIQPPDIKEIQKYWEKIWSTPVNHTSNLSWIEENQLGNIESMPKVVIDLEDIKIATTKMLNWKAPGPDKIQNYWLKYLTATHRIIVNIFNGLIQEPSNIPDFLTQGITYLKPKDMDTSNPAKYRPITCLSTLYKLLTSIIANKINTHTTQNNIVQEEQKGCCKGSRGCKEQLIIDTEIHNQVKQKHRNLYFAYIDYQKAFDSVPHSWLIHVLKLYKIDDSLIRFLKHTMTKWTTTLNITINDKSHKTAKINIVRGIFQGDSLSPLWFCLAINPLSKILNESGHGYIIDRQTNTKLSHLLYMDDIKLYASTRQQLNNLINLTESFSNDINMNFGIEKCKINSIVKGRHKLTESYKLSIFNNTISSMEYKEFYKYLGFQQSTYIDHTKIKQDLTTQYKQRLNKIFTTYLSARNKVKAVNTYAVPILTYSFGIVKWSETDLEALNTLTRTTAYKHHIHHIHSAVERFTLKRKLGGRGFIDIKNLHFKQIENLRSYFLNRAKYSLLHKAVTDIPTSGTPLQFKDKHFKPENKIVKQEVKIENWKKKSLHGKYPHNIEQDHIDNEASNYWLMKGNIFAETEGFIIAIQDQIIKTRNYSKHILKDSSVINDKCRLCNLTNETIDHITGGCKVLASKEYINRHNNVAKQVHQYLAHKYKLINDMVPYYKYSPKNVLENNAVKLYWDRDIITDKTINCNRPDITLTLKSTKSTYLIDISIPNTENLKQKYFDKIQKYLPLADEIKEMWHQNTVRIIPIILSSTGVIPKNLHTSIRELDLRKSIFIKLQKSTILDTASIVRRFLNISTLVSN

SEQ ID NO: 24033 - protein, 1304 aa, Tagiades gana
MMRLRSSKALPQAGTSDGESRPEQSNSGSPTYSGGGTASLRPSSVTRNITPISENTITTNLQTDSCTPPSSPGTIFESSNSSPRSYEEFSQYTSRSTTVSPMSDVVRPKKTRIINQNLPILLPNTYNQSLPEQTATCNNPTKSVLQDMRPTTTLAGRDRQRMKWTKEVNHQLLRCYYIVTNFENNLTGYRTQLREKFIEYYPELSFITEQRLSDQIRVIHRNNRISKHERELIKKGLETQINQSNNSTLCNHSSQISQSLHSNQHDQILNTLTVELEEVNIDPTSTANDHNIVEVSSVRHDTNYNKLYSIFVDNLNKYKNVDPNLRPSISKLHMTYQTIKMINSLNYIIGQHLVENCVTTLEELNIIIYSAALAAVTVNNKIENKKENTKKIYTNTQNSTKPAWEKRLENRILNIRKEIGQYTQYLNGNLSQKKQTKINPKKKKDDQDIIDTLDLLKQKLQALAKRLKRYRNTSKRYKQNKLFENNQKLVYRTFIPQQKILHPPNIEEVHDYWKNIWSKPINHNSNPSWLSIEETSVEEIESMPRFTVDLQDVKVALSKMLNWKAPGPDKIQNYWLKYFTSTHKNIVDSFNAIIENPQNLPTFITQGVTYLKPKDTDTSKPANYRPITCLPTLYKLLTSIIANKLNMHIIQNKIIKEEQKGCCKGSRGCKEQLVIDTEIHCQVKQKHRNLFYAYIDYKKAFDSVPNSWLIQVLKLYKVDNILINFLDHTMSKWTTTLNITTENSSLKSPLIHIARGIFQGYSLSPLWFCLAINPLSKILNNTGDGYIIDRTCKLKLSHLLYIDDIKLYASTRQQLNNLLKLTETFSNDIKMEFGINKCKINSIVKGKHKFTEPFDLTSCQEKISAMECKDFYRYLGYNQSTSIDHTKIKQDLTTQYKQRLNQIFKTHLSGRNKVKAVNTFAIPVLTYSFGIIKWSNTDLEALNTLSRSTAYKHHIHHIHSAVERFTLKRKLGGRGFIDIRNLHYKQIENLRTYFLQKAKDSLLHKAITDLSTSGTPLNLKDKDFKPESKIVKQEVKIENWKKKSLHGKYPHNIEQEHIDREASSCWLMKGNIFAETEGFIIAIQDQIIKTKNYAKYILKDNTVVNDSCRLCHSSKETIDHITGGCKTLAAKEYINRHNNVAKQIHQYLALKYKLIEHKVPYYKYFPKNVLENKEVKLYWDRDIITDKTIHCNRPDLTLTVKNTKNTYLIDISIPNTENLKQKYLNKIQKYLPLAEEMKEMWHQDLVRIIPIILSSTGVIPKTLHTSLRELQLRKSIFIELQKSTLLDTSSIVRRFLNLSTAIIS

SEQ ID NO: 24034 - protein, 994 aa, Myrinia binoculus
MFKENLTKFKNTDPILRPSIPKLQISYNTRKLIQNMNNIIENYLSEISITTLEKIHEIIYCAALTLVTVTNKVTKYNNNNKKQDTKASSGKPAWERRLENRISKLRKEIGQHTQYLRGNLSQKKQFKINPAKKEKQEIIDRLDTLKQKLQALAKRLRRFQKTNLRYKQNKSFEINQKLLYRNFNPQQKLTNPPDLEAMQSYWESIWSHPIDHTTSPSWISIIEEVTQQIGPMPQFTIDLEDVKLATNKMLNWKTPGPDKIQNYWLKYLTATHKTITETFNSLIQKPENVPSFLTQGITYLKPKDGDTSNPANYRPITCLPTLYKLLTSIIANKVNTHIIQYNIINEEQKGCRKGSRGCKEQLVIDTEIHNQVKQKHRNLYFAYIDYQKAFDSVPHSWLIHILKIYKIDDNLINFLQKTMINWSTTLNIVTEHNSLKSSPISISRGIFQGDSLSPLWFCLAMNPLSRILNNTGHGYTIDRPNNIKLSHLLYMDDIKLYATTRQQLNNLLKVTESFSKDIKMEFGIKKCKINSIVKGSHKQTEPYNLTLSHEQISSMYINDYYKYLGYQQNVAIDHTKIKQDLKIQYKQRLNKIFKTHLSARNKVKAVNTYAVPILTYSFGIIKWTDTDLDALNTLTRTTAYKHHIHHIHSAIERFTLNRKLGGRGFIDIKNLHYKQVENLRTYFLNKANDSSLHKAITDLPTSGTPLHFKDKNYIPENKIVKQDVKIENWKKKSLHGKYRNNIEQDHIDKEGSFYWLTKGNIFAETEGFIIAIQDQIIKTKNYAKYILKDTNITSDKCRLCNLTNETIDHITGGCKVLSSKEYINRHNNVAKQIHQYLALKYKLIDNKVPYYKYLPKNVLENNTAKLYWDRDIITDRTINCNRPDITLTLKNIKTTYLIDISVPNTENLKQKHFDKIQKYLPLADEMKEMWHQETVKVIPIILSSTGVIPQNLHKSLKELQLRKSLFIELQKSTLLDTSAIVRRFLNLSAIVSDS

SEQ ID NO: 24035 - protein, 1301 aa, Cabirus procas
MSNPNHNNNNKKYNLRSLSRAQNTTRMRLMDDEEMNRRALLTQNTATKTRSHLSTSTSSMESLFESPASSPRSYEGLSHNISRSTTSSPMSDVQPIPCKRPIKRTASNRLTKPAADQLITDQKLLSSAQFNSTSAHTNPTRSVLQDMRPATTLAGRDRQRMKWTNEVNRQLLRCYYIVTNLEENLTSYRPQLREKFIEYYPELHFMTEQRLADQIRVIHRNNRISAAARAEIKRNVQTTVNLSTNTVNSSSPNPLPLTHSTHCFQNKSALVDGAKSDVNITVSPQTTKNPDTTNIEQTTVTENTENSLKLKQMFIENLFKFKSSDPLSRPSIPKLQLTYNSKKLIQNLNDIIEKHLIDNNVTTLEEIHEIIYCAALTLVTLTSKIPDHKNTNKTISKKPTWERRLENRITQLRKEIGQRTQYLKGNLSQKKQRKLNLPNKENQDIVDKLDAQKQKLQALAKRLRRYRKTNQRYRQNKLFEINQKLLYRNLSPQQKITNHPDIHEVQSYWESIWSTPISHIPNPTWVSIEEKEIQHIDTMPQFKIHLNDVKLATSKMLNWKAPGPDKIQNYWLKYLTATHKTIADIFNTLIQYPEHCPNFLTQGITYLKPKETDTSNPANYRPITCLPTLYKLLTSIIANKIDIHITQNNIIKEEQKGCRKGSKGCKEQLVIDTEIHNQVKQKHRNLYFAYIDYQKAFDSVPHSWLIHILELYKIDNKLINFLQHTMNKWSTTLNISTDHNCLKSLPIKILRGIFQGDSLSPIWFCLAMNPLSKILNNTGNGYVIDRSNKIKLSHLLYMDDIKLYASTRQQLNDLLKLTESFSNDIKMQFGIKKCKINSVIKGKHRQTESYNLTSCNEKIGSMDFNDYYKYLGFKQSITIEHTKVKQNLISQYKLRLNQIFSTHLSARNTVKAVNTYAVPILTYSFGIIKWTDTDLDALNTLTRSTAYKHHIHHIHSAVERFTLNRKLGGRGFIDIKNLHYKQIENLRTYFVNKSVDSLLHKAITNLPTSGTPLNFNNKNFEPQIKMVKEDVKIESWRKKSLHGKYRHNIEQDNIDKDGSFCWLTKGNIFAETEGFIIAIQDQIIKTRNYSKHILKDPSITNDKCRLCNQTYETIDHITGGCKVLANKEYINRHNNVAKQVHQYIALKHKLIDTKMPYYKYVPKNVLENDKAKLYWDRDIITDKTINCNRPDLTLILKDIKTTYLIDISVPNTENLKQKYFDKIQKYLQLADEIKDMWHQESVRIIPVILSSTGVIPQNLHKSLKELQLHRSIFIELQKSTVLDTSAIVRRFLNLSSIVSSS

SEQ ID NO: 24036 - protein, 1311 aa, Ectomis octomaculata
MRLRSGYTLPQAGTGANRDGESRPEPSSSGSPTYSGGDTVLRTSAQCSTVAEHSHNSASVVASHDTAAHCQTPTSSTESLFESSASTPCSYEEIDLGRSRSSTSSSEDTQAMSKNVRNAKRNSTKCLLKTSTRTIQEAKILVEDKTTSRYVDPTRSVLQDIRPTTTLAGRFRQRMKWTNEINQQLLRCYYIATNLENNLTGYRTQLREKFIEHYPDLNFITEQRLSDQIRFIHRNNRIPVIQRENIKKSVEVHIKCNNSDITSNRSQSLLPAQTIQVSNSLADSETIVVETIKNTTDLNNESTIEVASIESNNILKLKDTFVQNILKFKNSDPNLRPSIPKLQITYKTKKLINDLNNIIENYLNENNISTIEAIHEVIYSAAITAVELNNKEKTKFKNTNASNINNKTFKPSWERRLENKISKFRKEIGQYTQYLKGNLSEKKKLKLNPTKLEDQKIIDKLDLLKQKLQALAKRLKRYRKTIQRFRQNRTFEVNQKLIYRNFNPQQKIIHLPDINEVQTYWEKIWSNPVHHTGTWSSTDEGEVEDIELMPQFVIDIEDVRLATKKMFNWKAPGPDKIQNYWLKYLTATHKTIVDIFNALILEPKNVPDFLTQGITYLKPKDIDTSNPAKYRPITCLPTLYKLLTSIIADKIYSHTTQNKIIQEEQKGCCKGSRGCKEQLIIDTEIHNQVKQKHRNLYFAYIDYQKAFDSVPHSWLIHVLKLYKIDNSLVRFLYHVMGKWITTLSISTENISLKSSPINIARGIFQGDSLSPLWFCLALNPLSKILNNSGHGYIIDKESKIKLSHLLYMDDIKLYASTRQQLNNLLQLTESFSNDIKMEFGIEKCKINSIVKGRHKLTEPYNLTNVGDTISPMEYIDYYKYLGYRQNTCIEHTKIKQDLTEQYKLRLHKIFSSHLSARNKVKAVNTFAVPVLTYSFGIIKWTDTDLEALNTLSRTTAYKHHIHHIHSSVERFTLKRKLGGRGFIDIKNLHYKQVENLRTYFISKGKDSLLHKAIIDMKTSGTALYFKDKDFNPENKIVKQDVKIANWKKKSLHGKYPHSIEQDHIDSEASNYWLLKGNIFAETEGFIIAIQDQIIKTRNYSKHILKDNSILNDKCRLCNTSNETIDHITGGCKILANREYINRHNNVAKQIHQYLALKYNLLDTKVPYYKYTPKNVLENNIVKLYWDRDIITDKTINCNRPDLVLTLKNIKTTYLIDVSIPNTDNLKQKHSDKIQKYLPFSDSKSSKSQFGSTPLLLHDFDQLQNGLFKGCYNNLVVDVNVKLVNYYLLVLCTCGQLALVSPVNVFVHVSKC

SEQ ID NO: 24037 - protein, 1295 aa, Codatractus imalena
MMKMQNQNPNNSYRYNLRSLSRVQYNQNTRNSRKEELNRQELTGLDQEDIAADNQSRSSTSTTSSESLFESLSSTPRSYEDSRSSTTSPISHIALPISRKERIIKPSTRSTTGQETHSVIKNRETSKQAKPTRSVLQDMRPTTTLAGRDRRRMKWTNEVNYQLLRCYYIVTNLESNLTGYRTQLREKFIEHYPELHFITEQRLSDQIRVIHRNNRISAVDRDKIRKNVEVNFNSYNNISFDTPQSSLLTQTTQYEQDSNLHIETTTINTETTHNTVTINIEPRIETVTIEGSDMIELKKVFTENIKKFKNVNPILRPPIPKLQITYKTKKLINDLNNIIENYLNENNIATLEEVHIIIYSAALTAVTINRKAPVTNKHGNVIEQYDKQKNYKPAWERRLENRISKLRKEIGQHTQYLKGNLSQKKQFKMNLRKTEEQEIVVRLDTLKQKLQALAKRLRRYKKTSQRYKQNKTFEVNQKMVYRSFNSQQKIIHPPDIKEVQKYWEKIWSNPINHTTNSSWIEETELENIEKMPQFVIELEDIKIATTKMFNWKAPGPDKIQNYWLKYFTATHEKIVDVFNTLIQEPGNIPDFLTRGITYLKPKTTDTSNPANYRPITCLPTVYKLLTSIIANKINKHTTQNVIIQEEQKGCCKGSRGCKEQLIIDTEIHNQVKQKHRNLYYAYIDYQKAFDSVPHSWLIHVLKLYKIDNSLISFINHAMTKWTTSLNIAIENKYLKSAPINISRGIFQGDSLSPLWFCLAINPLSKILNNSGHGYIIDRQLNTKLSHLLYMDDIKLYASTRQQLNNLLKLTESFSNDIKMDFGIEKCKINSIIKGRHKLTEPYNFTMSTNRISPMEYNDYYKYLGYLQNTSIEHTKIKQDLTTQYKQRLNKIFTTHLSARNKVKAVNTYAVPVLTYSFGIIKWTDTDLEGLNTLTRTTAYKHHIHHIHSAVERFTLKRKLGGRGFIDIKNLHYKQVENLRAYFLNKAKDSLIHKAIINIPTSGTPLQFKDEDFKPENKIVKEEIKIENWRKKSLHGKYRHNIEQDHVDNEASNYWLMKGNIFGETEGFMIAIQDQIIKTRNYSKHILKDSSIINDKCRLCNMANETIDHITGGCKVLAGKEYINRHNNVAKQIHQYLALKYKLINDKVPYYKYSPKTVLENKTVKLYWDRDIFTDRTINCNRPDLTLTLKTTKTTYLIDISVPNTDNLKQKHFDKIQKYLSLADEIKEMWHQNTVRIIPIILSSTGVIPKNLHSSLRELDLRKSIVIEIQKSAVLDTTSIVRRFLNISSALVNKTQ

SEQ ID NO: 24038 - protein, 1312 aa, Signeta flammeata
MLNSKTYHNSRYNLRSLSKAQSTRSVRNSGDEELNRRALVGHNATAEHETTSFTSTSSLETLFESPASSPRSYEESGHNQSRSTTLSPMTDVVQPTTINIQRRNRNTPNTYRRSTDVQVSSTCVYSENGTISSHVNPTRSVLQAMRPATTLAGRDRQRMKWTKEVNEYLLRCYYIVTNLETNLTGYRTQLREIFIEYYPDLHFMSEQRLSDQIRVIHRNNRITAIERDVIKKNVETYINFNSSSNSLRSTQPYSSTQLTTQSIQCHEGINNQIDTEITDSEPLLNVTEATQATIMINTDTSIEKSANKVDDSVKLESIFKENLIHFKNSDPCLRPSIPKLQITYKTKKLLDDINFIIERHLTENNIVTLEQIHEIIYSAALAAVSMNNKVTKHENNVRQTHTHKITKPAWEKRLENRISKLRKDIGQHTQYLKGNLSQKKQFKLNPNEKEEQDVRDRLDTLKQKLQALAKRLRRYKKTNQRYWQNKIFERNQKSIYRSFNPQQKIVNAPDINEIHSYWKNIWSNPVHHNTYPDWIPIEEKDSQNVETMTQFKVELDDIKTATSKMLNWKAPGPDKIQNYWIKYFSSTHKKIVDIFNALIAQPEQLPLFLTQGITYLKPKDSDTTNPAKYRPITCLPTLYKLLTSIVANKINAHIKQNNIIQEEQKGCCKGSRGCKEQLVIDAEIHNQVKQKHRNLHYAYIDYQKAFDSVPHSWLVHVLKIYKIDNTLINFLQHTMTKWTTNLSITIENKHVKSSTINIARGIFQGDSLSPIWFCLALNPLSKVLNNSGHGYIIDRPNKIRLSHLLYMDDIKLYASNRQQLNTLLKLTESFSNDIKMEFGINKCKINSIIKGHHKLTEPYNLISCNGTISSMEYKDYYKYLGYEQNTSIEHTKIKQDLLAQYKQRLNQIFKTHLSARNKVKAVNTYAVPILTYSFGIIKWTDTDLESLNTLTRTTAYKHHIHHIHSAVERFTLARKLGGRGFIDIKNLHYKQLENLRTYFQNKAKHSSLHKVITELTTSGTSLQFKDTDFKPENKIVKQELKLENWKKKSLHGKYPHNIEQNHIDREASCHWLMKGNIFAETEGFIVAIQDQIIKTKNYAKHILKDNTIINDKCRLCNLSNETVDHITGGCKVLASKEYINRHNNVAKQIHQYLALKYKLVDNKVPYYKYLPKNVLENSKAKLYWDRDIITDKTIHCNRPDITLTLKASKATYLIDISIPNTENLKQKHFDKIQKYLPLADEIREMWHQDTVRIIPIILSSTGVIPKNLHTSLTELQLRGSIVAEIQRSTILDTASIVRRFLSLSSLVRDSAL

SEQ ID NO: 24039 - protein, 1292 aa, Doberes anticus
MKMNNPNINKKYNLRSLSRVQNTTSMRIRDSKELNRRALISQKHENATAELVQTRSSTPKSPSESIFESPASSPRSYEESGHSRSTTLSPMSDVQPTPRKITINKRNKQAFNSAQSQTIGTSRHAQPTRSVLQDMRPATTLAGRDRQRMKWTNEVNHQLLRCYYIATNLERNLTSYRPQLREKFIECFPELNFMSEQRLSDQIRVIHRSNRISPVERAQIKQSVEKYINLNNIGNSDTLISLPLTQSTQCSQNWHTPTDSETPIIETSIDITETSQSTHTINTEQIIETGKETNEAIENMFKENLIKFKSSDPALRPSIPKLQITYNTKNLIQNLNKVIERHITKNSVTTLEEIHKIIYCAALTLVTLNNKVQKYDNTKRGATKGSSMKPSWERRLESRVANLRKEIGQYTQYLLGNLSEKKQFKLNPAKKEKQEIVDKLDALKQKLQALSKRLRRYRKTNQRYKQNKLFEINQKLLYRNFSPQQKCTHPPDLQAIQSYWESIWSTSINHTKNPSWMSIEEKETQDINSMPQLKIDLEDIKSATSKMLNWKAPGPDKVQNYWLKYLTATHKTIADIFNAMIQQPENIPPFLTQGVTYLKPKDSDTSNPANYRPITCLPTLYKLLTSIIANKINTHVIQNKIIKEEQKGCRKGSRGCKEQLVIDTEIHNQIKQKHRNLHFAYIDYKKAFDSVPHSWLIHILKLYKIDSSLVDFLQHMMTKWSTTLNITTENTILKSSSINISRGIFQGDSLSPIWFCLAINPLSRILNHTGHGYIVDRPNKIKLSHLLYMDDIKLYASTRQQLNDLLRLTETFSNDIKMEFGIKKCKINSIIKGRHKLTEPYSLSLCHEKITSMDFNDFYKYLGYHQNIGIEHTKVKQNLTAQYKERLHQIFKTHLSARNKVKAVNTYAVPILTYSFGIIKWTDTDLDALNILTRTTAYKHHIHHIHSAVERFTLNRKLGGRGFIDIKNLHYKQVENLRSYFLNKALDSALHKAITDITTSGAPLHFKDKDFKPENKIINQNVKIENWKKKSIHGKYIHNVEQDHVDKEGSFYWLTKGNIFAETEGFIIAIQDQIIKTRNYAKHILKDSNISNDKCRLCNLTNETIDHITGGCKILSPKEYVNRHNNVAKQIHQYLALKYKLIDNKVPYYKYLPKNVLENNIAKLYWDRDIITDRTINCNRPDLTLTLKDTKTTYLIDISIPNTENLKQKHFDKIQKYLPLADEIKEMWHQDTVRIIPVILSSTGVIPQNLHKSLKELQLRKSIFIELQKSTVLDTSAIVRRFLNLSSIVTNC

SEQ ID NO: 24040 - protein, 763 aa, Polygonus leo
MPQFVIDIEDIKIATTKMLNWKAPGPDKIQNYWLKYLTATHKNIVDIFNALIREPGNIPDFLTQGITYLKPKDVDTSNPAKYRPITCLPTLYKLLTSIIANKINTHIIKNKIIEEEQKGCCKGSRGCKEQLIIDTEIHNQVKQKHRNLYCAYIDYQKAFDSVPHSWLIQVLKLYKIDASLINFLNHAMTKWTTILRITAENKSLKSDKINIARGIFQGDSLSPLWFCLAINPLSKILNKSGHGYIIDRQNKIKLSHLLYMDDIKLYASTRQQLNSLLNLTETFSNNIKMEFGIEKCKINSIVKGRHKLTEPYNLTIFRDTINPMEYRDYYKYLGYQQNTCIEHTKIKQELTGHYKQRLNKFFSTYLSARNKVKAVNTYAVPILTYSFGIVKWTDTDLDALNTLTRSVAYKHHIHHIHSALERFTLKRKLGGRGFVDIKNMHYKQVDNLRAYFISKAKDSLLHKAIIDINMSGTPLQFKNKDFKPEDKIVKESIKIDNWKKKSLHGKYPKNIEQDHIDKEASNYWLIKGNIFAETEGFLIAIQDQIIKTRNYSKHILKDNSITSDKCRLCNSANETIDHITGGCKVLANREYINRHNNVAKQVHQYLALKYKVVDNKIPYYKYSPKSVLENSTAKLYWDRDIITYRTINCNRPDLILTLKTTKTTYLIDISVPNTDNLKQKHSDKIQKYLPLTEEIKEMWHQNTVRIIPIILSSTGVIPKNLHISLRELQLRKSIFVELQKSAVLDTTSIVRRFLNLTTLTSNQ

SEQ ID NO: 24041 - protein, 1339 aa, Pyrgus malvae
MRLRGRVIPQAGTREGESRPGPSGSGSPAYSGVGTASHLTAQSHAVVVNNPTPSSSTARQRQIGSSSSTSSMESLFESPASSVRSYEDPSLHSSRSTTLSPMSDAAPRKRRVIKRNTTKRKNNVMHNKVPEEQETLTSAPTESYNPTSEHDIPTRSVLQDMRPATTLAGRDRQRMKWTDEVNQKLLRCYYLATNLETNLTSYRPQLREKFIECFPELHFLTEQRLSDQVRVIHRNNRISAAERAKIRQDVEEHINNINNFRTITSTLSPLIPIQTNDNLITPHTSEQDENTELLNDGIEKSQNLIAISTEEIITTQFNVSENRNTTEFTKLESTFIDSLKKFSDSNPILRPNIPKLQFRHNTRKYISDINSIVKKHLIENSVTTLEQIHNIIYCAAITLVTVNNKVHKTTNLENQETTYNRKKPAWEKRLEKRILKLRKEIGQLTQYLRGNLSEKKQIKDNSTITIKITIKEIIPTNKTKQEVVDKLDEQKQKLQSLCKRLKRYKKTNQRYKQNKLFETNQKVIYRNFNPPQKLTQLPDIHTVQKYWEDIWSNPVNHTTHQPWITVEEKESERIEPMPEFTIDLEDIKTATSKMLNWKAPGPDKIQNYYLKYLTSTHETVADIFNSLIKNPDKVPKFFVQGVTYLKPKTSDTSHPANYRPITCLSTLYKLLTSIIANKINTHITVNKIIPEEQKGCQKGSRGCKEQLIIDTEIHNQIKQKHRNLYYAYIDYRKAFDSIPHSWLIHTLKMYKVEDSLVTFLHHIMSLWSTTLNITAERKCLLSTPIKISRGIFQGDSLSPLWFCLAINPLSKLLNNSGYGYTIDRTNKIQISHLLYMDDIKLYAATRQQLNSLLTITESFSADIKMEFGISKCKINSIVKGKHNLTEPYNLVLNKEKITSMEFSEYYKYLGFHQNIGIDHTKIKQELTTQYKHRLNQILKTHLSARNKVKAINSYAVPILTYSFGIIKWTDTDLDALNTLTRTTSYKHHIHHIHSAVERFSLKRKLGGRGFIDVKNLHYSQIENLRSYFLNKAKDSLIHKAITDLPTSGTPLQFKDKDYKPENKIVKEDTKIDNWRKKSLHGKYRNSIEQNYIDPEASFAWLTRGNIFAETEGFIIAIQDQVIKTRNYAKYILKDSNITNDKCRLCNLANETIDHIIGGCKVLSSKDYINRHNNVAKQIHQHLAFKYKLVDSKVPYYKYQPKNVLENNIAKLYWDRDIITDKTINCNRPDLSLTLKNTKTTYLIDISVPNTDNLKQKHFDKIQKYLPLADEIKEMWKQNTVRIIPVILSSTGVIPKNLHTSLKELQLPKAIFIELQKSTLLDTSAIVRRFLNFSLLVSNY

SEQ ID NO: 24042 - protein, 1253 aa, Telegonus anausis
MKMQNTNKNNSYRYNLRSHSRVQCTQNIRDTELEEVSRQASICLEQEDATDDQQMRSSTSITSLDSLFESPASTPRSYEKSRSNTTSPMSDVSLPLLRKERTLKRNTTKPSSLKTRSKIQEAHLHIENRPSSVQFNPTRSVLQDMRPTTTLAGRDRQRMKWTNEVNHQLLRCYYIVTNLESNLTGYRTQLREKFLEYYPELHIITEQRLSDQIRVIHRNNRISAVDRENIKKDVAALINLTNSNVSRQTPLPSLQTMHTIQTTQYDQSPNQIDNPATELNTEPTIETVIIEENDLTLTLKNTFKESMLKFKNSKPDVRPIIPKLQFTYKTNKIINDLNNIIENYLTDNNIVKLEELHEIIYCAAITAVTVNNKKTKEHGNIEKQCNKEKMYKPAWERRLENRILNLRKEIGQNTQYLKGNLTQRKQSKINPRKIESQEIVDRLDTLKQKLQALAKRLRRYRKTNQRYKQNKTFEVNQKHVYQSFNPQQKIIQPPDIEVIQKYWENIWSNPVNHESNLSWIEDNDLENIESMPQFVIDMEDIKIATAKMLNWKAPGPDKIQNYWLKYFTATHKNIVDIFNNIIQDPSKIPNFLTQGITYLKPKDMDTSNPAKYRPITCLPTLYKLLTSIIANKINIHTTLNKIIQEEQKGCCKGSRGCKEQLIIDTEIHNQVKQKHRNLYYAYIDYQKAFDSVPHAWLIHVLKLYKIDDSLITFLTNAMTKWSTTLNITIENKSLKTSPIHIARGIFQGDSLSPLWFCLAINPLSKILNNSGHGYIIDRQVNTKLSHLLYMDDIKLYASNRQQLNTLLKLTESFSNDIKMEFGIEKCKINSIVKGRHKLIEPYKLTISDNMISSMEFKDYYKYLGFQQSTTIEHTKLKQDLTAQYKQRLNKIFTTYLSARNKVKAVNTYAVPILTYSFGIVKWTDTDLEALNTLTRTTAYKHHIHHIHSAVERFTLKRKLGGRGFIDIKNLHYKQVENLRTYFLNKAKDSLIHKAIIDISTAGTPLQFNDKDFNPDSKIVKQEIKIQNWKKKSLHGKYPHNIEQDHIDTESSNYWLMKGNIFAETEGFIIAIQDQIIKTRNYAKHILKDSNIVNDRCRLCNLANETIDHITGGCKVLAGKEYIMRHNNVAKQIHQYLALKYKLINDKVPYYKYSPKNVLENNAVKIYWDRDIITDKTINCNRPDITLTLKSTKTTYLIDISIPNTENLKQKHFDKIQKYLPLADEIKEMWHQSKVTIVPIILSSTGVIPKNLHK

SEQ ID NO: 24043 - protein, 1315 aa, Chiomara georgina
MNAMRLRSGFRIPQASTGANRNGESRPEPSSSGSPTYSGGDTVSQASAQLSTVADHNTALAQSLPSTPTSSLESLFESPPSSPRSYEVASHNSSRSTTVSPRSDVIQPRQKDKLTKRHRTNAQHHPTYDVSPATCSTEENCNNSQPQTNTSRPSHPTRSVLQDMKPATTLAGRDRQRMKWTDEVNRTLLRCYYIATDLERNLTGYRPQLRKIFIDNYPELYFMTEQRLSDQIRVIYRNNRIPAAEREEIKQDLGTHNSYDTFNSSTLARHTPDNTIVGSDYREPTLIKPPTTEISITYPVGNENQEKESRKNDELNDYDKLERAFSENLLKFKRSDPVSRPYIGKLENRFNFKKIVNNLNNIIKEYLTKNNITTLEEIHEIIYCAALTAVSFNKKESEHINKDNRENGDRKKPAWQKRLEKRISKLRKEIGQHTQYLRGNLSKKKERKVNPTGKQQQEIVDQIDSLKQKLQALAKRLKRYQKTQQRFRQNKQFEKNQKTVYKNFNLQPTISQPPDIQEVQNYWTNIWSNPINHSLHPSWISSEEKDLVELGPMLHFKIDVQDVRMASSKLLNWKAPGPDKIQNFWLKHLTSTHKIITDIFNSLVESPESMPYFLTQGVTYLKPKDTDASNPANYRPITCLPTLYKLLTSIIANKINRHITQNNIIYEEQKGCRKGSQGCKEQLVIDSEIHSHVKQKHQNLYYAYIDYQKAFDSIPHSWLVYVLELYKIDTKLVNFLKHTMTKWTTTLNITIDQKCLKTSKINISRGIFQGDSLSPLWFCLALNPLSKLLNNSGHGYMIDKLNKIKISHLLYMDDIKLFASTKQELHDLLKLTEDFSNNIRMDFGINKCKVNSIIKGCHKLTEPYNLTVSNKLINPMDYSDYYKYLGFQQNTSIEHTQTKQELTAQYKQRLIQIFKTQLSSRNKVKAVNTFAVPILTYSFGIIKWTDTDLDALNTLTRTTAYKHHIHHIHSAVERFTLKRKVGGRGFIDIKNLHYKQIHNLRSYFMLKAEDSLLHRAISNLTTSGTALQFKNKDYKPEIKIIKQEEKLDRWKEKSLHGKYRKDVEQEHIDKEGSFCWLTKGNIFAETEGFLVAIQDKIIKTKNYAKYILKDSKVTNDKCRLCNLANETIEHITGGCQVLSSKEYINRHNNVAKQIHQYLALKYNLVKEKHPYYKYTPKNVLENSIAKLYWDRDIITDKTINCNRPDLTLVLKSTKTTYLVDISIPNTENLKKKHFDKIQKYLPLAEEIKEMWHQDKVKIIPIILSSTGVIPKNLHTSIKELNLHNSIFIELQKSTILDTTAIVRRFLNLSTLVSES

SEQ ID NO: 24044 - protein, 1327 aa, Cephise aelius
MRLRSGYSLPQAGTGANRNGESRPEQSSSGSPTYSGGDTVSQTSAQCHTVAEQNHKSALVDSMCGNQVITAADRKPHSSASTSSLESLFESPPSTPCSYEEFHKYRSRSTSLSPMSDIIPSRGRNGQSIKRYTTKRLQKTSIRGAAQGTHAHVVSRTSEYANPTRSVLQVMRPTTTLAGRDRQRMKWTSEVNEQLLRCYYIATNLEKNLTGYRTLLREMFIESYPELHFITEQRLSDQIRVIHRNNRIPEAQREYIKKNVEAHINSMNTNVTCNISQKPSQATQLEQYSNPVTNAKTINNIIDTIHNTDVESTEPIIEQVAEEKNETSNLKKIFAENILKYKNSHPNLRPPIPKLQITYKTKKLINDLNSIIESYLNQNNVTTLEEIHEIIYSAALTAVTVNNRITKKQENSSSVQSNSKNLFKPAWERRLENKITKLRKEIGQYTQYLKGNLSEKKQQKVNPAKNENQNIVDSLDALKQKLQAVAKRLRRYRKTNLRYRQNKTFEANQKVIYRSFNPQQKIIHPPDIEEVQNYWENIWSNPINHTSNSSLIPTESGESVNIDPMPRVVIDIEDITIGTSKMLNWKAPGPDKIQNYWLKYLTATHKNIMDIFNNLIQVPKNVPDFLTQGITYLKPKDSDTSNPAKYRPITCLPTLYKLLTSIIANKIYSHVTQNKIILEQQKGCCKGSRGCKEQLIIDSEIHSQVKQKHRNLYYAYIDYQKAFDSVPHSWLIRILKLYKIDNSLITFLEHLMSKWATTLNITVENKSLMSSQIRIARGIFQGDSLSPLWFCLAINPLSQILNKSGYGYVIDRQNNIKLSHLLYMDDIKLYASTRQQLDNLLKLTESFSNDIKMKFGIEKCKINSIIKGRHKLTESYNLTMFGDTISSMEYNDYYKYLGYQQSSSIEHTKIKQDLTGQYKQRLNKIFATHLSARNKVKAVNTYAVPILTYSFGIVKWTDTDLEALNTLTRTTAYKHHIHHIHSAVERFTLRRKLGGRGFTDIKNLHYKQVENLRAYFLNKAEDSLLHKAITDMSTSGTALQFKDKDFKPESKIVKQDVKIENWKKKSLHGKYPLNIEQDYVDKEASNSWLTKGNIFAETEGFVIAIQDQIINTRNYSKHILKDSNVINDKCRLCNLTNETIDHITGGCKVLASKDYINRHNNVAKQIHQHIALKYKLVDNKVPYYKYSPKSVLENKTVKLYWDRDIITDRTINCNRPDLTLTLKTTKTTYLIDISIPNTENLKQKHSDKIQKYLPLADEIKEMWHQNTVKIVPIILSSTGVIPKTLHKSLRELQLRKSIFVELQKSTILDTTSIVRRFLNISMLSSNQ

SEQ ID NO: 24045 - protein, 1311 aa, Toxidia parvulus
MQNLQTNHKSRYNLRSLSKAQCTRSMRITSDEELNRRALVSHNATAERETVSSTPTSSLETLFESPASSPHSYEELDDNQSRSTSVSSMTDVVQPTIKTLRRRNHNNPNTYRRSTDVQVSSTCVHSGREATSSHINPTRSVLQDMRPATTLAGRDRQRMKWTKEVNQNLLRCYYIVTNLENNLTGYRTQLREKFIEYYPDLHFMTEQRLSDQIRVIHRNNRINAIEREIIKKNVETYINFSSSSNNLETPQRYSSTQLTTQPTQHHAGINNQIDTEVTNNESLVVVTGATQTTDMINTNTSIEKSANKVIDSVNLENIFKQNLINFKNSDPCLRPSIPKLQNTYKTKKLIDDLNFVIERHLLENNISTLEQIHEIIYSAALAAVSVNNKVTDHENNTRQSHTQKTKPAWEKRLEYRISKLRKDIGQHTQYLKGNLSQKKQFKINPTKKEEQDVRDRLDILKQKLQALAKRLRRYKKTSQRYWQNKIFERNQKSIYRSFNPQQKIVNAPNINEIHSFWKNIWSNPINHNTHPDWISIEENDSQNIKTMSQFKIELDDIKIATSKMLNWKAPGPDKIQNYWIKYFSATHNKIVEIFNVLIARPEQFPLFLTQGITYLKPKDSDTTNPAKYRPITCLPTLYKLLTSIVANKINAHIKQNNIIQEEQKGCCKGSRGCKEQLIIDAEIHNQVKQKHRNLYYAYIDYQKAFDSVPHSWLIHVLKLYKIDDTLINFLQHTMTKWTTNLSITIENNNIKSSPINIARGIFQGDSLSPIWFCLALNPLSKVLNNSGYGYIIDRSNKIKLSHLLYMDDIKLYASNRQQLNILLKLTESFSNDIKMEFGINKCKINSIIKGHHKLTEPYSLTSCNGTISSMEYKDYYKYLGYQQNTSIEHTKIKQDLLTQYKQRLNQIFKTHLSARNKVKAINTYAVPILTYSFGIIKWTDTDLESLNTLTRTTAYKHHIHHIHSAVERFTLARKLGGRGFIDIKNLHYKQLQNLRDYFLNKATHSSLHKAITEVTTSGTALQFRDKDFKPENKIVKQELKLENWRKKSLHGKYPHNIEQNHIDREASCRWLVKGNIFAETEGFIIAIQDQIIKTKNYAKHILKDSSIINDKCRLCNLSNETVDHITGGCKVLASKEYINRHNNVAKQIHQYLALKYKLVDNKVPYYKYLPKNVLENSKAKLYWDRDIITDKTINCNRPDITLTLKDSNSTYLIDISIPNTENLKQKHFDKIQKYLPLADEMKEMWHQDTVRIIPIILSSTGVIPKNLQTSLTELQLRGSIATEIQRSAVLDTASIVRRFLNLSSLISDFAS

SEQ ID NO: 24046 - protein, 1265 aa, Drephalys kidonoi
MKMSNPFNNKRYNLRSLTTAKRKNSMQGTGREKQNRLAYTKRSSTSTSSLESLFQSTASSPRSYEETSRYTSRSTTLSPMSDVQPIPEGHTKGTSRYANTTSSVLQAMRPATTLAGRERQRMKWTNEVNYQLLRCYYIVSDLERNLTCYRSQLRKKFLEYFPELHFLTEQRLSDQIRVIHRNNRISESQRAQLKGNVETHLNLNSNNIVNSDTLHSLPLTHSPQSQRHILQNSAIGTNTETIDPLTPSQDRNTMRTEQIIETNKQLTLENTFKENLIKYKNSDPVLRPSIPKLKIKYINRKFIQNLNNIIEKYLTENSVTTLEEIHEIIYCAALTLVTVTNKIPKNDNTKKQANTPKNTIPAWERRLENRIIKLRKEIGQHTQYLRGNLSQKKQSKLNPKKIDKQEIRDRLDTLKQKLQALAKRLRRYRKTNQRYKQNKLFETNQKLLYRSFSPQHKITHPSDLQAAQNYWESIWSNPITHTANPTWIEEEEIKHIDPMPPLTIDLEDIKTATSKMLNWKAPGSDKIQNFWIKYITATHTHIVDIFNSLIQQPENVPHFLTQGVTYLKPKDSDTSNPANYRPITCLPTLYKLLTSIIANKINGHIIQNNIIREEQKGCRKGSRGCKEQLVIDTEIHNQVKQKHRNLYFAYIDYQKAFDSVPHSWLIQTLKHYRIDESLVNFLQHTMTKWSTVLNITAENKCLKSSPISISRGIFQGDSLSPIWFCPTLNPLSRILNNTGHGYIIDRPNKVKLSHLLYMDDIKLYALTRHQLNQLLRVTESFSNDIRMEFGIKKCKINSIIKGRHKLTEPYNLSHSRININPMNFNEYYKYLGYEQNIAIEHTKIKQNLTEQYTQRLNKIFKTQLSARNKVKAVNTYAVPILTYSFGIIKWTDTDLDSLNILTRTSAYKHHIHHIHSAVERFTLNRKLGGRGFIDIKNLHYKQIKNLRTYFINKAIDSSLHKAITDLTTSGTPLNFKDKDFKPENKIVKQDHKIENWKRKSLHGKYRNNIDQEHIDKEGSFCWLTKGNIFAETEGFIIAIQDQIIKTRNYAKHILKDSNVTNDKCRLCDLTFETIDHITGGCKVLAIKEYINRHNNVARQIHQHLALKYKLLENKVPYYKYLPKNVLENNIAKLYWDRDIITDKTINCNRPDLTLTLKDTKTTYLIDISIPNTENLKQKHLEKIQKYLSLADEIKEMWHQNSVRIIPVVLSSTGVIPQELHKSIKELQLRRYIFVELQKSTILDTCAIVRRFFNITSTSEPPESEN

SEQ ID NO: 24047 - protein, 1191 aa, Helias cama
MSDVVRTQAKQKRNKLTKTTYSQSTANGSEVHVNTNATSTQTNPTRSVLQDMKPATTLAGLNRQRLLRCYYIITNSERNLTGYRPQLHKMFIEHYPELDFLTEQRLSDQIRVIFRNNRIPAAERLLMKQELENQNISEFNNCDSLEPIPIEDERQTQHTLAPVDHSNMIPISESVEDISETARPTHMLNTQQTTDFTSKSKTDDYITLEKLFYENLEKFQNTDPSARPFIKKFQVTYNSKKMIQKLNNILDEHLTKNNITTLTEIHEIIYCAATTLTSFLNRKSTGESTEKPPIARNSNKPAWERRLQNRILKLRKEIGQYTQYLRGNLSQRKQKKVNPTLDNDQGVLEKLDSLKQRLQALAKRLRRYQKGNKRYKQNEVFETNQKVIYRNFNPQQRVINSPNSQEIENYWSNIWSNPVDHDANLSWISLEEKAVEQIGTMAEFKIDIQDVRIATRKTLNWKAPGPDKIQNFWLKYLTATHNTITSIFNSIVQNPHSIPPFFTQGITYLKPKDTDNSNPANFRPITCLPTLYKLLTSIISNKINTHILNNNIINEAQKGCRTGSRGCKEQLVIDTEVHANVKQKHRNLYYAYIDYQKAFDSVPHSWLVRVLKLYKIDSNLINFLQNTMTKWSTILHITTDNKPIETSPISITRGIFQGDSLSPLWFCLALNPLSKIIDNSGYGYLIDKQNNIKISHLFYMGDIKLYASNRQHLTDLLKLTESFSNNIKMNFGIKKCKINSIIKGSYKLTEPHNLTLAQETITPLDYNEYYKYLGFNQSTSIEHTKIKQDLITQYKHRLNQIFKTYLSARNKVKAVNTYAVPILTYSFGIIKWTDTDLDALNTLTRTTAYKHHIHHIHSAVERFTLKRKLGGRGFIDIKNLHYGQVENLRTYFLNKSKDSSLHRAITNLPTSGTSLQFRNKDFRPENKIVKDDDKIENWKKKSLHGKYRINIDQNHIDKEGSCYWLTKGNIFAETEGFMIAIQDQIIKTRNYAKHILKDKNVINDKCRLCSLSNETVDHITGGCKVLSGKEYINRHNNVAKQIHQYIALKYKLIKNKVPYYRYIPKNVLENNIVKLYWDRDIVTDKTINCNRPDITLTIKNTKTTYLIDISIPNTENLKQKHFDKIQKYLPLADEIKEMWHQDTARIIPIILSSTGVIPKKLYISLKELHLRESIFIELQKSVILDTAAIVF

SEQ ID NO: 24048 - protein, 1205 aa, Gorgythion begga
MQPKPKKKPIKRRTKNADPTFAPASSSTQQYYNSSQPNTSRPSNPTRSVLHDMKPSTTLAGRDRQRMKWTDEVNQTLLRCYYIATDLERNLTGYRPQLRKMFIDYYPELQFITEQRLSDQIRVIHRNNRIPVAKREQIKQNLETNNSLDTFNSLTLIQPVFDNINEEANYNEPTSLEPSTTNNLPEVLIMQPTETPETRNEDELNDYDKLKRAFRENLLKFKTSDPATRPYIKKLENRFNFKKNIVQKLNNIVKEHLTKNNVTTLEEIHEIIYCAASTAVSFGKIESEPTTQNNQENKDKKKPAWQKRLEKRISQLRKQIGQNTQYLRGNLSKKKERKVNPTGKQEQEIVDRIDSLKQKLQALAKRLKRYKKTQQKYTQNKLFEKNQKMVYKNFNPQPTISQPPDIQEVQKYWSDIWSNSINHSTHSSWMSSEENDLQHLEPMQNFKIDVQDIKTATSKLFNWKAPGPDKIQNFWLKYLTSTHKTITDIFNSLIELPNSTPHFLTQGVTYLKPKDDDTSNPANYRPITCLPTLYKLLTSIIANKINTHITQNNIIYEEQKGCRKGSQGCKEQLVIDSEIHSHVKQKHRNLYYAYIDYQKAFDSIPHSWLVYVLELYKIDSKLINFLKHTMTQWSTTLNITIDQKSLKTSKINISRGIFQGDSLSPLWFCLALNPLSKILNNSGHGYIIDKLNQIKISHLLYMDDIKLFASTKQQLHDLLKLTEDFSNDIRMNFGIKKCRINSIVKGKHKLTEPYNLTESNKLIDPMDYSEYYKYLGFRQNTSIEHTQIKQDLTAQYKQRLIQIFKTQLSSRNKVKAVNTYAVPILTYSFGIIKWTDTDLDTLNTLTRTTAYRHHIHHIHSAVERFTLKRKIGGRGFIDLKNLHYKQVANLRSYFILKSKDSLIHRAISELTTSGTALQFKNNEFNPESKIIKDIEKIDRWKEKSLHGKYRNYLEQEHIDREGSFCWLTKGNIFAETEGFIVAIQDKIIKTRNYAKYILKDSKVTNDKCRLCNLANETIEHITGGCQVLSSKEYINRHNNVAKQIHQYLALKYSLVKEKQPYYKYTPKNVLENNVAKLYWDRDIITDKTINCNRPDLTLVLKSTKTTYLVDISIPNTENLKKKHFDKIQKYLPLAEEIKEMWHQDTVRIIPIILSSTGVIPKNLHTSIKELNLHKSLFIELQKSTILDTTAIVRRFLNLSVLVSET

SEQ ID NO: 24049 - protein, 1143 aa, Heliopetes ericetorum
MKWTNEVNQQLLRCYYIVTNLERNLTSYRPQLRVMFIECYPEFDFMTEQRLSDQIRVIHRNNRIPVTERAQIKRSVEDYLLNTRNISNDTEGPLPFQSTPSLENLTSLPNKLTEEALQNTSSNITTTYNTIVTENLIEIQGKKDNIIELENSFKQNFIKYKNIDPALRPNIPKLIINYNTRQLISNLNNIIAKHITEYNIKTLEEIHDIIYSAALTAVTLHNTAPLEKETFTHKTRKPAWEKRLEKRISKLRKEIGQHSQYLKGNMSRKKQLKINPTQKEEQEIIDKLDALKQRLQALSKRLRRYKKTNLRYKQNKLFETNQRVVYRNFNIQQKLTQTPNLTEVQNYWSNIWSIPVNHDQNPDWLSLEELQIENIEPMPQFKIELEDIRAAIRKTLNWKAPGPDKIQNYWLKYFTATHNTIVNIFNDLIEKPESTPSFFTQGITYLQPKVADTSDPANFRPITCLSTLYKLLTSIIANKINTHITLNNIIPEEQKGCRKGSKGCKEQLVIDTEIHNQAKQKHRNLYYAYIDYQKAFDSVPHSWLIHILRLYKIDSNLIFFLQHTMSNWSTTLQITAEHKCLKTSPIRISRGIFQGDSLSPLWFCLAINPLSRILNNTGHGYIIDRSNKISLSHLLYMDDIKLYASTRQQLNILLELTESFSNDIRMDFGINKCKINSITKGKHQLIEPYNLALRLETINPLDYNDYYKYLGYQQNTSLDHTKIKQQLTTEYKHRLNLIFKTQLSARNKVKAVNTYAVPVLTYSFGIIKWTDTDLDALNTLTRTTAYKHQMHHIHSAVERFSLKRKEGGRGYIDIRNLHYNQIENLRLYFLNKSIESSLHKAITDLPTSGTPLQFKDKNFKPETKIVKQSDKIESWKKKSLHGKYRNNIDQEHIDTEASSCWLTKGNIFAETEGFIIAIQDKVVKTRNYAKYILKDNSIKDDRCRLCKLTHETIDHITGGCKILAGKEYINRHNNVAKQIHQYLAIMYNLIDSKVPYYKYTPKNVLENNKVKLYWDRDIITDKTINCNRPDITLTIKNIKTTFLIDISVPNTENIKQKYLDKIHKYLPLVDEIKDMWHQDNVRIIPIILSSTGVIPKNLHASLKELKLRKSIFAELQKSVVLDTSAIVRRFLSFSSVLSEPNDI

SEQ ID NO: 24050 - protein, 1298 aa, Epargyreus clarus
MKMQKQNQNTNNSYRYNLRSLSRVQHTQNIQNSGNEELGRRASTCLNQEDNITDCQTRSSTPTTSVESLFESPASTPRSYEKSRSSTTSPMSDVSQPTSRNERTLTNTNTKSKSRSKAQEPQRHIENRPTSRQTNPIRSVLQDMRPTTTLAGRNRQRMKWTNEVNHQLLRCYYIVTDLETNITGYRTQLREKFIEHYPELHFISEQRLSDQIRVIHRNNRISVVDRDNIKKDVEAQINLINSNLPCHTPQSSLLTQTTHYEQVSNLLTEIETSSIDTEIIANTVTTNTEPRIETATIEETEESTLKNTFAENILKYKNSNPYLRPTIPKLQITYKTKKIISDLNNIIENYLIDNNITKLEEIHEVIYSAAIAAVTVNNKVTKESENIKKQHDKLKLYKPAWERRLENRILKLRKEIGQQTQYLKGNLSQRKQSKINSGKTDDQEVVDRLDTLKQKLQALAKRLRRYRKTNQRYKQNKTFEANQKQIYRSFNPQQKIIQSPDIKEIQNYWEKIWSNPVGHASNISWMEDTELESIEPMPQFIIDKEDIKIATNKMFNWKAPGPDKIQNYWLKYLTATHKTIVDIFNGFIQDPSNIPDFLTRGVTYLKPKDIDTSNPAKYRPITCLPTLYKLLTSIIANKINTHTTFNKIVQEEQKGCCKGSRGCKEQLIIDTEIHQQVKQKHRNLYYAYIDYQKAFDSVPHSWLIHVLKLYKIDNSLIRFLKHAMTKWTTTLNITIENKSLKSDPINISRGIFQGDSLSPLWFCLAINPLSKILNNSGHGYIIDRQVNIKLSHLLYMDDIKLYASTRQQLNNLLNLTESFSNDIKMNFGIEKCKINSIVKGHHKLTEPHKLTISNNTISSMEYKDYYKYLGFQQSTCIEHTKIKQELTELYKQRLNKIFKTFLSARNKVKAVNTYAVPILTYSFGIVKWSETDLEALNTLTRTTAYKHHIHHIHSSVERFTLKRKLGGRGFIDIKNLHYKQIENLRTYFLTKAKDSLLHKAITDIPTSGTPLQFKDKKFKPENKIVKQEVKIENWKKKSLHGKHPHNIELEHIDREASNCWLMKGNIFAETEGFIIAIQDQIIKTRNYSKHILKDSSIINDKCRLCNLTNETIDHITGGCKVLAGKDYINRHNNVAKQIHQYLALKYKLINDKVPYYKYSPKNVLENNAVKLYWDRDIITDKTINCNRPDITLTLKLTKTTYLIDISIPNTDNVKQKHFDKIQKYLSLADEIKEMWHQNIVRIVPIILSSTGIIPKNLHKSIRELDLRKSIFIELQKSTVLDTASIVRRFLNMSTLVSN

SEQ ID NO: 24051 - protein, 1244 aa, Apyrrothrix sp.
MPSMRIKDGPDLNRRALISRKQENATPIQIQTCSSTSTSSLDSHFESLGSTPRSYEDVNQYPPQSPSSSSMSDERPMLRKQPTIKRNTFKRSINLAKEQSAVHQETLNNAPILAYSTSRLSNPTRSVLQDMSPATTLAGRSRQRMKWTNEVNQQLLRCYYIATNLERNLTNYRSQLREKFIDYYPELHFMTEQRLSDQIRVIHRNNRIPAVERAQIRLNVEKYVNLNTNIDNSNTLQSLPLTCPTERKNTPIDSETVSFIPTIHTTETPQATNTINSEEIIEIKTKNEITKLENAFKENLTKYKNSDPMSRPSIPKLQITCNTTKYLKIVNTIIEQHLTRNIVTKLEEIHEIVYSAAITIVTLNNKKAKLEQTNAISKTTTSKPAWERRLENRISNLRKEIGQHTQYLRGNLSQKKHFRLNPTKKETQEIVDRLDTLKQKLQALAKRLRRYRKTNQRYKQNKLFEINQKLLYQQFNPKPKIISPPNLQEVESYWKNIWSNPINHTANPSWITIEDKKIQHIDPMPQFTINTEDIKFATSKMLNWKAPGSDKVQNYWLKYLTATHKTIADIFDTLIRHPENVPQFMTQGVTYLKPKDSETSNPANYRPITCLPTLYKLLTSVIANKVNTHITRNKIINEEQKGCRKGSRGCKEQLVIDTEIHNQVKQKHRNLYFAYIDYKKAFDSVPHSWLIHILKLYKIDDNLITFLQHTMTKWSTTLNIATEHKCLKSSPINISRGIFQGDTLSPIWFCLAINPLSTILNNTGHGYIIDRSNNIKLSHLLYMDDIKLYASTKEQLNSLLKFTEEFSNDIKMEFGIKKCKINSIIKGKHKLIDPYNLTLHQEKINCMDFNDYYKYLGYPQNVAIEHTKIKLNLTSHYKQRLNQIFRTQLSARNKVKAVNTYAVPILTYSFGIIKWTDTDLDALNILTRTTAYRNKLHHIHSAIERFTLNRKVGGRGFIDIKNLHYKQIQNLRTYFLNKAIDSSLHKAITELPTIGTPLHFKDKNFHPEHKIVKQGDKIETWKKKSLHGKYRCNIEQDHIDSNGSFYWLTKGNIFAETEGFIIAIQDKVIRTRNYAKHILKDVTVTNDKCRLCSQSNETVDHITGGCKVLAGKEYINRHNNVAKQIHQYLALRYKLIDTKTPYYKYSPKNVLENKTAKLYWDRDIITDRTINCNRPDITLTVKATKTTYLVDISIPNTENVKQKHFEKIQKYLPLAGEMKEMWHQDNIRIIPIILSLTGVIPNSH

SEQ ID NO: 24052 - protein, 1441 aa, Dalla cyprius
MRYEMVLTRSKILQAGTSNGESRPEPSSGSPSYSGVGIISHLSTQSQTVVGRTHHHNTRLGEELNRRTPSGSLEHATANHTEEDSTSNSSRSIIEPYSPSTASYIPSPVSSIDQNSRFTPTPTSSVAQEETFCPASTKAGKPRVRMRWNKDVNLFIMRTYYYISKLETDMTTQSKKLHELFSQRYPGINVTEQRVSDQRRTIVRNKLLTHEELNHIKEQARIKLQDNREISLTSTNEHLGNIPLETSSHISLENNTTIHNSTNPNRSVLQAMRPTTTLAGRDRQRMKWTPEVNKQVLRCYYIVTNLESNLTGYRPQLREKFIEFYPELDFITEQRLSDQLRVIQRNNMITATEREEIKKHVVTLINSHNSNASIDTSQSSTQTITQSTNNYQHINISLDIENTYVNTVLPLDTVTEITQNGNVQNTVRNKNPVPSEIFDPINLEKQFIENINHFKNSDPTSRPSIPKLQFSFNTKKLINDLNTIIQKHLMENNITTLEEIHEIIYSAALVAVTVSSTKIKHKNTEGQSDKPKRTKPAWEQRLENRISKLRKEIGQLTQYLNNNLSQKKKSKLNPTNEEKQDITDRLDKLKQKLQALAKRLRRYRKTNLRYRQNKMFENNQKLVYQSFNKPQNSRSSPHHPDISEIHSYWKNIWSQPIIHNSHPPWVSIEEKEAQNIHNMTQFKIELDDIKTAIRKMLNWKAPGPDKIQNYWIKYFTSTHTTIVDLFNSLILTPEKLPLFLTKGTTYLKPKDIDTSDPAKYRPITCLPTLYKLLTSIIANRINKHVILNNIIQEEQKGCCKGSRGCKEQLVIDTEIHSQVKQKHRNLYVAYIDYKKAFDSVPHSWLIHVLKLYKIDYNLINFLQHAMNKWSTTLNITIENKCIKSSLIDITRGIFQGDSLSPLWFCLAINPLSNILNNSGYGYNIDKVNKVKLSHLLYMDDIKLYSSSRQELNSLLKLTESFSNDIKMEFGINKCKINSIVKGKHNITDPYNLTICNDTISAMEYKEYYKYLGYHQNTSIEHTKIKKDLTTQYTNRLNQIFKTYLSARNKVKAVNTYAVPILTYSFGIIKWTDTDLEALNTLTRTTAYKHQIHHIHSAVERFTLKRKLGGRGFIDIKNLHYKQIENLRNYFLNKAQDSSLHKAIVDLTTSGTALQLRQKDFKPEQKIVTQETKLQNWKKKSLHGKYPHNIEQDHVDRESSCSWLMKGNIFAETEGFIVAIQDKIIKTRNYSKHILKDKNITNDKCRLCNLSNETIEHITGGCKILASKEYINRHNNVAKQIHQYLALKYSLINNKLPYYKYQPKNVLENNKAKLYWDRDIITDKTIICNRPDITLTLKNTKTTYLIDISIPNTENLKQKHFDKIQKYLPLADEMKEMWHQDTVRTIPIILSATGVIPKNLHTSLKELQLRKSIFTELQKSAILDTSSIVRRFLNLSPLVTNS

SEQ ID NO: 24053 - protein, 1110 aa, Chiomara georgina
MKPATTLAGRDRQRMKWTDEINRTLLRCYYIATNLERNLTGYRPQLRKLFTDYYPELYFMTEQRLSDQIRVIHRNNRIPAAEREVIKQNLQINDSHDTFHSLTAIQVISENTNIVINNSEPTLLETSRGNNATEILTTNPTINENVEKELRDEHEPTDYDKLERAFRENLLKFKNSDPTTRPYIKKLENRFNFKKIIENLNKIVQEYLAKNNVTTLEEIHEIIYCAASTAVSFNNRKEANTNKDNQENNDKKKPAWQKRLEKRISKLRKHIGQNTQYLRGNLSKKKEKKLNPTGKQEQEIVDHIDSLKQKLQALAKRLKRYQKTQQRYRQNKLFERNQKIVYQNFKEQPTILQPPDIQEIQKYWTGIWSNPINHSLRPSWISTEEKDLQHLGPMQHFKIDIQDIRTASSKLLNWKAPGPDKIHNYWLKYLTATHKTITAIFNSLVASPENIPRFLTQGVTYLKPKDTDTSNPANYRPITCLPTLYKLLTSIIANKINTHITQNNIIYEEQKGCRKGSQGCKEQLVIDSEIHSHVKQKHRNLYYAYIDYQKAFDSIPHSWLVYVLELYKIDEKLINFLKHTMTKWSTTLNITIGKTCLKTSNIDISRGIFQGDSLSPLWFCLALNPLSKILNNSGHGYIIDKLNQTKISHLLYMDDIKLYASTKQQLHDLLKLTEEFSNDIKMNFGIKKCKLNSIIKGNHKLTEPYNLTVSNDLINPMDYNEYYKYLGFQQNTSIEHTQIKQNLTVQYKQRLTQIFKTQLSSRNKVKAVNTYAVPILTYSFGIIKWTDTDLDTLNTLTRTTAYKHHIHHIHSAVERFTLKRKIGGRGFIDIKNLHYKQVESLRSYFITKAKDSSLHKAISELTTSGTALQFKNKDFDPENKIMKDKEKLDRWKGKSLHGKYRNEIEQEHIDKEGSFCWLTKGNIFAETEGFIVAIQDKIIKTRNYAKYILKDSKVTNDKCRLCNLANETIEHITGGCQVLSSKEYINRHNNVAKQIHQYLALKYNLIKEKHPYYKYTPKNVLENNIAKLYWDRDIITDKTINCNRPDLTLVLKNTKTTYLVDISIPNTENLKKKHFDKIQKYLPLAEEIKEMWRQDTVRIIPIILSSTGVT

SEQ ID NO: 24054 - protein, 1130 aa, Lobotractus valeriana
MRPTTTLAGRDRQRMKWTNEVNHQLLRCYYVVTNLESNLSGYRTQLREKFIECYPELNFVTEQRLSDQIRVIHRNNRISAVDRENIKKNVEANINSTNNNISYHTTQSTLPIQITQYKQGSNLLTETTSIDTEITHNTGIINSEPRIENETMEVNDTLKLKNTFTENILKFKSVHPTLRPAIPKLQMTYKTVKLINDLNNIIEIYLTENNIATLEEIHIIIYCAALTAVTINNKVIKHHRNLKEQDDKQKIYKPAWERRLENRISELRKEIGQYTQYLKGNLSQKKQSKMNLRKTEEQDIVDRLDALKQKLQALAKRLRRYRKTNQRYKQNKTFESNQKLVYRSFNPQQKIIHPPDIKEVQKYWEKIWSNPVDHTTNSSWIEQTTLDNIEVMPKFVIDIEDIKIATSKLFNWKSPGPDKIQNYWLKYLTATHKTIVEIFNALISEPGNIPDFLTQGITYLKPKDVDTSNPAKYRPITCLPTIYKLLTSIIANKITIHTTQNIIIQEEQKGCCKGSRGCKEQLIIDTEIHNQVKKNHRNLYFAYIDYQKAFDSVPHSWLIHVLKLYKIDISLINFLNHAMTKWSTTLNITIDNKSLKSDSINIARGIFQGDSLSPLWFCLAINPLSKILNNSGHGYTIDRQLNTKISHLLYMDDIKLYASTRQQLNILLQLTESFSNDIKMDFGIEKCKINSIIKGRHKLAEPYNLTCFSNIISPMEYKDYYKYLGYQQNTSIEHTKIKQDLTIQYKHRLNKIFTTHLSARNKVKAINTYAIPILTYSFGIVKWTDTDLEALNTLTRTTAYKHHIHHIHSAVERFTLKRKLGGRGFIDIKNLHYKQVKDLRTYFLNKAKDSLIHKAITNITTSGTPLQFQDKDYKPENKIVKQEVKIENWKKKSLHGKYRNNIEQDHIDTEASNYWLMKGNIFAETEGFIIAIQDQIIKTRNYSKHILKDSSIINDKCRLCHLTNETIDHITGGCKVLAGKEYINRHNNVAKQIHQYLALKYKLINDKVPYYKYAPKNVLENHAVKLYWDRDIITDRTINCNRPDLTLTLKTTKTTFLIDISIPNTENLKQKHFEKMQKYLPLAEEIKEMWHQNTVRIVPLILSSTGIIPKSLHTSLRELELRKSIFIELQ

SEQ ID NO: 24055 - protein, 1207 aa, Myscelus amystis
MKMSNPNQNKRYNLRSLSRVQNAMSTPTTHSEVLNRRALICQNLGKTTAEPTQTVSPSNTSSLESLFESPTSSPRSYEESDQHQSRSTTLSPMSDVEATPKKRFISNRNTSNRLVNLHKQKTIVEQEAQNNVESHNRSRLRQTNPTRSVLQAMKPTTTLAGRDRQRMKWTNEVNHHLLRCYYIVTNLERNLTSYRPQLREKFIEHFPELHFITEQRLSDQIRVIHRNNRIPLDERTQIRLNVETYLNLSTNIDNTHTLPTLPLTDLSQCQKNISTFSESDTTPIEPSNHTPQNPQGQKTSSIEHIIETENEAEETIRLENIFQESLVKFKNSDPLSRPLIPKLQITYNTKKHINNLNNIIIKYLNENSVKTLEDIHEIIYCAALTLVTFNINKLAVDKTKKQYNKPNSSAPAWERRLENRIKKLRKEIGQHSQYLRENLSQKKQFKLNPLSKDKQEIIDKLDTLKQKLQALAKRLQRYRKAKQRYKQNKLFESNQKKLYQNLNPQQQIKNTPDLEKMQNYWQKIWSDPVNHTANPSWLSIEENETQQIDPMPVVTIDLEDIKTATNKMLNWKAPGPDKIQNYWLKYLTATHKTIADIFNNLIRYPENVPKFLTQGVTYLKPKDSDTSKPANYRPITCLPTLYKLLTSIIASKINTHITLNKIINEEQKGCRKGSRGCKEQLVIDTEIHNQVKKKHRNLFFAYIDYKKAFDSVPHSWLIHILKLYKIDVSIVNFLQHTMTKWSTILNITTEYKSLKSAPISILRGIFQGDSLSPIWFCLAINPLSKILNNTGHGYIIDIPNKIKLTHLLYMDDIKLYASTRRQLNDLLKLTETFSIDIKMEFGIDKCRINSIIKGKHKQTEPYNLNFHNKKICPMDPGDYYKYLGYKQNVAIDHTKIKQELTAQYKQRLNKIFKTQLSARNKVKAVNTYAVPILTYSFGIIKWTDTDLDALNILTRTTANKHNIHHIHSATERFTLKRQLGGRGFIDIKNLHYNQIENLRTYFVNKAIDSLLHKAIIDLPTSGTAIHFREDDFISKNKIVAEDNKIENWRKKSLHGKYRQSIEQDYVDKEGSFCWLTKGNIFAETEGFIVAIQDQIIKTRNYAKYILKDSNITNDKCRLCNAANETIDHITGGCKVLASKEYINRHNNVAKQIHQYLALKYNLIDNKVPYYKYSPKNVLENKAAKLYWDRDIITDKTINCNRPDLTLT

SEQ ID NO: 24056 - protein, 1111 aa, Cycloglypha thrasibulus
MVTTPVMGERNILKITIIIIIINNRIPAAERQLIKQQLESQNISEPDNSDPDTLISVLSTEDTQHTQNTLIPVDNSKDTLISEPVEDILEISTHMLDTDQTTESTTKNKTEEYINLEKLFHENLEKFKNTDPVSRPSIKKFKITYHSNKMIQNLNNILEEHLTKNNITTLTQIHEIIYCAAITLTSYLNKKSTDEDIEKQPITRNRSKPAWERRLQNRILKLRKEIGQYTQYLRGHLSQKKQKKINPAQQNDQDIVEKLDSLKQRLQALAKRLRRYQKGHQRYKQNKIFETNQKVIYRNFVPQQSTVNSPNAKEIENYWSNIWSNPVNHAENLPWISLEENSMEQIGPMPEFRIDIQDVRVATRKILNWKAPGPDKIQNFWLKHLTATHSTITVIFNSIVQNPHSIPHFLTQGITYLKPKDTDTSNPANFRPITCLPTLYKLLTSIISNKINAHILQNNIINEAQKGCRTGSRGCKEQLVIDTEVHANVKQKHRNLYYAYIDYQKAFDSVPHSWLVQVLKLYKIDTNLIAFLQHTMIKWSTTLHVTTANESIKTSPISISRGIFQGDSLSPLWFCLALNPLSKIIDNSGLGYLIDKPNNIKISHLFYMDDIKLYASTRQQLNDLLKLTESFSSDIKMNFGIKKCKINSIIKGSHKLTEPHNLTLAQETITPLNYNEYYKYLGFNQNTSIEHTKIKQDLITQYKHRLNQIFKTHLSARNKVKAVNTYAVPILTYSFGIIKWTDTDLDALNTLTRTTAYKHHIHHIHSAVERFTLKRKLGGRGFIDIKNLHYGQVENLRTYFLNKSKDSLLHRAITDLSTSGTSLQFRNKDYRPENKIVREDVKIENWKKKSLHGKYRMNIEQNHIDKEGSCYWLTKGNIFAETEGFMIAIQDQIIKTRNYAKHILKDNNVINDKCRLCNLSNETIDHITGGCKVLSSKEYINRHNNVAKQIHQYIALKYKLIVNKLPYYKYTPKNVLENNVVKLYWDRDIITDKTINCNRPDITLTIKNTKTTYLIDISIPNTENVKQKHFDKIQKYLPLADEIKEMWHQDTIRIIPIILSSTGVIPKNLYGSLKELHLRESIFIELQKSVILDTAAIVRRFLSLCSTVAKT

SEQ ID NO: 24057 - protein, 1259 aa, Urbanus sp.
MCPEQEDIAVDRQMRSSTSTPSLESLFESPASTPRSYETSRSNSISPMSDVTLPILNKERTFKRNTNKSSFLKSKSKVQDLQSHLHVENRPPSRQVNPTRSVLQDMRPTTTLAGRDRQRMKWTDEVNYQLLRCYYIVTNLENNLTGYRTQLREKFLEYYPELHIITEQRLSDQIRVIHRNNRISAVDRENIKKDVAASINLTNSNTSSQTPQSSSLTQTTQYEQGSNTQASNETSDIDTETLYNTDTINTEQTIVTETIQENDATLQNTFKENLLKFKNSKPDGRPYIPKLQFTYKTNKIINNLNNIIENYLTDNNIVTLEEIHEIIYSAATTAVTVNNKKTKERGNTEKQCYKEKTYKLAWEKRLENRILYLRKEIGQNTQYLKGNLSQRKQSKINPRKIQDQEIIDRLDTLKQKLQALAKRLRRYRKTNQRYKQNKIFEVNQKQIYQSFHPHQKISQPPDIEGIQKYWESIWSNPVNHVSNLSWIEDIELENIEAMPKFAIDLEDIKIATAKMLNWKAPGPDKIHNYWLKYFTATHKYIIDIFNGLIQDPSKIPDFLTQGITYLKPKDMDTANPAKYRPITCLPTLYKLLTSIIANKINIHTTQNKIVQEEQKGCCKGSRGCKEQLIIDTEVHNQVKQKHRNLYYAYIDYQKAFDSVPHSWLIHILKLYKIDDSLIKFLSNAMSKWSTTLNITVENKSLKTAPINIARGIFQGDSLSPLWFCLAINPLSKLLNNSGHGYIIDRQVNTKLSHLLYMDDIKLYASNRQQLNKLLNLTESFSSDIKMNFGIEKCKINSVVKGRHKLTEPYKLTNSNNMINPMEYKDYYKYLGFQQSTSIEHTKLKQDLTTRYKQRLNKIFGTYLSARNKVKAVNTYAVPILTYSFGIVKWTDTDLEALNTLTRTTAYKYHIHHIHSAVERFTLKRKLGGRGFIDIKNLHYKQVENLRTYFLNKSKDSLLHKAITEINTSGTPLQFKDEDFNPNNKIVKQDVKIQNWKKKSLHGKYPHNVEQEHIDSESSNYWLMKGNIFAETEGFIIAIQDQIIKTRNYAKHILKDSNIINDKCRLCNIANETIDHITGGCKVLAGKEYIMRHNNVAKQIHQYIALKHKLINDKVPYYKYSPKNVLENNAVKLYWDRDIITDKTINCNRPDITLTLKSTKTTYLIDISIPNTENLKQKHFDKIQKYLPLADEIKEMWHQSKVTIVPIILSSTGVIPKNLHTSIRELELRKSIFIELQKSTVLDTTSIVRRFLNISTLVSN

SEQ ID NO: 24058 - protein, 1316 aa, Eracon sarahburnsae
MKMNENPKNNKRYNLRSLSRVQNPTSMRNTGSEVLNRRALISQEHATAELLQICSSTLTSPAESLFESPASSPRSYEESNPYPSRSTTVSPVSDVETKQRKGHTIKRSRPKRLVNSVNKQLTPEEEQTSEQENSAQPHTNATSRHINPTRSVLQDMRPATTLAGRDRQRMKWTNEVNRQLLRCYYLVTYLETNLTNYRPQLREKFIEYFPELQFMTEQRLSDQIRVIHRNNRISAVERAEIKQFVKTELELNISTVQSLSLPHPTQQFQNLNTLTDDETSKEQVTNKALNVKETEILQATETINSKQIIEQTDRANETIKLEDMFRENLVKFKNSDPITRPSITKLQITYNTTKMIQNLNKIIEKYLTDNNVTTLEAIHEVIYCAALTLVTLTNKVPKYDNKTNQTTKSKNIKPAWERRLENRISSLRKEIGQHTQYLRGNLSHKKQSKLNPTNKGKEEIIDKLDTLKQKLQALAKRLKRYRKTNQRYKQNKLFENNEKVLYRNLNPQQNINSPPDIQEVQSYWESIWSNSINHNVNPTWISIEDREIQQINPMPKFTIDLEDINSATSKMLNWKAPGPDKIQNYWLKYLTSTHKTIANIFNTLIQHPENIPQFFIHGVTYLKPKDSDTSNPTNYRPITCLPTLYKLLTSIIANKINAHIIQNKIIEEEQKRCRKSSRGCKEQLVIDTEIHNQVKQKHRNLYFAYIDYQKAFDSVPHSWLIDILKRYKIDDNLVNFLQFAMTKWSTSLSITNEKKCLKSSPIKISRGIFQGDSLSPIWFCLAINPLSRILNNSGYGYVIDRTNRIKISHLLYMDDIKLFASTGQQLNDLLKLTESFSNDIKMQFGIKKCKINSIIKGSHKQAEPYNLTLSHDKISSMALNEYYKYLGYHQNVTIEHIKIKQDLTAQYKQRLNKIFKTNLSARNKVKAVNTYAVPILTYSFGIIKWTDTDLDALNTLTRTTAYKYRIHHIHSAVERFTLHRKLGGRGFIDIKNLHYKQIENLRTYFLNKALDSSLHKAITDLPTSGTPLNFKDKDFKPENKLVKENSKVESWKKKSLHGKFRNNIEQDHIDKEGSFKWLSKGNIFAETEGFVIAIQDQVIKTRNYAKHILKDANITNDKCRLCNLTNETIDHVTGGCKVLSSKEYLNRHNNVAKQIHQYLALKYKLIDNKVPYYKYSPKNVLENTIAKLYWDRDIITDRTINSNRPDLTLTLKNIKTTYLIDISIPNTENLKQKHMDKIQKYLPLADEIKEMWHQDVIRIIPIILSSTGVIPYNLHKSLKELQLRKSIFIELQKSTVLDTCAIVRRFLNVTTILPDP

SEQ ID NO: 24059 - protein, 1319 aa, Pholisora mejicanus
MRLRNRVIPQAGTREGESRPGPSSSGCPSYSGVGTASHTATQTSADAAVNTTPANTSSPRSTSSLESLFESPPSSPRSYEEASRNTSRSTTSSPMSDVVQSKKKCVKKVTIYNNSMSSHYYCTESPTEEEACSSTQTQIGITSRHTHPTSSVLQDMRPATTLAGRERQRMKWTNEVNQNLLRCYYIVTNCERNLTGYRTQLHRKFIEYYPDLHFITEQRLSDQIRVIHRNNRISAIERAQIKQCVEGHTNLNFKNDSTNTPYSLQSTNLPQTCLDTPTDCIPQNTETLPNITITSQENEHLDTDLPHTEYNIETQKETEDKLEIKNTFEENLKIFKNSDPASRPNLPRMHVTARTIKLIQYMNSIIDNYLGKNSVTTLEEIHEIIYSAATTVVKIVNKTSKYKNNKNNDESRRKKIKLAWEKRLERRISKLRKEIGQHTQYLKGNLSEKKQNKLNLTGQNNQDIIDSLDTLKQKLQALAKRLKRYRKTSQRFKENKLFNVNQKSVYQNFNPQPKCTQEPDMQEFENYWGNIWSNNIKHNCDTTWIAREEKESEQIKSMPKFTIDLEDIKLATSKMLNWKAPGPDKIQNYWLKYLTATHKTIADIFNVLVQNPDSVPKFFTHGITYLKPKTSDTSNPTNFRPITCLPTLYKMLTSIIANKINTHIVQNEIISEEQKGCRKGSRGCKEQLIIDTEIHAQVKQKHRNLFFAYIDYQKAFDSVPHSWLIQILKLYKIDDNLVNFLQHMMLKWSTTLNISVHNKYLQSSPINISRGIFQGDSLSPIWFCLALNPLSKTLNSTDHGYIIDPCEKTKISHLLYMDDIKLYASSRKQLDELLKLTELFSNDIKMEFGIKKCKINSIIKGRHKNTEPYNLTLHQDSINSMNYNDYYKYLGFQQSAYIEHTKIKQDLTLQYKQRLNKIFKTQLSARNKVKAVNTYAVPILTYSFGIIKWTDTDLESLNTITRTTANKHHIHHIHTAIERFTLHRKIGGRGFIDIKNLHYKQVDNLRTYFLNKATKSKLHKAITKLTTSGTSLQFKNKDFKPEDKIVTQEVKIENWRKKTIHGKYRKNIEQDHVDRDGSCYWLTKGNIFAETEGFVIAIQDQIVNTRNYAKYILKDTNVTNDKCRLCNLTSETIDHITGGCKVLANKEYINRHNNVAKQVHQYLALKYKLIESKLPYYKYLPKNVLENNIAKLYWDRDIITDKTINCNRPDLTLTLKNSKTTYLIDISVPNTENLKQKHLEKIQKYLPLAEEVKEMWHQDSVRIIPIIISSTGVIPKNLHKSLKELKLKKSIFIDLQKSAILDTTTIVRRFLNLSAAVSE

SEQ ID NO: 24060 - protein, 1299 aa, Telegonus cellus
MKMQNSNTNNSYRYNLRSLSRVQRTQNIRDNEHEEVSRQASICLEQEDTAVDHQIRSSTSTTSLVSLFESPVSTPRSYEKSRSNTTSPISDVTLPILRKERTLKRNTTKPSLLKTKSKVQEPHLHIENRPSSRQVNPTRSVLQDMRPTTTLAGRDRQRMKWTNEVNHQLLRCYYIVTNLENNLTGYRTQLREKFLEYYPELHIITEQRLSDQIRVIHRNNRISAVDRQNIKKDVAALISLTNSNVSGQTPQSSLLTQATQYEQASNLQTDNETSGIDTETIYNTDTINTESTIETVTVEENDSLTLVNTFKENILKFKNLKPDVRPTIPKLQFTYKTNKIINDLNNIIENYLNDNNIVTLEEIHEIIYSAAVTAVTVNNKKTKEHGNVEKRCNKETMYKPAWERRLENRIFNLRREIGQNTQYLKGNLSQRKQSKINPKKINDQEIVDRLDTLKQKLQALAKRLRRYRKTNQRYKQNKTFEVNQKQVYRSFNPQQKITQPPDIEQIQKYWEKIWSNPVNHASNLSWIEDNDLENIESMPQFVIDIEDIKIATAKMLNWKAPGPDKIQNYWLKYFTATHKNIVDIFNGLIQDPSNIPNFLTQGITYLKPKDMDTSNPAKYRPITCLPTLYKLLTSIIANKINTHTTLNKIVQEEQKGCCKGSRGCKEQLIIDTEIHNQVKQKHRNLYYAYIDYQKAFDSVPHSWLIHVLKLYKIDDTLIRFISNAMTKWTTTLNITIENKSLKTVPIHIARGIFQGDSLSPLWFCLAINPLSKILNNSGHGYIIDRQVNTKLSHLLYMDDIKLYASNRQQLNKLLKLTESFSNDIKMDFGIEKCKINSIVKGRHKRIEPYKLTTSKNIISSMEYKDFYKYLGFQQSTSIEHTKLKQDLTAQYKQRLNKIFTTYLSARNKVKAVNTYAVPILTYSFGIVKWTDTDLEALNTVTRTTAYKHHIHHIHSAVERFTLKRKLGGRGFIDIKNLHYIQVENLRTYFLNKAKDSLVHKAITDINTSGTPLQFKDKDFNPVNKIVKQDVKIQNWKKKSLHGKYPHNIEQDHVDSESSNYWLMKGNIFAETEGFIIAIQDQIIKTRNYAKHILKDSNIINDRCRLCNLTNETIDHITGGCKVLAGKEYIMRHNNVAKQIHQYLALKYKLINDKVPYYKYSPKNVLENNAVKLYWDRDIITDKTINCNRPDITLTLKLTKTTYLIDISIPNTENLKQKHFDKIQKYLPLADEIKEMWHQSKVTIVPIILSSTGVIPKNLHTSIRELDLRKSIFIELQKSTVLDTTSIVRRFLNISTLVSN

SEQ ID NO: 24061 - protein, 1322 aa, Ectomis asine
MRLRSANKLPQAGTGAKRDGESCPEQSSSGSPTYSGGDNVPQTSAQTTSLTESKRNIASIGKICKNVKHNAANHQARPSTPLSSSSVGSLFESPPSTPSLYEALSLRGSRSSTSSPLSDITLPTRKNVRNKNRNIPKRLLRKPTDAAVPTTNIMSSDINPTRSVLQDMRPTTTLAGRNRQRMKWTQEVNEQLLRCYYIVTNLETNLTGYRTQLREMFIEHFPELHFITEQRLSDQIRVIHRNNRISTVQRDHIKKNIPAHVIHANSNSRSSTSQILQSTQISQYKLLEPLADSETTNIVTKTVSTVGTVNTESTMEVEPLEVNDILFLKSLFEENILKFKNSDPILRPSIPKLQITFKTKTLINNINNIIKNFLVENNIVKIEEIHEVIYSAAITAVMVNNKVNIRNGTINDQPKKVFKPTWEIRLEKRISKLRKEIGQYTQYLNGNLSQKKKNKVNPTKLEDQNIIDRLDSLKQRLQALAKRLRRYRKTNQRFRENKMFERNQKNIYRSFNPQQKITRTPNIEQLQTYWENIWANPTNHKSHSSWISQEENNFENIETMLPFVIDLEDIKIATAKMLNWKAPGPDKIQNYWLKYLTATHKSIVDIFNDLIQEPSKIPNFLTQGITYLKPKDEDTSNPSKYRPITCLPTLYKLLTSIIANKINTHITKNNIIQEEQKGCCKGSRGCKEQLIIDTEIHNQVKQKHRNLYYAYIDYQKAFDSVPHSWLIYILKLYKIDNNLIRFLNHAMSKWSTTLNITTESETLRSSPINIARGIFQGDSLSPLWFCLAINPLSNLLNNSGHGYMIDRQSKIKLSHLLYIDDIKLYASTRQQLNSLLNITESFSNDIKMVFGIDKCKVNSIVKGRHKLTEPYNLTAYMDTISPMEYSDYYKYLGYQQNTCIGHSKIKQDLTSQYKQRVTKIFSTYLSARNKVKAINTYAVPILTYSFGIVKWTDTDLDALNTLTRSIAYKHHIHHIHSAVERFTLKRKLGGRGFIDIKNLHYKQVENLRTYFLSKAEDSLLHKAIIDINTSGTPLQFKDKDFKPENKIVKEEVKVENWKKKSLHGKYPLNVEKDHIDTEGSFHWLIKGNIFAETEGFLIAIQDQIIKTRNYSKHILKDNNVINDKCRLCNLANETIDHITGGCKVLAAREYINRHNNVAKQIHQYLALKYKLIDNKVPYYKYSPKNVLENNVAKLYWDRDIITDKTINCNRPDLVLTIKTTKTTYLIDISVPNTENLKQKHYDKIQKYQPLTEEIKEMWHQNTVRIIPIILSSTGVIPKNLHISLHELQLRKSIFVELQKSAVLDTASIVRKFLNLTALVSNQ

SEQ ID NO: 24062 - protein, 895 aa, Ridens mephitis
MDFVLPCILKPLTISTVCLRTESNGAYIVILVYKITYKTMKLINDLNNILETYITENKIVTLEEIHLIIYSAAVTAVTINNKVDKKQGNTKEQYDKQKTNKPAWERRLENRISNLRKDIGQYTQYLKGNLSKRKQSKINLGIMEEQEIIDRIDTLKQKLQALAKRLRRYRKTSQRYRQNKTFETNQKLVYQSFNPQQKIIHPPDFKEVKSYWEKIWSNPVNHTPNLSWIDETEIENIDVMPQFVIDIDDIKIATAKMLNWKAPGPDKIQNYWLKYFTATHKKIVDIFNALIREPSNIPDFLTQGITYLKPKDTDTSNPAKYRPITCLPTTYKLLTSVIANKINTHTTQNKIIQEEQKGCCKGSRGCKEQLIIDTEIHSQVKHKHRNLYFAYIDYQKAFDSVPHSWLIHVLKLYKIDNRLISFLNHAMTKWTTSLNITIANKSLKSTPINITRGIFQGDSLSPLWFCLAINPLSKILNNSGHGYIIDRQLNTKLSHLLYMDDIKLYASTRQQLNNLLKLTESFSNDIKMDFGIDKCKINSIVKGRHKLTEPYNLTIFPNKISPMEYKDYYKYLGYQQNTSIEHTKIKQDLTSQYKQRLNKIFTTHLSARNKVKAVNTYAVPILTYSFGIVKWTDTDLDALNTLTRTTAYKQHIHHIHSATERFTLKRKLGGRGFIDIKNLHYKQVQNLRTYFLNKAQDSLLHKAIINITTSGTPLHFKDNDFKPENKIIKEEVKIENWRKKCLHGKYRHNIEQDHIDSEASNFWLVKGNIFAETEGFIIAIQDQIIKTRNYSKYILKDSSIVNDKCRLCNLTKETIDHITGGCKVLASKEYINRHNNVAKQIHQYLALKYKLIKDKVPYYKYMPKNVLENSTVKLYWDRDIITDRTINCKVFIIKL

SEQ ID NO: 24063 - protein, 1288 aa, Pythonides amaryllis
MSNLNYYKRYNLRSTSNVENMRSLQITDAIEQKDHSNGSLSPSVSLFESPPSSPQSYEESNRNSSRFTTSSPVSDVQTTRRKGRNIKRKASEQLNNPPNKNPVNAITAQSSTDPTSEQAQPTRSVLQDMRPATTLAGRDRQRMKWTSEVNQQLLRCYYIVTNLETNLTNYRPQLREKFIEHFPELHFLTEQRLSDQIRVIHRNNRISVTERLDIKQNIEKSHNLNTNTNFTNMVSLTGTSQNNQPLNTAETPINQPTSIDISATDTSPITNTINNDDFELKQAENPGNKLKELENSFYENLIKFRNTDPVTRPNIPKLHINYNTRKLIQNLNKIIEKELEENNITKLEEIHAIIYCAATTLVAYNNQVPNYSNKKSQVSKSKRYKPGWEIRLENRIAILRKEIGQHTQYLNGNLSQKKQHKLNPTKKEKQFIVEKLDTLKQKLQALAKRLRRYRNTTLRHKQNKLFQTNQKLLYRNLNPQEKYTQELNIQDVQSYWEKIWSNPIQHTTHASWISSEDKETQHITPMPTLTIHLEDIKTATNKMLNWKAPGPDKIPNYYLKYFTSTHNTITNVFNDLIRQPQNIPHFFTQGVTYLKPKDNDTSNPANFRPITCLPTLYKLLTSIIANKINTHIMTNNIIQEEQKGCRKGSRGCKEQLVIDTEIHNQVKQKHRNLYFAYIDYQKAFDSVPHSWLVHILKIYKIDDRLVNFLQYAMTKWTTTLNVTTDHQSLKSSPINISRGIFQGDSLSPVWFCLAINPLSRMLNNTGHGYVIDRANKIKLSHLLYMDDIKLYASTRQQLNDLLRHTEIFSNDIKMEFGIKKCKINSIIKGKHKLTDSYNLAIGNKQIYSMNFNEYYKYLGYQQNTNIDHTKIKQDLTKQYKNRLHQIFKTHLSGRNKVKAVNTYAIPILTYSFGIIKWTDTDLDSLNILTRTTSHQHCIHHIHSATERFTLNRKLGGRGFIDIKNMHYKQIENLRTYFLNKAVDSQIHKAITDLPTSGTPLHFNNKYFKPESKITKQDIKIENWKKKSIHGKYRNNIDQEHVDKEGSFCWLTKGNIFAETEGFIIAIQDQIIKTRNYAKYILKDNNISNDKCRLCNLTNETIDHITGGCKVLASKEYINRHNNVAKQIHQYLALKYKLIDSKVPYYKYSPKNVLENKLVKLYWDRDIITDKTVHCNRPDLTLTLKQTKTTYLIDISIPNTENLKQKHFDKIQKYLPLADEMKAMWRQDVIKIIPIILSSTGVIPKNLHKSLQDLDLRKNIFVELQKSVVLDTSAIVRRFLNLSSSVTNI

SEQ ID NO: 24064 - protein, 1313 aa, Nicephellus nicephorus
MAPSGPIMKMKKQNPYINNNIRIDSYRYNLRSLARAQLVKSIRTTGNEEQSTATLVCCNQEDNVADRQTCLSSPTSSMDSLFESLASTPHSYERTDQHPSRSSTTSPMLNIVQRTSKNGRVIKPSTTKRLLNERRQSVVEDTLERIEDKMTPRQITPTRSVLQDMRPTTTLAGRDRQRMKWTNEVNQQLLRCYYIATNLEKNLTGYRTQLREKFIEYYPELHFITEQRLSDQIRVIHRNNRISVVERENIRKNVEAYINSANSNVSCDVLLQTQTTQCELSSNPWNGNEKNNIDTETVDCTATIINESRIEEAKPIEANYLLDLKTAFTENILKFKNTNPNLRPPIPKLQVTYNTKKLINDLNNIIETYLNENNITTLEEMHEIIYSAAITAVTINNKVKNKSENINELHKKPRNLKPAWEKRLENRITKLRKEIGQHTQYLKGNLSQKKQSKVNPSKKEKQEIIDRLDALKQKLQALAKRLRRYRKTNQRFRQNRTFETNQKSIYRSFNPQQKILHPPDISEVQTYWEKIWSNSVSHNSHSPWIPNVENELENIEIMPTFVVDIHDIKIATTKMFNWKAPGPDKVQNYWLKYLTATHKHLVDIFNALILIPANFPDFLTQGITYLKPKDIETCNPAKYRPITCLPTLYKLLTSMIANKINIHITQNKIIQEEQKGCCKGSRGCKEQLIIDTEIHSQVKQKHRNLYYAYIDYQKAFDSIPHSWLIHVLKLYKIDSSLISFLNHVITKWTTILNLTTENKSLKSPPINITRGIFQGDSLSPLWFCLAINPLSKILNNSGHGYIIDRQKITKLSHLLYMDDIKLYASTREQLNNLLKLTESFSTDIKMQFGIDKCKVNSIVKGKHKLTEPHTLSTLTDTISPLEYKDYYKYLGFKQNTSLEHTKIKQDLTTQYKQRLNKIFTTHLSARNKVKAVNTYAVPILTYSFGIIKWTDTDLEALNTLTRTTAYKYHIHHIHSAVERFTLKRKVGGRGFIDIKNLHYKQVDNLRVYFLNKAKDSLLHKAIINIPTSGTPLKFKDIDFIPEEKIVKEDVKIENWKKKSLHGKYPHNIEQDHVDSEASNYWLMKGNIFAETEGFIIAIQDQIIKTRNYSKHILKDSTIINDKCRLCNLTNETIDHITGGCKVLASKEYINRHNNVAKQIHQYLALKYKLIDAKLPYYKYSPKNVLENNTAKLYWDRDIITDKTINCNRPDLTLTLKATKITYLIDVSIPNTDNLKQKHFDKIQKYLPLADEIKEMWHQNSVRIIPIILSSTGVIPKNLHASIHELQLRKTIFVELQKSAVIDTTSIVRRFLNY

SEQ ID NO: 24065 - protein, 1293 aa, Codatractus alcaeus
MNMNNQNPNTNNSYRYNLRSLSRSQYNQNIQNSGYEALNRQTPRGLDQENIAADNQVTSSTSTTSLESLFESPVSSPRSYEETRSNTTSPMSDVTLPTLRNKRIIKRNAHKPSAKGTTQSAEQETHSKQTKPTRSVLQDMRPTTTLAGRDRRRMKWTNEVNHQLLRCYYIVTNLENNLTGYRTQLREKFIEQYPELHFITEQRLSDQIRVIHRNNRISAVDRENIKKNIKVNLNASYNNTSYHTSQSALPLQTIQYEQDSNLLNETTSMDTETTHNTVTINIEPRIGAVTIEVNEMAKLKNIFIENILKFKNVNPILKPAIPKLQITYKTKKIINDLNNIIENYLTENNIVTLEEIHEIIYSAALAAVTISNKVVKTENVKEQYDKQKHFKPAWERRLENRISKLRKEIGQHTQYLKGNLSQKKQSKMNLRKTGEQEIVDRLDTLKQKLQALAKRLRRYRKTSQRNRQNKTFETNQKMVYRSFNPQQKIIHPPDIKEVQEFWEKIWSKSVNHTTNSSWIEATELENIKEMPQFVIDMEDIKIAITKMLNWKAPGPDKIQNYWLKYLTATHKKIMNIFNALIQEPYKIPDFLTQGITYLIPKNTDTSNPANYRPITCLPTMYKLLTSIIANKINTHTTHNLIIQEEQKGCCKGSRGCKEQLIIDTEIHTQVKQKHRNLYFAYIDYQKAFDSVPHSWLIHVLKLYKIDNRLISFINHAMTKWVTTLNITTENTFLKTTPINIARGIFQGDSLSPLWFCLAINPLSKILNNSGHGYIIDRQRNTKLSHLLYMDDIKLYASTRQQLNNLLKLTEAFSNDIKMDFGIEKCKINSIIKGHHKLTEPFNLTISTNTISPMGYNDCYKYLGYHQNTSVEHTKIKQDLTTQYKQRLNKIFTTHLSARNKVKAVNTYAVPILTYSFGIIKWTDTDLDTLNTLTRTTAYKHHFHHIHSAVERFTLKRKLGGRGFIDIKNLHYKQIDNLRAYFLNKAKDSLLHKAIINIPTSGTPLQFKDKEFRSENKIVKDDVKIEKWKKKSLHGKYPHNIEQEHIDREASSYWLMKGNIFGETEGFMIAIQDQIIKTRNYSKHILKDSNITNDKCRLCNLTNETIDHITGGCKVLANKEYINRHNNVAKQIHQYLALKYKLINNKVPYYKYSPKNVLENNTAKLYWDRDIITDKTINCNRPDLTLTLKTTKITYLIDISVPNTENLKQKHFDKIQKYLSLADEIKEMWHQNTVKIIPIILSSTGVIPKNLHTSLRELDLRKSIVIEIQKSAVLDTTSIVRRFLNISALVTKTP

SEQ ID NO: 24066 - protein, 1314 aa, Mimia chiapaensis
MKMNNPNKNKRYNLRSLSRAQNPTSMRITDSEESNRRALTSQEHATAELLRTYSSTLTSPAESLFESPASSPRSYEELSRYPSRSTTVSPVSDVQPTLRKGHNIKRNGQKQLVNSANEQLTVRPEALNSMQSHTNAASGHINPTRSVLQDMRPATTLAGRDRQRMKWTNEVNQQLLRCYYITTQLETNLTSYRPQLREKFIEYFPELHFVTEQRLSDQIRVIHRNNRISVVERAQIKQNVKTEIELNISNLNTVPSLSLPYSTQCSQNLNIITDNESSKQQLTNEPSIIVETEISQAVEPVNSEQIIEAHNGASEATKLKDMFKEYLVKFKNSDPIMRPSITKLQITYNTTKLIQNLNKIIEEHLTENSITTLEEIHEIIYCAALTVVTLTNKVTKYDNLKKQTSKSSSMKPAWERRLENRISRLRKEIGQYTQYLRGNLSQKKQFTLNPTNKSKQEIVDKLDTLKQKLQALAKRLKRYRKTNQRYKQNKLFENNEKLLYRNFNPEQKPSNPPDLKEVQNYWESVWSSPENHNENPTWSNIEEKEIQQINPMPKFTIELEDIKSATSKMLNWKAPGPDKVQNYWLKYLTSTHKTIANIFNTVIRQPENIPHFFTHGITYLKPKDSDTSNPMNYRPITCLPTLYKLLTSIIASKVNTHIMQNKIIQEEQKGCRKGSRGCKEQLIIDTEIHNQVKQKHRNLYFAYIDYQKAFDSVPHSWLINILKIYKIDDRLINFLQFTMNKWSTTLNIANDHKCLNSSPIKISRGIFQGDSLSPIWFCLAINPLSRILNNSGHGYVIDRTNKIKISHLLYMDDIKLYASTRQQLNDLLKLTEYFSKDIKMQFGIKKCKINSIIKGNHKQTEPYNLTLSHDKISSMDSNEYYKYLGYHQNVTIEHTKIKRDLTTQYKQRLNNIFKTNLSARNKVKAVNTYAVPILTYSFGIIKWTDTDLDALNTLTRTTAYKYRIHHIHSAVERFTLSRKLGGRGFTDIKNLHYRQIENLRAYFLNKALDSSLHKAITDLTTSGTPLNFKDKDFKPENKLVKDNSKIESWKKKSLHGKYRNNIEQDHIDKEGSFHWLSKGKIFAETEGFIIAIQDQVIKTRNYAKHILKDVSITNDKCRLCNLTHETIDHITGGCKVLSSKEYINRHNNVAKQIHQYLALKYKLIDTKVPYYKYSPKNVLENNIAKLYWDRDIITDRTIHCNRPDLTLTLKNNKTTYLIDISIPNTENLKQKYIDKIQKYLPLADEMKEMWHQDTIRIIPIILSSTGVIPHNLHKSLKELQLRKSIFIELQKSAVLDTCATVRRFLNLSSTLPDS

SEQ ID NO: 24067 - protein, 1303 aa, Eburuncus unifasciata
MSIPINDKRYNLRSLSRNVITRSTQINESEELSRRAPTFQNPENTTKPPETHSSPCLSPAESLFDTPSSSPRSYENLSENGSRSSSLSPILAQPIPRKCREIKCRAPQRLTPPNNQVPATQDRALNTTQAQANIITGHTKPPRSVLLDMRPVTTLAGRDRQRMKWTNEVNQHLLRCYYIVTNLETNLTSYRQQLYKKFIEIYPELDFLTEQRLSDQIRVIHRNNRVPESERALIRKDIEKNTHLDTVILSSERNSSSSSQLTQFNQKTLRETEQIISQSLINVDLQEIEQLVNIEQTSPTEKIERDLENTFRDNLNKFKNSDPIHRPFIAKLQSTYNTRTLIQKLNNIINRHLKENNVTKLEEIHEIIYCAATTLVTHNNKAQNDINIKTLGKNEYKDNKKPKWERRIENKIAKLRKQIGQHTQYLKGNLSQKKYSKVNPTKKAEQDIVDQLDALKQKLQALAKRLKRYRKTNQRYKQNKLFETNQKLIYRSFNKQNKSTHKPDVEKIQSYWESIWSNSVEHTSNADWITIEEKELHQIDPMPQFKVDLEDIITATSKLLNWKAPGPDKIQNYYLKYLTSTHQTITNIFNNSILQPQSIPQFLTQGVTYLKPKDSDTLNPANLRPITCLPTLYKLFTSIIAHKVNTHITRNKIIEEEQKGCRKGSRGCKEQLVIDTEIHNQVRQKHRNIYFAYIDYQKAFDSVPHSWLIHILKLYKIDNKLVEFLQHIMSKWRTTLNINTDRNCVNTSPISISRGIFQGDSLSPIWFCLAINPLSRILNNTGHGYVIDRPNKIKLSHLLYMDDIKLYASTRQQLNELLKHTELFSNDIKMEFGVKKCKINSIIKGNHRLTEPYNLTDNNAQIKSMAFNEYYKYLGYPQNTAINHTKIKQDLTTQYKQRINNIFRTHLSGKNKVKAVNTYAVPILTYSFGIIKWTDTDLDALNTLTRTTAYKHHIHHIHSAVERFSLNRKIGGRGFIDIKNLHYKQIENLRTYFLNKALDSTLHKAITNITTSRTPLHFKDKKYTPLSKIVKEDIKISSWKEKALHGRFPRNIDEPHIDKEGSFSWLTKGNIFAETEGFIVAIQDQIIKTRNYAKHILKDSSVLSDKCRLCNISNETIDHITGGCKVLSSKEYVNRHNNVAKQIHQYLALKYKLLDSKVPYYKYSPKNVLENKIAKLYWDRDIITDKTINCNRPDLTLTIKNAKTTYLIDISIPNTDNLKQKHLEKIQKYLPLADEIKEMWHQNNIRIIPIILSSTGVIPHSLHKSIKELELRKSVFIELQKSTVLDTTAIVRRFLNFTSVDKT

SEQ ID NO: 24068 - protein, 1158 aa, Piruna pirus
MRPTTILAGRNRQRMKWTPEINQQVLRCYYIVTNLETNLTGYRPLLREKFIEYYPELDFITEQRLSDQLRVIQRNSMISTTERQEIKKSVSTILNSYPNNVSSDTSQQLVQPTSQPISNNQYDNSDTVNTAIETTQIENEHNTNISTQQTPCAILDSMNLEEQFIENLNKFKNSDPSLRPAIPKLKFTFDTKKLIKELNIIIEKYLTENNITSLGEIHEIIYSAALVAVTFSNSEIKYKNTKKQSDTPKRLKPTWEHRLESKIIKLRKEIGQLTQYIKNNLSQKKKTKLNPMNKDEQEIIDRLDKLKQKLQALAKRLRRYRKTNQRYRQNKMFENNQKLIYQSLNPQQNITSSQVQPDMKEIHTYWNNIWSHPINHNPHPSWVTIEEKESQSIDCMPQCQIDLDDIKIAINKMHNWKAPGPDKIQNYWIKYFTSTHLTIVDLFNSLILAPEKLPLFLTHGITYLKPKDVDSTNPAKYRPITCLPTLYKLLTSVITSKINKHIVQNNIIQEEQKGCCKGSRGCKEQLVIDTEVHSQVKQKHRNLYYAYIDYQKAFDSVPHSWLIHVLKLYKIDNTLINFLQHTMNNWSTTLNITIKNKSIKSLPINIARGIFQGDSLSPLWFCLAINPLSKILNNSGYGYNIDKVNNVKLSHLLYMDDIKLYSSTRQQLNYLLKLTESFSNDIKMEFGINKCKINSIVKGNHKLTEPYNLTISNDTIDAMEYKEYYKYLGYQQKTSIEHTNIKKDLTIQYSKRLNQIFKTYLSARNKVKAVNTYAVPILTYSFGIIKWTDTDLDALNTLTRTTAYKHHIHHIHSAVERFTLKRKLGGRGFIDIKNLHYKQIENLRSYFSNKAKESLLHKAIVNLDTSGTALRFKEKEFKPEHCIVKQETKLENWKKKSLHGKYPQNIEQNHIDKESSYSWLVKGNIFAETEGFIVAIQDKIIKTRNYSKHILKDKNIINDKCRLCNLSYETIEHITGGCKVLASKEYINRHNNVAKQIHQYLGLKYKLLNNKVPYYKYQPKNILENSTTKLYWDRDIITDKTINCNRPDITLTLKNSKTTYLIDISIPNTENLKQKHFEKIQKYLPLADEMKEMWHQDTVRIIPIILSATGVIPKNLHTSINELQLRKSIYTELQKSAVLDTSSIVRRFLNLSPLATNS

SEQ ID NO: 24069 - protein, 1316 aa, Heliopetes ericetorum
MRLRSRVIPQAGTREGESRPGPSGSGSPSYSGVGTASHLTVQPSTVTVNNQQIPSATSASAQRVRSSTSTTSLESLFESLPSSPRSYEDQSSRSSSSPISDVVQPRRTGRIFKRSTRNDLANSILSKPTAEQELRASTSIQCSATNKPTRSVLQDMRPATTLAGRDRQRMKWTNEVNQQLLRCYYIATNLETNLTGYRPQLREKFIQYFPELSFLNEQRLSDQIRVIYRNNRISAVERALIKQSVENNINNTNINHTSHVQETLQQTKPTSTELTPVESLNNMTQTPQIIDSTRINLGSETRNAENITNFEKLENNFNENLNKFKNSDPLLRPPIPKIQVTTRLRKTITELNKIIENYISKSRISTLEEVHEIIYCAAITLVTISKSKCSKNNREQTNTEPVRAFKRSRTKLAWEKRLEHRISNLRKEIGQYTQHLNGNLSKKKQTKLKLTQQNKQEAIDKLDALKQKLQALSKRLKRYRKTNERYKQNKLFESSQKLLYRNFTPQQKLTDSTLPNIQQVQSYWENIWSNPISHNENTSWIEIEHRNSEKIQPMPLFSISLEDIKIATGKLLNWKTPGPDKIHNYWLKYFTATHKIIAEIFNSLIKKPDNIPSFFTQGITYLKPKSSETSNPANYRPITCLPTLYKLLTSVIANKINAHLTFNNIIQEEQKGCRKGSRGCKEQLVIDTEIHNQVKQKHRNLFYAYIDYQKAFDSVPHSWLIYILKLYKIDDPLINFLQYIMSNWSTSLHITAEHACLKSSTIKITRGIFQGDSLSPIWFCLAINPLSRILNNTGYGYCIDRVSNIKISHLLYMDDIKLYASTREQLNILLKLTESFSNDIKMEFGINKCKVNCISKGTHKLAEPYHLTLSDKTISSMYYNDFYKYLGYQQSTGIDHTRIKQELTSQYKQRLNYIFRTHLSGRNKVKAVNTFAVPILTYSFGIIKWTETDLDALNILTRTTAYKHHLHHIHAAIERFTLQRKLGGRGFIDIKNLHYKQVDNIRTYFINKAKDSLLHKAITDLHTTGTSLNFKDKTFHPEHKIVKEDSKIGNWKKKTLHGKYINNIEQDHIDKNASFYWLSKGNIFAETEGFVIAIQDQVIKTRNYSKYILKDNNITNDRCRLCNLCNETIDHITGGCKILSCKEYINRHNNVAKQIHQNLALKYNLIDSKLPYYKYHPKNVLENSIVKLYWDRDIITDKTINCNRPDLTLTLKSSKTTYLIDISIPNTENLKQKYFEKIQKYLPLAEEIKEMWHQNSVRIIPIILSSTGVIPKNLHTSLTELEIQQHIIIELQKSVILDTSAIVRRFLNLSSLITNS

SEQ ID NO: 24070 - protein, 1319 aa, Pyrgus malvae
MRLRNREIPQVGTRKGESRPGPSGSGSPTYSGEGNASHLSAQHKAVAVKINQAIPPTAELTDSSAHTSSSLESLFESPASSPRSYEETSRYSARSTTVSPMSDDARPTLRKGRTVKRNTNNCPLERRCAHPAAQGETSPGIPPSSSATSRQNEPTRSVLLDMRPATTLAGRDRQRMKWTNEVNQQLLRCYYIVTNLERNLTSYRPQLRDKFIECYPELDFMTEQRLSDQIRVIHRNNRISATERAQIKQSIELYLSNTSNAAIHIEDDLPSQSIHDLENPNIIHNTITDEAPRNTSSNLTINNNPNMSEIHIEIQNKEDDIMKLEISLKENLIKYKNIDPALRPNIPKLILNYNTQKLISDINNVIEKHLAESNIETLEEIHDIIYCAALTTVTSLNTTSIEKEGLTYKKRKKPAWQKRLENRISKLRKEIGQHTQYLKGNLSQKKQFKINPTKKENQEIIDKLDALKQRLQALSKRLRRYKKTNLRYKQNKLFETNQKALYRNFNTRQNVTQTPDLTAIQNYWSNIWSTPVSHNENSAWLTIEEQETQNIEPMPKLKIELEDIRAATSKILNWKSPGPDKIQNYWLKHLTSTHITIAKIFNDLIQKPECTPRFLTQGITYLQPKAGDTSDPANFRPITCLPTLYKLLTSIIANKINTHIMLNKIILEEQKGCRKGSRGCKEQLVIDTEIHNHAKQKNRNLYYAYIDYQKAFDSVPHSWLVHILQLYKIDNSLILFLQHIMTNWSTTLQITAEDKCLKTSPINISRGIFQGDSLSPLWFCLAINPLSRILNNTGHGYTIDRSSKISLSHLLYMDDIKLYASTRHQLNILLELTETFSNDIRMEFGINKCKINSIIKGKHQLIEPYNLALRLEKINSLDYNDYYKYLGYQQKTSLDHTQIKQQLTTQYKHRLNLIFKTHLSARNKVKAVNTYAVPILTYSFGIIKWTDTDLDALNTLTRTTAYKHHTHHIHSAVERFSLKRKMGGRGYIDIKNLHYNQVENLRLYFLNKASDSLIHKAITDLSTSGTPLQFRDKNFKPDTKIVKIDDKIESWKKKKIHGKYRNNIDQEHIDTEASSCWLTKGNIFSETEGFIIAIQDQIIKTRNYAKHILKDNSIKDDRCRLCKLTHETIDHITGGCKVLASKEYINRHNNVAKQIHQYLAIMYKLIDSKVPYYKYTPKNVLENNKVKLYWDRDIITDKTINCNRPDLTLTIKDTKTTYLIDVSIPNTENLKQKHIDKIHKYLPLVDEIKDMWHQETVRIIPVILSSVGVIPKNLHASLKELKLRKSIYAELQKSVVLDTSAIVRRFLSFSSVLSEPIES

SEQ ID NO: 24071 - protein, 1326 aa, Pyrgus malvae
MRLRGRVIPQAGTREGESRPGPSGSGSPAYSGVGTASHLTAQSHAVVVNNPTPSSSTARQRQIGSSSPTSSMESLFESPASSVRSYEDPSLHSSRSTTLSPMSDAAPRKRRVIKRNTTKRMNNVMRNKVPEEQETLTSAPTESYNPTSEHDIPTRSVLQDMRPATTLAGRDRQRMKWTDEVNQKLLRCYYLATNLETNLTSYRPQLREKFIECFPELHFLTEQRLSDQVRVIHRNNRISAAERAKIRQDVEEHINNINNFRTITSTLSPLIPIQSNDNLITPHTSEQDENTELLNDAIEKSQNLIAISTEEIITTQFNVSENRNTTEFTKLESTFIDNLNKINDSNPILRPNIPKLQFRYNTRKYISDINSIVKKHLIENSVTTLEQIHNIIYCAAITLVTVNNKVHKTTNLENQETTYNRKKPAWEKRLEKRILKLRKEIGQLTQYLRGNLSEKKQIKLIPTNKTKQEVVDKLDEQKQKLQSLCKRLKRYKKTNQRYKQNKLFETNQKVIYRNFNPPQKLTQLPDIHTVQKYWEDIWSNPVNHTTHQPWITVEEKESERIEPMPEFTIDLEDIKTATSKMLNWKAPGPDKIQNYYLKYLTSTHETIADIFNSLIKNPDKVPKFFVQGVTYLKPKTSDTSHPANYRPITCLSTLYKLLTSIIANKINTHITVNKIIPEEQKGCQKGSRGCKEQLIIDTEIHNQIKQKHRNLYYAYIDYRKAFDSIPHSWLIHTLKMYKVEDSLVAFLHHIMSLWSTTLNITAERKCLLSTPIKISRGIFQGDSLSPLWFCLAINPLSKLLNNSGYGYTIDRTNKIQISHLLYMDDIKLYAATRQQLNSLLTITESFSADIKMEFGISKCKINSIVKGKHNLTEPYNLVLNNEKITSMEFSEYYKYLGFHQNIGIDHTKIKQELTTEYKYRLNQILKTHLSARNKVKAINSYAVAILTYSFGIIKWTDTDLDALNTLTRTTSYKHHIHHIHSAVERFSLKRKLGGRGFIDVKNLHYSQIENLRSYFLNKAKDSLIHKAITDLPTSGTPLQFKDKDYKPESKIVKEDTKIDNWRKKSLHGKYRNSIEQNYIDPEASFAWLTRGNIFAETEGFIIAIQDQVIKTRNYAKYILKDSNITNDKCRLCNLANETIDHIIGGCKVLSSKDYINRHNNVAKQIHQHLAFKYKLVDSKVPYYKYQPKNVLENNIAKLYWDRDIITDKTINCNRPDLSLTLKNTKTTYLIDISVPNTDNLKQKHFDKIQKYLPLADEIKEMWKQNTVRIIPVILSSTGVIPKNLHTSLKELQLPNAIFTELQKSTLLDTSAIVRRFLNFSLLVSNY

SEQ ID NO: 24072 - protein, 1422 aa, Piruna aea
MVLTRSKVLQAGTSNGESRPEPSSGSPSYSGVGIISHLPIQSQTVVGSTQHQQKELGEELNRRAPSGSLEHATANHTDEDSSSYSFGSVTEPYSPSTASYIPSPVSSIDQNSRGTPTPTSSVTQEDNSFFPASTKAGKPRVRMSWSKEVNIFIMRTYYYITKLETDMTLQSKHLYERFCQKYPALNISEQRVSDQRRTILRNKLLSHQELTQIKDEVRLKIQEENTENLTNPTQLQQLVCPDTASKNMNPTRSVLQAMRPATTLAGRDRQRMKWTPEVNKQVLRCYYIVTNLESNLTSYRPQLRQKFIEFYPELDFITEQRLSDQLRVILRNNMITSTEREEIKKSVGITMNTSNTDVSFDSSQPPMQISAQSINSNTYINILREIDSTNNISSNNARETIQTNIEPITDARQHPALHNIFDSINLEKQFIENLSKFKGSDPTLRPFIPKLQFSYNTKKLIHDLNTIIQKHLKNNNITTLEEIHEIIYSAALVAVTVSNTKVKNSGKQPDIPKSTKPVWEQRLENRIIKLRKEIGQHIQYLKGNLSKKKKFKLNPTNKEEQEVIDRLDSLKQKLQALAKRLSRYRKTNLRFRQNKTFETNQKLIYQSFSRAETAKPTQDPPDINIVHNYWKNIWSLPIDHNPDPSWVSTEEKDSINIDTMPQFKIELDDIKTATNKMLNWKAPGPDKIQNYWIKYFTSTHAKIVDIFNEFITTPEKLPVFLTQGITYLKPKDLDISNPAKYRPITCLPTLYKLLTSIIANRVNKHIIQNNIIQEEQKGCCKGSRGCKEQLVIDTEIHSQAKQKHRNLYYAYIDYQKAFDSVPHSWLIHVLKLYKIDTTLVKFLTHTMAKWSTILNLNINNKCVKSLPINIARGIFQGDSLSPLWFCLAMNPLSKILNNSGYGYNIDKINKVKISHLLYMDDIKLYSSTRQQLEELLKLTESFSNDIKMEFGISKCKINSIVKGSHKVTEPYNLILCNEKINAMDCKEYYKYLGFQQNTCLEHTKIKKELTKHYTQRLNQIFRTYLSARNKVKAVNTFAVPILTYSFGIIKWTDTDLDALNTLTRSVAYKHHIHHIHSAVERFTLKRKLGGRGFIDIKNLHYKQIENLRNYFISKAQDSTLHRAITKLTTSGTALQFREKNYQPELKIVKQESKLESWKKKSLHGKYPQYIEQDHIDRESSCSWLKKGNIFAETEGFIVAIQDKIIKTRNYSKHILKDNNIVNDKCRLCNLSNETIDHITGGCKVLASKEYINRHNNVAKQIHQYLALKYELINNKVPYYKYAPKNVLENHKAKLYWDRDIITDKTINCNRPDITLTLKISKTTYLIDISIPNTENLKQKHFDKIQKYLPLADEMKEMWHQDTVRIIPIILSATGVIPKNLHTSIKELQLRKSIYTELQKSAVLDTSSIVRRFLNLSPLVTNS

SEQ ID NO: 24073 - protein, 1144 aa, Pyrgus malvae
MKWTNEVNQQLLRCYYIVTNLERNLTSYRPQLRDKFIECYPELDFMTEQRLSDQIRVIHRNNRISATERAQIKQSIELNLSNTSNAALNIEDHLPSQSIHDLENPNIIHNTITDEAPRNTSSNLSINNNPNISEIHIEIQNKENDIMKLEISLKENLIKYKNIDPALRPNIPKFILNYNTQKLISDINNVIEKHLAESNIETLEEIHDIIYCAALTTVTSLNTTLIEKEGFTYKKRKKPAWEKRLENRISKLRKEIGQHTQYLKGNLSQKKQFKINPTKKEKQEIIDKLDALKQRLQALSKRLRRYRKTNLRYKQNKLFETNQKALYRNFNTRQNVTQTPNLTEIQNYWSNIWSTPVSHNENSAWLTIEEQETQNIEPMPKLKIELEDIRAATSKILNWKSPGPDKIQNYWLKHLTSTHITIAKIFNNLIQKPQCTPRFLTQGITYLQPKAGDTSDPANFRPITCLPTLYKLLTSIIANKINTHIMLNKIILEEQKGCRKGSRGCKEQLVIDTEIHNHAKQKNRNLYYAYIDYQKAFDSVPHSWLIHILQLYKIDNSLILFLQHIMTNWSTTLQITAEHKCLKTSPINISRGIFQGDSLSPLWFCLAINPLSRILNNTGHGYTIDRSSKITLSHLLYMDDIKLYASTRHQLNILLELTETFSNDIRMEFGINKCKINSIIKGKHQLIEPYNLALRLEKINSLDYNDYYKYLGYQQNPSLDHTQIKQQLTTQYKHRLNLIFKTHLSARNKVKAVNTYAVPILTYSFGIIKWTDTDLDALNTLTRTTAYKHHTHHIHSAVERFSLKRKMGGRGYIDIKNLHYKQIENLRLYFLNKATDSLLHKAITDLSTSGTPLQFRDKNFEPDTKIVKIEDKIESWKKKKLHGKYRNNIDQEHIDTEASSCWLTKGNIFAETEGFIIAIQDQIIKTRNYAKHILKDNSIKDDRCRLCKLTHETIDHITGGCKVLASKEYINRHNNVAKQIHQYLAIMYKLIDSKVPYYKYAPKNVLENNKAKLYWDRDIITDKTINCNRPDITLTIKDTKTTYLIDVSIPNTENLKQKHIDKIHKYLPLVDEIKDMWHQETVRIIPVILSSVGVIPKNLHASLKELKLRKSIYAELQKSVVLDTSAIVRRFLSFSSVLSEPLES

SEQ ID NO: 24074 - protein, 1278 aa, Paramimus stigma
MSIPINNKRYNLRSLSKNIIKRSIETHSSSCSSPTESLFDTPSSSPRSYEDPSDSGSRSSTSSPILAHLMPRKNREIKRRAPQRLIPSNNQVSAKEDRALNTTQTQTNILIGHTKPTRSVLLDMRPVTTLAGRNRQRMKWTNEVNQYLLRCYYIVTNLETNLTNYRSQLRIKFIEVYPELDFLTEQRLSDQIRVIFKNNRVPESERAIIRKDVEKNTCFDTEIGSPECNLNSSLQLTQFDQNTLCDTEQLLNQSLINVSLVETEEVVNTEQTSQIEKIESDLENTFRENLNKFKSSDPIHRPRIAKLQTTYNTKKLIENLNNVINRYLVKNSITKLEEIHEIIYCAATTLVTHNNKVQKDININTQDKKGYKDNKKPKWERRLENKIAKLRKEAGHLTQYLKGNLSKKKHSKVNRTKKTEQDIVNRLDALKQKLQALAKRLKRYRKTNQRYKQNKLFETNQKLIYRSFDKQSNCTNQPDIQKIQSYWEQIWSNSVNHTTNTDWISIEEKELHKIDPMPKFKVDLDDIKFATSKLLNWKAPGSDKIQNYYLKHFTATHQTITNIFNNLILQPQIIPKFFTQGVTYLKPKDSDTLNPANFRPITCLPTLYKLFTSVIAHKVNTHITRNKIIEEEQKGCRKGSKGCKEQLVIDTEIHNQVKQKHRNLYFAYIDYQKAFDSVPHSWLIHILKLYKIDNKLIEFLQHIMSKWSTILNINTDEKCFNTTPINISRGIFQGDSLSPIWFCLAMNPLSRILNNTGQGYVIDRLNKIKLSHLLYMDDIKLYASTRQQLNELLKRTESFSSDIKMDFGVKKCKINCIIKGKHKLTESYNLTNSNEQIKSMAFNDYYKYLGYPQNTAVNHTKIKQDLITQYKQRINNIFKTHLSGRNKVKAVNTYAIPILTYSFGIIKWTDTDLDSLNTLTRTSAYKHHIHHIHSAVERFSLKRKLGGRGFIDIKNLHYKQIENLRTYFLNKAIYSSLHKAIATMETSGTPLQLKDKEFKPLSKIVKEDVKIASWKEKALHGRFRRNIDEDHIDREGSFSWLTKGNIFAETEGFIVAIQDQIIKTRNYAKHILKDSSVLNDKCRLCNITNETIDHITGGCKVLSSKEYLNRHNNVAKQVHQYLALKYKLLESKVPYYKYSPKNVLENKIAKLYWDRDIITDKTIICNRPDLTLTLKNTKTTYLIDISIPNTDNLKQKHLEKIQKYLPLAEEIKEMWHQNNIRIIPIILSSTGVIPHSLHKSIRELELRKSVFVELQKSTVLDTSAIVRRFLNFTSAVKT

SEQ ID NO: 24075 - protein, 1317 aa, Ectomis pervivax
MRLRSSNKLPQAGTGANRNGESCPEQSSSGSPTYSGGDNVPQSSAQSTTVTENEHNPASVANRCKNVKLSAANHHSRPSTSSSSSSSITNLFESPASSPGSYEVWSLQRSRSSTLSPLLDIIQPTKKKVHTTKRDISERLVKKPTDAAVDVTKIMSADSNPTRSVLQDMRPTTTLAGRDRQRMKWTQEVNEQLLRCYYIVTNLENNPTGYRTQLREKFIEYFPELHFITEQRLSDQIRVIHRNNRISAVQRELIKKNIQAQVIRTNSNSTCDMSHILQSTPITQNNQLLEPVADSETINSVGTLNTEPTIKVEPSDGNDILFLKKLFSENILKFKNSDPNLRPSIPKLQITYKTKILINNLNNIIENFLAENNIVTIEEIHEIIYSAAITAVTVNNKVKIRNGTINEQQKKILKPTWEKRLENRISKLRKEIGQYTQYLKGNLSQKKINKVNPTKLDDQKIIDILDCLKQKLQALAKRLQRYRKSNQRLRENRIYEVNQKCIYNSFNTCQKIKQPPNIEQIQIYWENIWSNPINHTSNSSWTLKEENDLVNVETMLPFVIDIQDIKMATTKMLNWKAPGLDKIQNYWLKYLTATHKSIVVIFNALIQEPSSIPDFLTQGVTYLKPKDEDTSNPAKYRPITCLPTLYKLLTSIIANKINTHITKNKIIQEEQKGCCKGSRGCKEQLIIDTEIHNQVKQKHRNLYYAYIDYQKAFDSVPHSWLIYILQLYKIDNSLISFLNHAMRKWTTTLNITTDSETLISSPINIARGIFQGDSLSPLWFCLAINPLSKLLNNSGHGYIIDRQNKIKLSHLLYMDDIKLYASTRQQLNRLLNITETFSNDIKMVFGTEKCKINSIVKGRHKLTEPYNLTYYKNTISPMEYSDYYKYLGYQQNTCIGHSKIKKDLIAQYKQRITKIFSTYLSARNKVKAVNTYAIPILTYSFGIVKWTDTDLEALNTLTRSIAYKHHIHHIHSAVERFTLKRKLGGRGFIDIKNLYYKQIENLRAYFLNKAKYSLLHKTITDIDTSGTPLKFKDKDFKPENKIVKNEVKVENWKKKSLHGKYPLNIEKDHIDSEGSNHWLIKGNIFAETEGFLIAIQDQVIKTKNYSKHILKDNSIINDKCRLCNLANETIDHITGGCKVLAVKEYINRHNNVAKQIHQYLALKYKLIDNKVPYYKYSPKNVLENNVAKLYWDRDIITDRTINCNRPDLMLTLKATKTTYLIDISVPNTENLRQKHYDKIQKYLPLSEEIKEMWHQNTVRIVPIILSSTGVIPKNLHVSLRELQLRKSIFVELQKSAVLDTASIVRKFLNLTALSSFQ

SEQ ID NO: 24076 - protein, 1100 aa, Pyrgus malvae
MTEQRLSDQIRVIHRNNRISATERAQIKQSIELNLSNTSNAALNIEDHLPSQSIHDLENPNIIHNIITDKAPRNTSSNLSINNNPNISEIHIEIHNKEDDIMKLEISLKENLIKYKNIDPALRPNIPKFILNYNTQKLISDINNVIEKHLVESNIETLEEIHDIIYCAALTTVTSLNTTPIEKEGFTYKKRKKPAWEKRLENRISKLRKEIGQHTQYLKGNLSQKKQFKINPTKKEKQEIIDKLDALKQRLQALSKRLRRYKKTNLRYKQNKLFETNQKALYKNFNTRQNVTQIPNLTEIQNYWSNIWSTPESHNENSAWLTIEEQETQNIEPMPKLKIELEDIRAATSKILNWKSPGPDKIQNYWLKHLTSTHITIAKIFNDLIQKPQCTPRFLTQGITYLQPKAGDTSDPANFRPITCLPTLYKLLTSIIANKINTHIMLNKIILEEQKGCRKGSRGCKEQLVIDTEIHNHAKQKSRNLYYAYIDYQKAFDSVPHSWLIHILQLYKIDNSLILFLQHIMTNWTTTLQITAEHKCLKTSPINISRGIFQGDSLSPLWFCLAINPLSRILNNTGHGYTIDRSSKISLSHLLYMDDIKLYASTRHQLNILLELTETFSNDIRMEFGINKCKINSIIKGKHQLIEPYNLALRLEKINSLDYNDYYKYLGYQQNTSLDHTQIKQQLTAQYKHSLNLIFKTHLSARNKVKAVNTYAVPILTYSFGIIKWTDTDLDALNTLTRTTAYKHHTHHIHSAVERFSLKRKMGGRGYIDIKNLHYKQIENLRLYFLNKATDSLLHKAITDLSTSGTPLQFRDKNFKPDTKIEKIEDKIESWKKKKLHGKYRNNIDQEHIDTEASSCWLTKGNIFAETEGFIIAIQDQIIKTRNYAKHILKDNSIKDDRCRLCKLTHETIDHITGGCKVLASKEYINRHNNVAKQIHQYHLAIMYKLIDSKVPYYKYTPKNVLENNKVKLYWDRDIITDKTINCNRPDLTLTIKDTKTTYLIDVSIPNTENLKQKHIDKIHKYLPLVDEIKDMWHQETVRIIPVILSSVGVIPKNLHASLKELKLRKSIYAELQKSVVLDTSAIVRRFLSFSSVLSEPLES

SEQ ID NO: 24077 - protein, 1314 aa, Pyrgus malvae
MRLRNREIPQVGTRKGESRPGPSGSGCPAYSGEGNASHLSAQHKAVAVNNNQALPPTAESATDSSAHTSSSLESLFESPASSPRSYEELSPHSSRSTTLSPMSDAARPTFRKGRTVKRNTNDCPLEPRCAQPAAKGDNLHNIPPSSSATSRQNQPARSVLQDMRPATTLAGRDRQRMKWTNEVNQQLLRCYYIVTNLERNLTCYRPQLREKFIECYPELDFMTEQRLSDQIRVIHRNNRITPTKRAQIKQSVELYISNTGSNSLHTEDPLPSQSIDDLDNLNTITDERLRNTSSNLTVTNNTNITEDKVEIQNKEDDTIKIENSFKENLIKYKNIDPGLRPNIPKIILNYKTRKLISNVNSVIEKHLAESNINTLEEIHDIIYSAALTTVTSSNNTPLEKEPFKQKIKKPAWEKRLENRISKLRKEIGQYTQYLKGNLSRKKQLKIIPKKQEEQQIIDKLDALKQRLQALSKRLRRYKKTNLRYKQNKLFETNQKVVYRKFNIQQKLTQTPNLTEVQNYWSNIWSISVNHNQNPAWLTLEEQEIRNIEPMPELKIELEDIRAATSKTLNWKAPGPDKIQNYWLKHLTSTHISIANIFNDLIQKPECTPTFLTQGITYLQPKAGDTSDPANYRPITCLPTLYKLLTSIIATKINTHITLNKIIPEEQKGCRKGSRGCKEQLVIDTEIHNQVKQKHRNLYYAYIDYQKAFDSVPHSWLIHILKLYKIDSSLILFLQHIMTNWSTTLQITAEHKCLKTSPINISRGIFQGDSLSPLWFCLAINPLSRILNNTGHGYIIDRFNKISLSHLLYMDDIKLYASTRQQLNILLELTESFSNDIRMEFGIKKCKINSIIKGKHQLIEPYNLTLQLEKISSLDYNEYYKYLGYQQNTSLDHTKIKQQLTTQYKHRLNLIFKTHLSARNKVKAVNTYAVPILTYSFGIIKWTDTDLDALNTLTRTTAYKHHTHHIHSAVERFSLKRNMGGRGYIDIKNLHYKQIENLRLYFLNKANDSLLHKSITNLPTSGTPLQFRDKNFKPETKIVKLDDKIESWKKKTLHGKYRNNIDQEYIDTEASSCWLTKGNIFSETEGFIIAIQDQIVNTRNYAKHILKDNSIKDDRCRLCKLTHETIDHITGGCKVLAGKEYINRHNNVAKQIHQYLAIMYNLIDTKVPYYKYTPKNVLENNKVKLYWDRDIITDKTVNCNRPDITLTIKSTKTTYLIDVSIPNTENLVQKHIDKIHKYLPLVDEIKDMWHQETVRIIPIILSSVGVIPKNLFASLNELKLRKSIFAELQKSVVLDTSAIVRRFLSFSSVLSGPTL

SEQ ID NO: 24078 - protein, 1215 aa, Oechydrus chersis
MLTVIELVNAFSRGESRPGPSGPGCPAYSGGGNDSHMAAQHQAATVNKTNQAIPSTAEQELTDSSAHISSSSESLFELPASSPRSYEEHSRHSSRSTTLSPMSDVTRPTSRKGGTGKYSTNNCLLKPICDQTAAQREIFSSMPSNSSATSRQNQPTRSVLQDMRPATTLAGRSRQRMKWTDEVNQQLLRCYYIVTNLESNLTSYRPQLRKKFIECYPELDFITEQRLSDQLRVIHRNNRISATKRAQIKENVKLHTQSTNTSNTTINAQDSSTTQSTQDLNNLDTLTNTITDEPLQGGQDTSNNLINTKVTNTKHTQKYIKTQTKSIDVKELENNFKENLSKYKNLEPALRPTIPKVIFNYSTRKLISDLNSVIEKYIAESNIATLEEIYNILYCAAVTLVSLFNPTPLKENTTHKRNKPAWEKRLENRISKLRKKIGQHTQYLKGNLSKKKQSKVNPTKKKEQEIIDELDVLKQRLQALSKRLRRYKKTNLRYKQNKLFETNQKLVYRNFTTQQKLAQSPNFSEVQNYWNKIWSIPVNHTENPPWLTVEESETQNIAPMPHFNIELEDIRVAISKTLNWKAPGPDKIQNYWLKYLTSTHNTIVNIFNGLIQEPESTPSFLTQGVTYLQPKVGDNSDPANFRPITCLPTLYKLLTSIIANKINTHITLNKIIPEEQKGCRKGSRGCKEQLVIDTEIHNQAKQKHRNLYYGYIDYQKAFDSVPHSWLIHVLKLYKIDNSLVNFLQHAMTKWSTTLHITAEHKCLKSSPINISRGIFQGDSLSPLWFCLSINPLSRILNNTGHGYIIDRSNKIKISHLLYMDDIKLYASTKQQLNTLLKLTETFSNDIKMEFGINKCKINSVTKGKHQLLEPHNLALRPEKICSLDYNDHYKYLGYQQNISIDHTKIKQQLTIQYKHRLNQIFKTYLSARNKVKAVNTYAVPILTYSFGILKWTDTDLDALNILTRTTAYKHHTHHIHSAVERFSLKRKVGGRGFIDIKNLHYKQIENLRMYFLNKATESLLHKAITDISTSGTSLQFKDKNFKPENKIVKQDSKIENWKKKSLHGKYRNNIDQDHIDTEASCCWLTKGNIFAETEGFIVAIQDQVIKTRNYSKHILKDNSVKDDRCRLCNLAHETIDHITGGCKVLAGKEYINRHNNVAKQIHQYLALMYNLVESKVPYYKYQPKNILENNKAKLYWDRDIITDKTIHCNRPDLTL

SEQ ID NO: 24079 - protein, 1314 aa, Pyrgus malvae
MRLRNREIPQVGTRKGESRPGPSGSGCPAYSGEGNASHLSAQHKAVAVNNNQALPPTAESATDSSAHTSSSLESLFESPASSPRSYEELSPHSSRSTTLSPMSDAARPTFRKGRTVKRNTNDCPLEPRCAQPAAKGDNLHNIPPSSSATSRQNQPARSVLQDMRPATTLAGRDRQRMKWTNEVNQQLLRCYYIVTNLERNLTCYRPQLREKFIECYPELDFMTEQRLSDQIRVIHRNNRITPTKRAQIKQSVELYISNTGSNSLHTEDPLPSQSIDDLDNLNTITDERLRNTSSNLTVTNNTNITEDKVEIQNKEDDTIKIENSFKENLIKYKNIDPALRPNIPKIILNYKTRKLISNVNSVIEKHLAESNINTLEEIHDIIYSAALTTVTSSNNTPLEKEPFKQKIKKPAWEKRLENRISKLRKEIGQYTQYLKGNLSRKKQLKIIPKKQEEQQIIDKLDALKQRLQALSKRLRRYKKTNLRYKQNKLFETNQKVVYRKFNIQQKLTQTPNLTEVQNYWSNIWSISVNHNQNPAWLTLEEQEIRNIEPMPELKIELEDIRAATSKTLNWKAPGPDKIQNYWLKHLTSTHISIANIFNNLIQKPECTPTFLTQGITYLQPKAGDTSDPANYRPITCLPTLYKLLTSIIATKINTHITLNKIIPEEQKGCRKGSRGCKEQLVIDTEIHNQVKQKHRNLYYAYIDYQKAFDSVPHSWLIHILKLYKIDSSLILFLQHIMTNWSTTLQITAEHKCLKTSPINISRGIFQGDSLSPLWFCLAINPLSRILNNTGHGYIIDRFNKISLSHLLYMDDIKLYASTRQQLNILLELTESFSNDIRMEFGIKKCKINSIIKGKHQLIEPYNLTLQLEKISSLDYNEYYKYLGYQQNTSLDHTKIKQQLTTQYKHRLNLIFKTHLSARNKVKAVNTYAVPILTYSFGIIKWTDTDLDALNTLTRTTAYKHHTHHIHSAVERFSLKRNMGGRGYIDIKNLHYKQIENLRLYFLNKANDSLLHKSITNLPTSGTPLQFRDKNFKPETKIVKLDDKIESWKKKTLHGKYRNNIDQEYIDTEASSCWLTKGNIFSETEGFIIAIQDQIVNTRNYAKHILKDNSIKDDRCRLCKLTHETIDHITGGCKVLAGKEYINRHNNVAKQIHQYLAIMYNLIDTKVPYYKYTPKNVLENNKVKLYWDRDIITDKTVNCNRPDITLTIKSTKTTYLIDVSIPNTENLVQKHIDKIHKYLPLVDEIKDMWHQETVRIIPIILSSVGVIPKNLFASLNELKLRKSIFAELQKSVVLDTSAIVRRFLSFSSVLSGPTL

SEQ ID NO: 24080 - protein, 1315 aa, Telemiades fides
MRLRSGIELPQAGTGAHRDGESRPEPSNSGSPTYSGGDNVSQTSAQCSTVAENINNSPSIVNKNVEDNYTALLASTPTSSIESRFDTSSSYEEPGLHLSRSTTSSPMSDIIQRRRKKACAKRNTTKRLLKSPIQSVQETNQSSTYVNPTRSVLQDMRPTTTLAGRDRQRMKWTKEVNEQLLRCYYITTNLEKNLTGYRTQLREKFIQYYPELHFITEQRLSDQIRVIHRNNRISPAQREIIKKNIETHIIQPTSNVIADTSQLTQSIQITQSNQYSDPLDNNETINTISETLNSTLTLHTEPTKEVVLLETGDVLKLKTIFADNILKYKNSDPNLRPSIPKLQITFKTKKIISDLNNIIENYLTENNVDTIEEIHEIIYSAAITAVTVNNKVKIRYKDANESENNKQTFKPAWEKRLENRIINLRKDIGQYTQYLKGNLSQKKQIKVNPTKIGDQEIVDKLDLLKQKLQALAKRLRRYKKTSQRFTQNKIFEVNQKLIYRSFNPSQKTVQQQPDIKQVQTYWENIWSNPVNHTTDSSWTANEKQDLENIEAMPKFVVDLEDIKIATKKMLNWKAPGPEKIQNYWLKYLTATHKTIVNIFNALICEPGRIPDFLTQGITYLKPKDEDTSNPAKYRPITCLPTLYKLLTSIVTNKINTHINKNKIIQEEQKGCCKGSRGCKEQLIIDTEIHNQVKQKHRNLYYAYIDYRKAFDSVPHSWLIHVLKLYKIDNSIISFLNHAMTKWTTTLNITTENKTLRSSPINIVRGIFQGDSLSPLWFCLAINPLSKILNNSGHGYIIDRQNNTKLSHLLYMDDIKLYASTRQQLNNLLNLTDTFSNDIKMEFGIEKCKINSIVKGRHKLTAPYNLTTCSDTINPMEYTDYYKYLGYQQSTGIEHTKIKQELTAQYKNRLNKIFATYLSARNKVKAVNTYAVPILTYSFGIVKWTDTDLDALNTLTRSVAYKHHIHHIHSAIERFTLRRQVGGRGFVDIKNLHYKQIENLRTYFLNKSKDSSLHKAIKDINVKSGTSLQLKDRDFKPENKIVKEADKIEIWKKKSLHGKYPRNIEQDHIDSEASNCWLIKGNIFAETEGFIIAIQDQIIKTRNYSKHILKDNTVINDKCRLCNSAKETIDHITGGCKIMASREYINRHNNVAKQLHQYLALKYKLIDNKVPYYKYAPKSVLENNTVKLYWDRDIITDKSINCNRPDLILTLKMTKTTYLIDISVPNTDNLKQKHCDKIQKYLPLTEEIKEMWHQNTVRIVPIILSSTGVIPKNLHVSLRELQLRKSIFVELQKSVVLDTTSIVRRFLNLTTLVNHQ

SEQ ID NO: 24081 - protein, 772 aa, Epargyreus clarus
MEDTELESIEPMPQFIIDKEDIKIATNKMFNWKAPGPDKIQNYWLKYLTATHKTIVDIFNGFIQEPSNIPDFLTRGVTYLKPKDIDTSNPAKYRPITCLPTLYKLLTSIIANKINTHTTFNKIVQEEQKGCCKGSRGCKEQLIIDTEIHQQVKQKHRNLYYAYIDYQKAFDSVPHSWLIHVLKLYKIDNSLIRFLKHAMTKWTTTLNITIENKSLKSDPINISRGIFQGDSLSPLWFCLAINPLSKILNNSGHGYIIDRQVNIKLSHLLYMDDIKLYASTRQQLNNLLNLTESFSNDIKMNFGIEKCKINSIVKGHHKLTEPHKLTISNNTISPMEYKDYYKYLGFQQSTCIEHTKVKQELTELYKQRLNKIFKTFLSARNKVKAVNTYAVPILTYSFGIVKWSETDLEALNTLTRTTAYKHHIHHIHSAVERFTLKRKLGGRGFIDIKNLHYKQIENLRTYFLTKAKDSLLHKAITDIPTSGTPLQFKDKKFKPENKIVKQEVKIENWKKKSLHGKHPHNIELEHIDREASNCWLMKGNIFAETEGFIIAIQDQIIKTRYSKHILKDSSIINDKCRLCNLTNETIDHITGGCKVLAGKDYINRHNNVAKQIHQYLALKYKLINDKVPYYKYSPKNVLENNAVKLYWDRDIITDKTINCNRPDITLTLKLTKTTYLIDISIPNTDNVKQKHFDKIQKYLPLADEIKEMWHQNIVRIVPIILSSTGIIPKNLHTSIRELDLRKSIFIELQKSTVLDTASIVRRFLNMSTLVSN

SEQ ID NO: 24082 - protein, 1308 aa, Pyrrhopyge creona
MRMSNTNNKKIYNLRSHSRGQNTTSMRITNGQELNRQALISHKQKNAAPVQIQTCSSTSNSSLESYFESLASTPRSYEDINQVTSRSPSSSSMSDVRPTPRKRIIIKRNTSKGSINLTKEQSAAQQETSNRAPIHAYTTSRHANPTRSVLQDMSPATTLAGRGRQRMKWTNEVNQQLLRCYYIVTNLERNLTSYRSQLREKFIEYYPELHFITEQRLSDQIRVIHRNNRIPASERAQIKLNVETYTNLNTNIDNSNTIQSLPLTNSIQHNNTPVDSEVVSSIPIIHTTETPQATNTINSEQIQIETENEANKLENLFKENLTKYKNSDPMTRPSIPKLQITYNTRKYLKIINTVIEKHLTKNIVTKIEEIHEIIYSAANTIVTLNNKKPKLELTNQTTKTISSKPAWEKRLENRISKLRKEIGQHTQYLKGNLSQKKHFKLNPMNKDTQEIIDRLDTLKQKLQALAKRLRRYRKSNQRYKQNKLFEINQKLLYQKFNPHKKIISSPDLKEVQSYWENIWSNPINHTADASWTAVEDKKIQHIEPMPQLTINSEDIKLATSKMLNWKAPGSDKIQNYWLKYLTATHKTIADIFDTLIQHPENIPQFMTQGVTYLKPKDSNTSNPANYRPITCLPTLYKLLTSVIANKVNTHIMRNKIINEEQKGCRKGSRGCKEQLVIDTEIHNQVKQKHRNLYFAYIDYKKAFDSVPHSWLIHILKLYKIDDNLITFLQKIMTKWCTTLNITTEQNKCLKSSPINISRGIFQGDSLSPVWFCLAINPLSTILNNTGHGYIIDRSNNIKLTHLLYMDDIKLYASTREQLNQLLKLTETFSNDIKMEFGIEKCKINSIIKGKHKLIDSYNLTLREANISPMDFNDYYKYLGYPQNVAIEHTKIKHDLTSHYKQRLNQIFKTQLSARNKVKAVNTYAVPILTYSFGIIKWTDTDLDALNVLTRTTAYRNKLHHIHSAIERFTLNRKVGGRGFIDIKNLHYKQIQNLRTYFLNKASDSSLHKAITDLPTTGTPLQFKDKDFNPEIKIVKQNDKIETWKKKSLHGKYRCNIEQDHIDLNGSFCWLTKGSIFAETEGFIIAIQDKVIKTRNYAKYILKDISITNDKCRLCSQSNETIDHITGGCKVLAGKEYINRHNNVAKQIHQYLALRYKLIDTKTPYYKYLPKNVLENDTAKLYWDRDIITDRTINYNRPDITLTVKATKTTYLVDISVPNTENVKQKYFEKIQKYLPLAEEMKEMWHQDNIRIIPIILSSTGIIPKNLHESLKELQLRGSIFIELQKSTVLDTAAIVRRFLNLSTIISTP

SEQ ID NO: 24083 - protein, 979 aa, Yanguna spatiosa
MSRPPIPKLQITYNTKKYLTILNTIIEKHLSKNTVTKLEEIHEIIYSAAHTIVTLNNKKPKLELTNQISRTSTSKPAWEKRLENRISKLRKEIGQHTQYLKGNLSQKKHFKLNPTNKETQEIVDRLDTLKQKLQALAKRLRRYRKASQRYKQNKLFEVNQKLLYQQFKPQNKIISSPNLQEVQSYWENIWSKPTNHTADPFWIAVEHKKIQHIDPMPQLTINSEDIKMATSKMLNWKAPGSDKIQNYWLKYFTATHKTIADIFDTLIRQPENVPHFMTQGVTYLKPKDSDTSNPANYRPITCLPTLYKLLTSIIANKVNTHIMRNNIINEEQKGCSKGSRGCKEQLVIDTEIHNQVKQKHRNLYFAYIDYKKAFDSVPHSWLIHILKLYKIDDNLVTFLQHMMSKWCTTLNMATEHNKSLKSSPINISRGIFQGDSLSPIWFCLAINPLSTILNNTGHGYIIDRSNKIKLTHLLYMDDIKLYASTREQLNHLLKLTETFSNDIKMEFGIEKCKINSIIKGKHKLIDSYNLTLRQEKINPMDSNDYYKYLGYPQNVTIEHTKIKHDLISHYKQRVNQIFRTHLSARNKVKAVNTYAVPILTYSFGIIKWSDTDLDALNILTRTTAYRNKLHHIHSATERFTLNRKLGGRGFIDIKNLHYKQIQNLRTYFLNKANDSPLHKAITDLPTTGTPLHFKDKDFNPENKIVKQSDKIETWKKKSLHGKYRCNIEQDHIDMNGSFSWLTKGNIFAETEGFIVAIQDKVIKTRNYAKHILKDISITNDKCRLCSQSNETIDHITGGCKVLAGKEYINRHNNVAKQIHQYLALRYKLIDTKTPYYKYLPKNVLENDRAKLYWDRDIITDRTINCNRPDITLTVKATKTTYLVDISVPNTENLKQKHLEKIQKYLPLADEMKEMWHQDNIRIIPIIISSTGVIPKNLHESMKELQLRGSIFIELQKSTVLDTAAIVRRFLNLSTIISTP

SEQ ID NO: 24084 - protein, 1309 aa, Pyrrhopyge sadia
MRMSNTNNKKRYNLRSHSRGQNTTSMRITNGQELNRRALISHKQKNAASVQIQTCSSTSNSSLESYFESLASTPRSYEDINQVPSRSPSSSSMSDVRPTPRKRIIIKRNTSKGSINLTKEQSAAQQETSNRAPIHAYTTSRHANPTRSVLQDMSPATTLAGRGRQRMKWTNEVNQQLLRCYYIVTNSERNLTSYRSQLREKFIEYYPELHFISEQRLSDQIRVIHRNNRIPASERAQIKLNVETYTNLNTNIDNYNTIQSLPLTNSIQHNNTPVDSEVVSSIPIIHTTETPQATNTINSEQIIEIETENEATNLENLFKENLTKYKNSDPMTRPSIPKLQITYNTRKYLKIINTVIEKHLTKNIVTKIEEIHEIIYSAANTIVTLNNKKPKLELTNQTAKTITSKPAWEKRLENRISKLRKEIGQHTQYLKGNLSQKKHFKLNPMNKDTQEIIDRLDTLKQKLQALAKRLRRYRKSNQRYKQNKLFEINQKLLYQKFNPHKKIISSPDLKEVQSYWENIWSNPKNHTADASWIAVEDKKIQYIEPMPQLTINSEDIKLATSKMLNWKVPGSDKIQNYWLKYLTATHKTIAYIFDTLIQHPENIPQFMTQGVTYLKPKDSDTSNPANYRPITCLPTLYKLLTSVIANKVNTHIMRNKIINEEQKGCRKGSRGCKEQLVIDTEIHNQVKQKHRNLYFAYIDYKKAFDSVPHSWLIHILKLYKIDDHLISFLQKIMTKWCTTLNITTEQNKCLKSSPINISRGIFQGDSLSPVWFCLAINPLSTILNNTGHGYIIDRSNNIKLTHLLYMDDIKLYASTREQLNQLLKLTETFSNDIKMEFGIEKCKINSIIKGKHKLIDSYNLTFREANISPLDFNDYYKYLGYPQNVAIEHTKIKHDLTSHYKQRLNQIFKTQLSARNKVKAVNTYAVPILTYSFGIIKWTDTDLDALNVLTRTTAYRNKLHHIHSAIERFTLNRKVGGRGFIDIKNLHYKQIQNLRTYFLNKASDSSLHKAITDLPTTGTPLQFKDKDFNPEIKIVKQNDKTETWKKKSLHGKYRCNIEQDHIDLNGSFCWLTKGSIFAETEGFIIAIQDKVIKTRNYAKHILKDISIKNDKCRLCSQSNETIDHITGGCKVLAGKEYINRHNNVAKQIHQYLALRYKLIDTKTPYYKYLPKNVLENNTAKLYWDRDIITDRTINYNRPDITLTVKATKTTYLVDISVPNTENVKQKHLEKIQKYLPLAEEMKEMWHQDNIRIIPIILSSTGVIPKNLHESLKELQLRGSIFIELQKSTVLDTAAIVRRFLNLSTIISTP

SEQ ID NO: 24085 - protein, 979 aa, Pyrrhopyge kelita
MTRPSIPKLQITYNTRKYLKIINTVIEKHLTKNIVTKIEEIHEIIYSAANTIVTLNNKKPKLELTNQTAKTITSKPAWEKRLENRISKLRKEIGQHTQYLKGNLSQKKHFKLNPMNKDTQEIIDRLDTLKQKLQALAKRLRRYRKSNQRYKQNKLFEINQKLLYQKFNPHKKIISSPDLKEVQSYWENIWSNPTNHTADASWIAVEDKKIQHIEPMPQLTINSEDIKLATSKMLNWKAPGSDKIQNYWLKHLTATHKTIADIFDTLIQHPENIPQFMTQGVTYLKPKDSDTSNPANYRPITCLPTLYKLLTSVIANKVNTHIMRNKIINEEQKGCRKGSRGCKEQLVIDTEIHNQVKQKHRNLYFAYIDYKKAFDSVPHSWLIHILKLYKIDDNLITFLQKIMTKWCTTLNITTEQNKCLKSSPINISRGIFQGDSLSPVWFCLAINPLSTILNNTGHGYIIDRSNNIKLTHLLYMDDIKLYASTREQLNQLLKLTENFSNDIKMEFGIEKCKINSIIKGKHKLIDSYNLTLREANISPMDFNDYYKYLGYPQNVAIEHTKIKHDLTSHYKQCLNQIFKTQLSARNKVKAVNTYAVPILTYSFGIIKWTDTDLDALNVLTRTTAYRNKLHHIHSAIERFTLNRKVGGRGFIDIKNLHYKQIQNLRTYFLNKASDSSLHKAITDLPTTGTPLQFKDKDFNPEIKIVKQNDKIETWKKKSLHGKYRCNIEQDHIDLNGSFCWLTKGSIFAETEGFIIAIQDKVIKTRNYAKHILKDISITNDKCRLCSQSNETIDHITGGCKVLAGKEYINRHNNVAKQIHQYLALRYKLIDIKTPYYKYLPKNVLENDTAKLYWDRDIITDRTINYNRPDITLTVKATKTTYLVDISVPNTENVKQKHFEKIQKYLLLAEEMKKMWHQDNIRIIPIILSSTGVIPKNLHESLKELQLRGSIFIELQKSTVLDTAAIVRRFLNLSTIISTP

SEQ ID NO: 24086 - protein, 1160 aa, Pyrrhopyge pelota
MRMSNTNNKKRYNLRSHSRGQNTTSMRITNSQELDRRALISHKQKNAKPVQIQTCSSTSTSSLESHFESLASTPRTYEDINLVQSRSPSTSSMSDVRPTPRKRMTIKRYTSKGSNILAIEQSAAQQETSNRASIHAYTTSRHTNPTRSVLQDMSPATTLAGRGRQRMKWTNEVNQQLLRCYYIVTNLERNLTSYRSQLHEKFTEYYPELHFITEQRLSDQIRVIHRNNRIPASERAQIKLNVETYINLNTNIDNSNTMQSLPLTNSIQHNNTPVDSETVSSTPTIHTTETPQATNTINSEEIIEIETENEAITLENMFKENLTKYKNSDPMTRPSIPKLQITYNTRKYLKIINTVIENHLTKNVVAKLEEIHDIIYSAAHTIVTLNNKKPKNLTTQTAKTITSKPAWEKRLENRISKLRKEIGQHTQYLKGNLSQKKHFKLNPMNKETQEIVERLDTLKQKLQALAKRLRRYRKTNQRYKQNKLFEINQKLLYQQFNPHKKIISSPDLKEVQSYWENIWSNPTNHTTDASWIAVEDKKIQHIEPMPQLTVKLEDIKLATSKMLNWKAPGSDKIQNYWLKYLTATHTTIAYIFDTLIQHPENVPQFMTQGVTYLKPKDSDTSNPANYRPITCLPTLYKLLTSVIANKVNTHLIKNKIINEEQKGCRRGSRGCKEQLVIDTEIHNQVKQKHRNLYFAYIDYKKAFDSVPHSWLIHILKLYKIDDNLITFLKKIMTKWCTTLNITTEQNKCLKSSPINISRGIFQGDSLSPLWFCLAINPLSTILNSTGHGYIIDRSNKIKLTHLLYMDDIKLYASTREQLNHLLKLTETFSNDIKMEFGIEKCKINSIIKGKHKLIDSYNLTLREAKISPMNFNDYYKYLGYPQNVAIEHTKIKHDLTSHYKQRLNQIFKTQLSARNKVKAVNTYAIPILTYSFGIIKWTDTDLDALNVLTRTTAYRNKLHHIHSAIERFTLNRKVGGRGFIDIKNLHYKQIQNLRTYFLNKASDSSLHKAITDLPTTGTPLQFKDKDFHPENKIVKQNDKIETWKKKSLHGKYRCNIEQDHIDWNGSFCWLTKGNIFAETEGFIIAIQDKVIKTRNYAKHILKDISITNDKCRLCSQSNETIDHITGGCKVLAGKEYINRHNNVAKQIHQYLALRYKLIDT

SEQ ID NO: 24087 - protein, 1309 aa, Pyrrhopyge hadassa
MRMSNTNNKNIYNLRSHSRGQNTSSMRITNGQELNRRALISHKQKNAAPVQIQTCSSTSNSSLESYFESLASTPRSYEDINQVPSRSPSSSSMSDVRPTPRKRNIIKRSTSKGSINLTKEQSAARQETSNRAPIHAYTTSRHANPTRSVLQDMSPATTLAGRGRQRMKWTNEVNQQLLRCYYIVTNLERNLTSYRSQLREKFIEYYPELHFITEQRLSDQIRVIHRNNRIPASERAQIKLNVETYTNLNTNIDNSNTIQSLPLTNSIQHNNTPVDSETVSSIPIIHTTETPQATNTINSEQIIEIETENEASKLENLFKENLTKYKNSDPMTRPSIPKLKITYNTRKYLKIINTVIEKHLTKNIVTKIEEIHEIIYSAANTIVTLNNKKPKLELTNQTAKTITSKPAWEKRLENRISKLRKEIGQHTQYLKGNLSQKKHFKLNPMNKDTQEIIDRLDTLKQKLQALAKRLRRYRKSNQRYKQNKLFEINQKLLYQKFNPHKKIISSPDLKEVQSYWENIWSNPINHTADASWIAVEDKKIQHIEPMPQLTINSEDIRVATSKMLNWKAPGSDKIQNYWLKYLTATHKTIADIFDTLIQHPENIPQFMTQGVTYLKPKDSDTSNPANYRPITCLPTLYKLLTSVIANKVNIHIMRNKIINEEQKGCRKGSRGCKEQLVIDTEIHNQVKQKHRNLYFAYIDYKKAFDSVPHSWLIHILKLYKIDDNLITFLQKIMTKWCTTLNITTEQNKCLKSSPINISRGIFQGDSLSPVWFCLAINPLSTILNNTGHGYIIDRSNNIKLTHLLYMDDIKLYASTREQLNQLLKLTETFSNDIKMEFGIEKCKINSIIKGKHKLIDSYNLTLREANISPMDFNDYYKYLGYPQNVAIEHTKIKHDLTSHYKQRLNQIFKTQLSARNKVKAVNTYAVPILTYSFGIIKWTDTDLDALNVLTRTTAYRNKLHHIHSAIERFTLNRKVGGRGFIDIKNLHYKQIQNLRTYFLNKASDSSLHKAITDLPTTGTPLQFKDKDFNPEIKIVKQNDKIETWKKKSLHGKYRCNIEQDHIDLNGSFCWLTKGSIFAETEGFIIAIQDKVIKTRNYAKHILKDISITNDKCRLCSQSNETIDHITGGCKVLAGKEYINRHNNVAKQIHQYLALRYKLIDIKTPYYKYLPKNVLENDTAKLYWDRDIITDRTINYNRPDITLTVKATKTTYLVDISVPNTENVKQKHFEKIQKYLPLAEEMKEMWHQDNIRIIPIILSSTGVIPKNLHESLKELQLRGSIFIELQKSTVLDTAAIVRRFLNLSTIISTP

SEQ ID NO: 24088 - protein, 1283 aa, Pyrrhopyge telassa
MRITNGQELNRQALISHKQKNAAPVQIQTCSSTSNSSLESYFESLASTPRSYEDINQVTSRSPSSSSMSDVRPTPRKRIIIKRNTSKGSINLTKEQSAAQQETSNRAPIHAYTTSRHANPTRSVLQDMSPATTLAGRGRQRMKWTNEVNQQLLRCYYIVTNLERNLTSYRSQLREKFIEYYPELHFITEQRLSDQIRVIHRNNRIPASERAQIKLNVETYTNLNTNIDNSNTIQSLPLTNSIQHNNTPVDSEVVSSIPIIHTTETPQATNTINSEQIEIETENEATKLENLFKENLTKYKNSDPMTRPSIPKLQITYNTRKYLKIINTVIEKHLTKNIVTKIEEIHEIIYSAANTIVTLNNKKPKLELTNQTTKTISSKPAWEKRLENRISKLRKEIGQHTQYLKGNLSQKKHFKLNPMNKDTQEIIDGLDTLKQKLQALAKRLRRYRKSNQRYKQNKLFEINQKLLYQKFNPHKKIISSPDLKEVQSYWENIWSNPINHTADASWTAVEDKKIQHIEPMPQLTINSEDIKLATSKMLNWKAPGSDKIQNYWLKYLTATHKTIADIFDTLIQHPENIPQFMTQGVTYLKPKDSDTSNPANYRPITCLPTLYKLLTSVIANKVNTHIMRNKIINEEQKGCRKGSRGCKEQLVIDTEIHNQVKQKHRNLYFAYIDYKKAFDSVPHSWLIHILKLYKIDDNLITFLQKIMTKWCTTLNITTEQNKCLKSSPINISRGIFQGDSLSPVWFCLAINPLSTILNNTGHGYIIDRSNNIKLTHLLYMDDIKLYASTREQLNQLLKLTETFSNDIKMEFGIEKCKINSIIKGKHKLIDSYNLTLREANISPMDFNDYYKYLGYPQNVAIEHTKIKHDLTSHYKQRLNQIFKTQLSARNKVKAVNTYAVPILTYSFGIIKWTDTDLDALNVLTRTTAYRNKLHHIHSAIERFTLNRKVGGRGFIDIKNLHYKQIQNLRTYFLNKASDSSLHKAITDLPTTGTPLQFKDKDFNPEIKIVKQNDKIETWKKKSLHGKYRCNIEQDHIDLNGSFCWLTKGSIFAETEGFIIAIQDKVIKTRNYAKHILKDTSITNDKCRLCSQSNETIDHITGGCKVLAGKEYINRHNNVAKQIHQYLALRYKLIDTKTPYYKYLPKNVLENDTAKLYWDRDIITDRTINYNRPDITLTVKATKTTYLVDISVPNTENVKQKYFEKIQKYLPLAEEMKEMWHQDNIRIIPIILSSTGIIPKTLHESLKELQLRGSIFIELQKSTVLDTAAIVRRFLNLSTIISTP

SEQ ID NO: 24089 - protein, 1309 aa, Pyrrhopyge aziza
MRMSNTNNKKIYNLRSHSRGQNTTSMRITNGQELNRRALISHKQKNAAPVQIQTCSSTSNSSLESYFESLASTPRSYEDINQVPSRSPSSSSISDVRLTPRKRNIIKRNISKGSINLTKEQSAARQETSNRAPIHAYTTSRHANPTRSVLQDMSPATTLAGRGRQRMKWTNEVNQQLLRCYYIVTNLERNLTSYRSQLREKFIEYYPELHFITEQRLSDQIRVIHRNNRIPASERAQIKLNVETYTNLNTNIDNSNTIQSLPLTNSIQHNNTPVDSETVSSIPIIHTTETPQATNTTNSEQIIEIETENEATKLENLFKENLTKYKNSDPMTRPSIPKLQITYNTRKYLKIINTVIEKHLTKNIVTKIEEIHEIIYSAANTIVTLNNKKPKLELTNQTAKTITSKPAWEKRLENRISKLRKEIGQHTQYLKGNLSQKKHFKLNPMNKDTQEIIDRLDTLKQKLQALAKRLRRYRKSNQRYKQNKLFEINQKLLYQKFNPHKKIISSPDLKEVQSYWENIWSNPINHTADASWIAVEDKKIQHIEPMPQLTINSEDIRVATSKMLNWKAPGSDKIQNYWLKYLTATHKTIADIFDTLIQHPENIPQFMTQGVTYLKPKDSDTSNPANYRPITCLPTLYKLLTSVIANKVNTHIMRNKIINEQQKGCRKGSRGCKEQLVIDTEIHNQVKQKHRNLYFAYIDYQKAFDSVPHSWLIHILKLYKIDDNLITFLQKIMTKWCTTLNITTEQNKCLKSSPINISRGIFQGDSLSPVWFCLAINPLSTILNNTGHGYIIDRSNNIKLTHLLYMDDIKLYASTREQLNQLLKLTETFSNDIKMEFGIEKCKINSIIKGKHKLIDSYNLTLREANISPMDFNDYYKYLGYPQNVAIEHTKIKHDLTSHYKQRLNQIFKTQLSARNKVKAVNTYAIPILTYSFGIIKWTDTDLDALNVLTRTTAYRNKLHHIHSAIERFTLNRKVGGRGFIDIKNLHYKQIQNLRTYFLNKASDSSLHKAITDLPTTGTPLHFKDKDFNPEIKIVKQNDKIETWKKKSLHGKYRCNIEQDHIDLNGSFCWLTKGSIFAETEGFIIAIQDKVIKTRNYAKHILKDISITNDKCRLCSQSNETIDHITGGCKVLAGKEYINRHNNVAKQIHQYLALRYKLIDIKTPYYKYLPKNVLENDTAKLYWDRDIITDRTINYNRPDITLTVKSTKTTYLVDISVPNTENVKHKHFEKIQKYLPLAEEMKEMWHQDNIRIIPIILSSTGVIPKNLHESLKELQLRGSIFIELQKSTVLDTAAIVRRFLNLSTIISTL

SEQ ID NO: 24090 - protein, 1309 aa, Pyrrhopyge hadassa
MRMSNTNNKNIYNLRSHSRGQNTSSMRITNGQELNRRALISHKQKNAAPVQIQTCSSTSNSSLESYFESLASTPRSYEDINQVPSRSPSSSSMSDVRPTPRKRNIIKRSTSKGSINLTKEQSAARQETSNRAPIHAYTTSRHANPTRSVLQDMSPATTLAGRGRQRMKWTNEVNQQLLRCYYIVTNLERNLTSYRSQLREKFIEYYPELHFITEQRLSDQIRVIHRNNRIPASERAQIKLNVETYTNLNTNIDNSNTIQSLPLTNSIQHNNTPVDSETVSSIPIIHTTETPQATNTINSEQIIEIETENEASKLENLFKENLTKYKNSDPMTRPSIPKLKITYNTRKYLKIINTVIEKHLTKNIVTKIEEIHEIIYSAANTIVTLNNKKPKLELTNQTAKTITSKPAWEKRLENRISKLRKEIGQHTQYLKGNLSQKKHFKLNPMNKDTQEIIDRLDTLKQKLQALAKRLRRYRKSNQRYKQNKLFEINQKLLYQKFNPHKKIISSPDLKEVQSYWENIWSNPINHTADASWIAVEDKKIQHIEPMPQLTINSEDIRVATSKMLNWKAPGSDKIQNYWLKYLTATHKTIADIFDTLIQHPENIPQFMTQGVTYLKPKDSDTSNPANYRPITCLPTLYKLLTSVIANKVNIHIMRNKIINEEQKGCRKGSRGCKEQLVIDTEIHNQVKQKHRNLYFAYIDYKKAFDSVPHSWLIHILKLYKIDDNLITFLQKIMTKWCTTLNITTEQNKCLKSSPINISRGIFQGDSLSPVWFCLAINPLSTILNNTGHGYIIDRSNNIKLTHLLYMDDIKLYASTREQLNQLLKLTETFSNDIKMEFGIEKCKINSIIKGKHKLIDSYNLTLREANISPMDFNDYYKYLGYPQNVAIEHTKIKHDLTSHYKQRLNQIFKTQLSARNKVKAVNTYAVPILTYSFGIIKWTDTDLDALNVLTRTTAYRNKLHHIHSAIERFTLNRKVGGRGFIDIKNLHYKQIQNLRTYFLNKASDSSLHKAITDLPTTGTPLQFKDKDFNPEIKIVKQNDKIETWKKKSLHGKYRCNIEQDHIDLNGSFCWLTKGSIFAETEGFIIAIQDKVIKTRNYAKHILKDISITNDKCRLCSQSNETIDHITGGCKVLAGKEYINRHNNVAKQIHQYLALRYKLIDIKTPYYKYLPKSVLENDTAKLYWDRDIITDRTINYNRPDITLTVKATKTTYLVDISVPNTENVKQKHFEKIQKYLPLAEEMKEMWHQDNIRIIPIILSSTGVIPKNLHESLKELQLRGSIFIELQKSTVLDTAAIVRRFLNLSTIVSTP

SEQ ID NO: 24091 - protein, 1288 aa, Quadrus cerialis
MKMSNPHPNNRYNLRSRSKVIAISTTQITDAVVQKSRSNSSASPSESLFESPASSPRSYEEPDQYSSRSLTLSPISDVQSVQSTPRNRRNNKRNASKRLGNCNNVNSTAPQTLNVLQTPNDETEYANPTRSVLQDMKPATTLAGRDRQRMKWTNEVNQKLLRCYYIATNSETNLTNYRPQLREKFIEHYPELSFLTEQRLSDQIRVIHRNNRISATERLNIKQDVEKSLHLNTNIDLINTVSVTNLSQNNKDDTTTNSPTHVNSTEILQNINTINNINHINQTENLDCKKLQELKNTFHDNLIKYKNTEPDKRPYIPKLQINYKTRNLIKNLNNIIEEELKLNDITKIEQIHEIIYCAASTLVTHNNQVPTYSNKNNQSSKPNNTKPGWETRLENRIKILRKEVGQHTQYLRGNLSQKKQRKVNPTQKQEQMIVDQLDLLKQKLQALAKRLRRYRNTTQRFKQNKLFETNQKLLYKNLQPQQKYTQEPNIQEIQSYWEKIWSNPETHTSNNSWISMEDNETQHINPMPKFNIDLDDIKTATNKMLNWKAPGPDKISNYYLKYLTATHKTIADIFNTLIQQPQSIPRFFTQGVTYLKPKDTDTSDPANFRPITCLPTLYKLLTSTIAHKINTHIMQNNIIQEEQKGCRKGSRGCKEQLVIDTEIHNQVKQKHRNLYFAYIDYQKAFDSVPHSWLIHILKIYKIDDSLINFLQHTMTKWTTTLTITTDLQCLKSSLINISRGIFQGDSLSPIWFCLAINPLSKILNNTGHGYVIDRTNNIKISHLLYMDDIKLYASTRLQLNELLRHTELFSNDIKMEFGIKKCKINSIIKGKHKVIDEYSLSTSDKKISSMESNEYYKYLGYQQNTNIDHTKIKQDLTKQYKNRLHQIFKTHLSGRNKVKAVNTYAIPILTYSFGIIKWTDTDLDALNILTRTTSHEHRIHHIHSATERFTLHRKLGGRGFIDVKNMHYKQIENLRSYFLNKAMDSPLHKAITHLSTSGTPLHFNDHDFEPQNKIVEQDTKIENWKKKSIHGKYRKNIEQDHIDKESSFCWLTRGNIFAETEGFIIAIQDQIIKTRNYAKYILKEKIPNDKCRLCNITNETIDHITGGCKVLASKEYINRHNNVAKQIHQYLALKYKLIDSKTPYYKYLPKNVLENKLVKLYWDRDIITDKTVHCNRPDLTLTLKHTKTTYLIDISIPNTENLKQKHFDKIQKYLPLADEMKAMWHQDVVKIIPVILSSTGVIPLNLHKSLKDLDIKKSIFVELQKSVVLDTAAIVRRFLNFSATIENT

SEQ ID NO: 24092 - protein, 1292 aa, Gindanes brontinus
MIMSNFNCNKRYNLRSHSKSENTKEESNQQTLVGQMYENIIAPSNTSTSPSESLFESLASSPQSYEVMSRNSSRSTTVSPLSDVQLTRKVARNFKRNALKQLSHATDGESTHPQQTLNTPTPVTDATEQPDRSVLQDMRPATTLAGRDRQRMKWTNEVNHQLLRCYYIATNLETNLTNYRPQLREKFIENYPELHFLTEQRLSDQIRVIHRNNRITAAERSAIKQDIEKSHNLNTNTDLTSMVSLTDISHNNDNESSTDMNLTETLQDINAITNFSQINQIEDNSTQTENTDNKLQELKNTFHEKLNKIRNTEPDKRPYIPKLQINYNTGNLIHNLNNIIEKELEKGNVTQLEEIHEILYCAALTLVTHNNQVPNYTNKKYTNGKPNSIKPGWERRLETRITVLRKEIGQHTQYLRGHLSQKKQRKVNPMNKDEQFIVDQLDVLKQKLQALAKRLRRYRNTTQRHRQNKLFETNQKFIYRDLNPQHKYTQQPNIQEVQSYWERIWSNPITHTSNPSWIPIEEKETQHITPMPKFTIDLEDIKTATKKMLNWKAPGPDKIPNYYLKYLTATHKTITDIFNTLIQQPQSVPHFFTQGVTYLKPKDTDTSNPANFRPITCLPTLYKLLTSIIANKINTHIMQNNIIHEEQKGCRKGSRGCKEQLVIDTEIHNQVKQKHRNLYFAYIDYQKAFDSVPHSWLIHILKIYKIDDNLIDFLQHTMTKWTTTLKITTNYQCLTSSPIGISRGIFQGDSLSPLWFCLAINPLSRILNNTGHGYVIDRIKKIKLSHLLYMDDIKLYASTRHQLNELLRHTELFSNDIKMEFGIKKCKINSIIKGKHKLIDAHSLTISDQKISSMNPSEYYKYLGYQQNTNIDHTRIKQDLTKQYKNRLHEIFKTHLSGRNKVKAVNTYAVPILTYSFGVIKWSETDLNSLNILTRTTAHKHRIHHIHSATERFTLNRKLGGRGFIDIKNMHYKQLENLRSYFLNKAVDSQLHKAITDLSTSGTPLHFNDKDFKPKNKIINQDTKIEAWKKKSVHGRYRNNIDQHHIDKEGSFCWLTKGNIFAETEGFIIAIQDQIIKTRNYAKYILKEKISDDKCRLCNLTNETIDHVTGGCKVLASKEYVNRHNNVAKQIHQYLALKYKLIDSKTPYYKYLPKNVLENKLVKLYWDRDIITDKTVHCNRPDLTLTLKHTKTTYLIDISIPNTENLKQKYFDKIQKYLPLADEMKAMWRQDVVKIIPIILSSTGVIPQNLHKSLKDLNLKKCIFVELQKSVVLDTAAIVRRFLNLSSTITVT

SEQ ID NO: 24093 - protein, 1277 aa, Ouleus salvina
MKMSNFHSNKRYNLRSNSKVINITDAGVQKSRSNSSASPADSLFESPVSSPRSYEETDQYSSRSLSLSPVSDVQPAPRNRRNNNGNACKRSNKCTNVNSTHAPQAINILQTPYDSTQYAKPTRSVLQDMRPATTLAGRDRKRMKWTNEVNRMLLRCYYIATDLETNRTNYRSQLREKFIEHFPELHFLTEQRLADQIRVIHRNDRISPTERLNIKQDVAKSLHLNTNINSPSITDLSQNNNDETPSNLPTYMNPTRTLQDKITTNNSNQIDETENSVNKQLQDLKKTFHDNLINYKNTEPDSRPYIPKLQINYKTRNLIKSLNNIIEEVLEVNNITKIEEIHEIIYCAASTLVTHNNQPRSSNQNNQTNKPNNIKPGWERRLENRIKVLRKEIGQHTQYLRGNLSQKKQRKINQTQKEEQMIVDRLDVLKQKLQALAKRLRRYKNTSQRFKQNKLFETNQKLLYRNLHSRQQYTQEPKILEIQSYWEKIWSNPVTHISNNSWISIHNKETQYITPMPKFKIDLDDIKTATNKMLNWKAPGPDKISNYYLKYFTATHKTITDIFNTLIQQPQSIPRFFTQGVTYLKPKDTDTSNPANFRPITCLPTLYKLLTSIIARKINTHIMENNIIQEEQKGCRKGSRGCKEQLVIDTEIHNQVKQKHRNLYFAYIDYQKAFDSIPHSWLIHILKIYKIDNSLIDFLQHTMTKWTTTLNITTHLQCLKSSLIKISRGIFQGDSLSPIWFCLAINPLSKILNSTGHGYIIDRTNNIKISHLLYMDDIKLYASTRYQLNELLRHTELFSNDIKMEFGIKKCKINSIIKGKHKVIDEYSLSTSDQKICSMDSNEYYKYLGYQQNTNIDHTKIKQDLTKQYKNRLHQIFKTQLSGRNKVKAVNTYAIPILTYSFGIIKWTDTDLDALNILTRTTSHEHRIHHIHSATERFTLNRKLGGRGFIDVKNLHYKQIENLRSYFLNKAIDSRLHKAITDLSTTGTPLHFNDHDFDPQNKIVKQDIKIENWKKKSIHGKYRRNIEQDHIDKESSFCWLTRGNIFAETEGFIIAIQDQIIKTRNYAKHILKEKISNDKCRLCNIANETIDHITGGCKVLASKEYINRHNNVAKQIHQYLALKYKLIDTKTPYYKYLPKNVLENKLVKLYWDRDIITDKTVHCNRPDLTLTLKHTKTTYLIDISIPNTENLKQKHFDKIQKYLPLADEMKAMWHQDVVKIVPIILSSTGVIPQNLHKSLKDLDIKKSIFVELQKSVVLDTAATVRRFLNFSQIIENT

SEQ ID NO: 24094 - protein, 1267 aa, Zera sp.
MKMSNLHFNKRYNLRSNSNIRSMQITDVIVQESRSNSSASPTESLFESPASSPQSYEEADRCSSRSLTLSPISDVQPTPRYGRNIERNTSKRLGNSSNVNSIDAPQTLDDTTECAIPPRSVLQDMRPATTLAGRDRQRMKWTNEVNQKLLRCYYIATNLETNLTNYRPQLREKFIEHFPELNFLTEQRLSDQIRVIHRNNRISEKERLNIKQDVENYFHSNINTDSQSNNDDTVPNSSTHINATETLQDKNTINNINQMNPTDNTDTIQHQEIKNTFHDIMIKYKNTEPDERPYIPKLQINYKTRKLIQILNNIIEEELEANNVTKIEEIHEIIYCAAFTLVTHNNQVPTYLNKKNQTSKSNNNKPGWERRLENRIKILRKEIGQHTQYLRGNLSQKKQRKINPSKKQEQMIVDRLDALKQKLQALSKRLRRYRNTTQRFKQNKLFETNQKLLYKNLQPQQKYTQEPNIQEIQSYWEKIWSNPVTHTPNNSWLPMKDNETQNITPMPKFTIDLDDIKIATNKLLNWKAPGPDKISNYYLKYLTATHKTITDIFNTLIQQPQSIPRFFTQGVTYLKPKDTDTSNPANFRPITCLPTLYKLLTSIIAHKINTHIMQNNIIQEEQKGCRKGSRGCKEQLVIDTEIHNQVKQKHRNLYFAYIDYQKAFDSIPHSWLIHILKMYKINDNLINFLQHTMTKWTTTLNITTSLQCLKSPVINISRGIFQGDSLSPIWFCLAINPLSRILNNTGHGYVIDRTNNIKISHLLYMDDIKLYASTRHQLNELLRHTELFSNDIKMEFGIKKCKINSIIKGKHKVIDEYNLSTSDQKISSMNSNEYYKYLGYQQNTNIDHTKIKQDLTKQYKNRLHQIFKTHLSGRNKVKAVNTYAIPILTYSFGIIKWTDTDLDALNILTRTTSHEHRIHHIHSAIERFTLNRKLGGRGFIDIKNMHYKQIENLRSYFLNKAIDSPLHKTITNLPTSGTPLHFNDRDFEPQNKIVKQDIKIENWKKKSIHGKYRKNIEQDHIDKESSFCWLTRGNIFAETEGFIIAIQDQIIKTRNYAKYILKEKICNDKCRLCNVTNETIDHITGGCKVLASKEYINRHNNVVKQIHQYLALKYKLIDRKNPYYKYSPKNVLENKFVKLYWDRDIITDKTVHCNRPDLTLTLKHTKITYLIDISIPNTENLKQKHFDKIQKYLPLADEIKAMWHQDVVKIIPIILSSTGVIPQNLHKSLKDLDIKKSTFVELQKSVVLDTAAIVRRFLNFSATVENI

SEQ ID NO: 24095 - protein, 1282 aa, Cecropterus takuta
MKKTNTSISLRYNLRSTSKIQHMQNIRNTENEGLNRQASMWVDQENIPADHQICSSTSTTSIESIFESPASTPRSYEKSSSNTTSPMSDVTQPILRNKRIFKRSTTKSSSKTVNNPTRQVNPTRSVLQDMRPTTTLAGRDRQRMKWTNEVNQQLLRCYYIVTNLENNLTGYRTQLREKFIEYYPELHILTEQRLSDQIRVIHRNNRISAVERENIKKELELYNINLTNSDVSYQIPQPSLITQTTQCEQALNLHTITETNNMDIDTIHRTDTINTEPIGETVTTKENDTLSLKNIFTENIVKYKNSNPHLRPNIPKLQITYKTNKMIHDLNNIIQNYLTENNIVTLEEIHNIIYSAAMTAVTVNNKKIEKHRNIDKHNTQNLFKPAWERRLENRIIKLRKEIGQYLKGNLSQRKQSKINPRKIDDQEIIDKLDILKQKLQALAKRLRRYKKTSQRYNQNKTFDTNQKQIYRSFNPQQKITEPPDIEGIKNYWENIWSNPVNHSSNLSWIEDNDLENIESMPKFVIDIEDIKIATSKMLNWKAPGPDKIQNYWLKCLTATHKNIVDIFNGLIQDPSNIPDFLTQGITYLKPKDIDTSNPAKYRPITCLPTHAYKLLTSVIANKINTHTILNKIIPEEQKGCCKGSKGCKEQLIIDTEIHNQVKQKHRNLYYAYIDYQKAFDSVPHSWLVHVLKLYKIDNTLIRFLNHVMTKWATTLNITIENKSFKTSTIKIARGIFQGDSFSPLWFCLSINPLSKILNNSGHGYIIDRQVNTKLSHLLYMDDIKLYASTRQQLNNLLKLTEYFSNDIRMDFGIEKCKINSIVKGRHNLSEPYKLTIFNDTISSMEYKDYYKYLGFQQSTSIEHTKIKQDLTTQYKQRLNKIFTSYLSARNKVKAVNTYAVPILTYSFGIVKWTDTDLDALNILTRTTAYKHHIHHIHSAVERFTLRRKLGGRGFIDIKNLHYKQVANLRTYFFNKSKDSLIHKAITNIPTSGTPLQFKDREYKPENKIVKEEVKMENWKKKSLHGKYPNNILQNHIDSEASNYWLMKGNIFAETEGFVVAIQDQIIKTRNYSKYILKDSSVINDKCRLCSLTNETIDHITGGCKVLAGKEYINRHNNVAKQIHQYLALKYKLIKEKVPYYKYSPKNVLENNTVKLYWDRDILTDRTINCNRPDLTLTLKTTKTTYLIDISIPNTENLKQKHFDKIQKYLPLADEIKQMWHQNTVRIVPIILSSTGVIPKNLHTSIQELGLRKSIFIELQKSTVLDTTSIVRRFLNISTLVNN

SEQ ID NO: 24096 - protein, 1297 aa, Cecropterus dorantes
MKMKTSNPNISYRYNLRSLSRIQHMQNIRNTGNEELSSQASICLGQENTPADHQNCSSTSTTSLESIFESPASTPRSYEKSRSNTTSPMSDVTQPTPRNKRIFKRSITKSLSKTSSKVQEPRHYTENNSTSRQVTPTRSVLQDMRPTTTLAGRERQRMKWTSEVNQQLLRCYYIVTNLESNLTSYRTQLREKFTEYYPELHIITEQRLSDQIRVIHRNNRISAVERENIKRDVEALINLTNSNISSQIPQSSLVTQTTQCEQDSNLQTITEPTNMDTDTIHHADTINTESIVETLTIKENDTLTLEKTFTENIIKYKNSNPHLRPNIPKLQVTYKTNKIINDLNNIIQNYLTDNNIVTLEEIHEIIYSAAITAVTLNNKKTEKQGNFDKHNTPNTYKPAWERRLENRIIKLRKEIGQCTQYLKGNLSQRKQSKINPRKNDDQEIIERLDILKQKLQALAKRLRRYKKTNQRYNQNKRFETNQKQVYRSFSPQQKITQPPDIEEVKKYWEKIWSNPVNHSPNLSWIEDSDLDSIESMPQFVIDIEDIKIATSKMLNWKAPGPDKIQNYWLKYLTATHKTIVDIFNGFIQEPSNIPNFFMQGITYLKPKDINTSNPAKYRPITCLPTLYKLLTSIIANKINSHTILNKIIPEEQKGCCKGSKGCKEQLIIDTEIHNQVKQKHRNLYYAYIDYQKAFDSVPHSWLVHVLKLYKIDDSLIKFLNHVMTKWATTLNITTQNKSFKTPTINIARGIFQGDSFSPLWFCLAINPLSKILNNSGHGYIIDRQVKTKLSHLLYMDDIKLYASTRQQLNNLLKLTESFSNDIKMDFGIEKCKINSIVKGRHKLSEPYKLTVFNDTISPMEYKDYYKYLGFQQSTSIEHTKIKQDLTTQYKQRLNKIFTSYLSARNKVKAVNTYAVPILTYSFGIVKWTDTDLDALNMLTRTTAYKHHIHHIHSAVERFTLKRKLGGRGFIDIKNLHYKQIANLRTYFLNKSNESLIHKAITDIPTSGTPLQFKDKEFKPETKIVKEEVKIENWKKKSLHGKYPNNILQNHIDSEASNCWLTKGNIFAETEGFIVAIQDQIIKTRNYSKYILKDSNIINDKCRLCSLTNETIDHITGGCKVLAGKEYINRHNNVAKQIHQYIALKYKLINDKVPYYKYSPKNVLENHLVKLYWDRDIFTDRTINCNRPDLTLTLKTTKTTYLIDISIPNTENLKQKHFDKIQKYLPLAEEIKQMWHQNIVRIVPIILSSTGVIPKNLHTSIQELGLRKSIFIELQKSTVLDTTSIVRRFLNISTLIGN

SEQ ID NO: 24097 - protein, 1281 aa, Cecropterus bathyllus
MKMKTPNTNISNRYNLRSLSRIQRIRNTGNEELSRQTSIGLDQENIAADHQVCSSTSTTSSESLFESPASTPRSYEKSRSNSTSPMSDVAQPLPRNKRIFKRSVTKIVSKTSSPSRQVNPTRSVLQDMRPTTTLAGRDRQRMKWTSEVNKKLLRCYYIVTNLESNLTGYRTQLREKFIEHYPELHIITEQRLSDQIRVIHRNNRISAVERENIKKDVEAHINLTNSNMSYQIPQSSLITHTKQCEQATNLQNITETNSMDTETIHHTNTINTGPIVETVTLRENDTLTLKNTFTENIIKYKNSDPHFRPNIPKLQITYKTNKIINDLNNIIQKYLTDNNIVTLEGIHEIIYSAAMAAVTLNNKKTEKNRNIDKHNTQNIYKPAWERRLENRIVKLRKEIGQCTQYLKGNLSQRKQSKINPRKIDDQEIIDRLDLLKQKLQALAKRLRRYKKTNQRYNQNKTFEGNQKQVYRSFNPQQEITQPPDIEGIKQYWETIWSNSVNHSSNLSWIEDSNLESIESMPKFMIDIEDIKIATSKMLNWKAPGPDKIQNYWLKYLTATHKTIVDIFNDLIQVPSNIPDFLTQGVTYLKPKDTDTSNPAKYRPITCLPTMYKLLTSIIANKINSHTILNKIIPEEQKGCCKGSRGCKEQLIIDTEIHNQVKQKHRNLYYAYIDYQKAFDSVPHSWLVHVLKLYKIDDSLIKFLNHVMTKWATTLNITIKNKSFKTPTINISRGIFQGDSFSPLWFCLAINPLSKILNNSGHGYIIDRQVNTKLSHLLYMDDIKLYAATRQQLNNLLKLTESFSNDIKMDFGIQKCKINSIVKGRHKLSEPYNLTIFNNTISAMEYKDYYKYLGFQQSTSIEHTKIKQDLTTQYKQRLNKIFTSYLSARNKVKAVNTYAVPILTYSFGIVKWTDTDLDALNILTRTTAYKHHIHHIHSAVERFTLRRKLGGRGFIDIKNLHYKQVANLRTYFLNKSKDSLIHKAITDILTSGTPLQFKDKGFKPEDKIVKEEVKMENWKKKSLHGKHPNNILQTHIDSEASNYWLTKGNIFAETEGFIVAIQDQIIKTRNYSKYILKDSSIINDKCRLCSLTNETIDHITGGCKVLAGKEYINRHNNVAKQIHQYLALKYKLINDKVPYYKYSPKNVLENNSVKLYWDRDIFTDRTINCNRPDLTLTLKTTKTTYLIDISIPNTENLKQKHFDKIQKYLPLADEIKQMWHQNTVKIVPIILSSTGVIPKNLHTSIQELGLRKSIFIALQKSTVLDTTSIVRRFLNISTLVNS

SEQ ID NO: 24098 - protein, 1295 aa, Urbanus proteus
MENLNKNNSYRYNLRSLSRVQGAQNIRNTGNEALSRPSSISLEQVDTVADHQMRSSTSTTSLESLFESPASTPRSYEQSRSNITSPMSDVTLPTLRKDSTQKRTTATNLLKTNSIVQEPHLRIENRLTSRQVYPTRSVLQDMRPTTTLAGRDRQRMKWTNEVNHQLLRCYYIVTNLENNRTGYRTQLREKFIEYYPELHIITEQRLADQIRVIHRNNRISAIDRENIKKEVEKEINLTNSNVACHIPHSSLLTQTQYEQISNPQTDSEISGIDTDTTHIAAIINPELIIETITIEENDTLILKNAFTENILKYKNSNPYLRPTIPKLQITYKTHKIINDLNNIIENYLKDNNIVTLEEIHEIIYSAAITAVTVNNKTPNKNENIKKQYNNKKIGKAVWEIRLEKRITKLRKEVGQYTQYLKGNLSQRKQSKVNPRKIDDQEIIDRLDTLKQKLQALAKRLRRYRKTNQRYKQNKTFEANQKQVYRSFNPQQKNIQPPDIEKIQKYWQNIWSNPVNHASNLSWIEDNDLEKIESMPQFVIDIEDIKIATTKMLNWKAPGPDKIQNYWLKYFTATHKNIVDIFNGLIQEPCNIPAFLTQGITYLKPKDIDTKNPAKYRPITCLPTLYKLLTSIITNKINTHTTFNKIVQEEQKGCCKGSKGCKEQLIIDTEIHNQVKQKHRNLYYAYIDYQKAFDSVPHSWLIHVLKLYKIDHTLIRFLEHIMSKWTTTLNITVENKALQTDPINIARGIFQGDSLSPLWFCLAINPLSKILNNSGLGYIIDRQVNTKLSHLLYMDDIKLYASTRQQLNDLLKLTESFSNDIKMQFGIEKCKINSILKGRHKLTEPYKLTISDNTISSMEYKDYYKYLGFTQSTSIEHSKIKQDLTAQYKHRLNKIFTSYLSARNKVKAVNTYAVPVLTYSFGIVKWTDTDLEALNILTRTTAYKHHIHHIHSAVERFTLKRKLGGRGFIDIKNLHYKQVANLRTYFLNKASDSLVHKAVTDLPTSGTPLQFKDKEFKPENKIVKQDVKLENWKKKSLHGKYPNNINQDHIDSEGSNQWLMKGNIFAETEGFIIAIQDQIIKTRNYSKYILKDTNVTNDKCRLCNLTNETIDHITGGCKVLAGKEYINRHNNVAKQINQYLALKYKLISEKVPYYKYTPKNVLENKAVKLYWDRDIFTDKTINCNRPDLTLTLKTTKTTYLIDISIPNTENLKQKHLDKIQKYLPLADEIKEMWHQNTVRIVPIILSSTGVIPKNLHTSIRELDLRKTIFIELQKSAILDTTSIVRRFLNMSTLVSN

SEQ ID NO: 24099 - protein, 1299 aa, Urbanus sp.
MKNSISHSNENNSCRYNLRSLSRVQGAQNIRNTVSEEVSRQSPISLEQVDTVADHQMRSSTSSTSLESLFESPASTPRSYERSRSNTTSPMSDVTLPILRKESIQRCTTKTNLLKTNSIVQEPHLRIENRQTSRQVNPTRSVLQDMRPTTTLAGRDRQRMKWTNEVNHQLLRCYYIATNLENNLTGYRTQLREKFIECYPELHIFTEQRLADQIRVIHRNNRICAVDRENIKKEVEKEINLANSNVACHTPHSPLLTQTQYEQVSNPQTDSEISGIDTVTTHNAAIINTELMIGTITIEENDTLTLKNAFTENIIKYKNSNPYLRSTIPKLQITYKTHKIINDLNNIIENYLKDNNIVTLEEMHEIIYSAAITAVTVNNKKTNKNENIKKQYNNKNLGKPVWEIRLEKRITKLRKEIGQCTQYLKGNLSQRKKSKINPKKIDDQEIIDRLDTLKQKLQALAKRLRRYKKTNQRYKQNKTFEANQKQVYRSFNPQQKIIQPPDIEEIQKYWQNIWSNPVNHASNLSWIEDSDLEKIESMPQFVIDIEDIKIATTKMLNWKAPGPDKIQNYWLKYFTATHKNIVDIFNGLIQEPSNIPAFLTQGITYLKPKDVDTTNPAKYRPITCLPTLYKLLTSIITNKINTHTTFNKIVQEEQKGCCKGSRGCKEQLIIDTEIHNQVKQKHRNLYYAYIDYQKAFDSVPHSWLIHVLKLYKIDDSLIRFLEHVMSKWTTTLNITIENKSLQTDPINIARGIFQGDSLSPLWFCLAINPLSKILNNSGLGYIINRQVSTKLSHLLYMDDIKLYASTRQQLNDLLKLTESFSNDIKMQFGIEKCKINSILKGRHVLTEPYKLTISDNTISSMEYNDYYKYLGFIQSTSIEHSKIKQDLTAQYKHRLNKIFTSYLSARNKVKAVNTYAVPVLTYSFGIIKWTDTDLEALNILTRTTAYKHHIHHIHSAVERFTLKRKLGGRGFIDIKNLHYKQVANLRTYFLNKANDSLLHKAVIDLPTSGTPLQFKDKEFQPENKIVKQDVKIDNWKKKSLHGKYPNNINQDHVDSEGSNHWLMKGNIFAETEGFLIAIQDQIIKTRNYSKYILKDSNVTNDKCRLCNLTNETIDHITGGCKVLAGKEYINRHNNVAKQIHQYLALKYKLINEKVPYYKYTPKNVLENKAVKLYWDRDIFTDKTINCNRPDLTLMLKTTKTTYLIDISIPNTENLKQKHFDKIQKYLPLADEIKEMWHQNTVRIVPIILSSTGVIPKNLHTSIRELDLRKTIFIELQKSAVLDTTSIVRRFLNMSTLVSN

SEQ ID NO: 24100 - protein, 1023 aa, Autochton oryx
MDIETTHYTATINTEPRLEIITIDNDTLTLKNTFRENLQKFKKSNPILRPSIPKLQITYKTKKLINDLNNIIENYLTDNNIATLEEIHEIIYSAAITAVTVNNKGTKKHETNEKQCNKQKICKPAWERRLENRIFKLRKEIGQYTQYLKGNLSQRKQSKINPTKIKDQEIVDRLDTLKQKLQALAKRLRRYRKTNQRYKQNKTFETNQKQIYRSFNPQQNITQPPDMKEIQKYWENIWSNPVNHVSNLSWIEENELGNIESMPKFVIDLEDIKMATTKMFNWKAPGPDKIQNYWLKYLTATHRTIVNIFNSLIQEPSNIPDFITQGITYLKPKDMDTSNPAKYRPITCLSTLYKLLTSLIANKINTHITQNKIILEEQKGCCKGSMGCKEQLIIDTEIHNQVKQKHRNLYFAYIDYQKAFDSVPHSWLIRVLKLYKIDDTLIRFLNHAMTKWATTLNITINDKSYKTSKINIVRGIFQGDSLSPLWFCLAINPLSKILNKSGHGYIIDRNLNTKLSHLLYMDDIKLYASTRQQLNNLLKLTESFSNDIKMNFGIEKCKINSIVKGRHKLTEPFKLSIFNNTIRAMEYKEYYKYLGFQQSAYIDHTKIKQDLTSQYKQRLNKIFTTYLSARNKVKAVNTYAVPILTYSFGIVKWTETDLEALNTLTRTTAFKHHIHHIHSAVERFTLKRKLGGRGFIDIKNLHYKQVENLRKYFLNRAKDSCLHKAITDIPNSGTPLQFIDKQFKPENKIVKQEVKIENWKKKSLHGKYPHNIEQDHIDSEASNYWLMKGNIFAETEGFIIAIQDQIIKTRNYSKHILKDSSVINDKCRLCNLTNETVDHITGGCKVLAGKEYINRHNNVAKQIHQYLAQKYKLINDMVPYYKYTPKNVLENNAVKLYWDRDIITDKTIKCNRPDITLTLKSTKSTYLIDISIPNTDNLKQKYFDKIQKYLPLADEIKEMWHQNTVRIIPITLSSTGVIPKNLHTSIRELDLRKSIFIKLQKSTILDTASIVRRFLNITTLVNN

SEQ ID NO: 24101 - protein, 1200 aa, Astraptes hopfferi
MKMQNLNKNNSYRYNLRSISRVQGTQNMQNTGIEELSSQASISLEQGDNVTDNQMRSSTSTTSLESLFDSPASTPRSYETSRSNTTSPKSDVTPPILRKERIFKRKTTKSTLLKTKSQIQEPPPHIENRPISTQINPTRSVLQDMRPTTTLAGRDRQRMKWTHEVNHQLLRCYYIVTNSENNLTGYRTQLREKFIECYPELHIITEQRLADQIRVIHRNNRISAVDRENIKKEVEALINLTNSNTACRTPQSSQLTQTQYEQASNPQADNEGSGRGTETTNNPEAIHTDSTIQTVTVEENNILILKNTFTENILKIKNSNPYLRPFIPKLQITYKTHKIINDLNNIIENYLIENNIVTLEEIHEIIYSAAITAVTVNNKKTKKSGNIEKQCHNQKLYKPVWERRLENRITKLRIEIGQCTQYLKGNLSQRKRSKINPKNANDQEIVDRLDSLKQKLQAIAKRLRRYRKTNQRYKQNKTFEANQKQVYQSFNPQQKIIHPPDIEEIQKYWEKIWSNPVNHTPNLSWIEENDLENIETMPQFEIDLEDIKIATSKMLNWKAPGPDKIQNYWLKYFTATHKNIVEVFNDIIQEPSNIPGFLTQGITYLKPKDIDTTNPVKYRPITCLPTLYKLLTSIISNKINTHTTYNKIVQEEQKGCCKGSRGCKEQLIIDTEIHNQVKQKNRNLYYAYIDYQKAFDSVPHSWLIRVLKLYKIDNKLIRFLEHVMSKWTTTLNIKIENKSVKTAPINIARGIFQGDSLSPLWFCLAINPLSKILNDSGHGYIIDRQVNTKLSHLLYMDDIKLYASTRQQLNNLLKLTESFSNDIKMEFGIEKCKINSIVKGRHKLTEPYKLTIADNTISSMGYKDYYKYLGFTQFTSIDHSKIKQELTTQYKQRLNKVFTSYLSARNKVKAVNSYAIPVLTYSFGIVKWTDTDLETLNILTRTTAYKHHIHHIHSAVERFTLPRKLGGRGFIDIKNLHYKQIVNLRTYFLNKANDSLLHKAVTNLPTSGTPLQFKDREFKPESKIIKQDVKIENWRKKSLHGKYPKNIDQDHIDSEGSNHWLMKGNIFAETEGFIIAIQDQVIRTRNYSKYILKDSNIINDKCRLCNLTNETIDHITGGCKVLAGKEYINRHNNVAKQIHQYLALKYKLINEKVPYYKYTPKNVMENKVVKLYWDRDIFTDRTINCNRPDLTLTMKITKTT

SEQ ID NO: 24102 - protein, 1356 aa, Choaspes benjaminii
MDAWLRGSSVVNGPSPIPGDLGEYLALPGMLGSAGLDHLVPSLNSGPPRGANHGMENFNKNKYNLRSLSKANKSLKSMRAIDEEKEENSRTFTTQHLASALTCSPSEPLTRPSSPESLFESLPSSPHSYELSPGYQSRSSSVTPTHSIRQVESRRTRGERSHQLRRQETDKHQTPVNNSVAEPLALGKPNPTRSVLQDMHPATTLAGRDRQRMKWTDEVNRELLRCYYIATNMESNLTGYRTVLREKFINRYPELHCLTEQRLSDQIRVIHRNNRIKVTEREQIKKDMKEKLNSCNNQLNSHIDTHNEINTNSIPTIIPHHHPPTDHTLLEQTHTHTSKETQQNQVLITTEPEAANKDSYISLETTFKENIIKFKNTDPTLRPYIPKLEITYKTKKLISDLNHIIEKHTQNNQPKTLEDIHEIIYSAAVAATTSHNTKSHIINTTQKATLKNKKPAWQKRLEKRISKLRKTVARLTQYLKGNLSVKKQKIVNPTKKNNEQITLELDTAKQKLQALAKRLRRYKKTTLRYKENKLFEMNQKLLYRSLNTEEQITKDPDINETHTFWENTWSKLVHHNTDTSWIATETAKAQNIEPMPQFVIGVDDIKVAVAKMLNWKTPGPDKIQNYWIKYLTAIHKHLANIFNMLLQDPSNTPAFLTQGITYLKPKDTDTSNPAKYRPITCLPTTYKLLTSIITHKITTHITHNNIIPEEQKGCSKGSQGCKEQLVIDTEVHNHAKQKHRNLYYAYIDYQKAFDSIPHSWLIYILQLYKIDETIINFLQQIMTKWTTTLSIRTKNETLHSKPIKISRGIFQGDSLSPLWFCLAINPLSTLLNNSGHGYVVDKQNNIKLSHLLYMDDLKLYAASRQQLDEMLKITETFSNNIKMTFGFEKCKINCLVKGRHKNTGPYSLCSQNNSVYSMDCKEYYKYLGYQQSTSLEHTKIKQELIKQYKHRLIKIFKTHLSARNKTKAVNTYAVPILTYSFGIIKWSDTDLDALNTATRSIAYKHNIHHIHSAVERFSLKRNAGGRGFIDIKNLHYIQVNNLRSYFINKSQVSTLHRAVVDLPTAGTALQLKDKHYSPISKILQIEEKLKSWRNKVLHGKYPRQLEQDHIDKNASNQWLVKGNLFAETEGFVVAIQDQIIKTRNYAKYILKDNTIVNDKCRLCHQTNETIEHITGGCKSLAGKEYIHRHDNVAKQIHQHLAYKYHLIEDKVPYYKYSPKKVLENSIIKLYWDRDIITDKTIHCNRPDITLTLKVPKITYLIDVSIPNTDNIKQKHFEKIQKYANLVDEIKDMWHQETVKTIPIILSSTGVIPKSIHTAIKELQLRETIYIELQKSTLLDISSIVRRVLNLSSVVQT

SEQ ID NO: 24103 - protein, 1289 aa, Hesperia comma
MENSQKHNKTNNNIRYNLRSLSRGAKSNNNSLSIRSKELSRRDLIREDVTADHESGSSTSSRESLFESPISSPCSYEESYQYESRSTTLSPNSEVIQGNEIPYDVHRLSTTISEEPSYTHSTIGTASHINPTGSVLQVMRPATTLGGRDRQRMKWTKEVNEQLLRCYYIATNLESNLTGYRQQLREKFIEIYPELHFMTEQRLSDQIRVIHRNNRITPNDRDRIKNTLTQLNNTTRPISLQQYTPESTQLPVLEQHLDHVESTLTITENINTEQNYREDTETRTSTVEVLNEENNMTEVENIFTENLRKFKTPDPTLRIPIPKLQISHKTKKVIEDINIQIKRHLKTNNVTTLEELHEIIYCAAVTAVTINNKANIPNKTTNATVNRSKKPAWERRLENRITRLRKEIGQHTQYLKGNLSEKKGTKLKLSNLEEQKVIENLDTLKQKLQALAKRLRRYRKTNERYRQNKTFESNEKLFYRKFNPPPKLHTNPDINTIHDYWNNIWSNSEVHNPVPDWFALEEEEYRDIESMPQFKIELEDVKIATSRMHNWKAPGPDKVQNYWLKNFTATHQKIAEILNTLVQEPEKLPLFLTQGVTYLKPKDTDTTNPAKYRPLTCLPTLYKLLTSIISTKINSHVTNNKIIQEEQKGCCKGSRGCKEQLVIDSEVHNQVKQKHRNLYYAYIDYQKAFDSVPHSWLIEILKLYKVHHNLIHFLQYTMNNWTTILNITINNNHIKSSPIKIARGIFQGDSLSPLWFCLALNPLSKILNRSGHGYIIDRVNKTKLSHLLYMDDIKLYASNKRELHNLLKLTEKFSNDIKMEFGIEKCKINSIIKGKHNITEPFRLTTDDTIKSMDGKDYYKYLGYLQNTSIEHTKIKQNLITLYKKRLNQVFKTHLSARNKVKAVNTYAVPILTYSFGVIKWTDTDLDALNTLTRTTAYSHHIHHIHSAVERFTLARKLGGRGFIDIKNLHYKQIINLRNYFLNKAKESPLHKAITNFSTSGTPLLFKDEQFEPDNKIVKLESKLENWKKKSLHGKYPLNIEQDHIDREASCGWLMKGNIFAETEGFIIAIQDQIIKTRNYAKYILKDQSIVNDKCRLCNISNETIDHITGGCKVLASKEYINRHNNVAKQIHQYLALKYKLIDNKVPYYKYSPKNVLENSTIKLYWDRDIITDKTIHCNRPDITLTFKNTKTTYLIDISIPNTDNLKQKHSDKIQKYLPLADEIKDMWRQDTVRIIPIILSSTGVIPKNLHVSLKELSLRKSIYLELQKSVLLDTASIARRFLNSSPTL

SEQ ID NO: 24104 - protein, 762 aa, Hesperia comma
MESMPQFKIELEDVKIAISRMHNWKAPGPDKVQNYWLKNFTATHLKIAEILNTLVQEPEKLPLFLTQGITYLKPKDTDITNPAKYRPITCLPTLYKLLTSIISTKINLHVTNNKIIQEEQKGCCKGSRGCKEQLVIDSEVHNQVKQKHRNLYYAYIDYQKAFDSVPHSWLIEILKLYKVHHNLIYFLQYTMNSWTTILNITINNTHIKSSPIKIARGIFQGDSLSPLWFCLALNPLSKILNRSGHGYIIDRVNKTKLSHLLYMDDIKLYASNKQQLHNLLKLTETFSNDIKMEFGIEKCKINSIIKGKHNITEPFRLTTDDTIKSMDGKDYYKYLGYLQNTSIEHTKIKQNLVTLYKKRLNQVFKTHLSARNKVKAVNTYAVPILTYSFGVIKWTDTDLEALNTLTRTTAYSHHIHHIHSAVERFTLARKLGGRGFIDIKNLHYKQIINLRNYFLNKAKESPLHKAITNFTTSGTPLLFKDEQFEPVNKIVKLESKLENWKKKSLHGKYPLNIEQDHIDREGSCGWLMKGNIFAETEGFIVAIQDQIVKTRNYAKHILKDQSIVNDKCRLCNISNETIDHITGGCKVLAGKEYINRHNNVAKQIHQYLALKYKLIDNKVPYYKYSPKNVLENRAIKLYWDRDIITDKTIHCNRPDITLTFKDTKTTYLIDISIPNTDNLKQKHFDKIQKYLPLADEMKDMWHQDTVRIIPIILSSTGVIPKNLHVSLMDLNLRKSIFLEIQKSVLLDTASITRRFLNLSPTL

SEQ ID NO: 24105 - protein, 1299 aa, Coeliades ramanatek
MYNSNKHKYNLRSHSKALQGTKSAQVIEENMDRREQDSGNLGTTAADNHTSMSSRTSSPKSLFESAPSTPRSYEQSPQYHSRSSSNSPLSYIGQESDTQQSIRGRRSRIFYTQSLGENRATTTVDRIEIEPNNPTRTVLQDMQPATTLAGRVRQRMKWTNDVNKELLRCYYTVTNLETNLIGYRQSLHAKFIHTYPELHFISEQRLSDQIRMIHRNNKVSALERGNIKRHVETQLNLDTANNSAASLNVGTTNNDPTERFELDNHSPSSNITPALTDNLQTSATEQPTETNLINNLNIHTELTNTFYEKITKYTATDPNTRPLIPKLNFKYYTNKIIDQMNLIIKNHLQTNNNVTLEDLHLIIYSAAVSIISLHNKLYKHKKSEQNNKNFQQRKNSKPAWVTRLEDKISKLRKEIGIYTKYLEGKLSLKKEKRINPTKKNNQEIIDILDTLKQKLQATSKRLRRYKKTNQRYRENKLFESNQKLLYRSFHPEETITHSPDMQEIQTFWENIWSKPVQHSAFASWISSEEAEISAIQTMPQVTINLEDVQYVVSKIHNWKSPGLDKIQNYWLKYLTATHQYLADIFNTFLQKPDNIPAFLTQGITYLKPKDADTTNPSKYRPITCLPTIYKLLTSIITHKINKHITQSKIIPEEQKGCCKGSRGCKEQLVIDSEIHCQVKQKHRNLYYAYIDYKKAFDSVPHSWLIYILKLYKIDSRLIDFLECTMTKWTTILNVKTGSTSLKSSPIRIRRGIFQGDSLSPLWFCLAINPLSRLLNDSSHGYIINTQNKTKISHLLYMDDLKLYATNKKQLDALLKITENFSNDIRMEFGVEKCKVNSIVKGRQENTEPYNLSLYNDTIHPMDSKDYYKYLGYIQNSSIDHTKIKQELIIKYKQRLNKIFKTHLSARNKSKAVNTYAVPILTYSFGVIKWSDTDLEALNTTTRMTAYKHNAHHIHAASERFTLKRKLGGRGFIDIKNLHFTQIENLRKYFLDKASVSPLHKAIIDLQTSGTPLNFKDKDFEPLTKIKKEEQKLESWKRKALHGKYPMNLDREHVDKEASNAWLTKGNIFAETEGFLISIQDQIIKTRNYSKYILKDPSIQDDKCRLCHNSNETIDHITGGCPILASRDYTQRHDNVAKQVHQYLALKYQLIETKTPYYKYIPKNVLENKTAKLYWDRDIITDKTISCNRPDITLMLKIPKMTYLIDISIPNTENLKQKHLEKIQKYLSLADEIRDMWHQQTVKIIPIILSSTGVIPKNLHIALQEIQLRKNVFIELQKSAILDTCSIVRRFLSSTPLMQT

SEQ ID NO: 24106 - protein, 1171 aa, Ophraella communa
MPLCLKTARSQPQVLSQTYPNIPVTEQRVADQRRAILTKKYLSEEMIEQIKREVREAIEREDNQNSEIEARNPQVQSTSQPLINQPISSSQPSQSTVSILTNPSPDVQNRETVSSHDGNRPLDSSREINEDSPSHIRTIEDREQAEDRETIRLYIAHLKELLSTTLQKYKGMDPTRRPYIPKQKTSRKLAKIIDTLNTEILPSLLETETETFTELHDLIYCTAYTAAVANGSKITEQGARGNTKQYVPPWKRRLVKKIATKRGEIGRLMEYIRGNPSNKLSKKVKEIQKKYRVHTPRDSPNNGPKECLDTLQQKLSALSNRLRRYTTSDKRRQQNKEFKTNEKKFYRALKTDSNQNEQNGAENIPTQEEIMEYWKAIWNQDTRCNLDTNWLIKEEEENEHIEPMEEPHITVEITKEVINNTHNWKSTGSDNLHNFWYKKLDSTHNKLTEFLNKFISNPESIPYFLTEGKTYLLPKGRISRDPSKYRPITCLQTIYKILTSCITNILNKHVENHMIMTEEQKGCRKGTKGSKEQLIIDSVILNEVRKKNRKLSCCYVDYQKAYDSVPHSWLIKVLKTYKVHPVLIECLQQMMKGWRTKILLSVKVGQKKSAQGLETTIDSPEIAITRGIFQGDSLSPLWFCLALNPLSKLLNRTGIGYALKNEQTHHIISHQLYMDDLKLYAPSPGKLKELITLVEQFSNDISMTFGLDKCKIINIEKGKCQPGELQLKTGGLIEAMNEEDVYKYLGYQQAKIIDHTKIKEDLSREYVSRVRTICRTELNSKHTFKALNTIAVPVLTYSFGVIKWTETDLENLMRKTRTILTEYRKHHPKASTLRMTIPRKEGGRGLTDITNLHNGQIKLMRQYFHQRKHVSPLHLSICLQDKAYTPLNLSNESDQPNETIRSKKNKHQEWRNKTLHGRHPHELDQNHVDFTASNAWLTCGDLMPETEGFMLAIQDQVINTKNYLKYIVKDSTITEDRCRKCKEKSETIQHITSGCSMLSQTEYLQRHNQVAAVIHQDICYKLGLKQDTRKTPYYKYEPPALIQNDNYLIYYDRSIITDRTIPCNKPDIVVRNKVEKEAYIIDVAIPNTHNILTTIHEKKRKYIELADEVKKMWKLNKVTIVPIVISSTGVIPKELYGSLETLGLHRNTYILLQKAVVLNTARIVRRFLSQQ

SEQ ID NO: 24107 - protein, 964 aa, Clytia hemisphaerica
MRHAHPIQHEAAQDVQRVKARWSDEELKLLAVSEASAPPETRFMNQYLIGKFPQRSLESIKGQRKSAKYRNILNDIIVRERDDNPVASGSDDEDQGPDAGFPDTPPDSRDPFFRQIREIAEDDIELGQILTRFIDHGADVTPELERYINEHFVRQAPQRRRPPVNPAPDRRPYRRRIRLKRYIRFQEMFKRSRKQLTTNILNNTCEETDTFPTAESVRNTYQRIYESESPADNHEYREAPHPCDPTFLPITIEEIKRELKNMPNKAAGPDFFKVKDLKAANLSSICMIFNYCLVTGTQPVQWKKNRTTLIPKKPDGLDDASNWRPITISSVIARLLHRILAKRLTQALHLNPRQKAFLPMDGIAQNTLILDSVIQKARKSRSTLSIVGIDLSKAFDSVSHHSLTRALRRHKVEEQMIDYIINTYTGATTNISCGPVKLDRIRLLRGVKQGDPLSPILFNLVLDELFDLLPSWIGAKISDSIVNALAFADDIILLAESHAGMNRLTEILADFFRKRSMSVNAKKCFSFRFLLSKKDRVIVVSRERSYSMNGEPIPSNTYDSPFKYLGIKYDPRGKMKPSLTEFESMLGRVKGSPLKPQQKLTLLRDNVIPKFTHQLVLGRVTKGLLQSFDLAIRKTIKDITRLPSDTPTMYFHAPISTGGLGFGKFEETIPRYTLKRLRNLENSTDLATRDLANSTYVHDLRQKLLAMINKHTVEDALNYTKNHRIGNLYDSIDGSHLQECLSNPNGSTWLNYAPRHVTGKSYIRLIQLRINRLPTLENCNRGRANDKACRHCKLYQETVTHILSRCPKTHALRIRRHDSIAKLLQIACEAANLRVLYEHHIRINNQQLHKPDLIVVSPDSATIIDVSIVTGRMRIHGNTITLNGNWDHKAQIYNSEPINDYVRNLTGREDIKHAALIISIRGVWCAKNDDLFKRLGIAKKYRELMVIRAMEWGCRLWSTFMRTT

SEQ ID NO: 24108 - protein, 1107 aa, Phalangium opilio
MAHFIPKLSGGREKKLSFPFNLECTFCAILTLPNRPAVVRHLTDTHSVKKVSFFCSICGIEYDLLSSISSHYSKCFKKHSETHDTHDTLSTPSNNATVKEPPSPFGTGVICTVCGLVWRSKQSLGQHMQRRHPLERSQSLEISGREHWTRSELSNLAELELEARKDSTIKYINMYLHRHIIGRSLDAVRGARKSARYKQIRDELERKRQESAPTAEDGCSDESSDESTDSLPLLELSVGSSDPSDKEENPDQWREHFPEIGINSDLPEHLIAALNEGPVGDDTYSQILAVFLSGDEQVEANKHPKKKPAGRRRPVENRKQRKVRLYAEFQRLYAISPKRVIDRIENGEKQSSHIKLDALHETFDPIFTSQSLQPESSDFQLPPATEKFILPMTLQEIQIALKSLPRGSAPGIDGLVKSDLCKIKREALLGLFNNWLKFGEIPSSLKNLKTVFIPKIQDPQTGGDFRPLTMASIIYRTFSKILTRRLTDLFPINRWQAGFTEDASTSVNTLLLQSIMRVQKTSRKSLYMCALDISKAFDSISHLSINDVLIRRQCPEGYLKLVNNLYTNCRTIYSLQGETDSKEVQLNRGIKQGDPLSPLLFNMVFDELIRGLSEIPGVDLSPTHGVSVLAYADDLFIMSDSYSGLDRLMRKVVDFLDRHHLKINETKSKYFGFHHVGKLKRFKYDLRQIKLKNTYLKSEPPNAAIKYLGLRFYCNKPPELDLTDFKNRWTKISRAPLRTKQKYNLLINNVVPKFTYVLSCMLSPYMAALKFDKELRKVVKTLYHLPVGMPTALLRIPWKEGGLGLLDVEQQVLGTYCKSIGRLLRRTEPSVADLMERSTIRGIYSKAFTRVGLEYTSSDAHEIVRAVKINKRKRLDTQTNALKSKDVKLFRSHPLSNSWLNPNNTYLSPRDTINALRLRAGLYTTRSLSNIKSTNPSSRNCRHGCETLETAFHICQICPFVKGARMKRHNVVVEKVTKMCASYLDGSHIELEKIRLDADGTRLKPDGVVFGPLKNYIIEVAVPWDSTLTSLNQVFFQKQDIYESLRQTMARAKDTILIPVIFGARGLVLDKSARLLKEIGLTDRQLKFLSNDALIGSLCVLTKFMSL

SEQ ID NO: 24109 - protein, 957 aa, Ampulex compressa
MHKNWHDEQQVNKIDSKKARWSAEELALLARREAQLTRDRVRFVNQALKEYFPDRTLESIKGQRKNQAYKDKVLQILGEQQEEESIDQTTSSSNLPSKQQNPDLVDTLKKLFAELSPLDSIKYRADHLDQICNGMTQWPREKLFEELEIYLLSIFPISTQEKKRANHPLEQTTTKRQARRMEYAKTQRAWKKNPCKCLKTILKGKTTAGVTGKEDMIEFWKTTMTRTTDQSPPQGTQRPVLHKLWGPILPDEIRKSFPETSTSPGTDGITTRQLKAVPIHILTRIYNLFLVCGRLPKHLLRAKTTLIPKKDGADSPGDYRPITVTSIITRSFHKILAKRLVDKIALDKRQSAFLPKDGCAQNIFDLDMILKHHRQCFKPLYMASIDIAKAFDSVSHSTIRGTMQTMGIPDPMVTYIMDTYERGTTFLVCDKWRSEEIKPSCGVKQGDPLSPMIFNMVIDRLLEGIPPEVGVEVGGKLHNAFAFADDLIFVASTSVGLQLTIDTASEYLEQCGLRINATKSFTVSVKNVPHMKKSVVDKRQKFKCLGREMPALRREDEWKYLGIPFTPEGRTMAQPESCVKEALEKVTKAPLKPQQRLFALRVMILPGIYHLLTLGNTTLSRLKKVDAMVRAAARRWLNLPHDTVNAYFHASKKDCGLNIPSVRWLMPLHRLQRLRNMSYTGQARNSYLSQEAQKVIRRLTVENTAFDTARKIEERWAKLLHGSTDGSGLRESSKIPQQHQWVTEGNRLLSGSDFVNCVRLRINALPTKSRTARGRQADRSCRAGCGEVETLHHILQQCHRTHGARIDRHNAINSYVKRSLEAKYEVVAAEPVFQTPMGVRKPDLIAKCGNVALVVDTQIVGLHLDLNQAHKNKADKYKHLGDAIKDRYGVTKAEFTSVTLSYRGLWSATSAKDLMDRGILKKKELKIVSTRVLIGGVMCFHRFNRTTNVRKPREGVG

SEQ ID NO: 24110 - protein, 977 aa, Paramacrobiotus metropolitanus
MVFKCDLCPKVCKSAHGLTAHRDSAVCKKAQRKALRLGPSVASQPAAGSSHSTPKAPVPFPATTANNSAGAAPTPPPTQRTFQPSKERVLRRIPHGARPAARISLQKALQQIATKNDSKSWLKLFAFAPSALRLPAKTKSERTSSLATAVKKNLDLYDRDVEVPRSQPPRTKKKWSSDEDVARRVGQKIDDGSVSGTMRVVMSTDSIAVITPETLKELRAKHPESGLPCVTPPAADSPPAPPVSAADVFAAIHSFPRGSAGGPDGLRPQHLLDIVGSKMDAHSGQFCETVASVLNIVLTGEVPADIRPAFFGGKLLALRKKDGGLRPIAVGMTLRRLLAKIVCTSVAERATAILSPKQLGFNVRGGAEAIVHGTRLFLNASPDTTKALVKVDFRNAFNTVSREVVLNAVKSHFPEYYAFFHSAYGYHSSLFVDDHILSSETGVQQGDPLGPLLFCLALHAIIATLDSEFNSWYFDDGTLGGLPGNVLENFARIVERARAVGLEINIAKCELYVTGGTECLQREAVNDFLARHPGIRIMSTSSLTLLGAPVLDEAIAPMFAEKAAALTVVSERMQLLPRHHALYLLRHCLGAPKIIYMLRCCNAWKYPHQLYKIDEVLRSCFQLLCNARTNHDDYPSWRRASLPVSRGGIGIRRSEELALPAYLASIHSVTGLVSLLLPERSAVDVTEAQEMWKAKARQAELPELGFRKLQKTWDLPLCNTSLSSLLELFHDDEINKARLLAQSTPEAGVWLNALPSAHIGNLLDDDTLKISVGLRLGAVICDPHECMKCHKPVDGQAHHGLSCLFSAGRHPRHGALNSIVCRAFVSAGIPAKLEPRGTSHTSERRPDGCTTFAWKRGMCLVWDVTCVDTVAASHVKSTSTNAGAAAILAEEKKSRTYLYLNGRYIFAPIAFETMGSWGPSAIALIKELGKRLRDHTGEKRSHEFLRQRLSLEIQRGNAASVMGTMGEAEKLNELWML

SEQ ID NO: 24111 - protein, 903 aa, Paramacrobiotus metropolitanus
MEFKCDLCPKVCKSSHGLAAHRDSAVCKKAQRKALRPGPSAAPSAAPQPAAGSPRSLPPAPVPIPDATANNSAGAAPTPPTLPKAFLPSKERVIRRIPHGARPAARTSLQKALQQVATKNDSKSWLKLLDFAPSALRLPAKTKSERTSSLATMVKKNLDLYDRDAEVPPSQPPGTKKKRSSGEDVARRVGQKIDDGSVSGAMRVLMSTDSIADITPETLKELRAKHPESALPRVAPHAADTPPAPPVSAADVFTAIHSFPRGSAGGPDGLRPQHLLDIVGSKMDAQSGLFCETLASVLNIVLIGEIPADIRHIFFGGRLLALRKKDGGLRPIAVGMTLRRLLAKIVCSNVAERATAILSPYQLGFNVRGGAEAIVHGTRHFLNASPDITKAVVKIDFRNAFNTVSREVVLDAVKSHFPEYYAFFQSAYGHHSALFVGDHILSSEAGVQQGDPLGPLLFCLALHAVVATLEAEFNAWYLDDGTLGGLPRDVLENFGRVVEGARAVGLEINIGKCELYVTGGTECSQQEAIKDFLTRHPALRVMSSSSLTLLGAPVLDEAIAPIFAEKAAALTIVSERMQHLPRHHALYLLKHCLGAPKIIYMLRCCNAWKYPQQLYKIDEVLRSCFQLLCNVRTNHDDYPCWRQASLPVSKGGIGIRRSEELALPAYLASIHSVTGLVSLLLPGRPAVDVSAAQELWKLNTRLAELPDPGFRSLQKTWDLPLCNVSLSTLLEVFRDDEINKARLLAQSSPEAGVWLNALPSAHIGNLLDDDTLKISVGLRLGAVICDPHECMKCHKPVDGHAHHGLSCPFSAGRHPRHGALNSIVCRAFVSAGIPAKLEPRGTSYTNERRPDGCTTFAWKRGMCLAWDVTCVDTVAASHVKSTATTAERPLSRQKKRNPDSTRT

SEQ ID NO: 24112 - protein, 931 aa, Paramacrobiotus metropolitanus
MAADKEPCPFCQKLYCRGAGLASHMRACKSRPTGSAPSAMGNNSNGAAPTPPAPPKAAPDFRPTKERIMRRIPHGARPTARASLQRTLLRVASQNDSSSWLKLLAFAPNALRLPAKTKSERAVSLATAVKKNLDLFDRDIEIPASPPPPPLNPKKKRNSQDDLVRQVGLKIDDGSVSGAMRVISSTDSVAAVNADVLDELRTKHPKCTPPIMAPLDPGSAAPPISAADVFAAIHSFPRGSAAGPDGLRPQHLLDIVGPKMDVHSSQFCEALASVLNIVVNGKIPSDIRPTFFGGKLIALRKKDGGLRPIAVGLTLRRIVAKIVCTKVADRVTATLCPLQLGFNIRGGAEAIVHGTRKFAESDPETVKAILKIDFRNAFNTVSREAVLNAAHAHFPEYSAFLQSAYGYHSSLFLDQYNLSSESGVQQGDPLGPLLFCLVLHLLVITLTTELNAWFLDDGTLGGSPASVLANFDRIIAEAHSIGLDVNIAKCELFVCGGTESNQQHVTAEFNVRHPQLRVVSSSTLTLLGAPVLDDAIGPSLIEKAATLTRMCERLQLLPRHHALYLLRFCLGAPKVIYMLRCCNAWKYPEKLYEIDEKLRSCFQTLCNVRTAHDDYPCWRQASLPVCRGGIGIRRSEELALPAFLASIFSVSDMVSLLLPGHAAVDLTGALELWKKNARQPELPEPNFRKQQRTWDIPMCNISLSTLLEIYRDDEINKARLLAQSTPEAGIWLNALPSAHIGNLLDDDTLKISVGLRLGVAICEPHECMKCQKHVDKYGHHGLSCAFSAGRLPRHGGLNDIVCRACVSAGIPAKLEPRGTSHTSERRPDGCTTFAWQRGLCLAWDVTCVDTVAPSHIKKTATHASAAAVEAEQKKSQLYSYLNGRYTFLQLLSKQWAHGDRQPLPSLKNWANDWSNTQAKDVPMNFYVKDCH

SEQ ID NO: 24113 - protein, 1048 aa, Venturia canescens
MDATGPACASLTGEPSGSTGPTSGDSESTDSAPNLERAPYMCLYPGCDRSFPTTRGRGVHHQKGHKDWYDAQQNVQAIKARWSEEEKLMLARREAQLLNSGERLLNVALCQVFPTRSLEAIKGQRRKDSHKNLVRQMTAELLNQTPAMDMLPEEETPLVEDPIRACDPPAAPPVEEVPPARSEEEWSPILHFLCSLKPMKAQAYRTDILQNMVSSLQRGSKERLLEDVTIYLLTVFPPKRKHPRTSNAPRRVPGPGGLHRSARASKKDARREEYARVQGLYKRNPCRCLRAILKDKATTNAPPKETMIPFWTRVMTCGGDTSPGVGEKRKVKADLWAPITSDEILEAMPEGGSSPGPDGMSVKELRAIPVGILLRIFNLLMICGKLPRHLLESKTTLIPKKDGADSPGDFRPITVSSVITRTFHKILAKRLSLGIELDERQKAFRPVDGCSENIFLLDMILRYHRQKFLPLFLASIDVAKAFDSVSHASIKSTLGVMGLPNVMVDYIMDTYHHSTTRLAYGDWQSDLIHPTCGVKQGDPLSPIIFNMIVERLWRLLPADVGIRVGKRKVNASAFANDLVFYAATPLGLQSLLDIATDFLSQCGLSVNTGKSFTVAVRNVPHEKKSVIDASTTFRCRGTVLPALKRTDEWKYLGVPFTPEGRLNKRPFDAYRSALDILTKAPLKPQQRLFGLRVMVIPSLYHRLTLGCTNIGVLNKLDKITRNAVRTWLALPHDTVVAYFHADARDGGLSLPSFRWSMPMLRFVRLKNLGAFTRSDGQSAESIFLSNEIRRAEMRINDHGSVLASAESIQKRWARLLHTANDGAGLEQSRKVPSQHAWLTQGSRIVTGKDFLNMSRLRINALPVRSRTSRGRLADRSCRAGCKDTETLAHVLQFCPRVSGIRTERHDACIAYVAQSLSKNHRVIEKPRFKRTEGNLEPDLLAIRGSNALVIDATVIGVQRDLRLAHLDKIEKYRVLEDLIKRRHRVDSVTFTSVTLNWKGVWSKDSAEDLVRLGVLRKSELKIMSTRVLIGGLDIFSTFMRSTARSGIG

SEQ ID NO: 24114 - protein, 959 aa, Leucinodes orbonalis
MSLPNYIQCNLCSQPRFFKGQRGLKIHVTRCHSASSSLPTHPQAISTISSSNSQAAPSSPVLPLQYDLCTHLAKLKHSLPILKRVPRGARVCVAYKLAADLRSAANLNSTQAWETLLTFPYRILHIDPSNTSDNSVSLTTRIKDNCNSPNNINFDITLNRNNIRNSVYLNLIENKISDGDIKGAARLLFSDDALAPNTPDTLSSLHDKHPSPSDNIHFPEPPSNPSHILQITSLEVSQAVNGFRSGTAAGLDGLTAQHLKDLLGAGGDASTALLDALTDLVNLMLAGKVNDSILPTLYGANLCALKKKDGGIRPIAVGTTYRRLAAKISCRAVCDTLSNYFQPTQLGFGVKGGCEAAIHAARSYIQFRPDNIILKVDVKNAFNSIDRGTLLTEVVKQVPSLHSFLWQCYKLPSNLMYRDNVLSSATGCQQGDPLGPAIFSLAIHPIISKLKSKFNIWYLDDGTLGGDNETVLNDFSVLIREFQNCGLELNFGKCELFVPPSCENRNDIVNKFKLINPDIKIIDATSLRLLGSPLLKEAYFAYVNEQISKFNFAADRISKISSHAAYTIIKFCLFVPKFTYTLRCTDFWRYPDLTSKLDNILQRTLSSTFNVKLDARSWIQASLPIRHGGLGIRSITSISLPAFLSSAHNTLDLVYKILNHSHNFNIIDSSYISSATDTWKSLTQNDLPTIPTAQRLWDEPLCGLVRKSLIETASNSADRARLLAAGKWESGLWLRTIPSPALGTKLDNVSFRILISLRLGLFSTMPHRCTCGKVVDQLAHHGLSCPRSAGRIPRHASLNDVIRRALVSARIPAVLEPNGLVRSDGKRPDGMTLVPWKMGRPLVWDATCVDTLAPSHLHLSSVEAGSAAASAEALKRRKYESIGDTYIFEPFGVETLGSWGPSAHKLYRDLAKRLAESSHDTKAGLYLGQRISLAIQRGNVTSLLGTFPHDGDLNQIFYL

SEQ ID NO: 24115 - protein, 958 aa, Laspeyria flexula
MNSTAYVQCGACSRPRFFKGQRGLNIHVSRCHRITDSVQPAHFQASSSTPLSPNLPPAQSVDSSPPVPFWQVISKLKHSIPIVKRVPRGARICVAQKLTTDIKSVVNLSTQRAWEHLLTFPYRILHVDSSSSSKSSSLTSLIKENCISDHLPLPLDQIPFRKAGKSEFFHIENKVSDGDLKGAARLLFSDDTLAPNTPDTLLALHSKHPCPNSNLSLPDPPSDPLTNLQVTPPEVLRSVNGFRSGSAAGLDGLTAQHLKDLLNIGGDSSLALLEALTSLVNVMLSGQINGEILEILYGANLCALKKKDGGIRPIAVGTTYRRLAAKVCCRVVSGTLSEVFQPIQLGFGVAGGCEAAIHSVRSFLNYMPDDILLKVDVKNAFNSVDRGVLLSEVQKEVPSLYGFLWQCYSAPTKLLYREHLLSSAVGCQQGDPLGPAIFSLAIHPIISKLNSKLNVWYLDDGTIGGDPATVLGDFISLVNEFKACGLELNFSKCELFVPPNCIGRDDIIHSFRQLSPDIKIINPNSLCLLGSPILEESYSSYIDQQITKFNSFSSRLLKINSHVAYTIIRFCLFVPKFTYVLRSSPFWKYPDLTSKLDIIIQNTLSTSMNIRLEGRSWIQASLPIRHGGLGIRKITSVSLPAYLSSSHSTFDLTCQILSKSHSLNTVHIPFISEAIDTWTSITSDDLPQNLSAQRLWDESLCRVVRNNLLETTTNSADRARLLAAAEWESGLWLKAIPSPALGTFVDNISFRIAVSLRLGAFNFITHLCSCGKVVDQLGHHGLSCFRSAGRISRHASLNDVIRRALVSARIPSVLEPNGLVRSDGKRPDGMTRVPWKMGKPLVWDATCVDTLAASHLSRTGIKAGSAANSAECLKGRKYESLGETYIFEPFGVETLGPWGPNAHKFYREICKRVSEVSHDPRAGFYLGQRISLAIQRGNVASLLGTFPQESDLNQIFYL

SEQ ID NO: 24116 - protein, 733 aa, Ostrinia furnacalis
MNLQATSTDVLQAINGFRSGTAAGLDGLSAQHIKDLLNAPGEASVALLGALTSLVNVMLAGQVPHTITEIMYGANLCALKKKDGGIRPIAVGTTYRRLTAKICCKAVSGTLSNLFQPTQLGFGVAGGCEAAIHAVRSFLNFRPTDIILKVDVKNAFNSVDRGVLLTQIQKEVPSLYSFLWQCYSAPTKLMYRENLLSSSVGCQQGDPLGPAIFSLAIQPIINKLQSSLNVWYLDDGTLGGDPNTVLKDLSDLIENFKMCGLDLNFAKCELFIPQNCDKRDEIIQNFNLLAPNIKIVNQSSLRLLGSPVTIESFSDFIDEQISKFTTVSNKLFQINSHIAYTIIRFCLFVPKFTYYLRSSPFWNHPVLTSKLDAIIRHTLSQILNIKLEDRAWTQASLPIRHGGLGIRQISNVALPAYLSSCHKTFDLISKILSKSHMHNAVHLPFLTEAINTWRTLSSSDPPQNPSAQRLWDEPVCRVVRDNLLQTSTNSADRARLLAVAEWESGLWLKSLPSPALGTLIDNISFRVAISLRLGAPCSVPHRCSCGKDVDQLAHHGLSCNRSAGRIPRHAGLNDVIRRALVSARIPAILEPSGLSRSDGKRPDGMTLVPWEMGRPLVWDATCVDTLAPSHLPTTGVKVGSAAASAEDLKRRKYVNLNETYIFEPFGVETLGPWGPSAHKLFRKISQRLVETSYDTKAGLYLGQRISLAIQRGNVASLLGTFPQGSDLDEIFYL

SEQ ID NO: 24117 - protein, 989 aa, Pogonognathellus longicornis
MNEITNDDKECTNNDIIDLSPVIRRLRSGSGRINNGPIQDAIANPVLTSNGNDTQCPTCHKFFKGNKGLSSHITKKHTSQNSVSKIDNSLTSQFNTECSICHQFYKGPRGLSQHLAKSHRKEYRDSISSQYYLPDIDTQGTKTNNSQIASINEKLLKYNDIFKEMSEDTSLNENLFVELFNDYINELYNSQAHLPAPTHPASKYYNIRKNKATFVENIGKAVYKKSSNPHRRDTNKRKLKNRQYQNQLIQHYYYFNRKKCVNILTNDCGQKQCKAPIEDIYDSYSERWSTINSNTRTKYDLAPNENEQMNIDSNYSNIIFKEEVENALSGMNTDTSPGVDRVYVKTLKMVDCCETLSFIYSIMLNSNIIPENLKKARTILIYKDGDEKDPKNFRPISVCSTIRRLYERIMIKRLEKFYSTCEFQNGSSKTPGTFINTSILDGILRQAKTKNEDLMILFLDIQKAYDFVGHEHITKSLESIHIPSTLRNSILNLIQENKTRIEVSGKKTNEIIFNRGIFQGSPLSSILFNMSIDHILIELSEKEVTSKFGYKIDETLFLSVLGFMDDTALFANSKLSGILLNNMANSLFNEIGLSLNTNKTKCIYLESGKITEKEIQLDENNLIQTTRKDETIKYLGMNFCDTIVLDRGKFMDTLTKKLNIIVSTPLLYPQQKLQIFNIYVWPKFIYSIQSSNLCTFTNYFLEDIDKVIRSAVKDMLQLPGDYPNHALYSNPKRKGIGVIRAKWEAPIQNFNIASLLLFRNNKYVNQLRDLNSNIDKAINRLDIEKEYNDLDKGKLSLKQISKKIRDILREKEYTLWNKLPCHGKGVIQYKDCETINKSLFFKEGLSCSEWIEYLKMIPNISAARSIPGRSQDGTRCRRCNETYETLSHILGFCPYGLLHRNSRHHGIRTLIADALRKTNMEVYEEIHTIAENGSNRRVDIIALCRKNKIGYVLDPTIRFEQNEDQPIQVNEEKVCTYKPCVKDLQAKYK

SEQ ID NO: 24118 - protein, 747 aa, Stegodyphus dumicola
MRLLTSECSPSCRISAEDIAAEFSKRLASRDADVSIFPSCLPDRPPLDLSPFSPAEIQARLRSCEISAPGPDRLFYSHWQELDPECRILCDIFNICLRFKRIPSSWKSSRSFLIFKRGDPSILHNWRPIALSSSIARLFSGCLAKRLTAWLCDNDVLCSSQKGFMPHDGILEHHFIVQQQLQLARRRKSTLCLASLDIANAFGSIPHVALFTAIRTSGVGEDFLSLVQDLYRESSTCFLSSDGVSGPVNICAGVRQGCPLSGLLFNLAIDPVLRSIVSPPASPRILAFADDVLLLAPSPDILQHDLDSISDSFSRLGLHLNPSKCHSLHFSAARPAGSRSTLFCIKGSPLKALDDGEFFRFLRKPIGFHLPPCRAQLRDFLLLAEKIMESKLAPWQRLDALKCFFFPSLHFHMRTGLLSKGDWKKIDDFLRPAIKKTLNLPPEASNNYIYGLSGKGALGIPLSAEDSDIAAVDGAFKLLCSKDSYVRGLGWEDLCTYVHARIGETPSHSLVGLFLSASDDAPFASSTNPISSMWSAARSASRRLKVSWSFDADGSPSITCGSFTIFPSKRHTIFRSFRTLKRSERLDDLILLPNQGKVMECVAASRASSHFLSNGLFTRFAEWRFVHRARLNLVPLNAAKPWDRSRRGCRRCSSTEETLPHVLNHCMRYSAAYQSRHNAVVDRVHKAAGSRWNLLSANQVFPGTNLRPDLVLCKDRSAIVIDVTISFENRLSAFSSAREDKITSTAP

SEQ ID NO: 24119 - protein, 967 aa, Stegodyphus mimosarum
MRPGSLASPDMPSTISHTPEDTLTTQDVSLLGAEEDLLHAATTVFAEDPSHIPSADEMPSTSPPLLGFLDALLSLSSAPPDDASWNSFEACLSCITESATEIVKLPPPSPVALGPPRPTNIQNPRVIQRLYRGNRRRAMPLLTSDSSPSCNIPAEEIASAYSEFQCSSDADLSVFTTCLPDRPPLDLSPFSPAEIKAKLRSCENSAPGPDRLSYAHWREVDPDCRILCEIFNVCLRFQRVPSSWKSSRSFLIHKRGDPSVLSNWRPIALSSAIARLFSGCLAKRLTAWLSEHEVLSPSQKGFMPHDGVLEHNFVLQQRFQLARRHKSDLCLASLDLTNAFSSVPHHVLFTVLLTSGIGENFVALMKDLYRDSSTCFLSGDGLSGPVDIRTGVRQGCPLSGLLFNLAIDPVLRSIGTSSSSPRILAFADDVLLLAPSPHVLQSDLDAISDAFSRLGLQLNPSKCHSLHFSAARPAGSRPTIFYITGTPLRALDDGNHFRFLGKPIGFNLPPDRAQLRDFLLLAEKIMDSKLAPWQRLDALKCFFFPSLLFHMRTLQLSKGEWKKIDDFLRPAIKKTLNLPPEASNNYIYGLSGKGALGIPLAAEDSDIAAVDSAFKLLCSGDSYVRCLAWNDLSTYIQARIGEPPSTSTVGLFLSGSDDTPFTGNTNPISSIWSAARSASRRLKVTWSFDADGNPSISCGPNTIFPSKKHTVFRSFRTMRRTERINDLILLPNQGKAMECVSAARASSHFFHQGSFTRFADWRFIHRARLNLVPLNATKPWDRSRRACRRCQFPEETLPHVLDHCMRYARLFQKRHNAIVSRVKHAAAGRWNVIFENQAVPGSTLRPDLVLAKDDTCLIIDVVVPFENRLTSFQATRSTKEQKYRPLVDILRNTYRNVRVEAIIVGALGSWDPANDKIVRRLCSNRYASLMRKLIVSETISVSRDIYIEHLTGNPQIAQSNQAISPGK

SEQ ID NO: 24120 - protein, 1149 aa, Lasioglossum albipes
MSNSGNIAEASDTGNPCSRAPVADLSADDRRARDDPSNDNGQEMDIFMELPMSGTINCTLCTNNVRSFMEEKKWAEHILSQHADHRILWKCKGCKKSWVKIHACKCHIPRCKGVVETRDDDPSITCVACGEKFGSKSGLSQHERHRHAQIRNGKRSQPERRVRITTPGPNTRASVWSKREIELLVQLSEQFQNEKYINVKIHEHLPTKTIKQISDKRRDLRKRQRPTQEDETDEEEEEADDLPNSAHEPVTEERDGENENWQELFRAKIRGNPLEDEEDLKDIEREIMRIAEEEEFSSQDIENVIERFTEKLKEGIIERTPRNGSRRVNNERDDNERVDSERADSDGVNNRNASDRTLFKRFQYSRYQELYNKCPRKLIEMAVAGGRCNSVKKVDLPEKTAVERLYGGLWGTEGPSTGLPKLVGDNTASPVEGIWVPIAPAEIMAKMRKIKANTAPGVDGIKKIHLMKRGALLVLTKLLNLLMTHRYFPESWKRNRTTLIPKAGKSTDDVGNWRPITIGSLMSRIFSAMLDKRLRWKVQNHKRQKGFTQEDGCKHNISILDSAIKEMKMKRGGVVTVVDISKAFDTVPHSAMSDGLERKGVPAVMIEYIRNMYINCQTVIKTRNGDVSVTLRRGVKQGDPLSPLLFNLIVDPIIGNIDETTEGVSIGDENVSILAFADDIVLIAKDRDEAIRQNKKLHAFLKKIGMEIQASKCHTFQIVHKNKTWYVQDPKMKLEDHYMPGTKPDEIIKYLGVNLDPWRGLQPAKIDDIIKAAQNIHAMGLKPHQKINLMRTHLLPKYIHRLVASPPPLKTLEKLDHEIKQIIKEVLHLHPTTTDGIIYTEKKHGGLGMQSVADIVRVAKLRNGLRMMSSEDQAIRQAYEGQEVLIRKYAHSIGLQWPVEEEDLDKKREDLKRGYVERWRQLVSQGHGVHEFMNDKIGNAWLFKPELLKPSRYIDALRLRTNTYGTRVALRRARKEINPQCRRCNLQAETLAHVIGNCTHTKPARIRRHDEIVSIIENKVSKKSAVFKEATVNVLGELKKPDLVIKDQQRLLIVDVTVRYEDKDNLKRAYKEKEEKYKEAAEYIKLRLNCLSAEVVPVVVGSRGSIPMATRKNLKSMGLSKSEVMTIALVALRSSVEMANAFIDYDHIT

SEQ ID NO: 24121 - protein, 1109 aa, Strongyloides stercoralis
MSSISWSKELINLLSHPPEKYIRFSMGRPQILWTRIYRDHPELMRESKVTCVEQLKSKGRNYREMIVADVNSKRYERKVAENNETSKTPNIKEPKVKEIVGAAEPQPTTPFKTIDIKKLRKLKMVRIRRFKPSHALLSQANLAFIKNLTSLKLEKGYSAEDGFKLCYYIGMTMSKLANLKLDKKKKKTQMVIKSKQKYIKTLEKLLMLFEEKSNKAEAKIRLLKSKFAAKSKKDLHQIILDRLERARERLVEMKKMDLTSSLRQFFKGMPSLKKTILLRNKLMNNVIDMDNNSELVDVNEGAKYFKKLCGKRKHNLNKGAVSFNQFIKQGKCEASKNKMSITKDTLRLALKLTSSFKATGKDATPGFLYKTVPAMGEFLIETLWESLQSSTIPYKSFCYSNTILIPKTPNASKPEDTRPISLLNHAYKVLMKAYAIVIDQITLGTVFRPKEQCANRSKISGCALANLIDGKLTETSPKVAWVDFQKCFDSVLSVRSKAVIKALGLPKEQELLLLKITKSWYVQVSIGKKKARAFKQHNGLLQGCSLSPLLYICVAGYISFMLNKKCKKIQINNYTNPKENLEYNHIMYMDDAKLLFSNDADLKVGINTLRKAAYTIGLSINIKKSNTLNTKDAIFQPLDKNSTYKYLGIEQREGSDFLKTINKIKTKLTDNINQLYNLEIGEDNRISSIRMLVEPTFRYIGENITILSEKEIGTIIKLLNDIDKEFKKLITSKDGWQTSLTKERFYRWRKCEGKGMPNCTLSFTIGIMSQISMCYKDDKFLQILKNNHIHKPSNPIITLATSLLKVLNIASEIALYNEGINITFYQDNQTSKITLQNSKEMSSWIVNKYQSYLEEGINSKFWGTKRKEYSENLFMPLTSRAYMNLNSKPMVEKTVMAMQENQCYLPNFQSKLHDKITPCRFGCGVEENLTHILQTCEFMKKRTINERHTKICKIIETNLKKENKGDLYVEKSFEFKNVKLHHRRPDMVWYNDSIGYIIEIGVSLPGNMERMYKIKEIKYSMNSMAQVDDKNVDSITQDKNLQRELERTMKIEMTTIPLIFSSTGEVLNKTWTNLKLLFGKKASVICKACQRSAMISSFYILKEHLARKG

SEQ ID NO: 24122 - protein, 1146 aa, Microplitis demolitor
MPATETRRTTRAQVRAGRVLPELLSPRVVLSRLTEQQLTGHGVHEHRTQHDIQVTRTTNPPGENLTVNLKQTQISGSRVDASVSTHGEDTNLQNYEPQHQPLEEDERMIPEVVSSGEEVSHKCPWCARSFTTSTGLGVHKRRAHHIESNESIDLTRKKPRWQDEDLRRFAIEEARTPTTLYNINQHLFRTVKMHPPRGFEAIKSLRTKQKYRELVEYYREQIVESGIDANDQQSNQQSGNDEQLNGERDHESSETGGVERAGRPECNKKHQIERERHSETENGNQHNVWIDAAKETLNGDRRCEPGRAYLLKAINAIERGDSPENALEEWFYSRFPDLQNRKKQKQKERSRVQMASKKRQRRQEYAAIQTLWRKNMSKAAKKVIDGDADQEEHPTLVQQTECWKAIFEEPSVEDESWNPETSEDEHKHLFRPVSIVEVCRIKPEANSAAGPDGLRAGPWLKEVSSWTKALIMNVILCWGRVPQIWRDSRTVLIPKEPGTMDPMKFRPISISSVILRHMHKILAKRISYLNLFDERQRAFIEADGVAENTFVLSAVLEDAWDSKKQLHMATIDVRKAFDTVSHQSIPKVLREHKIQEELITYLRILYDQACTYIEVNGEFSDPIRPARGVRQGDPFSSIVFNLLMNLILRKVSKAVGYEMDGALINALAFADDLVLIASTKEGLQESINAVVNEMKRHGLAPMPQKCCCLSLVPSGRDCKVKVVTQAQFRIAGAAVSQLGVEDSWKQLGVMFSARGPSAPSVQLEELLRKVTKAPLKPQQRMKILTTFVIPRFVHSLSLGKVNHGLLARLDKMVRKYTRDWFRLPHDIPTAYFHAPIKEGGLGIMSFATKIPELTLRRVMRLKDSNWEAARVVGNSIWARKKERWCKRSAARDIEWARKLHQSVDGWELRETRHSDLSYGWVNDPYLRIPARDWVQFIRLRIGALPSRMRTTRGTRRLTQEYQCRAGCGVPETNAHIIQMCHRTHGGRVLRHNAIVNVIAKQLAKRDYVVEKEKVYKTRQGPRKPDIIASKDGQVHIVDAEIVSNNRSLQKSDNDKCKYYASNPSLILSVAGKFRVPRSMVKVSAVTISWRGVWAHASCSVMREMGIPKGILLGLTTRVLQGSHTNFNRFNEMTTMAGPNLGRYRPP

SEQ ID NO: 24123 - protein, 1207 aa, Perkinsus marinus
MSSPPSPRRPRRDRVLTQLGPALNPTRQEAANRESSSGVTRNKSTTGRQQWTLAEKQLLCEAEAHWEKHKECCKGSKGERIRSEFVRRGGRADKTKVQLTSYLYQLARKSEYSELKLNASRIVNREPIECIQQTNTQPTPSIDQEIFPSQQQGQSSSQHEQQQMDEEVVNMRGTRGRPKAPEDPRSQKEMQLIQDFLDEIEKVDNIPPNDREKLPDPKERTKAITERARILESHVVIACGDCPTVEKISKVVYAAASVLLREQGVKQPARSKKRGKLPAKRRLEDKLKTIRRDLGRVTSYLQQFDKPTRRLKTVTKEIRQQFGNSKTALQNAQGRLILQLKQVSAKLRIWTTKEKRVRLERLMKSNQKQLYREIQVLQQKSPNDLANDNSCIDEQVNNIRDNEVAHFWSKIWEYEETHSFEQESWCRKYCRKLQRKNIATLELEDIGPEVVNEALKKMRPWKAPGPDKVKAFWYKVFPGLVSKLALAFSVLVSDDNDDFEWFYQGTTHLLPKPLKNGQNRTPGDFRPITCLNVIYKLLTSVIATKLTAHLERYAIINEEQLGCRAGKRGCTHQLLLDQAILHHAKNSQHNMACGWVDFAKAYDSLSHTWIKFWLDKFGIGNKITNFISKCMTKWKLNLHIQGRTLDNGMVKVEKGIFQGDSLSPCLFVAGTQPISEALNNLDGGYYFGNSRNHKKNHLLFVDDLKLYSRTLDELTTQFECTRSVGRFAGLRFGWPKCAWINIRKGVVDIVKPHDIVGILNNVRYLGSDNYNYLGIPQNLLPDKEEVSRNVENILHKRIKVILEAKLSAVDTIRALNTWAIPVVYYPIQAGLLGKKIVVKLDSTIRNALRKYFAHGYISNTELLYVSRKEGGRGLTNIEDVWKKFSVFISQYIKDNIINVIPNIKTTNPLCKIIRRADKIKTQLGVESDRSVTREHFKVLDDNRKLKLYEMPAAGCWFKKIKELEKEGIDIENSLGWLEKVKISSQHESDILALRTLSIATKAFPVVVDGGKCRLCGQQSETLFHLASSCRTLANAEYLDRHNRICKIIFRECCNLIGAEFQQCWWTRLRPPFVKTDEGELFWDQKISTINKIEHNKPDILCIMHARKVIIVGEVAVSNDFGVIRKEDDKRCKYQPLLQELIILFPGYSIKLVPIVLGVTGVISRSLPKVLTDAFLSGVDINTCQRVASISTIHILRRVLGGPSVGVQ

SEQ ID NO: 24124 - protein, 1175 aa, Centruroides sculpturatus
MPEVTVLVPLHPPHGCRLCLPIPREYSDHAGLVRHLRREHEVPLLFECRACGLVLEKLKAMKIHQTRSEACRASIDAASPPPPLPADRVIRRIPNRPRKSYAARKPRPQSSPVSASDQSHMDPPSPASPPSPPQRRPRRRTTRPVRASPEVEQPSGTPSNEAIPPTPTPSYADVLRSSPASTAPTPSRRDVSASQPSRPPTATRDTPQPSTGDSQVGPLPISSPPSGPLTITQEIRNRPTTSNNQQADAPPPSWVSAWIARFDAAIDEDILEGVLGDFITLAQQICKVHTPPQQQQHQPRNHRSSSDRDNSSQPEAGEIQRLYRANRKRAFDRVVGGPSRFCRIDAKSIEDHYREMYKATTPTDIAPVPVRPCTPPDTNNPFEAPFTPQEVARRISKGHNTAPGPDRLRYLHWRRVDPKGLITAAIFNAVRRIGYVPSSWKILTTVLIHKKGEVSNISNWRPICLSNTLGKLYTACLADRLLCWCNTNNRLSPSQKGFLNYQGCIEHNFVLQSVIQNARRCRKDCFIAWLDIANAFGNIPHATLWESLKWHGLHQDAICVLQQLYDGSSTQVRTSMGLTEPIPMQSGVKQGCPISPLLFILAVEPAIRRIVDLDKGYSLNGYPTSVLAYADDIALISDTAEGLQMQLDAIADWTNWANINFNTAKCGTLSIKGKEHATSNNSFLLNQQTIPVLGNDDAYRHLGVPTGFGKHDTPTATTDGILQSLVKLHTSKLAPWQKVDALNTFIMPKLTFCLTAGTTPKSTLTKIDRATKRYVKKWLGLPQRASPEIVHLPYMCGGTNVTPTNQLADIAQVSHAMHLFFSKDPNITGIAIKALTEVINKRIGRTPNDEDLCQYLNGSMVGDFGLPSTDITSLWTRLRMATRRLKKRINITWTVGPGNLPNISAGTTLIRPEDCQRVLCGLLKEHFLGKLLAKPDQGKAYKVTSFSPVSNHFINNGKYTRFSDWYFIHRARMSVVALRGHRRFGNDTKRCRRCGYVRETLAHVLCHCPPNLHIITQRHNAILNRLVAAFKPEGATVLVNQRVPGFSDICRPDMVIIDEKSKSATIIDVTTPFENEQTAFQLAREEKLRKYAPLAQHFRQQGFDTHISAFIVGALGGYDHANEATLQRLGISRHYAKLMKKLMVSDSIKWSNDIYRGHIGDTRQHRTTSLPPSNN

SEQ ID NO: 24125 - protein, 1236 aa, Centruroides sculpturatus
MPEETILVPLQPPHGCRLCLPIPREYSDHAGLVRHLKRDHATSLTFECRACGLILDKLKAMKYHQTKSEACRASIEAATPPPPPPPTNGIRRRIPIRPRKRRTTGHPPSTTQPAPESDQSSDASSPTVSPVIRPRPRRRRTTRSSQLTPAEEQSPGVQPVSTQTTGPSNPLSRPPDPSGQINSGSLSSPGPHQPIHHFPPTSPGLHPTNLQPHSQQGDGDLSGQMSIPGPQNGEAYSSQMRIPGLQSSSRTSIPGLQSNSQTSIPGCPANDMHSQMSIPGQHNNCTLPSQTSAPGLQHNGAHTSQMSTPGGHPNGEDPPSWVSAWVTRFDAVLDEDMMENILGDFIALAHQICNITAPRQRHGTRAPSRTPCGPPRSDASELQCLYKANRKRAFDRIVGGPPRYCTVDPHTISNHFRTMYERPAPEAIVPVPADPCPPPETSNPFEAPFTPQEVANRIAKGHNTAPGPDKIRYLHWRRIDPKGIILSSIFNAVSRTGYVPRNWKVSTTMLIHKKGDTANLKNWRPICLSNTLGKLYTACLADRLLRWCSDNNRLSLSQKGFLNYQGCLEHNFVVKSVIQDARRSLKDCCIAWLDIANAFGNIPHHTLWESLRWHGIHQDAICVLQQLYEGSSTCVRTSTGYTDPIPMNSGVKQGCPISPLLFILALEPAIRRVQALGKGYSLHGCSIDILAYADDVALISSSPDGLQSQLNSISDWTAWAGITFNYSKCGTLTVAGKSHATRPTVFTINGQELPVLGDRDAYKHLGVPTGFTRCDTETATINSIIQAIEKLDSSRLAPWQKIDAINTFIMQKLSFCLTNGTTPKKILDNIDRTTKRCVKRWLGLPQRASPELLFLSYKQGGTNLTPTSQLADIAQLCHALHLFQSRDPNITCIAHSALEGVVMKRIGRRFSPEDLCSYLNGSMEDVFGLPSKDISSTWTRLRMATRRLKKYLHFDWTIGPDNIPIITAEGKWLRTDNCHQTLTGLMRIYHLQKLIAKPDQGKACGVTAASETSNHFINNGRFTRFANWFFVHRARLSVVALRGHKRFGNDTKRCRRCGYARETLAHVLCHCPPNFHLITWRHNAILQRIVTAFRPKDATVLVNQRVPGFEVNCRPDMVVIHEPSKTATIVDVTVPFENGPMAFQNARDEKLQKYNALVQHFRQKGYNTHISAFIIGALGGYDHANEETLQRLNISRRYSKLMKQLMVSDTIRWSCDIYRRHLGYQRQNEAPQHRQR

SEQ ID NO: 24126 - protein, 1175 aa, Centruroides sculpturatus
MPEVTVLVPLHPPHGCRLCLPIPREYSDHAGLVRHLRREHEVPLLFECRACGLVLEKLKAMKIHQTRSEACRASIDAASPPPPLPADRVIRRIPNRPRKSYAARKPRPQSSPVSASDQSHMDPPSPASPPSPPQRRPRRRTTRPVRASPEVEQPSGTPSNEAIPPTPTPSYADVLRSSPASTAPTPSRRDVSASQPSRPPTATRDTPQPPTGDSQVGPLPISSPPSGPLTITQEIRNRSTTSNNQQADAPPPSWVSAWIARFDAAIDEDILEGVLGDFITLAQQICKVHTPPQQQQHQPRNHRSSSDRDNSSQPEAGEIQRLYRANRKRAFDRVVGGPSRFCRIDAKSIEDHYREMYKATTPTDIAPVPVRPCTPPDTNNPFEAPFTPQEVARRISKGHNTAPGPDRLRYLHWRRVDPKGLITAAIFNAVRRIGYVPSSWKILTTVLIHKKGEVSNISNWRPICLSNTLGKLYTACLADRLLCWCNTNNRLSPSQKGFLNYQGCIEHNFVLQSVIQNARRCRKDCFIAWLDIANAFGNIPHATLWESLKWHGLHQDAICVLQQLYDGSSTQVRTSMGLTEPIPMQSGVKQGCPISPLLFILAVEPAIRRIVDLDKGYSLNGYPTSVLAYADDIALISDTAEGLQMQLDAIADWTNWANINFNTAKCGTLSIKGKEHATSNNSFLLNQQTIPVLGNDDAYRHLGVPTGFGKHDTPTATTDGILQSLVKLHTSKLAPWQKVDALNTFIMPKLTFCLTAGTTPKSTLTKIDRATKRYVKKWLGLPQRASPEIVHLPYMCGGTNVTPTNQLADIAQVSHAMHLFFSKDPNITGIAIKALTEVINKRIGRTPNDEDLCQYLNGSMVGDFGLPSTDITSLWTRLRMATRRLKKRINITWTVGPGNLPNISAGTTLIRPEDCQRVLCGLLKEHFLGKLLAKPDQGKAYKVTSFSPVSNHFINNGKYTRFSDWYFIHRARMSVVALRGHRRFGNDTKRCRRCGYVRETLAHVLCHCPPNLHIITQRHNAILNRLVAAFKPEGATVLVNQRVPGFSDICRPDMVIIDEKSKSATIIDVTTPFENEQTAFQLAREEKLRKYAPLAQHFRQQGFDTHISAFIVGALGGYDHANEATLQRLGISRHYAKLMKKLMVSDSIKWSNDIYRGHIGDTRQHRTTSLPPSNN

SEQ ID NO: 24127 - protein, 1174 aa, Centruroides sculpturatus
MPCETVLVPLHPPHGCRLCLPIPREYSDHAGLVRHLKREHNASLHFECRACGLVLEKLKALKAHQMRSDACKTSIEEATPPPPPPANKTIRRIRIRQKKQYAPRQSGATRTPSSESDNSTYTPPSPVSPPTQTRPRRRRTTRPIPALCEESPNSTCPGQVRTITTPTDPHSPTYAQVLATSPATTARTTDQRQPTPQTRADGGTPQPRPSPQCTNSFSPPVICLPTTAQSIGEPTTLPNSHNNDSENLPSWVAAWMDRFNATMDEDMLEGVLKDFIALANQICNIRAPQRQHQRQPQQQRRRSNTSDQRNAALGASEIQRLYKANRKRAFERIMGGPPQYCNMEATMIENHFKRMYETTPTTTTSPVPVSPCEPPATNNPFESPFTPKEVAHWIARGHNTAPGPDKLRYIHWKRIDPKGYIITSIFNAVQRIGYVPNDWKISTTVLVHKKGDTSNLNNWRPICLSNTLGKLYTACLADRLLYWCTTNNRLSTSQKGFLNFQGCIEHNFVLQSVIQDARRAKKDCFIAWLDIANAFGNIPHSTLWESLKWHGLHPDAIEVVQQLYEGATTRIRTTTGLTNPILMRTGVKQGCPISPLLFILAMEPAIRKIQGLRHGYELNEHSVDVLAYADDIALISNSATGLQLQIDTIEQWTSWANIKFNHTKCGTLSVRGKSHTTSANPFYISQQELPILGNADAYRHLGVPTGFSKCDTEKGATDGIMQSIVKLHSSKLAPWQKVDALNTFIMPKLTFFLTAGTTPKSILSKIDRTTKRCVKRWLGLPQRASPEVVHLPYTQGGTNVVPTNQLADIAQIAHAAHLLSSRDANIISIAHGMLKEVVKKRIARPPSADDLCKYLDGTMEGDFGLPSTDITSLWTRLRMATRRLKKKVNISWTVGPEDLPTITAGTTQIQAGECQRILCCLLKEHYLKKLLAKPDQGKAYGATAASSFSNHFLNNGKFTSFNEWYFIHRARMSVVPLRGHRRYGNDTKRCRRCNYTRETLAHVLCHCPPNLHLVTRRHNAVLDRITAAFQPGNAKVYINQCIPGYSENCRPDLVVINEQPKTVTIVDVTTPFENGPEAFQIARDEKVRKYEPLAQHFRNQGYDTHISAFIVGALGGYDHANISTLQRLGISRKYSNLMCKLMVSDTIKWSNNIFRNHIGDRQRRQTAPHQPTNN

SEQ ID NO: 24128 - protein, 1870 aa, Acanthoscurria geniculata
MCPSGTLPGDHCEFSISFSNNNIEHEAISVEFGDGEFTESTSNANTNGCHALSVNKGTATITFPVFKNILCPRENCGIMFEQNDPVGIKNSVSTHFLLMHRENIKFFFFLCVECMKCSAKYGHCETCNPDEDSSDVTILEVIDSSQLNCNSPYGKTEKNNKNMQVTDQDSDGVPPPASRSTLEDIAHNINSTLSEPTALQPVAPITAVETANNISISKICKSVRSIIEEFSDDSNSNASILEIEAPAELLPELIEAANENTTYDGYQNPRLVSLYDNTLTLEFPSNEGYKCASTNCDALFSEVDEKILKAKLVQHNLDVHRVVINEFRFVCATCKEFTDCIERCNNCTSINKSGSSSESDEFTTPERRPIVHENVALEAIVKANVSWNTLLTDVHLIVKVPREKFLSCPVKNCNRNTTHHLLPTAVKRLKNHIKNAHSITKRTTVYWCNKCTNFIQTRFKLHKCMKRVPHVQEEDEASTVIDSQCEPSQAVLNQWEQLRSHQTHIDGSILNIIFPIQLPYRCDIKGCNFASLAKEWHSTVRSITRHHLLAHNINLSTKHWCSHCKEKILSYRQSTHPCLKKAPLTFLSEDCLFKCNQCSFQTASKVGLLNHKEIHKKQLILHNTTNNGEPTDLRWLLTKTKERMKSLNNPERSKVLGERRAAPFDEEDNVGEASKFGHPEISAFTSKPTGDGGQQGSTRLLPVPASGHIGKESTRKGHSNVTIISENDGIFNPLVIEGRNSNTRTVIVDRHTSAGGRQVAPPVPAGGTTMNIRKADDHGKNTAVSGKQATTLNGNPKVNTRTFYNKAVKNQNKSGHSSTSGGDGGRGTAKTPVPAARAPKKLPNEMNIPPRVKKNMNNNNSAPSVYNLCNPAKDCDNQTNSDITNEHNMNSQNSMNSQMEEIAETQLSTLAAEPAQQVTTAPPLDANLPNHEIPLLNKFAAALHETVSTGSWEDFEIILAEVKSFFHEQYKIRIPEERTGPSKSKKVDLSNAKEIQKMYRRNRPRCIRELLKGEQGRCSIDKQKLYDYFSEAWPATDHDPSLIEHLTPKEFDVICEPFSVEEVRNTLYRCENTAPGPDRISYYHLKEQDPEAIICTYILNMCMKHKRVPTCWKSSTTVLIPKKGDPEDPSNWRPIALSDTLYKLYGKCLLSRVMDWVLSCEVLSPSQKGFLPHDGVYENNYVLEERLRRAKKSKLDTCLCALDLTNAFGSVPHDLMLSTLSKLGAGDHFVSIVKDMYAFSTTRIITNEGLTDAIPIDGGVKQGEPLSGMLFNIAFNALIENARAHGSCHTVLAYADDILLICDSPDKLQRSLDLISEDANRAGLKFNPKKCISLHISGTTPVGAVNSTFYLDGQCIPILGDGDPNLFLGKPFGHLIINHDAAVEAIIAKGKAILTSKLAPWQRLDALKTFFYPALQFPLRTGQLSKTEWDRVDNALRPEIRKTLYLPNRATNDLIYGRREKGGFQLPNVGTDSHICWIDGAFKLLTSRDPLVKELAQEDLLDHVKARTRLPDPGVEDIMMYLNGGSSELYLRTHCPRKSIWTKARAAAKELDVTWDFADLDRPRVWITDKPVTEINRHQMQKHLRAFCADQTSEKLSVKRNQGKTQACLSLDKNSNHFYFNGTYTRFKDWRFVHRARLNCVALNDTKPWVRREPNLRQCRRCHSTKDFETLPHVLNHCFKQHAQTYLNRHNNLVNRIAKAAAWKWDVLSINEQYPGTSLRPDIIVAKGDRAVIIDATVVFEHNLQAFKDAREWKKKKYEEVVADLKKTYKDVSCDAIIVGSLGAWDPANDSVLKNFATPRYIKKFKKICVSETISWSRDIYVEHLSGQRQYSSNDKVNKYNDNEQSTPEENEEPQNENEENHIIEEETCN

SEQ ID NO: 24129 - protein, 1244 aa, Allacma fusca
MSQPKRRDDRLIIYHPTPKIMKCPERNCSAAYTTSTKAWTSQRRSLEKHFQSQHNIIIAGSTNICSRCEEDMTLKPTNHKCTVIATRTRSQSREREPIPTSQSAAPELSTIMDMSVAEDNEELPFKCPDEGCGAAFLSAKSLQNHTLAKNRKRDKQNQLSQLPRNSLLRARLERQPTVTVTQPPDLLSESQVDQLDTEEFINEIINVAAPTPNLYELNPSPQQITAQQDNHIEESSSSPPVQIPRQNAEITHTPPETHHNPTPPAPIAQDASTDEGDPEDDSDSSSSESNASTIIGRGEEDQIDVEGSGDDPPHEDQHELPDLRIPFEPVMIDSNDESVLHPFKPRLLQIFEDEASDGNWQRFEEILEEITICAQEAVKLPEVPINRSTAPKQTNIHNPEEIQKLYNRNRRRAVRLITEGEGDRCKIPIREVTTHFTETNTRRPSDLSYYDDVTPAGRKVNMDPFSEKETVSVLVKSENTAPGDDRLTYKHWRLLDPSATVITPVFNICRKFRRVPSIWKTSKTVLIYKKGDPSVISNWRPIAISRTLYKTYCGLIARRFRVWLSAEKILHPSQKGFTPHDGCFEHNFTLNEVFEEALNEKTDTIAIPLDAKNAFGNAPHDAIILATEKYGAGKEFTDIVRDMYTNAYTSVITESGATEPIPIENGVQQGHRLSGDLYNLATNPTLNRLHNQYEPHRPHMLAFADDWIPIAKTVVEAQEKLDFLINDIRKIGVVFNVAKCATLHRSGRPPAGARNTIFRIEGEAIKCLDMGETMSYLGNPIGFAFNNKLASLQDFLEYATKILESKLAPWQRLDALKTFFYPSCNYAIRTNQFNHTEWKAIDQLLRKGIKKTLNVPNSATTEFLYGSRRSGALALPLLSEDNDIFAIDGAIKLLTSRDSALRQIAAHSLRRTVSKRIRRDTTWPEICQFLGGSNEAPFRGNTNARKNIWTRARTASTKVGVEWEFENGAFKCIRFGNVTLKAHQNKMIANKLRNYQREIRDQILISKPNQGKVLECVGMSKASSHFYSSGSHTRFADWRFIHRARLNQVPLNGAKMWISNADRRCRRCNAENETLPHVLNHCKPYLQGQTRRHNAIVDRVKKLAMGNKKKKMRVLSENSAAIGTDLRPDLVLMEEVAEKKKVYIVDVTIPFENRPQALTDARQRKLDKYQPLVQLYQQRYPNSEVSVEPIVLGSLGSWDPNNDNFLSKLCAKSYLLMMRKLAVSDVIKWSRDIYIEFLTGHRQY

SEQ ID NO: 24130 - protein, 1138 aa, Allacma fusca
MIAKVRRRDREQQLAQLPHDSALRNRLGSGGPCIIRSNQPTLSPTTQPQIPETEDFLDTILGSQVNTSDNITIDNNATNNIFISTVTEPLALSDETNISICQHPIRTPLHRNGTLSDVDSIPLDLTDENNMVANNQTQRPSPSAVRTTEWHNHSPTGTINMTPQCEYPHDVSDYTSNDSTSHPSPLTVMSNGYSIITNDDESVDTTINEDLLEEPDLRAPFEPAVINSNDESVLHHLRPRVIQILQGDLTNENWALFEDLIDEMTQLAQKAVKLPDTISNNSTAPKKTNINNPEEIQKLYNRNRRRSVRLITEGEGDRCKIPIEMVSAHFKSTNSRKPSDLSYFEDIMPAQSEVRLHPFSEKETTNTLMKSENTSPGDDRLTYKHWRLLDPSATILTPIFNICLLYRRVPQIWKTSKTVLIYKKGDPSSISNWRPIAISRTIYKTYCGLIANRFRTWLYSENILHPSQKGFTPHDGCFEHNYVLNEAFEEALNDKNDTIAIPLDAKNAFGNAPHDAIIQATIKYGTGDTFTHIIRDMYTNATTTIITDLASTDPIRIENGVQQGHILSGDLYNLVTNPSIQRLHALYEPHRFHLLAFADDWIPLAKTTDEAQDKLDFLVNDIKKIGVEFNVSKCATLYRSGKTPAGSRSTLLTLMGQTIKCIDATETTRYLRTPIGFALNNNIGSLQDHLNYATKLLESKLAPWQRIDSLKTFFYPSCNFAIRSNQFNKTEWRAIDDLLRKGIKKTLNLPNSATTEFLCGSKKSGALSIPLLAEDNDIFAIDGAFKLLTSRDTTVQKIATLNLRRTVQLRFGRETSWPEISLYLNGFNEEPFKGKSNARSNNWTRARAASSRLGVEWRFQDGRLKSIHFGDYTLKSTKTRQVAQKIRLHQRELRDQVLLNKPNQGKVLECVGLSRASSHFYVSGAHTRFADWRFIHRARLNQVPLNGAKVWDRTADKRCRRCGADNETLPHVLNHCTPYLHAQTLRHNSVVDRVKKAALGNKKRNFRVICENTAAIGTCLRPDLVIIEERTEKTRVHIVDVTIPFENRTQSLLDARQRKLDKYQPLIPLYNQRYPNAEVSIEPIIVGSLGSWDPANDSFLSKLCAKSYLDLMRKLTISEVIKWSRDIYVEFLTGHRQF

SEQ ID NO: 24131 - protein, 1096 aa, Sesia apiformis
MKTNRKITIRNIPVRPQVSGNVNAHSATDADVQPGPSSSTVAASTSTSTTSGWACPHCERVFTTKTGLGVHKRRAHPEVTNIENAPAQVKRRWRDEEIALVARAEVHQLMTTGRCSNEALMRDQPSLGRTLEAVKGMRRKDSYRSLVHDFLEEAQIEAEEAEAEPPMETVAEAEIEIEGDADAESDASVGESPGTVDLGEVGAGAPDHAPDRAESDSELIAQTSPNTAPPPVAFESHPPAENQLVVENLNECEQIISGLLRKAAERTARCSGQSTKQRRRRNCREQHLSDDSFKKLTNRQKRRSEYARVQELYKHSRQRAAAEVIDGYCRKVVHSVDALAAYWSPILAASSNAAGAPQQAINAARRIERGDAEPDYSRLWTPITSDEVRASCVDVKSAPGPDGITSAVWRSVPVHSKLEVFNSWMEAGEVPATLRRSRTIFVPKKDVPSSPGDYRPISIASVPLRQLHSILAKRLRDGCPHDVRQRGFISADGSAENTAVLDAVLGDSRKKLKECHVAVLDFSRAFDTVSHMALVKMLRERGLPGNFCDYVERLYESAETVFADRNGSNGTSVLIGRGVRQGDPLSPWLFNMTLDIVVASLPKDVGYRLEGERVSALAYADDLVLVAGSKVGLQQSLDVADSMGKSMGLNLNLSKCSVLSMVPDGKRKKVHYLTERTFKICGKHLKQTSCVERWRYLGVDFTSTGCVTLEHDIRGTLENISKAPLKPQQRLEILRSHLIPRFLHGLVLGNISDGRLRLLDVQIRNVIRKWLRLPGDVPTAYFHAPVKAGGLAIPSLRTYIPDLILRRIGRLGSSRWSVAKAAAETEPIKKKLQWATKQMGKFSRENPNTGKRSAAQYWSELLHASCDGFELRESSRTPASTSWIRGGCMQVSGRDYVQFIHTHINALPSRMRNTRGRRADGHESALNCRAGCAVKETTAHTIQQCFRTHGGRIERHNGVVKHLAKHLKNKGWNLEIEPRVVTAQGVRKPDIIAVKDGVGVIVDAQVVSAQRPLDTAHVEKSMKYGSHVELVERVAERLGLPNKDSVRATSCTISWRGVWSRSSYLEMKRLFSFHESHAYNSIFCPPGLTLELDPFQ

SEQ ID NO: 24132 - protein, 988 aa, Notodonta dromedarius
MIILGFIVIFCICCIVIVRGKRAARLNAVEIMSSTSPGSVFRCAICSPARIFQSQRGLKIHCGKLHKITPSTFNTLNPLPPSASQLTPLTLWETLSDLKRSKPVLKRIPRGARITVAEHLSKTIRCVVSDNTKRAGEQLLTFPYRTFHVANVPSNTASLTCRIKDNCASSPPNTFPTPLDPPHRRRPHVGLVRESATYRRIEGRLSDGDVKGAARLLFSGDVLAPDNLQTLMTLKDKHPLPASLLDLPDPPQDADSVLQVTSEDVIRAVMSFPSGSAGGLDALTPQHLKDLLGSSSGTAGETLLRDLTALVNVMLSGRVNSDVVEVIYGANLCALMKKDGGIRPIAVGCTYRRLAAKICCFHMKDDVSSFLKPKQLGFGSAGGCEAAVHALRTFIANDGGEVLLKVDIKNAFNSVDRGTLLTKIKEKIPNIFSFLWQCYSAPSKLIYKNNMILSSVGCQQGDPLGPVIFSLAIHSIIEKLESKFNVWYLDDGTLGGDADTVLKDLTLLKNELSTIGLDLNFAKCELFIFDNCPQAASFRQKFQIIAPNIKILQKDTLHLLGSPIFPESVPSFIEEKIQNFSDVSDRLLKINTHMAFYIIRHCLFVPKFTYFLRCCPLWKHSDYIQRLDNIVRNTLTVILNTPLDDISWAQASLPVKLGGLGIRKISSVSLPAFLSSVHANDSLVREILRPCFIPSELACLTEAKNAWLMACPNTSLPAVLSSQGQWDGPLCKLVREQLINTANSCAERARLLAVGEWESGLWLQALPSSNIGTLMDSTSFRLAVCLRLGSTCFVPHRCRCGETVDQRGHHGLSCLRSAGRISRHSSLNDIIRRALATANVAAVLEPNGLSRSDGRRPDGMTLIPWRMGRPLVWDATCVDTLAPSHLRESSIRAGGAAACAESLKRRKYSNLDPGYMFEPFGVETLGPWGPSAHRIFCDLGKRLVEATGDQRAGTYLAQRISIAIQRGNAASLLGTLPSDGGLAQVYFL

SEQ ID NO: 24133 - protein, 934 aa, Furcula furcula
MVIFLILIFLLLFVYIVIDGTRSLQCKEVEAKTSGTSLNNMFQCSLCSPARLFSTQRGLNVHTGKVHKPERPISASQDSFRHPPYQHTNSTSSTQYPLWKLLSDLKRTTPTLKRIPRGARITIAQTLAKDVKRVVSENSKNAWEHLLTFPYRVLHVKKDSSNTSLTSKLKSNCTCSAPNSHVLSYPQRSLAKAVVVSEYATYRLAENKLGDGDVRGAARILFSSDVLASDTPETLASLESKHPLPAATVQLPDPPQATDTVLQITDEDVIRAVSSFPSGSAGGLDSLTPQHLKDLLGRNSGAAGESLLKELTAMINLMLSGRVNGEIVDIIYGANLCALNKKDGGIRPIAVGCTYRRLAAKVCCAQKRDSIGSFFKPKQLGFGTAGGCEAAVHALRSFIHNHGGEVLLKVDIKNAFNSVDRGALLTQIKDKIPDIFGFMWQCYNEPSKLTYKNNLIYSSVGCQQGDPLGPAIFSLAIHPIVEKLESKFNVWYLDDGTLGGDVNTVLKDLEYLQREFLTIGLDLNYSKCELCLLNDSMPPNITIQKFNKLVPGIKIIEKDTLRLLGSPVLDESVPSFIDEKIQNFSEVSDRLLKINTHVAFFILRYCLFVPKFTYYLRCCPFWKHKVYLQKIDNIIRDTLTAILNTPLDDRSWAQASLPIRMGGLGIRKISSVSLPAFLSSAHANDKLVREILGPSICFSDIACLAEGKNAWSQACPSNSLPTILSSQRQWDEPLCELVRENLLNTAANSTERARLLAVCVWESGLWLQALPSSNIGTLLDSTSFRLAACLRLGTMCFVPHRCRCGEYVDQLGHHGLSCLRSAGRFSRHSSLNDIIRRALNTANVSAVLEPCGLSRSDGKRPDGMTLIPWKMGRPLVWDATCVDTLAPSHLSESSGKAGAAAESAECLKRRKYNSLDRGYIHTSKVSRDQHIFLQ

SEQ ID NO: 24134 - protein, 988 aa, Notodonta dromedarius
MIILGFIVIFCICCIVIVRGKRAARLNAVEIMSSTSPGSVFRCAICSPARIFQSQRGLKIHCGKLHKITPSTFSTLNPLPPSASQLTPLTLWETLSDLKRSKPVIKRIPRGARITVAEHLSKTIRCVVSDNTKRAWEQLLTFPYRTFHVANVPSNTASLTCRIKDNCASSPPNTFPTPLDPPHRRRPHVGLVRESATYRRIEGRLGDGDVKGAARLLFSGDVLAPDNLQTLMTLKDKHPLPASLVDLPDPPQDADSVLQVTSGDVIRAVMSFPSGSAGGLDALTPQHLKDLLGSSSGTAGETLLRDLTALVNVMLSGRVNSDVVEVIYGANLCALMKKDGGIRPIAVGCTYRRLAAKICCFHMKDDVSSFLKPKQLGFGSAGGCEAAVHALRTFIANDGGEVLLKVDIKNAFNSVDRGTLLTKIKEKIPNIFSFLWQCYSAPSKLIYKNNMILSSVGCQQGDPLGPVIFSLAIHSVIEKLESKFNVWYLDDGTLGGDADTVLKDLTLLKNELSTIGLDLNFAKCELFIFDNCPQAASFRQKFQIIAPNIKILQKDTLHLLGSPIFPESVPSFIEEKIQNFCDVSDRLLKINTHMAFYIIRHCLFVPKFTYFLRCCPLWKHSDYIQRLDNIVRNTLTVILNTPLDDISWAQASLPVKLGGLGIRKMSSVSLPAFLSSVHANDSLVREILRPCFIPSELACLTEAKNAWLMACPNTSLPAVLSSQGQWDGPLCKLVREQLINTANSCAERARLLAVGEWESGLWLQALPSSNIGTLMDSTSFRLAVCLRLGSTCFVPHRCRCGETVDQRGHHGLSCLRSAGRISRHSSLNDIIRRALATANVAAVLEPNGLSRSDGRRPDGMTLIPWRMGRPLVWDATCVDTLAPSHLRESSIRAGGAAACAESLKRRKYSNLDPGYMFEPFGVETLGPWGPSAHRIFCDLGKRLVEATGDQRAGTYLAQRISIAIQRGNAASLLGTLPSDGGLAQVYFL

SEQ ID NO: 24135 - protein, 988 aa, Notodonta dromedarius
MIILGFIVIFCICCIVIVRGKRAARLNAVEIMSSTSPGSVFRCAICSPARIFQSQRGLKIHCGKLHKITPSTFNTLNPLPPSASQLTPLTLWETLSDLKRSKPVIKRIPRGARITVAEHLSKTIRCVVSDNTKRAWEQLLTFPYRTFHVANVPSNTASLTCRIKDNCASSPPNTFPTPLDPPHRRRPHVGLVRESATYRRIEGRLSDGDVKGAARLLFSGDVLAPDNLQTLMTLKDKHPLPASLLDLPDPPQDADSVLQVTSEDVIRAVMSFPSGSAGGLDALTPQHLKDLLGSSSGTAGETLLRDLTALVNVMLSGRVNSDVVEVIYGANLCALMKKDGGIRPIAVGCTYRRLAAKICCFHMKDDVSSFLKPKQLGFGSAGGCEAAVHALRTFIANDGGEVLLKVDIKNAFNSVDRGTLLTKIKEKIPNIFSFLWQCYSAPSKLIYKNNMILSSVGCQQGDPLGPVIFSLAIHSIIEKLESKFNVWYLDDGTLGGDADTVLKDLTLLKNELSTIGLDLNFAKCELFIFDNCPQAGSFRQKFQIIAPNIKILQKDTLHLLGSPIFPESVPSFIEEKIQNFSDVSDRLLKINTHMAFYIIRHCLFVPKFTYFLRCCPLWKHSDYIQRLDNIVRNTLTVILNTPLDDISWAQASLPVKLGGLGIRKISSVSLPAFLSSVHANDSLVREILRPCFIPSELACLTEAKNAWSMACPNTSLPAVLSSQGQWDGPLCKLVREQLINTANSCAERARLLAVGEWESGLWLQALPSSNIGTLMDSTSFRLAVCLRLGSTCFVPHRCRCGETVDQRGHHGLSCLRSAGRISRHSSLNDIIRRALATANVAAVLEPNGLSRSDGRRPDGMTLIPWRMGRPLVWDATCVDTLAPSHLRESSIRAGGAAACAESLKRRKYSNLDPGYMFEPFGVETLGPWGPSAHRIFCDLGKRLVEATGDQRAGTYLAQRISIAIQRGNAASLLGTLPSDGGLAQVYFL

SEQ ID NO: 24136 - protein, 988 aa, Notodonta dromedarius
MIILGFIVIFCICCIVIVRGKRAARLNAVEIMSSTSPGSVFRCAICSPARIFQSQRGLKIHCGKLHKITPSTFNTLNPLPPSASQLTPLTLWETLSDLKRSKPVIKRIPRGARITVAEHLSKTIRCVVSDNTKRAWEQLLTFPYRTFHVANVPSNTASLTCRIKDNCASSPPNTFPTPLDPPHRRRPHVGLVRESATYRRIEGRLSDGDVKGAARLLFSGDVLAPDNLQTLMTLKDKHPLPASLLDLPDPPQDADSVLQVTSEDVIRAVMSFPSGSAGGLDALTPQHLKDLLGSSSGTAGETLLRDLTALVNVMLSGRVNSDVVEVIYGANLCALMKKDGGIRPIAVGCTYRRLAAKICCFHMKDDVSSFLKPKQLGFGSAGGCEAAVHALRTFIANDGGEVLLKVDIKNAFNSVDRGTLLTKIKEKIPNIFSFLWQCYSAPSKLIYKNNMILSSVGCQQGDPLGPVIFSLAIHSIIEKLESKFNVWYLDDGTLGGDADTVLKDLTLLKNELSTIGLDLNFAKCELFIFDNCPQAASFRQKFQIIAPNIKILQKDTLHLLGSPIFPESVPSFIEEKIQNFSDVSDRLLKINTHMAFYIIRHCLFVPKFTYFLRCCPLWKHSDYIQRLDNIVRNTLTVILNTPLDDISWAQASLPVKLGGLGIRKISSVSLPAFLSSVHANDSLVREILRPCFIPSELACLTEAKNAWLMACPNTSLPAVLSSQGQWDGPLCKLVREQLINTANSCAERARLLAVGEWESGLWLQALPSSNIGTLMDSTSFRLAVCLRLGSTCFVPHRCRCGETVDQRGHHGLSCLRSAGRISRHSSLNDIIRRALATANVAAVLEPNGLSRGDGRRPDGMTLIPWRMGRPLVWDATCVDTLAPSHLRESSIRAGGAAACAESLKRRKYSNLDSGYMFEPFGVETLGPWGPSAHRIFCDLGKRLVEATGDQRAGTYLAQRISIAIQRGNAASLLGTLPSDGGLAQVYFL

SEQ ID NO: 24137 - protein, 987 aa, Furcula furcula
MIIILVIFLCLIVYIYLSGVKSVQLNEVGAMSSSVSASLNNIFQCSLCSPVRSFHTQRGLNIHTGKVHKPDRSQNSSFLPYQHYNNSVTSVQYPLWRLLSDLKRSTPTVKRIPRGARITVAQTLAKDINRVITDNSVQAWEHLLTFPYRVLHVNKDSSSISLTSKLKNNCSSSAQNSLLVSVPHRYPARAASEGVNYRLVESKLGDGDVRGAARLLFSSDVLASDTPETLSLLKSKHPLPAATFQLPDPPQASDTVLQVTAQDVTCAVSSFPSGSAGGLDSLTPQHLKDLLGSQCGATGELLLKELTALVNLMLSGRVNSEVVDILYGANLCALAKKDGGIRPIAVGCTYRRLAAKVCCTKKRDGIGSYFQPKQLGFGSAGGCEAAVHALRTFVHNNGGEVLLKVDIKNAFNSVDRGALLSRIKEKIPDIFGFMWQCYSTPSKLTYKSNLLHSSVGCQQGDSLGPAIFSLAIHPIIDKLESKFNVWYLDDGTLGGDADTVLKDLEFLQREFLSIGLDLNYSKCELCFLDNTRTQNLTLHKFENLVPGIKNIAKHSLRLLGSPILKESVPSFLEEKIQNFSEVSERLLKINSHVAFYIIRYCLFLPKFTYFLRCCPLWKHKDYLQKLDNIVKDTLIAIFNTPFDDRSWAQASLPVRLGGLGVRKISSVSLPAFLSSAHANGKLVQEILGSSYGFSDLACLAESKDAWTLACPNSNLPIILSSQKQWDGPLCELVREKLLNTAANSTERARLLAVSEWESGLWLQALPSSNIGTLMDSTSFRLAVCLRLGTMCFVPHRCRCGEMVDQLGHHGLSCLRSAGRFSRHSSLNDIIRRALTTANVSAVLEPCGLFRSDGKRPDGMTLIPWKMGRPLVWDATCVDTLAPSHLSESAVKAGAAASTAECLKRRKYSNLDRGYMFEPFGVETLGPWGSSAHLLYKDITKRLIEATGDQRAGTYLAQRIGIAIQRGNAASLLGSLPSDGDLAQTLTL

SEQ ID NO: 24138 - protein, 980 aa, Furcula furcula
MIIILVVFLCLIVYLYLSGAKSVQLNEVGAMSSSASASLNNIFQCSLCSPVRSFRTQRGLNIHTGKVHKPDQSQNTSSPPHQHYNNFVTSVQYPLWRLLSDLKRSTPTVKRIPRGARITVAQTLAKDINGVITENSVQAWKHLLTFPYRVVHVNKDSSNISLTSKLKNNCSSSAQNPLLVSVPHRSPVRAGSEGVNYRLVESKLGDGDVRGAARLLFSSDVLASDTPETLSLLKSKHPLPAATIQLPDPPQAIDTVLQVTAQDVTCAVSSFPSGSAGGHLKDLLGSNCGATGELLLKELTALVNLMLSGRVNSEIVDILYGANRCALAKKDGGIRPIAVGCTYRRLAAKVCCTKKRDSIGSYFQPKQLGFGSAGGCEAAVHALRTFVHNNGGEVLLKVDIKNAFNSVDRGALLSRIKEKIPDIFGFMWQCYSTPSKLTYKSNLLYSSVGCQQGDPLGPAIFSLAIHPIIDKLESKFNVWYLDDGTLGGDADTVLKDLEFLQRELLSIGLDLNYSKCELCFLDNTRTQNLSLHKFENLVPGIKNIAIHSLRLLGSPILNESVPSFLEEKNLNFSEVSERLLKINSHVAFYIIRYCLFLPKFTYFLRCCPLWKHKDYLEKLDNIVKDTLIAIFNTPFDDRSWAQASFPVRLGGLGVRKISSVSLPAFLSSGHANGKLVQEILGSSYSFSDLAYLAESKDAWTLVCPNSNLPIILSSQRQWDGPLCELVREQLLNTAANSTERARLLAVSEWESGLWLQALPSSNIGTLMDSTSFRLAVCLRLGTMCFVPHRCRCGEMVDQLGHHGLSCLRSAGRFSRHSSLNDIIHRALTTANVSAVLEPCGLFRSDGKRPDGMTLIPWKMGRPLVWDGTCVDTLAPSHLSESAVKAGAAASTAECLKRRKYSNLDRGYMFEPFGVETLGPWGSSAHLLYKDVTKRLIESTGDQRAGTYLAQRISIAIQRGNAASLLGTLPSDGDLAQTFTL

SEQ ID NO: 24139 - protein, 987 aa, Furcula furcula
MIIILVIFLCLIVYIYLSGVKSVQLNEVGAMSSSVSASLNNIFQCSLCSPVRSFHTQRGLNIHTGKVHKPDRSQNSSFLPYQHYNNSVTSVQYPLWRLLSDLKRSTPTVKRIPRGARITVAQTLAKDINRVITENSVQAWEHLLTFPYRVLHVNKDSSSISLTSKLKNNCSSSAQNSLLVSVPHRYPARAASEGVNYRLVESKLGDGDVRGAARLLFSSDVLASDTPETLSLLKSKHPLPAATFQLPDPPQAIDTVLQVTAQDVTCAVSSFPSGSAGGLDSLTPQHLKDLLGSQCGATGELLLKELTALVNLMLSGRVNSEVVDILYGANLCALAKKDGGIRPIAVGCTYRRLAAKVCCTKKRDGIGNYFQPKQLGFGSAGGCEAAVHALRTFVHNNGGEVLLKVDIKNAFNSVDRGALLSRIKEKIPDIFGFMWQCYSTPSKLTYKSNLLHSSVGCQQGDPLGPAIFSLVIHPIIDKLESKFNVWYLDDGTLGGDADTVLKDLEFLQREFLSIGLDLNYSKCELCFLDNTRTQNLTLDKFENLVPGIKNIAKHSLRLLGSPILKESVPSFLEEKIQNFSEVSERLLKINSHVAFYIIRYCLFLPKFTYFLRCCPLWKHKDYLEKLDNIVKDTLIAIFNTPFDDRSWAQASLPVRLGGLGVRKISSVSLPAFLSSAHANGKLVQEILGSSYGFSDLACLAESKDAWTLACPNSNLPIILSSQKQWDGPLCELVREKLLNTAANSTERARLLAVSEWESGLWLQALPSSNIGTLMDSTSFRLAVCLRLGTMCFVPHRCRCGEMVDQLGHHGLSCLRSAGRFSRHSSLNDIIRRALTTANVSVVLEPCGLFRSDGKRPDGMTLIPWKMGRPLVWDATCVDTLAPSHLSESAVKAGAAASTAECLKRRKYSNLDRGYMFEPFGVETLGPWGSSAHLLYKDITKRLIEATGDQRAGTYLAQRIGIAIQRGNAASLLGSLPSDGDLAQTFTL

SEQ ID NO: 24140 - protein, 987 aa, Furcula furcula
MIIILVIFLCLIVYIYLSGVKSVQLNEVGAMSSSVSASLNNIFQCSLCSPVRSFHTQRGLNIHTGKVHKPDRSQNSSFLPYQHYNNSVTSVQYPLWRLLSDLKRSTPTVKRIPRGARITVAQTLAKDINRVITENSVQAWEHLLTFPYRVLHVNKDSSSISLTSKLKNNCSSSAQNSLLVSVPHRYPARAASEGVNYRLVESKLGDGDVRGAARLLFSSDVLASDTPETLSLLKSKHPLPAATFQLPDPPQASDTVLQVTAQDVTCAVSSFPSGSAGGLDSLTPQHLKDLLGSQCGATGELLLKELTALVNLMLSGRVNSEVVDILYGANLCALAKKDGGIRPIAVGCTYRRLAAKVCCTKKRDGIGSYFQPKQLGFGSAGGCEAAVHALRTFVHNNGGEVLLKVDIKNAFNSVDRGALLSRIKEKIPDIFGFMWQCYSTPSKLTYKSNLLHSSVGCQQGDPLGPAIFSLAIHPIIDKLESKFNVWYLDDGTLGGDADTVLKDLEFLQREFLSIGLDLNYSKCELCFLDNTRTQNLTLHKFENLVPGIKNIAKHSLRLLGSPILKESVPSFLEEKIQNFSEVSERLLKINSHVAFYIIRYCLFLPKFTYFLRCCPLWKHKDYLQKLDNIVKDTLIAIFNTPFDDRSWAQASLPVRLGGLGVRKISSVSLPAFLSSAHANGKLVQEILGSSYGFSDLACLAESKDAWTLACPNSNLPIILSSQKQWDGPLCELVREKLLNTAANSTERARLLAVSEWESGLWLQALPSSNIGTLMDSTSFRLAVCLRLGTMCFVPHRCRCGEMVDQLGHHGLSCLRSAGRFSRHSSLNDIIRRSLTTANVSAVLEPCGLFRSDGKRPDGMTLIPWKMGRPLVWDATCVDTLAPSHLSESAVKAGAAASTAECLKRRKYSNLDRGYMFEPFGVETLGPWGSSAHLLYKDITKRLIEATGDQRAGTYLAQRIGIAIQRGNAASLLGSLPSDGDLAQTLTL

SEQ ID NO: 24141 - protein, 675 aa, Furcula furcula
MLSGRVNSEVVDILYGANLCALAKKDGGIRPIAVGCTYRRLAAKVCCTKKRDGIGSYFQPKQLGFGSAGGCEAAVHALRTFVHNNGGEVLLKVDIKNAFNSVDRGALFSRIKEKIPDIFGFMWQCYSTPSKLTYKSNLLHSSVGCQQGDPLGPAIFSLAIHPIIDKLESKFNVWYLDDGTLGGDADTVLKDLEFLQREFLSIGLDLNYSKCELCFLDNTRTQNLTLHKFENLVPGIKNIAKHSLRLLGSPILKESVPSFLEEKIQNFSEVSERLLKINSHVAFYIIRYCLFLPKFTYFLRCCPLWKHKDYLQKLDNIVKDTLIAIFNTPFDDRSWAQASLPVRLGGLGVRKISSVSLPAFLSSAHANGKLVQEILGSSYGFSDLACLAESKDAWTLACPNSNLPIILSSQKQWDGPLCELVREKLLNTAANSTERARLLAVSEWESGLWLQALPSSNIGTLMDSTSFRLAVCLRLGTMCFVPHRCRCGEMVDQLGHHGLSCLRSAGRFSRHSSLNDIIRRALTTANVSAVLEPCGLFRSDGKRPDGMTLIPWKMGRPLVWDATCVDTLAPSHLSESAVKAGAAASTAECLKRRKYSNLDRGYMFEPFGVETLGPWGSSAHLLYKDITKRLIEATGDQRAGTYLAQRIGIAIQRGNAASLLGSLPSDGDLAQTLTL

SEQ ID NO: 24142 - protein, 986 aa, Furcula furcula
MIIILVIFLCLIVYIYLSGAKSVQLNEVGAMSISASASLNNIFQCSLCSPVRSFHTQRGLNIHTGKIHKPDRSQNSSFLPHQHYNNSVTSVQYPLWRLLSDLRRSTPTVKRIPRGARITVAQTLAKVINRVITENSVQAWEHLLTFPYRVLHVNKDSSSISLTSKLKNNCSSSAQNSLLVSVPHRYPARAASEGVNYRLVESKLGDGDVRGAARLLFSSDVLASDTPETLSLLKSKHPLPAATIQLPDPPQATDTVLQVTAEEVTRAVGSFPSGSAGGLDSLTPQHLKDLLGSNCGATGELLLKELTALINLMLSGRVNGEIVDILYGANLCALAKTDGGIRPIAVGCTYRRLAAKVCCAHKRDSVGGYFKPKQLGFGSAGGCEAAVHALRSFIHNRGGEVLLKVDIKNAFNCVDRGALLTQIKNKIPDIFGFMWQCYSEPSKLTYKNNLIYSSVGCQQGDPLGPAIFSLAIHPIIEKLESKFNVWYLDDGTLGGDADTVLKDLEYLQREFYTIGLDLNFSKCELCILNDSMPPNRTIQKFENLVPGIKIIGKDSLRLLGSPVLDESVPSFLDEKIQNFSEVSDRLLKINTHVAFFILRFCLFVPKFTYYLRCCPFWKHKVYLQKMDNIVRDTLTAILNTPLDDRSWAQASLPIRMGGLGIRKISSVSLPAFLSSAHACDNLVREILGQSNCFSGIACLTEGKDAWTQACPSNSLPTILSSQRQWDEPLCELVRENLLNTAANSTERARLLAVCVWESGLWLQALPSSNIGTLLDSTSFRLAACLRLGTMCFVPHRCRCGEHVDQLGHHGLSCLRSAGRFSRHSSLNDIIRRALNTANVSAVLEPCGLSRSDGKRPDGMTLIPWKMGRPLVWDATCVDTLAPSHLSESSGKAGAAAASAESLKRRKYSSLDRGYMFEPFGVETLGPWGPSAHHLFNDISRRLVESTGDQRAGTYLAQHISITIQRGNAASLLGTLPGDSDAPTYLL

SEQ ID NO: 24143 - protein, 986 aa, Furcula furcula
MIIILVIFLCLIVYIYLSGAKSVQLNEVGAMSISASASLNNIFQCSLCSPVRSFHTQRGLNIHTGKIHKPDWSQNSSFLPHQHYNNSVTSVQYPLWRLLSDLKRSTPTVKRIPRGARITVAQTLAKVINRVITENSVQAWEHLLTFPYRVLHVNKDSSSISLTSKLKNNCSSSAQNSLLVSVPHRYPARAASEGVNYRLVESKLGDGDVRGAARLLFSSDVLASDTPETLSLLKSKHPLPAATIQLPDPPQATDTVLQVTAEEVTRAVGSFPSGSAGGLDSLTPQHLKDLLGSNCGATGELLLKELTALINLMLSGRVNGEIVDILYGANLCALAKTDGGIRPIAVGCTYRRLAAKVCCAHKRDSVGGYFKPKQLGFGSAGGCEAAVHALRSFIHNRGGEVLLKVDIKNAFNCVDRGALLTQIKNKIPDIFGFMWQCYSEPSKLTYKNNLIYSSVGCQQGDPLGPAIFSLAIHPIIEKLESKFNVWYLDDGTLGGDADTVLKDLEYLQREFYTIGLDLNFSKCELCILNDSMPPNRTIQKFENLVPGIKIIGKDSLRLLGSPVLDESVPSFLDEKIQNFSEVSDRLLKINTHVAFFILRFCLFVPKFTYYLRCCPFWKHKVYLQKMDNIVRDTLTAILNTPMDDRSWAQASLPIRMGGLGIRKISSVSLPAFLSSAHACDNLVREILGQSNCFSGIACLTEGKDAWTQACPSNSLPTILSSQRQWDEPLCELVRENLLNTAANSTERARLLAVCVWESGLWLQALPSSNIGTLLDSTSFRLAACLRLGTMCFVPHRCRCGEHVDQLGHHGLSCLRSAGRFSRHSSLNDIIRRALNTANVSAVLEPCGLSRSDGKRPDGMTLIPWKMGRPLVWDATCVDTLAPSHLSESSGKAGAAAASAESLKRRKYSSLDRGYMFEPFGVETLGPWGPSAHHLFNDISRRLVESTGDQRAGTYLAHHISITIQRGNAASLLGTLPGDSDAPTYLL

SEQ ID NO: 24144 - protein, 987 aa, Furcula furcula
MIIILVIFLCLIVYIYLSGVKSVQPNEVGAMSSSVSASLHNIFQCSLCSPVRSFHTQRGLNIHTGKVHKPDRSQNSSFLPYQHYNNSVTSVQYPLWRLLSDLKRSTPTVKRIPRGARITVAQTLAKDINRVITENSVQAWEHLLTFPYRVLHVNKDSSSISLTSKLKNNCSSSAQNSLLVSVPHRYPARAASEGVNYRLVESKLGDGDVRGAARLLFSSDVLASDTPETLSLLKSKHPLPAATFQLPDPPQAIDTVLQVTAQDVTCAVSSFPSGSAGGLDSLTPQHLKDLLGSQCGATGELLLKELTALVNLMLSGRVNSEVVDILYGANLCALAKKDGGIRPIAVGCTYRRLAAKVCCTKKRDGIGSYFQPKQLGFGSAGGCEAAVHALRTFVHNNGGEVLLKVDIKNAFNSVDRGALLSRIKEKIPDIFGFMWQCYSTPSKLTYKSNLLHSSVGCQQGDPLGPAIFSLAIHPIIDKLESKFNVWYLDDGTLGGDADTVLKDLEFLQREFLSIGLDLNYSKCELCFLDNTRTQNLTLHKFENLVPGIKNIAKHSLRLLGSPILKESVPSFLEEKIQNFSEVSERLLKINCHVAFYIIRYCLFLPKFTYFLRCCPLWKHKDYLEKLDNIVKDTLIAIFNTPFDDRSWAQASLPVRLGGLGVRKISSVSLPAFLSSAHANGKLVQEILGSSYGFSDLACLAESKDAWTLACPNSNLPIILSSQKQWDGPLCELVREKLLNTAANSTERARLLAVSEWESGLWLQALPSSNIGTLMDSTSFRLAVCLRLGTMCFVPHRCRCGEMVDQLGHHGLSCLRSAGRFSRHSSLNDIIRRALTTANVSAVLEPCGLFRSDGKRPDGMTLIPWKMGRPLVWDATCVDTLAPSHLSESAVKAGAAASTAECLKRRKYSNLDRGYMFEPFGVETLGPWGSSAHLLYKEITKRLIEATGDQRAGTYLAQRIGIAIQRGNAASLLGSLPSDGDLAQTFTL

SEQ ID NO: 24145 - protein, 986 aa, Furcula furcula
MIIILVIFLCLIVYIYLSGAKSVQLNEVGAMSISASASLNNIFQCSLCSPVRSFHTQRGLNIHTGKIHKPDRSQNSSFLPHQHYNNSVTSVQYPLWRLLSDLKRSTPTVKRIPRGARITVAQTLAKVINRVITENSVQAWEHLLTFPYRVLHVNKDSSSISLTSKLKNNCSSSAQNSLLVSVPHRYPARAASEGVNYRLVESKLGDGDVRGAARLLFSNDVLASDTPETLSLLKSKHPLPAATIQLPDPPQATDTVLQVTAEEVTRAVGSFPSGSAGGLDSLTPQHLKDLLGSNCGATGELLLKELTALINLMLSGRVNGEIVDILYGANLCALAKTDGGIRPIAVGCTYRRLAAKVCCAQKRDSVGGYFKPKQLGFGSAGGCEAAVHALRSFIHNRGGEVLLKVDIKNAFNCVDRGALLTQIKNKIPDIFGFMWQCYSEPSKLTYKNNLIYSSVGCQQGDPLGPAIFSLAIHPIIEKLESKFNVWYLDDGTLGGDADTVLKDLEYLQREFYTIGLDLNFSKCELCILNDSMPPNRTIQKFENLVPGIKIIGKDSLRLLGSPVLDESVPSFLDEKIQNFSEVSDRLLKINTHVAFFILRFCLFVPKFTYYLRCCPFWKHKVYLQKMDNIVRDTLTAILNTPLDDRSWAQASLPIRMGGLGIRKISSVSLPAFLSSAHACDNLVREILGQSNCFSGIACLTEGKDAWTQACPSNSLPTILSSQRQWDEPLCELVRENLLNTAANSTERARLLAVCVWESGLWLQALPSSNIGTLLDSTSFRLAACLRLGTMCFVPHRCRCGEHVDPLGHHGLSCLRSAGRFSRHSSLNDIIRRALNTANVSAVLEPCGLSRSDGKRPDGMTLIPWKMGRPLVWDATCVDTLAPSHLSESSGKAGAAAASAESLKRRKYSSLDRGYMFEPFGVETLGPWGPSAHHLFNDISRRLVESTGDQRAGTYLAQHISITIQRGNAASLLGTLPGDSDAPTYLL

SEQ ID NO: 24146 - protein, 987 aa, Furcula furcula
MIIILVIFLCLIVYIYLSGVKSVQLNEVGAMSSSVSASLNNIFQCSLCSPVRSFHTQRGLNIHTGKVHKPDRSQNSSFLPYQHYNNSVTSVQYPLWRLLSDLKRSTPTVKRIPRGARITVAQTLAKDINRVITENSVQAWEHLLTFPYRVLHVNKDSSSISLTSKLKNNCSSLAQNSLLVSVPHRYPARAASEGVNYRLVESKLGDGDVRGAARLLFSSDVLASDTPETLSLLKSKHPLPAATFQLPDPPQAIDTVLQVTAQDVTCAVSSFPSGSAGGLDSLTPQHLKDLLGSQCGATGELLLKELTALVNLMLSGRVNSEVVDILYGANLCALAKKDGGIRPIAVGCTYRRLAAKVCCTKKRDGIGSYFQPKQLGFGSAGGCEAAVHALRTFVHNNGGEVLLKVDIKNAFNSVDRGALLSRIKEKIPDIFGFMWQCYSTPSKLTYKSNLLHSSVGCQQGDPLGPAIFSLAIHPIIDKLKSKFNVWYLDDGTLGGDADTVLKDLEFLQREFLSIGLDLNYSKCELCFLDNTRTQNLTLHKFENLVPGIKNIAKHSLCLLGSPILKESVPSFLEEKIQNFSEVSERLLKINSHVAFYIIRYCLFLPKFTYFLRCCPLWKHKDYLEKLDNIVKDTLIAIFNTPFDDRSWAQASLPVRLGGLGVRKISSVSLPAFLSSAHANGKLVQEILGSSYGFSDLACLAESKDAWTLACPNSNLPIILSSQKQWDGPLCELVREKLLSTAANSTERARLLAVSEWESGLWLQALPSSNIGTLMDSTSFRLAVCLRLGTMCFVPHRCRCGEMVDQLGHHGLSCLRSAGRFSRHSSLNDIIRRALTTANVSAVLEPCGLFRSDGKRPDGMTLIPWKMGRPLVWDATCVDTLAPSHLSESAVKAGAAASTAECLKRRKYSNLDRGYMFEPFGVETLGPWGSSAHLLYKDITKRLIEATGDQRAGTYLAQRIGIAIQRGNAASLLGSLPSDGDLAQTFTL

SEQ ID NO: 24147 - protein, 987 aa, Furcula furcula
MIIILVIFLCLIVYIYLSGVKSVQLNEVGAMSSSVSASLNNIFQCSLCSPVRSFHTQRGLNIHTGKVHKPDRSQNPSFLPYQHYNNSVTSVQYPLWRLLSDLKRSTPTVKRIPRGARITVAQTLAKDINRVITENSVQAWEHLLTFPYRVLHVNKDSSSISLTSKLKNNCSSSAQNSLLVSVPHRYPARAASEGVNYRLVESKLGDGDVRGAARLLFSSDVLASDTPETLSLLKSKHPLPAATFQLPDPPQASDTVLQVTAQDVTCAVSSFPSGSAGGLDSLTPQHLKDLLGSQCGATGELLLKELTALVNLMLSGRVNSEVVDILYGANLCALAKKDGGIRPIAVGCTYRRLAAKVCCTKKRDGIGSYFQPKQLGFGSAGGCEAAVHALRTFVHNNGGEVLLKVDIKNAFNSVDRGALLSRIKEKIPDIFGFMWQCYSTPSKLTYKSNLLHSSVGCQQGDPLGPAIFSLAIHPIIDKLESKFNVWYLDDGTLGGDADTVLKDLEFLQRAFLSIGLDLNYSKCELCFLDNTRTQNLTLHKFENLVPGIKNIAKHSLRLLGSPILKESVPSFLEEKIQNFSEVSERLLKINSHVAFYIIRYCLFLPKFTYFLRCCPLWKHKDYLEKLDNIVKDTLIAIFNTPFDDRSWAQASLPVSLGGLGVRKISSVSLPAFLSSAHANGKLVQEILGSSYGFSDLACLAESKDAWTLACPNSNLPIILSSQKQWDGPLCELVREKLLNTAANSTERARLLAVSEWESGLWLQALPSSNIGTLMDSTSFRLAVCLRLGTMCFVPHRCRCGEMVDQLGHHGLSCLRSAGRFSRHSSLNDIIRRALTTANVSAVLEPCGLFRSDGKRPDGMTLIPWKMGRPLVWDATCVDTLAPSHLSESAVKAGAAASTAECLKRRKYSNLDRGYLFEPFGVETLGPWGSSAHLLYKDITKRLIEATGDQRAGTYLAQRIGIAIQRGNAASLLGSLPSDGDLAQTLTL

SEQ ID NO: 24148 - protein, 987 aa, Furcula furcula
MIIILVIFLCLIVYIYLSGVKSVQLNEVEAMSSSVSASLNNIFQCSLCSPVRSFHTQRGLNIHTGKVHKPDRSQNSSFLPYQHYNNSVTSVQYPLWRLLSDLKRSTPTVKRIPRGARITVAQTLAKDINRVITENSVQAWEHLLTFPYRVLHVNKDSRSISLTSKLKNNCSSSAQNSLLVSVPHRYPARAASEGVNYRLVESKLGDGDVRGAARLLFSSDVLASDTPETLSLLKSKHPLPAATFQLPDPPQAIDTVLQVTAQDVTCAVSSFPSGSAGGLDSLTPQHLKDLLGSQCGATGELLLKELTALVNLMLSGRVNSEVVDILYGANLCALAKKDGGIRPIAVGCTYRRLAAKVCCTKKRDGIGSYFQPKQLGFGSAGGCEAAVHALRTFVHNNGGEVLLKVDIKNAFNSVDRGALLSRIKEKIPDIFGFMWQCYSTPSKLTYKSNLLHSSVGCQQGDPLGPAIFSLAIHPIIDKLESKFNVWYLDDGTLGGDADTVLKDLEFLQREFLSIGLDLNYSKCELCFLDNTRTQNLTLHKFENLVPGIKNIAKHSLRLLGSPILKESVPSFLEEKIQNFSEVSERLLKINSHVAFYIIRYCLFLPKFTYFLRCCPLWKHKDYLVKLDNIVKDTLIAIFNTPFDDRSWAQASLPVRLGGLGVRKISSVSLPAFLSSAHANGKLVQEILGSSYGFSDLACLAESKDAWTLACPNSNLPIILSSQKQWDGPLCELVREKLLNTAANSTERARLLAVSEWESGLWLQALPSSNIGTLMDSTSFRLAVCLRLGTMCFVPHRCRCGEMVDQLGHHGLSCLRSAGRFSRHSSLNDIIRRALTTANVSAVLEPCGLFRSDGKRPDGMTLIPWKMGRPLVWDATCVDTLAPSHLSESAVKAGAAASTAECLKRRKYSNLDRGYMFEPFGVETLGPWGSSAHLLYKDITKRLIEATGDQRAGTYLAQRIGIAIQRGNAASLLGSLPSDGDLAQTFTL

SEQ ID NO: 24149 - protein, 675 aa, Furcula furcula
MLSGRVNSEVVDILYGANLCALAKKDGGIRPIAVGCTYRRLAAKVCCTKKRDGIGSYFQPKQLGFGSAGGCEAAVHALRTFVHNNGGEVLLKVDIKNAFNSVDRGALLSRIKEKIPDIFGFMWQCYSTPSKLTYKSNLLHSSVGCQQGDPLGPAIFSLAIHPIIDKLESKFNVWYLDDGTLGDDADTVLKDLEFLQREFLSIGLDLNYSKCELCFLDNTRTQNLTLHKFENLVPGIKNIAKHSLRLLGSPILKESVPSFLEEKIQNFSEVSERLLKINSHVAFYIIRYCLFLPKFTYFLRCCPLWKHKDYLQKLDNIVKDTLIAIFNTPFDDRSWAQASLPVRLGGLGVRKISSVPLPAFLSSAHANGKLVQEILGSSYGFSDLACLAESKDAWTLACPNSNLPIILSSQKQWDGPLCELVREKLLNTAANSTERARLLAVSEWESGLWLQALPSSNIGTLMDSTSFRLAVCLRLGTMCFVPHRCRCGEMVDQLGHHGLSCLRSAGRFSRHSSLNDIIRRALTTANVSAVLEPCGLFRSDGKRPDGMTLIPWKMGRPLVWDATCVDTLAPSHLSESAVKAGAAASTAECLKQRKYSNLDRGYMFEPFGVETLGPWGSSAHLLYKDITKRLIEATGDQRAGTYLAQRIGIAIQRGNAASLLGSLPSDGDLAQTLTL

SEQ ID NO: 24150 - protein, 1016 aa, Patiria miniata
MATGATVVTILALLATLDRTVLSEATNHGTHPIVNPWSYCHGVLSRIMPLRFVTPNLPRSQWETWNQELKTQLGPLHFDLSSGHITPSQAGEVFTESLFNFVKGKPELVESDKHTGYVSHDPRVLTNAKKEMNKLRKRAFGKNSTHENRKRFNEANRHYSALKKVFKKTKDLKNVEHEEKLFHSNFYEFAKRLTKGELYKDVTKPSFTKCCANEYYTKKYSSSAHFIHNDLNWFPYIRVPDDGTDFDLTPVRPRDIKSVLQHKSSNKSPGPDNITYGILKKLPATHHFLATLFSRIMQVGSPPRSWSCCKVSLIHKKGEASLPENFRMIALNSCVAKIYHQLLSQRFNRYLIDNELIDTTMQKAFIQGINGCIEHTQTMHELISHAKANQKTLHVTWFDLADAFGSVQHDLIYHELERNKFPPIIQAYIKNLYSNLTGYVRGPGWNSEIFQFKKGVFQGDPLSPIIFVIAFNPLVQYIKSELRFGYTIDDTKFICTPFADDFNLITTNVKSHQRIINNIVSRAQSMNLILKPSKCKSLSLCSGKPTEKIFKINDFLIPTIKDEPHSFFGSIITFSGKARDTMFHIKQKIISYLNRIDESKIRDEYKLKVYCNYLLSSLRFCLTVHDITKTDLNTLDQNIDKYLKKWGGLPKSATNSLLHSNSGLGIKSLTFLYRECHALAHASTRIKGDNMVNKCLDSKLHRESSWSRKCSVTAYSENVLQKALKEIPAKDNSPGKHLHKLKTVIKSSVAKDIANTWDQKIKSLAKQGRLLELMETEKSNITWKSIMYNLPRKILRFGLNAIIDTLPVNTNLCLWGKSVDPKCTLCTSKETLLHVLNYCPVMLNQGRYTYRHNNVLLEICKSLDKMYNSCSNRKLFADLDGKHAPGGNTIPPSILPTTLKPDIVITDEHNKDITIVELTVPFETIITKSHDYKMQKYANLTRDFREIGFNSKLIALEIGSRGFIDENNKTQIRSLFNLMTKTEIRQLTTHLSKTALVSSFVIFYSKYSPVWIDSQD

SEQ ID NO: 24151 - protein, 1016 aa, Patiria miniata
MATGATVVTILALLATLDRTVLSEATNHGTHPIVNPWSYCHGVLSRIMPLRFVTPNLPRSQWETWNQELKTQLGPLHFDLSSGHITPSQAGEVFTESLFNFVKGKPELVESDKHTGYVSHDPRVLTNAKKEMNKLRKRAFGKNSTHENRKRFNEANRHYSALKKVFKKTKDLKNVEHEEKLFHSNFYEFAKRLTKGELYKDVTKPSFTKCCANEYYTKKYSSSAHFIHNDLNWFPYIRVPDDGTDFDLTPVRPRDIKSVLQHKSSNKSPGPDNITYGILKKLPATHHFLATLFSRIMQVGSPPRSWSCCKVSLIHKKGEASLPENFRMIALNSCVAKIYHQLLSQRFNRYLIDNELIDTTMQKAFIQGINGCIEHTQTMHELISHAKANQKTLHVTWFDLADAFGSVQHDLIYHELERNKFPPIIQGYIKNLYSNLTGYVRGPGWNSEIFQFKKGVFQGDPLSPIIFVIAFNPLVQYIKSELRFGYTIDDTKFICTPFADDFNLITTNVKSHQRIINNIVSRAQSMNLILKPSKCKSLSLCSGKPTEKIFKINDFLIPTIKDEPHSFFGSIITFSGKARDTMFHIKQKIISYLNRIDESKIRDEYKLKVYCNYLLSSLRFCLTVHDITKTDLNTLDQNIDKYLKKWGGLPKSATNSLLHSNSGLGIKSLTFLYRECHALAHASTRIKGDNMVNKCLDSKLHRESSWSRKCSVTAYSENVLQKALKEIPAKDNSPGKHLHKLKTVIKSSVAKDIANTWDQKIKSLAKQGRLLELMETEKSNITWKSIMYNLPRKILRFGLNAIIDTLPVNTNLCLWGKSVDPNKTLCTSKETLLHVLNYCPVMLNQGRYTYRHNKVLLEICKSLDKMYNSCSNRKLFADLDGKHAPGGNTIPPSILPTTLKPDIVITDEHNKDITIVELTVPFETNITKSHDYKMQKYANLTRDLREIGFNSKLIALEIGSRGFIDENNKTQIRSLFNLMTKTEIRQLTTHLSKTALVSSFVIFYSKYSPVWIDSQD

SEQ ID NO: 24152 - protein, 998 aa, Patiria miniata
MFLAVAVICAAAPCRPIKFCYCEFPSVMHKHNARIILANKVIQWETWNQELKTQLGPLHFDLSSGHITPSQAGEVFTESLFNFVKGKPELVESDKHTGYVSHDPRVLTNAKKEMNKLRKRAFGKNSTHENRKRFNEANRHYSALKKVFKKTKDLKNVEHEEKLFHSNFYEFAKRLTKGELYKDVTKPSFTKCCANEYYTKKYSSSAHFIHNDLNWFPYIRVPDDGTDFNLTPVRPRDIKSVLQHKSSNKSPGPDNITYGILKKLPATHHFLATLFSRIMQVGSPPRSWSCCKVSLIHKKGEASLPENFRMIALNSCVAKIYHQLLLQRFNRYLIDNELIDTTMQKAFIQGINGCIEHTQTMHELISHAKANQKTLHVTWFDLADAFGSVQHDLIYHELERNKFPPIIQAYIKNLYSNLTGYVRGPGWNSEIFQFKKGVFQGDPLSPIIFVIAFNPLVQYIKSELRFGYTIDDTKFICTPFADDFNLITTNVKSHQRIINNIVSRAQSMNLILKPSKCKSLSLCSGKPTEKIFKINDFLIPTIKDEPHSFFGSIITFSGKARDTMFHIKQKIISYLNRIDESKIRDEYKLKVYCNYLLSSLRFCLTVHDITKTDLNTLDQNIDKYLKKWGGLPKSATNSLLHSNSGLGIKSLTFLYRECHALAHASTRIKGDNMVNKCLDSKLHRESSWSRKCSVTAYSENVLQKALKEIPAKDNSPGKHLHKLKTVIKSSVAKDIANTWDQKIKSLAKQGRLLELMETEKSNITWKSIMYNLPRKILRFGLNAIIDTLPVNTNLCLWGKSVDTKCTLCTSKETLLHVLNYCPVMLNQGRYTYRHNNVLLEICKSLDKMYNSCSNRKLFADLDGKHAPGGNTIPPSILPTTLKPDIVITDEHNKDITIVELTVPFETNITKSHDYKMQKYANLTRDLREIGFNSKLIALEIGSRGFIDENNKTQIRSLFNLMTKTEIRQLTTHLSKTALVSSFVIFYSKYSPVWIDSQD

SEQ ID NO: 24153 - protein, 1144 aa, Aurelia aurita
MSNDNSSNNNVNGTGINHGEGVSFGRCPVDEQRRPGRHQATARQKWSKTINRLVMYCKFKSEPNRRGYRKRMMEIWRDKGVFEISEQRLMDQARAILVNQWLTDVELEEVKREIERENTDVIVDRNEQQEMSQLEGDESEGGASEQETRTEARNDREDRTGNANDDIEGLDLREDIVLSEEETEQLTTICTFYRNKEQPPKVTFKTVNKKKIQSEIKKLENVIKKVITPTITETNRFVIALIWYIAHKMDLKEREQRPKKDPWWKRRINNDIKELRAAISKLERRQNNEMLSNRGMEYIDKKYRVREKGVSVVIEELKQRVVAKAAKVKRFEARNEQQRQNRLFEVDQGRLYQELDGKDKSEILIPDADEARDFWSSIWESPVEHNTQAEWLKEIKEEMTGLNHRQEDIEIEEGKVKEQLKKIPNWKAPGPDGVQGFWIKNLNGLHNRIAEQLNEIVRTGVVPTWMTKGRTVLCVKDVSKGNAADNYRPISCLPLMWKVLTGIAADQIYTYMEERELFPDEQKGCKRKARGTKDQLLIDKTIIKNCKRRHTNLSIAWIDYRKAYDMVPHSWIIECLNMIGIAENLKELLVRSMPSWKTILTAGKEELGEVTIQRGIFQGDCLSPLLFVICLLPMSMVLRKCKAGYQLERGKTKVNHLLFMDDLKLFAKDENEIDSLVRTVSIFSEDIGMRFGVQKCGVVVMKRGKVVNSDGIQLPNGETIKSIGEEGYKYLGMLEIDEIMNQSMKELVQMEYLRRLKKILKSRLNGKNIIIAINTWAVSLLRYGAGLINWTKNELQQLDRKTRKKLTMYGAFHPKSNVNRLYLTRQEGGRGLIGAEETVRSEENNLGWYVMNNVHEIMRSVEKEGILRSNEIKDPKVWKRQNKEQHKNGWIDKPLHGQTANATKDLMDKDKNWNWLKHAGLKKETESTIFAAQEQAVGTNSVKNIIYKENVSKECRLCGKADETIAHIVSECQQLAQVQYKGWRHDKVAQIVHWKLCQKLGIDHGDRWYNHKIESVIVTEDFRLLWDFPIQTDHRLEHNRPDIVFENKKDRSCLLIDISCPFDIRIERKEKEKIEIYQDLKREIKRLWNVREVKIVPIIIGALGTIGKNFENWLKKIEIECSTELLQKACLLGTAKILRKVLDT

SEQ ID NO: 24154 - protein, 940 aa, Tuta absoluta
MSASPIRTTCPYCPESSRLFVAPRGLNVHIAHMHRDVRSQQVVVALNVDQRLTSPAVSLDDIHILKKTVRVLKHIPKGARSTVAGKLSSIIDDCVQTNETSAWCSLLSFAYGALRVPEASSGKSLTAKVKENTDQLSVYFPAVTRSPQTRSVNKLIESKVYDGDLRGAVRLLSSESTLSPNNESTLNALREKHPVPSPSQHLSLPSEPNLSSPFLSVSEDDVALGISSFYSGSASGIDGIRPIHLKELISNTAGDNGRRLLGSITRLCEFLLRGMLNLEVTPYFYGASLCALNKKNDGGIRPIAVGIAFRRLVSKLGCRAVKDEMARYLQPRQLGFGTPLGCEAAIHATRLFVLDKVLPGDDIILKFDIKNAFNSIHRDVLLSETKDRIPGLFPYLYQAYAAPSKLFYNDTSISSQVGVQQGDPLGPLIFSLVLHKIVTELEAPLNLWYLDDGTIGGKPDVLFRDLQLLLPRLEAIGLSLNHTKCEFFGGPQGVCSFSRFESVLPGLKKLNEGTFNLLGAPIFPDAVPAALEARKQTLMVVRERLRYLPASVSLTLLRSCFGMPTLTYTVRTSPTWLFPDDVTDVDCLIKSILEDVINVSLNDSQWAQASLPIRHGGLGIRRVMDTGLAGFLASVSGVRSLVAQIFSLNGDELVIPFADAALSQWRQLCPGKDVPDDPTVQRGWDDVQCRVVVERMLGNASGADLARIKAASKPESGAWLHALPSPQLGTFLDNDSLRIAVALRLGCVVCAPHHCVCGTMVEENGHHALSCQRCAGRFPRHHALNDIIRRALVSANIPCVLEPPGLCRTDGKRPDGLTLVPWMRGRCLLWDATCVSTFAACHVGGTAHVAGSAAETAARLKHQKYAALAQQYLFVPVAIETSGTWGAEARAFVSELGRRLRERGSDPRSGAFLVQRLSLAVQRGNAASVMGTFGPGEYGR

SEQ ID NO: 24155 - protein, 940 aa, Tuta absoluta
MSASPIRTTCPYCPESSRLFVAPRGLNVHIAHMHKDVRSQQVVVALNVDQRLTSPAVSLDDIHILKKTVRVLKHIPKGARSTVAGKLSSIIDDCVQTNETSAWCSLLSFAYGALRVPEASSGKSLTTKVKENTDQLSVYFPAVTRSPQTRSVNKLIESKVYDGDLRGAVRLLSSESTLSPNNESTLNALREKHPVPSPSQHLSLPSEPNLSSPFLSVSEDDVALGISSFYSGSASGIDGIRPIHLKELISNTAGDNGRRLLGSITRLCEFLLRGMLNLEVTPYFYGASLCALNKKNDGGIRPIAVGIAFRRLVSKLGCRAVKDEMARYLQPRQLGFGTPLGCEAAIHATRLFVLDKVLPGDDIILKFDIKNAFNSIHRDVLLSETKDRIPGLFPYLYQAYAAPSKLFYNDTSISSQVGVQQGDPLGPLIFSLVLHKIVTELEAPLNLWYLDDGTIGGKPDVLFRDLQLLLPRLEAIGLSLNHTKCEFFGGPQGVCSFSRFESVLPGLKKLNEGTFNLLGAPIFPDAVPAALEAKKQTLMVVRERLRYLPASVSLTLLRSCFGMPTLTYTVRTSPTWLFPDDVTDVDCLIKSILENVINVSLNDSQWAQASLPIRHGGLGIRRVMDTGLAGFLASVSGVRSLVAQIFSLNGDELVIPFADAALSQWRQLCPGKDVPDDPTVQRGWDDVQCRVVVERMLGNASGADLARIKAASKPESGAWLHALPSPQLGTFLDNDSLRIAVALRLGCVVCAPHHCVCGTMVEENGHHALSCQICAGRFPRHHALNDIIRRALVSANIPCVLEPPGLCRTDGKRPDGLTLVPWMRGRCLLWDATCVSTFAACHVGGTAHVAGSAAETAARLKHQKYAALAQQYLFVPVAIETSGTWGAEARAFVSELGRRLRERGSDPRSGAFLVQRLSLAVQRGNAASVMGTFGPGEYGR

SEQ ID NO: 24156 - protein, 942 aa, Ceratina australensis
MARQEAVLTLQGHRFVNQLLVAAFPHRSLESIKGQRRRPEYKAAVQRFLTELGSLALTDAVLSPVEDPDIYLTPIRSYLQNLPPLEGSEYQAINLNHICSRLNSLPPLVLLVEISAYIHGIFPSISQSSTVRMRKPPAEPRASISKRKQRRTEYARTQILFKRNPGKCINQILEGITSITIPDKDTMEPYWTAVFTSAPAASHAVNMPSLSTHLSQAWDPITPDEITKCFPKCGTAPGPDKISSRLLRAVPLGVLTRIFNIFLLCGSLPEDLCNSTVTFIPKITEPTQPGDYRPIAIASVITRTFHKVLANRVLAQVALDTRQRAFIKADGCAEATFLLDLLLKYHHKNCRSMYLASLDLSKAFDSITHEAILSALDSRGAPPTLVHYIRNFYNKSSMIIRTPHWCSNAIYPLRGVRQGDPLSPNLFNLVMDALLRSLPPECGIEADGLRLNALAYADDLFLVASTAEGLKDLLTHVTAFLADCGLLINVNKSYTIALKADGKHKKVAVDGRFKLFCGSSPLRALKRTDTFSYLGVLFTPEGRVFGKPCEPLVKMLESLTRAPLKPQQRLWALRNVVIPKLHHQLILGHATIGCLNKIDRSVRSFVRRWLLLHHDVPNAYFHASISDGGLGIMSLRWMVPCLRLKRLLSISQGSWAPDLTPGSYWYYEKLLCLRRLNAGNRQLEKNTDIWRYWVDKLYSSVDGAALSCSSKIPSQHRWISSGNRFLSGRDFINACRLRINALPSRSRTSRGRSGDRGCRAGCHRVETTNHILQACHRTHADRIKRHNNVVSYITRNLRRSGYEVLVEPRYNTSAGVRKPDIVTSMGETTIVLDAQVTSDITSLSGVHQAKVDYYAQNTDLISSIMRSTGASRILVLAATLSWRGIWSPESAKDLLNLGVIKKYELSILSTRVIIGGLSAFWKFNRSTLTINNRSHLHRRGIG

SEQ ID NO: 24157 - protein, 973 aa, Dasypogon diadema
MRSKHPSDFDQMRLRVDVKARWSEEETLLVARKEAELAVHRNPRFMNQELARIFPERTLEALKKIRQRPEYRRAVRRFIDELEAGPSRLLPSHASLLVSSPSNSSHEDLQEPPTADRHFLDFLLALPAPRATSYNADVLLDIVNTAQESGKDDTLARLSSYLLDVWPTHSPSAPPPRRREFRPPTRRQARRQDYARTQRNWDKHQGRCIKAILDGPDESHMPPRDVMEPYWREVMERESAAAPPNGNLRQDLGTTWEPITIEEIGICQLPLSSSPGPDGITPRQLRAMPDELMVRILNLFLWCGKIPQHLGQAKTVFIPKKNRSTEPGDFRPITIPSVITRLLHGILARRLKNKVDLDPRQRAFQPTDGCADNTTLVDLLLRDHHQRYASCYVATLDVSKAFDSVSHNAIFGSLQSFGFPDGFIRYLKSFYLSSTTRLVGDGWMSGPVQPKRGVKQGDPLSPMLFNIIIDRLLKRFSTDIGCLLGTTRINSLAFADDLMLCASTPQGLQTLIDVTTAFLTSCGLTLNSAKCLSISIKGQPKQKNTVVVNQVFKIAGNPMPALKRGDEWRYLGISFTTDGRSKFRASDEVLPKLEHLSKAPLKPQQRLHALRTVVIPQLYHKLTLGNIMLGVLKKTDVCIRTFVRKWLDLPRDTPNAFFHAPIEHGGLGIPSIRWNGPCLRRARLLGLHLPNMEGVAMANTFIAKELDRVEARLRVNGRLLENQEAIAGFWSARLHGSVDGSGLRESARHKQAHRWIREPTRLLSGRDFVQCVKLRINALPSRSRTTRGRHELDRMCRAGCQAPETLNHIVQQCHRTHGSRIERHDSVMAYIERSASNRGFTTIKEPSFNTREGTRKPDLIAVSGGEAVVVDAQVVTDGHSLDDAHYRKKSRYNTDEIKEEICRRYRVSGVRVTTATLNWRGIWSGSSIDELVRLNLLRKHESALISTRTAIGSIRCFRIFSSTTSVSYRSGIG

SEQ ID NO: 24158 - protein, 976 aa, Proctacanthus coquilletti
MRKAHPTELDRMRLRVDVKARWSEEETLLVARKEAELVVKKNSRFLNQDLAGIFPDRTLEAIKKTRQKPSYRDAVRRFIDELESGPSHHPSSPPTGPESPLTSTQSTPSMDLPLPDTNRHFLEYITTLPPPRVTSYGCEVLLSIIEDANASGRDTTLTRLSSYLLDIWPTQRHNVPPAKKRELQNAVTRRQRRRQDYAMTQRNWVKHQGRCIRSIIDGPITAEPPSRNIMEPYWREVMERESTVAPHDEDLRQVLDSTWSPITCDELKACRLPLSSSPGPDGITPRQLRAIPDVLMVRILNLILWCGKIPEHLGESRTVFIPKKDQSIDPGDFRPITIPSVVIRLLHGILAKRLKNAVDLDPRQRGFQPTDGCADNTTLVDLLLRDHHQRYASCYIATLDVSKAFDSVSHKALFGTIRSYGFPHGLVDYLNNLYLSSGTRLVGEGWISDVIRPKRGVKQGDPLSPILFNIVVDRLLRRYPNTIGCAIGSSKINAMAFADDILLCASTPQGLQVLIDETHSFLSSCGMVLNSTKCLTISIKGQPKQKTTVIEERRFRVAGNLAPALKRGEVWRYLGISFSTEGRCKYRASEELQPKLVRLTKAPLKPQQRLFALRTVVIPQLYHKLTLGNIMIGALNKTDVLIRSYVRRWLSLPKDVPTAFFHAPINQGGLGIPSLRWNGPCLRKKRLENIRLPNLDEVATANTFVAAELDRAAGRLRVDGRLLKDLEDISNFWSNRLHNSVDGAGLREACRHKQAHRWISEPTSLLSGRDFVQCIKIRINALPSRSRTTRGRHTQDRMCRAGCQAPETVNHIVQQCYRTHASRIDRHNSVLAFIERGAGNRGFTTVKEPTITTSEGLRRPDLIAVSGGGAVVVDAQIVTDGRSLDTAHQDKIARYKTSEIIEEVKRRYQIERVVVTSATLNWRGIWSGSSIDALVQNGILNVKDSALISTRVAIGSIRCFRIFNSTTAVNYRAGIG

SEQ ID NO: 24159 - protein, 1240 aa, Montipora capitata
MRFLPIYSILIVVNINYNLPPARSDSRNTILCKMSAERIQHGRTRWTEQMCIDLLTCKDKAKQLFASEECPTNEKGRKIGVMQLTLKFWNEKGYESLGKTAQNLMVKLAHLEKTCKVSAVRITNELQEQRETSEQRPNNREIETEDQTSEQQQSIDWTIEDLSWIAQITRAAKCIYDDIVKDIGIMNKRDVNTFVKKKSYIKKIDIDRLQYVAKSLIKTSPLIDPLQYLWEYNCSIYSVVKAWKSIHTKERNEDKERKSSGKPRWMINMERKMNNLRKQTSQICEELKRIRDNCELTPKMKKNRFWMIKEIKGRITIASLTTLKERKINAIRALKRQKERKKTAHERFKTNQWFDVDEGSFYSHLNNIIKSTEANHHPQYTGKEKPPSTNQDATPATITTREEFEGFWRPIWESASEVPIEADWIKDTETALKQHITHPSGPITITKEIITNSIKNKRNWSSPGKDKITNYWIKKMDTFHGDIATALNIILTERLGIPAWLTVGRSVMIPKKDNPSAPDHRPITCLNTLYKLITSVIDHQLQVHEDKNNLMQIDQRGGKAKSMGTIDNLLIDKMILEDAHFHKKNLSCTWVDVKKAFDSVSHQWIIKTLEMHGINADLINLIKSIMKTWNINLEVTTNKVKETIGPIKVNRGILQGDSFCVRLFTLSLNPIAWYLRSTEGYKLSHAQDRKITHALFVDDLKTYHRSEQKAVTVTSKLKKMFADIGLEWGINKCAAIHMKRGKLAPNDSASEMPVSNDCSIPVIGSEDHYKFLGKYQNTQHLEDKVIEEASNQYENRLWAVWTSPLSIPRKVLATNVYAVPVLQYYMWTTDWCLSHLKELDRLTRKVINDCSGKHKHESTPLLYLQPQQGGKGLVELETLYKNTKIKIANYINNSKDQHIKLVKSFQLKKEQSHLRSIFKDAKKYAEELNIECDFEDGETILRNGDKEMRVSGKEPYKVKSIIDKANSDRHMRDTQRQPWVGKFVTQHWNDPQISNNSYDIFKQWKNIPDIVMSIDTSIRQQLLNTKTYRSQKLHEQVEELSCRLCSEKQETVSHVLCGCSHIAQSLYKTRHDKMLRPVYHALLEKYGFDESDYSSPWHMQSHPQPSKENKEAKILWDIPWQLEKCPKDGANKPDISILDKKNKEWSLVEGTICTPGTIAERTKCKQNKYLDLRLGIKNLYPGYKVKLITIVFDYLGAYYKDLDKELNVLFGPKVARLTIERSQKWVISQNCEIVKRFSCM

SEQ ID NO: 24160 - protein, 1210 aa, Heteractis crispa
MTVERIQHGRTRWTEQMCIDLLTCKDEAKQLHTSEECPTNEKGRKIGLMQLTLKFWNEKGYENLGKTAQNLRDKLSHLERTCKVSSLRITNELREQRETGEQRTNNNVPEIEEEDQPSEQQQSINWTKEDLDWMEQITPTAKYIFDDIVTDTGNMNKRDVNTFVKKNVFIKKKDIDRLQQIAKTLIKTNPSSDPVQYLWEYNCSVYAVVKAWKSIHSKEKNADKERKGSEKPRWMTNIERKMNNLRKQISQISEELNRLRANRKLTPKMKKNRSWMMKEIKGKITIESLTILKERKINTIRAQKKQKDNKKTTYERFKTNQWFDADEGSFYSHLNNIIKLTEANKHPQYIGKEKKCSVAQEITSDSAITKEVFEEFWRPIWENASELPIEERDWIKDTEAALRQHTQHPTELIKITKEIITNCIKNKRNWSSPGIDKITNYWIKKMDIFHGDIATALNVILTERLEIPPWLTIGRSVMIPKKDNPTVADHRPITCLNTLYKPITSVIDYQLQLHEDKNNLMQIDQRGGKAKSMGTVDNLLIDKMILEDAHFRKKNLSCTWVDVKKAFDSVSHQWIAQTLEMHGFNADLIHLIKSVMNTWSINLEVTINQVKETIGPIKVNRGILQGDSFCVRLFTLCLNPIAWYLRSTEGYKLSHAPDRKITHVLFVDDLKTYHRSEQKAVIVTSKLKKMFTDIGLEWGINKCAAMHIKRGKLTTNDNTNGMPVSNNCTIQVIGNEDHYKFLGKYQNTEHLEDKVIEEASKEYENRLWAIWTSPLSIPRKVRATNVYAVPVLQYYMWTTDWCLNHLKALDRLTRKVINDCSGKHKYESTPLLYLQPEQGGKGLTELETLYKNTKLKVANYINNSKDQHIKLVKSFQLEKEQRNLRSIFKDAKKYAENLNIECNFDNNVTLLRFDNKEVQVSSAEPQKVKNIINRANVLKYKNELQHQSWVGKLVTQHWNDPELSSTSYDLFKQWKNVPDVVLSVDTLIRQQLLNTKTYRMCKLQEHVDELTCRICSEKQETVCHILGNCSKLAQTLYTQRHDKMLRPIYHALLDKYGHKQSNHLLPWYKQSHPRPSEESDDVKILWNIPWHLKKAPRNGANKPDISILDMRAKECILIEGTVCTPGTIIEKTRNKHEKYVDLRLGIKHLYPGYKVRLITIVFDFLGAHYKELSKDLSALLGKQVASLVIERSQKWIISQNCEIVKRFMCV

SEQ ID NO: 24161 - protein, 989 aa, Sander lucioperca
MCPISSKTAKGDADSRLQTMTTIIFSYASERFGQVEKVKTKPTSYTMNRRATRIHHLRQEIRTLKKQYKKATAEERQPIAELQNILRKKLMIIRRAEWHRRRGRERVRKQVAFIANPFGFTKQLLGDKRSGRLECSKEEVNRFLQDTVSDSMREQELEANKALISPAPPTTEFNLREPSLRDVEEIIKAARSASTPGPSGVPYLVYKRCPDLLRHLWKILKVIWRRGRVADQWRWAEGVWIPKEENLKNINQFQTISLLSVEGKVFFSIVSRRLTEFLLKNNYIDPSMQKGGIPGASSCLEHTGVVTQLIREAHENRGDLVVLWLDLANAYGSIPHKLVELALHLHHVPSKIKDLILDYYNNFRMRVTSGSGTSDWHRIGKGIITGCTISVIFFAFAMNMVVKSAKVECRGPLTKSGVRQPPIRAYMDDLTITTTSVPGSRWILQGLERLITWARMSFKPSKSRSMALKKGKVIDKFRFSISGTVITTITEQLVKSLRKLFDSSLKDSVAIQKSNKELGAWLTKVDKSGLPGRFKAWLYQHSILPRVLWPLLVYAVPMTTVESLERKLSGFLRKWLGLPRSLTSTALYGTSNILQMPFSGLTEEFMVVRTREVLQYRDSRDCKVSSAGIEVRMGRKWKAGKAVEVAESCLRQKALVGTVATGRVGLGYFPKTLVSQARGKERHHLLQDEIRAGVEEERVSRAVALRQQGAWTRWESTLQRRITWANILQADFHRVRFLVQAVYDALPSPANLHVWGKSETPSCLLFSGRGSLEHLLSSCPKALADGRYRWRHDQVLKAIAESLASAINTSKHHHAPKKAVPFIKAGEKPRVRSQLTTGLLHKASDWLLQVDLEKQLRFPQHIATTRLRPDMIVTSEASKHLIMLELTVPWEEHIEEANERKRAKYQELVEECRDRGWKTFYEPIEVSCRGFAGHSLCKVLSRLGVTGAAKKRAIQSTSEAAEKATRWLWIKRADPWADPWTATGTQVGA

SEQ ID NO: 24162 - protein, 838 aa, Astatotilapia calliptera
MSDPLREQDLGPNKALINPAPPSVEFKLTEPSLKEVCEVIKAARSASSPGPSGVPYLVYKRCPELLRHLWKILKVIWQRGRVADQWRCAEGVWIPKEEDSKNINQFRSISLLSVEGKVFFSVVSRRLTEFLLRNNYIDPSVQKGGIPGVPGCLEHTGVVTHLIREAHENRGDLAVLWLDLTNAYGSIPHKLVEHALHLHHVPSKIKDLILDYYANFRLRVTARAVTSDWHRLRKGIITGCTISVTLFALAMNMVVKAAEVECRGPLTRSGVRQPPIRAYMDDLTITTSSVPGCRWILQGLERLISWARMSFKPSKSRSMVLKKGKVTDKFQFSISGTIIPSITEQPVKSLGKLFDSSLKDSTAIQKANEELGAWLIKVDKSGLPGRFKAWIYQHSILPRILWSLLVYTVPITTVESLERKISGFLRKWLGLPRSLTSAALYGTSNSVQLPFSGLTEEFKVARTREALQYRDSKDCKVASAGIEVRTGRKWKAEKAVEVAESRLRQKTLMGVLATGGAGLGYVPKAQVSRAQGKERHQLLQEEVRAGVEEERVSRAVGLKRQGAWTRWESTLQRKVTWANIMQADFHRIRFLVQAVYDTLPSPANLHLWGKSETPACPLCSGRGTLEHLLSSCPRALADGRYRWRHDQVLRVVAEKIALAISTSKHHHAPRKAISFIKAGEKPQVRPHLTTGLLNTASDWQLQADLSKQLKFPQNIVKTSLRPDLIIISEASKQLIMLELTVPWEERIEEANERKQGKYQELVQECRGRGWKTFYEPIEVGCRGFAGRSLCKVLGRLGVAGATKKRAIQAVSEAAEKATRWLWIKRADPWVATGTQVGA

SEQ ID NO: 24163 - protein, 838 aa, Maylandia zebra
MSDPLREQDLGPNKALINPAPPSVEFKLTEPSLKEVCEVIKAARSASSPGPSGVPYLVYKRCPELLRHLWKILKVIWRRGRVADQWRCAEGVWIPKEEDSKNINQFRSISLLSVEGKVFFSVVSRRLTEFLLRNNYIDPSVQKGGIPGVPGCLEHTGVVTHLIREAHENRGNLAVLWLDLTNAYGSIPHKLVEHALHLHHVPSKIKDLILDYYANFRLRVTARAVTSDWHRLRKGIITGCTISVTLFALAMNMVVKAAEVECRGPLTRSGVRQPPIRAYMDDLTITTSSVPGCRWILQGLERLISWARMSFKPSKSRSMVLKKGKVTDKFRFSISGTIIPSITEQPVKSLGKRFDSSLKDSTAIQKANEELGAWLIKVDKSGLPGRFKAWIYQHSILPRILWPLLVYTVPITTVESLERKISGFLRKWLGLPRSLTSAALYGTSNSVQLPFSGLTEEFKVARTREALQYRDSKDCKVASAGIEVRTGRKWKAEKAVEVAESRLRQKTLMGVLATGGAGLGYVPKAQVSRAQGKERHQLLQEEVRAGVEEERVSRAVGLKRQGAWTRWESTLQRKVTWANIMQADFHRIRFLVQAVHDTLPSPANLHLWGKSETPACPLCSGRGTLEHLLSSCPRALADGRYRWRHDQVLRVVAEKIALAISTSKHHHAPRKAISFIKAGEKPQVRPHLTTGLLNTASDWQLQADLGKQLKFPQNIVKTSLRPDLIIISEASKQLIMLELTVPWEERIEEANERKRGKYQELVQECRGRGWKTFYEPIEVGCRGFAGRSLCKVLGRLGVAGATKKRAIQAVSEAAEKATRWLWIKRADPWVATGTQVGA

SEQ ID NO: 24164 - protein, 1078 aa, Fundulus heteroclitus
MHTYIHIYIYIYIYIYIYTHTYTYIHIYTYTYIYMYIYVYIYICIYMYIYIYVYIYIYVYMYTYVYVYICICVQQRIKWPPASRRSEWQQFDEDVSNIIQATAKGDVDSRLTSMTTVIVSYARERFGQVDKGKSKSTPYTMSRRATRIHHLRQELRTLKKQYKAATEEEKQPLAELKNILCKKLMTLRRAEWHRRRGRERARKRAAFIANPFGFTKRLLGDKRSGRLECSIEQVNQFLQDTVSDPLRDQELEPNKALISPDPPTTEFNLKEPSLKEVEEVVKAARSASAPGPSGTPYLVYKRCPGILRHLWRIMKVIWRRGKVANQWRHAEGVWIPKEENSQDISQFRSISLLSVEGKVFFSIVSRRLTEFLLKNSYIDPSVQKGGISTPGCLEHTGVVTQLIREAHENKGDLAVLWLDLANAYGSIPHKLVELALHLHHVPSKIKDLILDYYNDFRMRVTSGSETSDWHRIGKGIITGCTISVVLFSLAMNMVVKSAEVECRGPLTKSGVRQPPIRAYMDDLTVTTASVPGCRWILHGLEKLISWARMSFKPSKSRSMVLKKGKVMDKFRFSISGTVIPTITEQPVKSLGKLFDSTLKDSVAIQKASLELGAWLTKVDKSGLPGRFKAWIYQHSILPRILWPLLIYAVPMTAVESLERKISSFLRKWLGLPRSLTSAALYGTSNILQLPLSGLTEEFMVARTREALQYRDSKDGKVSAAGIEVRTGRKWKAREALELAESRLRQKALVGTVATGRAGLGYFPKTLISQSRRKERHHLIQEEVRAGVEEERVSRAVGLQQQGAWTRWESALQRRITWTNILQPDFQRVRFLVQAVYDALPSPANLHVWGKSETPSCPLCSGRGSLEHLLSGCPKALADGRYRWRHDQVLKAVAESVASAINSSNKQQAPKKAISFVRAGEKPRANQRATIGLLYTASDWQLQVDLGKQLRFPQHIATTTLRPDMIMTSQSSKHLIILELTVPWEENIEEANERKRAKYQELVEECRGAGWKTFYEPIEVGCRGFAGRSLCKVLSRLGIVGASKKRAIKSASEAAEKATRWLWIRRADPWAATGTQVGA

SEQ ID NO: 24165 - protein, 937 aa, Thalassophryne amazonica
MSRRATRIHHLRQELRTLKKQYKAATEEEEQTLAELKNILRKKLMTLCRAEWHRRRGRERARKRAAFITNPFGLTKQLLGDKRSGWLECSIEQVNRFLQDTVSNPLRDLELEPNKALISPDPPTTEFNLKEPSLKEVEEVVKVARSASAPGPSGIPYLVYKRCPELLRHLWRILKVIWRREKVANQWRHAEGVWIPKEENLQDNSQFRSISLLSVEGKVFFSINSRRLTEFLLKNSYIDPSVQKGGISAPGCLEHTGVITQLIREAHENKGDLAVLWLDLANAYGSIPHKLVEIALHLHHVPSKIKDLILDYYNNFRMRVTSGSETSDWHRIGKGIITGCTISVVLFSLAMNMVVKSAEVECRGPLTKSGVRQPPIRAYMDDLTVTTMSVPGCRWILQGLEKLITWARMSFKPSKSRSMVLKKGKVSDKFRFSISGTVIPTITAQPVKSLGKLFDSTLKNSAAIQKASLELGTWLTKVDKSGLPGKFKAWIYQHSILPRILWPLLIYAVPITAVESLERKISGFLRKWLGLPRSLTSAALYGTSNILQLPLSGLTEEFMVARTREVLQYRDSKDCKVSAAGIEVWTGRKWKAWEAVELAESRLRQKALVGTVATGRAGLGYFPKILISQAHGKERHHLIQEEVRAGVEEERVSRAVGLRQQGAWTRWESALQRRITWTNILQPDFQWVRFLVQAVYDALPSPANLHVWGKSETPSCPLCSGRGSLEHLLSGCPKALADGRYRWRHDQVLKAVAESVASAISSSKNHHAPKKAISFVKAGEKPRANQHATSGLLHTAADWQLQVDLGRQLRFPQHIATTFLRPDMIMTSQSWKQLIILELTVPWEENIEYANERKRAKYQELVEECREGGWKTVYEPIEVGCRGFAGRSLCKVLSRLGIVGMAKRAIKSASEAAENATRWLWVKRADPWAATGMQVGA

SEQ ID NO: 24166 - protein, 1084 aa, Fundulus heteroclitus
MTQANGQTTNVTCICGKLCKNHRGLKIHQAKMKCLDRDNEVQRSGLVPGETQEEPGQEATHRAQSLHVPQTLNPSRVIPQQRIKWPPASRRSEWQQFDEDVSNIIQATAKGDVDSRLTSMTTVIVSYARERFGQVDKGKSKSTPYTMSRRATRIHHLRQELRTLKKQYKAATEEEKQPLAELKNILCKKLMTLRRAEWHRRRGRERARKRAAFIANPFGFTKRLLGDKRSGRLECSIEQVNQFLQDTVSDPLRDQELEPNKALISPDPPTTEFNLKEPSLKEVEEVVKAARSASAPGPSGTPYLVYKRCPGILRHLWRIMKVIWRRGKVANQWRHAEGVWIPKEENSQDISQFRSISLLSVEGKVFFSIVSRRLTEFLLKNSYIDPSVQKGGISTPGCLEHTGVVTQLIREAHENKGDLAVLWLDLANAYGSIPHKLVELALHLHHVPSKIKDLILDYYNDFRMRVTSGSETSDWHRIGKGIITGCTISVVLFSLAMNMVVKSAEVECRGPLTKSGVRQPPIRAYMDDLTVTTASVPGCRWILHGLEKLISWARMSFKPSKSRSMVLKKGKVMDKFRFSISGTVIPTITEQPVKSLGKLFDSTLKDSVAIQKASLELGAWLTKVDKSGLPGRFKAWIYQHSILPRILWPLLIYAVPMTAVESLERKISSFLRKWLGLPRSLTSAALYGTSNILQLPLSGLTEEFMVARTREALQYRDSKDGKVSAAGIEVRTGRKWKAREALELAESRLRQKALVGTVATGRAGLGYFPKTLISQSRRKERHHLIQEEVRAGVEEERVSRAVGLQQQGAWTRWESALQRRITWTNILQPDFQRVRFLVQAVYDALPSPANLHVWGKSETPSCPLCSGRGSLEHLLSGCPKALADGRYRWRHDQVLKAVAESVASAINSSNKQQAPKKAISFVRAGEKPRANQRATIGLLYTASDWQLQVDLGKQLRFPQHIATTTLRPDMIMTSQSSKHLIILELTVPWEENIEEANERKRAKYQELVEECRGAGWKTFYEPIEVGCRGFAGRSLCKVLSRLGIVGASKKRAIKSASEAAEKATRWLWIRRADPWAATGTQVGA

SEQ ID NO: 24167 - protein, 1057 aa, Oreochromis aureus
MHAGDPQETDRGGEDEVSNRTDSRLTTNAMERTMSKTCICGKLCKNQRGLKVYQARMKCLERESEVQRTVPEPGETQEEPGQEAPHRAQSLHAPDSSNPSSVVPQQRIKWPPASSRSEWQKFDEDVSKIIQAVAKRDADSRLKTMTTIIVSYASERFGLTEKCNNKTPYTMNRRTMKIHRLCQELRSLKKQFKNADVEEKQALEELHNILRKKLITLRRAEWHRRRGRERARKRAAFIADPFRFSKQLLGVKRSGQLEASAEEVNNFLHETMSDLLREQDLGPNEALINPAPPSVEFKLTEPSLKEVCEVIKAARSASSPGPSGVPYLLYKCCPELRRHLWKILKVIWRRGRVADQWRCAEGVWIPKEEDSRNINQFRSISLLSVEGKVFFSFVSQRLTEFLLRNNYIDPSVQKGGISGVPGCLEHTGVVTHLIREANENRGDLAVLWLDLTNAYGSIPHKLVEHALHLHHVPSKIKDLILDYYANFRLRVTSGAVTSGWHRLGKGIITGCTISVTLFALAMNMVVKAAEVECRGPLTRSGVRQPPIRAYMDDLTITTSSVPGCRWILQGLERLISWARMSFKPSKSRSMVLKKGKVTDKFRFSISGTIIPSITEQPVKSLGKLFDSSLKDSTAIQKANEELGAWLIKVDKSGLPGRLKAWIYQHSILPRILWPLLVYTVPITTVESLERKISGFLRKWLGLPRSLTSAALYGASNSLQLPFSGLTEEFKVAHTREALQHRHSKDCKVASAGIEVRTGRKWKAEKAVEVAESRLRQKTLVGVLATGGAGLGYFPKAQVSRAQGKERRQLLQEEVRAGVEEERVGRAVGLKRQGAWTRWESTLQRKVTWANIMQADFHRIRFLVQAVYDTLPSPANLHLWGKSETPVCPLCSGRGTLEHLLSSCPRALADGRYRWRHDQVLRVVAENIASAISTSKHHHAPRKAISFIKAGEKPQVRPHLTTGLLNTASDWQLQADLGKQLKFPQNTAKTSLRPDMIIISEASKQLIMLELTVPWEERIEEANERKQGKYQDLVQECRGRGWKTFYEPIEVDCRGFAG

SEQ ID NO: 24168 - protein, 1054 aa, Oryzias latipes
MKCLERESEVQRTGLEPGETQEEPGQEATHRAQSLHVPKPPNPSRVVLQQRIKWPPAKKLSEWRQFDEDVSNIIQAAAKGDAESRLQTMTTIIVSYASERFGHIEKGQTKHTPYTRNRRATKIHHLRQELRTLKKHHKKATEEEKQSLSELKNILRKQLTSLRRAEWHRRRGRERARKRAAFIANPFGFTKKLLGDKRSGQLECSTEEVNQFLQDTLSDPLREQELEPNKALIKPAPPTIEFNLKEPSLKEVEEIIKAARSASTPGPSGVPYVAYKRCPQLLRHLWKILRVIWRRGRVPDQWRWAEGVWIPKEENLKNINQFRTISLLSVEGKVFFSIVSRRLTEFLLKNDYIDPSVQKGGIPGAPGCLEHTGVVTQLIREAHENKGDLAVLWLDLANAYGSIPHKLVELALHLHHVPSKIKDLIVDYYNNFRMRVTSGSGKSDWHRIGKGIITGCTISVILFALAMNMVVKAAEVECRGPLTKSGVRQPPIRAYMDDLTITTSSVPGSRWILKGLEKLITWARMSFKPSKSRSMVLKRGKVVDKFRFSISGTAIPTITEQPVKSLGKFFDSSLKDAAAIQKSNKELGVWLTKVDKSGLPGRFKAWIYQHSILPRVLWPLLVYAVPMTTVESLEKKISGFLRRWLGLPRCLTSSALYGTSNVLQLPFSGLTEEFMVVRTREVLHYRDSRDGKVSAAGIEVRTGRKWKAGKAVEEAESRLRQKALVGTVATGRAGLGYLPKTVVSQAHGKERHRLLQEEVRAGVEEERASRLTGLRQQGAWTRWESTLQRRISWADILQADFHRVRFLVQAVYDVLPSPANLHVWGKSEMPSCLLCSGRGSLEHLLSSCPRALADGRYRWRHDQVLKALAESLASAIKASKNQRAPKKAVPFIKAGEKPHVRKQLPTSLLHRALDWQLQVDLEKQLRFPQHIVRTNLRPDMLLISETSKHLIMLELTVPWEERMEEANERKRSKYQELVEGCRERGWKTFYEPVEVGCRGFAGRSLCKVLCRLGITGAAKKRAIQSVCEAAEKATRWLWMKRADPWSAAGTQVGV

SEQ ID NO: 24169 - protein, 1084 aa, Fundulus heteroclitus
MTQANGQTTNVTCICGKLCKNHRGLKIHQAKMKCLDRDNEVQRSGLVPGETQEEPGQEATHRAQSLHVPQTLNPSRVIPQQRIKWPPASRRSEWQQFHEDVSNIIQATAKGDVDSRLTSMTTVIVSYARERFGQVDKGKSKSTPYTMSRRATRIHHLRQELRTLKKQYKAATEEEKQPLAELKNILCKKLMTLRRAEWHRRRGRERARKRAAFIANPFGFTKRLLGDKRSGRLECSIEQVNQFLQDTVSDPLRDQELEPNKALISPDPPTTEFNLKEPSLKEVEEVVKAARSASAPGPSGTPYLVYKRCPGILRHLWRIMKVIWRRGKVANQWRHAEGVWIPKEENSQDISQFRSISLLSVEGKVFFSIVSRRLTEFLLKNSYIDPSVQKGGISTPGCLEHTGVVTQLIREAHENKGDLAVLWLDLANAYGSIPHKLVELALHLHHVPSKIKDLILDYYNDFRMRVTSGSETSDWHRIGKGIITGCTISVVLFSLAMNMVVKSAEVECRGPLTKSGVRQPPIRAYMDDLTVTTASVPGCRWILHGLEKLISWARMSFKPSKSRSMVLKKGKVMDKFRFSISGTVIPTITEQPVKSLGKLFDSTLKDSVAIQKASLELGAWLTKVDKSGLPGRFKAWIYQHSILPRILWPLLIYAVPMTAVESLERKISSFLRKWLGLPRSLTSAALYGTSNILQLPLSGLTEEFMVARTREVLQYRDSKDGKVSAAGIEVRTGRKWKAREALELAESRLRQKALVGTVATGRAGLGYFPKTLISQSRRKERHHLIQEEVRAGVEEERVSRAVGLRQQGAWTRWESVLQRRITWTNILQPDFQRVRFLVQAVYDALPSPANLHVWGKSETPSCPLCSGRGSLEHLLSGCPKALADGRYRWRHDQVLKAVAESVASAINSSNKQQAPKKAISFVRAGEKPRANQRVTIGLLYTASDWQLQVDLGKQLRFPQHIAKTTLRPDMIMTSQSSKHLIILELTVPWEENIEEANERKRAKYQELVEECRGAGWKTFYEPIEVGCRGFAGRSLCKVLSRLGIVGASKKRAIKSASEAAEKATRWLWIRRADPWAATGTQVGA

SEQ ID NO: 24170 - protein, 1080 aa, Astatotilapia calliptera
MERTTSKTCICGKLCKNQRGLKVHQARMKCLERESEVQRTGPEPGETQEEPGQEAPHRAQSLHALDSSNPSSVVPQQRIKWPPASSRSEWQKFDEDVSNIIQAVAKRDADSRLKTMTTIIVSYASERFGLIEKCDNKTPYTMNRRAMKIHQLRQELRSLKKQFKNADAEEKQALEELHNILRKKLITLRRAEWHRRRGRERARKRAAFIADPFRFSKQLLGVKRSGQLECSAEEVNNFLHETMSDPLREQDLGPNKALINPAPPSAEFKLTEPSLKEVCEVIKAARSASSPGPSGVPYLVYKRCPELLRHLWKILKVIWRRGRVADQWRCAEGVWIPKEEDSKNINQFRSISLLSVEGKVFFSVVSRRLTEFLLRNNYIDPSVQKGGIPGVPGCLEHTGVVTHLIREAHENRGDLAVLWLDLTNAYGSIPHKLVEHALHLHHVPSKIKDLILDYYANFRLRVTSRAVTSDWHRLGKGIITGCTISVTLFALAMNMVVKAAEVECRGPLTRSGVRQPPIRAYMDDLTITTSSVPGCRWILQGLERLISWARMSFKPSKSRSMVLKKGKVTDKFRFSISGTIIPSITEQPVKSLGKLFDSSLKDSTAIQKANEELGAWLIKVDKSGLPGRFKAWIYQHSILPRILWPLLVYTVPITTVESLERKISGFLRKWLGLPRSLTSAALYGTSNSVQLPFSGLTEEFKVARTREALQYRDSKDCKVALAGIEVRTGRKWKAEKAVEVAESRLRQKTLMGVLATGGAGLGYVPKAQVSRAQGKERRQLLQEEVRAGVEEERVSRAVGLKRQGAWTRWESTLQRKVTWANIMQADFHRIRFLVQAVYDTLPSPANLHLWGKSETPACPLCSGRGTLEHLLSSCPRALADGRYRWRHDQVLRVVAEKIASAISTSKHHHAPRKAISFIKAGEKPQVRPHLTTGLLNTASDWQLQADLGKQLKFPQNIAKTSLRPDMIIISEASKQLIMLELTVPWEERIEEANERKRGKYQELVQECRGRGWKTFYEPIEVGCRGFAGRSLCKALGRLGVAGAAKKRAIQAVSEAAEKATRWLWIKRADPWVATGTQVGA

SEQ ID NO: 24171 - protein, 1158 aa, Fundulus heteroclitus
MLRHHLPRRVWPTTGETVDSTERWHSGQVGVASQPVSFARENPNQATESPTVRYPQEIPRGGEDEISNRTDHTVMTQANGQTTNVTCICGKLCKNHRGLKIHQAKMKCLDRDNEVQRSGLVPGETQEEPGQEATHRAQSLHVPQTLNPSRVIPQQRIKWPPASRRSEWQQFDEDVSNIIQATAKGDVDSRLTSMTTVIVSYARERFGQVDKGKSKSTPYTMSRRATRIHHLRQELRTLKKQYKAATEEEKQPLAELKNILCKKLMTLRRAEWHRRRGRERARKRAAFIANPFGFTKRLLGDKRSGRLECSIEQVNQFLQDTVSDPLRDQELEPKKALISPDPPTTEFNLKEPSLKEVEEVVKAARSASAPGPSGTPYLVYKRCPGILRHLWRIMKVIWRRGKVANQWRHAEGVWIPKEENSQDISQFRSISLLSMEGKVFFSIVSRRLTEFLLKNSYIDPSVQKGGISTPGCLEHTGVVTQLIREAHENKGDLAVLWLDLANAYGSIPHKLVELALHLHHVPSKIKDLILDYYNDFRMRVTSGSETSDWHHIGKGIITGCTISVVLFSLAMNMVVKSAEVECRGPLTKSGVRQPPIRAYMDDLTVTTASVPGCRWILHGLEKLISWARMSFKPSKSRSMVLKKGKVMDKFRFSISGTVIPTITEQPVKSLGKLFDSTLKDSVAIQKASLELGAWLTKVDKSGLPGRFKAWIYQHSILPRILWPLLIYAVPMTAVESLERKISSFLRKWLGLPRSLTSAALYGTSNILQLPLSGLTEEFMVARTREALQYRDSKDGKVSAAGIEVRTGRKWKAREALELAESRLRQKALVGTVATGRAGLGYFPKTLISQSRRKERHHLIQEEVRAGVEEERVSRAVGLRQQGAWTRWESALQRRITWTNILQPDFQRVRFLVQAVYDALPSPANLHVWGKRETPSCPLCSGRGSLEHLLSGCPKALADGRYRWRHDQVLKAVAESVASAINSSNKQQAPKKAISFVRAGEKPRANQRATIGLLYTASDWQLQVDLGKQLRFPQHIATTTLRPDMIMTSQSPKHLIILELTVPWEENIEEANERKRAKYQELVEECRGAGWKTFYEPIEVGCRGFAGRSLCKVLSRLGIVGASKKRAIKSASEAAEKATRWLWIRRADPWAATGTQVGA

SEQ ID NO: 24172 - protein, 1080 aa, Pseudosimochromis marginatus
MERTTSKTCICGKLCKNQRGLKVHQARMKCLERESEVQRTGPEPGETQEEPGQEAPHRAQSLHAPDSSNPSSVVPQQRIKWPPASSQSEWQKFDEDVSNIIQAVAKRDADSRLKTMTTIIVSYASERFGLIEKCNNKTPYTMNRRAMKIHQLRQELRSLKKQFKNADAEEKQALEELHNILRKKLITLRRAEWHRRRGRERARKRAAFIADPFRFSKQLLGVKRSGQLECSAEEVNNFLHETMSDPLREQDLGPNKALINPAPPSVEFKLTEPSLKEVCEVIKAARSASSPGPSGVPYLVYKRCPELLRHLWKILKVIWRRGRVADQWRCAEGVWIPKEEDSKNINQFRSISLLSVEGKVFFSVVSRRLTEFLLRNNYIDPSVQKGGIPGVPGCLEHTGVVTHLIREAHENRGDLAVLWLDLTNAYGSIPHKLVEHALHLHHVPSKIKDLILDYYANFRLRVTSRAVTSDWHRLRKGIITGCTISVTLFALAMNMVVKAAEVECRGPLTRSGVRQPPIRAYMDDLTITTSSVPGCRWILQGLERLISWARMSFKPSKSRSMVLKKGKVTDKFRFSISGTIIPSITEQPVKSLGKLFDSSLKDSTAIQKANEELGAWLIKVDKSGLPGRFKAWIYQHSILPRILWPLLVYTVPITTVESLERKISGFLRKWLGLPRSLTSAALYGTSNSVQLPFSGLTEEFKVARTREALQYRDSKDCKVASAGIEVRTGRKWKAEKAVEVAESRLRQKTLMGVLATGGAGLGYVPKAQVSRAQGKERHQLLQEEVRAGVEEERVSRAVGLKRQGAWTRWESTLQRKVTWANIMQADFHRIRFLVQAVYDTLPSPANLHLWGKSETPACPLCSGRGTLEHLLSSCPRALADGRYRWRHDQVLRVVAEKIASAISTSKHHQALRKAISFIKAGEKAQVRPHLTTGLLNTASDWQLQADLGKQLKFPQNIVKTSLRPDLIIISEASKQLIMLELTVPWEERIEEANERKRGKYQELVQECRGRGWKTFYEPIEVGCRGFAGRSLCKVLGRLGVAGVTKKRAIQAVSEAAEKATRWLWIKRADPWVVTGTQVGA

SEQ ID NO: 24173 - protein, 1084 aa, Astyanax mexicanus
MTQANGHTTNVICICGKLCKNHRGLKIHKARMKCLDKDNEVQRSGLVPGETQEEPGQEATHRAQSLHVPQTLNPSRVIPQQRIKWPPASKRSEWQQFDEDVSKIIQATAKGDVDSRLTSMTTIIISYASERFGQVDKGKSKSTSYTMSRRATRIHHLRQELRTLKKQYKAAAEEEKKPLLELKNILRKKLMTLRRAEWHRRRAKERARKRAAFIANPFGFTKQLLGDKRSGQLECSIEQVNHFLQDTVSDPQRDLELEPNKALIRPDLPTMEFNLKEPSLKEVEEVVKAARSASAPGPSGTPYLVYKRCPGLLRHLWKILKVIWRRGKVADQWRHAEGVWIPKEENSRDISQFRTISLLSVEGKVFFSIVSRRLTEFLLKNSYIDPSVQKGGISAPGCLEHTGVVTQLIREAHENKGDLAVLWLDLANAYGSIPHKLVELALHLHHVPSKIKDLILDYYNKFRMRVTSGSETSDWHSIEKGIITGCTISVVLFSLAMNMVVKSAEVECRGPLTKSGVRQPPIRAFMDDLTVTTTSVPGCRWILQGLEKLMTWARMSFKPSKSRSMVLKKGKVIDKFRFSISGTVIPTITEQPVKSLGKLFDSTLKDSAAIQKASLELGTWLTKVDKSGLPGRFKAWIYQHSILPRILWPLLIYAVPMTAVESLERRISSFLRKWLGLPRSLTSAALYGTSNILQLPLRGLTEEFMVARTREALQYRDSKDSKVSAAGIEVRTGRKWKAREAVKLAESRLRQKELVGTEATGRAGLGYFPKILISQTRGKERHHLIQEEVRAGVEEERLSRVVGLRQQGAWTRWESALKRRITWTNILQPDFQRVRFLVQAVYDVLPSPANLHVWGKSETPSCPLCSGRGSLEHLLSGCPKALADGRYRWRHDQVLKAVAESVASAISSSKNHHAPKKAIYFVKAGEKPRTNKHATAGLLHTASDWQLQVDLGKQMRFPQQIATTTLRPDMIMTSQSSKQLIILELTVPWEENIEEANERKRAKYQELVEECRGGGWKTFYEPIEVGCRGFAGRSLCKVLSRLGIVGAAKKRAIKSASEAAEKATRWLWMKRADPWVATGTQVGA

SEQ ID NO: 24174 - protein, 1080 aa, Pseudosimochromis marginatus
MERTTSKTCICGKLCKNQRGLKVHQARMKCLERESEVQRTGPEPGETQEEPGQEAPHRAQSLHAPDSSNPSSVVPQQRIKWPPASSQSEWQKFDEDVSNIIQAVAKRDADSRLKTMTTIIVSYASERFGLIEKCNNKTPYTMNRRAMKIHQLRQELRSLKKQFKNADAEEKQALEELHNILRKKLITLRRAEWHRRRGRERARKRAAFIADPFRFSKQLLGVKRSGQLECSAEEVNNFLHETMSDPLREQDLGPNKALINPAPPSVEFKLTEPSLKEVCEVIKAARSASSPGPSGVPYLVYKRCPELLRHLWKILKVIWRRGRVADQWRCAEGVWIPKEEDSKNINQFRSISLLSVEGKVFFSVVSRRLTEFLLRNNYIDPSVQKGGIPGVPGCLEHTGVVTHLIREAHENRGDLAVLWLDLTNAYGSIPHKLVEHALHLHHVPSKIKDLILDYYANFRLRVTSRAVTSDWHRLRKGIITGCTISVTLFALAMNMVVKAAEVECRGPLTRSGVRQPPIRAYMDDLTITTSSVPGCRWILQGLERLISWARMSFKPSKSRSMVLKKGKVTDKFRFSISGTIIPSITEQPVKSLGKLFDSSLKDSTAIQKANEELGAWLIKVDKSGLPGRFKAWIYQHSILPRILWPLLVYTVPITTVESLERKISGFLRKWLGLPRSLTSAALYGTSNSVQLPFSGLTEEFKVARTREALQYRDSKDCKVASAGIEVRTGRKWKAEKAVEVAESRLRQKTLMGVLATGGAGLGYVPKAQVSRAQGKERHQLLQEEVRAGVEEERVSRAVGLKRQGAWTRWESTLQRKVTWANIMQADFHRIRFLVQAVYDTLPSPANLHLWGKSETPACPLCSGRGTLEHLLSSCPRALADGRYRWRHDQVLRVVAEKIASAISTSKHHQALRKAISFIKAGEKAQVRPHLTTGLLNTASDWQLQADLGKQLKFPQNIVKTSLRPDLIIISEASKQLIMLELTVPWEERIEEANERKRGKYQELVQECRGRGWKTFYEPIEVGCRGFAGRSLCKVLGRLGVAGATKKRAIQSVSEAAEKATRWLWIKRADPWVATGTQVGA

SEQ ID NO: 24175 - protein, 838 aa, Simochromis diagramma
MSDPLREQDLGPNKALINPAPPSVEFKLTEPSLKEVCEVIKAARSASSPGPSGVPYLVYKRCPELLRHLWKILKVIWRRGRVADQWRCAEGVWIPKEEDSKNMNQFRSISLLSVEGKVFFSVVSRRLTEFLLRNNYIDPSVQKGGIPGVPGCLEHTGVVTQLIREAHENRGDLAVLWLDLTNAYGSIPHKLVEHALHLHHVPSKIKDLILDYYANFRLRVTSRAVTSDWHRLRKGIITGCTISVTLFALAMNMVVKAAEVECRGPLTRSGVRQPPIRAYMDDLTITTSSVPGCRWILQGLERLISWARMSFKPSKSRSMVLKKGKVTDKFRFSISGTIIPSITEQPVKSLGKLFDSSLKDSTAIQKANEELGAWLIKVDKSGLPGRFKAWIYQHSILPRILWPLLVYTVPITTVESLERKISGFLRKWLGLPRSLTSAALYGTSNSVQLPFSGLTEEFKVACTREALQYRDSKDGKVASAGIEVRTGRKWKAEKAVEVAESRLRQKTLMGVLATGGAGLGYVPKAQVSRAQGKERHQLLQEEVRAGVEEERVSRAVGLKRQGAWTRWESTLQRKVAWANIMQADFHRIRFLVQAVYDTLPSPANLHLWGKSETPACPLCSGRGTLEHLLSSCPRALADGRYRWRHDQVLRVVAEKIALAISTSKHHHAPRKAISFIKAGEKPQVRPHLTTGLLNTASDWQLQADLGKQLKFPQNIVKTSLRPDLIIISEASKQLIMLELTVPWEERIEEANERKRGKYQELVQECRGRGWKTFYEPIEVGCRGFAGRSLCKALGRLGVAGATKKRAIQAVSEAAEKATRWLWIKRADPWVATGTQVGA

SEQ ID NO: 24176 - protein, 1080 aa, Pseudosimochromis marginatus
MERTTSKTCICGKLCKNQRGLKVHQARMKCLERESEVQRTGPEPGETQEEPGQEAPHRAQSLHAPDSSNPSSVVPQQRIKWPPASSQSEWQKFDEDVSNIIQAVAKRDADSRLKTMTTIIVSYASERFGLIEKCNNKTPYTMNRRAMKIHQLRQELRSLKKQFKNADAEEKQALEELHNILRKKLITLRRAEWHRRRGRERARKRAAFIADPFRFSKQLLGVKRSGQLECSAEEVNNFLHETMSDPLREQDLGPNKALINPAPPSVEFKLTEPSLKEVCEVIKAARSASSPGPSGVPYLVYKRCPELLRHLWKILKVIWRRGRVADQWRCAEGVWIPKEEDSKNINQFRSISLLSVEGKVFFSVVSRRLTEFLLRNNYIDPSVQKGGIPGVPGCLEHTGVVTHLIREAHENRGDLAVLWLDLTNAYGSIPHKLVEHALHLHHVPSKIKDLILDYYANFRLRVTSRAVTSDWHRLRKGIITGCTISVTLFALAMNMVVKAAEVECRGPLTRSGVRQPPIRAYMDDLTITTSSVPGCRWILQGLERLISWARMSFKPSKSRSMVLKKGKVTDKFRFSISGTIIPSITEQPVKSLGKLFDSSLKDSTAIQKANEELGAWLIKVDKSGLPGRFKAWIYQHSILPRILWPLLVYTVPITTVESLERKISGFLRKWLGLPRSLTSAALYGTSNSVQLPFSGLTEEFKVARTREALQYRDSKDCKVASAGIEVRTGRKWKAEKAVEVAESRLRQKTLMGVLATGGAGLGYVPKAQVSRAQGKERHQLLQEEVRAGVEEERVSRAVGLKRQGAWTRWESTLQRKVTWANIMQADFHRIRFLVQAVYDTLPSPANLHLWGKSETPACPLCSGRGTLEHLLSSCPRALADGRYRWRHDQVLRVVAEKIASAISTSKHHQALRKAISFIKAGEKAQVRPHLTTGLLNTASDWQLQADLGKQLKFPQNIVKTSLRPDLIIISEASKQLIMLELTVPWEERIEEANERKRGKYQELVQECRGRGWKTFYEPIEVGCRGFAGRSLCKVLGRLGVAGATKKRAIQAVSEAAEKATRWLWIKRADPWVATGTQVGA

SEQ ID NO: 24177 - protein, 1084 aa, Fundulus heteroclitus
MTQANGQTTNVTCICGKLCKNHRGLKIHHAKMKCLDRDNEVQRSGLVPGETQEEPGQEATHRAQSLHVPQTLNPSRVIPQQRIKWPPASRRSEWQQFDEDVSNIIQATAKGDVDSRLTSMTTVIVSYARERFGQVDKGKSKSTPYTMSRRATRIHHLRQELRTLKKQYKAATEEEKQPLAELKNILCKKLMTLRRAEWHRRRGRERARKRAAFIANPFGFTKRLLGDKRSGRLECSIEQVNQFLQDTVSDPLRDQELEPNKALISPDPPTTEFNLKEPSLKEVEEVVKAARSASAPGPSGTPYLVYKRCPGILRHLWRIMKVIWRRGKMANQWRHAEGVWIPKEENSQDISQFRSISLLSVEGKVFFSIVSRRLTEFLLKNSYIDPSVQKGGISTPGCLEHTGVVTQLIREAHENKGDLAVLWLDLANAYGSIPHKLVELALHLHHVPSKIKDLILDYYNDFRMRVTSGSETSDWHRIGKGIITGCTISVVLFSLAMNMVVKSAEVECRGPLTKSGVRQPPIRAYMDDLTVTTASVPGCRWILHGLEKLISWARMSFKPSKSRSMVLKKGKVMDKFRFSISGTVIPTITEQPVKSLGKLFDSTLKDSVAIQKASLELGAWLTKVDKSGLPGRFIAWIYQHSIVPRILWPLLIYAVPMTAVESLERKISSFLRKWLGLPRSLTSAALYGTSNILQLPLSGLTEEFMVARTREALQYRDSKDGKVSAAGIEVRTGRKWKAREALELAESRLRQKALVGTVATGRAGLGYFPKTLISQSRRKESHHLIQEEVRAGVEEERVSRAVGLRQQGAWTRWESALQRRITWTNILQPDFQRVRFLVQAVYDALPSPANLHVWGKSETPSCPLCSGRGSLEHLLSGCPKALADGRYRWRHDQVLKAVAESVASAINSSNKQQAPKKAISFVRAGEKPRANQRATIGLLYTASDWQLQVDLGKQLRFPQHIATTTLRPDMIMTSQSSKHLIILELTVPWEENIEEANERKRAKYQELVEECRGAGWKTFYEPIEVGCRGFAGRSLCKVLSRLGIVGASKKRAIKSASEAAEKATRWLWIRRADPWAATGTQVGA

SEQ ID NO: 24178 - protein, 996 aa, Pseudosimochromis marginatus
MERTTSKTCICGKLCKNQRGLKVHQARMKCLERESEVQRTGPEPGETQEEPGQEAPHRAQSLHAPDSSNPSSVVPQQRIKWPPASSQSEWQKFDEDVSNIIQAVAKRDADSRLKTMTTIIVSYASERFGLIEKCNNKTPYTMNRRAMKIHQLRQELRSLKKQFKNADAEEKQALEELHNILRKKLITLRRAEWHRRRGRERARKRAAFIADPFRFSKQLLGVKRSGQLECSAEEVNNFLHETMSDPLREQDLGPNKALINPAPPSVEFKLTEPSLKEVCEVIKAARSASSPGPSGVPYLVYKRCPELLRHLWKILKVIWRRGRVADQWRCAEGVWIPKEEDSKNINQFRSISLLSVEGKVFFSVVSRRLTEFLLRNNYIDPSVQKGGIPGVPGCLEHTGVVTHLIREAHENRGDLAVLWLDLTNAYGSIPHKLVEHALHLHHVPSKIKDLILDYYANFRLRVTSRAVTSDWHRLRKGIITGCTISVTLFALAMNMVVKAAEVECRGPLTRSGVRQPPIRAYMDDLTITTSSVPGCRWILQGLERLISWARMSFKPSKSRSMVLKKGKVTDKFRFSISGTIIPSITEQPVKSLGKLFDSSLKDSTAIQKANEELGAWLIKVDKSGLPGRFKAWIYQHSILPRILWPLLVYTVPITTVESLERKISGFLRKWLGLPRSLTSAALYGTSNSVQLPFSGLTEEFKVARTREALQYRDSKDCKVASAGIEVRTGRKWKAEKAVEVAESRLRQKTLMGVLATGGAGLGYVPKAQVSRAQGKERHQLLQEEVRAGVEEERVSRAVGLKRQGAWTRWESTLQRKVTWANIMQADFHRIRFLVQAVYDTLPSPANLHLWGKSETPACPLCSGRGTLEHLLSSCPRALADGRYRWRHDQVLRVVAEKIASAISTSKHHQALRKAISFIKAGEKAQVRPHLTTGLLNTASDWQLQADLGKQLKFPQNIAKTSLRPDMIIISEASKQLIMLELTVPWEERIEEANERK

SEQ ID NO: 24179 - protein, 1080 aa, Astatotilapia calliptera
MERTTSKTCICGKLCKNQRGLKVHQARMKCLERESEVQRTGPEPGETQEEPGQEAPHRAQSLHALDSSNPSSVVPQQRIKWPPASSRSEWQKFDEDVSNIIQAVAKRDADNRLKTMTTIIVSYASERFGLIEKCNNKTPYTMNRRAMKIHQLRQELRSLKKQFKNADAEEKQALEELHNILRKKLITLRRAEWHRRRGRERARKRAAFIADPFRFSKQLLGVKRSGQLECSAEEVNNFLHETMSDPLREQDLGPNKALINPAPPSAEFKLTEPSLKEVCEVIKAARSASSPGPSGVPYLVYKRCPELLRHLWKILKVIWRRGRVADQWRCAEGVWIPKEEDSKNINQFRSISLLSVEGKVFFSVVSRRLTEFLLRNNYIDPSVQKGGIPGVPGCLEHTGVVTHLIREAHENRGDLAVLWLDLTNACGSIPHKLIGRALHLHHVPSKIKHLILDYYGNFRLRVTSGSVTSDWHRLRKGIITGCTISVTLFALAMYMVVKAAEVECRGPLTRSGVRQPPIRAYMDDLTITTSSVPGCRWILQGLESLISGARMSVKPSKSRSMVLKKGKVTDKFRFSISGTIIPSITEQPVKSLGKLFDSSLKDSTAIQKANEELGAWLIKVDKSGLPGRFKAWIYQHSILPRILWPLLVYTVPITTVESLERKISGFLRKWLGLPRSLTSAALYGTSNSVQLPFSGLTEEFKVARTREALQYRDSKDCKVALAGIEVRTGRKWKAEKAVEVAESRLRQKTLMGVLATGGAGLGYVPKAQVSRAQGKERRQLLQEEVRAGVEEERVSRAVGLKRQGAWTRWESTLQRKVTWANIMQADFHRIRFLVQAVYDTLPSPANLHLWGKSETPACPLCSGRGTLEHLLSSCPRALADGRYRWRHDQVLRVVAEKIASAISTSKHHHAPRKAISFIKAGEKPQVRPHLTTGLLNTASDWQLQADLGKQLKFPQNIAKTSLRPDMIIISEASKQLIMLELTVPWEERIEEANERKRGKYQELVQECRGRGWKTFYEPIEVGCRGFAGRSLCKALGRLGVAGAAKKRAIQAVSEAAEKATRWLWIKRADPWVATGTQVGA

SEQ ID NO: 24180 - protein, 1084 aa, Fundulus heteroclitus
MTQANGQTTNVTCICGKLCKNHRGLKIHQAKMKCLDRDNEVQRSGLVPGETQEEPGQEATHRAQSLHVPQTLNPSRVIPQQRIKWPPASRRSEWQQFDEDVSNIIQATAKGDVDSRLTSMTTVIVSYARERFGQVDKGKSKSTPYTMSRRATRIHHLRQELRTLKKQYKAATEEEKQPLAELKNILCKKLMTLRRAEWHRRRGRERARKRAAFIANPFGFTKRLLGDKRSGRLECSIEQVNQFLQDTVSDPLRDQELEPNKALISPDPPTTEFNLKEPSLKEVEEVVKAARSASAPGPSGTPYLVYKRCPGIRRHLWRIMKVIWRRGKVANQWRHAEGVWIPKEENSQDISQFRSISLLSVEGKVFFSIVSRRLTEFLLKNSYIDPSVQKGGISTPGCLEHTGVVTQLIREAHENKGDLAVLWLDLANAYGSIPHKLVELALHLHHVPSKIKDLILDYYNDFRMRVTSGSETSDWHRIGKGIITGCTISVVLFSLAMNMVVKSAEVECRGPLTKSGVRQPPIRAYMDDLTVTTASVPGCRWILHGLEKLISWARMSFNPSKSRSMVLKKGKVMDKFRFSISGTVIPTITEQPVKSLGKLFDSTLKDSVAIQKASLELGAWLTKVDKSGLPGRFKAWIYQHSILPRILWPLLIYAVPMTAVESLERKISSFLRKWLGLPRSLTSAALYGTSNILQLPLSGLTEEFMVARTREALQYRDSKDGKVSAAGIEVRTGRKWKAREALELAESRLRQKALVGTVATGRAGLGYFPKTLISQSRRKERHHLIQEEVRAGVEEERVSRAVGLRQQGAWTRWESALQRRITWTNILQPDFQRVRFLVQAVYDALPSPANLHVWGKSETPSCPLCSGRGSLEHLLSGCPKALADGRYRWRHDQVLKAVAESVASAINSSNKQQAPKKAISFVRAGEKPRANQRATIGLLYTASDWQLQVDLGKQLRFPQHIATTTLRPDMIMTSQSSKHLIILELTVPWEENIEEANERKRAKYQELVEECRGAGWKTFYEPIEVGCRGFAGRSLCKVLSRLGIVGASKKRAIKSASEAAEKATRWLWIRRADPWAATGTQVGA

SEQ ID NO: 24181 - protein, 1080 aa, Maylandia zebra
MERTTSKTCICGKLCKNQRGLKVHQARMKCLERESEVQRTGPEPGETQEEPGQEAPHRAQSLHALDSSNPSSVVPQQRIKWPPASSRSEWQKFDEDVSNIIQAVAKRDADSRLKTMTTIIVSYASERFGLIEKCNNKTPYTMNRRAMKIHQLRQELRSLKKQFKNADAEEKQALEELHNILRKKLITLRRAEWHRRRGRERARKRAAFIADPFRFSKQLLGVKRSGQLECSAEEVNNFLHETMSDPLREQDLGPNKALINPAPPSAEFKLTEPSLKEVCEVIKAARSASSPGPSGVPYLVYKRCPELLRHLWKILKVIWRRGRVADQWRCAEGVWIPKEEDSKNINQFRSISLLSVEGKVFFSVVSRRLTEFLLRNNYIDPSVQKGGIPGVPGCLEHTGVVTHLIREAHENRGDLAVLWLDLTNAYGSIPHKLVEHALHLHHVPSKIKDLILDYYANFRLRVTSRAVTSDWHRLGKGIITGCTISVTLFALAMNMVVKAAEVECRGPLTRSGVRQPPIRAYMDDLTITTSSVPGCRWILQGLERLISWARMSFKPSKSRSMVLKKGKVTDKFRFSISGTIIPSITEQPVKSLGKLFDSSLKDSTAIQKANEELGAWLIKVDKSGLPGRFKAWIYQHSILPRILWPLLVYTVPITTVESLERKISGFLRKWLGLPRSLTSAALYGTSNSVQLPFSGLTEEFKVARTREALQYRDSKDCKVALAGIEVRTGRKWKAEKAVEVAESRLRQKTLMGVLATGGAGLGYVPKAQVSRAQGKERRQLLQEEVRAGVEEERVSRAVGLKRQGAWTRWESTLQRKVTWANIMQADFHRIRFLVQAVYDTLPSPANLHLWGKSETPACPLCSGRGTLEHLLSSCPRALADGRYRWRHDQVLRVVAEKIASAISTSKHHHAPRKAISFIKAGEKPQVRPHLTTGLLNTASDWQLQADLGKQLKFPQNIAKTSLRPDMIIISEASKQLIMLELTVPWEERIEEANERKRGKYQELVQECRGRGWKTFYEPIEVGCRGFAGRSLCKALGRLGVAGAAKKRAIQAVSEAAEKATRWLWIKRADPWVATGTQVGA

SEQ ID NO: 24182 - protein, 1078 aa, Melanochromis auratus
MERTTSKTCICGKLCKNQRGLKVHQARMKCLERESEVQRTGPEPGETQEEPGQEAPHRAQSLHALDSSNPSSVVPQQRIKWPPASSRSEWQKFDEDVSNIIQAVAKRDADSRLKTMTTIIVSYASERFGLIEKCNNKTPYTMNRRAMKIHQLRQELRSLKKQFKNADAEEKQALEELHNILRKKLITLRRAEWHRRRGRERARKRAAFIADPFRFSKQLLGVKRSGQLECSAEEVNNFLHETMSDPLREQDLGPNKALINPAPPSAEFKLTEPSLKEVCEVIKAARSASSPGPSGVPYLVYKRCPELLRHLWKILKVIWRRGRVADQWRCAEGVWIPKEEDSKNINQFRSISLLSVEGKVFFSVVSRRLTEFLLRNNYIDPSVQKGGIPGVPGCLEHTGVVTHLIREAHENRGDLAVLWLDLTNAYGSIPHKLVEHALHLHHVPSKIKDLILDYYANFRLRVTSRAVTSDWHRLGKGIITGCTISVTLFALAMNMVVKAAEVECRGPLTRSGVRQPPIRAYMDDLTITTSSVPGCRWILQGLERLISWARMSFKPSKSRSMVLKKGKVTDKFRFSISGTIIPSITEQPVKSLGKLFDSSLKDSTAIQKANEELGAWLIKVDKSGLPGRFKAWIYQHSILPRILWPLLVYTVPITTVESLERKISGFLRKWLGLPRSLTSAALYGTSNSVQLPFSGLTEEFKVARTREALQYRDSKDCKVASAGIEVRTGRKWKAEKAVEVAESRLRQKTLMGVLATGGAGLGYIPKAQVSRAQGKERHQLLQEEVRAGVEEERVSRAVGLKRQGAWTRWESTLQRKVTWANIMQADFHRIRFLVQAVYDTLPSPANLHLWGKSETPACPLCSGRGTLEHLLSSCPRALADGRYRWRHDQVLRVVAEKIASAISISKHHHAPRKAISFIKAGEKPQGRPHLTTGLLNTASDWQLQADLGKQLTQNIAKTSLWPDMIIISEASKQLIMLELTVSWEERIEEANERKRGKYQELVQECRGRGWKTFYEPIEVGCRGFAGRSLCKALGRLGVAGAAKKRAIQAVSEAAEKATRWLWIKRADPWVATGTQVGA

SEQ ID NO: 24183 - protein, 1080 aa, Pseudosimochromis marginatus
MERTTSKTCICGKLCKNQRGLKVHQARMKCLERESEVQRTGPEPGETQEEPGQEAPHRAQSLHAPDSSNPSSVVPQQRIKWPPASSQSEWQKFDEDVSNIIQAVAKRDADSRLKTMTTIIVSYASERFGLIEKCNNKTPYTMNRRAMKIHQLRQELRSLKKQFKNADAEEKQALEELHNILRKKLITLRRAEWHRRRGRERARKRAAFIADPFRFSKQLLGVKRSGQLECSAEEVNNFLHETMSDPLREQDLGPNKALINPAPPSVEFKLTEPSLKEVCEVIKAARSASSPGPSGVPYLVYKRCPELLRHLWKILKVIWRRGRVADQWRCAEGVWIPKEEDSKNINQFRSISLLSVEGKVFFSVVSRRLTEFLLRNNYIDPSVQKGGIPGVPGCLEHTGVVTHLIREAHENRGDLAVLWLDLTNAYGSIPHKLVEHALHLHHVPSKIKDLILDYYANFRLRVTSRAVTSDWHRLRKGIITGCTISVTLFALAMNMVVKAAEVECRGPLTRSGVRQPPIRAYMDDLTITTSSVPGCRWILQGLERLISWARMSFKPSKSRSMVLKKGKVTDKFRFSISGTIIPSITEQPVKSLGKLFDSSLKDSTAIQKANEELGAWLIKVDKSGLPGRFKAWIYQHSILPRILWPLLVYTVPITTVESLERKISGFLRKWLGLPRSLTSAALYGTSNSVQLPFSGLTEEFKVARTREALQYRDSKDCKVASAGIEVRTGRKWKAEKAVEVAESRLRQKTLMGVLATGGAGLGYVPKAQVSRAQGKERHQLLQEEVRAGVEEERVSRAVGLKRQGAWTRWESTLQRKVTWANIMQADFHRIRFLVQAVYDTLPSPANLHLWGKSETPACPLCSGRGTLEHLLSSCPRALADGRYRWRHDQVLRVVAEKIASAISTSKHHQALRKAISFIKAGEKAQVRPHLTTGLLNTASDWQLQADLGKQLKFPQNIVKTSLRPDLIIISEASKQLIMLELTVPWEERIEEANERKRGKYQELVQECRGRGWKTLYEPIEVGCRGFAGRSLCKVLGRLGVAGATKKRAIQAVSEAAEKATRWLWIKRADPWVATGTQVGA

SEQ ID NO: 24184 - protein, 1084 aa, Menidia menidia
MTQANGQTTNVTCICGKLCKNHRGLKIHQAKMKCLDRDNEVQRSGLVPGETQEEPGQEATHRAQSLHVPQTLNPSRVIPQQRIKWPPASRRSEWQQFDEDVSNIIQATAKGDVDSRLTSMTTVIVSYARERFGQVDKGKSKPTPYTMSRRATRIHHLRQELRTLKKQYKAATEEEKQPLAELKNILRKKLMTLRRAEWHRRRGRERARKRAAFIANPFGFTKRLLGDKRSGRLECSIEQVNQFLQDTVSDPLRDQELDPNKALISPDPPTTEFNLKEPSLKDVEEVVKAARSASAPGPSGTPYLVYKRCPGILRHLWRIMKVIWRRGKVANQWRHAEGVWIPKEENSQDISQFRSISLLSVEGKVFFSIVSRRLTEFLLKNSYIDPSVQKGGISTPGCLEHTGVVTQLIREAHENKGDLAVLWLDLANAYGSIPHKLVELALHLHHVPSKIKDLILDYYNDFRMRVTSGSETSDWHRIGKGIITGCTISVVLFSLAMNMVAKSAEVECRGPLTKSGVRQPPIRAYMDDLTVTTASVPGCRWILHGLEKLISWARMSFKPSKSRSMVLKKGKVMDKFRFSISGTVIPTITEQPVKSLGKLFDSTLKDSVAIQKASLELGAWLTKVDKSGLPGRFKAWIYQHSILPRILWPLLIYAVPMTAVESLERKISSFLRKWLGLPRSLTSAALYGTSNILQLPLSGLTEEFMVARTREALQYRDSKDGKVSAAGIEVRTGRKWKAREALDLAESRLRQKALVGTVATGRAGLGYFPKTLISQSRGKERHHLIQEEVRAGVEEERVSRAVGLRQQGAWTRWESALQRRITWTNILQPDFQRVRFLVQAVYDALPSPANLHVWGKSETPSCPLCSGRGSLEHLLSGCPKALADGRYRWRHDQVLKAVAESVASAINSSNKQQAPKKAISFVRAGEKPRANQRATTGLLYTASDWQLQVDLGKQLRFPQHIATTTLRPDMIMTSQSSKHLIILELTVPWEENIEEANERKRAKYQELVEECRGAGWKTFYEPIEVGCRGFAGRSLCKVLSRLGIVGASKKRAIKSASEAAEKATRWLWIRRADPWAATGTQVGA

SEQ ID NO: 24185 - protein, 1068 aa, Oreochromis niloticus
MLCKNQRGLKVHQARMKCLERESEVQRTGPEPGETQEEPGPEAPHRAQSLHAPDSSNPSSVVPQQRIKWPPASSRSEWQKFDEDVSNIIQAVAKRDADSRLKTMTTIIVSYASERFGLTEKGNNKTPYTMNRRAMKIHRLRQELRSLKKQFKEADAEEKQALEELHNILRKKLITLRRAEWHRRRGRERARKRAAFIADPFRFSKQLLGVKRSGQLECSAEEVNNFLHETMSDPLREQDLGPNKALINPAPPSVEFKLTEPSLKEVCEVIKAARSASSPGPSGVPYLVYKRCPELLRHLWKILKVIWRRGRVADQWRYAEGVWIPKEEDSKNINQFRSISLLSVEGKVFFSVVSRRLTEFLLRNNYIDPSVQKGGIPGVPGCLEHTGVVTHLIREAHENRGDLAVLWLDLTNAYGSMPHKLVEHALHLHYVPSKIKDLVLDYYSNFRLRVTSGAVTSGWHRLGKGIITGCTISVTLFALAMNMVVKAAEVECRGPLTRSGVRQPPIRAYMDDLTITTSSVPGCRWILQGLERLISWARMSFKPSKSRSMVLKKGKVTDKFRFSISGTIIPSITEQPVKSLGKLFDSSLKDSTAIQKANEELGAWLIKVDKSGLPGRFKAWIYQHSILPRILWPLLVYTVPITTVESLERKISGFLRKWLGLPRSLTSAALYGASNSLQLPFSGLTEEFKVARTREALQYRDSKDCKVASAGIEVRTGRKWKAEKAVEVAESRLRQKALVGVLATGGAGLGYFSKAQVSRAQGKERHQLLQEEVRAGVEEERVSRAVGLKQQGAWTRWESTLQRKVTWANIMQADFHRIRFLVQAVYDTLPSPANLHLWGKSETPVCPLCSGRGTLEHLLSSCPRALADGRYRWRHDQVLRVVAEKIASGISTSKHHHAPRKAISFIKAGEKPQARPHLTTGLLNTASDWQLQADLGKQLKFPQNIAKTSLRPDMIIISEASKQLIMLELTVPWEERIEEANERKRGKYQELVQECRGRGWKTFYEPIEVGCRGFAARSLCKVLGRLGMAGVAKKRAIQAVSEAAEKATRWLWIKRADPWVATGTQVGA

SEQ ID NO: 24186 - protein, 1084 aa, Menidia menidia
MTQANGQTTNVTCICGKLCKNHRGLKIHQAKMKCLDRDNEVQRSGLVPGETQEEPGQEATHRAQSLHVPQTLNPSRVIPQQRIKWPPASRRSEWQQFDEDVSNIIQATAKGDVDSRLTSMTTVIVSYARERFGQVDKGKSKPTPYTMSRRATRIHHLRQELRTLKKQYKAATEEEKQPLAELKNILRKKLMTLRRAEWHRRRGRERARKRAAFIANPFGFTKRLLGDKRSGRLECSIEQVNQFLQDTVSDPLRDQQLEPNKALISPDPPTTEFNLKEPSLKEVEEVVKAARSASAPGPSGTPYLVYKRCPGILRHLWRIMKVIWRRGKVANQWRHAEGVWIPKEENSQEISQFRSISLLSVEGKVFFSIVSRRLTEFLLKNSYIDPSVQKGGISTPGCLEHTGVVTQLIREAHENKGDLAVLWLDLANAYGSIPHKLVELALHLHHVPSKIKDLILDYYNDFRMRVTSGSETSDWHRIGKGIITGCTISVVLFSLAMNMVVKSAEVECRGPLTKSGVRQPPIRAYMDDLTVTTASVPGCRWILHGLEKLISWARMSFKPSKSRSMVLKKGKVMDKFRFSISGTVIPTITEQPVKSLGKLFDSTLKDSVAIQKASLELGAWLTKVDKSGLPGRFKAWIYQHSILPRILWPLLIYAVPMTAVESLERKISSFLRKWLGLPRSLTSAALYGTSNILQLPLSGLTEEFMVARTREALQYRDSKDGKVSAAGIEVRTGRKWKAREALDLAESRLRQKELVGTVATGRAGLGYFPKTLISQSRGKERHHLIQEEVRAGVEEERVSRAVGLRQQGAWTRWESALQRRITWTNILQPDFQRVRFLVQDVYDALPSPANLHVWGKSETPSCPLCSGRGSLEHLLSGCPKALADGRYRWRHDQVLKAVAESVASAINSSNKQQAPKKAISFVRAGEKPRANQRATTGLLYTASDWQLQVDLGKQLRFPQHIATTTLRPDMIMTSQSSKHLIILELTVPWEENIEEANERKRAKYQELVEECRGAGWKTFYEPIEVGCRGFAGRSLCKVLSRLGIVGASKKRAIKSASEAAEKATRWLWIRRADPWAATGTQVGA

SEQ ID NO: 24187 - protein, 1080 aa, Pseudosimochromis marginatus
MERTTSKTCICGKLCKNQRGLKVHQARMKCLERESEVQRTGPEPGETQEEPGQEAPHRAQSLHAPDSSNPSSVVPQQRIKWPPASSQSEWQKFDEDVSNIIQAVAKRDADSRLKTMTTIIVSYASERFGLIEKCNNKTPYTMNRRAMKIHQLRQELRSLKKQFKNADAEEKQALEELHNILRKKLITLRRAEWHRRRGRERARKRAAFIADPFRFSKQLLGVKRSGQLECSAEEVNNFLHETMSDPLREQDLGPNKALINPAPPSVEFKLTEPSLKEVCEVIKAARSASSPGPSGVPYLVYKRCPELLRHLWKILKVIWRRGRVADQWRCAEGVWIPKEEDSKNINQFRSISLLSVEGKVFFSVVSRRLTEFLLRNNYIDPSVQKGGIPGVPGCLEHTGVVTHLIREAHENRGDLAVLWLDLTNAYGSIPHKLVEHALHLHHVPSKIKDLILDYYANFRLRVTSRAVTSDWHRLRKGIITGCTISVTLFALAMNMVVKAAEVECRGPLTRSGVRQPPIRAYMDDLTITTSSVPGCRWILQGLERLISWARMSFKPSKSRSMVLKKGKVTDKFRFSISGTIIPSITEQPVKSLGKLFDSSLKDSTAIQKANEELGAWLIKVDKSGLPGRFKAWIYQHSILPRILWPLLVYTVPITTVESLERKISGFLRKWLGLPRSLTSAALYGTSNSVQLPFSGLTEEFKVARTREALQYRDSKDCKVASAGIEVRTGRKWKAEKAVEVAESRLRQKTLMGVLATGGAGLGYVPKAQVSRAQGKERHQLLQEEVRAGVEEERVSRAVGLKRQGAWTRWESTLQRKVTWANIMQADFHRIRFLVQAVYDTLPSPANLHLWGKSETPACPLCSGRGTLEHLLSSCPRALADGRYRWRHDQVLRVVAEKIASAISTSKHHQALRKAISFIKAGEKAQVRPHLTTGLLNTASDWQLQADLGKQLKFPQNIVKTSLRPDLIIISEASKQLIMLELTVPWEERIEEANERKRGKYQELVQECRGRGWKTFYEPIEVGCRGFAGRSLCKVLGRLGVAGAAKKRAIQAVSEAAEKATRWLWIKRADPWVATGTQVGA

SEQ ID NO: 24188 - protein, 1080 aa, Pseudosimochromis marginatus
MERTTSKTCICGKLCKNQRGLKVHQARMKCLERESEVQRTGPEPGETQEEPGQEAPHRAQSLHAPDSSNPSSVVPQQRIKWPPASSQSEWQKFDEDVSNIIQAVAKRDADSRLKTMTTIIVSYASERFGLIEKCNNKTPYTMNRRAMKIHQLRQELRSLKKQFKNADAEEKQALEELHNILRKKLITLRRAEWHRRRGRERARKRAAFIADPFRFSKQLLGVKRSGQLECSAEEVNNFLHETMSDPLREQDLGPNKALINPAPPSVEFKLTEPSLKEVCEVIKAARSASSPGPSGVPYLVYKRCPELLRHLWKILKVIWRRGRVADQWRCAEGVWIPKEEDSKNINQFRSISLLSVEGKVFFSVVSRRLTEFLLRNNYIDPSVQKGGIPGVPGCLEHTGVVTHLIREAHENRGDLAVLWLDLTNAYGSIPHKLVEHALHLHHVPSKIKDLILDYYANFRLRVTSRAVTSDWHRLRKGIITGCTISVTLFALAMNMVVKAAEVECRGPLTRSGVRQPPIRAYMDDLTITTSSVPGCRWILQGLERLISWARMSFKPSKSRSMVLKKGKVTDKFRFSISGTIIPSITEQPVKSLGKLFDSSLKDSTAIQKANEELGAWLIKVDKSGLPGRFKAWIYQHSILPRILWPLLVYTVPITTVESLERKISGFLRKWLGLPRSLTSAALYGTSNSVQLPFSGLTEEFKVARTREALQYRDSKDCKVASAGIEVRTGRKWKAEKAVEVAESRLRQKTLMGVLATGGAGLGYVPKAQVSRAQGKERHQLLQEEVRAGVEEERVSRAVGLKRQGAWTRWESTLQRKVTWANIMQADFHRIRFLVQAVYDTLPSPANLHLWGKSETPACPLCSGRGTLEHLLSSCPRALADGRYRWRHDQVLRVVAEKIASAISTSKHHQALRKAISFIKAGEKAQVRPHLTTGLLNTASDWQLQADLGKQLKFPQNIVKTSLRPDLIIISEASKQLIMLELTVPWEERIEEANERKRGKYQELVQECRGRGWKTFYEPIEVGCRGFAGRSLCKVLGRLGVAGATKKRAIQSVSEAAEKATRWLWIKKADPWVATGTQVGA

SEQ ID NO: 24189 - protein, 1076 aa, Sinocyclocheilus maitianheensis
MNVTCICGKLCKNHRGLKIHQARMKCLERESEVQRTGLEPGETQEEPGQEATHRAQSLHAPEPPNPSRVVQQRIKWPPASKRSEWLQFDKDVSNIIQATAKGDADSRLQTMTTIIFSYALERFGRVEKGKTKYTFYTMNRRATKIHHLRQELRTLKKQYKKATDEEKRPLAELQNILRKKLMILRRAEWHRRRGRERTRKRAAFIANPFGFTKQLLGDKRNGRLECSIEEVNRFLQDTVSDSLREQDLEPNKALVNPTPPTTEFNLKGPSLKEVEEIIKAARSASTPGPSGVPYLVYKRCPDLLQHLWKILKVIWRRGRVADQWRCGEGVWIPKEENSKNINQFRTISLLSVEGKVFFSIVSRRLTEFLLKNNYIDPSVQKGGIPGAPGCLEHTGVVTQLIREAHENRGDLVVLWLDLANAYGSIPHKLVELALHLHHVPSKIKDLILDYYNNFRMRVTSGSETSDWHRIGKGIITGCTISVILFALAMNMVVKSAEVECRGPLTKSGVRQPPIRAYMDDLIITTTSVPGSRWILQGLERLITWARMSFKPSKSRSMVLKKGKVVDKFRFSISGTVIPTIAEQPVKSLGKLFDSTLKDSAAIQKSNKELGAWLTKVDKSGLPGRFKAWIYQHSILPRVLWPLLIYEVPMTTVESLERKISGFLRKWLGLPRSLTSAALYGTSNILQLPFSGLTEEFKVVRTREALQYRDSRDCKVSAAGIEVRTGRKWKAGKAVEVAESRLRQKALVGTVATGRAGLGYFPKTLVSQARGKERHHLLQEEVRAGVEEERVSRAGGLRQQGAWTRWESTLQRRITWANILQADFHRVRFLVQAVYDALPSPANLHVWGKSETPFCLLCSGRGSLEHLLSSCPKALADGRYRWRHDQVLKAIAESLASAISTSKYHHAPKKAIHFIKAGEKHRVCPQLTTGLLHKASDWQLQVDLGKQLRFPQHIVTTSLRPDMIVTSEVSKQLIMLELTVPWEERIEEANERKRAKYQELVEKCRERGWRTFYEPIEVGCRGFAGRSLCKVLSRLGITGVAKKRAIQAASEAAEKATRWLWFKRADPWAATGTQVGA

SEQ ID NO: 24190 - protein, 1080 aa, Pseudosimochromis marginatus
MERTTSKTCICGKLCKNQRGLKVHQARMKCLERESEVQRTGPEPGETQEEPGQEAPHRAQSLHAPDSSNPSSVVPQQRIKWPPASSQSEWQKFDEDVSNIIQAVAKRDADSRLKTMTTIIVSYASERFGLIEKCNNKTPYTMNRRAMKIHQLRQELRSLKKQFKNADAEEKQALEELHNILRKKLITLRRAEWHRRRGRERARKRAAFIADPFRFSKQLLGVKRSGQLECSAEEVNNFLHETMSDPLREQDLGPNKALINPAPPSVEFKLTEPSLKEVCEVIKAARSASSPGPSGVPYLVYKRCPELLRHLWKILKVIWRRGRVADQWRCAEGVWIPKEEDSKNINQFRSISLLSVEGKVFFSVVSRRLTEFLLRNNYIDPSVQKGGIPGVPGCLEHTGVVTHLIREAHENRGDLAVLWLDLTNAYGSIPHKLVEHALHLHHVPSKIKDLILDYYANFRLRVTSRAVTSDWHRLRKGIITGCTISVTLFALAMNMVVKAAEVECRGPLTRSGVRQPPIRAYMDDLTITTSSVPGCRWILQGLERLISWARMSFKPSKSRSMVLKKGKVTDKFRFSISGTIIPSITEQPVKSLGKLFDSSLKDSTAIQKANEELGAWLIKVDKSGLPGRFKAWIYQHSILPRILWPLLVYTVPITTVESLERKISGFLRKWLGLPRSLTSAALYGTSNSVQLPFSGLTEEFKVARTREALQYRDSKDCKVASAGIEVRTGRKWKAEKAVEVAESRLRQKTLMGVLATGGAGLGYVPKAQVSRAQGKERHQLLQEEVRAGVEEERVSRAVGLKRQGAWTRWESTLQRKVTWANIMQADFHRIRFLVQAVYDTLPSPANLHLWGKSETPACPLCSGRGTLEHLLSSCPRALADGRYRWRHDQVLRVVAEKIASAISTSKHHQALRKAISFIKAGEKAQVRPHLTTGLLNTASDWQLQADLGKQLKFPQNIVKTSLRPDLIIISEDSKQLIMLELTVPWEERIEEANERKRGKYQELVQECRGRGWKTFYEPIEVGCRGFAGRSLCKVLGRLGVAGATKKRAIQSVSEAAEKATRWLWIKRADPWVATGTQVGA

SEQ ID NO: 24191 - protein, 1053 aa, Sinocyclocheilus maitianheensis
MNVTCICGKLCKNHRGLKIHQARIKCLEQESEVQRTGLEPGETQEEPGQEATHRAQSLHAPEPPNPSRVVQQRIKWPPASKRSEWLQFDKDVSNIIQATAKGDADSRLQTMTTIIFSYALERFGRVEKGKTKSTFYTMNRRATKIHHLRQELRTLKKQYKKATDEEKRPLAELQNILRKKLMILRRAEWHRRRGRERTRKRAAFIANPFGFTKQLLGDKRNGRLECSIEEVNRFLQDTVSDSLREQDLEPNKALVNPTPPTTEFNLKGPSLKEVEEIIKAARSASTPGPSGVPYLVYKRCPDLLQHLWKILKVIWRRGRVADQWRCGEGVWIPKEENSKNINQFRTISLLSVEGKVFFSIVSRRLTEFLLKNNYIDPSVQKGGIPGAPGCLEHTGVVTQLIREAHENRGDLVVLWLDLANAYGSIPHKLVELALHLHHVPSKIKDLILDYYNNFRMRVTSGSETSDWHRIGKGIITGCTISVILFALAMNMMVKSAEVECRGPLTKSGVRQPPIRAYMDDLIITTTSVPGSRWILQGLERLITWARMSFKPSKSRSMVLKKGKVVDKFRFSISGTVIPTIAEQPVKSLGKLFDSTLKDSAAIQKSNKELGAWLTKVDKSGLPGRFKAWIYQHSILPRVLWPLLIYEVPMTTVESLERKISGFLRKWLGLPRSLTSAALYGTSNILQLPFSGLTEEFKVVRTREALQYRDSRDCKVSAAGIEVRTGRKWKAGKAVEVAESRLRQKALVGTVATGRAGLGYFPKTLVSQARGKERHHLLQEEVRAGVEEERVSRAGGLRQQGAWTRWESTLQRRITWANILQADFHRVRFLVQAVYDALPSPANLHVWGKSETPFCLLCSGRGSLEHLLSSCPKALADGRYRWRHDQVLKAIAESLASAISTSKYHHAPKKAVHFIKAGEKHRVCSQLTTGLLHKALDWQLQVDLGKQLRFPQHIVTTSLRPDMIVTSEVSKQLIMLELTVSWEERIEEANERKRAKYQELVEKCRERGWRTFYEPIEVGCRGFAGRSLCKVLSRLGITGVAKKRAIQGHKVALV

SEQ ID NO: 24192 - protein, 1080 aa, Pseudosimochromis marginatus
MERTTSKTCICGKLCKNQRGLKVHQARMKCLERESEVQRTGPEPGETQEEPGQEAPHRAQSLHAPDSSNPSSVVPQQRIKWPPASSQSEWQKFDEDVSNIIQAVAKRDADSRLKTMTTIIVSYASERFGLIEKCNNKTPYTMNRRAMKIHQLRQELRSLKKQFKNADAEEKQALEELHNILRKKLITLRRAEWHRRRGRERARKRAAFIADPFRFSKQLLGVKRSGQLECSAEEVNNFLHETMSDPLREQDLGPNKALINPAPPSVEFKLTEPSLKEVCEVIKAARSASSPGPSGVPYLVYKRCPELLRHLWKILKVIWRRGRVADQWRCAEGVWIPKEEDSKNINQFRSISLLSVEGKVFFSVVSRRLTEFLLRNNYIDPSVQKGGIPGVPGCLEHTGVVTHLIREAHENRGDLAVLWLDLTNAYGSIPHKLVEHALHLHHVPSKIKDLILDYYANFRLRVTSRAVTSDWHRLRKGIITGCTISVTLFALAMNMVVKAAEVECRGPLTRSGVRQPPIRAYMDDLTITTSSVPGCRWILQGLERLISWARMSFKPSKSRSMVLKKGKVTDKFRFSISGTIIPSITEQPVKSLGKLFDSSLKDSTAIQKANEELGAWLIKVDKSGLPGRFKAWIYQHSILPRILWPLLVYTVPITTVESLERKISGFLRKWLGLPRSLTSAALYGTSNSVQLPFSGLTEEFKVARTREALQYRDSKDCKVASAGIEVRTGRKWKAEKAVEVAESRLRQKTLMGVLATGGAGLGYVPKAQVSRAQGKERHQLLQEEVRAGVEEERVSRAVGLKRQGAWTRWESTLQRKVTWANIMQADFHRIRFLVQAVYDTLPSPANLHLWGKSETPACPLCSGRGTLEHLLSSCPRALADGRYRWRHDQVLRVVAEKIASAISTSKHHQALRKAISFIKAGEKAQVRPHLTTGLLNTASDWQLQADLGKQLKFPQNIVKTSLRPDLIIISEASKQLIMLELTVPWEERIEEANERKRGKYQELVQECRGRGWKTFYEPIEVGCRGFAGRSLCKVLGRLGMAGATKKRAIQSVSEAAEKATRWLWIKRADPWVATGTQVRA

SEQ ID NO: 24193 - protein, 621 aa, Oryzias sinensis
MRVTSGSGKSDWHRIGKGIITGCTISVILFALAMNMGVKAAEVECRGPLTKSGVRQPPIRTYMDDLTITTSSVPGSRWILKGLKKLFTWARMSFKPSKSRSMVLKRGKVVDKFWFSISGTAIPTITEQPVKSLGKFFDSSLKDAAAIQRSNKELGVWLTKVDKSGLPGRFKAGIYQHSILPRVLWPLLVYAVPMTTVESLEKKISGFLRRWLGLLRCLTSTALYGTSNVLQLPFSGLTEEFMVVRTREVLHYRDSRDGKVSAAGIEVRTGRKWKAGKAVEEAESRLRQKALVGTVATGTAGLGYLPKTVVSQAHGKERHRLLQEEVRAGVEEERASRLTGLRQQGARTRWERTLQRRISWADILQADFHRVRFLVQAVYDVLPSPANLHVWGKSEMPSCLLCSGRGSLEHLLSSCPKALADGRYRWRHDQVLKALAESLASAIKASKNQRAPKKAVPFIKAGEKPQVRKQLPTGLLHKALDCQLQVDLEKQLRFPQHIVRTNLRPDMLLISETSKHLIMLELTVPWEERMEEANERKRAKYQELVEGCRKRGWKTFYESVEVGCRGFAGRSLCKVLCRLGITGAAKKRAIQSVCEAAEKATRWLWMKRADPWSAAGTQVGV

SEQ ID NO: 24194 - protein, 1067 aa, Danio kyathit
MTNVTCVTCICGKLCKNHRGLKIHQARMKCLEQESKVQRTGPEPGETQEEPGQEATHRAKSLHVPEPQIPSKVVQQRIKWPPASKQSEWLQFDEDVSNIIQAIAKGDADSRLKTMTTIIFSYALERFGWVEKGKTKPTSYTMNRRATQIHHLRQELRSLKKLYKKATDEEKQPLAEIRNILRKKLMILRRAEWHRRRRRERARKRAAFITNPFSFTKQLLGDKRSGRLECSIEEVNRFLEDTVSDPLREQELEPNKALISPAPPAREFNLRGPSLKEVKEIIKASRSASTPGPSGIPYLVYKRCPGILRHLWKILKVIWQRGRVAEQWRCAEGVWIPKEENSKNINQFRTISLLSVEGKVFFSIVSRRLTEFLLKNNYIDPSVQKGGIPGAPGCLEHTGVVTQLIREAHENRGDLVVLWLDLANAYGSIPHKLVELALHRHHVPSKIKDLILDYYNNFRMRVTSGSETSNWHRIGKGIITGCTISVILFALAMNMVVKSAEVECRGPLTKSGVRQPPIRAYMDDLTITTTTVPGSRWILQGLERLIAWARMSFKPSKSRSMVLKKGKVVDKFHFSISGSVIPTITEQPVKSLGKLFDSSLKDSAAIQKSRKELGAWLTKVDKSGLPGRFKAWIYQHSILPRVLWPLLIYAVPMSTVESLERKISGFLRKWLGLPRSLTSAALYGTSNTLQLPFSGLTEEFMVVRTREALQYRDSRDSKVSSACIEVRTGRKWKAGNAVEVAESRLRQKALVGTVARGRVGLGYFPQTLVSQVHGKERHHLLQEEVRAGVEEERVSRVVGLQQQGAWTRWENTLQRRITWANILQADFQRVRFLVQAVYDVLPSPSNLHVWGKSETPSCLLCSGRGSLEHLLSSCPKALADGRYRWRHDQVLKAITESLASAISTSKNHHAPKKALYFIKAGEKPRALPQLTTGLLHKASDWQLEVDLGKQLRFPHHIAKTRLRPDIIVISEASRQLIMLELTVPWEERIEEANERKRAKYQELVEECRERGWRTFYEPIEVGCRGFAGHFAGHVEALQSFGHYRGGKEKGHSICKRSRREGHKVAVD

SEQ ID NO: 24195 - protein, 1080 aa, Petrochromis famula
MERTTSKTCICGKLCKNQRGLKVHQARMKCLERESEVQRTGPEPGETQEEPGQEAPHRAQSLHAPDSSNPSSVVPQQRIKWPPASSRSEWQKFDEDVSNIIQAVAKRDADSRLKTMTTIIVSYASERFGLIEKCNNKTPYTMNRRAMKIHQLRQELRSLKKQFKNADAEEKQALEELHNILRKKLITLRRAEWHRRRGRERARKRAAFIADPFRFSKQLLGVKRSGQLECSAEEVNNFLHETLSDPLREQDLGPNEALINPAPPSVEFKLTEPSLKEVCEVIKAARSASSPGPSGVPYLVYKRCPELLRHLWKILKVIWRRGRVADQWRYAEGVWIPKEEDSKNINQFQSISLLSVEGKVFFSVVSRRLTEFLLRNNYIDPSVQKGGIPGVPGCLEHTGVVTHLIREAHENRGDLAVLWLDLTNAYGSIPHKLVEHALHLHHVPSKIKDLILDYYANFRLRVTSRAVTSDWHRLRKGIITGCTISVTLFALAMNMVVKAAEVECRGPLTRSGVRQPPIRAYMDDLTITTSSVPGCRWILQGLERLISWARMSFKPSKSRSMVLKKGKVTDKFRFSISGTIIPSITEQPVKSLGKLFDSSLKDSTAIQKANEELGAWLIKVDKSGLPGRFKAWIYQHSILPRILWPLLVYTVPITTVESLERKISGFLRKWLGLPRSLTSTALYGASNSVQLPFSGLTDEFKVACTREALQYRDSKDCKVASAGIEVRTGRKWKAEKAVEVAESRLRQKTLMGVLATGGAGLGYVPKAQVSRAQGKERHQLLQEEVRAGVEEERVSRAVGLKRQGAWTRWESTLQRKVTWANIMQADFHRIRFLVQAVYDTLPSPANLHLWGKSETPACPLCSGRGTLEHLLSSCPRALADGRYRWRHDQVLRVVAEKIASAISTSKHHHAPRKAISFIKAGEKPQVRPHLTTGLLNTASDWQLQADLGKQLKFPQNIAKTSLRPDLIIISEASKQLIMLELTVPWEERIEEANERKRGKYQELVQECRGRGWKTFYEPIEVGCRGFAGRSLCKVLGWLGVAGATKKRAIQAVSEAAEKATRWLWIKRADPWVATGTQVGA

SEQ ID NO: 24196 - protein, 1080 aa, Danio kyathit
MTNVTCVTCICGKLCKNHRGLKIHQARMKCLEQESKVQRTGPEPGETQEEPGQEATHRAKSLHVPEPQIPSKVVQQRIKWPPASKQSEWLQFDEDASNIIQAIAKGDADSRLKTMTTIIFSYALERFGWVEKGKTKPTSYTMNRRATQIHHLRQELRSLKKLYKKATDEEKQPLAEIRNILRKKLMILRRAEWHRRRRRERARKRAAFITNPFSFTKQLLGDRRSGRLECSIEEVNRFLEDTVSDPLREQELEPNKALISPAPPAREFNLRGPSLKEVKEIIKASRSASTPGPSGIPYLVYKRCPGILRHLWKILKVIWQRGRVAEQWRCAEGVWIPKEENSKNINQFRTISLLSVEGKVFFSIVSRRLTEFLLKNNYIDPSVQKGGIPGAPGCLEHTGVVTQLIREAHENRGDLVVLWLDLANAYGSIPHKLVELALHRHHVPSKIKDQILDYYNNFRMRVTSGSETSNWHRIGKGIITGCTISVILFALAMNMVVKSAEVECRGPLTKSGVRQPPIRAYMDDLTITTTTVPGSRWILQGLERLIAWARMSFKPSKSRSMVLKKGKVVDKFHFSISGSVIPTITEQPVKSLGKLFDSSLKDSAAIQKSRKELGAWLTKVDKSGLPGRFKAWIYQHSILPRVLWPLLIYAVPMSTVESLERKISGFLRKWLGLPRSLTSAALYGTSNTLQLPFSGLTEEFMVVRTREALQYRDSRDSKVSSACIEVRTGRKWKAGNAVEVAESRLRQKALVGTVARGRVGLGYFPQTLVSQVHGKERHHLLQEEVRAGVEEERVSRVVGLQQQGAWTRWENTLQRRITWANILQADFQRVRFLVQAVYDVLPSPSNLHVWGKSETPSCLLCSGRGSLEHLLSSCPKALADGRYRWRHDQVLKAITESLASAISTSKNHHAPKKALYFIKAGEKPRALPQLTTGLLHKASDWQLEVDLGKQLRFPHHIAKTRLRPDIIVISEASRQLIMLELTVPWEERIEEANERKRAKYQELVEECRERGWRTFYEPIEVGCRGFAGHSLCKVLSRLGITGVAKKRAIRSASEAAEKATRWLWIKRADPWTATGTQVGT

SEQ ID NO: 24197 - protein, 1076 aa, Sinocyclocheilus maitianheensis
MNVTCICGKLCKNHRGLKIHQARMKCLERESEVQRTGLEPGETQEEPGQEATHRAQSLHAPEPPNPSRVVQQRIKWPPASKRSEWLQFDKDVSNIIQATAKGDADSRLQTMTTIIFSYALERFGRVEKGKTKSTFYTMNRRATKIHHLRQELRTLKKQYKKATDEEKRPLAELQNILRKKLMILRRAEWHRRRGRERTRKRAAFIANPFGFTKQLLGDKRNGRLECSIEEVNRFLQDTVSDSLREQDLEPNKALVNPTPPTTEFNLKGPSLKEVEEIIKAARSASTPGPSGVPYLVYKRCPDLLQHLWKILKVIWRRGRVADQWRCGEGVWIPKEENSKNINQFRTISLLSVEGKVFFSIVSRRLTEFLLKNNYIDPSVQKGGIPGAPGCLEHTGVVTQLIREAHENRGDLVVLWLDLANAYGSIPHKLVELALHLHHVPSKIKDLILDYYNNFRMRVTSGSETSDWHRIGKGIITGCTISVILFALAMNMVVKSAEVECRGPLTKSGVRQPPIRAYMDDLIITTTSVPGSRWILQGLERLITWARMSFKPSKSRSMVLKKGKVVDKFRFSISGTVIPTIAEQPVKSLGKLFDSTLKDSAAIQKSNKELGAWLTKVDKSGLPGRFKAWIYQHSILPRVLWPLLIYEVPMTTVESLERKISGFLRKWLGLPRSLTSAALYGTSNILQLPFSGLTEEFKVVRTREALQYRDSRDCKVSAAGIEVRTGRKWKAGKAVEVAESRLRQKALVGTVATGRAGLGYFPKTLVSQARGKERHHLLQEEVRAGVEEERVSRAGGLRQQGAWTRWESTLQRRITWANILQADFHRVRFLVQAVYDALPSPANLHVWGKSETPFCLLCSGRGSLEHLLSSCPKALADGRYRWRHDQVLKAIAESLASAISTSKYHHAPKKAIHFIKAGEKHRVCPQLTTGLLHKASDWQLQVDLGKQLRFPQHIVTTSLRPDMIVTSEVSKQLIMLELTVPWEERIEEANERKRAKYQELVEKCRERGWRTFYEPIEVGCRGFAGRSLCKVLSRLGITGVAKKRAIQAASEAAEKATRWLWFKRADPWAATGTQVGA

SEQ ID NO: 24198 - protein, 1080 aa, Petrochromis famula
MERTTSKTCICGKLCKNQRGLKVHQARMKCLERESEVQRTGPEPGETQEEPGQEAPHRAQSLHAPDSSNPSSVVPQQRIKWPPASSRSEWQKFDEDVSNIIQAVAKRDADSRLKTMTTIIVSYASERFGLIEKCNNKTPYTMNRRAMKIHQLRQELRSLKKQFKNADAEEKQALEELHNILRKKLITLRRAEWHRRRGRERARKRAAFIADPFRFSKQLLGVKRSGQLECSAEEVNNFLHETLSDPLREQDLGPNEALINPAPPSVEFKLTEPSLKEVCEVIKAARSASSPGPSGVPYLVYKRCPELLRHLWKILKVIWRRGRVADQWRYAEGVWIPKEEDSKNINQFQSISLLSVEGKVFFSVVSRRLTEFLLRNNYIDPSVQKGGIPGVPGCLEHTGVVTHLIREAHENRGDLAVLWLDLTNAYGSIPHKLVEHALHLHHVPSKIKDLILDYYANFRLRVTSRAVTSDWHRLRKGIITGCTISVTLFALAMNMVVKAAEVECRGPLTRSGVRQPPIRAYMDDLTITTSSVPGCRWILQGLERLISWARMSFKPSKSRSMVLKKGKVTDKFRFSISGTIIPSITEQPVKSLGKLFDSSLKDSTAIQKANEELGAWLIKVDKSGLPGRFKAWIYQHSILPRILWPLLVYTVPITTVESLERKISGFLRKWLGLPRSLTSTALYGASNSVQLPFSGLTDEFKVACTREALQYRDSKDCKVASAGIEVRTGRKWKAEKAVEVAESRLRQKTLMGVLATGGAGLGYVPKAQVSRAQGKERHQLLQEEVRAGVEEERVSRAVGLKRQGAWTRWESTLQRKVTWANIMQADFHRIRFLVQAVYDTLPSPANLHLWGKSETPACPLCSGRGTLEHLLSSCPRALADGRYRWRHDQVLRVVAEKIASAISTSKHHHAPRKAISFIKAGEKPQVRPHLTTGLLNTASDWQLQADLGKQLKFPQNIAKTSLRPDLIIISEASKQLIMLELTVPWEERIEEANERKRGKYQELVQECRGRGWKTLYEPIEVGCRGFAGRSLCKVLGRLGVAGATKKWAIQAVSEAAEKATRWLWIKRADPWVATGTQVGA

SEQ ID NO: 24199 - protein, 1076 aa, Sinocyclocheilus maitianheensis
MNVTCICGKLCKNHRGLKIHQARMKCLERESEVQRTGLEPGETQEEPGQEATHRAQSLHAPEPPNPSRVVQQRIKWPPASKRSEWLQFDKDVSNIIQATAKGDADSRLQTMTTIIFSYALERFGRVEKGKTKSTFYTMNRRATKIHHLRQELRTLKKQYKKATDEEKRPLAELQNILRKKLMILRRAEWHRRRGRERTRKRAAFIANPFGFTKQLLGDKRNGRLECSIEEVNRFLQDTVSDSLREQDLEPNKALVNPTPPTTEFNLKGPSLKEVEEIIKAARSASTPGPSGVPYLVYKRCPDLLQHLWKILKVIWRRGRVADQWRCGEGVWIPKEENSKNINQFRTISLLSVEGKVFFSIVSRRLTEFLLKNNYIDPSVQKGGIPGAPGCLEHTGVVTQLIREAHENRGDLVVLWLDLANAYGSIPHKLVELALHLHHVPSKIKDLILDYYNNFRMRVTSGSETSDWHRIGKGIITGCTISVILFALAMNMVVKSAEVECRGPLTKSGVRQPPIRAYMDDLIITTTSVPGSRWILQGLERLITWARMSFKPSKSRSMVLKKGKVVDKFRFSISGTVIPTIAEQPVKSLGKLFDSTLKDSAAIQKSNKELGAWLTKVDKSGLPGRFKAWIYQHSILPRVLWPLLIYEVPMTTVESLERKISGFLRKWLGLPRSLTSAALYGTSNILQLPFSGLTEEFKVVRTREALQYRDSRDCKVSAAGIEVRTGRKWKAGKAVEVAESRLRQKALVGTVATGRAGLGYFPKTLVSQARGKERHHLLQEEVRAGVEEERVSRAGGLRQQGAWTRWESTLQRRITWANILQADFHRVRFLVQAVYDALPSPANLHVWGKSETPFCLLCSGRGSLEHLLSSCPKALADGRYRWRHDQVLKAIAESLASAISTSKYHHAPKKAIHFIKAGEKHRVCPQLTTGLLHKASDWQLQVDLGKQLRFPQHIVTTSLRPDMKVTSEVSKQLIMLELTVPWEERIEEANERKRAKYQELVEKCRERGWRTFYEPIEVGCRGFAGRSLCKVLSRLGITGVAKKRAIQAASEAAEKATRWLWFKRADPWAATGTQVGA

SEQ ID NO: 24200 - protein, 1011 aa, Pseudosimochromis marginatus
MERTTSKTCICGKLCKNQRGLKVHQARMKCLERESEVQRTGPEPGETQEEPGQEAPHRAQSLHAPDSSNPSSVVPQQRIKWPPASSQSEWQKFDEDVSNIIQAVAKRDADSRLKTMTTIIVSYASERFGLIEKCNNKTPYTMNRRAMKIHQLRQELRSLKKQFKNADAEEKQALEELHNILRKKLITLRRAEWHRRRGRERARKRAAFIADPFRFSKQLLGVKRSGQLECSAEEVNNFLHETMSDPLREQDLGPNKALINPAPPSVEFKLTEPSLKEVCEVIKAARSASSPGPSGVPYLVYKRCPELLRHLWKILKVIWRRGRVADQWRCAEGVWIPKEEDSKNINQFRSISLLSVEGKVFFSVVSRRLTEFLLRNNYIDPSVQKGGIPGVPGCLEHTGVVTHLIREAHENRGDLAVLWLDLTNAYGSIPHKLVEHALHLHHVPSKIKDLILDYYANFRLRVTSRAVTSDWHRLRKGIITGCTISVTLFALAMNMVVKAAEVECRGPLTRSGVRQPPIRAYMDDLTITTSSVPGCRWILQGLERLISWARMSFKPSKSRSMVLKKGKVTDKFRFSISGTIIPSITEQPVKSLGKLFDSSLKDSTAIQKANEELGAWLIKVDKSGLPGRFKAWIYQHSILPRILWPLLVYTVPITTVESLERKISGFLRKWLGLPRSLTSAALYGTSNSVQLPFSGLTEEFKVARTREALQYRDSKDCKVASAGIEVRTGRKWKAEKAVEVAESRLRQKTLMGVLATGGAGLGYVPKAQVSRAQGKERHQLLQEEVRAGVEEERVSRAVGLKRQGAWTRWESTLQRKVTWANIMQADFHRIRFLVQAVYDTLPSPANLHLWGKSETPACPLCSGRGTLEHLLSSCPRALADGRYRWRHDQVLRVVAEKIASAISTSKHHQALRKAISFIKAGEKAQVRPHLTTGLLNTASDWQLQADLGKQLKFPQNIVKTSLRPDLIIISEASKQLIMLELTVPWEERIEEANERKRGKYQELVQECRGRG

SEQ ID NO: 24201 - protein, 1076 aa, Petrochromis famula
MERTTSKTCICGKLCKNQRGLKVHQARMKCLERESEVQRTGPEPGETQEEPGQEAPHRAQSLHAPDSSNPSSVVPQQRIKWPPASSRSEWQKFDEDVSNIIQAVAKRDADSRLKTMTTIIVSYASERFGLIEKCNNKTPYTMNRRAMKIHQLRQELRSLKKQFKNADAEEKQALEELHNILRKKLITLRRAEWHRRRGRERARKRAAFIADPFRFSKQLLGVKRSGQLECSAEEVNNFLHETLSDPLREQDLGPNEALINPAPPSVEFKLTEPSLKEVCEVIKAARSASSPGPSGVPYLVYKRCPELLRHLWKILKVIWRRGRVADQWRYAEGVWIPKEEDSKNINQFQSISLLSVEGKVFFSVVSRRLTEFLLRNNYIDPSVQKGGIPGVPGCLEHTGVVTHLIREAHENRGDLAVLWLDLTNAYGSIPHKLVEHALHLHHVPSKIKDLILDYYANFRLRVTSRAVTSDWHRLRKGIITGCTISVTLFALAMNMVVKAAEVECRGPLTRSGVRQPPIRAYMDDLTITTSSVPGCRWILQGLERLISWARMSFKPSKSRSMVLKKGKVTDKFRFSISGTIIPSITEQPVKSLGKLFDSSLKDSTAIQKANEELGAWLIKVDKSGLPGRFKAWIYQHSILPRILWPLLVYTVPITTVESLERKISGFLRKWLGLPRSLTSTALYGASNSVQLPFSGLTDEFKVACTREALQYRDSKDCKVASAGIEVRTGRKWKAEKAVEVAESRLRQKTLMGVLATGGAGLGYVPKAQVSRAQGKERHQLLQEEVRAGVEEERVSRAVGLKRQGAWTRWESTLQRKVTWANIMQADFHRIRFLVQAVYDTLPSPANLHLWGKSETPACPLCSGRGTLEHLLSSCPRALADGRYRWRHDQVLRVVAEKIASAISTSKHHHAPRKAISFIKAGEKPQVRPHLTTGLLNTASDWQLQADLGKQLKFPQNIAKTSLRPDLIIISEASKQLIMLELTVPWEERIEEANEKKRGKYQELVQECRGRGWKTFYEPIEVGCRGFAGRSLCKVLGWLGVAGAAKKRAIQAVSEAAEKATRWLWIKRADPWVATGT

SEQ ID NO: 24202 - protein, 1080 aa, Simochromis diagramma
MERTTSKTCICGKLCKNQRGLKVHQARMKCLERESEVQRTGPEPGETQEEPGQEAPHRAQSLHAPDSSNPSSVVPQQRIKWPPASSQSEWQKFDEDVSNIIQAVAKRDADSRLKTMTTIIVSYASERFGLIEKCNNKTPYTMNRRAMKIHQLRQELRSLKKQFKNADAEEKQALEELHNILRKKLITLRRAEWHRRRGRERARKRAAFIADPFRFSKQLLGVKRSGQLECSAEEVNNFLHETMSDPLREQDLGPNKALINPAPPSVEFKLTEPSLKEVCEVIKAARSASSPGPSGVPYLVYKRCPELLRHLWKILKVIWRRGRVADQWRCAEGVWIPKEEDSKNINQFRSISLLSVEGKVFFSVVSRRLTEFLLRNNYIDPSVQKGGIPGVPGCLEHTGVVTHLIREAHENRGDLAVLWLDLTNAYGSIPHKLVEHALHLHHVPSKIKDLILDYYANFRLRVTSRAVTSDWHRLRKGIITGCTISVTLFALAMNMVVKAAEVECRGPLTRSGVRQPPIRAYMDDLTITTSSVPGCRWILQGLERLISWARMSFKPSKSRSMVLKKGKVTDKFRFSISGTIIPSITEQPVKSLGKLFDSSLKDSTAIQKANEELGAWLIKVDKSGLPGRFKAWIYQHSILPRILWPLLVYTVPITTVESLERKISGFLRKWLGLPRSLTSAALYGTSNSVQLPFSGLTEEFKVARTREALQYRDSKDCKVASAGIEVRTGRKWKAEKAVEVAESRLRQKTLMGVVATGGAGLGYVPKAQVSRAQGKERHQLLQEEVRAGVEEERVSRAVGLKRQGAWTRWESTLQRKVTWANIMQADFHRIRFLVQAVYDTLPSPANLHLWGKSETPACPLCSGRGTLEHLLSSCPRALADGRYRWRHDQVLRVVAEKIALAISTSKHHHAPRKAISFIKAGEKPQVRRHLTTGLLNTASDWQLQADLGKQLKFPQNIVKTSLRPDLIIISEASKQLIMLELTVPWEERIEEANERKRGKYQELVQECRGRGWKTFYEPIEVGCRGFAGRSLCKVLGRLGVAGATKKRAIQAVSEAAEKATRWLWIKRADPWVATGTQVGA

SEQ ID NO: 24203 - protein, 1015 aa, Pseudosimochromis marginatus
MERTTSKTCICGKLCKNQRGLKVHQARMKCLERESEVQRTGPEPGETQEEPGQEAPHRAQSLHAPDSSNPSSVVPQQRIKWPPASSQSEWQKFDEDVSNIIQAVAKRDADSRLKTMTTIIVSYASERFGLIEKCNNKTPYTMNRRAMKIHQLRQELRSLKKQFKNADAEEKQALEELHNILRKKLITLRRAEWHRRRGRERARKRAAFIADPFRFSKQLLGVKRSGQLECSAEEVNNFLHETMSDPLREQDLGPNKALINPAPPSVEFKLTEPSLKEVCEVIKAARSASSPGPSGVPYLVYKRCPELLRHLWKILKVIWRRGRVADQWRCAEGVWIPKEEDSKNINQFRSISLLSVEGKVFFSVVSRRLTEFLLRNNYIDPSVQKGGIPGVPGCLEHTGVVTHLIREAHENRGDLAVLWLDLTNAYGSIPHKLVEHALHLHHVPSKIKDLILDYYANFRLRVTSRAVTSDWHRLRKGIITGCTISVTLFALAMNMVVKAAEVECRGPLTRSGVRQPPIRAYMDDLTITTSSVPGCRWILQGLERLISWARMSFKPSKSRSMVLKKGKVTDKFRFSISGTIIPSITEQPVKSLGKLFDSSLKDSTAIQKANEELGAWLIKVDKSGLPGRFKAWIYQHSILPRILWPLLVYTVPITTVESLERKISGFLRKWLGLPRSLTSAALYGTSNSVQLPFSGLTEEFKVARTREALQYRDSKDCKVASAGIEVRTGRKWKAEKAVEVAESRLRQKTLMGVLATGGAGLGYVPKAQVSRAQGKERHQLLQEEVRAGVEEERVSRAVGLKRQGAWTRWESTLQRKVTWANIMQADFHRIRFLVQAVYDTLPSPANLHLWGKSETPACPLCSGRGTLEHLLSSCPRALADGRYRWRHDQVLRVVAEKIASAISTSKHHQALRKAISFIKAGEKAQVRPHLTTGLLNTASDWQLQADLGKQLKFPQNIVKTSLRPDLIIISEASKQLIMLELTVPWEERIEEANERKRGKYQELVQECRKGLEDFL

SEQ ID NO: 24204 - protein, 1080 aa, Petrochromis famula
MERTTSKTCICGKLCKNQRGLKVHQARMKCLERESEVQRTGPEPGETQEEPGQEAPHRAQSLHAPDSSNPSSVVPQQRIKWPPASSRSEWQKFDEDVSNIIQAVAKRDADSRLKTMTTIIVSYASERFGLIEKCNNKTPYTMNRRAMKIHQLRQELRSLKKQFKNADAEEKQALEELHNILRKKLITLRRAEWHRRRGRERARKRAAFIADPFRFSKQLLGVKRSGQLECSAEEVNNFLHETLSDPLREQDLGPNEALINPAPPSVEFKLTEPSLKEVCEVIKAARSASSPGPSGVPYLVYKRCPELLRHLWKILKVIWRRGRVADQWRYAEGVWIPKEEDSKNINQFQSISLLSVEGKVFFSVVSRRLTEFLLRNNYIDPSVQKGGIPGVPGCLEHTGVVTHLIREAHENRGDLAVLWLDLTNAYGSIPHKLVEHALHLHHVPSKIKDLILDYYANFRLRVTSRAVTSDWHRLRKGIITGCTISVTLFALAMNMVVKAAEVECRGPLTRSGVRQPPIRAYMDDLTITTSSVPGCRWILQGLERLISWARMSFKPSKSRSMVLKKGKVTDKFRFSISGTIIPSITEQPVKSLGKLFDSSLKDSTAIQKANEELGAWLIKVDKSGLPGRFKAWIYQHSILPRILWPLLVYTVPITTVESLERKISGFLRKWLGLPRSLTSTALYGASNSVQLPFSGLTDEFKVACTREALQYRDSKDCKVASAGIEVRTGRKWKAEKAVEVAESRLRQKTLMGVLATGGAGLGYVPKAQVSRAQGKERHQLLQEEVRAGVEEERVSRAVGLKRQGAWTRWESTLQRKVTWANIMQADFHRIRFLVQAVYDTLPSPANLHLWGKSETPACPLCSGRGTLEHLLSSCPRALADGRYRWRHDQVLRVVAEKIASAISTSKHHHAPRKAISFIKAGEKPQVRPHLTTGLLNTASDWQLQADLGKQLKFPQNIAKTSLRPDLIIISEASKQLIMLELTVPWEERIEEANERKRGKYQELVQECRGRGWKTLYEPIEVGCRGFAGRSLCKVLGWLGVAGATKKRAIQAVSEAAEKATRWLWIKRADLWVATGTQVGA

SEQ ID NO: 24205 - protein, 1031 aa, Menidia beryllina
MKCLDRDNEVQRSGLVPGETQEEPGQEATHRAQSLHVPQTLNPSRVIPQQRIKWPPASRRSEWQQFDEDVSNIIQATAKGDVDSRLTSITTVIVSYARERFGKVDKGKSKPTPYTMSRRATRIHHLRQELRTLKKQYKAATEEEKQPLAELKNILRKKLMTLRRAEWHRRRGRERARKRAAFIANPFGFTKRLLGDKRSGRLECSIEQVNQFLQDTVSDPLRDQELEPNKALISPDPPTTEFNLKEPSLKEVEEVVKAARSASAPGPSGTPYLVYKRCPGILRHLWRIMKVIWRRGKVANQWRHAEGVWIPKEENSQDISQFRSISLLSVEGKVFFSIVSRRLTEFLLKNSYIDPSVQKGGISTPGCLEHTGVVTQREAHENKGDLAVLWLDLANAYGSIPHKLVELALHLHHVPSKIKDLILDYYNDFRMRVTSGSETSDWHRIGKGIITGCTISVVLFSLAMNMVVKSAEVECRGPLTKSGVRQPPIRAYMDDLTVTTASVPGCRWILHGLEKLISWARMSFKPSKSRSMVLKKGKVMDKFRFSISGTVIPTITEQPVKSLGKLFDSTLKDSVAIQKASLELGAWLTKVDKSGLPGRFKAWIYQHSILPRILWPLLIYAVPMTAVESLERKISSFLRKWLGLPRSLTSAALYGTSNILQLPLSGLTEEFRVARTREALQYRDSKDGKVSAAGIEVRTGRKWKAREALELAESRLRQKALVGTVATGRAGLGYFPKTLISQSRGKERHHLIQEEVRAGVEEERVSRAVGLRQQGAWTRWESALQRRITWTNILQPDFQRVRFLVQAVYDALPSPANLHVWGKSETPSCPLCSGRGSLEHLLSGCPKALADGRYRWRHDQVLKAVAESVASAINSSNKQQAPKKAISFVRAGEKPRANQRATTGLLYTASDWQLQVDLGKQLRFPQHIATTTLRPDMIMTSQSSKHLIILELTVPWEENIEEANERKRAKYQELVEECRGAGWKTFYEPIEVGCRGFAGRSLCKVLSRLGIVGASKKRAIKSAATGTQVGA

SEQ ID NO: 24206 - protein, 1080 aa, Petrochromis famula
MERTTSKTCICGKLCKNQRGLKVHQARMKCLERESEVQRTGPEPGETQEEPGQEAPHRAQSLHAPDSSNPSSVVPQQRIKWPPASSRSEWQKFDEDVSNIIQAVAKRDADSRLKTMTTIIVSYASERFGLIEKCNNKTPYTMNRRAMKIHQLRQELRSLKKQFKNADAEEKQALEELHNILRKKLITLRRAEWHRRRGRERARKRAAFIADPFRFSKQLLGVKRSGQLECSAEEVNNFLHETLSDPLREQDLGPNEALINPAPPSVEFKLTEPSLKEVCEVIKAARSASSPGPSGVPYLVYKRCPELLRHLWKILKVIWRRGRVADQWRYAEGVWIPKEEDSKNINQFQSISLLSVEGKVFFSVVSRRLTEFLLRNNYIDPSVQKGGIPGVPGCLEHTGVVTHLIREAHENRGDLAVLWLDLTNAYGSIPHKLVEHALHLHHVPSKIKDLILDYYANFRLRVTSRAVTSDWHRLRKGIITGCTISVTLFALAMNMVVKAAEVECRGPLTRSGVRQPPIRAYMDDLTITTSSVPGCRWILQGLERLISWARMSFKPSKSRSMVLKKGKVTDKFRFSISGTIIPSITEQPVKSLGKLFDSSLKDSTAIQKANEELGAWLIKVDKSGLPGRFKAWIYQHSILPRILWPLLVYTVPITTVESLERKISGFLRKWLGLPRSLTSTALYGASNSVQLPFSGLTDEFKVACTREALQYRDSKDCKVASAGIEVRTGRKWKAEKAVEVAESRLRQKTLMGVLATGGAGLGYVPKAQVSRAQGKERHQLLQEEVRAGVEEERVSRAVGLKRQGAWTRWESTLQRKVTWANIMQADFHRIRFLVQAVYDTLPSPANLHLWGKSETPACPLCSGRGTLEHLLSSCPRALADGRYRWRHDQVLRVVAEKIASAISTSKHHHAPRKAISFIKAGEKPQVRPHLTTGLLNTASDWQLQADLGKQLKFPQNIAKTSLRPDLIIISEASKQLIMLELTVPWEERIEEANERKRGKYQELVQECRGRGWKTFYEPIEVGCRGFAGRSLCKVLGRLGVAGATKKRAIQAVSEAAEKATRWLWIKRADPWVATGTQVGA

SEQ ID NO: 24207 - protein, 1080 aa, Petrochromis famula
MERTTSKTCICGKLCKNQRGLKVHQARMKCLERESEVQRTGPEPGETQEEPGQEAPHRAQSLHAPDSSNPSSVVPQQRIKWPPASSRSEWQKFDEDVSNIIQAVAKRDADSRLKTMTTIIVSYASERFGLIEKCNNKTPYTMNRRAMKIHQLRQELRSLKKQFKNADAEEKQALEELHNILRKKLITLRRAEWHRRRGRERARKRAAFIADPFRFSKQLLGVKRSGQLECSAEEVNNFLHETLSDPLREQDLGPNEALINPAPPSVEFKLTEPSLKEVCEVIKAARSASSPGPSGVPYLVYKRCPELLRHLWKILKVIWRRGRVADQWRYAEGVWIPKEEDSKNINQFQSISLLSVEGKVFFSVVSRRLTEFLLRNNYIDPSVQKGGIPGVPGCLEHTGVVTHLIREAHENRGDLAVLWLDLTNAYGSIPHKLVEHALHLHHVPSKIKDLILDYYANFRLRVTSRAVTSDWHRLRKGIITGCTISVTLFALAMNMVVKAAEVECRGPLTRSGVRQPPIRAYMDDLTITTSSVPGCRWILQGLERLISWARMSFKPSKSRSMVLKKGKVTDKFRFSISGTIIPSITEQPVKSLGKLFDSSLKDSTAIQKANEELGAWLIKVDKSGLPGRFKAWIYQHSILPRILWPLLVYTVPITTVESLERKISGFLRKWLGLPRSLTSTALYGASNSVQLPFSGLTDEFKVACTREALQYRDSKDCKVASAGIEVRTGRKWKAEKAVEVAESRLRQKTLMGVLATGGAGLGYVPKAQVSRAQGKERHQLLQEEVRAGVEEERVSRAVGLKRQGAWTRWESTLQRKVTWANIMQADFHRIRFLVQAVYDTLPSPANLHLWGKSETPACPLCSGRGTLEHLLSSCPRALADGRYRWRHDQVLRVVAEKIASAISTSKHHHAPRKAISFIKAGEKPQVRPHLTTGLLNTASDWQLQADLGKQLKFPQNIAKTSLRPDMIIISEASKQLIMLELTVPWEERIEEANERKRGKYQELVQECRGRGWKTFYEPIEVGCRGFAGRSLCKVLGRLGVAGAAKKRAIQAVSEAAEKATRWLWIKRADPWVATGTQVGA

SEQ ID NO: 24208 - protein, 1080 aa, Pseudosimochromis marginatus
MERTTSKTCICGKLCKNQRGLKVHQARMKCLERESEVQRTGPEPGETQEEPGQEAPHRAQSLHAPDSSNPSSVVPQQRIKWPPASSQSEWQKFDEDVSNIIQAVAKRDADSRLKTMTTIIVSYASERFGLIEKCNNKTPYTMNRRAMKIHQLRQELRSLKKQFKNADAEEKQALEELHNILRKKLITLRRAEWHRRRGRERARKRAAFIADPFRFSKQLLGVKRSGQLECSAEEVNNFLHETMSDPLREQDLGPNKALINPAPPSVEFKLTEPSLKEVCEVIKAARSASSPGPSGVPYLVYKRCPELLRHLWKILKVIWRRGRVADQWRCAEGVWIPKEEDSKNINQFRSISLLSVEGKVFFSVVSRRLTEFLLRNNYIDPSVQKGGIPGVPGCLEHTGVVTHLIREAHENRGDLAVLWLDLTNAYGSIPHKLVEHALHLHHVPSKIKDLILDYYANFRLRVTSRAVTSDWHRLRKGIITGCTISVTLFALAMNMVVKAAEVECRGPLTRSGVRQPPIRAYMDDLTITTSSVPGCRWILQGLERLISWARMSFKPSKSRSMVLKKGKVTDKFRFSISGTIIPSITEQPVKSLGKLFDSSLKDSTAIQKANEELGAWLIKVDKSGLPGRFKAWIYQHSILPRILWPLLVYTVPITTVESLERKISGFLRKWLGLPRSLTSAALYGTSNSVQLPFSGLTEEFKVARTREALQYRDSKDCKVASAGIEVRTGRKWKAEKAVEVAESRLRQKTLMGVLATGGAGLGYVPKAQVSRAQGKERHQLLQEEVRAGVEEERVSRAVGLKRQGAWTRWESTLQRKVTWANIMQADFHRIRFLVQAVYDTLPSPANLHLWGKSETPACPLCSGRGTLEHLLSSCPRALADGRYRWRHDQVLRVVAEKIASAISTSKHHQALRKAISFIKAGEKAQVRPHLTTGLLNTASDWQLQADLGKQLKFPQNIVKTSLRPDMIIISEASKQLIMLELTVPWEERIEEANERKRGKYQELVQECRGRGWKTFYEPIEVGCRGFAGRSLCKVLGRLGVAGAAKKRAIQAVSEAAEKATRWLWIKRADPWVATGTQVGA

SEQ ID NO: 24209 - protein, 1080 aa, Petrochromis famula
MERTTSKTCICGKLCKNQRGLKVHQARMKCLERESEVQRTGPEPGETQEEPGQEAPHRAQSLHAPDSSNPSSVVPQQRIKWPPASSRSEWQKFDEDVSNIIQAVAKRDADSRLKTMTTIIVSYASERFGLIEKCNNKTPYTMNRRAMKIHQLRQELRSLKKQFKNADAEEKQALEELHNILRKKLITLRRAEWHRRRGRERARKRAAFIADPFRFSKQLLGVKRSGQLECSAEEVNNFLHETLSDPLREQDLGPNEALINPAPPSVEFKLTEPSLKEVCEVIKAARSASSPGPSGVPYLVYKRCPELLRHLWKILKVIWRRGRVADQWRYAEGVWIPKEEDSKNINQFQSISLLSVEGKVFFSVVSRRLTEFLLRNNYIDPSVQKGGIPGVPGCLEHTGVVTHLIREAHENRGDLAVLWLDLTNAYGSIPHKLVEHALHLHHVPSKIKDLILDYYANFRLRVTSRAVTSDWHRLRKGIITGCTISVTLFALAMNMVVKAAEVECRGPLTRSGVRQPPIRAYMDDLTITTSSVPGCRWILQGLERLISWARMSFKPSKSRSMVLKKGKVTDKFRFSISGTIIPSITEQPVKSLGKLFDSSLKDSTAIQKANEELGAWLIKVDKSGLPGRFKAWIYQHSILPRILWPLLVYTVPITTVESLERKISGFLRKWLGLPRSLTSTALYGASNSVQLPFSGLTDEFKVACTREALQYRDSKDCKVASAGIEVRTGRKWKAEKAVEVAESRLRQKTLMGVLATGGAGLGYVPKAQVSRAQGKERHQLLQEEVRAGVEEERVSRAVGLKRQGAWTRWESTLQRKVTWANIMQADFHRIRFLVQAVYDTLPSPANLHLWGKSETPACPLCSGRGTLEHLLSSCPRALADGRYRWRHDQVLRVVAEKIASAISTSKHHHAPRKAISFIKAGEKPQVRPHLTTGLLNTASDWQLQADLGKQLKFPQNIAKTSLRPDMIIISEASKQLIMLELTVPWEERIEEANERKRGKYQELVQECRGRGWKTFYESIEVGCRGFAGRSLCKVLGRLGVAGAAKKRAIQAVSEAAEKATRWLWIKRADPWVATGTQVGA

SEQ ID NO: 24210 - protein, 991 aa, Astatotilapia calliptera
MKCLERESEVQRTGPEPGETQEEPGQEAPHRAQSLHALDSSNPSSVVPQQRIKWPPASSRSEWQKFDEDVSNIIQAVAKRDADSRLKTMTTIIVSYASERFGLIEKCNNKTPYTMNRRAMKIHQLRQELRSLKKQFKNADAEEKQALEELHNILRKKLITLRRAEWHRRRGRERARKRAAFIADPFRFSKQLLGVKRSGQLECSAEEVNNFLHETMSDPLREQDLGPNKALINPAPPSAEFKLTEPSLKEVCEVIKAARSASSPGPSGVPYLVYKRCPELLRHLWKILKVIWRRGRVADQWRCAEGVWIPKEEDSKNINQFRSISLLSVEGKVFFSVVSRRLTEFLLRNNYIDPSVQKGGIPGVPGCLEHTGVVTHLIREAHENRGDLAVLWLDLTNAYGSIPHKLVEHALHLHHVPSKIKDLILDYYANFRLRVTSRAVTSDWHRLGKGIITGCTISVTLFALAMNMVVKAAEVECRGPLTRSGVRQPPIRAYMDDLTITTSSVPGCRWILQGLERLISWARMSFKPSKSRSMVLKKGKVTDKFRFSISGTIIPSITEQPVKSLGKLFDSSLKDSTAIQKANEELGAWLIKVDKSGLPGRFKAWIYQHSILPRILWPLLVYTVPITTVESLERKISGFLRKWLGLPRSLTSAALYGTSNSVQLPFSGLTEEFKVARTREALQYRDSKDCKVALAGIEVRTGRKWKAEKAVEVAESRLRQKTLMGVLATGGAGLGYVPKAQVSRAQGKERRQLLQEEVRAGVEEERVSRAVGLKRQGAWTRWESTLQRKVTWANIMQADFHRIRFLVQAVYDTLPSPANLHLWGKSETPACPLCSGRGTLEHLLSSCPRALADGRYRWRHDQVLRVVAEKIASAISTSKHHHAPRKAISFIKAGEKPQVRPHLTTGLLNTASDWQLQADLGKQLKFPQNIAKTSLRPDMIIISEASKQLIMLELTVPWEERIEEANERKRGKYQELVQECRGRGWKTFYEP

SEQ ID NO: 24211 - protein, 1080 aa, Pseudosimochromis marginatus
MERTTSKTCICGKLCKNQRGLKVHQARMKCLERESEVQRTGPEPGETQEEPGQEAPHRAQSLHAPDSSNPSSVVPQQRIKWPPASSQSEWQKFDEDVSNIIQAVAKRDADSRLKTMTTIIVSYASERFGLIEKCNNKTPYTMNRRAMKIHQLRQELRSLKKQFKNADAEEKQALEELHNILRKKLITLRRAEWHRRRGRERARKRAAFIADPFRFSKQLLGVKRSGQLECSAEEVNNFLHETMSDPLREQDLGPNKALINPAPPSVEFKLTEPSLKEVCEVIKAARSASSPGPSGVPYLVYKRCPELLRHLWKILKVIWRRGRVADQWRCAEGVWIPKEEDSKNINQFRSISLLSVEGKVFFSVVSRRLTEFLLRNNYIDPSVQKGGIPGVPGCLEHTGVVTHLIREAHENRGDLAVLWLDLTNAYGSIPHKLVEHALHLHHVPSKIKDLILDYYANFRLRVTSRAVTSDWHRLRKGIITGCTISVTLFALAMNMVVKAAEVECRGPLTRSGVRQPPIRAYMDDLTITTSSVPGCRWILQGLERLISWARMSFKPSKSRSMVLKKGKVTDKFRFSISGTIIPSITEQPVKSLGKLFDSSLKDSTAIQKANEELGAWLIKVDKSGLPGRFKAWIYQHSILPRILWPLLVYTVPITTVESLERKISGFLRKWLGLPRSLTSAALYGTSNSVQLPFSGLTEEFKVARTREALQYRDSKDCKVASAGIEVRTGRKWKAEKAVEVAESRLRQKTLMGVLATGGAGLGYVPKAQVSRAQGKERHQLLQEEVRAGVEEERVSRAVGLKRQGAWTRWESTLQRKVTWANIMQADFHRIRFLVQAVYDTLPSPANLHLWGKSETPACPLCSGRGTLEHLLSSCPRALADGRYRWRHDQVLRVVAEKIASAISTSKHHQALRKAISFIKAGEKAQVRPHLTTGLLNTASDWQLQADLGKQRKFPQNIAKTSLRPDMIIISEASKQLIMLELTVPWEERIEEANERKRGKYQELVQECRGRGWKTFYESIEVGCRGFAGRSLCKVLGRLGVAGAAKKRAIQAVSEAAEKATRWLWIKRTDPWVATGTQVGA

SEQ ID NO: 24212 - protein, 1080 aa, Petrochromis famula
MERTTSKTCICGKLCKNQRGLKVHQARMKCLERESEVQRTGPEPGETQEEPGQEAPHRAQSLHAPDSSNPSSVVPQQRIKWPPASSRSEWQKFDEDVSNIIQAVAKRDADSRLKTMTTIIVSYASERFGLIEKCNNKTPYTMNRRAMKIHQLRQELRSLKKQFKNADAEEKQALEELHNILRKKLITLRRAEWHRRRGRERARKRAAFIADPFRFSKQLLGVKRSGQLECSAEEVNNFLHETLSDPLREQDLGPNEALINPAPPSVEFKLTEPSLKEVCEVIKAARSASSPGPSGVPYLVYKRCPELLRHLWKILKVIWRRGRVADQWRYAEGVWIPKEEDSKNINQFQSISLLSVEGKVFFSVVSRRLTEFLLRNNYIDPSVQKGGIPGVPGCLEHTGVVTHLIREAHENRGDLAVLWLDLTNAYGSIPHKLVEHALHLHHVPSKIKDLILDYYANFRLRVTSRAVTSDWHRLRKGIITGCTISVTLFALAMNMVVKAAEVECRGPLTRSGVRQPPIRAYMDDLTITTSSVPGCRWILQGLERLISWARMSFKPSKSRSMVLKKGKVTDKFRFSISGTIIPSITEQPVKSLGKLFDSSLKDSTAIQKANEELGAWLIKVDKSGLPGRFKAWIYQHSILPRILWPLLVYTVPITTVESLERKISGFLRKWLGLPRSLTSTALYGASNSVQLPFSGLTDEFKVACTREALQYRDSKDCKVASAGIEVRTGRKWKAEKAVEVAESRLRQKTLMGVLATGGAGLGYVPKAQVSRAQGKERHQLLQEEVRAGVEEERVSRAVGLKRQGAWTRWESTLQRKVTWANIMQADFHRIRFLVQAVYDTLPSPANLHLWGKSETPACPLCSGRGTLEHLLSSCPRALADGRYRWRHDQVLRVVAEKIASAISTSKHHHAPRKAISFIKAGEKPQVRPHLTTGLLNTASDWQLQADLGKQLKFPQNIAKTSLRPDLIIISEASKQLIMLELTVPWEERIEEANERKRGKYQELVQECRGRGWKTFYEPIEVGCRGFAGRSLCKVLGRLGVAGAAKKRAIQAVSEAAEKATRWLWIKRADPWVATGTQVGA

SEQ ID NO: 24213 - protein, 1049 aa, Oxygymnocypris stewartii
MKCLERESEVQRTGPEPGETQEEPGQEATHRAQSLHVPEPPNPSRVVQQRIKWPPASKRSEWLQFEEDVSNILQATAKGDADSRLQTITTIIFSYALERFGQVEKGKTKSTSYTMNRRATKIHHLRQELCTLKKQYKKATDEEKRPLAELQNILRKKLMILRRAEWHRRRGRERARKRAAFIANPFGFIKQLLGDKRSGRLECSREEVNRFLQDTVSDSLREHDLEPNKALISPAPPTTEFNLREPSLKEVEEIIKAARSASTPGPSGVPYLVYKRCPELLRHLWKILKVIWRRGRVADQWRFAEGVWIPKEENSKNINQFRTISLLSVEGKVFFSIVSRRLTEFLLKNNYIDPSVQKGGIPGAPGCLEHTGVVTQLIREAHENRGDLVVLWLDLANAYGSIPHKLVELALHLHHVPCKIKDLILDYYNNFRMRVTSGSETSDWHRIGKGIITGCTISVILFALAMNMVVKSAEVECRGPLTKSGIRQPPIRAYMDDLTITTTSVPGSRWILQGLERVITWARMSFKPSKSRSMVLKKGKVVDKFRFSISGTVIPTITEQPVKSLGKLFDSSLKDSAAIQNSNKELGAWLTKVDKSGLPGRFKAWIYQHSILPRVLWPMLIYAVPMTTVESLERKISGFLRKWLGLPRSLTSAALYGTSNILQLPFSGLAEEFKVVRTREALQYRDSRDCKVSSAGIEVRTGRKWKAEKAVEMAESRLRQKALVGNVSTGRAGLGYFPKTLVSQARGKEIHHLLQEEVRAGVEEERVSRAMGLRQQGAWTRWESTLQRRITWANILQADFHRVRFLVQAVYDTLPSPANLHVWGKSETPSCLLCSGRGSLEHLLSSCPKALADGRYRWRHDQVLKAIAESFDSAISTSKNHHVSKKAISFIKAGEKPRARPHLTTGLLTRASDWQLQVDLGKQLRFPQHIATTSLRPDMIVTSEVLKQLIMLELTVPWEERIEEANERKRAKYQELVEECRERGWRTFYEPIEVGCRGFAGRSLCKVLSRLGVTGVAKKRAIQSASEAAEKATRWLWIKRADPWTATGT

SEQ ID NO: 24214 - protein, 1112 aa, Maylandia zebra
MESPKERYPQETPRGGEDEVSNRTDLRLTTNAMERTTSKTCICGKLCKNQRGLKVHQARMKCLERESEVQRTGPEPGETQEEPGQEAPHRAQSLHALDSSNPSSVVPQQRIKWPPASSRSEWQKFDEDVSNIIQAVAKRDADSRLKTMTTIIVSYASERFGLIEKCNNKTPYTMNRRAMKIHQLRQELRSLKKQFKNADAEEKQALEELHNILRKKLITLRRAEWHRRRGRERARKRAAFIADPFRFSKQLLGVKRSGQLECSAEEVNNFLHETMSDPLREQDLGPNKALINPAPPSAEFKLTEPSLKEVCEVIKAARSASSPGPSGVPYLVYKRCPELLRHLWKILKVIWRRGRVADQWRCAEGVWIPKEEDSKNINQFRSISLLSVEGKVFFSVVSRRLTEFLLRNNYIDPSVQKGGIPGVPGCLEHTGVVTHLIREAHENRGDLAVLWLDLTNAYGSIPHKLVEHALHLHHVPSKIKDLILDYYANFRLRVTSRAVTSDWHRLGKGIITGCTISVTLFALAMNMVVKAAEVECRGPLTRSGVRQPPIRAYMDDLTITTSSVPGCRWILQGLERLISWARMSFKPSKSRSMVLKKGKVTDKFRFSISGTIIPSITEQPVKSLGKLFDSSLKDSTAIQKANEELGAWLIKVDKSGLPGRFKAWIYQHSILPRILWPLLVYTVPITTVESLERKISGFLRKWLGLPRSLTSAALYGTSNSVQLPFSGLTEEFKVARTREALQYRDSKDCKVALAGIEVRTGRKWKAEKAVEVAESRLRQKTLMGVLATGGAGLGYVPKAQVSRAQGKERRQLLQEEVRAGVEEERVSRAVGLKRQGAWTRWESTLQRKVTWANIMQADFHRIRFLVQAVYDTLPSPANLHLWGKSETPACPLCSGRGTLEHLLSSCPRALADGRYRWRHDQVLRVVAEKIASAISTSKHHHAPRKAISFIKAGEKPQVRPHLTTGLLNTASDWQLQADLGKQLKFPQNIAKTSLRPDMIIISEASKQLIMLELTVPWEERIEEANERKRGKYQELVQECRGRGWKTFYEPIEVGCRGFAGRSLCKALGRLGVAGAAKKRAIQAVSEAAEKATRWLWIKRADPWVATGTQVGA

SEQ ID NO: 24215 - protein, 1076 aa, Pseudosimochromis marginatus
MERTTSKTCICGKLCKNQRGLKVHQARMKCLERESEVQRTGPEPGETQEEPGQEAPHRAQSLHAPDSSNPSSVVPQQRIKWPPASSQSEWQKFDEDVSNIIQAVAKRDADSRLKTMTTIIVSYASERFGLIEKCNNKTPYTMNRRAMKIHQLRQELRSLKKQFKNADAEEKQALEELHNILRKKLITLRRAEWHRRRGRERARKRAAFIADPFRFSKQLLGVKRSGQLECSAEEVNNFLHETMSDPLREQDLGPNKALINPAPPSVEFKLTEPSLKEVCEVIKAARSASSPGPSGVPYLVYKRCPELLRHLWKILKVIWRRGRVADQWRCAEGVWIPKEEDSKNINQFRSISLLSVEGKVFFSVVSRRLTEFLLRNNYIDPSVQKGGIPGVPGCLEHTGVVTHLIREAHENRGDLAVLWLDLTNAYGSIPHKLVEHALHLHHVPSKIKDLILDYYANFRLRVTSRAVTSDWHRLRKGIITGCTISVTLFALAMNMVVKAAEVECRGPLTRSGVRQPPIRAYMDDLTITTSSVPGCRWILQGLERLISWARMSFKPSKSRSMVLKKGKVTDKFRFSISGTIIPSITEQPVKSLGKLFDSSLKDSTAIQKANEELGAWLIKVDKSGLPGRFKAWIYQHSILPRILWPLLVYTVPITTVESLERKISGFLRKWLGLPRSLTSAALYGTSNSVQLPFSGLTEEFKVARTREALQYRDSKDCKVASAGIEVRTGRKWKAEKAVEVAESRLRQKTLMGVLATGGAGLGYVPKAQVSRAQGKERHQLLQEEVRAGVEEERVSRAVGLKRQGAWTRWESTLQRKVTWANIMQADFHRIRFLVQAVYDTLPSPANLHLWGKSETPACPLCSGRGTLEHLLSSCPRALADGRYRWRHDQVLRVVAEKIASAISTSKHHQALRKAISFIKAGEKAQVRPHLTTGLLNTASDWQLQADLGKQLKFPQNIVKTSLRPDLIIISEASKQLIMLELTVPWEERIEEANEKKRGKYQELVQECRGRGWKTFYEPIEVGCRGFAGRSLCKVLGRLGVAGAAKKRAIQAVSEAAEKATRWLWIKRADPWVATGT

SEQ ID NO: 24216 - protein, 1231 aa, Maylandia zebra
MTSLDTDYRFPFGDIEEEDFDYEKDCQGGYFATHAEKTNFKTFNYAEHNMNDPESSIDPDTHFYNNTNNTCEYYTDDQFNVNIKMANALSVIHFNSRSLYKKFSKITECLSKLKKFNIIAISETWLDNEKVSEMGLEGYELFTMNRLTTNAMERTTSKTCICGKLCKNQRGLKVHQARMKCLERQSEVQRTGPEPGETQEEPGQEAPHRAQSLHAQDSSNPSSVVPQQRIKWPPASSQSEWQKFDEDVFNIIQAVAKRGADSRLKTMTTIIVSYASERFGLIEKCNNKTPYTMNRRAMKIHQLRQELRSLKKQFKNADAEEKQALEELHNILRKKLITLRRAEWHRRRGRERARKRAAFIADPFRFSKQLLGVKRSGQLECSAEEVNNFLHETTSDPLREQDLGPNKALINPVPPSVEFKLTEPSLKEVCEVIKAARSASSPGPSGVPYLVYKRCPELLRHLWKILKVIWRRGRVADQWRCAEGVWIPKEEDSKNINQFRSISLLSVEGKVFFSVVSRRLTEFLLRNNYIDPSVQKGGIPGVPGCLEHTGVVTHLIREAHENRGDLAVLWLDLTNAYGSIPHKLVEHALHLHHVPSKIKDLILDYYANFRLRVTSRAVTSDWHRLQKGIITGCTISVTLFALAMNMVVKAAEVECRGPLTRSGVRQPPIRAYMDDLTITTSSVPGCRWILQGLERLISWARMSFKPSKSRSMVLKKGKVTDKFRFSISGTIIPSITEQPVKSLGKLFDSSLKDSTAIQKANEELGAWLIKVDKSGLPGRFKAWIYQHSILPRILWPLLVYTVPITTVESLERKISGFLRKWLGLPRSLTSAALYGTSNSVQLPFSGLTEEFKVARTREALQYRDSKDCKVASAGIEVRTGRKWKAEKAVEVAESRLRQKTLMGVLATGGAGLGYIPKAQVSRAQGKERHQLLQEEVRAGVEEERVSRAVGLKRQGAWTRWESTLQRKVTWANIMQADFHRIRFLVQAVYDTLPSPANLHLWGKSETPACPLCSGRGTLEHLLSSCPRALADGRYRWRHDQVLRVVAEKIASAISISKHHHAPRKAISFIKAGEKPQGRPHLTTGLLNTASDWQLQADLGKQLKFPQNIAETSLRPDLIIISEASKQLIMLELTVPWEERIEEANERKRGKYQELVQECRGRGWKTFYEPIEVGCRGFAGRSLCKVLGRLGVAGAAKKRAIQAVSEAAEKATRWLWIKRADPWVATGTQVGA

SEQ ID NO: 24217 - protein, 894 aa, Danio rerio
MILRRAEWHRRRERERARKRAAFITNPFGFTKQLLGDKRSGRLECSIEEVNRFIEETVSDPLREQELEPNKALISPTPPAREFSLRGPSLKEVKEIIKASRSASTPGPSGIPYLVYKRCPGLLLHLWKILKVIWQRGRVAEQWRCAEGVWIPKEENSKNINQFRIISLLSVEGKVFFSIVSRRLTEFLLENNYIDPSVQKGGIPGAPGCLEHTGVVTQLIREAHENRGDLVVLWLDLANAYGSIPHKLVELDLHRHHVPSKIKDLILDYYNNFKMRVTSGSETSSWHRIGKGIITGCTISVILFALAMNMVVKSAEVECRGPLTKSGVRQPPIRAYMDDLTITTTTVPGSRWILQGLERLIAWAIMSFKPSKSRSMVLKKGKVVDKFHFSISGSVIPTITEQPVKSLGKLFDSSLKDSAAIQKSKKELGAWLAKVDKSGLPGRFKAWIYQHSILPRVLWPLLIYAVPMSTVESLERKISGFLRKWLGLPCSLTSAALYGSSNTLQLPFSGLTEEFMVVRTREALQYRDSRDGKVSSACIEVRTGRKWNAGKAVEVAESRLQQKALVGTVATGRAGLGYFPKTLVSQVKGKERHHLLQGEVRASVEEERVSRVVGLRQQGAWTRWNTLQRRITWANILQADFQRVRFLVQAVYDVLPSPSNLHVWGKNETPSCLLCSGRGSLEHLLSSCPKALADGRYRWRHDQVLKAIAASLASAINTSKNHRAPRKAVHFIKAGEKPRALPQLTTGFLHKASDWQLEVDLGKQLRFPHHIAATRLRPDIIAISEASRQLIILELTVPWEEGIEEANERKRAKYQELVEECRERGWRTYYEPIEIGCRGFAGRSLCKVLSRLGITGVAKKRAIRSASEATEKATRWLWIKRADPWTAVGTQVGT

SEQ ID NO: 24218 - protein, 1053 aa, Limnothrissa miodon
MKCGDQRNTLQRTGPSPGGTQEEPGQEAPHSAQPLQAVEPLYPCRSFHQRQIKWPSANSQAAWTQFDTDVSQILEATAKGEVDRRLETMTSIIVSYAVERFGLRESKNPKSKYILNRRATQIHKLRQELRSLKKQYKVAGEEEKQPLVELRSILRKKLMTLRHAEGHRRRRKERARKRAAFISNPFTFTKKLLGDKRSGNLMCSVAEADTYLHNTLSDPVRDQDLEPQRTLISPQAPAVEFVMREPSWAEIQEMAKGARTASAPGPSGVPYTVYKRCPQLLRHLWKLLRVIWRRGQVAGQWRCAEGVWIPKEEDSKDISQFRAISLLSVEGKIFFSILSRRLTEFLLKNSYIDTSVQKGGIPGVPGCLEHTGVVTQLIREAREGKGDLTVLWLDLATAYGSIPHKLVEVALLRHHVPTKVKDLILDYYSNFRLRVTAGSGTSDWHRLEKGIITGCTISVILFALAMNMIVKSAEVECRGPLTKSGVRQPPIRAFMDDLTVTTTSVPGCRWILQGLEKLVTWARMSFKPAKSRSLVLKKGKVTDRFRFSLAGTTIPSISEQPVKSLGKLFDSSLKDTASTQRTSKELGGWLRCVDRSGLPGRFKAWIYQHSILPRILWPLLVYAVPMTTVEAMERKISSYLRRWLGLPRSLSSAALYGSSNILQLPFSGLTEEFMVTRTREALQYRESRDGKVASAGIQVQTGRKWRAHEALEVAESRLRQKVLVGSIASGHAGIGYFPSIRVDKAQGKQRQHLIQEEVRAGVEEERASRMVGMGKQGAWTKWENVLQRKITWPNIWRADSLNIRFLVQAVYDVLPTPSNLHVWGKAETPSCPQCPGRGSLEHLLSSCPKALGEGRYRWRHDQVLKAVAESIAMAINTTKGHSKPKTIRFHRAGEKPTIQAGDRIGLLTTATDWQLEVDLGKQLKIPSRIISTRLRPDMIIVSDSTKQLIILELTVPWEERMEEANERKRAKYQELAEECRSQGWKTYCEPLEVGCRGFAGRSLCKVLTMLGLTSEAKRKAIRSATEAAEKATRWLWIKRADPWTNAAGTQAGV

SEQ ID NO: 24219 - protein, 1039 aa, Myripristis murdjan
MDTRCICGKVCKNPRGLKIHLARMKCRERENTLQRTGFDPGETQEEPGQDSPHRAQSLHAVESSYPCRIIQQKRIKWPSANNQAVWSQFDSDVCQILETTAKGEVDRRLETMATIIVSYAAERFGHIESRNTKPNYMMNRRATQIHKLRQELRSLKKQHKVASEEEKQPLAELRNILRKKLMTLRRAEWHRRRGKERARKRTAFISNPFAFTKRLLGDKRSGNLMCSTEDINTFLHNTLSDPERDQELRPQSALISPQPPTVVFAMREPSWSEVQEVVKGARTASAPGPSGVPYTVYKRCPQLLRHLWKILRVIWRRGKVADQWRCAEGVWIPKEENSKNISQFRTISLLSVEGKIFFSILSRRLTEFLLKNNYIDTSVQKGGIPGVPGCLEHTGVVTQLIREAREGKGDLTVLWLDLANAYGSIPHKLVELALQRHHVPSKVTDLILDYYHDFRLRVTAGSGTSDWHRLEKGIITGCTISVILFALAMNMLVKSAEVECRGPLMKSGVRQPPVRAFMDDLTVTTTSVPGSRWILQGLEKLITWARMSFKPVKSRSLVLKRGKVVDRFRFSLAGVTIPSITEQPVKSLGKYFDCSLKDAASIKETSKDLEAWLSRVDKSGLPGRFKAWIYQHSILPRILWPLLVYTVPITTVEAMERKISSYLRRWLGLPRSLSSSALYGTSNILQLPISGLAEEFMVSRTREVLQYRESRDPKVALAGIQVRTGRKWRADKALEVAESRLKQKALVGSVATGRAGIGYFPTTRVDKAKGKERQHLVQEEVRAGVEEVRASRMVGMGQQGAWSKWENVLQRKITWANIWKADFHRIRFCVQAVYDVLPSPANLHAWGKIDTPSCPQCSGRGSLEHLLSSCPKALGDGRYRWRHDQVLRAVADSIATAINNIKGHDKPKTITFHRAGEKPITQPRAKAGLLTSATDWQLEVDLGKQLKFPARITPTQLRPDMIIVSDSTKQLIILELTVPWEERMHVANERKRAKYQELVEECRRQGWRTRCEPLEVGCRGFAGQSLCKVFMMLGLTGEA

SEQ ID NO: 24220 - protein, 1053 aa, Limnothrissa miodon
MKCGDQRNTLQRTGPSPGETQEEPGQEAPHSAQPLQAVEPLYPCRSFHQRQIKWPSANSQAAWAQFDTDVSQILEATAKGEVDRRLETMTSIIVSYAVERFGLRESKNPKSKYILNRRATQIHKLRQELRSLKKQYKVAGEEEKQPLVELRSILRKKLMTLRRAEGHRRRRKERARKRAAFISNPFTFTKKLLGDKRSGNLMCSVAEADTYLHNTLSDPVRDQDLEPQRTLISPQAPAVEFVMREPSWAEIQEVAKGARTASAPGPSGVPYTVYKRCPQLLRHLWKLLRVIWRRGQVAGQWRCAEGVWIPKEEDSKDISQFRTISLLSVEGKIFFSILSRRLTEFLLKNSYIDTSVQKGGIPGVPGCLEHTGVVTQLIREAREGKGDLTVLWLDLANAYGSIPHKLVEVALLRHHVPTKVKDLILDYYSNFRLRVTAGSGTSDWHRLEKGIITGCTISVILFALAMNMIVKSAEVECRGPLTKSGVRQPPIRAFMDDLTVTTTSVPGCRWILQGLEKLVTWARMSFKPAKSRSLVLKKGKVTDRFRFSLVGTTIPSISEQPVKSLGKLFDSSLKDTASTQRTSKELGGWLRCVDRSGLPGRFKAWIYQHSILPRILWPLLVYAVPMTTVEAMERKISSYLRRWLGLPRSLSSAALYGSSNILQLPFSGLTEEFMVTRTREALQYRESRDGKVASAGIQVQTGRKWRAHEALEVAESRLRQKVLVGSIASGHAGIGYFPSIRVDKAQGKQRQHLIQEEVRAGVEEERASRMVGMGQQGAWTKWENVLQRKITWPNIWRADSLNIRFLVQAVYDVLPTPSNLHVWGKAETPSCPQCPGRGSLEHLLSSCPKALGEGRYRWRHDQVLKAVAESIAMAINTTKGHSKPKTIRFHRAGEKPTIQAGDRIGLLTTATDWQLEVDLGKQLKIPSRIISTRLRPDMIIVSDSTKQLIILELTVPWEERMEEANERKRAKYQELAEECRSQGWKTYCEPLEVGCRGFAGRSLCKVLTMLGLTSEAKRKAIRSATEAAEKATRWLWIKRADPWTNAAGTQAGV

SEQ ID NO: 24221 - protein, 981 aa, Labeo catla
MLEATAKGEVDRRLETMTSIIVSYAVERFGLRESKNPKTKYILNRRATQIHKLRQELRGLKKQYKVVGEEEKQPLVELRNILRKKLMTLQRAEGHRRRRKERARKRAAFISNPFTFTKKLLGDKRSGNLMCSVAEADTFLHNTLSDPERDQDLEPQRTLISPQAPAVEFVMREPSWAEIQEVVKGARTASAPGPSGVPYIVYKRCPQLLRHLWKLLRVIWRRGQVAGQWRCAEGVWIPKEEDSKDISQFRTISLLSVKGKIFFSILSRRLTEFLLKNSYIDTSVQKRGIPGVPGCLEHTGVVTQLIREAREGRGNLTVLWLDLANAYGSIPHKLVEVALLRHHVPTKVKDLILDYYSNFRLRVTAGSGTSDWHRLEKGIITGCTISVILFALAMNMIVKSAEVECRGPLTKSGVRQPPIRAFMDDLTVTTTSVPGGRWILLGLEKLITWARMSFKPAKSRSLVLKKGKVTDRYRFSLAGTTIPSITEQPVKSLGKLFDSSLKDTASIQRTSKELGGWLRCVDRSGLPGRFKAWIYQHSILPRILWPLLVYAVPMTTVEDMERKISSYLRRWLGLPRSLSSAALYGSSNILQLPFSGLTEEFMVTRTREALQYRESRDGKVASAGIQVKTGRKWRADEALEVAESRLRQKVLVGSIASGRAGIGYFPSTRVDKAQGKQRQRLIQEEVRAGVEEERASRMVGMGQQGAWTKWENVLQRKITWPNIWRADSLNIRFLVQAVYDVLPTPSNLHVWGKAETPSCTQCPGRGSLEHLLSSCPKALGEGRYRWRHDQVLKAVAESIARAINTTKGHSKPKTIRFHRAGEKPTIPAGGRLGLLTTATDWKLEVDLGKQLKIPSRITSTRLRPDMIIVSDSTKQLIILELTVPWEERMEEANERKRAKYQELVEECRSQGWKTYCEPLEVGCRGFAGRSLCKVLTMLGLTSEAKRKAIRSATEAAERATRWLWIKRADPWMNAAGTQAGV

SEQ ID NO: 24222 - protein, 1040 aa, Hirundichthys speculiger
MKCREQESILQRTGSNPGETQEEPGQESPHRAQSLQAVEPSNPCNIVRQKRIKWPPAKSQSVWSQFDTETTSTGGVDRRLETMTAIIVSYAAERFGHIERSNIKPSYIMNRRATQIHKLRQELRSLKQQYKVASEVEKQPLVELRNILRKKLMTLRRAEWHRRRRKERARKRAAFISNPFTFSKKLLGDKRSGSLVCSAEEVNSFLHNTLRDPERDLELQPQRALISPQLPSVAFALTEPTWAEVQEMVKGARTASAPGPSGVPYTVYKCCPQLLRYLWKILRVIWRRGKVANQWRCAEGVWIPKEEDSKDISQFRTISLLSVEGKIFFSILSRRLTEFLLKNSYIDTSVQKGGIPGVPGCLEHTGVVTQLLREAREGKGDLTVLWLDLANAFGSIPHKLVELALHRHHVPSKVSDLILDYYSNFRLRVAAGTGTSDWHRLEKGIITGCTISVILFALAMNMIVKSAEVECRGPLTTSGVRHPPIRAFMDDLTVTTTSVPGSRWILQGLEKLINWARMSFKPAKSRSLVLKRGKVVDRFRFSLAGATIPSISEKPVKSLGKYFDCSLKDSASIQRTSKELEDWLSRVDKTGLPGRFKAWIYQHSILPRILWPLLVYTVPITTVEGMERKISSYLRRWLGLPRSLSSSALYGTSNILQLPISGLTEEFMVSRTREALQYRESRDPKVASAGIQVQTGRKWNAGKALDVAESRLRQKALVGSIATGRAGIGFFPSTRVDNAQGKARQHLVQEEVRASRMVGMGQQGAWTKWENVLQRKITWSNIWKADFQRIRFLVQAVYDVLPSPANLHVWGKTETPSCPRCSGRGSLEHLLSSCPKALGDGRYRWRHDQVLRAVADSIATAINTSKGHHRPKTMMFHRAGEKPTIPPRAKSGLLTSANDWQLEVDLGRQLKFPPRITSTRLRPDMIIVSDSTKQLIILELTVPWEEHMDEANERKRAKYQELVDECRRQGWKTICEPLEVGCRGFAGRSLCRVFTRLGLVGEAKRKAIRSATEAAERATRWLWIKRADSWANAAGTQAGD

SEQ ID NO: 24223 - protein, 1055 aa, Clupea harengus
MARMKCRERELEEQPTGTSPGETQEEPGQESPHRAQNLHASQPPRLCTASQKGKIRWPPANKQTEWLQFDEDVGNIMQTISKGDIDSRLHSMTSIIISYAAERFGYDEKGKPRAPYTKNRRAAQIQQLRHELRTLKKQHKSAREDQKEPLAELRNILRKKLMTLRRAEGHRRRRKERARKRTAFLSNPFGFVKKLLGDKRSGHLSCSQEEVDQFLSNTLSDPQRDQALGPQKALIEPPPPKVDFNPREPSLKEVQEVVKRARSASAPGPSSVPYIVYKRCPALLSHLWKILRVIWRRGRVANQWRCAEGVWIPKEENSKTIEQFRTISLLSVEGKIFFSILSRRLTEFILQNEYVDTSVQKGGIPGVPGCLEHTGVVTQLIREARESKGDLAVLWLDLTNAYGSIPHSLVEIALQKHHVPSNIRVLILDYYNNFRMRVTSGSTTSNWHRLEKGIITGCTISVTLFTLAMNMVAKSAEVECRGPKTKSGTRQPPIRAFMDDLTITTSSVPGTRWILQGLEKLIAWARMSFKPSKSRSLVLKKGRVVDRFRFTLAGDTIPSISEQPVKSLGKVFDASLKDANSIKKTINDLEEWLRKVDKSGLPGRFRAWIYQHAVLPRILWPLLVYEVPMTAVESMERRISSHLRRWLGLPRSLSSAALYGSSNILQLPFSGLKEEFMVSRTREALLYRDSKDPKVSAAGIEVRTGRKWKAGEALEVAESRLRQRELVGNVARGRAGLGYFPSIQVRKAIGKDRRLLLQEEVRAGVEEERASRMVSLRQQGAWTKWESVQQRRVTWDNILRADYYRVRFLIQTVYDGLPSPANLHVWGKIETPSCGLCSGRGSLEHILSSCPKALADGRYRWRHDQVLKAVAEIVASAITTSKQRRPKSINFVKAGEKRTPQSRTTTGLLASAADWQLKVDLGKQLRFPEHIASTRLRPDMVIFSNSTKQVIMMELTVPWEERMDEAQERKRAKYQELTEECRRQGWITRCEPIEVGCRGFAGQSLCRVLTKLGILGLCKKRAIKSTIDAAERATKWLWLKREAQWSNAAGMQAGD

SEQ ID NO: 24224 - protein, 1092 aa, Sphaeramia orbicularis
MDPTVTNHTNGQPTMMNTVRCTCGKLCKNERGLKIHMAKMKCREKEQEEQRTGTSPGETQEGPCQESPHSAQNLHAFQPPEACATSQSRKIRWPPASKVTEWQQFDDDDFCNILKTTSKGDVDGRLNNMTLIITSYAVERFGHREEGKPPAPYSKNRRAAQIHQLRNELRALQRQYKSASEDQKEPLAELRNILRKKLMTLRRAEGHRRRRKERARKRTAFLANPFGFGKKLLGDKRSGQLSCSPEEVDQFLKNTLSDPLRDQPLGPQKALIDPPPLKVNFDLREPSLKEVQQVVQRARAASAPGPSGVPYIVYKRCPGLLQRLWKILKVIWRRGRVTKQWRCAEGVWIPKEENSKSIEQFRSISLLSVEGKVFFSILSRRLSEFVLQNNYMDTSVQKGGIPGVPGCLEHTGVITQLIREAREARGDLAVLWLDLTNAYGSIPHGLVQITLQKHHVPSNISNLILDYYNDFRLRVSSGSESSSWHQLEKGIITGCTISVTLFALAMNMMVKSAEMECRGPKMKSGSRQPPIRAFMDDLSITTSSVPGTRWILQGLEKLITWARMSFKPSKSRSLVLKKGRVAEQFRYTLAGVPIPSVSEQPVKSLGKVFHSSLRDSNSIKKTIKDLEEWLRKTDKSGLPGRFRAWIYQHAILPKILWPLLIYEVPLTTVEALERRITNHLRRWLGLPRNLSSAALYGRSNILQLPFRGLKEEFMVSRTREALLYRDSRDPKVVAAGIEVRTGRKWRAGEALEVAESRLRQRELVGNVARGHTGLGYFPSINTRKAKGKERHQLLQEEVRAGVEEERASRMVGLRQQGAWTKWESAEQRRVTWDNILRADNHRVRFLIQAVYDGLPSPVNLHVWGRIESPACALCSGRGSLEHILSGCRKALADGHYRWRHDQVLKAVAEAVALAITTNKQHRPKPTTFIKAGERHRSQLGPVPGLLASAADWELRVDLVKQLRFPEHIAPTSLRPDMVIFSNSTKKVIMVELTIPWEEHMDEAQERKRAKYQELTEQCRSNGWVTFCEPIEVGCRGFAGRCFCRLLAKLGIVGLAKKRAIKSTTDAAERATRWLWLKREAPWSTAAGMQAGT

SEQ ID NO: 24225 - protein, 1047 aa, Oryzias latipes
MKCLERESEVQRTGLEPGETQEVPGQEATHRAHSLHVPKPPNPSRVVPQQRIKWPPARKRSEWCQFDEDVSNIIQAAAKGDAESRLQTMTTIIVSYASERFGHIEKGQTKHTPYTKNRRATKIHHLRQELRTLKKHHKKATEEEKQSLSELKNILRKQLMSLRRAEWHRRRGRERARKRAAFIANPFGFTKKLLGDKRSGQLECSTEEVNQFLQDTLSDPLREQELEPNKALIKPAPPTIEFNLTEPSLKEVEEIIKAARWASTPGPSGVPYVAYKRCPQLLRHLWKILRVIWRRGRVPDQWRWAEGVWIPKEENSKNINQFRTISLLSVEGKVFFSIVSRRLTEFLLKNDYIDPSVQKGGIPGAPGCLEHTGVFTQLIREAHENKGDLGVLWLDLANAYGSIPHKLVELALHLHHVPSKIKDLIVDYYNNFRMWVTSGSGKSDWHRIGKGIITGCTISVILFALAMNMVVKAAEVECRGPLTKSVVRQPPIRAYMDDLTITTSSVPGSRWILKGLEKLITWARMSFKPSKSRSMVLKRGKVVDKFRFSISVTAIPTITEQPVKSLGKFFDSSLKDAAAIQKSNKELGVWLTKVDKSGLPGRFKAWIYQHSILPRVLWPLLVYAVPMTTVESLEKKISGFLRRWLGLPWCLTSSALYGTSNVLQLPFIGLTEEFMVVLHYRDSRDGKVSAAGIEVRTGRKWKAGKAVEEAESRLRQKALVGTVAIGRAGLGYLPKTVVSQAHGKERHRLLQEEVRAGVEEERASRLTGLRQQGAWTRWESTLQRRISWADILQADFHRVRFLVQAVYDVLPSPANLHVWGKSEMPSCLLCSGRGSLEHLLSTCPRALADGRYRLRQVLKALAESLASAIKASKNQRAPKKVVPFIKAGEKPQVRKQLLTGLLHKALDWQLQVDLEKQLRFPQHIVRTNLRADMLLISETSKHLIMLELTVPWEERMEEANERKRAKYQELVEGCRERGWKTFYEPVEVGCRGFAGRSLCKVLCHLGITGAAKKRAIQSVCEAAKKATRWLWMKRADPWSAAGTQVGV

SEQ ID NO: 24226 - protein, 988 aa, Paralithodes platypus
MAETEPSQEDQEVSLVEAEEWIILEDYGLVDTKCLTCRKPNARKTSRKCSGCLRSVHLSCAKFTKKTSGEQPNWKCPSCPGPTAGPTRATPDADLIQLVTKWKARIQVLARVPKGARIQVAEALTTIIKQALHLKTPLAWARLLGFSYGALQKPPRTNIQDHLQVSLATRVKHQVAQYMEANRLVDPPEQQPNRAQKQQEKEEEEAEQLHKRVAAKLADSDVKGAVRLLSSSEGIAGHGIEVVEALRGKHPPTPRDISLPPAPNDQIPQPLVVTKKQVVAAVTSFPAGSAAGPDGIRPAHLKGLLGQGSGAAGEALLETLTKFINMVLRGEVPDCATPLFFWASLCALAKKDGGVCPIAVGNTFRRLETTPRSTLKTSSTRFWNSRGCEAAVHATRTYLSQAREKRVLLKIDMRNAFNSIRRDVFLRAAREYIPTLYPLLWQAYSKPSILIFGETVISSATGLQQGDPGGPALFSIGVDAAANKVRSELNVWYLDDATLGGSVENVQTDLNNIITDLGQAGLVINDTKCEFVLNHTPEEREHTQAQFQGALPDVKILQEHQQTLLGSPLTLAAIPPALQGKKEELQRLVSCLIHIDAHSSLALLKNCFSIPKLQYLLCTSMTYTNNGGLQELDNIIREAVTSITNVEFQDRTWTQATLPVRLGGLSIRRASDIASPAFISSLIATNDLIVSILSSQPGMTLNRDVAEAINTWKESTGAEEEPQGTSRSKQKAWDTISAKKTQESLLTNADQVSKARLQAAARLESGLWLHAIPIPPLGTRLDAEALWVAISLRVSPAVCHPHTCKCGGGMDAQGHRALSCNHSAGRLPRHSALNDVIKWALQSAKRASILEPHVLLREDSKRPDGMTFPYKNGRCLVWDATCVDTFSITNIARNAKEAGEAARIAESRKREKYQAIARSHQFESLAFETSGVFGPTTLNMVNEIGRKIREVSGEPRETLWLKQRLGMAILRGNATSVMSSVRLGHATV

SEQ ID NO: 24227 - protein, 1019 aa, Paralithodes camtschaticus
MVEMEAPREDQEDGLVEAEERIILEDYGLADTKCLKCRTTNARKNSRKCSGCLRSIHLSCAKLTKKTSGEQPNWKCLACPGPTAEPTGATPATLVADLTQLVTKWKARIQVLARVPKGARIQVAEALTTIIKQALQLKTPLAWARLLGFSYGALRKPPRTNILDHLEVSLATRVKRQVAQYMDGNKLVEPPEQQPNRAQKHKEKEEEEAEQLRKRVAAKLADSDIKGAVRLLSSSEGFAGQGTEVVEALQEKHPPTPRDLNLPPAPNDQMRQPLVVTKEQVVAAVTSFPAGSAAGPDGIRPAHLKGLLGQGSGAAGEALLETLTKFINMVLRGEVPDCATPLFFGASLCALAKKDGGVRPIAVGNTFRRLATKVGLKPLSNGLGQHLRPVQLGFGTPGGCEAAVHATRTYLSQAQEKRVLLKIDMRNAFNSIRRDVFLRAAQEHIPTLYPLLWQAYSKPSILIFGETVIPSETGLQQGDPGGPALFSIGVDAAANKVRSELNVWYLDDATLGGSVENVLTDLNNIITDLGQAGLVINDTKCELVLLNHTREQGEETQALFRNILPDVKILQEHQQTLLGFPLTLAAIPPALQVKKEELQRLVSRLIHIDAQSALALLKNCFSIPKLQYLLRTSMTYTNNGGLQELDSIIREAVTSITNVEFKERAWTQATLPVRLGGLGLRRASDIASPAFISSLIATNDLVLSILYSKPGMTLNGDVTAAINTWKGSTGVEEEPQGTSRSKQKAWDTISAKKTQENLLTNADQVAKARLQAAARSESGLWLHAIPIPPIGTHLDAEALRVAIALRVGAAVCHPHTCKCDGRMDAQGHHDLSCNYNAGRLPRHSALNDVIKRALQSGNCASILEPHGLHREDGKRPDGMTTFSYKNGRCLVWDATCVDTFSTTNAARNADEAGEAARIAKNKNREKYQAIARSHQFEPLAFETSGVFGPTTLKMVNEIGRKIREVSGEPRETLWLKQRLGMAILRGNATSVMSSVRQDWVMPLREARQEWCIRSLSTVG

SEQ ID NO: 24228 - protein, 927 aa, Paralithodes camtschaticus
MVEMEAPREDQEDGLVEAEERIILEDYGLADTKCFKCGKTNARKNSRKCSGCLRYIHLSCAKLTKKTSGEQPNWKCLACPGPTAEPTGATPATPVANLTQLVTKWKARIQVLVRVPKGARIQVAEALTTIIKQALQLKTPLAWARLLGFSYGALRKPPRTNIQDHLQVSLATRVKRQVAQYMDGNKLVEPPEQQPNRAQKHQDKEEEEAEQLRKRVAAKLADIDIKGAVRLLSSSESFAGQGTEVVEALQEKHPPTPRDLNLPPARNDQMRQPLVVTKEQVVAAVTSFPAGSAAGPDGIRPAHLKGLLGQGSGAAGEALLETLTKFINMVLRGEVPDCATPLFLGASLCALAKKDGGVRPIAVGNTFRRLATKVGLKPLSNGLGQHLRPVQLGFGTPGGCEAAVHATRTYLSQAQEKRVLLKIDMRNAFNSIRRDGFLRAAQEHIPTLYPLLWQAYSKPSILIFGETVIPSATGLQQGDPGGPALFSIGVDAAANKVRSQLNVWYLDDATLGGSVENVLTDLNNIVTDLGQAGLVINDTKCELVLLNHTREQGEETQARFRDILPDVKILQEHQQTLLGSPLTLAAIPPALQVKKEELQRLVSRLIHIDAHSALALLKNCFSIPKLQYLLRTSMTYTNNGGLQELDSIIREAVTSITNVEFKERAWTQATLPVRLGGLGIRRASDIASPAFISSLIATNDLVLSILSSQPGMAPNGDITAAINTWKGSTGVEEEPQDTSRSKQKAWDTISAKKTQENLLTNADQVAKARLQAAVRSESGLWLHAIPIPPLGTHLDAEALRVAIALRVGAAVCHPHTCKCGGWMDAQGHHALSCNYNAGRLPRHSALNDVIKRALQSANRASILEPHGLHREDGKRPDGMTTFPYKNGRCLVWDATCVDTFSTTNIARNADEAGEATRIAENKKREKY

SEQ ID NO: 24229 - protein, 1018 aa, Paralithodes camtschaticus
MVEMEAPREDQEDGLVEAEERIILEDYGLADTKCLKCGTTNARKNSRKCSGCLRSIHLSCAKLTKKTSGSGKQPNWKCLACPGPTAEPTGATPATPATPVADLTQLVTKWKARIQVLARVPKGARIQVAEALTTLIKQALQLKTPLAWARLLGFSYGALRKPPRTNIQDHLQVSLATRVKRQVAQYMDGNKLVEPPEQQPNRAQKYQEKEEEEAEQLRKRVAAKLADSDIKGAVRLLSSSEGFAGQGTEVVEALQEKHPPTPRDLNLPPAPNDQMRQPLVVTKEQVVAAVTSFPAGSAAGPDGIRPAHLKGLLGQGSGAAGESLLETLTKFINMVLRGEVPDCATPLFLGASLCALAKKDGGVRPIAVGNTFRRLATKVGLKPLSNGLGQHLRPVQLGFGTPGGCEAAVHAARTYLSQAQEKRVLLKIDMRNAFNSIHRDVFLRADQEHIPTLYPLLWQAYSKPSILIFGETVIPSETGLQQGDPGGPALFSIGVDAAANKVRSELNVWYLDDATLGGSVENVLTDLNSIITDLGQAGLVINDTKCELVLLNHTREQGEETQALFRNILPDVKILQEHQQTLLGSPLTLAAIPPALQVKKEELQRLVSRLIHIDAHSALALLKNCFSIPKLQYLMRTSMTYTNNGGLQELDSIIREAVTSITNVEFKERAWTQATLTVRLGGLGIRRASDIASPAFISSLIATNDLVLSILYSEPGMTLNGDVTAAINTWKGSTGVEEEPQGTSRSKQKAWDTISAKKTQENLLTNADQVAKARLQAAARSESSLWLHAIPIPPLGTHLDAEALRVAIALRLGAAVCHPHTCKCDGRMDAQGHHALSCNYNAGRLPRHSALNDVIKRALQSANCASILEPHGLHREDGKRPDGMTTFSYKNGRCLVWDATCVDTFSTTNAARNADEAGEAARIAENKKREKYQAIARIHQFEPLAFETSGVFGPTTLKMVNEIGRKIREVSGEPRETLWLKQRLGKAILRGNATSVMSSVGQDWVMPLREAPAGVVYP

SEQ ID NO: 24230 - protein, 1013 aa, Paralithodes platypus
MVEMEAPREDQEDGLVEAEERIILEDYGLADTKCFKCGITNARKNSRKCSGCLRSIHLSCAKLTKKISGEQPNWKCLTCPGPTAEPTGATPATPVANLTQLVTKWKARIQVLARVPKGARIQVAEALTTIIKQALQLKTPIAWAWLLGFSYGALRKPPRTNIQDHLQVSLATRVKRQVEQYMGGNKLVEPPEQQPNRAQKHQDKEEEEAEQLRKRVAAKLADSDIKGAVRLLSSSEGFAGQGTEVVEALQEKHPPTPRDLNLLPAPNNQMRQPLVVTKEQVVAAVTSFPAGSAAGPDGIRPAHLKGLLGQGSGAAGEALLETLTKFINMVLRGEVPDCATPLFFGASLCALAKKDGGVHPIAVGNTFRRLATKVGLKPLSNGLGQHLRPVQLGFGTPGVCEAAVHATRTYLSQAQEKRVLLKIDMRNAFNSIRRDVFLRAAQEHIPTLYPLLWQAYSKPSILIFGETVIPSATELQQGDPGGPALFSIGMDAAANKLRSELNVWYLDDATLGGSVENVLTDLNNIVTDLGLAGLVINDTKCELVLLNHTREQGEETQALFRNILPDVKILQEHQQTLLGSPLTLAAIPPALQVKKEELQRLVSRLIHIDAHSALALLKNCFSIPKLQYLLHTSMTYTNNGGLQELDSIIREAVTSITNVEFKERAWTQATLPVRLGGLGIRRASDIASPAFISSLIATNDLVLSILSSQPGMTLNGDVTAAINTWKGSTGVEEEPQGTSRSKQKAWDTISAKKTQEDLLTNVDQVAKARLQAAARSESGLWLHAIPIPPLGTHLDAEALRVAIALRVGAAVCHPHTCKCGGWMDAQGHHALSCNYNAGRLPRHSALNDVIKRALQSASRASILEPHGLHREDGKRPDGMTTFPYKNGRCLVWDATCVDIFSTTNIARNADEAGEAARIAENKKREKYQTIARNHQFEPLAFETSGVFGPTTLKMVNEIGRKIREVSGEPRETLWLKQRLGMAILRGNATSVMSSVRQDWVMPLCEARAGVVYP

SEQ ID NO: 24231 - protein, 1013 aa, Paralithodes camtschaticus
MAEMEAPREDQEVGLVEAEERIILEDYGLADTKCFKCGKTNARKNSRKCSGCLRSIHLSCAKLTKKKSGEQPNWKCLACPGPTAEPTGATPATPVADLTQLVTKWKARIQVLARVPKGARIQVVEALTTIIKQALQLKTPLAWARLLGFSYGALRKPPRTNIQDHLQVSLATRVKRQVAQYMDGNKLVEPPEQQPNRAQKQQDKEEEEAEQLRKRVAAKLADSDIKGAVRLLSSSEGFAGQGTEVVEALQEKHPPTPRDLNLPPAPNDQMCQPLVVTKEQVVAAATSFPAGSAAGPNGIRPAHLKGLLGQGSGAAGEALLETLTKFINMVLRGEVPDCATPLFFGASLCALAKKDGGVRPIAVGNTFRRLATKVGLKPLSNGLGQHLRPVQLGFGTPGGCEAAVHATRTYLSQAQKKRVLLKIDMRNAFNSIRRDVFLRAAQEHIPTLYPLLWQAYSKPSILIFGETVIPSATGLQQGDPGGPALFSIGVDAAANKVRSELNVWYLDDATLGGSVENVLTDLNNIVTDLGQAGLVINDTKCELVLLNHTREQGEETQALFRGILPDVKILQEHQQTLLGSPLTLAAIPPALQVKKEELQRLVSRLIHIDAHSALALLKNCFSIPKLQYLLRTSMTYTNNGGLQELDSIIREAVTSITNVEFKERTWTQATLPVRLGGLGIRRASDIASPAFISSLIATNDLVVSILSSQPRMTLNGDVTAAINTWKGSTGVEEEPQGTSRSKQKAWDTISAKKTQENLLTNADQVAKARLPAAARSESGLWLRAIPIPPLGTHLDAEALRVTIAIRVGAAVCHPHTCKCGGGMDAQGHHALSCNYNAGRLPRHSALNDVIKRALQSANRASILEPHGLHREDGKRPDGMTTFPYKNGRCLVWDATCVDTFSTTNIARNADEAGEAARIAENKKREKYQAIARNHQFEPLAFETSGVFGPTTLKMMNEIGRKIREVSGEPRETLWPKQRLGMAILRGNATSVMSSVRLDWVMPLCEARAGVVYP

SEQ ID NO: 24232 - protein, 1010 aa, Paralithodes camtschaticus
MEAPREDQEVVLVEAEERIILEDYGLADTKCFKCRKTNARKNSRKCSGCLRSIHLSCAKLTKKTSGEQPNWKCLACPGPTAEPTGATPATPVADLTQLVTKWKARIQVLARVPKGARIQVAEALTTIIKQALQLKTPLAWARLLGFSYGALRKPPRTNIQDHLHVSLATRVKRQVAQYMDGNKLVEPPEQQPNRAQKQQDKEEEEAEQLRKRVAAKLADSDIKGAVRLLSSSEGFAGQGTEVVEALQEKHPPTPRDLNLPPAPNDQMPQPLVVTKEQVVAAVTSFPAGSAAGPDGIRPTHLKGLLGQGSGAAGEALLETLTKFINMVSRGEVPDCATPLFFGASLCALAKKYGSVRPIAVGNTFRRLATKVGLKPLSNGLGQHLRPVQLGFGTPGVCEAAVHATRTYLSQAQEKRVLLKIDMRNAFNSIRRDVFLRAAQEHIPTLYPLLWQAYSKPSILIFGETVIPSATGLQQGDPDGPALFSIGVDAAANKGRSELNVWYLDDATLGGSVENVLTDLINIVTDLGQAGLVINDTKCELVLLNHTREEGEETQALFRGILPDVKILQEHQQTLLGSPLTLAAIPPALQVKKEELQRLVSRLIHIDAHSALALLKNCFSIPKLQYLLRTSMTYTNNGGLQELDGIIREAVTSITNVEFKERTWTQATLPVRLGGLGIRRASDIASPAFISSLIATNDLVVSILSSQPGMTLNGDVTVAINTWKESTGAEDEPQGTSRSKQKAWDTISAKKTQENLLTNADQVAKARLQAAARSESGLWLHAIPIPPLGTHLDAEALRVAIALRVGAAVCHPHTCKCGGGMDAQGHHALSCNYNAGRLPRHSALNYVIKRALQSANRASILEPHGLHREDGKRPDGMTTFPYKNGRCLVWDATCVDTFSTTNIARNADEAGEAARIAENKKREKYQAIARNHQFEPLAFETSGVFGPTTLKMVNEIGRKIREVSGEPRETLWLKQRLGMAILRGNATSVMSSVRLDWVMPLCEARAGVVYP

SEQ ID NO: 24233 - protein, 925 aa, Paralithodes platypus
MSRMPRAHCRANRGATPATPVADLTQLVTKWKARIQVLARVPKGARIQVAAEALTTIIKQALQLKTPLAWARLLGFSYGALRKPPRTNIQDHLQVSLATRVKRQVAQYMDGNKLVEPPEQQPNRAQKHQEKEEEEAEQLRKRVAAKLADSDIKGAVRLLSSSEGFAGQGTEVVEALQEKHPPTPRDLNLPPAPNDQMRQPLVVTKEQVVAAVTSFPAGSAAGPDGIRPAHLKGLLGQGSGAAGEALLETLTKFINMVLRGEVPDCATPLFFGASLCALAKKDGGVRPIAVGNTFRRLATKVGLKPLSNGLGQHLRPVQLGFGTPGGCEAAVHATRTYLSQAQEKRVLLKIDMRNAFNSIRRDVFLRAAQEHIPTLYPLLWQAYSKPSILIFGETVIPSETGLQQGDPGGPALFSIGVDAAANKVRSELNVWYLDDATLGGSVENVLTDLNNIITDLGQAGLVINDTKCELVLLNHTREQGEETQALFRNILPDVKILQEHQQTLLGSPLTLAAIPPALQVKKEELQRLVSRLIHIDAHSALALLKNCFSIPKLQYLLRTSMTYTNNGGLQELDSIIREAVTSITNVEFKERAWTQATLPVRLGGLGIRRASDIASPAFISSLIATNDLVLSILYSKPGMTLNGDVTAAINTWKGSTGVEEEPQGTSRSKQKAWDTISAKKTQENLLTNADQVAKARLQAAARSESGLWLHAIPIPPLGTHLDAEALRVAIALRVGAAVCHPHTCKCDGRMDAQGHHALSCNYNAGRLPRHSALNNVIKRALQSANCASILEPHGLHREDGKRPDGMTTFPYKNGRCLVWDATCVDTFSTTNAARNADEAGEAARIAENKKREKYQAIARIHQFEPLAFETSGVFGPTTLKMVNEIGRKIREVSGEPRETLWLKQRLGMAILRGNATSVMSSVRQD

SEQ ID NO: 24234 - protein, 773 aa, Paralithodes camtschaticus
MDGNKLVEPPEQQPNRAQKHQEKEEEEAEQLRKRVAAKLADSDIKGAVRLLSSSEGFAGQGTEVVEALQEKHPPTPRDLNLPPAPNDQMRQPLVVTKEQVVAAVTSFPAGSAAGPDGIRPAHLKGLLGQGSGAAGEALLETLTKLINMVLRGEVPDCATPLFLGASLCALAKKDGGVRPIAVGNTFRRLATKVGLKPLSNGLGQHLRPVQLGFGTPGGCEAAVHATRTYLSQAQEKRVLLKIDMRNAFNSIRRDVFLRAAQEHIPTLYPLLWQVYSKPSILIFGETVIPSETGLQQGDPGGPALFSIGVDAAANKVRSELNVWYLDDATLGGSVENVLTDLNNIITDLGQAGLVINDTKCELVLLNHTREQGEETQALFRNILPDVKILQEHQQTLLGSPLTLAAIPPALQVKKEELQRLVSRLIHIDAHSALALLKNCFSIPKLQYLLRTSMTYTNNGGLQELDSIIREAVTSITNVEFKERAWTQATLPVRLGGLGIRRASDIAYPAFISSLIATNDLVLSILYSKPGMTLNGDVTAAINTWKGSTGVEEEPQGTSRSKQKAGDTISAKKTQENLLTNADQVAKARLQAAARSESGLWLHAIPIPPLGTHLDAEALRVAIALRVGAAVCHPHTCKCDGRMDAQGHHALSCNYNAGRLPRHSALNDVIKRALQSANCASILEPHGLHREDGKRPDGMTTFSYKNGRCLVWDATCVDTFSTTNAARNADEAGEAARIAENKKREKYKPSPEFISSSPWHSKLQESSALPPLRW

SEQ ID NO: 24235 - protein, 1011 aa, Paralithodes platypus
MVEMEAPREDQEDGLVEAEERIILEDYGLADTKCFKCGITNARKNSRKCSGCLRSIHLSCAKLTKKTSGEQPNWKCLACPGPTAEPTGATPATPVANLTQLVTKWKARIQVLARVPKGARIQVAEALTTIIKQALQLKTPLAWARLLGFSYGALRKPPRTNIQDHLQVSLATRVKRQVAQYMAGNKLVEPPEQQPNRAQKHQDKEEEEAEQLRKRVAAKLADSDIKGAVRLLSSSEGFAGQGTEVVEALEEKHPPTPRDLNLPPAPNDQMRQPLVVTKEQVVAAVTSFPAGSASGPDDIRPAHLKGLLGQGSGAAGEALLETLTKFINMVLRGEVPDCATPLFFGASLCALAKKDGSVRPIAVGNTFRRLATKVGLKPLSNGLGQHLRPVQLGFGTPGGCEAAVTRTYLSQAQEKRVLLKIDMRNAFNSIRRDVFLRAAQEHIPTLYPLLWQAYSKPSILIFGETVIPSATGLQQGDPGGPALFSIGVDAAANKVRSELNVWYLDDATLGGSVENVLTDLNNIVTDLGQAGLVINDTKCELVLLNHTREQGEETQALFRNILPDVKILQEHQQTLLGSPLTLAAIPPALQVKKEELQRLVSRLIHIDAHSALALLKNCFSIPKLQYLLRTSMTYTNNGGLQELDSIIREAVTSITNMEFKERAWTQATLPVRLGGLGIRRASDIASPAFISSLIATNDLVLSHLSSQPGMTLNGDVTAAINTWKGSTGVEEEPQGTSRSKQKAWDTISAKKTQENLLTNADQVAKARLQAAARSESGLWLHAIPIPPLGTHLDAEALRVAIALRVGAAVCHPHTCKCGGGMDAQGHHALSCNYNAGRLPRHSALNDVIKRALQSANRASILEPHGLHREDGKRPDGMTTFPYKNGRCLVWDATCVDTFSTTNIARNADEVGEAARIAENKKREIYQAIARYHQFEPLAFETSGVFGPTTLKMVNEIGRKIREVSEEPRETLWLKQRLGMAILRGNTTSVMSSVRQDWVMPLCEARAGVVYP

SEQ ID NO: 24236 - protein, 1013 aa, Paralithodes camtschaticus
MAEMEAPREDQEVGLVEAEKRIILEDYGLADTKYFKCGKTNARKNSRKCSGCLRSIHLSCAKLTKKTSGEQPNWKCLACPGPTAEPTGATPATPVDDLTQLVTKWKARIQVLARVSKGARIQVAEALTTIIKQALQHKTPLAWARLLGFSYGALRKPPRTNIQDHLQVSLATRVKRQVAQYMDGNKLVEPPEQQPNRAQKQQDKEEEEAEQLRKRVAAKLADSDIKGAVRLLSSSEGFAGQGTEVVEALQEKHPPTPRDLNLPPAPNDQMRQPLVVTKEQVVAAVTSFPAGSAAGPDGIRPAHLKGLLGQGSGAAGEALLETLTKFINMVLRGEVPDCATPLFSGASLCALAKKDGGVRPIAVGNTFRRLATKVGLKPFSNGLGQHLRPVQLGFGTPEGCEAAVHATRTYLNQAQEKRVLLKIDMRNAFNSIRRDVFLRAAQEHIPTLYPLLWQAYSKPSILIFGETVIPSATGLQQGNPGGPALFSIGVDAAANKVRSELNVWYLDDATLGGSAENVLTDLNNIVTDLGQAGLVINDTKCELVLLNHTREQGEETQALFRGILPDVKILQEHQQTLLGSPLTLAAIPPALQVKKEELKRLVSRLIHIDAHSALALLKNCFSIPKLQYLLRTSMTYTNNGGLQELDSIIREAVTSITNVEFKERTWTQATLPVRLGGLGIRRASDIASPAFISSLIATNDLVVSILSSQPGMTLNGDVAVAINTWKESTGAEEEPQGTSRSKQKAWDTISAKTTQENLLTNADPVAKARLQAAARSESGLWLHAIPIPPLGTHLDAEALRVAIALRMGAAVCHPHTCKCGGGMDAQGHHALSCNYNAGRLPRHSALNDVIKRALQSANRASILEPHGLHREDGKRPDGMTTFPYRKGRCLVWDATCVDTFSTTNIARNADEAGEAARIAENKKREEYQAIARNHQFKPLAFETSGVFDPTTLKMVNEIGRKIREVSGEPRETLWLKQRLGMAILQGNATSVMSSVRLDWVMPLCEARAGVVYP

SEQ ID NO: 24237 - protein, 1007 aa, Paralithodes camtschaticus
MVEMEAPREDQEDGLVEAEKRIILEDYGLADTKCFKCGKTNARKNSRKCSGCLRSIHLSCASGEQPNWKCLACPGPTAEPTGATPATPVADLTQLVTKWKARIQVLARVPKGARIQVAEALTTIIKQALQLKTPLAWARLLGFSYGALRKPPRTNIQDHLQVSLATRVKRQVAQYMDGNKLVEPPEQQPNRAQKQQDKEEEEAEQLRKRVAAKLADSDIKGAVRLLSSSEGFAGQGTEVVEALQEKHPPTPRDLNLPPAPNDQMRQPLVVTKEQVVAAVTSFPAGSAAGPDGIRPAHLKGLLGQGSGAAGEALLETLTKFINMVLRGEVPDCATPLFLGASLCALAKKDGGVRPIAVGNTFRRLATKVGLKPLSNGLGQHLRPVQLGFGTPGGCETAVHATRTYLSQAQEKRMLLKIDMRNAFNSIRRDVFLRAAQEHIPTLYPLLWQAYSKPPILIFGETVIPSATGLQQGDPGGPALFSIGVDAAANKVRSELNVWYLDDATLGGSVENVLTDLNNIVTDLGQAGLVINDTKYELVLLNHTHEQGEETQALFRDILPDVKILQEHQQTLLGSPLTLAAIPPALQVKKEELQRLVSRLIHIDAHSALALFKNCFSIPKLQYLLRTSMTYTNNGGLQELDSIIREAVTSITNVEFKERAWTQATLPVRLGGLGIRRASDIASPAFISSLIATNDLVVSILSSQPGMTLNGDVTAAINTWKGSTRVEEEPQGASRSKQKAWDTISAKKTKENLLTNADQVAKARLQAAARSESGLWLHAIPIPPLGTHLDAEALRVAIVLRVGAAVCHPHTCKCGGWMDAQGHHALSYNYNAGRLPRHSALNDVIKRALQSANRASILEPHGLHREDGKRPDGMTTFPYKNGRCLVWDATCVDTFSTTNIARNADEAGEAARIAENKKREKYQAIARNHQFEPLAFETSGIFGPTTLKMVNEIGRKIREVSGEPRETLWLKQRLGMAILRSNATSVMSSVRQDCVMPLCEAQAGVVYP

SEQ ID NO: 24238 - protein, 1009 aa, Paralithodes camtschaticus
MVEMEAPREDQEDGLVEAEERIILEDYGLADTKCLKCGTTNARKNSRKCSGCLRSIHLSCAKLTKKTSGEQPNWKCLACPGPTAEPTGATPATPVADLTQLVTKWKARIQVLARVPKGARIQVAEALTTIIKQALQLKTPLAWARLLGFSYGALRKPPRTNIQDHLQVSLATRVKRQVAQYMDGNKLVEPPEQQPNRAQKHQEKEEEEAEQLRKRVAAKLADSYIKGAVRLLSSSEGFAGQGTEVVEALQEKHPPTPRDLNLPPAPNDQMRQPLVVTKEQVVAAVTAFPAGSAAGPDGIRPAHLKGLLGQGSGAAGEALLETLTKFINMVLRGEVPDCATPLFLGASLCALAKKDGGVRPIAVGNTFRRLATKVGLKPLSNGLGQHLRPVQLGFGTPGGCEAAVHATRTYLSQAQEKRVLLKIDMRNAFNSIRRDVFLRAAQEHIPTLYPLLWQAYSKPSILIFGETVIPSETGLQQGDPGGPALFSIGVDAAANKVRSELNVWYLDDATLGGSVENVLTDLTNIITDLGQAGLVINDTKCELVLLNHTREQGEETQALFRNILPDVKILQEHQQTLLGSPLTLAAIPPALQVKKEKLQRLVSRLIHIDAHSALALLKNCFSIPKLQYLLRTSMTYTNNGGLQELDSIIREAVTSITNVEFKKRAWTQATLPVRLGGLGIRRASDIASPAFISSLIATNDLVLSILYSKPGMTLNGDVTAAINTWKGSTGVDEEPQGTSRSKQNAWDTISAKKTQENLLTNADQVAKARLQAAARSESGLWLHAIPIPPLGTHLDAEALRVAIALRVGAAVCHPHTCKCDGRMDAQGHHALSCNYNAGRLPRHCALNDVIKRALQSANCASILEPHGLHREDGKRPDGMTTFSYKNGRCLVWDATCVDTFSTTNADEAGEAARIAENKKREKYQAIARIHQFEPLAFETSGVFGPTTLKMVNEIGRKIREVSGEPRETLWLKQRLGMAILRGNATSVMSSVRQDWVMPLREAPAGVVYP

SEQ ID NO: 24239 - protein, 920 aa, Paralithodes platypus
MAETEAPREDQEVSLVEAEERIILEDYGLADTKCLVCGKSNARKNSRKFSGCFRSVDLSCAKLTKKASGEQPNWKCPSCPGPTAGPTRATPDADLIQLVTKWKARIQVLARAPKGARIQVAEALTTIIKQALQLKTPLAWARLLGFSYGALRKPTRTNIHDHLQVSLATRVKRQVAQYMEANRLVEPPEQQPNRSQKQQDKEEEEAEHLRKRVAAKLADSDIKGAVRLLSSSEGFAGHGTEVVEALRGKHPPTPGDLNLPPAPNDQIPQPLVVTKEQVVVAVTSFPAGSAAGPDGIRPTHLKGLLGQGTGAAGEALLETLTKFINMVLRGEVPDCAIPLFFGASLCTLAKKDGGVRPIAVGNTFRRLATKVGLKPLSNGLGQHLRPVQLGFGTPGVCEAAVHATRTYLSQAQGKRVLLKIDMRNAFNSIRRDVFLRAARDHIPTLYPLLWQAYSKPSILIFGETVIPSVTGLQQGDPGGPALFSIGVDAAANKVWSELNVWYLDDATLGGSVENVLTDLKNIITDLSQAGLVINDTKCELVLLNHTLEEREHTQAQFQRTLPDVKILQEHQQTLLGSPLTLAAIPPALQGKKEELQRLVSRLLHIDAHSALALLKNCFSIPKLQYLLRTSMTYTNNGGLQELDNIIREAVTSITNVVFQDRTWTQATLPVRLGGLGIRRASDIASPAFISSLMATNDLVVSILSFQPGLTLNGDVAEAINTWKESTGAEEEPQGTSRSKQKAWDTISAKKTQENFLTNADQVAKAHLQAAARLESGLWLHAVPIPPLGTHLDAEALRVAIALRVGATVCHPHTCKCGGGMDARGHHALSCNHSAGRLPRHSALNDVIKRALQSANRASILEPHGLLREDGKWPDGMTTFPYKNGRCLVWDATCVDTFSTTNIARNADEAGEAARIAESRK

SEQ ID NO: 24240 - protein, 1018 aa, Paralithodes camtschaticus
MAEMEAPREDQEVGLVEAEERIILEDYGLADTKCFKCGKTNARKNSRKCSGCLRSIHLSCAKLTKKTSGEQPNWKCLACPGPTAEPTGATPATPVADLTQLVTKWKARIQVLARVPKGARIQVAEALTTIIKQALQLKTPLAWARLLGFSYGALRKPPRTNIQDHLQVSLATRVKRQVAQYMDGNKLVEPPEQQPNRAQKQQDKEEEEAEQLRKKVAAKLTDSDIKGAVRLLSSSEGFAGQGTEVVEALQEKHPPTPRDLNLPPAPNDQMRQPLVVTKEQVVAAVTSFPAGSATGPDGIRPAHLKGLLGQGSGAAGEALLETLTKFINMVLRGEVPDCATPLFLGASLCALAKKDGGVRPIAVGNTFRRLATKVGLKPLSNGLGQHLRPVQLGFGTPGGCEAAVHATRTYLSQAQEKRVLLKIDIRNAFNSIRRDVFLRAAQEHIPTLYPLLWQAYSKPSILIFGETVIPSATRLQQGDPGGPALFSIGVDAAANKVRSELNVWYLDDATLGGSVENVLTDLNNIVTDLGQAGLVINDTKCELVLLNHTREQGEETQALFRGILPDVKILQEHQQTLLGCPLTLAAIPPALQVKKEELQRLVSRLIHIDAHSALALLKNCFSIPKLQYLLRTSMTYTNNGGLQELDSIIREAVTSITNVEFKERTWTQATLPVRLGGLGLRRASDIASQAFISSLIATNDLVVSILSSQPGMTLNWDVTVAIDTWKESTGVEEEPQGTSRSKQKAWDTISAKKTQENLLTNADQVAKARLQAAARSESGLWLHAIPIPPLGTHLDAEALRVAIALRVGAAVCHPHTCKCGGGMDAQGHHALSCNYNAGRLPRHSALNDVIKRALQSANRASILEPHGLHREDGKRPDGMTTFPYKNGRCLVWDATCVDTFSTTNIARNADEAGEAARIAENKKREKYQAVARNHQFEPLAFETSGVFGPTTLKMVNEIGRKIREVSGEPRETLWLKQRLGMAILRGNATSVSSVRLDWVMLLCEARAGVVYPSLSTVG

SEQ ID NO: 24241 - protein, 1013 aa, Paralithodes camtschaticus
MVEIEAPREEQEVGLVEAEERIILEDYGLADTKCFKCGKNNARKNSRKCSGCLRSIHLSCAKLTKKTSGEQPNWKCLACPGPTAEPTGATPAIPVADLTQLVTKWKARIQVLARVPKGARIQVAEALTTIIKQALQLKTHLAWARLLGFSYGALRKPPRTNIQDHLQVSLATRVKHQVAQYMDGNKLVEPPEQQPNRAQKQQDKEEEEAEQLRKRVAAKLADSDIKGAVRLLSSSEGFAGQGTEVVEALQEKHPPTPRDLNLPPAPNDQMRQPLVVTKEQVVAAVTSFPAGSAAGPDGIRPAHLNGLLGQGSGAAGEALLETLTKFINMVLRGEVPDCATPLFFGASLCALAKRDGGVRPIAVGNIFRRLATKVGLKPLSNDLGQHLRPVQLGFGTPGVCEAAVHATRTYLSQAQEKRVLLKIDMRNAFNSICRDVFLRAAQEHIPTLYPLLWQAYSKPSILIFGETVIPSATGLQQGDPGGPALFSIGVDAAANKVRSELNVWYLDDATLGGSVENVLTDLNNIVTDLGQAGLVINDTKCELVLLNHTREQGEKTQALFRGILPDVKILQEHQQTLLGSPLTLAAIPPALQVKKEELQRLVSRLIHIDAHSALALLKNCFSIPKLQYLLRTSMTYTNNGGLQELNSIIREAVTSITNVEFKERTWTQATLPVRLGGLGIRRASDIASPAFISSLIATNDLVVSILSSQPGMTLNGDVTAAINTWKGSTGVEEEPQGTSRSKQKAWDTVSAKKTQENLLTNADQVAKARLQAAARLESGLWLHAIPIPPLGTHLDAEALRVAIALKVGAAVCHPHICKCGGGMDAQGHHALSCNYNAGRLPRHSALNDVIKRALQSANRASILEPHGLHREDSKRPDGMTTFPYKNGRCLVWDTTCVDTFSTTNIARNADEAGEAAWIAENKKREKYQAIARNHQFEPLAFETSGVFGPTTLKMVNEIGRKIREVSGEPRETLWLKQRLGMAILQGNATSVMSSVRLDWVMPLCEARAGVVYP

SEQ ID NO: 24242 - protein, 973 aa, Paralithodes camtschaticus
MVEMEAPREDQEDGLVEAEERIILEDYGLADTKCFKCGITNARKNSRKCSGCLRSIHLSCAKLTKKTSGEQPNWKCLACPGPTAEPTGATPATPVANLTQLVTKWKARIQVLARVPKGARIQVAEALTTIIKQALQLKTPLAWARLLGFSYGALRKPPRTNIQDHLQVSQATRVKRQVAQYMDGNKLVEPPEQQPNRAQKHQDKEEEEAEQLRKRVAAKLADSDIKGAVRLLSSSEGFAGQGTEVVEALQVKHPPTPRDLNLPPAPNDQMRQPLVVTKEQVVAAVTSFPAGSAAGPDGIRPAHLKGLLGQGSGAAGEALLETLTKFINMVLRGEVPDCATPLFLGASLCALAKKDGGVRPIAVRNTFRRLATKVGLKPLSNGLGQHLRPVQLGFGTPGGCEAAVHATRTYLSQGQEKRVLLKIDMRNAFNSIRRDVFLRAAQEHIPTLYPLLWQAYSKPSILIFGETVIPSATGLQQGDPGGPALFSIGVDAAANKVRSELNVWYLDDATLGGSVENVLTDLNNIVTDLGQAGLVINDTKCELVLLNHTREQGEETQALFRNILPDVKILQEHQQTLLGSPLTLAAIPPALQVKKEELQRLVSRLIHIDAHSALALLKNCFSIPKLQYLLRTSMTYTNNGGLQELDSIIREAVTSITNVEFKERAWTQATLPVRLGGLGIRKASDIAFPAFISSLIATNDLVLSILSSQPGMTLNGDVTAAINTWKGSTGVEEEPQGTSRSKQKAWDTISAKKTQENLLTNADQVAKARLQAAARSESGLWLHAIPIPPLGTHLDAEALRVAIALRVGAAVCHPHTCKCDGRMDAQGHHALSCNYNAGRLPRHSALNDVIKRALQSANRASILEPHGLHREDGKRPDGMTTFPYKNGQCLVWDATCVDTFSTTNIARNADEAGEAARIAENKKREKYQAIARNHQFEPLAFETSEVFGPTTLKMVNEIGRKIREVSGEPRETL

SEQ ID NO: 24243 - protein, 1013 aa, Paralithodes platypus
MVEMEAPREDQEDGLVEAEERIILEDYGLADTKCLKCGTTNARKNSRKCSGCLRSIHLSCAKLTKKTSGEQPNWKCLACPGPTAEPTGATPATPVADLTQLVTKWKARIQVLARVPKGARIQVAEALTTIIKQALQLKTPLAWARLLGFSYGALRKPPRTNIQDHLQVSLATRVKRQVAQYMDGNKLVEPPEQQPNRAQKHQDKEEEEAEQLRKRVAAKLADSDIKGAVRLLSSSEGFAGQGTEVVEALQEKHPPTPRDLNLPPAPNDQMRQPLVVTKEQVVAAVTSFPAGSAAGPDGIRPAHLKGLLGQGSGAAGEALLETLTKFINMVLRGEVPDCATPLFFGASLCALAKKDGGVRPIAVGNTFRRLATKVGLKPLSNGLGQHLRPVQLGFGTPGGCEAAVHATRTYLSQAQEKRVLLKIDMRNAFNSIRRDVFLRAAQEHIPTLYPLLWQAYSKPSILIFGETVIPSETGLQQGDPGGPALFSIGVDAAANKVRSELNVWYLDDATLGGSVENVLTDLNNIITDLGQAGLVINDTKCELVLLNHTREQGEETQALFRNILPDVKILQEHQQTLLGSPLTLAAIPPALQVKKEELQRLVSRLIHIDAHSALALLKNCFSIPKLQYLLRTSMTYTNNGGLQELDSIIRDAVTSITNVEFKERAWTQATLPVRLGGLGIRRASDIASPAFISSLIATNDLVLSILYSKPGMTLNGDVTAAINTWKGSTGVEEEPQGTSRSKQKAWDTISAKKTQENLLTNADQVAKARLQAAARSESGLWLHAIPIPPLGTHLDAEALRVAIALRVGAAVCHPHTCKCDGRMDAQGHHALSCNYNAGRLPRHSALNDVIKRALQSANCASILEPHGLHREDGKRPDGMTTYPYKNGRCLVWDATCVDTFSTTNAARNADEAGEAARIAENKKREKYQAIARIHQFEPLAFETSGVFGPTTLKMVNEIGRKIREVSGEPRETLWLKQRLGMAILRGNATSVMSSVRQDWVMPLREAPAGVVYP

SEQ ID NO: 24244 - protein, 954 aa, Paralithodes camtschaticus
MVEMEAPREDQEDGLVEAEERIILEDYGLADTKCFKCGTTNARKNSRKCSGCLRSIHLSCAKLTKKTSGEQPNWKWLACPGPTAEPTGATPATPVANLTQIVTKWKARIQVLARVPKGARIQVAEALTTIIKQALQLKTPLAWARLWGFSYGALRKPPRTNIQDHLQVSLATRVKCQVAQYMDGHKLVEPPEQQPNRAQKHQDKEEEEAEQLRKRVAAKLADSDIKGAVRLLSSSEGFAGQGTEVVEALQEKHPPTPRDLNLPPAPNDQMRQPLVVTKEQVVAAVTSFPAGSATGPDGIRPAHLKGLLGQGSRAAGEALLETLTKFINMVLREEVPDCATPLFFWASLCALAKKDGGVRPIAVGNNFRRLATKVGLKPLSNGLGQHLRPVQLGFGTPGGCEAAVHATRTYLSQAQEKRVLLKIDMRNAFNSIRRDVFLRAAQEHNPTLYPLLWQAYSKPSILIFGEMVIQSATGLQQGDPGGPSLFSIGVDAAAKKVRSELNVWYLDDATLGGSVESVLTDLKNIVTDLGQAGLVINDTKCELVLLNHTREQGEETQALFRNILPDVKILQEHQQTLLGSPLTLAAIPPALQVKKEELQRLVSRLIHIDAHSDLALLKNCFSIPKLQYLLRTSMTYTNNGGLQELDSIIREAVTSITNVEFKERAWTQATLPVRLGGLGIRRASDIASPAFISSLIATNDLVLSILYSQPGMPLNGDVTAAINTWKGSTGVEEEPQGTSRSKQKAWDTISAKKTQENLLTNADQVAKARLQAAARSESGLWLHAIPIPPLGTHLDAEALRVAIALRMGAAVCHPHTCKCDGGMDAQGHHALSCNYNAGRLPRHSALNDVIKRALQSANRASILEPHGLHREDGKRPDGMTTFPYKNGRCLVWDATCVDTFSTTNIARNADEAGEAARLAEIKSEKNIKPSPEIISSSPWHSKLQESSALPPLRW

SEQ ID NO: 24245 - protein, 1013 aa, Paralithodes camtschaticus
MVEIEAPREEQEVGLVEAEERIILEDYGLADTKCFKCGKNNARKNSRKCSGCLRSIHLSCAKLTKKTSGEQPNWKCLACPGPTAEPTGATPAIPVADLTQLVTKWKARIQVLARVPKGARIQVAEALTTIIKQALQLKTHLAWARLLGFSYGALRKPPRTNIQDHLQVSLATRVKHQVAQYMDGNKLVEPPEQQPNRAQKQQDKEEEEAEQLRKRVAAKLADSDIKGAVRLLSSSEGFAGQGTEVVEALQEKHPPTPRDLNLPPAPNDQMRQPLVVTKEQVVAAVTSFPAGSAAGPDGIRPAHLNGLLGQGSGAAGEALLETLTKFINMVLRGEVPDCATPLFFGASLCALAKRDGGVRPIAVGNIFRRLATKVGLKPLSNDLGQHLRPVQLGFGTPGVCEAAVHATRTYLSQAQEKRVLLKIDMRNAFNSICRDVFLRAAQEHIPTLYPLLWQAYSKPSILIFGETVIPSATGLQQGDPGGPALFSIGVDAAANKVRSELNVWYLDDATLGGSVENVLTDLNNIVTDLGQAGLVINDTKCELVLLNHTREQGEKTQALFRGILPDVKILQEHQQTLLGSPLTLAAIPPALQVKKEELQRLVSRLIHIDAHSALALLKNCFSIPKLQYLLRTSMTYTNNGGLQELNSIIREAVTSITNVEFKERTWTQATLPVRLGGLGIRRASDIASPAFISSLIATNDLVVSILSSQPGMTLNGDVTAAINTWKGSTGVEEEPQGTSRSKQKAWDTISAKKTQENLLTNADQVAKARLQAAARLESGLWLHAIPIPPLGTHLDAEALRVAIALKVGAAVCHPHICKCGGGMDAQGHHALSCNYNAGRLPRHSALNDVIKRALQSANRASILEPHGLHREDSKRPDGMTTFPYKNGRCLVWDTTCVDTFSTTNIARNADEAGEAAWIAENKKREKYQAIARNHQFEPLAFETSGVFGPTTLKMVNEIGRKIREVSGEPRETLWLKQRLGMAILQGNATSVMSSVRLDWVMPLCEARAGVVYP

SEQ ID NO: 24246 - protein, 1014 aa, Paralithodes camtschaticus
MVEMEAPWEDQEDGLGEAEERIILEDYGLADTKCFKCGKTNARKNSRKCSGCLRSIHLSCAKLTKKTSGEQPNWKCLACPGPTAEPTGATPATPVADLTQLVTKWKARIQVLARLPKGARIQVAEALTTIIKKQALQLKTSLAWARLLGFSYGALRKPPRTNIQDHLQVSLATRVKRQVAQYMDGNKLVEPPKQQPNRAQKQQDKEEEEAEQLRKRVAAKLADSDIKGTVRLLSSSEGFADQGTEVVEALQEKHPPTPRDLNLPPAPNDQMRQPLVVTKEQVVAAVTSFPAGSAAGPDGIRPAHLKGLLGQGSGAAGEALLETLTKFINMVLRGEVPDCATPLFFGASLCALAKKEGGVRPIAVGNTFRRLATKVGLKPLSNGLGQHLRPVQLGFGTPGGCEAAVHATRTYLSQAQEKRVLLKIDMRNAFNSIRRDVFLRAAQEHIPTLYPLLWQAYSKPSILMFGETVIPSATGLQQGDPGGPALFSIGVDAAANKVRLELNVWYLDDATLGGSVENVLTDLNNIVTDLGQAGLVINDTKCELVLLNHTREQGEETQALFRDILPDVKILQEHQQTLLGSPLTLAAIPPALQVKKEELQRLVSRLIHIDAHSALALLKNCFSIPKLQYLLRTSMTYTNNGGLQELDSIIREAVTSITNVEFKERAWKQATLPVRLGGLGIRRASDIASPAFISSLIATNDLVVSILPSQPGMTLNGDVTAAINTWKGSTGVEEEPQGTSRSKQKAWDTISAKKTQEKLLTNADQVAKARLQAAAHSESGLWLHAIPIPPLGTHLDAEALRVAIALRVGAAVCHPHTCKCGRGMDAQGHHALSCNYNAGRLPRHSALNDVIKQALQSANRASILEPHGLHREDGKRPDGMTTFPYKNGRCLVWDATCVDTFSTTNIARNADEAGEAARIAENKKREKYQAIARNHQFEPLAFETSGVFGPTTLKMVNEIGRKIREVSGEPRETLWRKQRLGMAILRGNATSVMSSVRQDWVMPLCEARAGVVYP

SEQ ID NO: 24247 - protein, 1013 aa, Paralithodes camtschaticus
MVEMEAPREDQEDGLVEAEERIILEDYGLADTKCLKCGTTNARKNSRKYSGCLRSIHLSCAKLTKKTSGEQPNWKCLACPGPTAEPTGATPATPVADLNKLVTKWKARIQVLARVPKGARIQVAEALTTIIKQALQLKTPPAWARLLGFSYGALRKPPRTNIQDHLQVSLATRVKRQVAQYMDGNKLVEPPEQQPNRAQKHQEKEEEEVEQLRKRVAAKLADSDIKGAVRLLSSSEGFAGQGTEVVEALQEKHPPTPRDLNLPPAPNDQMRQPLVVTKEQVVDAVTSFPAGSAAGPDGIRPAHLKGLLGQGSGAAGEALLETLTKFINMVLRGEVADCATPLFLGASLCALAKKDGGVCPIAVGNTFRRLATKVGLKPLSNGLGRHLRPVQLGFGTPGGCEAAVHATRTYLSQAQEKRVLLKIDMRNAFNSIRRDVFLRAAQEHIPTLYPLLWQAYSKPSILIFGETVIPSETGLQQGDPGGPALFSIGVDAAANKVRSELNVWYLDDATLGGSVENVLTDLNNIITDLGQAGLVINDTKCELVLLNHTREQGEETQALFRNILPDVKILQEHQQTLLGYPLTLAAIPPALQVKKEELQSLVSRLIHIDAHSALALLKNCFSIPKLQYLLRTSMTYTNNGGLQELDSIIREAVTSITNVEFKERAWKQATLPVRLGGLGIRRASDIASPAFISSLIATNDLVLSILYSKPGMTLNGDVTAAINTWKGSTGVEEEPQGTSRSKQKAWDTISAKKTQENLLTNADQVAKARLQAAARSESGLWLHAIPIPPLGTHLDAEALRVAIALRVGAAVCHPHTCKCDGRMDAQGHHALSCNYNAGRLPRHSALNDVIKRALQSANCASILEPHGLHREDGKRPDGMTTFSYKNGRCLVWDATCVDTFSTTNAARNADEAGEAARIAENKKREKYQAIARIHQFEPLAFETSGVFGPTTLKMVNEIGRKIRQVSGEPRETLWLKQRLGMAILRGNATSVMSSVRQDWVMPLREAPAGVVYP

SEQ ID NO: 24248 - protein, 1012 aa, Paralithodes camtschaticus
MVEMEAPREDQEDGLVEAEERIILEDYGLADTKCLKCGTTNARKNSRKCSGCLRSIHLSCAKLTKKTSEQPNWKCLACPGPTAEPTGATPATPVADLTQLVTKWKARIQVLARVPKGARIQVAEALTTIIKQALQLKTPLAWARLLGFSYGALRKPPRTNIQDHLQVSLATRVKRQVAQYMDGNKLVEPPEQQPNRAQKHQEKEEEEAEQLRKRVAAKLADSDIKGAVRLLSSSEGFAGQGTEVVEALQEKHPPTPRDLNLPPAPNDQMRQPLVVTKEQVVAAVTSFPAGSAAGPDGIRPAHLKGLLGQGSGAAGEALLETLTKFINMVLRGEVPDCATPLFFGASLCALAKKDGGVRPIAVGNTFRRLATKVGLKPLSNGLGQHLRPVQLGFGTPGGCEAAVHATCTYLSQAQEKRVLLKIDMRNAFNSIRRDVFLRAAQEHIPTLYPLLCQAYSKPSILIFGETVIPSETGLQQGDPGGPALFSIGVDAAANKVRSELNVWYLDDATLGGSVENVLTDLNNIITDLGQAGLVINDTKCELVLLNHTREQGVETQALFRNILPDVKILQEHQQTLLGSPLTLAAIPPALQVKKEELQRLVSRLIHIDAHSALALLKNCFSIPKLQYLLRTSMTYTNNGGLQELDSIIREAVTSITNVEFKERAWTQATLPVRLGGLGIRRASDIASPAFISSLIATNDLVLSILYSKPGMTLNGDVTAAINTWKGSTGVEEEPQGTSRSKQKAWDTISAKKTQENLLTNADQVAKARLQAAARSESGLWLHAIPIPPLGTHLDAEALRVAIALRVGAAVCHPHTCKCDGRMDAQGHHALSCNYNAGRLPRHSALNDVIKRALQSANCASILEPHGLHREDGKRPDGMTTFSYKNGRCLVWDATCVDTFSTTNAARNADEAGEAARIAENKKREKYQAIARIHQFELLAFETSGVFGPTTLKMVNEIGRKIREVSGEPRETLWLKQRLGMAILRGNATSVMSSVRQDWVMPLREAPAGVVYP

SEQ ID NO: 24249 - protein, 965 aa, Paralithodes camtschaticus
MVEMEAPREDQEDGLVEAEERIILEDYGLAVYTKCFKCGTTNARKNSRKCSGCLRSIHLSCAKLTKKTSAEQPNWKCLACPGPTAEPTGATPATPVANLTQLVTKWKARIQVLARVPKGARIQVAEALTTIIKQALQLKTPLAWARLLGFSYGALRKPPRTNIQDHQVSLATRVKRQVAQYMDGNKLVEPPEQQPNRAHKHQDKEEEEAEQLRKRVAAKLADSDIKGAVRLLSSSEGFAGQGTDVVEALQEKHPPTPRDLNLPPAPNYQMRQPLVVTKEQVVAAVTSFPAGSAAGPDGIRPAHLKGLLGQGSGAAGEALLETLTKFINMVLRGEVPDCATPLFFGASLCALAKKDGGVRPIAVGNTFRRLATKVGLKPLSNGLGQHLRPVQLGFGTPGVCEAAVHATRTYLSQAQEKRVLLKIDMRNAFNSIRRDVFLRAAQEHIPTLYPLLWQAYSKPSILIFLETVIPSATGLQQGDPGGPALFSIGVDAAANKVRSELNVWYLDDATLGGSVENVLTDLNNIVTDLGQAGLVINDTKCELVLLNHTREQGEETQALVRNILPDVKILQEHQQTLLGSPLTLAAIPPALQVKKEELQRLVSRLIHIDAHSALALLKNCFSIPKLQYLLRTSMTYTNNGGLQELDSIIREAVTSITNVEFKERAWTQATLPVRLGGLGIRRASDIASPAFISSLIATNDLVLSILSSQPGTTLNGDVTAAINTWKGSTGVEEEPQGTSRSKQKAWDTISVKKTQENLLTNADQVAKARLQAAARSESGLWLHAIPIPPLGTHLDAEALRVAIALRVGAAVCHPHTCKCGGWMDAQGHHALSCNYNAGRLPRHSALNDVIKRALQSANRASILEPHGLYREDGKQPDGMTTFPYKNGRCLVWDATCVDTFSTTNIARNADEAGEAARIAENKKREKYQASARNHQFEPLAFETSGVFGPTTLNPPAPAMYYIYIP

SEQ ID NO: 24250 - protein, 1013 aa, Paralithodes platypus
MVEMEAPREDQEDGLVEAEERIILEDYGLADTKCLKCGTTNARKNSRKCSGCLRSIHLSCAKLTKKTSGEQPNWKCLACPGPTAEPTGATPATPVADLTQLVTKWKARIQVLARVPKGARIQVAEALTTIIKQALQLKTPLAWARLLGFSYGALRKPPRTNIQDHLQVSLATRVKRQVAQYMDGNKLVEPPEQQPNRAQKHQEKEEEEAEQLRKRVAAKLADSDIKGAVRLLSSSEGFAGQGTEVVEALQEKHPPTPRDLNLPPAPNDQMRQPLVVTKEQVVAAVTSFPAGSAAGPDGIRPAHLKGLLGQGSGAAGEALLETLTKFINMVLRGEVPDCATPLFFGASLCALAKKDGGVRPIAVGNTFRRLATKVGLKPLSNGLGQHLRPVQLGFGTPGGCEAAVHATRTYLSQAQEKRVLLKIDMRNAFNSIRRDVFLRAAQEHIPTLYPLLWQAYSKPSILIFGETVIPSETGLQQGDPGGPALFSIGVDAAANKVRSELNVWYLDDATLGGSVENVLTDLNNIITDLGQAGLVINDTKCELVLLNHTREQGEETQALFRNILPDVKILQEHQQTLLGSPLTLAAIPPALQVKKEELQRLVSRLIHIDAHSALALLKNCFSIPKLQYLLRTSMTYTNNGGLQELDSIIREAVTSITNVEFKERAWTQATLPVRLGGLGIRRASDIASPAFISSLIATNDLVLSILYSKPGMTLNGDVTAAINTWKGSTGVEEEPQGTSRSKQKAWDTISAKKTQENLLTNADQVAKARLQAAARSESGLWLHAIPIPPLGTHLDAEALRVAIALRVGAAVCHPHTCKCDGRMDAQGHHALSCNYNAGRLPRHSALNDVIKRALQSANCASILEPHGLHREDGKRPDGMTTFPYKNGRCLVWDATCVDTFSTTNAARNADEAGEAARIAENKKREKYQAIARIHQFEPLAFETSGVFGPTTLKMVNEIGRKIREVSGEPRETLWLKQRLGMAILRGNATSVMSSVRQDWVMPLREAPAGVVYP

SEQ ID NO: 24251 - protein, 1010 aa, Paralithodes camtschaticus
MEAPREDQEDGLVEAEQRIILEDYGLADTKCFKCRKTNARKNSRKCSGCLRSIHLSCAKLTKKTSGEQPNWKCLACPGPTAEPTGATPATPVADLTQLVTKWKARIQVLARVPKGARIQVAEALTTIIKQALLLKTPLAWARLLGFSYGALRKLPRTNIQDHLQVSLATRVKRQVAQYMDGNKLVEPPEQQPNRAQKQQDKEEVEAEQLRKRVAAKLADSDIKGAVRLLSSSEGFAGQGTEVVEALQEKHPPTPRDLNLPPAPNDQMRQPLVVTKEQVVAAVTSFPAGSAAGPDGIRPAHLKGLLGQGSGAAGEALLETLTKFINMVLRGEVPDCAIPLFLGASLCALAKKDGGVRPIAVGNTFRRLATKVGLKPLSNGLGQHSRPVQLGFGTPGGCEAAVHATRTYLSQAQEKRVLLKIDMRNAFNSIRRDVLLRAAQEHIPTLYPLLWQAYSKPSILIFGETVIPSATGLQQGDPGGPALFSIGVDAAANKVRSELNVWYLDDATLGRSVENVLTNLNNIVTDLGQAGLVINDTKCELVLLNHTREQGEETQALFRGILPDVKILQEHQQTLLGSPLTLAAIPPALQVKKEELQRLVSRLIHIDAHSALALLKNCFSIPKLQYLLRISMTYTNNGGLQDLDSIIREAVTSITNVEFKERAWTQATLPVRLGGLGIRKASDFASPAFISSLIATNDLVVSILSSQPGMTLNGDITAAINTWKGSTGVEEEPQGTSRSKQKAWDTISAKKTQENLLTNADQVANARLQAAARSESGLWLHAIPIPPLGTHLDAEALRVSIALRVGAAVCHPHTCKCGGGMDAKGHYALSCNYNAGRLPRHSAQNDVIKRALQSANRASILEPHGLHREDGKRPDGMTTFPYKNGRCLVWDATSVDTFSTTNIARNADEAGEAARIAENKKREKYQAIARNHQFEPLAFETSGVFGPTTLKMVNEIGRKIREVSGEPRETLWLKQRLGMAILRGNATSVMSSVRQDWVMPLCEARAGVVYP

SEQ ID NO: 24252 - protein, 1013 aa, Paralithodes camtschaticus
MVEMEAPREDQEDGLVEAEERIILEDYGLADTKCPKCRTTNARKNSRKCSGCLRSIHLSCAKLTKKTSGEQPNWKCLAFPGPTAEPTGATPATLVADLTQLVTKWKARIQVLARVPKGARIQVAEALTTIIKQALQLKTPLAWARLLGFSYGALRKPPRTNIQDHLQVSLATRVKCQVAQYMDGNKLVEPPEQQPNRAQKHQDKEEEEAEQLRKRVAAKHADSDIKGAVRLLSSSEGFAGQGTEVVEALQEKHPPTPRDLNLPPAPNDQMRQPLVVTKEQVVAAVTSFPAGSAAVPDGIRPAHLKGLLGQGSGAAGEALLETLTKFINMVLRGEVPDCATPLFFGASLCALAKKDGGVRPIAVGNTFRRLATKVGLKPLSNGLGQHLRPVQLGFGTPGGCEAAVHATRTYLSQAQEKRVLLKIDMRNAFNSIRRDVFLRAAQEHIPTLYPLLWQAYSKPSILIFGETVIPSETGLQQGDPGGPALFSIGVDAAANKVRSELNVWYLDDATLGGSVENVLTDLNNIVTDLGQAGLVINDTKCELVLLNHTREQGEETQALFRNILPDVKILQEHQQTLLGSPLTLAAIPPALQVKKEELQRLVSRLIHIDAHSALALLKNCFSIPKLQYLLRTLMTYTNNGGLQELDSIIREAVTSITNVEFKERAWTQATLPVRLGGLGIRRASDIASPAFISSLIATNDLVLSILYSQPGMTLNGNVTAAINTWKGSTGVEEEFQGTSRSKQKAWDTISAKKTQENLLTNADQVAKARLQAAARSESGLWLHAIPIPPLGTHLDAEALRVAIALRVGAAVCHPPTCKCDGRMDAQGHHALSCNYNAGRLPRHSALNDVIKRALQSANRASILEPHGLHREDGKRPDGMTTFSYKNGRCLVWDATCVDTFSTTNAARNADEAGEAARIAENKKREKYQAIARIHQFEPLAFETSGVFGPTTLKMVNEIGRKIREVSGEPRETLWLKQRLGMAILRGNATSVMSSVRQDWVMPLCEAPAGVVYP

SEQ ID NO: 24253 - protein, 814 aa, Paralithodes camtschaticus
MDGNKLVEPPEQQPNRAQKHQEKEEEEAEQLRKRVAAKLADSDIKGAVRLLSSSEGFAGQGTEVVEALQEKHPPTPRDLNLPAAPNDQMRQPLVVTKEQVVAAVTSFPAGSAAGPDGIRPAHLKGLLGQGSGAAGEALLETLTKFINMVLRGEVPDCATPLFLGASLCALAKKDGGVRPIAAGNTFRRLATKVGLKPLSNGLGQHLRPVQLGFGTPGGCEAAVHATRTYLSQAQEKRVLLKIDMRNAFNSIRRDVFLRAAQEHIPTLYPLLWQAYSKPSILIFGETVIPSETGLQQGDPGGPALFSIGVDAAANKVRSELNVWYLDDATLGGSVENVLTDLNNIITDLGQAGLVINDTKCELVLLNHTREQGEETQALFRNILPDVKILQEHQQTLLGSPLTLAAIPPALQVKKEELQCLVSRLIHIDAHSALALLKNCFSIPKLQYLLRTSMTYTNNGGLQELDSIIREAVTSITNVELKERAWTQATLPVRLGGLGIRRASDIASPAFISSLIATNDLVLSILYSKPGMTLNGDVTAAINTWKGSTGVEEEPQGTSRSKQKAWDTIWAKKTQENLLTNADQVAKARLQAAAHSESGLWLHAIPIPPLGTHLDAEALRVAIALRMGAAVCHPHTCKCDGRMDAQGHHALSCNYNAGRLPRHSALNDVIKRALQSANCASILEPHGLHREDGKRPDGMTTFSYKNGRCLVWDATCVNTFSTTNAARNADEAGEAARIAENKKREKYQAIARILQFEPLAFETSGVFGPTTLKMVNEIGRKIREVSGESRETLWLKQRLGMAILRGNATSVMSSV

SEQ ID NO: 24254 - protein, 832 aa, Paralithodes platypus
MDGNKLVEPPEQQPNRAQKHQDKEEEEAEQLRKRVAAKLADSDIKGAVRLLSSSEGFAGQGTEVVEALQEKHPPTPRDLNLPPAPNDQMRQPLVVTKEQVVAAVTSFPAGSAAGPDGIRPAHLKGLLGQGSGAAGEALLETLTKFINMVLRGEVPDCATPLFFGASLCALAKKDGGVRPIAVGNTFRRLATKVGLKPLSNGLGQHLRPVQLGFGTPGGCEAAVHATRTYLSQAQEKRVLLKIDMRNAFNSIRRDVFLRAAQEHIPTLYPLLWQAYSKPSILIFGETVIPSETGLQQGDPGGPALFSIGVDAAANKVRSELNVWYLDDATLGGSVENVLTDLNNIITDLGQAGLVINDTKCELVLLNHTREQGEETQALFRNILPDVKILQEHQQTLLGSPLTLAAIPPALQVKKEELQRLVSRLIHIDAHSALALLKNCFSIPKLQYLLRTSMTYTNNGGLQELDSIIREAVTSITNVEFKERAWTQATLPVRLGGLGIRRASDIASPAFISSLIATNDLVLSILYSKPGMTLNGDVTAAINTWKGSTGVEEEPQGTSRSKQKAWDTISAKKTQENLLTNADQVAKARLQAAARSESGLWLHAIPIPPLGTHLDAEALRVAIALRVGAAVCHPHTCKCDGRMDAQGHHALSCNYNAGRLPRHSALNDVIKRALQSANCASILEPHGLHREDGKRPDGMTTFPYKNGRCLVWDATCVDTFSTTNAARNADEAGEAARIAENKKREKYQAIARIHQFEPLAFETSGVFGPTTLKMVNEIGRKIREVSGEPRETLWLKQRLGMAILRGNATSVMSSVRQDWVMPLREAPAGVVYP

SEQ ID NO: 24255 - protein, 832 aa, Paralithodes camtschaticus
MDGNKLVEPPEQQPNRAQKHQDKEEEEAEQLRKRVAAKLADSDIKGAVRLLSSSEGFASQGTEVVEALQEKHPPTPRDLNLPPAPNDQMRQPLVVTKEQVVAAATLFPAGSAAGPDGIRPAHLKGLLGQGSGAAGEALLETLTKFINMVLRGEVPDCATPLFFGASLCALAKKDGGVRPIAVGNTFRRLATKVGLKPLSNGLGQHLRPVQLGFGTPGGCEAAVHATCTYLNQAQEKRVLLKIDMRNAFNSIRRCVFLRAAQEHIPTLYPLLWQAYSKPSILIFGETVIPSETGLQQGDPGGPALFSIGVDAAANKVRSELNVWYLDDATLGGSVENVLTDLNNIITDLGQAGLVINDTKCELVLLNHTREQGEETQALFRNILPDVTILQEYQQTLLGSPLTLAAIPPALQVKKEELQRLVSRLIHIDAHSALALLKNCFSIPKLQYLLRTSMTYTNNGGLQELDSIIREAVTSITNVEFKERAWTQATLPVRLGGLGIRRASDIASPAFISSLIATNDLVLSILYSKPGMTLNGDVTAAINTWKGSTGVEEEPQGTSRSKQKAWDTISAKKTQENLVTNADQVAKARLQAAARSESGLWLHAIPIPPLGTHLDAEALRVAIALRVGAAVCHPHTCKCDGRMDAQGHHALSCNYNAGRLPRHSALNDVIKRALQSANCASILEPHGLHREDGKRPDGMTTFPYKNGRCLVWDATCVDTFSTTNAARNADEAGEAARIAENKKREKYQAIARIHQFEPLAFETSGVFGPTTLKMVNEIGRKIREVSGEPRETLWLKQRLGMAILRGNATSVMSSVRQDWVMPLREAPAGVVYP

SEQ ID NO: 24256 - protein, 832 aa, Paralithodes camtschaticus
MDGNKLVEPPEQQPNRAQKHQDKEEEEAEQLRKRVAAKLADSDIKGAVRLLSSSEGFAGQGTEVVEALQEKHPPTPRDLNLPPAPNDQMRQPLVVTKEQVVAAVTSFPAGSAAGPDGIRPAHLKGLLGQGSGAAGEALLETLTKFINMVLRGEVPDCATPLFLGASLCALAKKDGGVRPIAVGNTFRRLATKVGLKPLSNGLGQHLRPVQLGFGTPGGCEAAVHATRTYLNQAQEKRVLLKIDMRNAFNSIRRDVFLRAAQEHIPTLYPLLWQAYSKPSILIFGETVIPSETGLQRGDPGGPALFSIGVDAAANKVRSELNVWYLDDATLGGSVENVLTDLNNIITDLGQAGLVINDTKCELVLLNHTREQGEETQALFRNILPDVTILQEHQQTLLGSPLTLAAIPPALQVKKEELQRLVSRLIHIDAHSALALLKNCFSIPKLQYLLRTSMTYTNNGGLQELDSIIREAVTSITNVEFKERAWTQATLPVRLGGLGIRRASDIASPAFISSLIATNDLVLSILYSKPGMTLNGDVTAAINTWKGSTGVEEEPQGTSRSKQKPWDTISAKKTQENLLTNADQVAKARLQAAARSESGLWLHAIPIPPLGTHLDAEALRVAIALRVGAAVCHPHTCKCDGRMDAQGHHALSCNYNAGRLPRHSALNDVIKRALQSANCASILEPHGLHREDGKRPDGMTTFPYKNGRCLVWDATCVDTFSTTNAARNADEAGEAARIAENKKREKYQAIARIHQFEPLAFETSGVFGPTTLKMVNEIGRKIREVSGEPRETLWLKQKLGMAILRGNATSVMSSVRQDWVMPLREAPAGVVYP

SEQ ID NO: 24257 - protein, 954 aa, Paralithodes camtschaticus
MAEMEAPREDQEVGLVEAEERIILEDYGLADTKSFKCGKTNARKNSRKCSGCLRSIHLSCAKLTKKTSGEQPNWKCLACPGPTAEPTGATPATSVADLTQLVTKWKARIQVLARVPKGARIQVAEALTTIIKQALQLKTPLAWARRLGFSYGALRKQPRTNIQDHLQVSLATRVKRQVAQYMDGNKLVEPPEQQPNRAQKQQDKEEEEAEQLRKRVAAKLADSDIKGAVRLLSSSEGFASQGTEVVEALQEKHPPTPRDLNLPPAPNDQMRQPLVVTKEQVVAAVTSFPAGSAAGPDGIRPAHLKGLLGQGSGAAGEALLETLTKFINMVLRGEVPDCATPLFLGASLCALAKKDGGVRPIAVGNTFRRLATKVGLKPLSNGLGQHLRPVQLGFGTPGGCEAAVHATRTYLSQAQEKRVLLKIDMRNAFNSIRRDVFLRAAQEPIPTLYPLLWQAYSKPSILIFGETVIPSATGLQQGDPGGPALFSIGVDAAANKVRSELNVWYLDDATLGGSVENVLTDLNNIVTDLGQAGLVINDTKCELVLLNHTREQGEETQALFRGILPDVKILQEHQQTLLGSPLTLAAIPPALQVKKEELQCLVSRLIHIDVHSALALLKNCFSIPKLQYLLRTSMTYTNNGGLQELDSIIREAVTSITNVEFKEWTWTQATLPVRLGGLGIWRASDIASPASISSLIATNDLVVSILSSQPGMTLNWDVTVAINTWKESTGVEEEPQGTSRSKQKAWDTISAKKTQENLLTNADQVAKACLQAAARSESGLWLHAIPIPPLGTHLDAEALRVAIALRVGAAVCHPHTCKCGGGMDAQGHHALSCNYNAGRLPRHSALNDVIKRALQSANRASILEPHGLHREDGKRPDGMTTFPYKNGRCLVWDATCVDTFSTTNIARNADEAGEAARIAENKKREKYQAIARNHQFEPWHSKLQESSALPPLRW

SEQ ID NO: 24258 - protein, 918 aa, Paralithodes platypus
MAEMEAPREDQEVGLVEAEERIILEDYGLADTKCFKCGKTNARKNSRKCSGCLRSINLSCAKLTKKTSGEQPNWKCLACPGPTAEPTGATPATPVADLTQLVTKWKARIQVLARVPKGARIQVAEALTTIIKQALQLKTPLAWARLLGFSYGALRKPPRTNIQDHLQVSLATRVKRQVAQYMDGNKLVEPPVQQPNRAQKQQDKEEEEAKQLRKRVAAKLADSDIKGAVRLLSSSEGFAGQGTKVVEALQEKHPATPRDLNLPPAPNDQMRQPLVVTKEQVVAAVTSFPAGSAAGPDGIRPAHLKGLLGQGSGAAGEVLLETLTKFINMVLRGEVPDCATPLFFGASLCALAKKDGGVRPIAIGNTFRRLATKVGLKPLSNGLGQHLRPVQLGFGTPGGCEAAVHATRTYLSQAQEKRVLLKIDMRNAFNSIRRDVFLRAAQEHIPTLYPLLWQAYSKPSILIFGETVIPSATGLQQGDPGGPALFSIGVDAAANKVRSELNVWYLDDATLGGSVENVLTDLNNIVTDLGQAGLVINDTKCDLVLLNHTREQGEETQALFRGILPDVKILQEHQQTLLGSPLTLAAIPPALQVKKEELQHLVSRLIHIDAHSALALLKNCFSIPKLQYLLRTSMTYTNNGGLQELDSIIREAVTSITNVEFKERTWTQATLPVRLGGLGIRRASDIASPAFISSLIATNDLVVSILSSQPGMTLNGDITAAINTWKESTGVEEEPRGTSRSKQKAWDTISAKKTQENLLTNADQVAKARLQAAAHSESGLWLHAIPIPPLGTHLDAEARRVAIALRVGAAVCHPHTCKCGGGMDAQGHHALSCNYNAGCLPRHSALNDVIKRALQSANRASILEPHGLHREDGKRPDGMTTFPYKNGRCLVWDATCVDTFSTTNIARNADEAAVKPPG

SEQ ID NO: 24259 - protein, 840 aa, Paralithodes camtschaticus
MDVFFRPDGRVLARLGQQKISKVSGFKNKASDLCLSEDAVWIEPSTSLIHEISPASPDALVKARDQDFMVSRRLASGGRDGTSMHKSCQHNIKTCQNSRVQGQPGKVVVSAVTSFPAGSAAGPDGIRPAHLKGLLGQGSGAAGEALLETLTKFINMVLRGEVPDCATPLFLGASLCALAKKDGGVRPIAVGNTFRRLATKVGLKPLSNGLGQHLRPVQLGFGTTGGCEAAVHATRTYLSQAQEKRVLLKIDMRNAFNSIRRDVFLRAAQEHIPTLYPLLWQAYSKPSILIFGETVIPSETGLQQGDPGGPALFSIGVDAAANKVRSELNVWYLDDATLGGSVENVLTDLNNIITDLGQAGLVINDTKCELVLLNHTREQGEETQALFRNILPDVKILQEHQQTLLGSPLTLAAIPPALQVKKEELQRLVSRLIHIDAHSALALLKNCFSIPKLQYLLRTSMTYTNNGGLQELDSIIREAVTSITNVEFKERAWTQATLPVRLGGLGIRRASDIASPAFISSLIATNDLVLSILYSKPGMTLNGDVTAAINTWKGSTGVEEEPQGTSRSKQKAWDTISAKKTQENLLTNADQVAKARLQAAARSESGLWLHAIPIPPLGTHLDAEALRVAIALRVGAAVCHPHTCKCDGRMDAQGHHALSCNYNAGRLPRHSALNDVIKRALQSANCASILEPHGLHREDGKRPDGMTTFSYKNGRCLVWDATCVDTFSTTNAARNADEAGEAARIAENKKREKYQAIARIHQFEPLAFETSGVFGPTTLKMVNEIGRKIREVSGEPRETLWLKQRLGMGILRGNATSVMSSVRQDWVMPLREAPAGVVYP

SEQ ID NO: 24260 - protein, 1012 aa, Paralithodes camtschaticus
MVEMEAPREDQDGLVEAEERIILEDYGLADTKCFKCGKTNARKNSRKCSGCLRSIHLSCAKLTKKTSGEQPNWKCLACPGPTAEPTGATPATPVADLTQLVTKWKARIQVLARVPKGARIQVAEALTTIIKQALQLKTPLAWARLLGFSYGALRKPPRTNIQDHLQVSLATRVKRQVAQYMDGNKLVEPPEQQPNRAQKHQDKEEEEAEQLRKRVAAKLADSDIKGAVRLLSSSEGFAGQGTEVVEALQEKHPPTPRDLNLPPAPNDQMRQPLVVTKEQVVAAVTSFPAGSAAGPDGIQPAHLKGLLGQGSGAAGEALLETLTKFINMVLRGEVPDCATPLFLGASLCALAKKDGGVRPIAVGNTFRRLATKVGLKPLSNGLGQHLRPVQLGFGTPGGCEAAVHATRTYLSQAHEKRVLLKIDMRNAFNSIRRDVFLRAAQEHIPTLYPLLWQAYSKPSILIFGETVIPSATGLQQGDPGGPALFSIGVDAAANKVRSELNVWYLDDATLGGSVENVLTDLNNIVTDLGQAGLVINDTKCELVLLNHTREQGEETQALFRDILPDVKILQEHQQTLLGSPLTLAAIPPALQVKKEELQRLVSHLIHIDAHSALALLKNCFSIPKLQYLLRTSMTYTNNGGLQELDSIIREAVTSITNVEFKERAWTQATLPVRLGGLGIRRASDIASPAFISSLIATNDLVVSILSSQPGMTLNGDVTAAINTWKGSTGVEEEPQGTPRSKQKAWDTISAKKTQENLLTNADQVAKARLQAAARSESGLWLHAIPIPPLGTHLDAEALRVAIALRVGAAVCHPHTCKCGGGMDAQGHHALSCNYNAGRLPRHSALNDVIKRALQSANRASILEPHGLHREDGKQPDGMTTFPYKNGRCLMWDATCVDTFSTTNIARNADEAGEAARIAENKKREKYQAIARNHQFEPLEFETSGVFGPTTLKMVNDIGRKIREVSGEPRETLWLKQRLGMAILRGNATSVMSSVRQDWVMPLCEARAGVVYP

SEQ ID NO: 24261 - protein, 1013 aa, Paralithodes camtschaticus
MVEMEAAREDQEDGLVEAEERIILEDYGLADTKCLKCGTTNARKNSRKCSGCLRSIHLSCAKLTKKTSGEQPNWKCLACPGPNAEPTGATPATPVADLTQLVTKWKARIQVLARVPKGARIQVAEALTTIIKQALQLKTPLAWARLLGFSYGALRKPPRTNIQDHLQVSLATRVKRQVAQNMDGNKLVEPPEQQPNRAQKHQDKEEEEAEQLRKRVAAKLADSDIKGAVRLLSSSEGFAGQGTEVVEALQEKHPPTPRDLNLPPAPNDQMCQPLVVAKEQVVAAVTSFPAGSAAGPDGIRPAHLKGLLGQGSGAAGEALLETLTKFINMVLRGEVPDCATPLFFGASLCALAKKDGGVRPIAVGNTFRRLALKVGLKPLSNGLGQHLRPVQLGFGTPGGCEAAVHATRTYLSQAQEKRVLLKIDMRNAFNSIRRDVFLRAAQEHIPTLYPLLWQAYSKPSILIFGETVIPSETGLQQGDPGGPALFSIGVDAAANKVRSELNVWYLDDATLGGSVENVLTDLNNIITDLGQAGLVINDTKCELVLLNHTREQGEETQALFRNILPDVKILQEHQQTLLGSPLTLAAIPLALKVKKEELQRLVSRLIHIDAHSALALLKNCFSIPKLQYLLRTSMTYTNNGGLQELDSIIREAVTSITNVEFKERAWTQATLPVRLGGLGIRRASDIASPAFISSLIATNDLVLSILYSKPGMTLNGDVTAAINTCKGSTGVEEEPQGTSRSKQKAWDTISAKKTQENLLTNADQVAKARLQAAARSESGLWLHAIPIPSLGTHLDAEALRVAIALRVGATVCHPHTCKCDGRMDAQGHHALSCNYNAGRLPRHSALNDVIKRALQSANCASILEPHGLHREDGKRPDGMTTFPYKNGRCLVCDATCVDTFSTTNAARNADEAGEAARIAENKKREKYQAIARIHQFEPLAFETSGVFGPTTLKMVNEIGRKIREVSGEPRETLWLKQRLGMAILRGNSTSVMSSVRQDWVMPLREAPAGVVYP

SEQ ID NO: 24262 - protein, 1013 aa, Paralithodes camtschaticus
MVEMEAPREDQEDGLVEAEERIILEDYGLADTKCFKCGKTNARKNSRKCSGCLRSIHLSCAKLTKKTSGEQPNWKCLACPGPTAEPTGATPATPVADLTQLVTKWKARIQVLARVPKGARIQVAEALTTIIKQALQLKTPLAWARLLGFSYGALQKPPRTNIQDHLQVSLDTRVKRQVAQYMDGNKLVEPPEQQPNRAQKQQDKEEEEAEQLRKRVVAKLADSDIKGAVRLLSSSEGFAGQGTEVVEALQEKHPPTPRDLNLPPAPNDQMRQPLVVTKEQVVAAVTSFPAGSAAGPDGIRPAHLKGLLGQGSGAAGEALLETLTKFINMVLRGEVPDCATPLFFGASLCALAKKDGGVRPIAVGNTFRRLATKVGLKPLSNGLGQHLRPVQLGFGTPGGCEAAVHATRTYLSQAQEKRVLLKIDMRNAFNSIRRDVFLRAAQEHIPTLYPLLWQAYSKPSILIFGETVIPSATGLQQGDPGGPALFSIGVDAAANKVRSELNVWYLDDATLGGSVENVLTDLNNIVTDLGQAGLVINDTKCELVLLNHTREQGEETQALFRDILPDVKILQEHQQTLLGSPLTLAAIPPAIQVKKEELQHLVSRLIHIDAHSALALLKNCFSVPKLQYLLRTSMTYTNNGGLQELDSIIREAVTSITNVEFKEQAWTQATLPVRLGGLGIRRASDIASPAFISSLIATNDLVVSILSSQLGMTLNGDVTAAINTWKGSTGVEEEPQGTSRSKQKAWDTISAKKTQENLLTNADQVAKARLQAAARSESGLWLHAIPIPPLGTHLDAEALRVAIALRVGAAVCHPHTCKCGGGMDAQGHHALSCNYNAGRLPRHSALNDVIKRALQSANRASILEPHGLHREDGKRPDGMTTFPYKNGRCLVWDATCVDTFSTTNIARNADDAGEAARIAENKKRKKYQAIARNHQFEPQAFETSGVFGPTTLKMVNEIGRKIREVSGEPRETLWLKQRLGMAILRGNATSVMSSVRQDWVMPLCEARAGVVYP

SEQ ID NO: 24263 - protein, 1113 aa, Paralithodes camtschaticus
MGPKLSILHSFVPVFGLFSLLVLHFKKSILLLVPKLLSLLFIIIVLLLLYLLLLIYVSAYILIHPVRMLTSRLSEVGRALLTIGYIIVAGSDGEKVRFNVSNIMEAPREDQEDGLVEAEERIILEDYGLADTKCLKCGTTNARKNSRKCSGCLRSIHLSCAKLTKKTSGEQPNWKCLACPGPTAEPTGATPATPVADLTQLVTKWKARIQVLARVPKGARIQVAEGLTTIIKQALQLKTPLAWARLLGFSYGALRKPPRTNIQDHLQVSLATRVKRQVAQYMDGNKLVEPPEQQPNRAQKHQDKEEEEAEQLRKRVAAKLADSDIKGAVRLLSSSEGFAGQGTEVVEPLQEKHPPTPRDLNLPPAPNDQMRQPLVVTKEQVVAAVTSVPAGSAAGPDGIRPAHLKGLLGQGSGAAGEALLETLTKFINMVLRGEVPDCATPLFLGASLCALAKKDGGVRPIAVGNTFRRLATKVGLKPLSNGLGQHLRPVQLSFGTPGGCEAAVYATRTYLSQAQEKQVLLKIDMRNAFNSIRRDVFLRAAQEHIPTLYPLLWQAYSKPSILIFGETVIPSETGLQQGDPGCPALFSIGVDAAANKVRSELNVWYLDDATLGGSVENVLTDLNNIITDLGQDGLVINYTKCELVLLNHTREQGEETQALFRNILPDVKILQEHQQTLLGSPLTLAAIPPALQVKKEELQRLVSRLIHIDAHSALALLKNCFSIPKLQYLLRTSMTYTNNGGLQELDSIIREAVTSITNVEFKERAWTQATLPVRLGGLGIRRASDIASPAFISSLIATNDLVLSILYSKPGMTLNGDVTAAINTWKGSTGVEEEPQGTSRSKQKAWDTISAKKTQENLLTNADQVAKARLQAAARSESGLWLHAIPIPPLGTHLDAEALRVAIALRVGAAVCHPYTCKCDGKMDAQGHHALSCNYNAGRLPRHSALNDVIKRALQSANCASILEPHGLHREDGKRPDGMTTYPYKNGWCLVWDATCVDTFSTTNAARNADEAGEAARIAENKKREKYQAIARIHQFEPLAFETSGVFGPTSLKMVNEIGRKIREVSGEPRETLWLKQRLGMAILRGNATSVMSSVRQDWVMPLREAPAGVVYP

SEQ ID NO: 24264 - protein, 832 aa, Paralithodes camtschaticus
MDGNKLVEPPEQQPNRAQKQQDKEEEEAEQLRKRVAAKLADSDIKGAVRLLSSSEGFAGQGTEVVEALQEKHLPTPRDLNLPPAPNDQMRQPLVVTKEQVVAAVTSFPAGSAAGPDGIRPAHLKGLLGQGSGAAGEALLETLTKFINMVLRGEVPDCATPLFFGASLCALAKKDGGVCPIAVGNTFRRLATKVGLKPLSNGLGQHLRPVQLGFGTPGGCEAAVHATRTYLSQAQEKRVLLKIDMRNAFNNIRRDVFLRAAQEHIPTLYPLLWQAYSKPSILIFGETVIPSATGLQQGDPGGPALFSIGVDAAANKVRSELNVWYLDDATLGGSVENVLTDLNNIVTDLGQAGLVINDTKCELVLLNHTREQGEETQALFQGILPDVKILQEHQQTLLGSPLTLAAIPPALQVKKEELQRLVSRLIHIDAHSALALVKNCFSIPKLQYLLRTSMTYTNNGGLQELDSIIREAVTSITNVEFKEWTWTQATLPVRLGGLGIRRASDIASPAFISSLIATNDLVVSILSSQPVMTLNGDVTVAINTWKESTGVEEEPQGTSRSKQKVWDTISVKKTQENLLTNADQVAKARLQAAARSESGLWLHAIPIPPLGTHLDAEALRVAIAFRVGAAVCHTCKCGGGMDAQGHHALSCNYNAGRLPRHSALNDVIKRALQSANRASILEPHGLHREDGKRPDGMTTFPYKNGQCLVWDATCVDTFSTTNIARNADEAGEAARIAENKKREKYQAIARNHQFEPLAFETSGVFGPTTLKMVNEIGRKIREVSGEPRETLWLKQRLGMANAILRGNATSVMSSVRLDWVMPLCEARAGVVYP

SEQ ID NO: 24265 - protein, 832 aa, Paralithodes camtschaticus
MDGNKLVEPPEQQPNRAQKQQDKEEEEAEQLRKRVAAKLADSDIKGAVRLLSSSEGFAGQGTEVVEALQEKHPPTPRDLNLPPAPNDQMRQPLVVTKEQVVAAVTSFPAGSAAGPDGIRPAHLKGLLGQGSGAAGEALLETLTKFINMVLRGEVPDCATPLFFGASLCALAKKDGGVHPIAVGNTFPRLATKVGLKPLSNGLGQHLRPVQLGFGTPGGCEAAVHATRTYLSQAQEKRVLLKIDMRNAFNSIRRDVFLRAAQEHIPTLYPLLWQAYSKPSILIFGETVIPSATRFQQRDPGGPALFSIGVDAAANKVRSELNVWYLDDATLGGSVENVLTDLNNIVTDLGQAGLVINDTKCELVLLNHTHEQGEETQALFRGILPNVKILQEHQQTLLGSPLTLAAIPPALQVKKEELQRLVSRLIHIDAYSALALLKNCFSIPKLQYLLRTSMTYTNNGGLQELDSIIREAVTSITNVEFKERTWTQATLPVRLGGLGIRRASDIASPAFISSLIATNDLVVSILSSQPGMTLNWDVTAAINTWKESTGVEEEPQGTSRSKQKAWDTISANKTQENLLTNADQVAKACLQAAARSESGLWLHAIPIPPLGTNLDAEALRVAIALRVGAAVCHPHTCKCGRGMDAQGHHALSCNYNAGRLPRHSALNDVIKRALQSANRASILEPHGLHREDGKWPDGMTTFPYKNGRCLVWDATCVDTFSTTNIARNADEAGEAARIAENKKREKYQAIARNHQFEPLAFETSGVFGPTTLKMVNEIGRKIREVSGEPRETLWLKQRLGMAILRGNATSVMSSVRLDWLMPLCEARAGVVYP

SEQ ID NO: 24266 - protein, 1013 aa, Paralithodes camtschaticus
MVEMEAPREDQEDGLVEAEERIILEDYGLADTKCLKCGTTNARKNSRKCSGCLRSIHLSCAKLTNKTSGEQPNWKCLACPGPTAEPTGATLATPVADLTQLVTKWKARIQVLARVPKGARIQVAEALTTIIKQALQLKTPLAWARLLGFSYGALRKPPRTNIQDHLQVSLATRVKRQVEQYMDGNKLVEPPEQQPNRAQKHQDKEEEEVEQLRKRVAAKLADSDIKGAVRLLSSSEGFAGQGTEVVEALQEKPPPTSRDLNLPPAPNDQMRQPLVVTKEQVVAAVTSFPAGSAAGPDGIRPAHLKGLLGQGSGAAGEALLETLTKFINMVLRGEVPDCATPLFLGASLCALAKKDGGVRPIAVGNTFRRLATKVGLKPLSNGLGQHLRPVQLGFGTPGGCEAAVHATRTYLSQAREKRVLLKIDMPNAFNSIRRDVFLRAAQEHIPTLYPLLWQAYSKPSILIFGETVIPSETGLQQGDPGGPALFSIGVDAAANKVRSELNVWYLDDATMGGSVENVLTDLNNIITDLGQAGLVINDTKCELVFLNHTREQGEETQALFRNILPDVKILQEHQQTLLGSPLTLAAIPPALQVKKEELQRLVSRLIHIDAHSALALLKNCFSIPKLQYLLRTSMTYTNNGGLQELDSIIRDAVTSITNVEFKERAWTQATLPVRLGGLGIRRASDIASPAFISSLIATNDLVLSILYSKPGMTLNGDVTAAINTWKGSTGVEEEPQGTSRSKQKAWDTISAKKTQENLLTNADQVAKARLQAAARSESGLWLHAIPIPPLGTHLDAEALWVAIALRVGAAVCHPHTCKCDGSMDAQGHHALSCNYNAGRLPRHSALNDVIKRALQSANCASILEPHGLHREDGKRPDGMTTYPYKNGRCLVWDATCVDTFSTTNAARNADEAGEAARIAENKKREKYQAIARIHQFEPLAFETSGVFGPTTLKMVNEIGRKIREVSGEPRESLWLKQRLGMAILRGNATSVMSSVRQDWVMPLREAPAGVVYP

SEQ ID NO: 24267 - protein, 936 aa, Paralithodes camtschaticus
MVEMEAPREDQEDGLVEAEERIILEDYGLADTKCFKCGTTNARKNSRKCSGCLRYIHLSCAKLTKKTSGEQPNWKCLACPGPTAEPTGATPATPVANLTQLVTKWKARIQVLARVPKGARIQVAEALTTIIKQALQLKTPLAWARLLGFSYGALRKPPRTNIQDHLQVSLATRVKRQVAQYMDGNKLVEPPEQQPNRAQKHQDKEEEEAEQLRKRVAAKLADSDIKGAVRLLSSSEGFAGQGTEVVEALQEKHPPTPRDLNLPPAPNDQMRQPLVVTKEQVVAAVTSFPAGSAAGPDGIRPAHLKGLLGQGSGAAGEALLETLTKFINMVLRGEVPDCATPLFLGASLCALAKKDGGVRPIAVGNTFRRLATKVGLKPLSNGLGQHLRPIQLGFGSPGGCEAAVHAIRTYLSQAQEKRVLLKIDMRNAFNSIRRDVFLRAAQEHIPTLYPLLWQAYSKPSILIFGETVIPSETGLQQGDPGGPALFSIGVDAAANKVRSELNVWYLDDATLGGSVENVLTDLNNIVTDLGQAGLVINYTKCELVLLNHTREQGKETQALFRNILPDVKILQEHQQTQLGSPLTLAAIPPALQVKKEELQRLVSRLIHIDAHSALALLKNCFSIPKLQYLLRTSMTYTNNGGLQELDSIIREAVTSISNVEFKERAWTKATLPVRLGGLGIRRASDIASPAFTSSLIAINDLVLSILYSQPGMTLNGDVTAAINTWKGSTGVEEEPQGTSRSKQKAWDTISAKKTQENVLTNADQVAKARLQAAARSESGLWLHAIPIPPLGTHLDAEALRVAIALRVGAAVCHPHTCKCGGRMDAQGHHALSCNYNAGRLPRHSALNDVIKRALQSANRASILEPHGLHREDGKRPDGMTTFPYKNGRCLVWDATCVDTFSTTNIARNADEAGEAARIAENKKREKYQAIARNHQF

SEQ ID NO: 24268 - protein, 775 aa, Paralithodes platypus
MDGNKLVEPPEQQPNRAQKHQEKEEEEAEQLRKRVAAKLADSDIKGAVRLLSSSEGFAGQGTEVVEALQEKHPPTPRDLNLPPAPNDQMRQPLVVTKEQVVAAVTSFPAGSAAGPDGIRPAHLKGLLGQGSGAAGEALLETLTKFINMVLRGEVPDCATPLFFGASLCALAKKDGGVRPIAVGNTFRRLATKVGLKPLSNGLGQHLRPVQLGFGTPGGCEAAVHATRTYLSQAQEKRVLLKIDMRNAFNSIRRDVFLRAAQEHIPTLYPLLWQAYSKPSILIFGETVIPSETGLQQGDPGGPALFSIGVDAAANKVRSELNVWYLDDATLGGSVENVLTDLNNIITDLGQAGLVINDTKCELVLLNHTREQGEETQALFRNILPDVKILQEHQQTLLGSPLTLAAIPPALQVKKEELQRLVSRLIHIDAHSALALLKNCFSIPKLQYLLRTSMTYTNNGGLQELDSIIREAVTSITNVEFKERAWTQATLPVRLGGLGIRRASDIASPAFISSLIATNDLVLSILYSKPGMTLNGDVTAAINTWKGSTGVEEEPQGTSRSKQKAWDTISAKKTQENLLTNADQVAKARLQAAARSESGLWLHAIPIPPLGTHLDAEALRVAIALRVGAAVCHPHTCKCDGRMDAQGHHALSCNYNAGRLPRHSALNDVIKRALQSANCASILEPHGLHREDGKRPDGMTTFSYKNGRCLVWDATCVDTFSTTNAARNADEAGEAARIAEKKKAREKNIKPSPEFISSSPWHSKLQESSALPPLRW

SEQ ID NO: 24269 - protein, 1013 aa, Paralithodes camtschaticus
MAEIEAPREDQEVGLIEAEERIILEDYGLADTKCFKCGKTNARNNSRKCSGCLRSIHLSCAKLTKKTSGEQPNWKCLACPGPTAEPTGATPATPVADLTQLVTKWKARIQVLARVPKGARIQVAEALTTIIKQALQLKTPLAWARLLGFSYGALRKPPRTNIQDHLQVSLATRVKRQVAQYMDGNKLVEPPEQQPNRTQKQQDKEEEEAEQLRKRVAAKLADSDIKGAVRLLSSSEGFAGQGTEVVEALQEKHPPTPRDLNLPPAPNDQMRQPLVVTKEQVVAAVTSFPAGSAAGPDGIRPAHLKGLLGQGSGAAGEALLETLTKFINMVLRGEVPDCATPLFFWASLCALAKKDGGVRPITVRNTFRRLATKVGLKPLSNGLGQHLRPVQLSFGTPGGCEAAVHATRTYLSQAQEKRVHLKIDMRNAFNSIHRDVFLRAAQEHIPTLYPLLWQAYSKPSILIFGETVIPSATGLQQGDPGGPALFSIGVDAAANKVRSELNVWYLDDATLGGSVENVLTDLNNIVTDLGQAGLVINDTKCELVLLNHTREQGEETQALFRGILPDVKILQEHQQTLLGSPLTLAAIPPALQVKKEELQRLVSRLIHIDAHSALALLKNCFSIPKLQYLLRTSMTYTNNGGLQELDSIIREAVTSITNVEFKERTWTQATLPVCLRGLGIRRASDIASPAFISSLIATNDLVVSILSSQPGMTLNGDVTVAINTWRESTGVEEEPQGTSRSKQKAWDTISAKKTQENLLTNADQVAKARLQAAARSDSGLWLHAIPIPPLGTHLDAEALRVAIALRVGAVVCHPHTCKCGRGMDAQGHHALSCNYNAGRLPRHSALNDVIKRALQSANRASILEPHGLHREDGKRPDGMTTFSYKNGRCLVWDATCVDTFSTTNIARNADEAGEAARIAENKKREKYQAIARNHQFEPLAFETSGVFGPTTLKMVNEIGRKIREVSGEPRETLWLKKRLGMAILRGNATSVISSVRLDWVMPLCEARAGVVYP

SEQ ID NO: 24270 - protein, 758 aa, Paralithodes camtschaticus
MDGNKLVEPPEQQPNRAQKQQDKEEEEAEQLGKRVAAKLADSDIKGAVRLLSSSEGFAGQGTEVVEALQEKHPPTPRDLNLPPAPNDQMRQPLVVTKEQVVAAVTSFPAGSAAGPDGIRPAHLKGLLGQGSGAAGEALLETLTKFINMVLRGEVPDCATPLFIGASLCALAKKDGGVRPIAVGNTFRRLATKVGLKPLSNGLVQHLRPVQLGFGTPGGCEAAVHATRTYLSQAQEKRVLLKIDMRNAFNSIRRDVFLRAAQEHIPTLYPLLWQAYSKPSILIFGETVIPSATGLQQGDPGGPALFSIGVDAAANKVRSELNVWYLDDATLGGSVENVLTDLNNIVTDLGQAGLVINDTKCELVLLNHTHEQGEETQALFRGILPDVKILQEHQQTLLGSPLTLAAIPPALQVKKEGLQCLVSRLIHIDAHSALALLKNCFSIPKLQYLLRTSMTYTNNGGLQELDSIIREAVTSITNVEFKERTWTQATLPVRLGGLGIRRASDIASPAFISSLIATNDLVVSILSSQPGMTLNWDVTTAINTWKESTGVEEEPQGTSRSKQKAWDTISAKKTQENLLTNADQVAKARLQAAARSESGLWLHAIPIPPLGTHLDAEALRVAIALRVGAAVCHPHTCKCGRGMDAQGHHALSCNYNAGRLPRHSALNDVIKRALQSANRASILEPHGLHREDGKWPDGMTAFPYKNGRCLVWDATCVDTFSTTNIARNADEAGEATRIAENKKREKYQAIARNRQKSSV

SEQ ID NO: 24271 - protein, 999 aa, Paralithodes platypus
MVEMEAPREDQEDGLVEAEERIILEDYGLADTKCLKCGTTNARKNSRKCSGCLRSIHLSCAKLTKKTSGEQPNWKCLACPGPTAEPTGATPATPVADLTQLVTKWKARIQVLARVPKEPRIQVAEALTTIIKQALQLKTPLAWARLLGFSYGALRKPPRTNIQDHLQVSLATRVKRQVAQYMDGNKLVEPPEQQPNRAQKHQEKEEEEAEQLRKRVAAKLADSDIKGAVRLLSSSEGFAGQGTEVVEALQEKHPPTPRDLNLPPAPNDQMRQPLVVTKEQVVAAVTSFPAGSAAGPDGIRPAHLKGLLGQGSGAAGEALLETLTKFINMVLRGEVPDCATPLFFGASLCALAKKDGGVRPIAVGNTFRRLATKVGLKPLSNGLGQHLRPVQLGFGTPGGCEAAVHATRTYLSQAQEKRVLLKIDMRNAFNSIRRDVFLRAAQEHIPTLYPLLWQAYSKPSILIFGETVIPSETGLQQGDPGGPALFSIGVDAAANKVRSELNVWYLDDATLGGSVENVLTDLNNIITDLGQAGLVINDTKCELVLLNHTREQGEETQALFRNILPDVKILQEHQQTLLGSPLTLAAIPPALQVKKEELQRLVSRLIHIDAHSALALLKNCFSIPKLQYLLRTSMTYTNNGGLQELDSIIREAVTSITNVEFKERAWTQATLPVRLGGLGIRRASDIASPAFISSLIATNDLVLSILYSKPGMTLNGDVTAAINTWKGSTGVEEEPQGTSRSKQKAWDTISAKKTQENLLTNADQVAKARLQAAARSESGLWLHAIPIPPLGTHLDAEALRVAIALRVGAAVCHPHTCKCDGRMDAQGHHALSCNYNAGRLPRHSALNNVIKRALQSANCASILEPHGLHREDGGKRPDGMTTFPYKNGRCLVWDATCVDTFSTTNAARNADEAGEAARIAENKKREKYQAIARIHQFEPLAFETSGVFGPTTLKMVNEIGRKIREVSGEPRETLWLKQRLGMAILRGNATSVMSSVRQD

SEQ ID NO: 24272 - protein, 1013 aa, Paralithodes camtschaticus
MVEMEAPQEDQEDGLGEAEERIILEDYGLADTKCFKCGKTNARKNSRKCSGCLRSINLSCAKLTKKTSGEQPNWKCPACPGPTAEPTGATPATPVADLTQLVTKWKARIQVLARVPKGARIQVAEALTTIIKQALQLKTPLAWARLLGFSYGALRKPPRTNIQDHLQVSLATRVKRQVAQYMDGNKLVEPPEQQPNRAQKQQDKEEEEAEQLRKRVAAKLADSDIKGAVRLLSSSEGFAGQGTEVVEALQEKHPPTPRDLNLPPAPNDQMRQPLVVTKEQVVAAVTSFPAGSAAGPDGIRPAHLKGLLGQGSGAAGEALLETLTKFINMVLRGEVPDCATPLFLGASLCALAKKDGGVRPIAVGNTFRRLATKVGLKPLSNGLGQHLRPVQLGFGTPGECEAAVHATRTYLSQAQEKRVLLKIDMRNAFNSIRRDVFLRAAQEHIPTLYPLLWQAYSKPSILMFGETVTPSATGLQQGDPGGPALFSIGVDAAANKVRSELNVCYLDDATLGGSVENVLTDLNNIVTDLGQAGLVINDTKCEHVLLNHTGEQGEETQALFRDILPDVKILQEHQQTLLGSPLTLAAIPPALQVKKEELQRLVSHLVHIDAHSALALLKNCFSIPKLQYLLRTSMTYTNNGGLQELDSIIREAVTSITNVEFKERAWTQATLPVRLGGLGIRRASDIASPAFISSLIATNDLVVSILPSQPGMTLNGDVTAAINTWKGSTGVEEEPQGTSRSKQKAWDTISAKKTQENLLTNADQVAKARLQAAARSESGLWLHAIPIPPLGTHLDAEALRVAIALRVGAAVCHPHTCKCGRGMDAQGHHALSCNYNAGRLPRHSALNDVIKRALQSANRASILEPHGLHREDGKRPDGMTTFPYKNGRCLVWDATCVDTFSTTNIARNADEAGEAAQIAENKKREKYQAIARNHQFEPLAFETSGVFGPTTLKMVNEIGRKIREVSGEPRETLWLKQRLGMAILRGNATSVMSSVRQDWVMPLCEARAGVVYP

SEQ ID NO: 24273 - protein, 970 aa, Paralithodes camtschaticus
MAEMEAPREDQEVGLVEAEERIILEDYGLADTKCFKCRNTNARKNSRKCSSCLRSIHLSCAKLTKKTSGEQPNWKCLACPGPTAEPTGATPATPATPVANLTQLVTKWKARIQVLARVPKGARIQVAEALTTIIKQALQLKTPLAWARLLGFSYGALRKPPRTNIQDHLQVSLATRVKRQVAQYMDGNKLVEPPEQQPNRAQKQQDKEEEEAEQLRKRVAAKLVDSDIKGAVRLLSSSEGFAGQGIEVVEALQEKHPPTPRDLNLPPAPNDQMRQPLVVTKEQVVAAVTSFPAGSAAGPDGIRPAHLKGLLGQGSGAAGEALLETLTKFINMVLRGEVPDCATPLFFGASLCALAKKVGGVRPIAVGNTFRRLATTVGLKPLSNGLGQHLRPVQLGFGTPGGCEAAVHATRTYLSQAQEKRVLLKIDMRNAFNSIRRDVFLRAAQEHIPTLYPLLWQAYSKPSILIFGETVIPSATGLQQGDPGGPALFSIGVDAAANKVRSELNVWYLDDATLGGSVENVLTDLNNIVTDLGQAGLVINDTKCELVLLNHTREQGEETQALFRGILPDVKILQEHQQTLLGSPLTLAAIPPALQVKKEELQRLVSRLIHIDAHSALALLKNCFSIPKLQYLLRTSMTYTNNGGLQELDSIIREAVTSITNVEFKERTWTQATLPVRLGGLGIRRASDIASPAFISSLIATNDLVVSILSSQPGMTLNGDVTAAINTWKGSTGVEEEPQGTSRSKQKAWDTISAKKTQENLLTNADQVAKARLPAAARSESGLWLHAIPIPPLGTHLDAEALRVAIALRVGAAVCHPHTCKCGGGMDAQGHHALSCNYNAGRLPRHSALNDVIKRALQSANRASILKPHGLHREDGKRPDGMTTFPYKNGRCLVWDATCIDTFSTTNIARKADEAGEAARIAENKKREKYQAIARNHQFEPLAFETSGVFGPTTLKMVNEIGRKIREVSG

SEQ ID NO: 24274 - protein, 999 aa, Paralithodes platypus
MVEMEAPREDQEDGLVEAEERIILEDYGLADTKCLKCGTTNARKNSRKCSGCLRSIHLSCAKLTKKTSGEQPNWKCLACPGPTAEPTGATPATPVADLTQLVTKWKARIQVLARVPKGARIQVAEALTTIIKQALQLKTPLAWARLLGFSYGALRKPPRTNIQDHLQVSLATRVKRQVAQYMDGNKLVEPPEQQPNRAQKHQEKEEEEAEQLRKRVAAKLADSDIKGAVRLLSSSEGFAGQGTEVVEALQEKHPPTPRDLNLPPAPNDQMRQPLVVTKEQVVAAVTSFPAGSAAGPDGIRPAHLKGLLGQGSGAAGEALLETLTKFINMVLRGEVPDCATPLFFGASLCALAKKRWRRAPPIAVGNTFRRLATKVGLKPLSNGLGQHLRPVQLGFGTPGGCEAAVHATRTYLSQAQEKRVLLKIDMRNAFNSIRRDVFLRAAQEHIPTLYPLLWQAYSKPSILIFGETVIPSETGLQQGDPGGPALFSIGVDAAANKVRSELNVWYLDDATLGGSVENVLTDLNNIITDLGQAGLVINDTKCELVLLNHTREQGEETQALFRNILPDVKILQEHQQTLLGSPLTLAAIPPALQVKKEELQRLVSRLIHIDAHSALALLKNCFSIPKLQYLLRTSMTYTNNGGLQELDSIIREAVTSITNVEFKERAWTQATLPVRLGGLGIRRASDIASPAFISSLIATNDLVLSILYSKPGMTLNGDVTAAINTWKGSTGVEEEPQGTSRSKQKAWDTISAKKTQENLLTNADQVAKARLQAAARSESGLWLHAIPIPPLGTHLDAEALRVAIALRVGAAVCHPHTCKCDGRMDAQGHHALSCNYNAGRLPRHSALNNVIKRALQSANCASILEPHGLHREDGKRPDGMTTFPYKNGRCLVWDATCVDTFSTTNAARNADEAGEAARIAENKKREKYQAIARIHQFEPLAFETSGVFGPTTLKMVNEIGRKIREVSGEPRETLWLKQRLGMAILRGNATSVMSSVRQD

SEQ ID NO: 24275 - protein, 832 aa, Paralithodes camtschaticus
MDGNKLVEPPEQQPNRAQKHQEKEEEEAEQLRKRVAAKLADSDIKGAVRLLSSSEGFAGQGTEVVEALQEKHPPTPRDLNLPPAPNDQMRQPLVVMKEQVVAAVTSFPAGSAAGPDGIRPAHLKGLLGQGSGAAGEALLETLTKFINMVLRGEVPDCATPLFFGASLCALAKKDGGVRPIAVGNTFRRLATKVGLKPLSNGLGQHLRPVQLGFGTPGGCEAAVHATRTYLSQAQEKRVLLKIDMRNAFNSIRRDVFLRAAQEHIPTLYPLLWQAYSKPSILIFGETVIPSETGLQQGDPGGPALFSIGVDAAANKVRSELNVWYLDDATLGGSVENVLTDLNNIITDLGQAGLVINDTKCELVLLNHTREQGEETQALFRNILPDVKILQEHQQTLLGSPLTLAAIPPALQVKKEELQRLVSRLIHIDAHSALALLKNCFSIPKLQYLLRTSMTYTNNGGLQELDSIIREAVTGITNVEFKERAWTQATLPVRLGGLGIRRASDIASPAFISSLIATNDLVLSILYSKPGMTLNGDVTAAINTWKGSTGVEEEPQGTSRSKQKAWDTISAKKTQENLLTNADQVAKARLQAAARSESGLWLHAIPIPPLGTHLDAEALRVAIALRVGAAVCHPHTCKCDGRMDAQGHHALSCNYNAGRLPRHSALNDVIKRALQSANCASNLEAHGLHREDGKRPDGMTTFPYKNGRCLVWDATCVDTFSTTNAARNADEAGEAARIAENKKREKYQAIARIHQFEPLVFETSGVFGPTTLKMVNEIGRKIREVSGEPRETLWLKQRLGMAILRGNATSVMSSVRQDWVMPLREAPAGVVYP

SEQ ID NO: 24276 - protein, 1014 aa, Paralithodes platypus
MVEMEAPREDQEDGLVEAEERIILEDYGLADTKCFKCGTTNARKNSRKCSGCLRSIHLSCAKLTKKTSGEQPNWKCLACPGPTAEPTGATPATPVANLTQLVTKWKARIQVLARVPKGARIKVAEALTTIIKQALQLKTPLAWARLLGFSYGALRKPPRTNIKDHLQVSLATRVKRQVAQYMDGNKLVEPPEQQPNRAQKHQDKEEEEAEQLRKRVAAKLADSDIKGAVRLLSSSEGFAGQGTEVVEALQEKHPPTPRDLNLPPAPNDQMRQPLVVTKEQVVAAVTSFPAGSAAGPDGIRPAHLKGLLGQGSGAAGEALLETLTKFINMVLRGEVPDCATPLFFGASLCALAKKDGGVRPIAVGNTFRRLATKVGLKPLSNGLGQHLRPVQLGFGTPGGCEAAAVHATRTYLSQAQEKRVLLKIDMRNAFNSIRRDVFLRAAQEHIPTLYPLLWQAYSKPSILIFSETVIPSETGLQQGDPGGPALLSIGVDAAANKVRSERNVWYLDDATLGGSVENVLTDLNNIVTDLGQAGLVINDTKCELVLLNHTREQGEETQALFRNILPDVKILQEHQQTLLGSPLTLAAIPPALQVKKEELQRLVSRLIHIDAHSALALLKNCFSIPKLQYLLRTSMTYTNNGGLQELDSIIREALTSITNVEFKERAWTQATLPVRLGGLGIRRASDIASPAFISSLIATNDLVLSILYSQPGMTLNGDVTAAINTWKGSTGVEEEPQGTSRSKQKAWDIISAKKTQENLLTNADQVAKARLQAAARSESGLWLHAIPIPPLGTHLDAEALRVAIVLRVGAAVCHPHTCKCGGRMDGQGHHALSCNYNAGRLPRHSALNDVIKRALQSANHASILEPHGLHREDGKRPDGMTTFPYKNGRCLVWDATCVDTFSTTNIARNADEAGEAARIAENKKREKYQAIARNHQFEPLAFETSGVFGPTTLKMVNEIGRKIREVSGEPRETLWLKQRLGMAILRGNATSVMSSVRQDWVMPLCEARAGVVYP

SEQ ID NO: 24277 - protein, 1013 aa, Paralithodes camtschaticus
MVEMEAPREDQEDSLVEAEDRIILEDYGLADTKCFKCGKTNARKNSRKCSGCLRSIHLSCAKLTKKTSGEQPNWKCLACPGPTAEPTGATPATPVADLTQLVTKWKARIQVLARVPKGARIQVAEALTTIIKQALQLKTPLAWARLLGFSYGALRKPPRTNIQDHLQVSLATRVKRQVAQYKDGNKLVEPPEQQPNRAQKQQDKEEKEAEQLRKRVAAKLADSDIKGAVRLLSSSEGFAGQGTEVVEALQEKHPPTPRDLNLPPAPNDQMRQPLVVTKEQVVAAVTSFPAGSAAGPDGIRPAHLKGLLGQGSGAAGEALLETLTKFINMVLRGEVPDCATPLFFGASLCALAKKDGGVCPIAVGNTFRRLATKVGLKPLSNGLGQHLRPVQLGFGTPGGCEAAVHATRTYLSQAQEKRVLLKIDMRNAFNSIRRDVFLRAAQEHIPTLYPLLWQAYSKPSILIFGETVIPSATRLQQGDPGGPALFSIGMDAAANKVRSELNVWYLDDATLGGSVENVLTDLNNIVTDLGQAGLVINDTKCELVLLNHTREQGEETQALFRDILPDVKILQEHQQTLLGSPLTLAAIPPALQVKKEELQRLVSRLIHIDAHSALALLKNCFSIPKLQYLLCTSMTYTNNGGLQELDSIIREAVTSITNVEFKERAWTQATLPVRLGGLGIWRASDIASPAFISSLIATNDLVVSILSSQPGMTLNGDVTAAINTWKGSTGVEEEPQGTSRSKQKAWDIISAKKTQENLQTNADQVAKARLQAAARSESGLWLHTIPIPPLGTHLDAEALRVAIALRVGAAVCHPHTCKCGGGMDAQGHHALSCNYNAGRLPRHSALNDVIKRALQSANRASILEPHGLHREDGKRPDGMTTFPYKNGRCLVWDATCVDTFSTTNIARNADEAGEAARIAKNKKREKYQAIARNHQFEHLAFETSGVFGPTTLKMVNEIGRKIREVSGEPRETLWLKQRLGMAILRGNATSVMSSVRQDWVMPLCEARAGVVYP

SEQ ID NO: 24278 - protein, 808 aa, Paralithodes camtschaticus
MDGNKLVEPPEQQPNRAQKQQDKEEEEAEQLRKRVAAKLADSDIKGTVRLLSSSEGFAGQGTEVVEALQEKHPPTPRDLNLPPAPNDQMRQPLVVTKEQVVAAVTSFPAGSAAGPDGIRPAHLKGLLVQGSGAAGEALLETLTKFINMVLRGEVPDCATPLFLGASLCALAKKDGGVRPIAVGNTFRRLATKVGLKPLSNGLGQHLRPVQLGFGTPGGCEAAVHATRTYLSQAQEKRVLLKIDMRNTFNSIRRDVFLRAAQEHIPTLYPLLWQAYSKPSILIFGETVIPSATGLQQGDPGGPALFSIGVNAAANKVRSELNVWYLDDATLGGSVENVLTDLNNIVTDLGQAGLVINDTKCKLVLLNHTREQGEETQALFRGILPDVKILQEHQQILLGSPLTLAAILPALQVKKEELQHLVSRLIHIDAHSALALLKNCFSIPKLQYLLHTSMTYTNNGGLQELDSIIREAVTSITNVEFKERTWTQATLPVRLGGLGIRRASDIASPAFISSLIATNDLVVSILSSQPGMSLNWDVTAAINTWKESTGVEEEPQGTSRSKQKAWDTISAKKTQENLLTNADQVAKASLQAAARSESGLWLHAIPIPPLGTHLDAEALRVGAAVCHPHTCKCGRGMDAQGHHALSCNYNAGRLPRHSALNDVIKRALQSANRASILEPHGLHREDGKRPDGMTTFPYKNGRCLIWDATCVDTFSTTNIARNADEAGEAARIAENKKREKYQAIVRNHQFEPLAFETSGVFGPTTLKMVNEIGRKIREVSGEPRETLWLKQRLGMAILRGNATSVMNSV

SEQ ID NO: 24279 - protein, 995 aa, Paralithodes platypus
MARKVMKLTMVEAEERIILEDYGLADTKCLKCGKNNARKTSRKCSGCLRSVHLSCARLTKKTSEEQPNWKCPSCPGPTAEPTRATPDADLIQLVTKWKARIQVLARVPKGARIQVAEALTTIIKQALQLKTPLAWARLLGFSYGALRKPPRTNIQDHLQVSLATRVKRQVAQYMEANRLVDPPKQQPNRAQKQQDKEEEEAEQLHKRVAAKLADSDIKGAVRLLSSSEGFAGHGTEVVEALRGKHPPTPVNLSLPPPAPNDQMPQPLVVTKEQVVAAVTSFPAGSAAGPDGIRPAHLKGLLGQGSGAAGEALLETLTKFINMVLRGEVPDCATPLFFGASLCALAKKDGGVRPIAVGNTFRRLATKVGLKPLSNGLGQHLRPVQLGFGTPGGCEAAVHTTRTYLSQAREKRVLLKIDMRNAFNSIRRDVFLHAAREHIPTLYPLLWQAYSKPSILIFGETVISSATGLQQGDPGGPALFSIGVDAAANKVRSELNVWYLDDATLGGSVENVLTDLNNIITDLGQAGLEINDTKCELVLLNHTPEEREHTQAQFQDTLPGVRILQEHQQTLLGSPLTLAAIPPALQGKKEELQRLVSRLIHIDAHSALALLKNCFSIPKLQYLLRTSMTYTNNGGLQELDNIIREAVTSITNVEFQDRTWTQATLPVRLGGLGIRRASDIASPAFISSLIATNDLVVSILPSQPGMTLNRDIAEAINTWKESTGAEEEPQGTSRSKQKAWDTISAKKTQENLLTNADQVAKARLQAAARLESGLWLHAIPIPPLGTHLDAEALRVAIALRVGAAVCHPHTCKCGASMDAQGHHALSCSLSAGRLPRHSALNDVIKRALQSANRASILEPLGLLREDGKRPDGMTTFPYKNGRCLVWDATCVDTFSMTNITRSANEAGEAARIAESRKREKYQVIATSHQFEPLAFETSGVFGPTTLNMVNEIGRKIREVSGEPRETLWLKQRLGMAILRGNATSVMSSVRLGHATV

SEQ ID NO: 24280 - protein, 898 aa, Paralithodes platypus
MPTQLWPCSRTVSPIPKLQYLLRTSMTYTNNGGLQELDSIIREAVTSITNVEFKERAWTQATLPVRLGGLGIRRASDIASPAFISSLIATNDLVLSILYSKPRSWRIVTSKGPSDCCPLQKVLLVKAPKLLKPYKKSTPPTPRDLNLPPAPNDQMRQPLVVTKEQVVAAVTSFPAGSAAGPDGIRPAHLKGLLGQGSGAAGEALLETLTKFINMVLRGEVPDCATPLFFGASLCALAKKDGGVRPIAVGNTFRRLATKVGLKPLSNGLGQHLRPVQLGFGTPGGCEAAVHATRTYLSQAQEKRVLLKIDMRNAFNSIRRDVFLRAAQEHIPTLYPLLWQAYSKPSILIFGETVIPSETGLQQGDPGGPALFSIGVDAAANKVRSELNVWYLDDATLGGSVENVLTDLNNIITDLGQAGLVINDTKCELVLLNHTREQGEETQALFRNILPDVKILQEHQQTLLGSPLTLAAIPPALQVKKEELQRLVSRLIHIDAHSALALLKNCFSIPKLQYLLRTSMTYTNNGGLQELDSIIREAVTSITNVEFKERAWTQATLPVRLGGLGIRRASDIASPAFISSLIATNDLVLSILYSKPGMTLNGDVTAAINTWKGSTGVEEEPQGTSRSKQKAWDTISAKKTQENLLTNADQVAKARLQAAARSESGLWLHAIPIPPLGTHLDAEALRVAIALRVGAAVCHPHTCKCDGRMDAQGHHALSCNYNAGRLPRHSALNDVIKRALQSANCASILEPHGLHREDGKRPDGMTTFPYKNGRCLVWDATCVDTFSTTNAARNADEAGEAARIAENKKREKYQAIARIHQFEPLAFETSGVFGPTTLKMVNEIGRKIREVSGEPRETLWLKQRLGMAILRGNATSVMSSVRQDWVMPLREAPAGVVYP

SEQ ID NO: 24281 - protein, 1009 aa, Paralithodes camtschaticus
MVEMEAPREDQEDGLVEAEERIILEDYGLADTKCFKCGKTNARKNSRKCSSCLRSIHLSCAKLTKKTSGEQPNWKCLACPGPTAEPTGATPAIPVADLTQLVTKWKARIQVLARVPKGARIQVAEALTTIIKQALQLKTPLAWARLLDFSYGALRKPPRTNIQDHLQVSLATRVKRQVAQYMDGNKLVEPPEQQPNRAQKQQDKEEEEAEQLRKRVAAKLADSDIKGAVRLLSSSEGFAGQGTEVLEALQEKHPPTPRDLNLPPAPNDQMRQPFVVTKEQVTSFPAGSAAGPDSIRPAHLKGLLGQGSGAAGEALLETLTKFINMVLRGEVPDCAPPLFFGASLCALAKKDGGVCPIAVGNTFRRLATKVGLKPPSNGLGQHLRPVQLGFGTPGVYEGAVHATRTYLSQAQEKRVLLKIDMRNAFNSIRRDVFLRAAQEHIPTLYPLLWQAYSKPSILIFGETVIPSATGLQQGDPGGPALFSIGVDAAANKVRSELNVWYLDDATLGGSVENVLTDLNNIVTDLGQAGLVINDTKCELVLLNHTREQGEETQALFRGILPNVKILQEHQQTLLGSPLTLAAIPPALQVKKEELQRLVSRLIHIDAHSALALLKNCFCIPKLQYLLRTSMTYTNNGGLQELDSIIREAVTSITNVEFKERAWTQATLPVRLGGLGIRRASDIASPAFISSLIATNDLVVSILPSQPGMTLNGDVTAAINTWKGSTGVEEEPQGTSRSKQKAWDTISAKKTQENLLTNADQVAKARLQAAARSESGLWLHAIPIPPLGTHLDAEALRVAIALRVGAAVCHPHTCKCGGGMDAQGHHALSCNYNAGRLPRHSALNYVIKRALQSANRLSILEPHGLHREDGKRPDGMTTFPYKNGRCLVWDATCVDTFSTTNIARNADEAGEAAQIAENKKREKYQAIARNHQFEPLAFETAGVFGPTTLKMVNEIGRKIREVSGEPRETLWLKQRLGMAILRGNATCVMSSVRQDWVMPLCEARAGVVYP

SEQ ID NO: 24282 - protein, 1013 aa, Paralithodes camtschaticus
MVEMEAQREDQEDGLVEVEERIILEDYGLADTKCLKCGTTNARKNSRKCSGCLRSIHLSCAKLTKKTSGEQPNWKCLACPGPTAEPTGATPATPVADLTQLVTKWKARIQVLARVPKGARIQVAEALTTIIKQALQLKTPLAWARLLGFSYGALRKPPRTNIQDHLQVSLATRVKRQVAQYMDGNKLVEPPEQQPNRAQKHQDKEEEEAEQLRKRVAAKLADSDIKGAVRLLSSSEGFAGQGTEVVEALQEKHPPTPRDLNLPPAPNDQMRQPLVVTKEQVVAAVTSFPAGSAAGPDGIRPAHLKGLLGQGSGAAGEALLETLTKFINMVLRGEVPDCATPLFFGASLCALAKKDGGVRPIAVGNTFRRLATKVGLKPLSNGLGQHLRPVQLGFGTPGGCEAAAHATRTYLSQAQEKRVLLKIDMRNAFNSIRRDVFLCAAQEHIPTLYPLLWQAYSKPSILIFGETVIPSETGLQQGDPGGPALFSIGVDAAANKVRSELNVWYLDDATLGGSVENVLTNLNNIITDLGQAGLVINDTKCELVLLNHTREQGEETRALFRNILPDVTILQEHQQTLLGSPLTLAAIPPALQVKKEELQRLVSRLIHIDAHSALALLKNCFFIPKLQYLLRTSMTYTNNGGLQELDSIIREAVTSITNVEFKERAWTQATLPVRLGGLGIRRASDIASPAFISSLIATNDLVLSILYSKPGMTLNGDVTAAINTWKGSTGGEEEPQGTSRSKQKAWDTISAKKTQENLLTNADQVAKARLQAAARSESGLWLHAIPIPPLGTHLDAEALRVAIALRVGAAVCHPHTCKCDGRMDAQGHHALSCNYNAGRLPRHSALNDVIKRALQSANCASILEPHGLHREDGKRPDGMTTFPYKNGRCLVWDATCVDTFSTTNAARNADEAGEAARIAENKKREKYQAIARIHQFEPLAFETSGVFGPTTLKMVNEIGRKIREVSGEPRETLWLKQRLGMAILQGNATSVMSSVRQDWVMPLREAPAGVVYP

SEQ ID NO: 24283 - protein, 961 aa, Paralithodes platypus
MVEMEAPREDQEDGLVEAEERIILEDYGLADTKCLKCGTTNARKNSRKCSGCLRSIHLSCAKLTKKTSGEQPNWKCLACPGPTAEPTGATPATPVADLTQLVTKWKARIQVLARVPKGARIQVAEALTTIIKQALQLKTPLAWARLLGFSYGALRKPPRTNIQDHLQVSLATRVKRQVAQYMDGNKLVEPPEQQPNRAQKHQEKEEEEAEQLRKRVAAKLADSDIKGAVRLLSSSEGFAGQGTEVVEALQEKHPPTPRDLNLPPAPNDQMRQPLVVTKEQVVAAVTSFPAGSAAGPDGIRPAHLKGLLGQGSGAAGEALLETLTKFINMVLRGEVPDCATPLFFGASLCALAKKDGGVRPIAVGNTFRRLATKVGLKPLSNGLGQHLRPVQLGFGTPGGCEAAVHATRTYLSQAQEKRVLLKIDMRNAFNSIRRDVFLRAAQEHIPTLYPLLWQAYSKPSILIFGETVIPSETGLQQGDPGGPALFSIGVDAAANKVRSELNVWYLDDATLGGSVENVLTDLNNIITDLGQAGLVINDTKCELVLLNHTREQGEETQALFRNILPDVKILQEHQQTLLGSPLTLAAIPPALQVKKEELQRLVSRLIHIDAHSALALLKNCFSIPKLQYLLRTSMTYTNNGGLQELDSIIREAVTSITNVEFKERAWTQATLPVRLGGLGIRRASDIASPAFISSLIATNDLVLSILYSKPGMTLNGDVTAAINTWKGSTGVEEEPQGTSRSKQKAWDTISAKKTQENLLTNADQVAKARLQAAARSESGLWLHAIPIPPLGTHLDAEALRVAIALRVGAAVCHPHTCKCDGRMDAQGHHALSCNYNAGRLPRHSALNDVIKRALQSANCASILEPHGLHREDGKRPDGMTTFSYKNGRCLVWDATCVDTFSTTNAARNADEAGEAARIAEKKKARKKYQAIARIHQFEPLAFETSGVFGPTTLKMVNENRP

SEQ ID NO: 24284 - protein, 998 aa, Paralithodes camtschaticus
MVEMEAPREDQEDGLVEAEERIILEDYGLGDTKCLKCGTTNARKNSRTCSGCLRSIHLSCAKLTKKTSGEQPNWKCLACPGPTAEPTGATPATPVADLTQLVTKWKARIQFLARVPKGARIQVAEALTTIIKQALQLKTPLAWARLLGFSYGALRKPPRTNIQDHLQVSLATRVKRQVAQYMDGNKLVEPPEQQPTRAQKHQEKEQEEAEQLRKRVAAKLADSDIKGAVRLLSSSEGFAGQSTEVVEALQEKHPPTPRDLNLPPAPNDQMRQPLVVTKEQVVAAVTLFPAGSAAGPDGIRPAHLKGLLGQGSGAAGEALLETLTKFINMVLRGEVPDCATPLFFGASLCALAKKDGGVRPIAVGNTFRRLATKVGLKPLSNGLGQHLRPVQLGFGTPGGCEAAVHATRTYLSQAQEKRVLLKIDMRNAFNSIRRDVFLREAQEHIPTLYPLLWQAYSKPSILIFGETVIPSETGLQQGDPGGPALFSIGVDAAANKVRSELNVWYLDDATLGGSVENVLTDLNNIITDLVQAGLVINDTKCELVLLNHTREQGEETQALFRNILPDVKILQDHQQTLLGSPLTLAAIPPALQVKKEELQRLVSRLIHIDAHSALALLKNCFSIPKLQYLLRTSMTYTNNGGLQELDRIIREAVTSITNVEFKERAWTQATLPVRLGGLGIRRASDIASPAFISSLIATNDLVLSILYCKPGMTLNGDVTAAINTWKGSTGVEEEPQGTSRSKQKAWDTISAKKTQENLLTNADQVAKAHLQAAARSESGLWLHAIPIPPLGTHLDAEALRVAIALRVGAAVCHPHTCKCDGRMDAQGHHALSCNYNAGRLPRHSALNDVIKRALQSANCASILEPHGLHREDGKLPDGMTTFSYKNGRCLVWDATCVDTFSTTNATRNADEAGEAAWIAENKKREKYQAIARIHQFEPLAFETSGVFGPTTLKMVNEIGRKSREVSGEPRETLWLKQRLGMAILRGNATSVMSSVRQD

SEQ ID NO: 24285 - protein, 1013 aa, Paralithodes camtschaticus
MVEMEAPREDQEDGLVEPEERKILEDYGLADTKCFKCGKTNARKNSRKCSGCLRSIHLSCAKLTKKTSGEQPNWKCLACPGPTAEPTGATPATPVADLTQLVTKWKARIQVLTRVPKGARIQVAEALTTIIKQALQLKTPLAWARLLGFSYGALRKPPRTNIQDHLQVSLATRVKRQVAQYMDGNKLVEPPKQQPNRAQKQQDKEEEEAEQLRKRVAAKLADSDIKGAVRLLSSSEGFAGQGTKVVEALQEKHPPTPRDLNLPPAPNDQMRQPLVVTKEQVVAAVTSFPAGSAAGPDGIRPAHLKGLLGQGSGAAGEALLETLTKFINMVLRGEVPDCATPLFFGASLCALAKKDGGVRPIAVGNTFRRLATKVGLKPLSNGLGQHLRPVQLGFGTPGECEAAVHATRTYLSQAQEKRVLLKIDMRNAFNSIHRDVFLRAAQEHISTLYPLLWQAYSKPSILIFGETVIPSATGLQQGDPGGPALFSIGVDAAANKVRSELNVWYLDDATLGGSVENVLTDLNNIVTDLGQAGLVINDTKCELVLLNHTREQGEETRALFRDILPDVKILQEHQQTLLGSPLTLAAIPPALQVKKEELQRLASRLIHIDAHSALALLKNCFSIPKLQYLLRTSMTYTNNGGLQELDSIIREAVTSITNVEFKERAWTQATLPVRLGGLGIRRASNIASPAFISSLIATNDLVVSILSSQPGMTLNGDVTIAINTWKGSTGVEEEPQGTSRSKQKAWDTISAKKTQENLLTNADQVAKAHLQAAARSETGLWLHAIPIPPLGTYLDAEALRVAIALRVGAALCHPHTCKCGGGMDAQGHHALSCNYNAGRLPRHSALNDVIKRALQSANCASILEQHGLHREDGKRPDGMTTFPYKNGRCLVWDATCVDTFSTTNIARNADEAGEAARIAENKKREKYQAIARNHQFEPLAFETSGVFGPTTLKMVNEIGRKIREVSGEPRETLWLKQRLGMAILRGNATSVMSSVRQDWVMPLCEARAGVVYP

SEQ ID NO: 24286 - protein, 952 aa, Paralithodes camtschaticus
MVEMEAPREDQEDGLVEAEERIILENYGLADTKCLKCGTTNARKNSRKCSSCLRSINLSCAKLTKKTSGEQPNWKCLACPGPTAEPTGATPATPVADLTQLVTKWKAWIQVLARVPKGARIQVAEALTTIIKQALQLKTPLAWARLLGFSYGALRKPPRTNIQDHLQVSLATRVKRQVAQYMDGNKLVEPPEQQPNRAQKHQDKEEEEAEQLRKRVAAKLADSDIKGAVRLLSSSEGFAGQGTEVVEALQEKHPPTPTDLNLPPAPNDQMRQPLVVTKEQVVAAVTSFPAGSAAGPDGIRPAHLKGLLGQGSGAAGEALLETLTKFINMVLRGEVPDCATPLFFGASLCALAKKDGGVRPIAVGNTFPRLATKVGLKPLSNGLGQHLRPVQLGFGTPGGCEAAVHATRTYLSQAQEKRVLLKIDMRNAFNSIRRDVFLRAAQEHIPTLYPLLWQAYSKPSILIFGETVIPSETGLQQGDPGGPALFSIGVDAAANKVRSELNVWYLDDATLGGSVENVLTDLNNIITDLGQAGLVINDTKCELVLLNHTREQGEETQALFRNILPDVKILQEHQQTLLGSLLTLAAIPPALQVKKEELQRLVSRLIHIDAHSALALLKNCFSIPKLQYLLRTSMTYTNNGGLQELDSIIREAVTSIINVEFKERAWTQATLPVRLGGLGIRRASDIASPAFISSLIATNDLVLSILSSQPGMTLNEDVTAAINTWKGSTGVEEEPQGTSRSKQKAWDTISAKKTQENLLTNADQVAKARLQAAARSESGLWLHAIPIPPLGTHLDAEALRVAIALRVGAAVCHPHTCKCGGWMDAQGHHALSCNYNAGCLPRHSALNDVIKRALQSANRASILEPHGLHREDGKRPDGMTTFPYKNGRCLVWDATCVDTFSTTNIARNADEAGEAARIAENKKARKISRHRQKSSVRAPGIRNFRSLRPYHP

SEQ ID NO: 24287 - protein, 1013 aa, Paralithodes platypus
MVEMEAPREDQEDGLVEAEERIILEDYGLADTKCLKCGTTNARKNSRKCSGCLRSIHLSCAKLTKKTSGEQPNWKCLACPGPTAEPTGATPATPVADLTQLVTKWKARIQVLARVPKGARIQVAEALTTIIKQALQLKTPLAWARLLGFSYGALRKPPRTNIQDHLQVSLATRVKRQVAQYMDGNKLVEPPEQQPNRAQKHQEKEEEEAEQLRKRVAAKLADSDIKGAVRLLSSSEGFAGQGTEVVEALQEKHPPTPRDLNLPPAPNDQMRQPLVVTKEQVVAAVTSFPAGSAAGPDGIRPAHLKGLLGQGSGAAGEALLETLTKFINMVLRGEVPDCATPLFFGASLCALAKKDGGVRPIAVGNTFRRLATKVGLKPLSNGLGQHLRPVQLGFGTPGGCEAAVHATRTYLSQAQEKRVLLKIDMRNAFNSIRRDVFLRAAQEHIPTLYPLLWQAYSKPSILIFGETVIPSETGLQQGDPGGPALFSIGVDAAANKVRSELNVWYLDDATLGGSVENVLTDLNNIITDLGQAGLVINDTKCELVLLNHTREQGEETQALFRNILPDVKILQEHQQTLLGSPLTLAAIPPALQVKKEELQRLVSRLIHIDAHSALALLKNCFSIPKLQYLLPTSMTYTNNGGLQELDSIIREAVTSITNVEFKERAWTQATLPVRLGGLGIRRASDIASPAFISSLIATNDLVLSILYSKPGMTLNGDVTAAINTWKGSTGVEEEPQGTSRSKQKAWDTISAKKTQENLLTNADQVAKARLQAAARSESGLWLHAIPIPPLGTQLDAEALRVAIALRVGAAVCHPHTCKCDGRVDAQGHHDLSCNYNAGRLPRHSALNYVIKRALQSANCASILEPHGLHREDGKRPDGMTTFSYKNGRCLVWDATCVDTFSTTNAARNADEAGEAARIAENKKREKYQAIARIHQFEPLAFETSGVFGPTTLKMVNEIGRKIREVSGEPRETLWLKQRLGMAILRGNATSVMSSVRQDWVMPLREAPAGVVYP

SEQ ID NO: 24288 - protein, 978 aa, Paralithodes platypus
MVEMEAPREDQEDGLVEAEERIILEDYGLADTKCLKCGTTNARKNSRKCSGCLRSIHLSCAKLTKKTSGEQPNWKCLACPGPTAEPTGATPATPVADLTQLVTKWKARIQVLARVPKGARIQVAEALTTIIKQALQLKTPLAWARLLGFSYGALRKPPRTNIQDHLQVSLATRVKRQVAQYMDGNKLVEPPEQQPNRAQKHQEKEEEEAEQLRKRVAAKLADSDIKGAVRLLSSSEGFAGQGTEVVEALQEKHPPTPRDLNLPPAPNDQMRQPLVVTKEQVVAAVTSFPAGSAAGPDGIRPAHLKGLLGQGSGAAGEALLETLTKFINMVLRGEVPDCATPLFFGASLCALAKKDGGVRPIAVGNTFRRLATKVGLKPLSNGLGQHLRPVQLGFGTPGGCEAAVHATRTYLSQAQEKRVLLKIDMRNAFNSIRRDVFLRAAQEHIPTLYPLLWQAYSKPSILIFGETVIPSETGLQQGDPGGPALFSIGVDAAANKVRSELNVWYLDDATLGGSVENVLTDLNNIITDLGQAGLVINDTKCELVLLNHTREQGEETQALFRNILPDVKILQEHQQTLLGSPLTLAAIPPALQVKKEELQRLVSRLIHIDAHSALALLKNCFSIPKLQYLLRTSMTYTNNGGLQELDSIIREAVTSITNVEFKERAWTQATLPVRLGGLGIRRASDIASPAFISSLIATNDLVLSILYSKPGMTLNGDVTAAINTWKGSTGVEEEPQGTSRSKQKAWDTISAKKTQENLLTNADQVAKARLQAAARSESGLWLHAIPIPPLGTHLDAEALRVAIALRVGAAVCHPHTCKCDGRMDAQGHHALSCNYNAGRLPRHSALNDVIKRALQSANCASILEPHGLHREDGKRPDGMTTFSYKNGRCLVWDATCVDTFSTTNAARNADEAGEAARIAENKKREKYQAIARIHQFEPLAFETSGVFGPTTLKMVNEIGRKIREVSGEPGKPSGSSKD

SEQ ID NO: 24289 - protein, 1013 aa, Paralithodes camtschaticus
MAEMEAPREDQVVGLVEAEERIILEDYGLADTKCFKCGKTNARKNSRKCSGCLRSIHLSCAKLTKKTSGEQPNWKCLACPGPTAEPTGATPATPVADLTQLVTKWKARIQVLARVPKGARIQVAEALTTIIKQALQLKTPLAWARLLGFSYGALRKPPRTNIQDHLQVSLATRVKRQVAQYMDGNKLVEPPEQQPNRAQKQQDKEEEEAEQLRKRVAAKLADSDIKGAVRLLSFSEGFAGQGTEVVEALQEKHPPTPRDLNLPPAPNDQMRQPLVVTKEQVVAAVTSFPAGSAAGPDGIRPAHLKGLLVQGSGAAGEALLETLTKFINMVLRGEVPDCATPLFFGASLCALAKKVGGVRPIAVGNTFRRLATKVGLKPLSNGLGQHLRPVQLGFGTPGGCEAAVHATRTYLSQAQEKRVLLKIDMRNAFNSIRRDVFLRAAQEHIPTLYPLLWQAYSKPSILIFGETVIPSATGLQQGDPGGPALFSIGVDAAANKVRSELNVWYLDDATLGGSVENVLTDLNNIVTDLGQAGLVINDTKCELVLLNHTREQGEETRALFRGILPDVKILQEHQQTLLGSPLTLAAIPPALQVKKEELQRLVSRLIPIDAHSALALLKNCFSIPKLQYLLRTSMTYTNNGGLQELDGIIREAVTSITNVEFKERTWTQATLPVRLGGLGIRRASDIASPAFISSLIATNDLVVSILSSQPGMTLNWDVTAAINTWKESTGVEEEPQGTSRSKQKAWDTISAKKTQENLLTNADQVAKARLQAAARSESGLWLHAIPIPPLGTHLDAEVLRVAIALRVGAAVCHPHTCKCGRGMDAQGHHALSCNYNAGRRPRHSALNDVIKRALQSANRASILEPHGLHREDGKRPDGMTTFPYKNGRCLVWDATCVDTFSTTNIARNADEAGEAARIAENKKREKYQAIARNHQFEPLAFETSGVFGPTTLKMVNEIGRKIREVSGEPRETLWLKQRLGMAILRGNATSVMSSVRLDWVMPLCEARAGLVYP

SEQ ID NO: 24290 - protein, 1095 aa, Paralithodes camtschaticus
MLRKLIMTMIRPRLEYAAVIWSPHLKKHINKLEKVQRIATKMIPRLKELTYEERLKTLQLPTLKERRERGDLITMFKGVKSLERVDREDLFVRDNGRTRGHEFKLRKGRCRKDTKKFSFPYRSIEYRRKNSRKCSGCLRSINLSCAKLTKKTSGEQPNWKCLACPGPTAEPTGATPVADLTQLVTKWKARIQVLARVPKGARIQVAEALTTIIKQALQLKTPLAWARLLGFSNGALRKPPRTNIHDHLQVSLATRVKRQVAQYMDGNKLVEPPEQQPNRAQKQQDKEEEEAEQLRKRVAAKLADSDIKGAVRLLSSSEGFAGQGTEVVEALQEKHPPTPRDLNLPPAPNDQMRQPLVVTKEQVVAAVTSFPAGSAAGPDGIRPAHLKGLLGQGSGAAGEALLETLTKFINMVLRGEVPDCATPLFWGASLCALAKKDGGVRPIAVGNTFRCLATKVGLKPLSNGLGQHLRPVQLGFGTPGVCEAAVHATRTYLSQAQEKRVLLKIDMRNAFNSIRRDVFLRAAQEHIPTLYPLLWQAYSKPSILIFGETVIPSATGLQQGDPGGPALFSIGVDAAANKVRSELNVWYMDDATLGGSVENVLTDLTNIVTDLGQAGLVINDTKCELVLLNHTREQGEETQALFRGILPDVKILQEHQQTLLGSPLTLAAIPPALQVKKEELQRLVSRLIHIDAHSALALLKNCFSIPKLQYLLRTSMTYTNNGGLQELDSISREAVTSITNVDFKERTWTQATLPVRLGGLGIRRASDIASPAFISSLIATNDLVVSILSSQPRMTLNWDITGAINTWKESTGVEEEPQGTSRSKQKAWDTISAKKTQENLLTNADQVAKARLQAAARSESGLWLHAIPIPPLGTHLDAEALRVAIALRVGAAVCHPHTCKCGGGMDAQGHHALSCNYNAGRLPRHSALNDVIKRALQSANCASILEPHGLHREDGKRLDGMTTFPYKNGRCLVWDATCVDTFSTTNIARNADEAGEAARIAENKKREKYQAIARNHQFEPLAFETSGVFGPTTLKMVNEIGRKIREVSGEPPEILWLKQRLGMAILRGNATSVMSSVRLDWVMPLCEARAGVVYP

SEQ ID NO: 24291 - protein, 999 aa, Paralithodes camtschaticus
MVEMEAPREDQEDGLVEAEERIILEDYGLADTKCLKCGTTNARKNSRKCSGCLRSIHLSCAKLTKKTSGEQPNWKCLACPGPTAEPTGATPATPATPVADLTQLVTKWKARIQFLARVPKGARIQVAEALTTIIKQALQLKTPLAWARLLGFSYGALRKPPRTNIQDHLQVSLATRVKRQVAQYMDGNKLVEPPEQQPTRAQKHQEKEQEEAEQLRKRVAAKLADSDIKGAVRLLSSSEGFAGQSTEVVEALQEKHPPTPRDLNLPPAPNDQMRQPLVVTKEQVVAAVTLFPAGSAAGPDGIRPAHLKGLLGQGSGAAGEALLETLTKFINMVLRGEVPDCATPLFFGASLCALAKKDGGVRPIAVGNTFRRLATKVGLKPLSNGLGQHLRPVQLGFGTPGGCEAAVHATRTYLSQAQEKRVLLKIDMRNAFNSIRRDVFLREAQEHIPTLYPLLWQAYSKPSILIFGETVIPSETGLQQGDPGGPALFSIGVDAAANKVRSELNVWYLDDATLGGSVENVLTDLNNIITDLGQAGLVINDTKCELVLLNHTREQGEETQALFRNILPDVKILQDHQQTLLGSPLTLAAIPPALQVKKEELQRLVSRLIHIDAHSALALLKNCFSIPKLQYLLRTSMTYTNNGGLQELDRIIREAVTSITNVEFKERAWTQATLPVRLGGLGIRRASDIASPAFISSLIATNDLVLSILYCKPGMTLNGDVTAAINTWKGSTGVEEEPQGTSRSKQKAWDTISAKKTQENLLTNADQVAKAHLQAAARSESGLWLHAIPIPPLGTHLDAEALRVAIALRVGAAVCHPHTCKCDGRMDAQGHHALSCNYNAGRLPRHSALNDVIKRALQSANCASILEPHGLHREDGKLPDGMTTFSYKNGRCLVWDATCVDTFSTTNATRNADEAGEAAWIAENKKREKYQAIARNHQFEPLAFETSGVFGPTTLKMVNEIGRKSREVSGEPRETLWLKQRLGMAILRGNATSVMSSVR

SEQ ID NO: 24292 - protein, 1013 aa, Paralithodes camtschaticus
MVEMEAPREDQEDGLVEAEERIILEDYGLADTKCLKCGTTNARKNSRKCSGCLRSIHLSCAKLTKKTSGEQPNWKCLACPGPTAEPTGATPATPVADLTQLVTKWKARIQVLARVPKGARIQVAEALTTIIKQALQLKTPLAWARLLGFSYGALRKPPRTNIQDHLQVSLATRVKRQVAQYMDGNKLVEPPEQQPNRAQKHQDKEEEEAEQLRKRVAAKLADSDIKGAVRLLSSSEGFAGQGTEVVEALQEKHPPTPRDLNLPPAPNDQMRQPLVVTKEQVVAAVTSFPAGSAAGPDGIRPAHLKGLLGQGSGAAGEALLETLTKFINMVLRGEVPDCATPLFFGASLCALAKKDGGVRPIAVGNTFRRLATKVGLKPLSNGLGQHLRPVQLGFGTPGGCEAAVHATRTYLSQAQEKRVLLKIDMRNAFNSIRRDVFLRAAQEHIPTLYPLLWQAYSKPSILIFGETVIPSETGLQQGDPGGPALFSIGVDAAANKVRSELNVWYLDDATLGGSVENVLTDLNNIITDLGQAGLVINDTKCELVLLNHTREQGEETQALFRNILPDVKILQEHQQTLLGSPLTLAAIPPALQVKKEELQRLVSRLIHIDAHSALALLKNCFSIPKLQYLLRTSMTYTNNGGLQELDSIIRDAVTSITNVEFKERAWTQATLPVRLGGLGIRRASDIASPAFISSLIATNDLVLSILYSKPGMTLNGDVTAAINTWKGSTGVEEEPQGTSRSKQKAWDTISAKKTQENLLTNADQVAKARLQAAARSESGLWLHAIPIPPLGTHLDAEALRVAIALRVGAAVCHPHTCKCDGRMDAQGHHALSCYYNAGRLPRHSALNDVIKRALQSANCASILEPHGLHREDGKWPDGMTTYPYKNGRCLVWDATCVDTFSTTNAARNAVEAGEAARIAENKKREKYQAIARIHQFEPLAFETSGVFGPTTLKMVNEIGRKIREVSGEPRETLWLKQRLGMAILRGNATSVMSSVRQDLVMPLREAPAGVVYP

SEQ ID NO: 24293 - protein, 1010 aa, Paralithodes camtschaticus
MVEMEAPREDQEHGLVEAEERIILEDYGLADTKCLKCRTTNARKNSRKCSGCLRSIHLSCAKLTKKTSGEQPNWKCLACPGPTAEPTGATPVADLTQLVTKWKARIQVLARVPKGARIQVAEALTTIIKQALQLKTPLAWARFLGFSYGALRKPPRTNIQDHLQVSLATRVKRQVAQYMDGNKLVEPPEQQPNRAQKHQDKEEEEAEQLRKRVAAKLADSDIKGAVRLLSSSEGFAGQGTEVVEALQEKHPPTPRDLNLPPAPNDQMRQPLVVTKEQVVAAVTSFPAGSAAGPDGIRPAHLKGLLGQGSGAAGEALLETLTKFINMVLRGEVPDCATPLFFWASLCALAKKDGGVRPIAVGNTFRRLATKVGLKPLSNGLGQHLRPVQLGFGTPGGCEAAVHATRTYLSQAQEKRVLLKIDMRNAFNSIRRDVFLRAAQEHIPTLYPLLWQAYSKPSILIFGETVIPSETGLQQGDPGGPALFSIGVDAAANKVRSELNVWYLDDATLGWSVENVLTDLNNIITDLGQAGLVINDTKCELVLLNHTREQGEETQALFRNILPDVKILQEHQQTLLGSPLTLAAIPPALQVKKEELQRLVSRLIHIDAHSAPALLENCFSIPKLQYLLRTSMTYTNNGGLQELDSIIREAVTSITNVEFKERAWTQATLPVRLGGLGIRRALDIASPAFISSLIATNDLVLSILYSKPVMTLNGDVTAAINTWKGSTGVEEEPQGTFRSKQKVWDTISAKKTQENLLTNADQVAKARLQAAARSESGLWLHAIPIPPLGTHLDAEALRVAIALRVGAAVCHPHTCKCDGRMDAQGHHALSCNYNAGRLPRHSALNDVIKRALQSANCASILEPHGLHREDGKRPEGMTTFPYKNGRCLMWDATCVDTFSTTNAARNADEAGEAARIAENKKREKYQAIARIHQFEPLAFETSGVFGPTTLKMVNEIGRKIREVSGEPRETLWLKQRLGMAILRGNATSVMSSVRQDWVMPLREAPAGVVYP

SEQ ID NO: 24294 - protein, 918 aa, Paralithodes camtschaticus
MVEMEAPREDQEDGLVEAEERIILEDYGLADTKCLKCGTTNARKNSRKCSGCLRSIHLSCAKLTKKTSGEQPNWKCLTCPGPTAEPTGATPVADLTQLVTKWKARIQVLARVPKGARIQVAEALTTIIKQALQLKTPLAWARLLGFSYGALRKPPRTNIQDHLQVSLATRVKRQVAQYMDGNKLVEPPEQQPNRAQKHQDKEEEEAEQLRKRVVAKLADSDIKGAVRLLSSSEGFAGQGTEVVEALQEKHPPTPRDLNLPPAPNDQMRQPLVVTKEQVVAAVTSFPAGSAASPDGIRPAHLKGLLGQGSGAAGEALLETLTKFINMVLRGEVSDCATPLFFGASLCALAKKDGGVRPIAVGNTFRRLATKVGLKPLSNGLGQHLRPVQLGYGTPGGCEAAVHATRTYLSQAQEKRVLLKIDMRNAFNSIRRDVFLRAAQEHIPTLYPLLWQAYSKPSILIFGETVIPSEAGLQQGDPGGPALFSIGVDAAANKVRSELNVWYLDDATLGGSVENVLTDLNNILTDLSQAGLVINDTKCELVLLNHTREQREETQALFRNILTDVKILQEHQQTLLGSPLTLAAIPPALQVKKEELQRLVSRLIHIDAHSALALLNNCFSIPKLQYLLRTSMTYTNNGGLQELDSIIREAVTSITNVEFKERAWIQATLPVRLGGLGIRRASDIASPAFISSLIATNDLVLSILYSKPGMTLNGDVTAAINTWKGSTGVEEEPQGTSRSKQKAWDTISAKKTQENLLTNADQVAKARLQAAARSESGLWLHAIPIPPLGTHLDAEALRVAIALRVGAAVCHPHTCKCDGRMDAQGHHALSCNYNAGRLPRHSSLNDVIKRALQSANCASILEPHGLHREDGKRPDGMTTFPYKNGRCLVWDATCVDTFSTTNAARNADEAGEAARIAEN

SEQ ID NO: 24295 - protein, 976 aa, Paralithodes camtschaticus
MAEMEAPREDQEVGLVEAEERIILEDYGLADTKCFKCGKTNARKNSRKCSGCLRSINLSCAKLTKKTSGEQPNWKCLACPGPTAEPTGATPKTPVADLTQLVTKWKARIQVLARVPKGARIQVAEALTTIIKQALQLKTPLTWARLLGFSYGALRKPPRTNIQDHLQVSLATRVKRQVAQYMDGNKLVEPPEQQPNRAQKQQDKEEEEAEQLRKRVAAKLAISDIKGAVRLLSSSEGFAGQGTEVVEALQEKHPPTPRDLNLPPAPNDQMRQPLVVTKEQVVAAVTSFPAGSAAGPDGIRPAHLKGLLGQGSGAAGEALLETLTKFINMVLRGEVPDCATPLFFGATLCALAKKDGSVRPIAVGNTFCRLATKVGLKPLSNGLGQHLRPVQLGFGTPGGCEAAVHATRTYLSQAQEKRVLLKIDMRNAFNSIRRDVFLRAAQEHIPTLYPLLWQAYSKPSILIFGETVIPSATGLQQGDPGGPALFSIGVDAAANKVRSELNVWYLDDATLGGSVENVLTDLNNIVTDLGQAGLVINDTKCELVLLNHTRGQGEETQALFRGILPDVKILQEHQQTLLGSPLTLAAIPPALQVKKEELQRLVSRLIHIDAHSALALLKNCFSIPKLQYLLRTSMTYTNNGGLQELDSIIREAVTSITNVEFKERTWTQTTLPVRLGGLGIWRASDIASPAFISSLIATNDLVVSILSSQPGMTLNGDVTAAINTWKESTGVEEEPRGTSRSKQKAWDTISAKKTQENLLTNADQVAKARLQAAARSESGLWLHAIPIPPLGTNLDAEALRVAIAFRVGAAVCHPHTCKCGGGMDAQGHHALSCNYNAGRLPRHSALNDVIKRALQSANRASILEPHGLHREDGKRPDGMTTFPYKNSRCLVWDATCVDTFSTTNIARNADEAGEAARIAENKKREKYQAIARNHQFEPLAFETSGVFGPTTLKMVNEIGRKIREVSGEPRETLWLK

SEQ ID NO: 24296 - protein, 949 aa, Paralithodes camtschaticus
MVEMEAPREDQEDGLVEAEERIILEDYGLADTKCLKCGTTNARKNSRKCSGCLRSIHLSCAKLTKKTSGEQPNWKCLACPWPTAEPTGATPATPVADLTQLVTKWKARIQVLARVPKGARIQVAEALTTIIKQALQLKTPLAWARLLGFSYGAFRKPPRTNIQDHLQVSLATRVKRQVSQYMDGNKLVEPPEQQPNRAQKHQDKEEEEAEQLRKRVAAKLADSDIKGAVRLLSSSEGFAGQGTEVVEALQEKHPPTPRDLNLPPAPNDQMRQPLVVTKEQVVAAVTSFPAGSAAGPDGIRPAHLKGLLGQGSGAAGEALLETLTKFINMVLRGEVPDCATPLFFGASLCALAKKDGGVRPIAVGNTFRRLATKVGLKPLSNGLGQHLRPVQLGFGTPGGCEAAVHATRTYLSQAQEKRVLLKIDMRNAFNSIRRDVFLRAAQEDIPTLYPLLWQAYSKPSILIFGETVIPSETGLQQGDPGGPALFSIGVDAAANKVRSELNVWYLDDATWGGSVQNVLTDLNNIITDLGQAGLVINDTKCELVLLNHTREQGEETQALFRNILPDLKILQEHQQTLLGSPLTLAAIPPALQVKKEELQRLVSRLIHIDAHSALALLNNCFSIPKLQYLLRTSMTYTNNGGLQELDSIIRDAVTSITNVEFKERAWTQATLPVRLGGLGIRRASDIASPAFISSLIATNDLVLSILYSKPGMTLNGDVTAAINTWKGSTGVEEEPQGTSRSKQKAWDTISAKKTQENLLTNADQVAKARLQAAARSESGLWLHTIPIPPLGTHLDAEALRVAIALRVGAAVCHPHTCKCDGRMDAQGHHALSCNYNAGRLPRHSALNDVIKRALQSANCASILEPHGLHREDGKRPDGMTTYPYKNGRCLVWDATCVDTFFTTNAARNADEAGEAARIAENKKREKYQAIARIHQFEPLAFETSGVFGP

SEQ ID NO: 24297 - protein, 1018 aa, Paralithodes platypus
MVEMEVPREDQEDGLVEAEERIILEDYGLADTKCFKCGKTNARKNSRKCSGCLRSIHLSCAKLTKKTSEQPNWKCLACPGPTAEPTGATPAIPVADLTQLVTKWKARIQVLARVPKGARIQVAEALTTIIKQALQLKTPLAWARLLGFSYGALRKPPRTNIQDHLQVSLATRVKRQVAQYMDGNKLVEPPEQQPNRAQKQQDKEEEEAEQLRKRVAAKLADSDIKGAVRLLSSSEGFAGQGTEVVEALQEKHPPTPRDLNLPPAPNDQMRQPLVVTKEQVVAAVTSFPAGSAAGPDGIRPAHLKGLLGQGSGAAGEALLETLTKFINMVLRGEVPDCATPLFFGGITLCTGKKNDGGVPPIAVGNTFRRLATKVGLKPLSNGLGQHLRPVQLGFGTPGGCEAAVNATRTYLSQAQEKRVLLKIDMRNAFNSIRRDVFVRAAQEHIPTLYPLLWQAYSKPSILIFGETVIPSATGLQQGDPGGPALFSIGVDAAANKVRSELNVWYLDDATLGGSVENVLTDLNNIVTDLGQAGLVINDTKCELVLLNHTREQGEETQALFRGILPDVKILQEHQQTLLGSPLTLAAIPPALQVKKEELQSLVSRLIHIDAHSALALLKNCFSIPKLQYLLRTSMTYTNNGGLQELDSIIREAVTSITNVEFKERAWTQATLPVRLGGLGIRRASDIASPAFISSLIATNDLVVSILSSQPGMTLNGDVTAAINTWKGSTGVEEEPQGTSRSKQKAWDTISAKKTQENLLTNADQVAKARLQAAARSESGLWLHAIPIPPLGTHLDAEALRVAIALRVGAAVCHPHTCKCGGGMDAQGHHALSCNYNAGRLPRHSALNDVIKRALQSANRASILEPHGLHREYGKRPDGMTTFPYKNGRCLVWDATCVDTFSTTNIARNADEAGEAARIAENKKREKYQAIARNHQFEPLAFETSGVFGPTTLKMVNEIGRKIREVSGEPRETLWLKQRLGMAILRGNATSVMSSVRQDWVMPLCEAPGRSGVSVVFPQ

SEQ ID NO: 24298 - protein, 998 aa, Paralithodes camtschaticus
MVEMEAPREDQEDGLVEAEERIILEDYGLADTKCLKCGTTNARKNSRKCSGCLRSIHLSCAKLTKKTSGEQPNWKCLTCPGPTAEPTGATPATPVADLTQLVTKWKARIQVLARVPKGARIQVAEALTTIIKQALQLKTPLAWARLLGFSYGALRKPPRTNIQDHLQVSLATRVKRQVAQYMDGNKLVEPPEQQPNRAQKHQEKEEEEAEQLHKRVAAKLADSDIKGAVRLLSSSEGFAGQGTEVVEALQEKHPPTPRDLNLPPAPNDQMRQPLVVTKEQVVAAVTSFPAGSAAGPDGIRPAHLKGLLGQGSGAAGEALLETLTKFINMVLRGEVPDCATPLFFGASLCALAKKDGGVRPIAVGNTFRCLATKLGLKPLSNGLGQHLRPVQLGFGTPGGCEAAVHATRTYLSQAQEKRVLLKIDMRNAFNSIRRDVFLRAAQEHIPTLYPLLWQAYSKPSILIFGETVIPSETGLQQGDPGGPALFSIGVDAAANKVRSELNVWYLDDATLGGSVENVLTDLNNIITDLGQAGLVINDTKCELVLLNHTRKQGEETQALFRNILPDVKILQEHQQTLLGSPLTLAAIPPALQVKKEELQRLVSRLIHIDAHSALALLKNCFSIPKLQYLLRTSMTYTNNGGLQELDSIIREAVTSITNVEFKERAWTQATLSVRLGGLGIRRASDIASPAFISSLIATDDLVLSILYSKPGMTLNGDVTAAINAWKGSTGVEEEPQGTSRSKQKAWDTISAKKTQENLLTNADQVAKARLQAAARSESGLWLHTIPIPPLGTHLDAEALRVAIALRVGAAVCHPHTCKCDGRMDAQGHHALSCNYNAGRLPRHSALNDVIKRALQSANCASILEPHGLHREDGKRPDGMTTFSYKNGRCLVWDASCVDTFSTTNAARNADEAGEAARIAENKKREKYQAIARIHQFEPLAFETSGVFSPTTLKMVNEIGRKIREVSGEPRETLWLKQRLGMAILRGNATSVMSSVRQD

SEQ ID NO: 24299 - protein, 1018 aa, Paralithodes camtschaticus
MAEMEAPREDQEVGLVEAEERIILEDYGLADTKCFKCGKTNARKNSRKCSGCLRSIHLSCAKLTKKTSGEQPNWKCLACPGPTAEPTGATPATPVADLTQLVTKWKARIQVLARVPKGARIQVAEALTTIIKQALQLKTPLAWARLLGFSYGALRKPPRTNIQDHLQVSLATRVKRQVAQYMDGNKLVEPPEQQPNRAQKQQDKEEEEAEQLRKKVAAKLTDSDIKGAVRLLSSSEGFAGQGTEVVEALQEKHPPTPRDLNLPPAPNDQMRQPLVVTKEQVVAAVTSFPAGSATGPDGIRPAHLKGLLGQGSGAAGEALLETLTKFINMVLRGEVPDCATPLFLGASLCALAKKDGGVRPIAVGNTFRRLATKVGLKPLSNGLGQHLRPVQLGFGTPGGCEAAVHATRTYLSQAQEKRVLLKIDIRNAFNSIRRDVFLRAAQEHIPTLYPLLWQAYSKPSILIFGETVIPSATRLQQGDPGGPALFSIGVDAAANKVRSELNVWYLDDATLGGSVENVLTDLNNIVTDLGQAGLVINDTKCELVLLNHTREQGEETQALFRGILPDVKILQEHQQTLLGCPLTLAAIPPALQVKKEELQRLVSRLIHIDAHSALALLKNCFSIPKLQYLLRTSMTYTNNGGLQELDSIIREAVTSITNVEFKERTWTQATLPVRLGGLGLRRASDIASQAFISSLIATNDLVVSILSSQPGMTLNWDVTVAIDTWKESTGVEEEPQGTSRSKQKAWDTISAKKTQENLLTNADQVAKARLQAAARSESGLWLHAIPIPPLGTHLDAEALRVAIALRVGAAVCHPHTCKCGGGMDAQGHHALSCNYNAGRLPRHSALNDVIKRALQSANRASILEPHGLHREDGKRPDVMTTFPYKNGRCLVWDATCVDTFSTTNIARNADEAGEAARIAENKKREKYQAVARNHQFEPLAFETSGVFGPTTLKMVNEIGRKIREVSGEPRETLWLKQRLGMAILRGNATSVSSVRLDWVMLLCEARAGVVYPSLSTVG

SEQ ID NO: 24300 - protein, 832 aa, Paralithodes camtschaticus
MDGNKLVEPPEQQPNSAQKHQDKEEEEAEQLRKRVAAKLADSDIKGAVRLLSSSECFAGQGTEVVDALQEKHPPTPRDLNLPPSPNDQMRQPLVVTKEQVVAAVTSFPAGSAAGRDGIRPAHLKGLLGQGSGAAGEALLETLTKFINMVLRGEVPDCATPLFLGASLCALAKKDGGVRPIAVGNTFRRLATKVGLKPLSNGLGQHLRPVQLGFGTPGGCEAAVHATRTYLSQAQEKRVLLKIDMRNAFNSIRRDVFLRAAQEHIPTLYPLLWQAYSKPSILIFGETVIPSETGLQQGDPGGPALFSIGVDAAANKVRSELNVWYLDDATLGGSVENVLTDLNNIITDLGQAGLVINDTKCELVLLNHTREQGEETQALFRNILPDVKILQEHQQTLLGSPLTLAAIPPALQVRKEELQHLVSRLIHIDAHSALALLKNCFSIPKLQYLLRTSMTYTNNGGLQELDSIIRDAVTSITNVEFKERAWTQATLPVRLGGLGIRRASDIASPAFISSLIATNDLILSILYSKPGMTLNGDVTAAINTWKGSTGVEEEPQGTSRSKQKAWDTISAKKTQENLLTNADQVAKARLQAAARSESGLWLHAIPIPPLGTHLDAEALRVAIALRVCAAVCHPHTCKCDGRMDAQGHHALSCNYNAGRLPRHSALNDVIKRALQSANSASILEPHGLHREDGKLPDGMTTYPYKNGRCLVWDATCVDTFSTTNAARNAGEAGEAARIAENKKREKYQAIARIHQFEPLAFETSGVFGPTTLKMVNEIGRKIREVSGEPRETLWLKQRLGMAILRGNATSVMSSVRQDWVMPLREAPAGVVYP

SEQ ID NO: 24301 - protein, 1013 aa, Paralithodes camtschaticus
MVEMEAPREDQEDGLVEAEERIILEDYGLADTKCFKCGKTNARKNSRKCSGCLRSIHLSCAKLTKKTSGEQPNWKCLACPGPTAEPTGATPATPVADLTQLVTKWKARIQVLARVLKGARIQVAEALTTIIKQALQLKTPLAWARLLGFSYGALRKPPRTNIQNHLQVSLATRVKRQVAQYMDGNKLVKPLEQQPNRAQKQQDKEEEEAEQLRKRVAAKLADSDIKGAVRLLSSSEGFAGQGTEVIEALQEKHPPTPRDLNLPPSPNDQMRQPLVVTKEQVVAAVTSFPAGSAAGPDGIRPAHLKGLLGQGSGAAGEALLETLTKFINMVLRGEVSDCATPLFFGASLCALAKQDGGVRPIAVGNTFLRLATKVGLKPLSNGLGQHLRPVQLGFGTPGGCEAAVHATRTYLSQAQEKRVLLKIDMRNAFNSIRRDVFLRAAQEHIPTLYALLWQAYSKPSILIFGETVIPSATGLQQGDPGGPALFSIGVDAAANKVRSELNVWYLDDATLGGSVENVITDLNNIVTYLGQAGLVINDTKCELVLLNHTREQGEETQALFRDILPDVKILQEHQQTLLGSPLTLAAIPPALQVKKEELQRLVSRLIHIDAHSALALLKNCFSIPKLQYLLHTSMTYTNNGGLQELDSIIREAVTSITNVEFKERALTQATLPVRLGGLGIRRASDIASPAFISSLIATNDLVVSILSSQPGMTLNGDVTAAINTWKGSTGVEEEPQGTCRSKQKAWDTISAKKTRENLLTNADLVAKARLQAAARSESGLWLHAIPIPPLGTQLDAEALRVAIALRVGAAVCHPHTCKCGGGMDAQGHHALSCNYNAGRLPRHSALNDVIKRALQSANRASILEPHGLHREDGKRPDGMTTFPYKNGRCLVWDATCVDTFSTTNIARNADEAGEAARIAENIKREKYQAIARNHQFEPQAFETSGVFGPTTLKMVNEIGRKIREVSGEPRETLWLKQRLGMAILRGNATSVMSSVRQDWVMPLCEARAGVVYP

SEQ ID NO: 24302 - protein, 998 aa, Paralithodes camtschaticus
MVEMEAPREDQEDGLVEAEERIILEDYGLADTKCLKCGTTNARKNSRKCSGCLRSIHLSCAKLTKKTSGEQPNWKCLTCPGPTAEPTGATPATPVADLTQLVTKWKARIQVLARVPKGARIQVAEALTTIIKQALQLKTPLAWARLLGFSYGALRKPPRTNIQDHLQVSLATRVKRQVAQYMDGNKLVEPPEQQPNRAQKHQEKEEEEAEQLHKRVAAKLADSDIKGAVRLLSSSEGFAGQGTEVVEALQEKHPPTPRDLNLPPAPNDQMRQPLVVTKEQVVAAVTSFPAGSAAGPDGIRPAHLKGLLGQGSGAAGEALLETLTKFINMVLGGEVPDCATPLFFGASLCALAKKDGGVRPIAVGNTFRCLATKLGLKPLSNGLGQHLRPVQLGFGTPGGCEAAVHATRTYLSQAQEKRVLLKIDMRNAFNSIRRDVFLRAAQEHIPTLYPLLWQAYSKPSILIFGETVIPSETGLQQGDPGGPALFSIGVDAAANKVRSELNVWYLDDATLGGSVENVLTDLNNIITDLGQAGLVINDTKCELVLLNHTRKQGEETQALFRNILPDVKILQEHQQTLLGSPLTLAAIPPALQVKKEELQRLVSRLIHIDAHSALALLKNCFSIPKLQYLLRTSMTYTNNGGLQELDSIIREAVTSITNVEFKERAWTQATLSVRLGGLGIRRASDIASPAFISSLIATNDLVLSILYSKPGMTLNGDVTAAINAWKGSTGVEEEPQGTSRSKQKAWDTISVKKTQENLLTNADQVAKARLQAAARSESGLWLHTIPIPPLGTHLDAEALRVAIALRVGAAVCHPHTCKCDGRMDAQGHHALSCNYNAGRLPRHSALNDVIKRALQSANCASILEPHGLHREDGKRPDGMTTFSYKNGRCLVWDASCVDTFSTTNAARNADEAGEAARIAENKKREKYQAIARIHQFEPLAFETSGVFSPTTLKMVNEIGRKIREVSGEPRETLWLKQRLGMAILRGNATSVMSSVRQD

SEQ ID NO: 24303 - protein, 1013 aa, Paralithodes camtschaticus
MAEMEAPWEDQEDGLVEAEGRIILEDYGLADTKCFKCGKTNARKNSRKCSGCLRSINLSCAKLTKKTSGEQPNWKCLACPGPTAEPTGATPATPVADLTQLVTKWKARIQVLARVPKGARIQVAEALTTIIKQALQLKTPLAWARLLGFSYGALRKPPRTNIQDHLQVSLATRVKRQVAQYMDGNKLVEPPEQQPNRAQKQQDKEEEEAEQLRKRVAAKLADTDIKGAVRLLSSSEGFAGQGTEVVEALQEKHPPTPKDLNLPPAPNDQMRQPLVVTKEQVVAAVTSFPAGSAAGPDGIRPAHLKGLLGQGSGAAGEALLETLTKFINMVLRGEVPDCATPLFFWASLCALAKKDGGMRPIAVGNTFRHLAIKVGLKLLSNGLGQHLRPVQLGFGTPGGCEAAVHATRTYLSQAQEKRVLLKIDMQNAFNSIRRDVFLRAAQEHIPTLYPLLWQAYSKPSILIFGETVIPSATGLQQGDPGGPALFSIGVDAAANKVRSELNVWYLDDATLGGSVENVLTDLNNIVTDLGQAGLVINDTKCELVLLNHTREQGEETQALFRDTLPDVKILQEHQQTLLGSPLTLAAIPPALHVKKEELQRLVSHLIHIDAHSDLALLKNCFSIPKLQYLLRTSMTYTNNGGLQELDSIIREAVTSITNVEFKERTWTQATLPVRLGGLGIRRASDIASPAFISSLIATNDLVLSILSSQPGMTLNGELTAAINTWKKSTGVDEEPQGTSRSKQKAWDTISAKKTQENLLTNADQVAKARLQAATRSESGLWLHAIPTPPLGTHLDAEALRVPIVLRVGAAVCHPHTCKCGRGIDAQGHHALSCNYNAGRLPRHSALNDVIKRALQSVNRASILEPHGLHREDGKRPDGMTTFPYKNGRCLVWNATCVDTFSTTNIARNADEAGEAARIAENKKREKYQAITRNHQFEPLAFETSGVFGPTTLKMVNEIDRKIREVSGEPRETLWLKQRLGMVILRGNATSVMSSVRLDWVMPLCEARAGVMYP

SEQ ID NO: 24304 - protein, 1013 aa, Paralithodes camtschaticus
MVEMEAPREDQEDGLVEAEERIILEDYGLADTKCLKCGTTNARKNSRKCSGCLRSIHLSCAKLTKKTSGEQPNWKCLACPGPTAEPTGATPATPVADLTQLVTKWKARIQVLARVPKGARIQVAEALTTIIKQALQLKTPLAWARLLGFSYGALRKPPRTNIQDHLQVLLATRVKRQVAQYMDGNKLVEPPEQQPNRAQKHQDKEEEEAEQLRKRVTAKLADSDIKGAVRLLSSSEGFAGQGTEVVEALQEKHPPIPRDLNLPPAPNDQMRQPLVVTKEQVVAAVTSFPAGSAAGPDGIRLAHLKGLLGQGSGAAGEALLETLTKFINMVLRGEVPDCATPLFFGASLCALAKKDGGVRPIAVGNTFRRLATKVGLKPLSNGLGQHLRPVQLGFGTPGVCEAAVHATRTYLSQAQEKRVLLKIDMRNAFNSIRRDVFLRAAQEHFPTLYPLLWQAYSKPSILIFGETVIPSETGLQQGDPGGPALFSIGVDAAANKLRSELNVWYLDDATLGGSVENVLTDLNNIITDLGQAGLVINDTKCELVLLNHTREQGEETQALFRNILPDVKILQEHQQTLLGSPLTLAAIPPTLQVKKEELQRLVSRLIHIDAHSALALLKNCFSIPKLQYLLRTSMTYTNNGGLQELDSIIRDAVTSITNVEFKERAWTQATLPVRLGGLGIRRASDIASPAFISSLIATNDLVLSILYSKPGMTLNGDVTAAINTWKGSTGVEEEPQGTSRSKQKAWDTISAKKTQENLLTNADQVAKARLQAAARSESGLWLHAIPIPPLGTHLDAEALRVAIVLRVGAAVCHPHTCKCDGRMDAQGHHALSCNYNAGRLPRHSALNDVIKRALQSANCASILEPHGLHREDGKRPDGMTTYPYKNGRCLVWDATCVDTFSTTNAARNADEAGEAARIAENKKREKYQGIARIHQFEPLAFETSGVFGPTTLKMVNEIGRKIREVSGEPRETLWLKQRLGMAILRGNATSVMSSVRQDWVMPLCEAPAGVVYP

SEQ ID NO: 24305 - protein, 833 aa, Paralithodes platypus
MDGNKLVEPPEQQPNRAQKHQDKEEEEAEQLRKRVAAKLADSDIKGAVRLLSSSEGFAGQGTEVVEALQEKHPPTPRDLNLPPAPNDQMRQPLVVTKEQVVAAVTSFPAGSAAGPDGIRPAHLKGLLGQGSGAAGEALLETLTKFINMVLRGEVPDCATPLFFGGITLCTGKKRWRCAPIAVGNTFRRLATKVGLKPLSNGLGQHLRPVQLGFGTPGGCEAAVHATRTYLSQAQEKRVLLKIDMRNAFNSIRRDVFLRAAQEHIPTLYPLLWQAYSKPSILIFGETVIPSETGLQQGDPGGPALFSIGVDAAANKVRSELNVWYLDDATLGGSVENVLTDLNNIITDLGQAGLVINDTKCELVLLNHTREQGEETQALFRNILPDVKILQEHQQTLLGSPLTLAAIPPALQVKKEELQRLVSRLIHIDAHSALALLKNCFSIPKLQYLLRTSMTYTNNGGLQELDSIIRDAVTSITNVEFKERAWTQATLPVRLGGLGIRRASDIASPAFISSLIATNDLVLSILYSKPGMTLNGDVTAAINTWKGSTGVEEEPQGTSRSKQKAWDTISAKKTQENLLTNADQVAKARLQAAPRSESGLWLHAIPIPPLGTHLDAEALRVAIALRVGAAVCHPHTCKCDGRMDAQGHHALSCNYNAGRLPRHSALNDVIKRALQSANCASILEPHGLHREDGKRPDGMTTYPYKNGRCLVWDATCVDTFSTTNAARNADEAGEAARIAENKKREKYQAIARIHQFEPLAFETSGVFGPTTLKMVNEIGRKIREVSGEPRETLWLKQRLGMAILRGNATSVMSSVRQDWVMPLREAAPAGVVYP

SEQ ID NO: 24306 - protein, 830 aa, Paralithodes camtschaticus
MDGNKLVEPPEQQPNRAQKHQDKEEEEAEQLRKRVAAKLADSDIKGAVRLLSSSEGFAGQGTKVVEALQEKHPPTPRDLNLPPAPNNQMRQPLVVTKEQVVAAVTSFPAGSAAGPDGIRPAHLKGLLGQGSGAAGEALLETLTKFINMVLRGEVPDCATPLFFGASLCALAKKDGGVRPIAVGNTFRRLATKVGLKPLSNGLGQHLRPVQLGFGTPGGCEAAVHATRTYLSQAQEKRVLLKIDMRNAFNSIRRDVFLRAAQEHIPTLYPLLWQAYSKPSILIFGETVIPSETGLQQGDPGGPALFSIGVDAAANKVRSELNVWYLDDATLGGSVENVLTDLNNIITDLGQAGLVINDTKCELVLLNHTREQGEETQALFRNILPDVKILQEHQQTLLGSPLTLAAIPPALQVKKEELQRLVSRLIHIDAHSALALLKNCFSIPKLQYLLRTSMTYTNNGGLQELDSIIREAVTSITNVEFKERAWTQATVPVRLGGLGIRRASDIASPAFISSLIATNDLVLSILYSQPGMTLNEDVTAAINTWKGSTGVEEEPQGTSRSKQKAWDTISAKKTQENLLTNADQVAKARLQAAARSESGLWLHAIPIPPLGTHLDAEALRVAIALRVGAAVCHPHTCKCDGRMDAQGVLSCNYNAGRLPRHSALNDVIKRALQSANCASILEPHGLHREDGKRPDGMTTFPYKNGRCLVWDATCVDTFSTTNAARNADEAGEAARIAENKKREKYQAIARIHQFEPLAFETSGVFGPTTLKMVNEIGRKIREVSGEPRETLWLKQRLGMAILRGNATSVMSSVRQDWVMPLCEAPAGVVYP

SEQ ID NO: 24307 - protein, 832 aa, Paralithodes camtschaticus
MDGNKLVEPPEQQPNRAQKQQDKEEEEAEQLRKRVAAKLADSDIKGAVRLLSSSEGFAGQGTEVVEALQEKHPPTPRDLNLPPAPNDQMPQPLVVTKEQVVAAVTSFPAGSAAGPDGIRPAHLKGLLGQGSGAAGETLLETLTKFINMVLRGEVPDCATPLFLGASLCALAKKDGGVRPIAVGNTFRRLATKVGLKPLSNGLGQHLRPVQLGFRTPGGCEAAVHATRTYLSQAQEKRVLLKIDMRNAFNSIRRDVFLRAAQEHIPTLYPLLWQAYSKPSILIFGETVIPSATGLQQGDPGGPALFSIGVDAAANKVRSELNVWYLDDATLGGSVENVLTDLNNIVTDLSQAGLVINDTKCELVLLNHTREEGEETQALFQGILPDVKILQDHQQTLLGSPLTLAAIPPALQVKNEELQRLVSRLIHIDAHSALALLKNCFSIPKLQYLLRTSMTYTNNGGLQELDSIIREAVTSITNVEFKERTWTQATLPVRLGGLGIRRASDIASPAFISSLIATNDLVVSILSSQPGMTLNGDVAVAINTWKESTGAEEEPQGTSRSKQKVWDTISAKKTQENLLTNADQVAKARLQAAARSESGLWLHAIPIPRLGTHLDAEALRVAIALRVGAAVCHPHTCKCGGGMDAQGHHALSCNYNAGRLPRHSSLNDVIKRALQSANRASILEPHGLHREDGKRPDGMITFPYKNGRCLVWDATCVDTFSTTNIARNADEAGEAARIAENKKREKYQAIARNHQFEPLAFETSGVFCPSTLKMVNEIGRKIREVSGEPRETLWLKQRLGMAILRGNATSVMSSVRLDWVMPLCEARAGVVYP

SEQ ID NO: 24308 - protein, 822 aa, Paralithodes camtschaticus
MDGNKLVEPPEQQPNRAQKQQDKEEEEAEQLRKRVAAKLADSDIKGAVRLLSSSEGFAGQGTEVVEALQEKHPPTPRDLNLPPATNDQMRQPLVVTKEQVVAAVTSFPAGSAAGPDGIRPAHLKGLLGQGSGAAGEALLETLTKFINMVLRGEVPDCATPLFLGASLCALAKKDGGVRPIAVGNTFRRLATKVGLKPLLNGLGQHLRPVQLGFGTPGGCEAAVRATRTYLSQAQEKQVLLKIDMRNAFNSIRRDVFLRAAQEHIPTLYPLLWQAYSKHSILIFGETVIPSATGLQQGDPGGPALFSIGVDAAANKVRSELNVWYLDDATLGGSVENVLTDLNNIVTDLGQAGLVINDTKCELVLLNHTREQGEETQALFRDILPDVKILQEHQQTLLGSPLTLAAIPPALQVKKEELQRLVSRLIHIDAHSALALLKNCFSIPKHQYLLRTSMTYTNNGGLQELDIIIREAVTSITNVEFKERAWTQATLPVRLGGLGIRRASDIASPAFISSLIATNDLVVSILSSHSGMTLNGDITAAINTWKGSTGVEEEPQGTSRSKQKAWDTISGKKTQENLLTNADQVAKARLQAAARSESGLWLHAIPIPPLGTHLDAEALRVAIALRVGTAVCHPHTCKCGGGMDAQGHHALSCNYNAGRLPRHSALNDVIERALQSANRASILEPHGLHKEDGKRPDGMTTFPYKNGRCLVWDATCVDTFSTTNIARNADEAGEAARIAENKKREKYQAIARNHQFEPLAFETSGVFGPTTLKMVNEIGRYQRSFRRTPGNPLAQTKTRDGYPPGQCHQRHELSLTGLGHATV

SEQ ID NO: 24309 - protein, 832 aa, Paralithodes platypus
MDGNKLVEPPEQQPNRAQKHQEKEEEEAEQLRKRVAAKLADSDIKGAVRLLSSSEGFAGQGTEVVEALQEKHPPTPRDLNLPPAPNDQMRQPLVVTKEQVVAAVTSFPAGSAAGPDGIRPAHLKGLLGQGSGAAGEALLETLTKFINMVLRGEVPDCATPLFFGASLCALAKKDGGVRPIAVGNTFRRLATKVGLKPLSNGLGQHLRPVQLGFGTPGGCEAAVHATRTYLSQAQEKRVLLKIDMRNAFNSIRRDVFLRAAQEHIPTLYPLLWQAYSKPSILIFGETVIPSETGLQQGDPGGPALFSIGVDAAANKVRSELNVWYLDDATLGGSVENVLTDLNNIITDLGQAGLVINDTKCELVLLNHTREQGEETQALFRNILPDVKILQEHQQTLLGSPLTLAAIPPALQVKKEELQRLVSRLIHIDAHSALALLKNCFSIPKLQYLLRTSMTYTNNGGLQELDSIIREAVTSITNVEFKERAWTQATLPVRLGGLGIRRASDIASPAFISSLIATNDLVLSILYSKPGMTLNGDVTAAINTWKGSTGVEEEPQGTSRSKQKAWDTISAKKTQENLLTNADQVAKARLQAAARSESGLWLHAIPIPPLGTHLDAEALRVAIALRVGAAVCHPHTCKCDGRMDAQGHHALSCNYNAGRLPRHSALNDVIKRALQSANCASILEPHGLHREDGKRPDGMTTFSYKNGRCLVWDATCVDTFSTTNAARNADEAGEAARIAENKKREKYQAIARIHQFEPLAFETSGVFGPTTLKMVNEIGRKIREVSGEPRETLWLKQRLGMAILRGNATSVMSSVRQDWVMPLREAPAGVVYP

SEQ ID NO: 24310 - protein, 919 aa, Paralithodes camtschaticus
MAEMEVPREDQEVGLVEAEERIILEDYGLADTKCFKCGKTNARKNSRKCSGCLRSIHLSCAKLTKKTSGEQPNWKCLACPGPTAEPTGATPATPDADLTQLVTKWKARIQVLARVPKGTRIQVAEALTTIIKQALQFKTPLAWVRLLGFSYGALRKPTRTNIQDHLQVSLATRVKHQVAQYMDGNKLVEPPEQQPNRAQKQQDKEEEEAEQLRKRVAAKLADSDIKGAVRLLSSSEGFAGQGTEVVEALQEKHPPTPRDLNLPPAPNDQMRQPLVVTKEQVVAAVTSFPAGSAAGPDGIRPAHLKGLLGQGSGAAGEALLETLTKFINMVLREEVPDCATPLFLGASLCALAKKDGGVRPIAVGNTFCRLATKVGLKPLSNGLGQHLRPVQLGFGTPGGCEAAVHATRTYLSQAQEKRVLLKIDMRNAFNSIRRDVFLCAAQEHIPTLYPLLWQAYSKPSILIFGETVIPSATGLQQGDPGGPALFSIGVDAAANKVRSELNVWYLDDATLGGSVENVLTYLNNIVTDLGQAGLVINDTKCELVLLNHTREQGEETQALFRGILPDVKILQEHQQTLLGSPLTLAAIPPALQVKKEELQRLVSRLIHIDAHSALALLKNCFSIPKLQYLLRTSMTYTNNGGLQELDSIIREAVTSITNVEFKERAWTQATLPVRLGGLGIRRASDIASPAFISSLIATNDLVVSILSSQPGMTLNWDVTAAINTWKESTGVEEEPQGTSRSKQKAWDTISAKKTQENLLTNADQVAKARLQAAARSESGLWLHAIPIPPLGTPLDAEALRVAIALREGATVCHPHTCKCGRGMDAQGHHALSCNYNAGRLPRHSALNDVIKRALQSANRASILEPHGLHREDGKRPDGMTTIPYKNGRCLVWDATCVDTFSTTNIARNADEAGEAARIA

SEQ ID NO: 24311 - protein, 1013 aa, Paralithodes camtschaticus
MAEMEAPREDQVVGLVEAEERIILEDYGLADTKCFKCGKTNARKNSRKCSGCLRSIHLSCAKLTKKTSGEQPNWKCLACPGPTAEPTGATPATPVADLTQLVTKWKARIQVLARVPKGARIQVAKALTTIIKQALQLKTPLAWARLLGFSYGALRKPPRTNIQDHLQVSLATRVKRQVAQYMDGNKLVEPPEQQPNRAQKQQDKEEEEAEQLRKRVAAKLADSDIKGAVRLMSSSEGFAGQGTEVVEALQEKHPPTPRNLNLSPAPNDQMRQPLVVTKEQVVAAVTSFPAGSAAGPDGIRPAHLKGLLGQGSGAAGEALLETLTKFINMVLRGEVPNCATPLFFGASLCALAKKDGGVRPIAVGNTFHRLATKVGLKPLSNGLGQHLRPVQLGFGTPGGCEAAVHATRTYLSQAQEKRVLLKIDMRNAFNSIRRDVFLRSAQEHIPTLYPLLWQAYSKPSILIFGERVIPSATGLQQGDPGGPALFSIGVDAAANKVRSELNVWYLDDATLGGSVENVLTDLNNIVTDLGQAGLVINDTKCELVLLNHTREQGEETQALFRGILPDVKILQEHQQTLLGSQLTLAAIPPALHIKKEKLQRLVSRLIHIDAHSALALLKNCFSIPKLQYLLRTSMTYTNNGGLQELDSIIREAVTSITNMEFKEWTWTQATLPVRLGGLGIRRASDIASPAFISSLIATNDLVVSILSSQPGMTLNWDVTAAINTWKESTGVEEEPQGTSRSKQKAWDTISAKKTQENLLTNADQVAKTRLQAAARSESDLWLHAIPIPPLGTHLDAEALRVAIALRVGAAVCHPHTCKCGRGMDAQGHHALSCNYNAGRLPRHSALNDVIKRALKSANRASILEPHGLHREDGKRPDGMTTFPYKNGRCLVWDATCVDTFSTTNIARNADEAGEAARIAENKKREKYQAIARNHQFEPLAFETSGVFGPTTLKMANEIGRKIREVSGEPRETLWLKQRLGMALLRVNATSVMSSVRLDWVMPLCEARAGVVYP

SEQ ID NO: 24312 - protein, 832 aa, Paralithodes camtschaticus
MDGNKLVEPPEQQPNRAQKHQDKEEEEAEQLRKRVTAKLADSDIKGAVRLLSSSEGFADQGTEVVEALQEKHPPTPRDLNLPPAPNDQMGQPLVVTKEQVVAAVTSFPAGSAAGPDGIRPAHLKGLLGQGSGAAGEALLETLTKFINMVLRGKVPDCATPLFLGASLCALAKKDGSVRPIAVGNTFRRLATKVGLKPLSNGLGQHLRPVQLGFGTPWGCKAAVHATCTYLSQAPKKRVLLKIDMRNAFNSIRRDVFLRAAQEHIPTLYPLLWQAYSKPSILIFGEAVIPSATGLQQGDAGGPALFSIGVDAAANKVRSELNVWYLDDATLGGSVENVLTDLNNIVTDLGQAGLVINDTKCELVLLNHTREQGEETQALFRDILPDVKILQEHQQTLLGSPLTLAAIPPALQVKKEELQCLVSRLIHIDAHSALALLKNCFSIPKLQYLLRTSMTYTNNGGLQELDSIIREAVTSITNVEFKERAWTQATLPVRLGGLGIRRASDIASPAFITSLIATNDFVVSILSSQPGMTLNGDVTAAINTWQGSTGVEEEPQGTSWSKQKAWDTISAKKTQENLLTNADQVAKARLQAAARSESGLWLHAIPIPPLGTHLDAEALRVAIALRVGAAVCHPHTCKCGGGMDAQGHHALSCNYNAGRLPRHSALNYVIKRALQSANHASILEPHGLHREDGKRPDGMTTFPYKNGRCLVWDATCVDTFSTTNIARNADEAGEAARIAENKKREKYQAIARNHQFEPLAFETSGVFGPTTLKMVNEIGRKIREVSGEPRETLWLKQRLGMAILRGNATSVMSSVRQDWVMPLCEARAGVVYP

SEQ ID NO: 24313 - protein, 880 aa, Paralithodes platypus
MQALQLKTPLAWARLLGFSYGALRTPPRTNIQDHLQVSLATRVKRQVAQYMDGNKLVEPPEQQPNRAQKHQDKEEEEAEQLRKRVAAKLADSDIKVRLLSSSEGFAGQGTEVVEALQEKHPPTPRDLNLPPAPNDQMRQPLVVTKEQVVAAVTSFPAGSAAGPDGIRPAHLKGLLGQGSGAAGEALLETLTKFINMVLRGEVPDCATPLFFGASLCALAKKDGGVRPIAVGNTFRRLATKVGLKPLSNGLGQHLRPVQLGFGTPGGCEAAVHATRTYLSQAQEKRVLLKIDMRNAFNSIRRDVFLRAAQEHIPTLYPLLWQAYSKPSILIFGETVIPSATGLQQGDPGGPALFSIGVDAAANKVRSELNVWYLDDATLGGSVENVLTDLNNIVTDLGQAGLVINDTKCELVLLNHTREQGEETQALFRNILPDVKILQEHQQTLLGSPLTLAAIPPALQVKKEELQRLVSRLIHIDAHSALALLKNCFSIPKLQYLLRTSMTYTNNGGLQELDSIIREAVTSITNVEFKERAWTQATLPVRLGGLGIRRASDIASPAFISSLIATNDLVLSILSSQPGMTLNGDVTAAINTWKGSTGVEEEPQGTSRSKQKAWDTISAKKTQENLLTNADQVAKARLQAAARSESGLWLHAIPIPPLGTHLDAEALRVAIALRVGAAVCHPHTCKCGGWMDAQGHHALSCNYNAGRLPRHSALNDVIKRALQSANRASILEPHGLHREDGKRPDGMTTFPYKNGRCLVWDATCVDTFSTTNIARNADEAGEAARIAENKKREKYQAIARNHQFEPLAFETSGVFGPTTLKMVNEIGRKIREVSGEPRETLWLKQRLGMAILRGNATSVMSSVRQDWVMPLCEARAGVVYP

SEQ ID NO: 24314 - protein, 919 aa, Paralithodes camtschaticus
MAEMEVPREDQEVGLVEAEERIILEDYGLADTKCFKCGKTNARKNSRKCSGCLRSIHLSCAKLTKKTSGEQPNWKCLACPGPTAEPTGATPATPDADLTQLVTKWKARIQVLARVPKGTRIQVAEALTTIIKQALQFKTPLAWVRLLGFSYGALRKPTRTNIQDHLQVSLATRVKHQVAQYMDGNKLVEPPEQQPNRAQKQQDKEEEEAEQLRKRVAAKLADSDIKGAVRLLSSSEGFAGQGTEVVEALQEKHPPTPRDLNLPPAPNDQMRQPLVVTKEQVVAAVTSFPAGSAAGPDGIRPAHLKGLLGQGSGAAGEALLETLTKFINMVLREEVPDCATPLFLGASLCALAKKDGGVRPIAVGNTFCRLATKVGLKPLSNGLGQHLRPVQLGFGTPGGCEAAVHATRTYLSQAQEKRVLLKIDMRNAFNSIRRDVFLCAAQEHIPTLYPLLWQAYSKPSILIFGETVIPSATGLQQGDPGGPALFSIGVDAAANKVRSELNVWYLDDATLGGSVENVLTYLNNIVTDLGQAGLVINDTKCELVLLNHTREQGEETQALFRGILPDVKILQEHQQTLLGSPLTLAAIPPAIQVKMEELQRLVSRLIHIDAHSALALLKNCFSIPKLQYLLRTSMTYTNNGGLQELDSIIREAVTSITNVEFKERAWTQATLPVRLGGLGIRRASDIASPAFISSLIATNDLVVSILSSQPGMTLNWDVTAAINTWKESTGVEEEPQGTSRSKQKAWDTISAKKTQENLLTNADQVAKARLQAAARSESGLWLHAIPIPPLGTPLDAEALRVAIALREGATVCHPHTCKCGRGMDAQGHHALSCNYNAGRLPRHSALNDVIKRALQSANRASILEPHGLHREDGKRPDGMTTIPYKNGRCLVWDATCVDTFSTTNIARNADEAGEAARIA

SEQ ID NO: 24315 - protein, 1013 aa, Paralithodes camtschaticus
MAEMEAPREDQVVSLVEAEERIILEDYGLADTKCFKCGKTNARKNSRKCSGCLRSIHLSCAKLTKKTSGEQPNWKCLACPGPTAEPTGATPATPVADLTQLVTKWKARIQVLARVPKEARIQVAEALTTIIKQALQLKTPIAWARLLGFSYGALRKPPRTNIQDHLQVSLATRVKRQVAQYMDGNKLMEPPEQQPNRAQKQQDKEEEEAEQLRKRITAKLADSDIKGAVRLLSSSEGFAGQGTEVVEALQEKHPHTPRDLNLPPAPYDQMRQPLVVTKEQVVAAVTSFPAGSAAGPDGIRPAHLKGLLGQGSGAAGEALLETLTKFSNMVLRGEVPDCATPLFLGASLCAQAKKDGGVRPIAVGNTFRRLATKVGLKPVSNGLGQHLRPVQLGFGTPGGCEAAVHATRTYLSQVQEKRVLLKINMRNAFNSIHRDVFLRAAQEHIPTLYPLLWQAYSKPSILIFGETVIPSATELQQGDPGGPALFSIGVDAAANKVRSELNVWYLDDVTLGGSVENVLTDLNNIVTDLGQAGLVINDTKCELVLLNHTREQGEETQALFRGILPDVKILQEHQQTLLGSPLTLAAIPPALQVKKEELQRLVSRLIHIDAHSALALLKNCFSIPKLQYLLRTSMTYTNNGDLQELDSIIREAVTSITNVEFKERTWTQATLPVRLGGLGIRRASDIASPAFISSLIATNDLVVSILSSQPGMTLNWDVTAAINTWKESTGVEEEPQGTSRSKQKAWDTISAKKTQENLLTNADQVAKARLQAAARSESGLWLHAIPIPPLGTHLDAEALLVAIALRVGAAVCHPHTCKCGRGMDAQGHHALSCNYNTGCLPRHSALNDVIKRALQSANRASILEPHGLHREDGKRPDGMTTFPYKNGRCLVWDATCVDTFSTTNIARNADEAGEAARIAENKKREKYQAIARNHQFEPLAFETSGVFGPTTLKMVNEIGRKIREVSGKPRETLWLKQRLGMAILRGNATSVMSSVRLDWVMPLCEAWAGVVYP

SEQ ID NO: 24316 - protein, 935 aa, Paralithodes camtschaticus
MAEMEAPREDQVVGLVEAEERIILEGYGLADTKCFKCRKTNARKNSRKCSGCLRSIHLSCAKLTKKTSGEQPNWKCLACPGPTAEPTGATPATPVADLTQLVTKWKARIQVLARVPKGARIQVAEALTTIIKQALQLKTPLAWARLLGFSYGALRKPPRTNIQDHLQVSLATRVKRQVAQYMDGNKLVEPPEQQPNRAQKQQDKEEEEAEQLRKRVTAKLADSDIKGAVRLVSSSEGFAGQGTEVVEALQEKHPPTPRDLNLPPAPNDQMRQPLVVTKEQVVAAVTSFPASSAAGPDGIRPAHLKGLLGQGSGAAGEALFETLTKFINIVLRGEVPDCATPLFFWASLCTLVKKDGGVRPIAVGNTFRRLATKVGLKPLSNGLGQHLRPVQLGFGAPGVCEAAVHATRTYLSQAQEKRVLLKIDMRNAFNSIRRDVFLRAAQEHIPTLYPLLWQAYSKPSILIFGETVIPSATGLQQGDPGGPALFSIGVDAAANKVRSELNVWYLDDATLGGSVENVLTDLNNIVTDLGQAGLVINDTKFELVLLNHTREQGEKTQALFRGILPDVKILQEHQQTLLGSPLILAAIPPALQVKKEELQRLVSRLIHIDAHSALALLKNCFSIPKLQYLLRTSMTYTNNGGLQELNSIIREAVTSITNVEFKERTWTQATLPVRLGGLGIRRASDIASPAFISSLIATNDLVVSILSSQPGMTLNWDVTAAINTWKKSTALEEEPQGTSRSKQKVWDTISAKKTQENLLTNADQVAKARLQAAARSESGLWLHAIPIPPLGTHLDAEALRVAFALRVGAAVCHPHTCKCGRGMDAQGHHALSYNYNAGRLPRHSALNDVIKWALQSANRASILEPHGLHREDGKRPDGMTTFPYKNGRCLVWDATCVDTFSTTNIARNADEAGKAARIAENKKRENSSALPPLRW

SEQ ID NO: 24317 - protein, 914 aa, Paralithodes camtschaticus
MAEMEAPREDQEVGLVEAEERIIWEDYGLADTKCFKCGKTNARKNSRKCFGCLRSIHLSSAKLTKKTSGEQPNWKCLACPGPTAEPTGATPVADLTQLVTKWKARIQVLARVPKGARIQVAEALTTIIKQALQLKTPLAWARLLGFSYGALRKPPRTNIQDHLQVSLATRVKRQVAQYMDGNKLVEPPEQQPNRAQKQQDKEEEEAEQLRKRVAAKLADSDIKGAVRLLSSSEGFAGQGIEVVEALEEKHPPTPRDLNLPPAPNDQMPQPLVVTKEKVVAAVTSFPAGSAAGPDGIRSAHLKGLLGQGSGAAGEALLETLTKFNKMVLRGEVPDCATPLFFWGSLCALAKKDGGVRPIVVGNTFRRLATKVGLKPLSNGLGQHLRPVQLGFGTPGVCEAAVHATRTYLSQAQEKRVLLKIDMRNAFNSIRRDVILRAAQEHIPTLYPLLWQAYSKPSILIFGETVIPSATGLQQGDPGGPALFSIGVDAAANKVRSELNVWYLDDATLGGSVENVLTDLNNIVTDLGQAGLVINDTKCELVLLNHTHEEGEETQALFRGILPDVKILQEHQQTLLGSPLTLAAIPPALQVKKEELQRLVSRLIHIDAHSALALLKNCFSIPKLQYLLRTSMIYTNNGGLQELDSIIREAVTSITNVEFKERTWTQATLPVRLGGLGIRRASDIASPAFISSLIATNDLVVSILSSQPGMTLNGDVTVVINTWKESTGAEEEPQGTSRSKQKAWHTISAKKTQENLLTNADQVAKARLQAATRSESGLWLHAIPIPPLGTHLDAEVLRVAIALRVAAAVCHPHTCKCGGGMDTQGHHALSCNYNAGRLPRHSALNDVIKRALQSANRASILEPHGLHREDGKRPDGMTTFPYKNGRCLMWDATCLTLSPQPTSPETPTKQVKPPG

SEQ ID NO: 24318 - protein, 1009 aa, Paralithodes camtschaticus
MVEMEAPREDQEDGLVEAEERIILEDYGLADTKCLKCGTTNARKNSRKCSGCLRSIHLSCAKLTKKTSGEQPNWKCLACPGPTAEPTGATPVADLTQLVTKWKARIQVLARVPKGARIQVAEALTTIIKQALQLKTPLAWARLLGFSYGALRKPPRTNIQDHLQVSLATRVKRQVAQYMDGNKLVEPPEQQPNRAQKHQEKEEEEAEQLRKRVAAKLADSDIKGAVRLLSSSEGFAGQGTEVVEALQEKHPPTPRDLNLPPAPNDQMRQPLVVTKEQVVAAVTSFPAGSAAGPDGIRPAHLKGLLGQGSGAAGEALLETLTKFINMVLRGEVPDCATPLFFGASLCTLAKKDGGVRPIAVGNTFRRLATKVGLKPLSNGLGQHLRPVQLGFGTPGGCEAAVHATRTYLSQAQEKRVLLKIDMRNAFNSIRRDVFLRAAQEHIPTLYPLLWQAYSKPSILIFGETVIPSETGLQQGDPGGPALFSIGVDAAANKVRSELNVWYLDDATLGGSVENVLTDLNNIITDLGQAGLVINDSKCELVLLNHTREQGEETQALFRNILPDVKILQEHQQTLLGSPLTLAAIPPALQVKKEELQRLVSRLIHIDAHSALALLKNCFSIPKLQYLLRTSMTYTNNGGLQELDSIIREAVTSITNVEFKERAWTKATLPVRLGGLGIRRASDIASPAFSSSLIATNDLVLSILYSKPGMTLNGDVTAAINTWKGSTGVEEEPQGTSRSKQKAWDTISAKKTQENLTNADQVAKARLQAAARSESGLWLHAIPIPPLGTHLDAEALRVAIALRVGAAVCHPHTCKCDGRMDAQGHHALSCNYNAGRLPRHSALNDVIKRALQSANCASILEPHGLHREDGKRPDGMTTFSYKNGRCLVWDATCVDTFSTTNAARNADEAGEAARIAENKKREKYQAIARIHQFEPLAFESSGVFGPTTLKMVNEIGRKIREVSGEPRETLWLKQRLGMAILRGSATSVMSSVRQDWVMPLREAPAGMVYP

SEQ ID NO: 24319 - protein, 831 aa, Paralithodes camtschaticus
MDGNKLVEPPEQQPNRAQKQQDKEEEEAEQLRKRVAAKLADSDIKRAVRLLSSSEGFAGQGTEVVEALQEKHPPTPRDLNLPPAPNDQMRQPLVVTKEQVVAAVTSFPAGSAAGPDGIRPAHLKGLLGQGSGAAGEALLENLTKFINMVLRGEVPDCATPLFFGASLCALAKKDGGVRPIAVGNTFRRLATKVGLKPLSNGLGQHLRPVQLGFGTPGGCEAAVHATRTYLSQAQEKRVLLKIDMRNAFNSIRRDVFLRAAQEHIPTLYPLLWQAYSKPSILIFGETVIPSATGLQQGDPGGPALFSIGVDAAANKVRSELNVWYLDDATLGGSVENVLTDLNNIVTDLGQAGLVINDTKCELVLLNHTREQGEETQALFRDILPDVKILQEHQQTLLGSPLTLAAIPPALQVKKEELQRLVSRLIHIDAHSALALLKNCFSIPKLQYLLRTSMTCMNNGGLQELDSIIREAVTSITNVEFKERAWTQATLPVRLGGLGIRRASDIASPAFFSSLIATNDLVVSILSSQPGMTLNGDVTAAINTWKGSTGVEEEPQGTSRSKQKAWDTISAKKTQENLTNADQVAKARLQAAARSESGLWLHAIPIPPLGTHLDAEVLRVAIALRVGAAVCHPHTCKCGGGMDAQGHHALSCNYNAGRLPRHSALNDVIKRALQSANRASILEPHGLHREDGKRPDGMTTFPYKNGRCLVWDATCVDTFSTTNIARNADEAGEAVRIAENKKREKYQAIARNHQFEPLAFETSGVFGPTTLKMVNEIGRKIREVSGEPRETLWLKQRLGMAILRGNATSVMSSVRQDWVMPLCEARAGVVYP

SEQ ID NO: 24320 - protein, 1012 aa, Paralithodes camtschaticus
MAEMEAPREDQEVGLVEAEERIILEDYGLADTKCFKCGKPNARKNSRKCSGCLRSINLSCAKLTKKTSGEQPNWKCLACPGPTAEPTGATPATPVADLTQLVTKWKARIQVLARVPKGARIQVAEALTTIIKQALQLKTPLAWARLLGFSYGALRKPPRTNIQDHLQVSLATRVKRQVAQYMDGNKLVEPPEQQPNRAQKQQDKEEEKAEQLRKRVAAKLADSDIKGAVRLLSSSEGFAGQGTEVVEALQEKHPPTPRDLNLPPAPNDQMRQPLVVTKEQVVAAVTSFPAGSAAGPDGIRPAHLKGLLGQGSGAAGEALLETLTKFINMVLRGEVPDCATPLFFGASLCALAKKDGGVRPIAVGNTFRRLATKVGLKPLSNGLGQHLRPVQLGFGTPGVCEAAVHATRTYLSQAQEKRVLLKIDMRNAFNSIRRDVFLRAAQEHIPTLYPLLWQAYSKPSILIFGETVIPSATGLQQGDPGGPALFSIGVDAAANKVRSELNVWYLDDATLGGSVENVLTDLNNIVTDLGQAGLVINDTKCELVLLNHTREQGEETQALFRGILPDVKILQEHQQTLLGSPLTLAPIPPALQVKKEELQRLVSRLIHIDAHSALALLKNCFSIPKLQYLLRTSMTYTNNGGLQELDSIIREAVTSITNVEFKERTWTQATLPVRLGGLGIRRASDIASPAFISSLIATNDLVVSILSSQPGMTLNWDLTVAINTWKESTGVVEEPQGTSRSKQKAWDTISAKKTQENLTNADQVEKARLQAAARSESGLWLHAIPIPPLGTHLDAEALRVAIVLRVGAAVCHPHTCKCGGGMDAQGHHALSCNYNAGRLPRHSSLNYVIKRALQSANRASILEPHGLHREDGKWPGGMTTFPYKNGRCLVWDATCVDTFSTTNIARNTDEAGEAARIAENKKREKYQAIARNHQFEPLAFETSGVFGPTTLKMVNEIGRKIREVSGEPRETLWLKQRLGMAILRGNATSVMSSVRPDWVMPLCEARAGVVYP

SEQ ID NO: 24321 - protein, 1026 aa, Paralithodes camtschaticus
MCQERFPGVSETRETWQMEAPREDQEVGLVEAEERIILEDYGLADTKCFKCGKTNARKNSRKCSGCLRSIHLSCAKLTKKTSGDQPNWKCLACPGPTAEPTGATPATPVADLTQLVTKWKARIKVLARVPKGARIQVAEALTTIIKQALQLKTPLAWARLLGFSYGALRKPPRTNIQNHLQVSLATRVKRQVAQYMDGNKLVEPPEQQPNRAQKQQDKEEEEAEQLRKRVAAKLADSDIKGAVRLLSSSEGFAGQGTEVVEALQEKHPPTPRDLNLPPAPNDQMRQPLVVTKEQVVAAVTSFPAGSAAGPDGIRPAHLKGVLGQGSGAAGEALLETLTKFINMVLRGEVPDCATPLFFGASLCALAKKDGGVRPIAVGNTFRRLSTKVGLKPLSNGLGQHLRTVQLDFGTPGGCEAAVHATRTYLSQAQEKRVLLKIDMRNAFNSIRRDVFLRAAQEHIPTLYPLLWQAYSKPSILIFGETVIPSATGLQQGDPGGPALFSIGVDAAANKVRSELNVWYLDDATLGGSVENVLTDLNNIVTDLGQAGLVINDTKCELVLLNHTREEGEETQALFRGILPDVKILQEHQKTLLGSPLTLAAIPPALQVKKEELQRLVSRLIHIDAHSALALLKNCFSIPKLQYLLRTSMTYTNNGGLQELDSIIREAVTSITNVEFKERTWTQATLPVRLEGLGIRRASDIASPAFISSLIATNDLVVSILSSQPGMTLNRDVTVAINTWKESTGVEEEPQGTSRSKQKAWDTISAKKTQENLTNADQVAKARLQAAARSESGLWLHAIPIPPLGTHLDAEALRVAIALRVGAAVCHPHTCKCGGGMDAQGHHALSCNYNAGRLPRHTALNDVIKRALQSANRASILEPHGLHREDGKQPDGMTTFPYKNGRCLMWDATCVDTFSTTNIARNADEAGETARIAENKKREKYQAIARNHQFEPLAFETSGVFCPTTLKMVNEIGRKIREVSGEPRETLWLKQRLGMAILRGNATSVMSSVRLDWVMPLCEARAGVVYP

SEQ ID NO: 24322 - protein, 1005 aa, Paralithodes camtschaticus
MVEMEAPREDQEDGLVEAEERIILEDYGLADTKCFKCGTTNARKNSRKCSGCLRSIHLSCAKLTKKTSGEQPNWKCLACPGPTAEPTGATPATPVANLTQLVTKWKARIQVLARVPKGARIQVAEALTTIIKQALQLKKPLAWARLLGFSYGALRKPPRTNIQDHLQVSLATRVKRQVAQYMDGNKLVEPPEQQPNRAQKHQDKEEEEAEQLRKRVTAKLADSDIKVAVRLLSSSEGFAGQGTEVVEALQEKHPPTPRDLNLPPAPNDQMRQPLVVTKEQVVAAVTSFPAGSAAGPDGIRPAHLKGLLGQGSGSAGETLLETLTKFINMVLKGEVPDCVTPLFWGTSLCALAKKDGGVRPIAVGNTFRRLATKVGLKPLSNGLGQHLRPVQLGFGTPGGCEATRTYLSQAQEKRVLLKIDMRNAFNSIHRDVFLRAAQEHIPTLYPLLWQAYSKPSILIFGETVISSATGLQQGDPGGPALFSIGVDAAANKVRSELNVWYLDDTTLGGSVENVLTDLNNIVTDLGQAGLVINNTKCELVLLNHTREQGEETQALFRNILPDVKILQEHQQTLLGSPLTLAAIPPALQVKKRGASTSHESPDTHRCPLSSGPFSIPKLQYLLRTSMTYTNNGGLQELDSIIREAVTSITNVEFKERAWTQATLPVHLRGLGIRRASDIASPAFISSLIATNDLVLSILSSQPGMTLNGDVTAAINTWKGSTGVEEEPQDTSRSKQKAWDTISAKKTQENLLTNADQVAKARLQAAARSESGLWLHAIPIPPLGTHLDAEVLRVAIAVRVGAAVCHPHTCKCGGLMDAQGHHALSCNYNAGRLPRHSALNDVIKRALQSASRASILEPHGLHREDGKRPDGMTTFPYKNGRFLVWDATCVDTFSTTNIARNADEAGEAARIAENKKREKYQAIARNHQFEPLAFETSGVFGPTTLKMLNEIGRKIREVSGEPRETLWLKHSLGMAILRGNATSVMSSVRQDWVMPLCEARAGVVYP

SEQ ID NO: 24323 - protein, 994 aa, Paralithodes camtschaticus
MAEMEAPREDQEVGLVEAEERIILEDYGLADTKCFKCGKTNARKNSRKCSGCLRSIHLSCAKLTKKTSGEQPNWKCLACPGPTAEPTGATPATPVADLTQLVTKWKARIQVLARVPKGARIQVAEALTTIIKQALQLKTPLAWARLLGFSYGALRKPPRTNIQDHLQVSLATRVKRQVAQYMDGNKLVEPPEQQPNRAQKQQDKEEEEAEQLRKRVAAKLADSDIKGAVRLLSSSEGFAGQGTEVVEALQEKHPPTPRDLNLPPAPNDQMRQPLVVTKEQVVAAVTSFPAGSAAGPDGSRPAHLKGLLGQGSGAAGEALLETLTKFINMVLRGKVPDCATPLFFGASLCALAKKDGGVRPIAVGNTFRRLATKVGLKPLSNGLGQHLRPVQLGFGTPGVCEAAVHATRTYLSQAQEKRVLLKIDMRNAFNSIHRDVFLRAAQEHIPTLYPLLWQVYYKPSILIFGETVIPSATGLQQGDPGGPALFSIGVDAAANKVRSELNVWYLDDATLGGSVENVLTDLNNIVTDLGQAGLVINDTKCELVLNHTREQGEETRALFRGILPDVKILQEHQQTLLGFPLTLAAIPPALQVKKEELQRLVSRLIHIDAHSALALLKNCFSIPKLQYLLRTSMTYTNNGGLQELDSIIREAVTSITNVEFKERTWTQATLPVRLGGLGIRRASDIASPAFISSLIVTNDLVVSILSSQPGMTLNGDVTGAINTWKESTGVEEEPQGTSRSKQKEWDTISAKKTQENLLTNADQVAKARLKAAARSESGLWLHAISIPPLGTHLDAEALRVAIALRVGAAVCHPHTCKCGGGMDAQGHHALSCNYNAGRLPRHSALNDVIKRALQSANRASILEPHGLHREDGKRPDGMTTFPYKNGRCLVWDATCVDTFSTTNIARNADEAGEAARIAENKKREKYQAIARNHQFEPLAFETSGVFGPTTLKMVNEIGRKIREVSGEPRETLWLKQRLGMAILRGNATSVMSSV

SEQ ID NO: 24324 - protein, 907 aa, Paralithodes platypus
MFKETDWSFLINNNDINTSWKLFETTYLKAVQDCIPSKIRRPGHNNKPKWWNKDISNCLLAKKCANDRLKSSQNDEERVKFVELRRKAKKLIKQSKKTLELHIANQSKTNPKEFYSYIRKKKVVTSTVGPLVDENGEYTKDEVQMSNALNTFFASVFTTEDLSDIPTPSPIQIDNSDVLSNITVTEREVLNCLDKLKVNKTPGPDTISPRVLKEAKDELSKPLTLLFNKSFTKFINMVLRGEVPDCATPLFFGASLCALAKKDGGVRPIAVGNTFRRLATKVGLKPLSNGLGQHLRPVQLGFGTPGGCEAAVHATRTYLSQAQEKRVLLKIDMRNAFNSIRRDVFLRAAQEHIPTLYPLLWQAYSKPSILIFGETVIPSETGLQQGDPGGPALFSIGVDAAANKVRSELNVWYLDDATLGGSVENVLTDLNNIITDLGLAGLVINDTKCELVLLNHTREQGEETQALFRNILPDVKILQEHQQTLLGSPLTLAAIPPALQVKKEELQRLVSRLIHIDAHSALALLKNCFSIPKLQYLLRTSMTYTNNGGLQELDSIIREAVTSITNVEFKERAWTQATLPVRLGGLGIRRASDIASPAFISSLIATNDLVLSILYSKPGMTLNGDVTAAINTWKGSTGVEEEPQGTSRSKQKAWDTISAKKTQENLLTNADQVAKARLQAAARSESGLWLHAHPHPTSWNSHLDAEALRVAIALRVGAAVCHPHTCKCDGRMDAQGHHALSCNYNAGRLPRHSALNDVIKRALQSANCASILEPHGLHREDGKRPDGMTTFSYKNGRCLVWDATCVDTFSTTNAARNADEAGEAARIAENKKREKYQAIARIHQFEPLAFETSGVFGPTTLKMVNEIGRKIREVSGEPRETLWLKQRLGMAILRGNATSVMSSVRQD

SEQ ID NO: 24325 - protein, 834 aa, Paralithodes camtschaticus
MDGNKLVEPPEQQPNRAQKQQDKEEEEAEQLRKRVVANLADSDIKGAVRLLSSSEGFAGQGTEVVEALQEKHPPTPRDLNLPPAPNDQMRQPLVVTKEQVVAAVTSFPAGSAAGPDGIRPAHLKGLLGQGSGADGEALLETLTKFINMVLRGEVPDCATPLCFGASLCALAKKDGGVRPIAVGNTFRRLATKVGLKPLSNGLGQHLRPVQLGFGTPGGCETAVHATRTYLSQAQEKRVLLKIDMRNAFNSIRRDVFLRAAQEHIPTLYPLLWQAYSKPSILNFGETVIPSATGLQQGDPGGPALFSIGVDAAANKVRSELNVWYLDDATLGGSVENVLVLTDLNSIVTDLGQAGLVINDTKCELVLLNHTREQGEETQALFRGILPDVKILQEHQQTLLGSPVTLAAIPPALQVKKEELQRLVSRLIHIDAHSALALLKNCFSIPKLQYLLRTLMTYTNNGSLQELDSIIREAVTSITNVEFKERPWTQATLPVRLGGLGIRRASDIASPAFISSLIATNDLVVSILSSQPGMTLNGDVTVAINTWRESTGVEEEPQGTSRSKQKAWDTISAKKTQENLLTNADQVAKARLQAAARLECGLWLHAIPIPPLGTHLDAEALRVAIALRVGAAVCHPHTCKCGGGMDAQGHHALSCNYNAGRLPRHSALNDVIKRALQSANRASILEPHGLHREDGKRPDGMTTFPYKNGRCLVWDATCVDTFSTTNIARNADEAGEAARIAENKKREKYQAIARNHQFEPLAFETSGVFGPTTLKMVNEIGRKIREVSGEPRETLWLKQRLGMAILRGNATSIMSSVRLDWVMPLCEARAGVVYP

SEQ ID NO: 24326 - protein, 962 aa, Paralithodes camtschaticus
MAEMEAPREDQEVGLVEAEERIILEDYGLADTKCFKCGKTNARKNSRKCSGCLRSIHLSCAKLTKKTSGEQPNWKCLACPGPTAEPTGATPATPVADLTQLVTKWKARIQVLARVPKGARIQVAEALTTIIKQALQLKTPLAWARLLGFSYGALRKPPRTNIQDHLQVSLATRVKRQVAQYVDGNKLVEPPEQQPNRAQKQQDKEEEEAEQLRKRVAAKLADSDIKGAVRLLSSSEGFAGQGTEVVEALQEKHPPTPRDLNLPPAPNDQMRQPLVVTKEQVVAAVTSFPAGSAAGPDGIRPAHHKGLLGQGSGAAGEALLETLTKFINMVLRGEVPDCAIPLFFWASLCALAKKDGGVHPIAVGNTYRRLATKVGLKPLSNGLGQHLRPVQLGFGTPGGCEAAVHATRTYLSQAQEKRVLLKIDMRNAFNSIRRDVFLRAAREHIPTLYPLLWQTYSKPSILIFGETVIPSATGLQQGDPGGPALFSIGVDAAANKVRSELNVWYLDDATLGGSVENVLTDLNNIVSDLGQAGLVINDTKCELVLLNHTREQGEETQALFRGILPDVKIFQEHQQTLLGSPLTLAAIPPALQVKKEELQRLVSRLIHIDAHSALALLKNCFSIPKLQYLLRTSMTYTNNGGLQELDSIIREAVTSITNVEFKERTWTQATLPVRLGGLGIRRASDIASPAFISSLIATNDLEVSILSSQPGMTLNGVNVTGAINTWKESTGVEEEPQGTSRSKQKAWDTISAKKTQENLLTNADQVAKARLQAAARSESGLWLHAIPIPPLGTHLDAEALRVAIALRVGAAVCHPHTCKCGGGMDAQGHHALSCNYNAGRLPRHSALNYVIKRALQSANRASILEPHGLHREDGKRPDGMTTFPYKNGRCLVWDATCVDTFSTTNIARNADEAGEAARLAENKKREKYQAIARNHQFEPLAFETSGVFGPTTLNPSYPGSLS

SEQ ID NO: 24327 - protein, 999 aa, Paralithodes platypus
MVEMEAPREDQEDGLVEAEERIILEDYGLADTKCLKCGTTNARKNSRKCSGCLRSIHLSCAKLTKKTSGEQPNWKCLACPGPTAEPTGATPATPVADLTQLVTKWKARIQVLARVPKGARIQVAEALTTIIKQALQLKTPLAWARLLGFSYGALRKPPRTNIQDHLQVSLATRVKRQVAQYMDGNKLVEPPEQQPNRAQKHQEKEEEEAEQLRKRVAAKLADSDIKGAVRLLSSSEGFAGQGTEVVEALQEKHPPTPRDLNLPPAPNDQMRQPLVVTKEQVVAAVTSFPAGSAAGPDGIRPAHLKGLLGQGSGAAGEALLETLTKFINMVLRGEVPDCATPLFFGASLCALAKKDGGVRPIAVGNTFRRLATKVGLKPLSNGLGQHLRPVQLGFGTPGGCEAAVHATRTYLSQAQEKRVLLKIDMRNAFNSIRRDVFLRAAQEHIPTLYPLLWQAYSKPSILIFGETVIPSETGLQQGDPGGPALFSIGVDAAANKVRSELNVWYLDDATLGGSVENVLTDLNNIITDLGQAGLVINDTKCELVLLNHTREQGEETQALFRNILPDVKILQEHQQTLLGSPLTLAAIPPALQVKKEELQRLVSRLIHIDAHSALALLKNFFSIPKLQYLLRTSMTYTNNGGLQELDSIIREAVTSITNVEFKERAWTQATLPVRRLGGLGIRRASDIASPAFISSLIATNDLVLSILYSKPGMTLNGDVTAAINTWKGSTGVEEEPQGTSRSKQKAWDTISAKKTQENLLTNADQVAKARLQAAARSESGLWLHAIPIPPLGTHLDAEALRVAIALRVGAAVCHPHTCKCDGRMDAQGHHALSCNYNAGRLPRHSALNNVIKRALQSANCASILEPHGLHREDGKRPDGMTTFPYKNGRCLVWDATCVDTFSTTNAARNADEAGEAARIAENKKREKYQAIARIHQFEPLAFETSGVFGPTTLKMVNEIGRKIREVSGEPRETLWLKQRLGMAILRGNATSVMSSVRQD

SEQ ID NO: 24328 - protein, 1480 aa, Ixodes persulcatus
MATLERFFPPDAVVCHLCDLRISSRPKMGEHYLSSHGCHLVWRCSICHTHTYTLITSMSSHYSRCRRRQEGVDNSTPLHASAPPAPRDSGQLSGSKNAHPSTFLHASAPSVTLDKSTHKGPARLRSRPPPVEDHNVGASSTAPEVSLSSVQANSSHSEASKPATALEGSDPTTRTKNQDTLPPTGSPTATLPTKLPCPPPGAWSEADLRVLAFGELRLLPRTKFVNMELSIGYMGVTCQTIKDCRAKKLYRGVLRQEQARLRAVTPATPLPATPRPSSHLSTPPTHVQPTQHAPTTTARLTSRMPRLNNTKLRKSPGEVHAPTGLSRRAQVASCASQSRDPPPPSSKTPLTTSVAEPVNRIWSADDTRALALLELQAPSAMVCDEELAALLPKRTWESVREHRRSIVYKEALEREKARSRVRRPHEAPDESSFWEEDAATSVIEVQPPVRASLDSTLVADFQEGTSGEGTDELFSTPLRSPPPPGQTVLPSLVSRLPSPVLPTRVSYLPSPANAPVPQAVDPQQLPPLTEFNSYGRWTASELVALARAELDCGNEPFINQALAKTFTSRSWLSISGQRRSERYRDILARERASRVAAEAALSTQHQAPRSARVTAARPSTPPGQQGSEPPIIIDRQQLRESFLKAGLTDEVLIDSICSRPAGMVETNAILHHFKATPQKAKEEGRGRRAPPPPRNRAQRRRQLYEEHQRLYRLGPKVLVDEIRMQGADPTTTLKELHRVYDPLMSTPSRQVDSITSNMTALGEVAVEPFSEEEIKQVLKATDTSTSPGPDGLNLKEIRKVPAAVLAHLFTNWLAFSSVPVELKVARTVFIPKSRKATAPGDFRPITISSLLLRLYTRALLRRFSQDHQFHDFQGGFGDDRSASSNIIIFQALMKRKKTDRRSLYALSLDVRKAFDTVSHHAIIEVLKGRGLPPEYIEVVRDLYAGSSTTFWAGGRTDGVKIPVRQGIKQGDPLSPFLFNCVLDPLLIDLNRDAAGLEVGSQTIGALAFADDMILTSSSYEGLRSLLATTESYLAEVGLRLNPAKTILFGWRASADAITYDIPPVVVAGSPVFSTPPNKPIKYLGIDFYINKRPIVHSPTADDDFDIIQSASLKPFQKLRCINTLITPKFLYAASSILGSAGESAGVDKRLRTRIKSVLHLPQSFPNTHVYLPSRDGGLGVMNIERVGTEVQLKALARLVRLGNPAIDSLFNSTIGAFHCRLSSQLQVPADLTDAEELSAALRHSRTIWWGEHRAVYANKDLFSHHGQPLSNTWLQPDTHHLKDGDRIKALRLRTNILPTNALLERHNTNASARLCRRCRHALETPFHILQECPSIKLPRMERHNFLCKQVCRLTRKYHPGAIIETERVYHTEGGDRLKPDIVVTIDDTVVIADVAVTWDDRPASLSRVCSFKSAKYDCLRPLFPGKVTTAVGLAFGARSMLCKETLSGGASLGIPKWDMAWLSSRALVGSLICFNRFMKS

SEQ ID NO: 24329 - protein, 1341 aa, Ixodes scapularis
MSGTHPSSGALSTIERLYPPEEIVCHLCDIRLTSRISLGEHYELTHSCHFIWRCSICLTKTYTKSTSMSSHYTRCRKKPSVSPASTMATNESRTAARNGLLQKPIPSPPSSNEDHLELPRDTERPGMPMSLTSSTPALRRPPEGDWKMEDVRILAVQELTMPTKTKFVNKELAKGYAGVSWQSIKVIRGRKLYRDVLQQEQVRRRLPPHDSDVCTQPEPHTTTPGGPQTSVERSCMQTETSPSPVKTQRPQREGESSRDFFPATVTPEEINPTPGTRPWTDRETEALVLCELQAPSCMRGSDELAALMPGRSWQSVRDHRQTPQYAEAMRRELERQREKDAPNSLTHASPSIHSPGAPPGTPPAVVIPASSAASIIAEVPPTIEMVNSPPPAEFNLHARWTVSELTALARAEIACGDHPHMNLALSRTFTTRSWQGITGQRNTRRYKDILASLRAADPEQPGTLPPSHILGASSTGVCDQPTSHSHATIIHGLLDPIGIGVDLRRAGINDARLQEALHSRPAGMAEVNIIMNHFSVSSTKKGGTGGRKKRKRRPAKNRNQRRRERYAEHQRLYSLGPKVLVDELRLDGADPAVLLGELHRVYDPLMSTPSRPVDGFITSDPVLNIEVEPFTDGEIRGVLKNTDAKTAPGPDGLTLKEVSKIPPSILAIIFTNWLAFATLPDELKVAKTVFIPKSRSATTGGDFRPITISSILLRLYTRALLRRFSQDHVFHELQGGFGDDRSASSNIIILQALMKARKQARQSFYSLSLDVRKAFDTVSHHAIIEVLKGRGLPPQYIEVVRDLYHGSSTTFWSGGVTDGVRVPVRQGIKQGDPLSPFLFNCVLDPLLMNLNRDSAGLDVGDSTIGALAFADDLILTSSSYEGLRSLLTSTEEYLAEVGLFLNPAKTIFFGWRASSAAIIYDLPSITVAGTPVHPTPINSPIRYLGIDFFINKRPVVHSQHAEDDLILIESSSLKPFQKLRCINTLIMPKYLYAASSILGSSGDSAAIDKALRIRIKTLLHLPLSFPNTHMHLASRDGGMGCLNIERVAQEVQLKALARLVRLGNRSVDHLLNTTMGTYHCRLASQLRVPPDLTDAKELSAALGQSRKEWWRDTQAAYQNRDLFAHHDQALGNSWLQHDSRHLKDGDRIKALRLRTNTYPTNALLHLHDSDPSARLCRRCHQSLETPFHILQECSSIKLPRMERHNFICKQVCRLVSKHNPEAVIRTEQFITSPDGIRLRPDIIISDGDRVIIADVAVSWDDRPQSLQRMCDSKSAKYDCLRPLYPDKVVTAVGLAFGARSMLCMGTVRGGASLGFPKWDMAWLASRALVGSLICLNRFMKA

SEQ ID NO: 24330 - protein, 912 aa, Ixodes scapularis
MACVSLPLTGQRNTRRYKGILASLRAADPDQPGPLQPGDIHGASSTGVCNQPTSNSPVTVTHALLDPIRIGVDLRRVGINDARLQEALHGRPAGMAEVNIIMKHFNVSSTKKGGTGGRKKRKRRPAKNRNQRRRERYAEHQRLYSLGPKVLVDELRLDGADPAVLLGELHRVYDPLMSTPSRPVDGFITSDPVLNIEVEPFTDGEIRGVLKNTDTKTAPGPDGLTLKEVSKIPPSILAIIFTNWLAFATLPDELKVAKTVFIPKSRSATTGGDFRPITISSIILRLYTRALLRRFSQDHVFHELQGGFGDDRSASSNIIILQALMKARKQARQSFYSLSLDVRKAFDTVSHHAIIEVLKGRGLPPQYIEVVRDLYHGSSTTFWSGGVTDGVRVPVRQGIKQGDPLSPFLFNCVLDPLLMNLNRDSAGLDVGDSTIGALAFADYLILTSSSYEGLRSLLTSTEEYLAEVGLFLNPAKTIFFGWRASSAAIMYDLPSITVAGTPVHPTPINSPIRYLGIDFFINKRPVVHSQHAEDDLILIESSSLKPFQKLRCINTFIMPKYLYAASSILGSSGDSAAIDKALRIRIKTLLHLPLSFPNTHMHLASRDGGLGCLNIERVAQEVQLKALARLVRLANRAVDHLLNTTVGPYHCRLASQLRVPPDLTDAKELAAALGQSRKEWWRDTQAAYRNRDLFAHHDQALGNSWLQHDSRHLKDGDRIKALRLRTNTYPTNALLHLHDSDPSARLCRRCHQSLETPFHILQECPSIKLPRMERHNFICKQVCRLISKHNPEAVIRTEQFITSPDGIRLRPDIIISDGDRVIIADVAVSWDDRPQSLQRMCDSKSAKYDCLRPLYPDKVVTAVGLVFGARSMLCMGTVRGGASLGIPKWDMAWLASRALVGSLICLNRFMMA

SEQ ID NO: 24331 - protein, 1457 aa, Ephydatia muelleri
MTEACQQRSREAAQKEAQQGVSTARTKWTQREIELFKAALAKYGPGSNIKLAKEIGTRSTEQVNVYKCRFLKAYPTWVSEHYHPAIPVDGTARSSATTRSPSSQPQVGHTPPGPSNTQGHRTAGPRALTVPTVNRRRGALPAFPTSPPSSPPDAAAAGQQLPTRSPTSTTPHQAVASARQHYSPGVGEAQPQTPAATPPPTPPITVSPVTAQPSQEERTPSPPPVPVSEGGVLRLQLLDQALTILRSNNISVWDPEASCFSPPATDLATPTSSSPLTTVPARMHCSPGMGGACQPQPPPATIPPAPAITPPPAPVTVRKPYNTEVSVDHLMSPLAAYPEEAPVSPPSIFQSLLHVPPFVPAVPRTSMMIRRLDQALQSLRGEAPDTSPPLTPPSPPQHASPPTVVSERQHCSPAVDVVISQPLPMSPAVGGTNPPTPPSSPGQLPPPAGVPGPPATITIDPERMDETLRMPMYQELTPFSGRRLGTFEWVAFEEVLKRWSTAIKEVVTAQRRRPPNPTSQWARRQQGRGNRSGAAATLPTDLPPPGPGQPDSQNGDNTAGNRRYRTPGIARRANEARTIQRAYRTNPGNCMRRLLQPGPPVFCKIGDAELVEHFNAAYSVPPPLGPPPLWLFPPRHPESPAENVEGDVLSEPFSPDEVLGQLRRTKRSAPGVDGITYSDWRWVDPLGSILAAIFNTCRLNRKIPTAWKHSTVTLIHKGGDVAIIQNWRTISLQLTIYKIYSALIARRIAAWAISNSAFSPAQKGFLAYDGCAEHNFLLRSMFTDSRRKKKNLLLTWLDLREAFPSVSHDLLSLMMERLGLSGSTLDIVRDIYTNASIAIRTGRESYTPPIFQRRGVKQGCPLSPILFNIVLEGLLRHLSSCDAGYTLAGCRVNSLAYADDVCIAASSKEENQHLLDRAMEYVEWAGFAFNAKKCGSLCMINQAPRISVDHLYTPRLGTDVIPALSWEERYKYLGCPTGAFRSNAKVLEELRQSLVKDTDTVFQSPLAEWQKLDAFRRFLFPRLSFAMKVMFPGITWCKKLDTSLRSIIKRGLHLPRRTCTHYFYLSHDLGGLGIPSAEMESHAVKAGQAFKFLADTRDPYIRAVALDQLTDTVKKRARHLDPNKPEDLSEFLNNSAPPGEGGAGDMQSIWSQCRDSLATGGATIELTQDSATLHTVDQHLSWIKRNQIVQVLKQAMKLRHLNGLRRSMDQGRAFDSVAQHPDSTFFTYTGAFLTFPQYRFIHKARLNLLPVRTVQARCRQAVPSTQCRLCGRMPETLAHVLNHCHANLGLVRERHNAILDRIVRAVPPSLGTKYKEQAIPGTTGNNRPDLTIISPDESTVTIVDVSCPFEGSPLALEEAAKTKLMKYEPLKQHLLQTYNSVTILPFIVGSLGSWYPANDRVLSSLRIGRKYASLMRKLCVVSAVAGSQNIWYASMCTHRRSSATATEESPEPAPLQQ

SEQ ID NO: 24332 - protein, 1309 aa, Ephydatia muelleri
MQQLPGNSCLPGPQHLPPHTRLWPPQGSTTVLGWVRHNHRPLQRRHPPTPPITVSPVTAQPSQEERTPSPPPVPVSEGGVLRLQLLDQALTILRSNNISVWDPEASCFSPPATDLATPTSSSPLTTVPARMHCSPGMGGACQPQPPPATIPPAPAITPPPAPVTVRKPYNTEVSVDHLMSPLAAYPEEAPVSPPSIFQSLLHVPPFVPAVPRTSMMIRRLDQALQSLRGEAPDTSPPLTPPSPPQHASPPTVVSERQHCSPAVDVVISQPLPMSPAVGGTNPPTPPSSPGQLPPPAGVPGPPATITIDPERMDETLRMPMYQELTPFSGRRLGTFEWVAFEEVLKRWSTAIKEVVTAQRRRPPNPTSQWARRQQGRGNRSGAAATLPTDLPPPGPGQPDSQNGDNTAGNRRYRTPGIARRANEARTIQRAYRTNPGNCMRRLLQPGPPVFCKIGDAELVEHFNAAYSVPPPLGPPPLWLFPPRHPESPAENVEGDVLSEPFSPDEVLGQLRRTKRSAPGVDGITYSDWRWVDPLGSILAAIFNTCRLNRKIPTAWKHSTVTLIHKGGDVAIIQNWRTISLQLTIYKIYSALIARRIAAWAISNSAFSPAQKGFLAYDGCAEHNFLLRSMFTDSRRKKKNLLLTWLDLREAFPSVSYDLLSLMMERLGLSGSTLDIVRDIYTNASIAIRTGRESYTPPIFQRRGVKQGCPLSPILFNIVLEGLLRHLSSCDAGYTLAGCRVNSLAYADDVCIAASSKEENQHLLDRAMEYVEWAGFAFNAKKCGSLCMINQAPRISVDHLYTPRLGTDVIPALSWEERYKYLGCPTGAFRSNAKVLEELRQSLVKDTDTVFQSPLAEWQKLDAFRRFLFPRLSFAMKVMFPGITWCKKLDTSLRSIIKRGLHLPRRTCTHYFYLSHDLGGLGIPSAEMESHAVKAGQAFKFLADTRDPYIRAVALDQLTDTVKKRARHLDPNKPEDLSEFLNNSAPPGEGGAGDMQSIWSQCRDSLATGGATIELTQDSATLHTVDQHLSWIKRNQIVQVLKQAMKLRHLNGLRRSMDQGRAFDSVAQHPDSTFFTYTGAFLTFPQYRFIHKARLNLLPVRTVQARCRQAVPSTQCRLCGRMPETLAHVLNHCHANLGLVRERHNAILDRIVRAVPPSLGTKYKEQAIPGTTGNNRPDLTIISPDESTVTIVDVSCPFEGSPLALEEAAKTKLMKYEPLKQHLLQTYNSVTILPFIVGSLGSWYPANDRVLSSLRIGRKYASTDAKTVCSLRCGWLAEHLVRQHVHPPKILCHGDRGISRTCTSTTMRDQ

SEQ ID NO: 24333 - protein, 932 aa, Sacculina carcini
MYIHKHTHMYIHKDTHMYIHKHTHMYIHKHTHMYIHKHTNICIYTKTHTCIYTKTHTCIYTKTHTHVYTQTHTCIYTNTNTCIYTKTHTCIYTNTHTHEYTQTHTHVYTQTHKHMYIHKDTHVYTQTHTHVYTQTHTHVYTQTHTHTTQTTSDSVASPSEEVAEALQAKHPPAPEGEELPRCPDDLPRITVDANDVQLAICAFPTGSSAGLDGIRPLHLRQLVSLRTAEAGRRLLSALTALCNCAIAGEIPDLARATFYSARLVALRKKTGGLRPIAVGGVYRRLASKLVARRLTAAAGTQFRPVQLGIGTPLGCEAAVHATREFAARHVGRDYTIAKLDISNAFNSVSRRAVLDAVYGRFPAAAALVSQAYSQPTPLYLGTTRIWSSRGVQQGDPLGPLLFALAVDSVARLVRAPLNVWFLDDATLGGPTDVLAADVEMLVRALSAIGLELNVDKCELTSLAPACEVRGTSTPSGSQGRIDPAEQPCSRLARADATHRAGLSTPGNGVAEMMFSVATETPLQKLTLLGAPVQQGGVRAALEKIQTTTRLLIERTAHIGSHAALFFLSRYASVPRATYLMRAAPVYVAEEELDQIDLLMRVAISRSCNIQLDDDSWTQASLPVRLGGVGVRRMADVALPAHIASLEATEELVRQINGRESGDRPASLTSAISDFAERQCPDYKPEVPPTQRHLDELASTRRYQRLLTQANQVDRARLLAAAAPHSGAWLSALPVANLGLLLPDEAVRVGVALRLGVAVQQPHRCRCGTMTDKLGHHNLSCHRDPGRLPRHSALNDVIFRSLASAGLTAILEPRGLDRGDGRRPDGITCYPFRRGRMLCWDATCTSTHVVENAVRAGAAEDRKRRRYAAIGRQYEFLPLAVETSGVMGEALDDLVRELGRRMTERSGERREATWLRQRIGLAVIRGNAAAVCM

SEQ ID NO: 24334 - protein, 1067 aa, Sacculina carcini
MNECDVCGDTGPCRHRHGALLCRACLVFFERHQYSDRSSIVCRRGGCAVSSRSRSCTACRLERCLAIGMNMVGRDRPASAGENIPPSLQSISSDAVSVPACGACGLANDRKRTVPCAMCQRPFHLTCVGLTRAQATELPVWHCDGCLREEALEDAVEDPAVSDDSEAPLDHAAALAELRSKTRVMQHIPRGLRHRVASDLTCLITAALQQRSLSSWWRLMSYAYVGPMASTAAADTDTSTRSRREASQPESSGDALARQVKSKCVDGDIRAALRLLTTSDSVASPSEEVAEALQAKHPPAPEGEELPRCPDDLPRITVDANDVQLAICAFPTGSSAGLDGIRPLHLRQLVSLRTAEAGRRLLSALAALCNCAIAGEIPDLARATFYSARLVALRKKTGGLRPIAVGGVYRRLVSKLVARRLTAAAGTQFRPVQLGIGTPLGCEAAVHATREFAARHVGRDYTIAKLDISNAFNSVSRRAVLDAVYGRFPAAAALVSQAYSQPTPLYLGTTRIWSSRGVQQGDPLGPLLFALAVDSVARLVRAPLNVWFLDDATLGGPTDVLAADVEMLVPALSAIGLELNVDKCELTSLAPACEVRGTSTPSGSQGRIDPAEQPCSRLARADATHRAGLSTPGNGVAEMMFSVATETPLQKLTLLGAPVQQGGVRAALEKIQTTTRLLIERTAHIGSHAALFFLSRYASVPRATYLMRAAPVYVAEEELDQIDLLMRVAISRSCNIQLDDDSWTQASLTVRLGGVGVRRMADVALPAHIASLEATEELVRQINGRESGDRPASLTSAISDFAERQCPDYKPEVPPTQRHLDELASTRRYQRLLTQANQVDRARLLAAAAPHSGAWLSALPVANLGLLLPDEAVRVGVALRLGVAVQQSHRCRCDTMADKFGHHNLSCHGDLGCLPRHSALNDVIFRSLASAGLTAILEPRGLDRGDGRRPDGITCSPFRRGRMLCWDATCTSTFGITQVVENAVRPGAAARAAENRKRRRYAAIGRQYEFLPLAVETSGVMGEALDDLVRELGRRMTERSGERREATWLRQRIGLAVIRGNAAAVCM

SEQ ID NO: 24335 - protein, 1132 aa, Macropis europaea
MDSTSNKEASDAGGHVTHPPVAVRGDKNDEWAIKVVVPMPESFMCPLCSQKSNNISFLNLKDFRKHLEVNHPDVRQEWICAICGATFSKCHAVLCHRPKCKGVKDPKPIHAFACVVCGSSFETQRGLSTHERLMHPNTRNEKRMELAKKSTSKSNTSKKLSVWTLEEIDLLRQLMPKYEKCKMPNKELAKHLPGKDAKQIGEKRRQLFGSRARTQTAKISSNESGESDGEIISDPPLTATVLSHTEDSQLDCATNSGDWKNLFNDAITMSPFLNKESKFSLVEEELHKTWNKIVSRPEDTQHLVDEFLDNCLTPMVWKPKVVRSGKRRCPNNGNKKQLGKNAKKRQTFFARCQDLYNNCPRTLAEMVINNEMSRLKPKTSPPDKQEVSKLYDQLWGLEGPRVAESHRCNKITSMKNFDPITFEEVKKRIANTKKGTAAGPDEITRQCIIGNDAAWILSKFYNLLLTTSCFPSSWKKNRTTLIPKGKDNLEDPKNWRPITVGSLLCRTFMGVLDKRLRNLVGFSVRQKGFVAENGCAYNTLLLDEAIRKSKMDKGGVFVILDIAKAFDTVPHSFLFDRLLQMGIPNHLVDYLNQSYKQCTTTIACGNNEHADVTLRRGVKQGDPISPFLFNALMDPVLRKIESTEGGIDIECQKVSVLAFADDLVLLAKNKREAKKLLKIITDNLDELGMKTAPHKCQTFQITPLKDTWFCENPNLEIDSKSIPYIQPADMFRYLGARMDPWRGYAKGDEKRLIVECIKRTRKLALRPMQKINLISTYILPHFMYALIVTQNVSNSLKELDQDIRQELKSILHLQPSTATGFFYARKSDGGLGFPRLEHVVKFAFIKNMLNMQDSHDLVLRNMAVSERVQTLMKKTANSMRLNWPLTIEELNSEKRRMKSQYATDWAQLASQGKGVNSFLNDPIGNKWLHQPQLLKGSRFINAIQLRTNTFGTKVVLARANKNASVECRHCHSKPETLGHILGQCVSIKNARIHRHNSIVFQVVENVKDRSSVFIEPSIAVDNALLKPDIVIKDDKGVLVVDVTVRYEDGRSLDAAMDEKINKYDKVAKQLANSMKTANSKVLPIVIGALGAMPKKTIENLKQLGFNKNELSNISLATLRSSIEMANQFIDYT

SEQ ID NO: 24336 - protein, 1132 aa, Macropis europaea
MDSTSNKEASDAGGHVTHPPVAVRGDKNDEWAIKVVVPMPESFMCPLCSQKSNNISFLNLKDFRKHLEVNHPDVRQEWICAICGATFSKCHAVLCHRPKCKGVKDPKPIHAFACVVCGSSFETQRGLSTHERLMHPNTRNEKRMELAKKSTSKSNTSKKLSVWTLEEIDLLRQLMPKYEKCKMPNKELAKHLPGKDAKQIGEKRRQLFGSRARTQTAKISSNESGESDGEIISDPPLTATVLSHTEDSQLDCATNSGDWKNLFNDAITMSPFLNKESKFSLVEEELHKTWNKIVSRPEDTQHLVDEFLDNCLTPMVWKPKVVRSGKRRCPNNGNKKQLGKNAKKRQTFFARCQDLYNNCPRTLAEMVINNEMSRLKPKTSPPDKQEVSKLYDQLWGLEGPRVAESHRCNKITSMKNFDPITFEEVKKRIANTKKGTAAGPDEITRQCIIGNDAAWILSKFYNLLLTTSCFPSSWKKNRTTLIPKGKDNLEDPKNWRPITVGSLPCRTFMGVLDKRLRNLVGFSVRQKGFVAENGCAYNTLLLDEVIRKSKMDKGGVFVILDIAKAFDTVPHSFLFDRLLQMGIPNHLVDYLNQSYKQCTTTIACGNNEHADVTLRRGVKQGDPISPFLFNALMDPVLRKIESTEGGIDIECQKVSVLAFADDLVLLAKNKREAKKLLKIITDNLDELGMKTAPHKCQTFQITPLKDTWFCENPNLEIDSKSIPYIQPADMFRYLGARMDPWRGYAKGDEKRLIVECIKRTRKLALRPMQKINLISTYILPHFMYALIVTQNVSNSLKELDQDIRQELKSILHLQPSTATGFFYARKSDGGLGFPRLEHVVKFAFIKNMLNMQDSHDLVLRNMAVSERVQTLMKKTANSMRLNWPLTIEELNSEKRRMKSQYATDWAQLASQGKGVNSFLNDPIGNKWLHQPQLLKGSRFINAIQLRTNTFGTKVVLARANKNASVECRHCHSKPETLGHILGQCVSIKNARIHRHNSIVFQVVENVKDRSSVFIEPSIAVDNALLKPDIVIKDDKGVLVVDVTVRYEDGRSLDAAMDEKINKYDKVAKQLANSMKTANSKVLPIVIGALGAMPKKTIENLKQLGFNKNELSNISLATLRSSIEMANQFIDYT

SEQ ID NO: 24337 - protein, 952 aa, Lasioglossum morio
MRMARKEAYLLLEGHRFVNQLLETAFPNRSLEAIKGQRRRAEYKEAVQRFLDELNNTAVPNDSRSDTSVRNDTSIRSDIITNPDMTQDLLSSIRSVLSSLPPLRGSDCCVGMLNRIIERIDIILPSDLAGEIALYIWEIFQRPSSGPARTRRGPPGQPVALTRRKQRRADYAYTQRLFRKDPGRCIGDILEKVSHAGTIDRNLMEPFWTAVFETTPTPYLTNRDREPEILKVLDPILPSEIPPCFPKRGTSPGPDLVTSRALRAVPIEILARMFNIFLICGELPEDLCKSVVTLLPKKLQATLPTDFRPIAVSSVITRTFHKVLANRFQNLFPLDIRQRGFIKADGCAEATFLLDLVLRYHHSNCKSMFLASIDLSKAFDCVTHESIFSILHSRGVPPALVQYIKNFYAKSSLILRTPEWSSRPIRPLRGVRQGDPLSPFLFDLVIDTFLRSLQPHYGVRADGLHINALAYADDLLLMATTAEGLQDLLNAATSFFSNCGLDINSEKSFVIALRADGKAKKVAVDGRANITCKSSKLRALRRTDSFTYLGVPFSPEGRLFVKPHGPLEVMLTRITEAPLKPQQRLWALRSVVLPKLYHQLILGHTTIGCLNKMDCAVRRHVRRWLRLPHDVPNAYIHAAVPDGGLGVCSLRWKIPSLRLKRLHSLSVGDWGPDLSPGSFWYYEELLCHRKLKPSGDTHLVTKHDIRKFWAGRLYDAVDGAALASSSLTPAQHRWISSGNRFLSGRDFINVCRLRINALPSRSRTARGRSYDRRCRAGCAQVETTNHILQACHRTHSERMRRHDAITSYLHRNLSRAGYNVSMEPRYVTREGVRKPDIVASLGATTLVLDAQVTSDTRSLTAPHRKKIDYYSRNDDLLAQIRAATRSSSIQVIAATLSWRGVWCPESASKLLELGIIRKCDLPVLSTRVVVGGLSAFRRFNRTTMVNFRRGIG

SEQ ID NO: 24338 - protein, 947 aa, Lasioglossum lativentre
MRMARKEASLLLEGHRFVNQLLETAFPHRSLEAIKGQRKRDDYKGAVQRFLDELSNTSVRGDTPTRGDTSIRSENAADPDLNQDHQLSSIRSVLGALSPLRGSDYCTGILNRIVGRISSISPSDLTGDISFYIWEIFQRSSRPARSRRPLDQPVALSRRKQRRADYARTQRMFRKDPGRCIGDLLENISHAGTIDRNLMEPFWTAVFETTPTFYQTNRDREPEISEALDPILPSEIPSCFPKRGTSPGPDSITSRALRAVPVEILARMFNIFLVCGELPEDLCKSVVTFLPKKLHPELPTDFRPIAVSSVITRTFHKVLANRLLRLFPLDIRQRGFIKADGCGEATFLLDMVLRYHHSNFKSMFLASIDLSKAFDCISHDSIFSTLYSRGVPSALVQYIKNFYTKSSLVLRTPEWASRPIRPLRGVRQGDPLSPFLFDLVVDTFLRSLQPHFGVRADGLHINALAYADDLLLMATTAEGLQDLLNMATSFFSDCGLDINTEKSYVVALRADGKAKKVAVDGRANITCKSCKLRALRRTDSFVYLGVPFSPEGRLFVKPHDPLKVMLTKITEAPLKPQQRLWALRSVILPKFYHQLILGHTTIGCLNKMDCVVRGYVRHWLRLPHDVPNAYIHASVPDGGLGVSSLRWKIPSLRLKRLRALSVGDWGPDLTPGSFWYYEELLCRRKLRPSGDTHLVTKDDIRKFWAERLYGSVDGEAFASSSLTPAQHRWISSGNRFLSGRDFINSCRLRINALPSRSRTARGRSYDRGCRAGCARVETTNHILQACHRTHSERIRRHDAITSYLYRNLSRAGYSLSMEPRYVTQEGVRKPDIVATLGVTTLVLDAQVTSDTRSLTEAHRRKVDYYSRNDDLLAQIRAATRSSSIKVVAATLSWRGVWCPESASKLLELGIIRKCDLPVLSTRVVIGGLSAFRRFNRTTMVNHRRGIG

SEQ ID NO: 24339 - protein, 1049 aa, Habropoda laboriosa
MKKASDETVVGGGPSGSAAPAILTPSFSINLPSSSSLSSSSAGVPAACAPVPTIVNMFVCEFPGCCRSFATKIGLGVHFRRAHPVARDEQVIPAQSKVRWSDEERMRLAHKEAALIMEGHHLVNQLLHDAFPNRTLESIKGQRRREDYKAAVQRFLNDLRNTEYPQDRESTTVDAPVVVDHLSPPIRAALGALPQLQGRNYCVPVLNRIISRISDISLSDLTTEIAHFIGEIFPNQQQRSRLRKPDMHSAILSKRKQRRADYARTQRLFKKDPGRCIGSILEEVSQVTAVDRGLMEPFWSKIFESTPTLYQARRDSDPEVPEAWAPISASEILPCFPKRGTSSGPDNISCRAFRAVPVDILTRIFNIFLLCGELPEDLCKSVVIFIAKKPNPISPADFRPIAISSVVTRTFHKVLANRLSRLIPLDIRQRGFIRADGCAEATFLLDMVLHYHHRNCKPMYLVSLDLSRAFDCVSHEAIFAILRSRGAPANLVQYLKKFYAKSSLVLRTSEWTSRPIHPSCGVRQGDPMSPFLFNIVIDTFLKSLPDHYGIRADGLHLNALAYADDLLLMATTAEGLQDLLNTATSFFAECGLDINTEKSFVVALRADGKAKKVAVDGRVNITCKSSKLRALRRTDTFTYLGVSFSPEGRLFVKPYDPLKVILDKLAAAPLKPQQRMWALRCVILPKFYHQLILGHATIGCLNKVDRLVRSYVRRWLHLHHDVPNAYLHAAVTDGGLGVASLRWLVPSLRLKRLLSLSGGVWGPDLTPGSFWNYETLLCHRRLKPSNCTPLETVRDVRRFWARRLYASVDGAALASSSSVPTQHRWVSSGNRFLSGRDFVNTCRLRINALPSKSRSSRGREYDRRCRAGCARVETTNHILQACHRTHADRIRRHDSVVAYMSRNLSSAGFNVSVEPRYVTPEGVRKPDIVASLGVTTLIVDAQITSDIRSLTAVHNRKVAYYAHNSSLLSQVRASTGSQSVQVLAATLSWRGVWCPESAKKLLELGVIKKGDLSVLSTRVLIGGLSAFRKFNRTTMATVGRSRIPRTGVG

SEQ ID NO: 24340 - protein, 1198 aa, Osmia lignaria
MDPNGPRGSVAGFPASGGGLFVDDQGRTMANEMDNGEGHSLTDREERNTQDISEAVQSSVTSDVIIELPLVNVLDCPICARLDKRFSFLNIRDLKKHLIEQHSEVKVLWQCKQCNKMFPGVHNCVCHIPKCKGLRETIVKAYVCSICSESFTTGRGLSMHELHRHPDTRNVKRAAASIPRTGLRGRKKYLWTDEEIEKLIQLNEKYKNERFPNKKIQEYFPTKTTKQISNKRRELPTAEQRNMSTPTVDRPLESNGPPPAGSHSYDSTGTSNEVSRAVIEPDFSGNAHIEPEEQLETQLNANLSDIGVDEDLIEAWSNKIRQEAYSVTLPEDNRYYACIQELDAILHNLNRSPETSKEIDKWISDSLVPKLLNNENRDRNREPTGTTNPRDVRSGRRRNKRNHNARARYCYARCQELYNKCPKKLANVAISGDFSAVEMHNELPTATDIGQLYTELWGVSGPTMEDQEDSEELVSPSEACPPFNVDEIKKRINKIKNKTAGGLDQIKKTHLKEEGVAEVMTKLFNIVLLSGHYPEMWKLNRTTLIPKAGKDPQDVRNWRPITIGPLLARIFSRAIDNRIRKFTTQSNRQKGFVTEDGCKNNIVLLDRAIARMKTETSGVVSIIDISKAFDTIPHAALLPSLRRKRVPQCLTDIVRSMYECCKTVIKARNEDSVEITLKRGVKQGDPLSPLLFNLVIEPIIEKINQETSGVKINENNLAILAFADDIVLLAKDAQEAKEQMEMLTKYLKDLGMKVATNKCSCFEIVAKNKTWHLKDPKIQIDNEETQFVTPESIITYLGIGIKPWSGLKRGEEIPAIMQAIKNVKKMKLKPHQKVNLIQTYVLPHFIYGLIASPPHGTSLRNLDQALRQELKQMLHLTPSTTDGLIYTAKSHGGLGFPRLEHVVKLAVLRHAAKAAVSTDAVLSDIIQDESLQKRLKVYANSMRINWPATLEEIETARNRLKKEETDRWQQLISQGQGVADFRQDKIGNTWLRIPTLLKPSRFIDALKLRTNTFGNKTTMKRAKQCDDVTCRRCRAQPETLGHIIGGCMHVKPMRIKRHDEIRDFIANKVSPGRTVFVEPTVNILGELKKPDLVIKDQRRLLVVDVIVRYEDQASLERAYKEKVNKYQATAEYVQRRIGCWEAKVLPIVVGARGAMTSKTLSNLKELGITRKDALTISMIAIRSSIEIANAFIDYDNID

SEQ ID NO: 24341 - protein, 1122 aa, Osmia lignaria
MNAPSLNCPSLRILPTTKPTPFECHWCEVKVLWQCKQCNKMFPGVHNCVCHIPKCKGLRETIVKAYVCSICSESFTTGRGLSMHELHRHPDTRNVKRAAASTPRTGLRGRKKYPWTDEEIEKLIQLNEKYKNERFPNKKIQEYFPTKTTKQISNKRRELPTAEQRNMSTPTVDRLLESNGLPPAGSHSYDSTGTSNEVSRAVIEPDFSGNVHIEPEEQLETQLNANLSDIGVDEDLIEAWSNKIRQEAYSVTLPEDNRYYACIQELDAILHNLNRSPETSKEIDKWISDSLIPKLLNNENRDRNREPTGTTNPRDVRSGRRRNKRNHNARARYCYARCQELYNKCPKKLANVAISGDFSAVEMHNELPTATDIGQLYTELWGVSGPTMEDQEDSEELVSPSEACPPFNVDEIKKRINKIKNKTAGGLDQIKKTHLKEEGVAEVMTKLFNIVLLSGHYPEMWKLNRTTLIPKAGKDPQDVRNWRPITIGPLLARIFSGAIDNRIRKFTTQSNRQKGFVTEDGCKNNIVLLDRAIARMKTETSGVVSIIDISKAFDTIPHAALLPSLRRKRVPQCLTDIVRSMYECCKTVIKARNEDSVEITLKRGVKQGDPLSPLLFNLVIEPIIEKINQETSGVKINENNLAILAFADDIVLLAKDAQEAKEQMEMLTKYLKDLGMKVATNKCSCFEIVAKNKTWHLKDPKIQIDNEETQFVTPESIITYLGIGIKPWSGLKRGEEIPAIMQAIKNVKKMKLKPHQKVNLIQTYVLPHFIYGLIASPPHGTSLRNLDQALRQELKQMLHLTPSTTDGLIYTAKSHGGLGFPRLEHVVKLAVLRHAAKAAVSTDAVLSDIIQDESLQKRLKVYANSMRINWPATLEEIETARNRLKKEETDRWQQLISQGQGVADFRQDKIGNTWLRIPTLLKPSRFIDALKLRTNTFGNKTTMKRAKQYDDVTCRRCRAQPETLGHIIGGCMHVKPMRIKRHDEIRDFIANKVSPGRTVFVEPTVNILGELKKPDLVIKDQRRLLVVDVTVRYEDQASLERAYKEKVNKYQATAEYVQRRIGCWEAKVLPIVVGARGAMTSKTLSNLKELGITRKDALTISMIAIRSSIEIANAFIDYDNID

SEQ ID NO: 24342 - protein, 1185 aa, Limonius californicus
MELENYPLLYPLTTDPMCNVCEPPRAYKNHNDLNKHLKRIHQKQVIFACRICRETTGTIKQIKSHQKATHPNVNPEVVVEIAGNNGGYLRRGRVPPAGAVHHAQEMEARNDDNPNLTHENGTQILNGAHQPGTEPDEPNNNNGDHTIPEHSQAVNELNATTPPSTPPPGGGNNDGDQLLGSQLIPVMAIMAPPSTPPLDGASNNDIPLRGTPPTPMTPQRRSPPPSPRVAAEARPPAQPRIEGQPADAHLSEHQQRWLNLINNIQTPDDLQTNTSTIMEEMRELALTQANRRGNNENGENRPRPPPRNPPPRPPPNAARYDPAEAANIQRLYRQNRSKAFRKVASNNGSGVCCTIGSESLTDFFANTWKLPEQQYQWPAIELPSANGEDLTAQFTSEEVSKRLLRMSNTAPGRDRITYSHLKRLDPGCKILTVLYNKVLHLRRVPDPWKEAMVVLIYKKGDRNDPSNWRPISLCPTVYKLFTSCIASRLSTWATDNNLLSPIQKGFREFEGCYEHNFVLQSILDATRRKRKRSVVAWLDLANAFSSVPHQHILEALRRLGVSEQLCAIVGDIYGDCSATIKTTEGESTPIPVKAGVRQGCPLSPILFNMALEPVLRAVTNLNLGFNIANLKISVLAYADDLVLISESPEQLQLLLDSAGETAGQCGLTFKPAKCASLDLDCRGRNICHDNRFSIQGTVFPHLGEGQAYEHLGIPTGYHVDQSPEATIDRMTEQLQQLDDSLLAPWQKIDALNTFILPQTSFVLRGAAVQKTAVKQLDQKIKKCCKGWMKLPNRASPELLYIPCKKGGADILPLADLADLATVTHAFKMITSPDHIVASIASSQLAEVVRRRIGRAPSKEDTAKYLSGALDGEFGNDRGDIASLWTRARNACRRLHPRIGVQWEAVNGEELTIRIARPEQEPDLIRIPPMHRSKLEWALKDQLRNLYLTKLCRKPDQGKVLKSSSKWSSSNHFIRGGFATRFCDWNFIHRARLDCLPLNATRRFGERDKRCRRCGRQNETLPHVLNHCTMHSATWQRRHNAIQDRLVKAIPERLGTVQVNRQIEGVNSNLRPDIVIRNEVAKAVIIVDTAIPFENGPDALAQARNMKKVKYSEVARELRSQGYDTYVDALIVGALGSWDPANEPVLRKCNIGKRYSQLMRKLMCSDSIRWGRDIYVEHITGTRQYT

SEQ ID NO: 24343 - protein, 950 aa, Cnaphalocrocis medinalis
MTTQTLIYTAAYTAAVCNGSKIRSEENISGRNNNNTPFWQKRLNNKINHLRKCIARMTEYLRGTRNRRLESYIEEIRKIYSTHSRHEEPNDTDDKILDTLKQKLNAAASRLRRYNNCSLRKKQNTQFNTNEKQFYRQLAIDTQNTTSNRENETLPSQEELQQFWASIWATPVQHNEEAEWIQAEASNTNNINSMQFEEISLDTLIQVINKTHNWKAPGIDNIQNYWYKKFTSLHLSLLKQINNFLQDPSLIPPYITQGLTYMIPKSNDNLQDPSKYRPITCLPTIYKIITSCITDIIYKHVTDNKILAEEQKGCRRNSQGCKEQLIIDTVIMKQALKYKKDISTMYIDYRKAYDSVPHSWLLQVLKLYKIHPTLITFLETCMTEWKTSLKLVRNNTVLNTGNIPIKRGIFQGDALSPLWFCLALNPLSNMLNNNNCGFSIPVNEPDQIAITHLMYMDDIKLYSSDTHSLHQLADITQTFSKDIRMEFGIDKCKTVTVRKGKVEHNEYLLENGDTIDALDIDSSYKYLGFYQLRQIKQKQAKNTIITKFKHRLNILLRSQLYSRNLTKSINTYAVSLLTYSFGIIYWSKKELVQLQRNVNTAMTSHRKHHPKSCVQRVTLSRENGGRGVIDIQNLHSKQIKNLRFFFHEKATHSTLHKTVTRSDTHLTPLNLQDSSEQPSEHITPDPEKELAWKQKSLHGRHYQDLHQPHVDKAASNAWLQRGELFPETEAFMMAIQDQVINTKNYQKHIWKNSTVIDTCRRCHGNTETIQHITGACKAIVQTDYKHRHDQVAAIIHQYLAFKHKFLKEKIPYYKYQPDAVLENQDFKIYWDRTIITDKTIHYNRPDITLQDKNDKTVYLIDIAVCNTHNLQSTHTEKLAKYRDLAIEIKTQWRVTTVKVVPIVISSTGVIPKELHKSLDTLSIPSPTYKLLQKAVILNTCRIVRKFLNIE

SEQ ID NO: 24344 - protein, 1378 aa, Cnaphalocrocis medinalis
MIQVVSNLRPRYNNKSRSLPGGRRGASGAAAGCLSMRDIGDEELNRRAPIEKCMTAESGGSSPTSSISLFPSLPSSPPSYLNESPRSNISRSLSTSLTLDVVQEEDTVLESQAAPAKEGKSARKRWTREMNEFIWRTFLIITKLETNNTPFLPTLHQKFIAQFPEMNVSRQRVGDQRRTILRNNLLDAETLANIRTEVEEMLPTIGNRQTDQVVEPSQRMRWSPELNEAIMKMYYKVTNLEANTTGYRKLLHIRMVEQFPHLSHISEQRLSDQRRAIINNKYITEERLRELKREAERELSTNQFYAIQNQTQHTTDTNQNNNTEPNTGDQVHATLNSSTHDIPQLTDTNNHPDSGTEIESTQTNTFTNTKLNIKILNTFDTALKNFTGTDPTKRPHIPRQKVTYKLRYIVNYINIEIIPKYSTCEDDFSTTQTVIYSAAYTAAICNGSRIVVDNNVNRRNSDNTPEWQKRLNNKIKYLRKCIGRLSEYISGNRSRRLESHIEEIRKTYNNHSQHEEPNDTDIKILDTLKQKLNAAASRLRRYNNCTLRKKQNLQFNNNEKQFYRQLIVNTQNDTSNNDAQIPPSQESLKEFWSNLWSIPVQHNADADWIHAEANNSDNIALMQFEDISVETFAKIINKTHNWKAPGIDNIQNFWYKKFTNIHSILYTHINNFIHDPNSMPPYITQGLTYMIPKCKDNHQDPSKYRPITCLPTIYKIITSCITEIIYTHITDNNILAEEQKGCKRNSQGCKEQLIIDTVIMKQALKYKKDITTMYIDYRKAYDSVPHSWLLYVLKLYKIHPTLINFLEKCMKEWKTTLKLISCNSAVTTDNIPIKRGIFQGDALSPLWFCLALNPLSNMLNNQNCGFPIPANQPETIAITHLMYMDDIKLYSRDTHSLSHLADITQTFSRDIQMEFGIDKCKMLTVTKGNIERNDYVLESGNVIEALDTDSSYKYLGFQQLREIKQKPAKIEISSKFKHRLNILLRSQLNSKNLIKSVNTYAISLLTYSFGIINWTKSDITQLQRNINTAMTSHRKHHPRSCIQRITLSREKGGRGIIDIQNLHNKQIKNLRHFFHEKASHSTLHKFVTLSDTNLTPLNLQNSNELQTEYIMSDPEKEFAWKQKSLHGRHYHDLHLPHVDKAASNAWLQRGELFPETEAFMLAIQDQIINTKNYQKHILKNSAINDTCRRCHSSPETIQHITGACKAIVQTDYKHRHDQVAAIVHQYLAFKCHFIKEKTPYYKYKPETILENQDFRIYWDRTIITDKTIHFNRPDITVQDKNNKTVYLIDIAICNTHNLQTSHTEKLAKYRDLAIEIKTQWRVTSVKIVPIIISTTGVIPRELHMSLSTLNIPSPTYKLLQKAVILNTCRIVRKFLNIE

SEQ ID NO: 24345 - protein, 762 aa, Ostrinia furnacalis
MEFDCISIDTLLKVINKTHNWKAPGTDNIQNYWYKKFTNTHPSLHKHINDFIRSPNLMPSYITQGLTYMIPKSAEHHDPSKYRPITCLQTIYKILTSCLTEVIYDHAIDHQILAEEQKGCRRNSQGCKEQLIIDSVAMKFALRNRIDISTMYIDYRKAYDSVPHSWLLYVLKMYKIHPIIITFLENCMSMWSTNLKLTSNTTNYITSSIPIKRGIFQGDALSPLWFCLALNPLSNMLNKTSLGFNMPLQRDYNTGTLVNTTLTHLMYMDDIKLYSKNTQSLHQLADITQTFSNDIGMEFGIDKCKTVTIKKGRIEQKDYMLENGNNIEALDAKSSYKYLGFHQLRQINHKQTKKDIITKFKHRLNILLRSQLNSKNLTKSINSFAISLLTYSFGIITWSQTDLKQLQRIVHTTMTAHRKHHPKACVQRITLPRKEGGQGFIDINNLHNKQIKNLRHFFHDRAELSTLHKAVVYCDKNLTPLNLHDNNTQKNEHITPDPEKASMWKQKVIHGRHYHDLHQLHVDKAASNAWLQSGQLFPETEAFMIAIQDQVIDTKNYQKYILKKPNITDTCRRCHSSPEHIQHITGACKAIVQTDYKHRHDQVAAIVHQHLAFKFHFLTQKLPYYKYQPTTVLENQDYRIYWDRTIVTDKTIHYNRPDITLHDKSNKTVYLIDIAVCNTHNLQTTQSEKLAKYRDLAIEIRTQWRVTTVLVVPIVISTTGVIPRQLHTSLNTLDITPSIYKLLQKATILNTCRIVRKFLNIL

SEQ ID NO: 24346 - protein, 843 aa, Neoneuromus ignobilis
MMRGPVSQEEVDRIAQLLVEFLKPSDPKVEMPGRVKKKGRGGKKAVKKFRYARTQDLYKKDPALLAKFIRMDKDHTVGNSQELNRGEVEDLYKSLWGTSLGTRLQDISAEDCAPEPVLPEMVLSVVSTLEVHKRLRRIKSTTAPGLDGVKWSHLQGRDKEHLLACFYNCILISETITSMWGFNRTVLIPKEGKDTAKAANYRPLTISSLINRIFWGIMDERIRKVISFSPRQKGFVPEAGCFVNVQILSEVFRQMKDREGGVGVQLDVSKAFDTVPHDAIKWALERKGLPDPLVKLIGASYKDARTIISHPKGDIELPLLRGVKQGDPLSPLLFNLVLERLLEKLEMMPGFKIDGVTNISSMAFADDLFLFSSNAAGAQVLFDQVVDYLGALGMGVVASKSTTLQIIKQHKSWFMTDPDVERFGVRLPSIKPHEHLKYLGVRFSPWSGFASVDDDVRRVLNKLKTLPLKPDQKLCLLHKHLLPHFLHPLALATPSKTALKALDNEIRVCVKTFMHLPMSVANGLIYCSKRDGGLGMFRFEQLVPRVSVGLGLGMLSSMDIVVKVITNNVNAMARFSRMAEYMRLRFPCTKAQLNRYRLRCQREEITRWGALPAQGRGVRSHIDDKIGNSFLYYPKLLKPCRFITALQLRTNTGGNRTSLNKAVKQNDLSCRKCKVSKETLAHILGACIHTKAARIRRHDDIKNFVESIILKGAKGGMVTTEGTFTSPEGNRLKPDLIVKNEVGVFIADITIRREDGDSLSDAVKEKISTYNPILSVVARIYGVSEVAHLPIVVGHTGAMPQSTLKALYTLGVRRVGDLKTISLMALRSSIELYHSFLDYDGPV

SEQ ID NO: 24347 - protein, 1160 aa, Habropoda laboriosa
MKWTRVDCVLELTARLLKFLKEMADTDDEISDTGGPGPGPPVADLSAVDRRTNDDDLGMSPELETVQIVGLPLDGQITCRQCELKGISRQFLQETKMKEHVEEQHSYATIIWRCTACGKDFPKLHGCRCHLPKCKGRLPTKSTIGIKCDLCDEMFETRRGVSMHERHRHPELRNVRRAEAGISRNRNRPGSRASAWSEEEVGLLIELNERFKHLRQPNVAIREFLPGKTLKQISDKRRLLPVQEQEAPAEQGSSTDSSSEEYHSAGEIETIEEIPRRDPTEQAWKEALRVAIMDGQLDSNNEFKYIECKIFELAGNDELEEKQNEINALVQAFIEQLKDGINDSPDPNANFRSRANKNKKRGSHRTQKKGFEYARYQELYKKCPKKLLDLAILGKGVCDKERVEPPSKSEIGPLYKELWGQIGPQSNIIIKTAKKSLGSKMEDIWSPIAVEEIIQKFKKIKNKTAAGVDEIEKSHLRKKGALFIFTKMCNLLLMSRIYPDQWKLNRTTLIPKPGKSVDDVKNWRPITIGSLLGRIYSAMIDKRLRGAIKQHPRQKGFTNEDGCKQNVAILSSALGKIKEESGGVISIIDISKAFDTVPHGALGDALKVKGIPTTISNYITKMYNGCRTRIQCKNNETFEVGLLRGVKQGDPLSPLLFNLVLDPIIGVIDETSKGIQIGDKSVSILAFADDLVLLAHNQMEAQKQIKDIHEYLNKLKMKINIEKCSSFQVICKNKTWHLKNPEIKIGQQAVPYADPEQIIEYLGVTIDPWRGTRKTSINAIIDAARQIKRMGLKPHQKVNLIRTYLLPKYIHRLVANPPPLGLLDQIDHEIKQLIKEILHLHPSTTDGLIYTEKSHGGLGVQRVANIVKLAKIRNIIKMKESKDEVTRKASEEQEAITKKYASSIGLTWPCTIEDVEKARVSLKKKDTDKWRQLISQGQGVKEFFGDKIGNKWLYHPELLKPSRYLDALRLRTNTFGTKVALNRARKNMDVNCRRCGVQVETLGHVLGNCYHTKPLRIKRHNEICKLIVQNLPKRCAVFEEPVINVMGELRKPDLVIKDQGRVSVVDVTVRYEDKENLSDAYRQKIQKYKEAAEIIRIKTMGTEAEVLPIVVGCRGAIPNKTKENLKRLGLQVKDALTASLIALRSSIEIANIFIDYDHIT

SEQ ID NO: 24348 - protein, 1110 aa, Brachyptera putata
MDISPGQLTQNVNTIICPTCDKNFLPSDNLLFLDHFEVCDGSFLDVTTLAIANDRLTRSSNSVSLPNSETVPINVSKKNKQKMECPFCVKSFINVKMHIRKAHNNRQFSRQGSISTEGNETRTELSENEEITDAVMVLDTSVTTSPIIGSQKKEKCPHCGKNYLSVNIHISKAHPDHQRLKIASTYVEKYQTSKIENTDNQQQYTVNNSNTDSVSPFKSRGCLDEVYLTQVKLWTEEFSKQVLDEEFDDNVTKFSTFLANSLDYLPGPKHPAKKYYEARKSGKFKTNDRTHATQSNPERTSKRDREKRREKYLYDLTQYQYYNQRRKAVRRVLNNNTVTCKIPREELHSHFVDVFSHTNDAIRSEYPRNFDLEELDRLDKVYKGQVSCEEILFTMRKISADTAAGPDRVIMRVLKSERIAKIISLIASRMLDTGYVPSVYQQARTVLIYKSGDVRNPSNFRPISICSLLRRIIEKTLDRQLRSYVTFNENQRGFISTPGTFINTSIIGGILKSSAEHKKDVTIVFLDLSKAFDTVGHKHLNLTINNLPVPTKLRHLISKLLINNKTHVEANGDKTKSINMNQGVFQGSPLSPTLYNLATDHILNELTEHEVKSKYGYDFSGDIEKVSALGFADDTVVIGKDKESAVTLVEIARARFHEIGLSINAKKCAAIVIEKGKWVQSSIIIDETMQIDSLAAKEKIKYLGVDFSQTLVFDPATVINKLTKNLDSLTTSPLLNAEQKLNVFNQFLGPTLIYPLQNAPLGQLPKSFLSNADKLIRSAVKEILQVPHDAPNSMLYANRKYKGLGIINTSWEAFIQHHNICSVLEKTNNQHVNISRDLEEEKKICIRELEVGEQELSNISGVLTGRKLRDLLREREFTKWCNLPHKGKGVILYKEVTSANIWIRNKSGLSCSEWRDAIKLTCNVAPVRTVPGRSTNTTHCRHCGEYETLAHVLCFCQHGELLIINRHNKVRKMIADALRKTEKYLVFEEVHGLSDKGSTRRIDIIAINTKAKTADILDPTIRFERGVDQVQEVNQEKKKIYEPTIPYYLDKYDIKKIQVTGLLIGARGTIPKFLEECFVKFGIASIIRNIVLSVLRDSIIILRNHLYSQN

SEQ ID NO: 24349 - protein, 1110 aa, Brachyptera putata
MDISPGQLTQNVNTIICPTCDKNFLPSDNLLFLDHFEVCDGSSLDVTTLAIANDRLTRSSNSVSLPNSETVPINVSKKNKQKMECPFCVKSFINVKMHIRKAHNNRQFSRQGSISTEGNETRTELSENEEITDAVMVLDTSVTTSPIIGSQKKEKCPHCGKNYLSVNIHISKAHPDHQRLKIASTYVEKYQTSKIENTDNQQQYTVNNSNTDSVSPFKSRGCLDEVYLTQVKIWTEEFSKQVLDEEFDDNVTKFSTFLANSLDYLPGPKHPAKKYYEARKSGKFKTNDRTHATQSNPERTSKRDREKRREKYLYDLTQYQYYNQRRKAVRRVLNNNTVTCKIPREELHSHSVDVFSHTNDAIRSEYPRNFDLEELDRLDKVYKGQVSCEEILFTMRKISADTAAGPDRVIMRVLKSERIAKIISLIASRMLDTGYVPSVYQQARTVLIYKSGDVRNPSNFRPISICSLLRRIIEKTLDRQLRSYVTFNENQRGFISTPGTFINTSIIGGILKSSAEHKKDVTIVFLDLSKAFDTVGHKHLNLTINNLPVPTKLRHLISKLLINNKTHVEANGDKTKSINMNQGVFQGSPLSPTLYNLATDHILNELTEHEVKSKYGYDFSGDIEKVSALGFADDTVVIGKDKESAVTLVEIARARFHEIGLSINAKKCAAIVIEKGKLVQSSIIIDETMQIDSLAAKEKIKYLGVDFSQTLVFDPATVINKLTKNLDSLTTSPLLNAEQKLNVFNQFLGPTLIYPLQNAPLGQLPKSFLSNADKLIRSAVKEILQVPHDAPNSMLYANRKYKGLGIINTSWEAFIQHHNICSVLEKTNNQHVNISRDLEEEKKICIRELEVGEQELSNISGVLTGRKLRDLLREREFTKWCNLPHKGKGVILYKEVTSANIWIRNKSGLSCSEWRDAIKLTCNVAPVRTVPGRSTNTTHCRHCGEYETLAHVLCFCQHGELLIINRHNKVRKMIADALRKTEKYLVFEEVHGLSDKGSTRRIDIIAINTKAKTADILDPTIRFERGVDQVQEVNQEKKKIYEPTIPYYLDKYDIKKIQVTGLLIGARGTIPKFLEECFVKFGIASIIRNIVLSVLRDSIIILRNHLYSQN

SEQ ID NO: 24350 - protein, 1109 aa, Brachyptera putata
MDISPGQLTQNVNTIICPTCDKNFLPSDNLLFLDHFEVCDGSSLDVTTLAIANDRLTRSSNSVSLPNSETVPINMSKKNKQKMECPFCLKSFINVKMHIRKAHNNRQFSRQGSISTEGNETRTELSENEEITDAVMVLDTSVTPSPIIGSQKKEKCPHCGKNYLSVNIHISKAHPDHQRLKIASTYVEKYQTSKIENTDNQQQYTVNNSNTDSVSPFKSRGCLDEVYLTQVKLWTEEFSKQVLDEEFDDNVTKFSTFLANSLDYLPGPKHPAKKYYEARKSGKFKTNDRTHATQSNPERTSKRDREKRREKYLYDLTQYQYYNQRRKAVRRVLNNNTVTCKIPREELHSHFVDVFSHTNDAIRSEYPRNFDLEELDRLDKVYKGQVSCEEILFTMRKISADTAAGPDRVIMRVLKSERIAKIISLIASRMLDTGYVPSVYQQARTVLIYKSGDVRNPSNFRPISICSLLRRIIEKTLDRQLRSYVTFNENQRGFISTPGTFINTSIIGGILKSSAEHKKDVTIVFLDLSKAFDTVGHKHLNLTINNLPVPTKLRHLISKLLINNKTHVEANGDKTKSINMNQGVFQGSPLSPTLYNLATDHILNELTEHEVKSKYGYDFSGDIEKVSALGFADDTVVIGKDKESAVTLVEIARARFHEIGLSINAKKCAAIVIEKGKLVQSSIIIDETMQIDSLAAKEKIKYLGVDFSQTLVFDPATVINKLTKNLDSLTTSPLLNAEQKLNVFNQFLGPTLIYPLQNAPLGQLPKSFLSNADKLIRSAVKEILQVPHDAPNSMLYADRKYKGLGIINTSWEAFIQHHNICSVLEKTNNQHVNISRDLEEEKKICIRELEVGEQKLSNISGVLTGRKLRDLLREREFTKWCNLPHKGKGVILYKEVTSANIWIRNKSGLSCSEWRDAIKLTCNVAPVRTVPGRSTNTTHCRHCGEYETLAHVLCFCQHGELLIINRHNKVRKMIADALRKTEKYLVFEEVHGLSDKGSTRRIDIIAINTKAKTADILDPTIRFERGVDQVQVNQEKKNIYEPTIPYYLDKYDIKKIQVTGLLIGARGTIPKFLEECFVKFGIASIIRNIVLSVLRDSIIILRNHLYSQN

SEQ ID NO: 24351 - protein, 1040 aa, Brachyptera putata
MDISPGQLTQNVNTIICPTCDKNFLPSDNLLFLDHFEVCDGSSLDVTTLAIANDRLTRSSNSVSLPNSETVPINVSKKNKQKMECPFCVKSFINVKMHIRKAHNNRQFSRQGSTSTEGNETRTELSENEEITDAVMVLDTSVTTSPIIGSQKKEKCPHCGKNYLSVNIHISKAHPDHQRLKIASTYVEKYQTSKIENTDNQQQYTVNNSNTDSVSPFKSRGCLDEVYLTQVKIWTEEFSKQVLDEEFDDNVTKFSTFLANSLDYLPGPKHPAKKYYEARKSGKFKTNDRTHATQSNPERTSKRDREKRREKYLYDLTQYQYYNQRRKAVRRVLNNNTVTCKIPREELHSHFVDVFSHTNDAIRSEYPRNFDLEELDGLDKVYKGQVSCEEILFTMRKISADTAAGPDRVIMRVLKSERIAKIISLIASRMLDTGYVPSVYQQARTVLIYKSGDVRNPSNFRPISICSLLRRIIEKTLDRQLRSYVTFNENQRGFISTPGTFINTSIIGGILKSSAEHKKDVTIVFLDLSKAFDTVGHKHLNLTINNLPVPTKLRHLISKLLINNKTHVEANGDKTKSINMNQGVFQGSPLSPTLYNLATDHILNELTEHEVKSKYGYDFSGDIEKVSALGFADDTVVIGKDKESAVTLVEIARARFHEIGLSINAKKCAAIVIEKGKLVQSSIIIDETMQIDSLAAKEKIKYLGVDFSQTLVFDPATVINKLTKNLDSLTTSPLLNAEQKLNVFNQFLGPTLIYPLQNAPLGQLPKSFLSNADKLIRSAVKEILQVPHDAPNSMLYANRKYKGLGIINTSWEAFIQHHNICSVLEKTNNQHVNISRDLEEEKKICIRELEVGEQELSNISGVLTGRKLRDLLREREFTKWCNLPHKGKGVILYKEVTSANIWIRNKSGLSCSEWRDAIKLTCNVAPVRTVPGRSTNTTHCRHCGEYETLAHVLCFCQHGELLIINRHNKVRKMIADALRKTEKYLVFEEVHGLSDKGSTRRIDIIAINTKAKTADILDPTIRFERGVDQVQEVNQERKDL

SEQ ID NO: 24352 - protein, 1110 aa, Brachyptera putata
MDISPGQLTQNINTIICPTCDKNFLPSDNLLFLDHFEVCDGSSLDVTTLAIANDRLTRSSNPVSLPNSETVPINMSKKNKQKMKCPFCLKSFINVKMHIRKAHNNRQFSRLGSISTEGNETRTELSENEEITDAVMVLDTSVTPSPIIGSQKKEKCPHCGKNYLSVNIHISKAHPDHQRLKIASTYVEKYQTSKIENTDNQQQYTVNNSNTDSVSPFKSRGCLDEVYLTQVKLWTEEFSKQVLDEEFDDNVTKFSTFLANSLDYLPGPKHPAKKYYEARKSGKFKTNDRTHATQSNPERTSKRDTEKRREKYLYDLTQYQYYNQRRKAVRRVLNNNTVTCKIPREELHSHIVDVFSHTNDAIRSEYPRHFDLEELDRLDKVYKGQVSCEEILFTMRKISADTAAGPDRVIMRVLKSERIAKIISLIASRMLDTGYVPSVYQQARTVLIYKSGDVRNPSNFRPISICSLLRRIIEKTLDRQLRSYVTFNENQRGFISTPGTFINTSIIGGILKSSAEHKKDVTIVFLDLSKAFDTVGHKHLNLTINNLPVLTKLRHLISKLLINNKTHVEANGDKTKSINMNQGVFQGSPLSPTLYNLATDHILNELTEHEVKSEYGYDFSGDIEKVSALGFADDTVVIGKDEESAVTLVEIARARFHEIGLSINAKKCAAIVIEKGKLVQSSIIIDETMQIDSLAAKERIKYLGVDFSQTLVFDPATLINKLTKNLDSLTTSPLLNAEQTLNVFNQFLGPTLIYPLQNAPLGQLPKSFLSNADKLIRSAVKEILQEPHDAPNSMLYANRKYKGLGIINTSWEAFIQHHNICSVLEKTNNQHVNISRDLEEEEKICIRELEVGEQELSNISGVLTGRKLRDLLREREFTKWCNLPHKGKGVKLYKEVTSANIWIRNKSGLSCSEWRDAIKLTCNVAPVRTVPGRSTNTTHCRHCGEYETLAHVLCFCQHGELLNINRHNKVRKMIADALRKTEKYLVFEEVHGLSDKGSTRRIDIIAINTNAKTADILDPTIRFERGVDQVQEVNQEKKRIYEPTIPYYLDKYDIKKIQVTGLLIGARGTIPKSLEECFVKFGIASIIRNIVLSVLRDSIIILRNHLYSQN

SEQ ID NO: 24353 - protein, 1110 aa, Brachyptera putata
MDISPGQLTQNVNTIICPTCDKNFLPSDNLLFLDHFEVCDGSSLDVTTLAIANDRLTRSSNSVSLPNSETVPINMSKKNKQKMECPFCSKSFINVKMHIRKAHNNRQFSRQGSISTEGNETRTELSENEEITDAVMVLDTSVTPSPIIGSQKKEKCPHCGKNYLSVNIHISKAHPDHQRLKIASTYVEKYQTSKIENTDNQQQYTVNNSNTDSVSPFKSRGCLDEVYLTQVKLWTEEFSKQVLDEEFDDNVTKFSTFLANSLDYLPGPKHPAKKYYEARKSGKFKTNDRTHATQSNPERTSKRDREKRREKYLYDLTQYQYYNQRRKAVRRVLNNNTVTCKIPREELHSHFVDVFSHTNDATRSEYPRNFDLEELDGLDKVYKGRVSCEEILFTMRKISADTAAGPDRVIMRVLKSERIAKIISLIASRMLDTGYVPSVYQQARTVLIYKSGDVRNPSNFRPISICSLLRRIIEKTPDRQLRSYVTFNENQRGFISTPGTFINTSIISGILKSSAEHKKDVTIVFLDLSKAFDTVGHKHLNLTINNLPVPTKLRHLISKSLINNKTHVEANGDKTKSINMNQGVFQGSPLSPTLYNLATDHILNELTEHEVKSKYGYDFSGDIEKVSALGFADDTVVIGKDKESAVTLVEIARARFHEIGLSINAKKCAAIVIEKGKLVQSSIIIDETMQIDSLAAKEKIKYLGVDFSQTLVFDPATVINKLTKNLDSLTTSPLLNAEQKLNVFNQFLGPTLIYPLQNAPLGQLPKSFLSNADKLIRSAVKEILQVPHDAPNSMLYANRKYKGLGIINTSWEAFIQHHNICSVLEKTNNQHVNISRDLEEEKKICIRELEVGEQELSNISGVLTGRKLRDLLREREFTKWCNLPHKGKGVILYKEVTSANIWIRNKSGLSCSEWRDAIKLTCNVAPVRTVPGRSTNTTHCRHCGEYETLAHVLCFCQHGELLIINRHNKVRKMIADALRKTEKYLVFEEVHGLSDKGSTRRIDIIAINTKAKTADILDPTIRFERGVDQVQEVNQEKKNIYEPTIPYYLDKYDIKKIQVTGLLIGARGTIPKFLEECFVKFGIASIIRNIVLSVLRDSIIILRNHLYSQN

SEQ ID NO: 24354 - protein, 667 aa, Zeuzera pyrina
MEGRLCNEVCPFLYGASLCALVKKDGSIRPIAVGSVIRRLVAKLGCQAVRGQMADLLGPHQLGFGIPLGCEAAIHASRAFLLDPKRAGDVILKLDINNAFNSVERGVMLAEARNKIPSLYHFLGQCYETPSNLYFNGQRIASQVGAQQGDPLGPLLFCLAINNVITSLKAPLNIWYLDDGTIGGTPNVVAKDLETLIHELNDIGLIINSSKCELYQCGGVNEDQISTFRNVLPNIRIIDRHSFTLLGAPIFEDAVPTSLRDKREILIRARQHLEQLPAQVALTIFRCCLSVPKLTYIMRTSPTWLFPTDVSQLDDEIKDTLETILNVHLDKAQWLQASLPVRHGGLGVRRVWDTNISAFLASSHGVVGLVANILQTQGTSLAIPYMEAALSAWSMVCPTANQPGNPRMQRQWDDQLCKARFSEILETASGVDIARLKAVACQESGAWLHAHPSPHFGTALYDGSLRVAVALRLGSNICEPHNCICGASVDTRGLHGLSCRQSVGRFPRHHMSNEVIQRALMSASVPSILKPPGLSRLDGKRPDGLTLIPWERGRCLIWDATCVSTYAASHLARTTRVAGAAAEWAALQKHYKYEQLKSRYIFVPFSVEVSGVWDMEAKLGLRLRKNGLDPRFESYLVQHISLAIQKGNAASVMGTFASGTIRGGLFD

SEQ ID NO: 24355 - protein, 953 aa, Ephestia elutella
MDAVIGASLACPHCPLESQRRFTKRGLAIHFTRKHRSDLTAPTSSQSRSEHPASPAVSDGHSGVLYPPPLLDRIGTYRTDIRVLKHIPKGARNMAAGKLCSIIDKCLRTNAVEDWYSLLSFSYVAFRVPESNADTRSLTTKVKKNLEDNSFNFFPSDRPKKPLSVCRAIETKVYDGDLRGAVRLLTSDCSLAPANPVTLTSLCDKHPAPLRPLAGPAEGEATTQSLTVTLEDVASAIGSFHASSAAGLDGLRPQHLKELTSVTAGDNGRLLLASLTKLCNFLLEGRLCAAVCPFLYGASLCALTKKDGGIRPIAVGSVLRRLVAKLGCRAVTNQMAELLRPHQLGFGTPLGCEAAIHSVRAFALDPKHANDVILKIDIKNAFNCVERDVMLAEVRDKIPLLCPFLSQCYALPTNLYYNGNKITSQVGAQQGDPLGPLLFSLAINRLIASLEAPLNLWYLDDGTIGGAPDVVAKDLRTLVPGLRDMGLIIHSSKCELYPCGEEAEHGVETLRELLPDVKILNRQTFSLLGTPVFEDAISVALQNKRELLAQARQNLRQLSAHVALTLLRGCLSIPKLTYIMRTSPTWLFPNEIAQLDNDLKITLETVLNVHLNETQWLQASLPIRHGGLGIRRMQDTNVSAFLASSHGVRGLVANILYVHGDNVCVPFTEEALSAWSLVCPVSELPKDKGVQRGWDDQLCRARYEQLLGAAVGVDVARLRAVVSPESGAWLHALPSPHVGTALDDGSLRVAVALRLGCDVCEPHSCVCGVSVDSRGHHGLSCSKSAGRFPRHYMLNEVIRRALVSAGVPCTLEPPGLSRSDGKRPDGLTLIPWERGRSLVWDATCVSTFAASHLTRTTRAAGAAAEWAATQKHAKYAPLTSYMFVPFAVEVSGVWCAEARGFVRELGRRLRSSSGEPRAESYLVQRISLAIQRGNAASVMGTFAPGMTRGGLFD

SEQ ID NO: 24356 - protein, 953 aa, Ephestia elutella
MDAVIGASLACPHCPLESQRRFTKRGLAIHFTRKHRSDLTAPTSSQSRSEHLASPAVSDGHSGVLYPPPLLDRIGTYRTDIRVLKHIPKGARNMAAGKLCSIIDKCLRTNAVEDWYSLLSFSYVAFRVPESNADTRSLTTKVKKNLEDNSFNFFPSDRPKKPLSVCRAIETKVYDGDLRGAVRLLTSDCSLAPANPVTLTSLCDKHPAPLRPLAGPAEGKATTQSLTVTLEDVASAIGSFHASSAAGLDGLRPQHLKELTSVTAGDNGRLLLASLTKLCNFLLEGRLCAAVCPFLYGASLCALTKKDGGIRPIAVGSVLRRLVAKLGCRAVTNQMAELLRPHQLGFGTPLGCEAAIHSVRAFALDPKHANDVILKIDIKNAFNCVERDVMLAEVRDKIPLLCPFLSQCYALPTNLYYNGNKITSQVGAQQGDPLGPLLFSLAINRLIASLEAPLNLWYLDDGTIGGAPDVVAKDLRILVPGLRDMGLIIHSSKCELYPCGEEAEHGVETLRELLPDVKILNRQTFSLLGTPVFEDAISVALQNKRELLAQARQNLRQLSAHVALTLLRGCLSIPKLTYIMRTSPTWLFPNEIAQLDNDLKITLETVLNVHLNETQWLQASLPIRHGGLGIRRMQDTNVSAFLASSHGVRGLVANILHVHGDNVCVPYTEEALSAWSLVCPVTELPKDKGVQRGWDDQLCRARYEQLLGAAVGVDVARLRAVVSPESGAWLHALPSPHVGTALDDGSLRVAVALRLGCDVCEPHSCVCGVSVDSRGHHGLSCSKSAGRFPRHYMLNEVIRRALVSAGVPCTLEPPGLSRSDGKRPDGLTLIPWERGRSLVWDATCVSTFAASHLTRTTRAAGAAAEWAATQKHAKYAPLTSYMFVPFAVEVSGVWCAEARGFVRELGRRLRSSSAEPRAESYLVQRISLAIQRGNAASVMGTFAPGMTRGGLFD

SEQ ID NO: 24357 - protein, 961 aa, Ephestia elutella
MNVNGGASLACPHCSVDSQRRFTKRGLAIHITRMHKTESTTTLPLSPLSQLPQPTDVVTSSLVTIDHIVVSHPPLCLENLGQYRANVRVLKHIPKGARNAAAGKLCAVINKCIQSNTVEDWYALLSFAYVALRIPEPSSGTESLTSKVKRNLNDCSHNFLPGDGRPQKSSSIYKAIETKVYDGDLRGAVRLLTSDCSLAPADSNTLSSLRDKHPAPMRPAMGPTESVPPVQRLTVTAEDVAKAIGSFHASSAAGLDGLRPQHLKELISVSAGDSGPRLLESLTRLCCFLLEGRVCEEVCPFLYGASLCALTKKDGGIRPIAVGGVLRRLVARLGCRAVGDQMGNLLRPRQLGFGSPLGCEAAIHSTRAFALNPEHAGDVILKIDIKNAFNSVERDVMLAEARDKIPSLCPFLAQCYAAPTNLYYNGEKIASQVGAQQGDPLGPLLFSLAINKLIVSLEAPLNIWYLDDGTIGGAPNVVARDLQALVCGLRDMGLTINSSKCELYSCGISSDENIDMFRNILPDVKILDRQSFALLGSPIFEDAVPVALRGKRDMLARAHQHLAQLPAHVALTLLRGCLSAPKLVYMMRTSPTWLFPTEIALLDEEMKVTLETILNVHLDEAQWSQASLPVRHGGLGIRRLQDINAPAFLASSHRVYGLVANILQVQGDNLDIPYAREALTAWSSACPSIEPPVDRGAQRGWDDLLCKARYGHLLEAAVGTDIARLRAACSPESGAWLHALPSPHIGTVLDDGSLRVAAALRLGCSLCEPHTCICGAQADSRGYHGLSCGKSAGRFPRHYMLNDVIRRALVSVEVPCTLEPPGLSRSDGKRPDGLTLIPWERGRCLVWDATCVSTFASTHLPRTTRGAGAAADWAATQKHNKYAPLKGTYIFVPFAVEVSGAWGAEAKIFVRQLGRRLKNNGIDRRAESYLTQRISLAIQRGNAASVMGTFASGTIRGGLFD

SEQ ID NO: 24358 - protein, 966 aa, Apolygus lucorum
MAADEAVAVRNGVRNINVYLNERFPTPTVIAIKNIRLKPHYKQLVQEAILANSSGASPASPVADVEQQPAIQYPSPGTSGLLADLKTEVLRLGGQVGRIEGYESTYLQDLVRRAVEGLDNLEDEVAAYLGRIFPRVGDATVTRHQGGPPPRMVLRGGRRAAKQARRREYHRVQSLWRKHPARVAAEVLEEPGENQVQPPLQEFVDFWEPLLSAPSHDPRECVVSPVSTRESLRSIMCSPVLSDKAHKCRVRNSTSAGPDGVSARRWNKAPKTIKLLILNLLLLAGRPPKALTRTQTVFIPKKGGSGPGGYRPISVSSVVFRHFQKVLASRLQVAGVIGDVQRAFRPADGTAENLTVLQTVISLARITRRQLHLAALDVAKAFDTVNHLALTDCLCGVGAPSRLIEYVACLYQEGVTVLEAGGEVSGDIRIGRGVRQGDPLSPPFNLVVDTALGKLPTEVGFDLAPGVRVGALAFADDVILLAETREGLQIALNAFAKQLAGCGLVVNPDKCGSVSLVPSGRQHKVKVVDGGFVVVQSPIPSRSVLEVWRYLGVDFMGVATITASRVDLGRPLARVTKAPLKPQQKLRLLRMYLLPKLTYGLVFGRLTAGRLQELDREVRSAVRSWLKFPPGVPSAYVHAPVKSGGLGIVSLSACIPSLRCQRLLALQGSSWEVARAAADLDFVRQQLAWCDRATPSAPKPSSSAEFAAALHESVDGKELRQCSESLVSSQWVDWASEGIGARDYRHFHAIRVASLPTAVRCSRGSRGTTLPLCRACWSGNEHLYHVVQQCPRTHGGRILRHDAVAKQIAGALSSSGWDVERERLYHMPSDQGEKPDIVAVKPDQSCIILDVQVVNGSLDMEQTWRAKIRKYDRDDLRQAVSELKGVAPNNIRVMAATLSWRGVWCGKSATELRELGISVGVLRGITTRVLLGSYLNWWSFYRGTSLHPSLPPPPSSSSLIPRAGVG

SEQ ID NO: 24359 - protein, 1100 aa, Apolygus lucorum
MNEENDEPHNPRLPIGTRGSRGGAQRRPRQGRRPSSPSSSSSSSLPSSSSTASLNHQCAHCERACTTRSGLGLHVRRKHPVAANAAIDIERVQHRYVSEELRRMAADEVVAVRDGVRNINVYLSERFPMRTVIAIKNIRLKPHYKQLVQEAILANSSGASPASPIADVEQQPAIQYPSPGTSGLLADLKTEVLRLGGQVGRIEGYESTYLQDLARRAAEGLDNLENEVAAYLGRIFPQVGDATVTQHRGGPPPGVVLRGGRRAAKQARRREYHRVQSLWRKHPARVAAEVLEEPGENQVQPPLQEFVDFWEPLLSAPSHDPGERVVPPVSTRDSLRSIMCAPVLSDEAHKCRVKNSTSAGPDGISARCWNKAPKTIKLLVLNLLLLAGRPPKALTRARTVFIPKKGGSGPGGYRPISVSSVVFRHFQSVLASRLQVAGIIGDVQRAFRPADGTAENLTVLQTVISLAHMKRRQLHLAALDVAKAFDTVSHLALTDCLRGVGAPSRLIEYVACLYQEGVTVLEAGGEVSGDVRIGRGVRQGDPLSPLLFNLVVDTALGKLPTEVGFDLAPGVRVGALAFADDVILLAETREGLQIALNAFARQLARCGLVVNPDKCGSVSLVPSGRQHKVKVVDGGFVIGQSPIPSRSVLEVWRYLGVDFMGVATISASRLDLGRVLARVTKAPLKPQQKLRLLRTYLLPRLTYGLVFGRLTAGRLQELDRQVRSAVRSWLRFPPGVPSAYVHAPVKSGGLGIVSLSACIPSLRRQRLRALQGSSWEVARAAADLDFVRQQLAWCDRATPSAPKPSSSAEFAAALHESVDGKELRQCSESPVSSQWVDWASEGIGARDYRHFHAVRMATLPTAVRCSRGSRGTTLPLCRACRSGNEHLYHVVQQCPRTHGGRILRHDVVAKQIAGALSSSGWDVERERLYHMPSDQGKKPDIVAVKPDQSCIILDVQVVNGSLDMEQTWRAKIRKYDRNELRQAVSELKGVAPNNIRVMAATLSWRGVWCGKSATELRELGISVGVLRGITTRVLLGSYLNWWSFYRGTSLHPSLHPHLPHHPSSLGPASGESWASSPLYLIYLFIFIYGVPPPSKKTFCL

SEQ ID NO: 24360 - protein, 967 aa, Apolygus lucorum
MAADEVVAVRNGVRNINVYLSERFPMHTVIAIKNIRLRPHYKQLVQEAILANSSGASPASPIADVEQQSAIQYPSPRTSGLLADLKTEVMRLGGQVGRIEGYESAYLQDLVRRAAEGLDNLEDEVAAYLGRIFPPVEDTTVTQHQGGPPPRVMLRGGRRAAKQARRREYHRVQSLWKKHPARVAAEVLEEPGENQVQPPLQEFVDFWEPLLSAPSHDPGERVVPPVSTRDSLRGIMCLPVLSDEAHKCRVRNSTSAGPDGISARRWNKAPKTIKLLILNLLLLAGRPPKALTRARTVFIPKKGGSGPGGYRPISVSSVVFRHFQKVLASRLQVAGVIGDVQRAFRPADGTAENLTVLQTVVSLARIKRRQLHLAALDVAKAFDTVSHLALTDCLRGVGAPSRLIEYVACLYQEGVTVLEAGGEVSGDVRIGRGVRQGDPLSPLLFNLVVDTALGKLPTEVGFDLAPGVRVGALAFADDVILLAETREGLQIALNAFAKQLARCGLVVNPDKCGSVSLVPSGRQHKVKVVDGGFVVGQSPIPARSVLEVWRYLGVDFMGVATITASRVDLGRALARVTKAPLKPQQKLRLLRTYLLPKLTYGLVFGRLTAGRLQELDREVRSAVRSWLRFPPGVPSAYVHAPVKSGGLGIVSLSACIPSLRRQRLLALQGSSWEVARAAADLDFVRQQLAWCDRATPSAPKPSSSAEFAAALHESVDGKELRQCSESLVSSQWVDWASEGIGARDYRHFHAVRVAALPTAVRCSRGSRGTTLPLCRACRSGNEHLYHVVQQCPRTHGGRILRHDAVAKQIAGALSSSGWDVERERLYHMPSDQGKKPDIVAVKPDQSCIILDVQVVNGSLDMEQTWRAKIRKYDRDDLRQAVSELKGVAPNNIRVMAATLSWRGVWCGKSATELRELGISVGVLRGITTRVLLGSYLNWWSFYRGTSLHPSLPPPPSSSSLIPRAGVG

SEQ ID NO: 24361 - protein, 1011 aa, Apolygus lucorum
MTLWRLGRGPLLPGSLTLLKCASPVMNTNNDEPHNPRRPIGTRGSGGGAQRRPRQGRRPSSPSSSSSSSLPSSSSTASLNHQCAHCERAFTTRSGLGLHVRRKHPVAANAAIEIERVQPRYASEDLRRMAGDEVVAVRSGVRNINVYLSERFPTRTVNAISKLRQRPHYRQLVQDAILANSSGASPASPIADVEQQPAIQNPSPGTSGLLADLKTEVMRLGGQVGRIEGYESTYLQDLVRRAAEGSENLEDEVAAYLGRIFPQVGDATVTRHQRGPPLRMVLRGGRRAAKQARRREYHRVQSLWRKHPARVAAEVLEEPGENQVQPPLQEFVDFWEPLLSAPSHDPGERVVPPVSTRDSLRGIMCSPVLLDEAHKCRVKNSTSAGPDGISARRWNKAPKTIKLLILNLLLLAGRPPKALTRTRTVFIPKKGGSGPGGYRPISVSSVVFRHFQKVLASRLQVAGVIGDVQRAFRPADGTAETLTVLQTVISLARIKRRQLHLAALDVAKAFDTVSHFALTDCLHGVGAPTRLIEYVACLYHEGVTVLEAGGEMSRDIMIGRGVRQGDPLSPLLFNLVVDTALGKLPTEVGFDLAPGVRVGALAFADDVILLAETREGLQIALNAFAKQLARCGLVVNPDKCGSVSLVPSGRQHKVKVVDGGFVIGQSPIPSRSVLEVWRYLGVDFMGVATITASRVDLGRELARVTKAPLKPQQKLRLLRTYLLPKLTYGLVFGRLTAGRLQELDREVRSAVRSWLKFPPGVPSAYIHAPVKSGGLGIVSLSASIPSLRRQRLLALRGSSWGVARAAADLDFVRQQLAWCDRATPSAPKPSSSAEFAAALHESVDGKELRQCSESLISSQWVDWASEGIGARDYRHFHAVRVASLPTAVRCTRGSRGATLPLCRACRSRSEHLYHLVQQCPRTHGGRILRHDAVAKQIAGALSSSGWDVERERLYHMPSDQGKKPDIVAVKPDQSCIILDVQVVNGSLDMEQTWQAKIRKYDTNDLRQAVSS

SEQ ID NO: 24362 - protein, 1070 aa, Apolygus lucorum
MEYQPDQPHNPRQPIGSRGIRGGAQRRPRQGRRPSSPSSSSSSSLPSSSSTASLDHQCAHCERAFTSRSGLGVHVRRKHPVAANDEINVERVQPRYASEDLRRMAADEVVAVRNGVRNINVYLSERFPTRTVIAIKNLRLKPHYKQLVQEAILANSGGASPASPIADVDQQSAIQYPSPGTSGLLADLETEVLRLGGQVGRIEGYESTYLQDLARRAAEGLDNLEDEVAAYLGRIFPRVGDATVTRHQGRPPPRVVLRGGRRAAKQARRREYHRVQSLWRKHPARAAAEVLEEPGEDQVQPPLQEFVDFWEPLLSAPSHNPGERVVPPVSTRDSLRSILCLPVLLDEAHKCRVKNSTSAGPDGVSARRWNKAPKTIKLLILNLLMLAGRPPKALTRTRTVFIPKKGGSGPGDYRPISVSSVVFRHFQKVLASRLQVAGVIGDVQRAFRPAGGTAENLTVLQTVISLARIKRRQLHLAALDVAKAFDTVSHLALTDCLRGVGAPSRLIEYVACLYHEGVTVLEAGGEVSRDIRIGRGVRQGDPLSPLLFNLVVDTALGKLPTEVGFDLAPGVRVGALAFADDVILLAETREGLQIALNAFAKQLARCGLVVNPDKCGSVSLVPSGRQHKVKVVDGGFVVGQSPIPSRSVLEVWRYLGVDFMGVATITTSHVDLGRALARVTKAPLKPQQKLRLLRTYLLPKLTYGLVFGRLTAGRLQELDREIRSAVRSWLRFPPGVPSAYFHAPVKSGGLGIVSLSACIPSLRRQRLLALQGWSWEVARAAADLDFVRQQLAWCDRATPSAPKPSSSAEFAAALHESVDGKELRQCSESLVSSQWVDWASEGIGARDYRHFHAVRMATLPTAVRCSRGSRGTTLPLCRACRSGNEHLYHVVQQCPRTHGGRILRHDAVAKQIAGALSSSGWDVERERLYHMPSDQGKKPDIVAVKPDQSCIILDVQVVNGSLDMEQTWRAKIRKYDRDDLRQAVSELKGVAPNNIRVMAATLSWRGVWCGKSATELRELGISVGVLRGITTRVLHGSYLNWWSFYRGTSLHPSLPPPPSSSSLIPRAGVG

SEQ ID NO: 24363 - protein, 977 aa, Apolygus lucorum
MRFPVMNTEPTEPHNPRQPIGSRGIRGGAQRRPRQGRRPSSPSSSSSSSLPSSSSTASLNHQCAHCERAFTTRSGLGLHIRRKHPVAANAAIDIERIQPRYASEELRRMAADEAVAVCNGVRNINVYLNERFPTRTVIAIKNIRLKPHYKQLVQEAILANSSGASPASPIADVEQQPAIQYPSPGTSGLLADLKTEVLRLGGQVGRIEGYESTYLQDLVRRAVEGLDNLEDEVAAYLGRIFPRVGDATVTRHQGGPPPRMVLRGGRRAAKQARRREYHRVQSLWRKHPARVAAEVLEEPGENQVQPPLQEFVDFWEPLLSAPSHDPGECVVPPVSTRDSLRSIMCSPVLSDEAHKCRVRNSTSAGPDGVSARRWNKAPKTIKLLILNLLLLAGRPPKALTRTRTVFIPKKGGSGPGGYRPISVSSVVFRHFQKVLASRLQVAGVIGDVQRAFRPADGTAENLTVLQTVISLARIKRRQLHLAALDVAKAFDTVSHLALTDCLRGVGAPSRLIEYVACLYQEGVTVLEAGGEVSGDIRIGRGVRQGDPLSPLLFNLVVDTALGKLPTEVGFDLAPGVRVGALAFADDVILLAETREGLQIALNAFAKQLAGCGLVVNPDKCGSVSLVPSGRQHKVKVVDGGFVVGQSSIPSRSVLEVWRYLGVDFMGVATITASRVDLGRALARVTKAPLKPQQKLRLLRTYLLPKLTYGLVFGRLTAGRLQELDREVRSAVRSWLKFPPGVPSAYVHAPVKSGGLGIVSLSACIPSLRRQRLLALQGSSWEVARAAADLDFVRQQLAWCDRATPSAPKPSSSAEFAAALHESVDGKELRQCSESLLSSQWVDWASEGIGARDYRHFHAIRVASLPTAVRCSRGSRGTTLPLCRACRSGNEHLYHVVQQCPRTHGGRILRHDAVAKQIAGALSSSGWDVERERDCIACQVTRVRSPTLLPSSPTSLALSWMSKLSMAAWTWSRLGGPR

SEQ ID NO: 24364 - protein, 1070 aa, Apolygus lucorum
MEQTNDTPHNPRLPIGTRGSRGGAQRRPRQGRRPSSPSSSSSSSLPSSSSTASLDHQCAHCERAFTSRSGLGVHVRRKHPVAANEAIDVERVQPRYASEDLRRMAADEVVAVRNGVRNINVYLSERFPTRTVIAIKNLRLKPHYKQLVQEAILANSGGASPASPVAGVDQQSAIQYPSPGTSGLLADLKTEVLRLGGQVGRIEGYESTYLQDLARRAAEGLDNLEDEVAAYLGRIFPRVEDATVTQHQGGPPPRVVLRGGRRAAKQARRREYHRVQSLWRKHPARVAAEVLEEPGEDQVQPPLQEFVDFWEPLLSAPSHNPGERVVPPVSTRDSLRSILCSPVLLDEAHKCRVKNSTSAGPDSVSARRWNKAPNTIKLLILNLLILAGRPPKALTRTRTVFIPKKGGSGPGGYRPISVSSVVFRHFQKVLASRLQVAGVIGDVQRAFRPADGTAENLTVLQTVISLARIKRRQLHLAALDVAKAFDTVSHHALTDCLRGVGAPSRLIEYVACLYHEGVTVLEAGGEVSGDVRIGRGVRQGDPLSPLLFNLVVDTALGKLPTEVGFDLAPGVRVGALAFADDVILLAETCEGLQIALNAFAKQLSRCGLVVNPDKCGSVSLVPSGRQHKVKVVDGGFVIGQAPIPSRSVLEVWRYLGVDFMGVATITASRVDLGRALARITKAPLKPQQRLRLLRTYLLPKLTYGLVFGRLTAGRLQELDREVRSAVRSWLRFPPGVPSAYIHAPVKSGGLGIVSLSACIPSLRRQRLLALQGSSWEVARVAAGLDFVRQQLAWCDRATPSAPKPSSSAEFAAALHESVDGKELRQCSESLISSQWVDWASEGIGARDYRNFHAVRAATLPTAVRCSRGSRGMTDTLCRACRSGNEHLYHVVQQCPRTHGGRILRHDAVAKQIAGALSSSGWDVERERLYHMPSDQGKKPDIVAVKPDRSCIILDVQVVNGSMDMEQTWRAKIRKYDRDDLRQAVSELKGVEPNNIRVMAATLSWRGVWCGKSATELRELGISVGVLRGVTRRVLLGSYLNWWSFYRGTSLHPSLPPPPSSSSLIPRAGVG

SEQ ID NO: 24365 - protein, 384 aa, Apolygus lucorum
MGVATITASRVDLGRALARVTKAPLKPQQKLRLLRTYLLPKLTYGLVFGRLTAGRLQQLDREVRSAVRSWLKFPPGVPSAYIHAPVKSGGLGIVSLSACIPSLRRRRLLALQGSSWEVARAAADLDFVRQQLAWCDRATPSAPKPSSSAEFAAALHESVDGKELRQCSESLVSSQWVDWASEGIGARDYRHFHAIRVASLPTAVRCSRGSRGTTLPLCRACRSGNEHLYHVVQQCPRTHGGRILRHDAVAKQIAGALSSSGWDVERERLYHMPSDQGKKPDIVAVKPDQSCIILDVQVVNGSLDMEQTWRAKIRKYDTNDLRQAVSELKGVAPNNIRVMAATLSWCVVREKCHGVARVGHLSRRTPWYHHPCPARLIFELVVVL

SEQ ID NO: 24366 - protein, 1022 aa, Apolygus lucorum
MNDNSSQPHNPRQPIGSRGIRGGAQRRPRQGRRPSSPSSSSSSSLPSSSSTTSLDHQCAHCERAFTTRSGLGVHIRRKHPVAANDEIDVERVQPRYASEDLRRMVADEVVAVRNGVRNINVYLSERFPTRTVIAIKNLRLKPHYKQLVQEAILANSGGASPASPIAGVDQQSAIQYPSPGTSGLLADLKTEVLRLGGQVGRIEGYESIYLQDLAKQAAEGLDNLEDKVAAYLGRIFPQVGDATVTLHQGGPPPRVVLRGGRRAAKQARRREYHRVQSLWRKHPARVAAEVLEEPGEDQVLPPLQEFVDFWEPLLSAPSHNPGERVVPPASTRDSLRSILCSRVLLDEAHKCRVKNSTSAGPDGVSARRWNKAPNTIKLLVLNLLILAGKPPKALTRTRTVFIPKKGGSGPGGYRPISVSSVVFRHFQKVLASRLQVAGVIGDVQRAFRPADGTAENLTVLQTVISLARIKRRQLHLAALDVAKAFDTVSHLALTDCLRGVGAPSRLIEYVACLYREGVTVLEAGGEVSRDIVIGRGVRQGDPLSPLLFNLVVDTALGKLPTEVGFDLAPGVRVGALAFADDVILLAETREGLQIALNAFAKQLSRCGLVVNPDKCGSVSLVPSGRQHKVKVVDGGFVIGQAPIPSRSVLEVWRYLGVDFMGVATITASRVDLGRALARVTKAPLKPQQRLRLLRTYLLPKLTYGLVFGRLTAGRLQELDREVRSAVRSWLRFPPGVPSAYIHAPVKSGGLGIVSLSACIPSLRRRRLLALQGSSWEVARVAAGLDFVRQQLAWCDRATPSAPKPSSSAESAAALHESVDGKELRQCSESLISSQWVDWASEGIGARDYRNFHAVRVATLPTAVRCSRGSLGMTDTLCRPCWSGNEHLYHVVRQCPRTHGGRILRHDAVTKQIAGALSSSGWDVERERLYHMPSDQGKKPDIVAVKPDRSCIILDVQVVNGSMNMEQTWRAKIRKYDRDDLRQAVSELKGVEPNNIRVMAATLSWRGVWCGKSAMELASWASQ

SEQ ID NO: 24367 - protein, 1070 aa, Apolygus lucorum
MDTNQDQPHNPRQPIGSRGIRGGAQRRPRQGRRPSSPSSSSSSSLPSSSSTASLNHQCAHCERAFTTRSGLGLHVRRKHPVAANAAIDIERIQPRYASEELRRMAADEAVAVRNGVRNINVYLNERFPTRTVIAIKNIRLKPHYKQLVQEAILANSSGASPASPIADVEQQPAIQYPSPGTSGLLADLKTEVLRLGGQVGRIEGYESTYLQDLVRRAVEGLDNLEDEVAAYLGRIFPRVGDATVTRHQGGPPPRMVLRGGRRAAKQARRREYHRVQSLWRKHPARVAAGVLEEPGENQVQPPLQEFVDFWEPLLSAPSHDPGECVVPPVSTRDSLRSIMCSPVLSDEAHKCRVRNSTSAGPDGVSARRWNKAPKTIKLLILNLLLLAGRPPKALTRTRTVFIPKKGRSGPGGYRPISVSSVVFRHFQKVLASRLQVAGVIGDVQRAFRPADGTAENLTVLQTVISLARIKRRQLHLAALDVAKAFDTVSHLALTDCLRGVGAPSRLIEYVACLYQEGVTVLEAGGEVSGDVRIGRGVRQGDPLSPLLFNLVVDTALGKLPTEVGFDLAPGVRVGALAFADDVILLAETREGLQIALNAFAKQLAGCGLVVNPDKCGSVSLVPSGRQHKVKVVDGGFVVGQSPIPSRSVLEVWRYLGVDFMGVATITASRVDLGRALARVTKAPLKPQQKLRLLRTYLLPKLTYGLVFGRLTAGRLQELDREVRSAVRSWLKFPPGVPSAYVHAPVKSGGLGIVSLSACIPSLRRRRLLALQGSSWEVAHAAADLDFVRQQLAWCDRATPSAPKPSSSAEFAAVLHESVDGKELRQCSESLVSSQWVDWASEGIGARDYRHFHAIRVASLPTAVRCSRGSRGTTLPLSRACRSGNGHLYHVVQQCPRTHGGRILHHDAVAKQIAGALSSSGWDVERERLYHMPSDQGKKPDIVAVKPDRSCIILDVQVVNGSLDMEQTWRAKIRKYDTNDLRQAVSELKGVAPNNIRVMAATLSWRGVWCGKSATELRELGISVGVLRGITTRVLLGSYLNWWSFYRGTSLHPSLPPPPSSSSLIPRAGVG

SEQ ID NO: 24368 - protein, 1095 aa, Apolygus lucorum
MTLWRIGREPLSTGSLTLINKRSPVMEPNNDVPHNPRLPIGTRGSRGGAQRRPRQGRRPSSPSSSSSSSLPSSSSTASLDHQCAHCERAFTSRSGLGVHVRRKHPVAANEEIDIERVQPRYAPEDLRRMAADEVVAVRNGVRNINVYLSERFPTRTVIAIKNLRLKPHYKQLVQEAILANSGGASPASPVADMDQQSAIQYPSPGTSGLLADLKTKVLRLGGQVGRIEGYESTYLQDLARRAAEGLDNLEDEIAAYLGRIFPRVGDATVTQHQGGPPPRVVLRGGRRAAKQARRREYHRVQSLWRKHPARVAAEVLEEPGENQVQPPLQEFVDFWEPLLSAPSHNPGERVVPPVSTRDSLRSIMCSPVLSDEAHKCRVKNSTSAGPDGISARRWNKAPRTIKLLLLNLLLLAGRPPKALTRARTVFIPKKGGSGPGGYRPISVSSVVFRHFQKVLASRLQVAGIIGDVQRAFRPADGTAENLTVLQTVISLARMKRRQLHLAALDVAKAFDTVSHFALTDCLRGVGAPSRLIEYVACLYQEGVTVLEAGGEVSGDVRIGRGVRQGDPLSPLLFNLVVDTALGKLPTEVGFDLAPGVRVGALAFADDVILLAETREGLQIALNAFAKQLARCGLVVNPDKCGSVSLVPSSRQHKVKVVDGGFVIGQSPIPSRSVLEVWRYLGVDFMGVATISASRVDLGRALARVTKAPLKPQQKLRLLRTYLLPKLTYGLVFGRLTAGRLQELDRQVRSAVRSWLRFPPGVPSAYVHAPVKSGGLGIVSLSACIPSLRRQRLLALQGTSWEVARAAADLDFVRQQLAWCDRATPSAPKPSSSAEFAAALHESVDGKELRQCSESPVSSQWVDWASEGIGARDYRHFHAVRMATLPTAVRCSRGSRGTTLPLCRACRSGNEHLYHVVQQCPRTHGGRILRHDAVAKQIAGALSSSGWDVERERLYHMPSDQGKKPDIVAVKPDQSCIILDVQVVNGSLDMEQTWRAKIRKYDRNDLRQAVSELKGVAPNNIRVMAATLSWRGVWCGKSATELRELGISVGVLRGITTRVLLGSYLNWWSFYRGTSLHPSLPPPPSSSSLIPRAGVG

SEQ ID NO: 24369 - protein, 732 aa, Apolygus lucorum
MCSPVLSDEAHKCRVKNSTSAGPDGISARRWNKAPKTIKLLVLNLLLLAGRPPKALTRTRTVFIPKKGGSGPGGYRPISVSSVVFRHFQKVLASRLQVAGIIGDVQRAFRPADGTAENLTVLQTVISLARMKRRQLHLAALDVAKAFDTVSHLALTDCLRGVGAPSRLIEYVACLYQEGVTVLEAGGEVSGDVRIGRGVRQGDPLSPLLFNLVVDTALGKLPTEVGFDLAPGVRVGALAFADDVILLAETREGLQIALNAFAKQLARCGLVVNPDKCGSVSLVPSGRQHKVKVVDGGFVIGQSPIPSRSVLEVWRYLGVDFMGVATISASRVDLGRALARVTKAPLKPQQKLRLLCTYLLPKLTYGLVFGRLTAGRLQELDRQVRSAVRSWLRFPPGVPGAYVHAPVKSGGLGIVSLSACIPSLRRQRLLALQGSSWEVARAAADLDFVRQQLAWCNRATPSAPKPSSSAEFAAALHESVDGKELRQCSESPVSSQWVDWASEGIGARDYRHFHAVRIATLPTAVRCSRGSRGTTLPLCRACRSGNEHLYHVVQQCPRTHGGRILRHDAVAKQIAGALSSSGWDVERERLYHMPSDRGKKPDIVAVKPDQSCIILDVQVVNGSLDMEQTWRAKIRKYDRNDLRQVVSELKGVAPNNIRVMAATLSWRGVWCGKSATELRELGISVGVLRGITARVLLGSYLNWWSFYRGTSLHPSLPPPPSSSSLIPRAGVG

SEQ ID NO: 24370 - protein, 1095 aa, Apolygus lucorum
MTLWRLGRGPLSTGSLTLHLKRPPVMEQTVREPHNPRQPIGSRGIRGGAQRRPRQGRRPSSPSSSSSSSQPSSSSTASLNHQCAHCERAFTTRSGLGLHVSRKHPVAANAAIDIERIQHRYASEELRRMAADEAVAVRNGVRNINVYLNERFPTRTVIAIKNIRLKPHYKQLVQEAILANSSGASPASPIADVEQQPAIQYPSPGTSGLLADLKTEVLRLGGQVGRIEGYESTYLQDLVRWAAEGLDNLEDEVAAYLGRIFPRVGDVTVTQHQGGPPPRVVLRGGRRAAKQARRREYHRVQSLWRKHPARVAAEVLEEPGENQVQPPLQEFVDFWEPLLSAPSHDPGECVVPPVSTRDSLRSIMCSPVLSDEAHKCRVKNSTSAGPDGVSARRWNKAPKTIKLLILNLLLLAGRPPKALTRTRTVFIPKKGGSGPGGYRPISVSSVVFRHFQKVLASRLQVAGVIGDVQRAFRSADGTAENLTVLQTVISLARIKRRQLHLAALDVAKAFDTVSHLALTDCLRGVGAPSRLIEYVACLYQEGVTVLEAGGEVSGDIRIGRGVRQGDPLSPLLFNLVVDTALGKLPTEVGFDLAPGVRVGALAFADDVILLAETREGLQIALNAFAKQLARCGLVVNPDKCGSVSLVPSGRQHKVKVVDGGFVVGQSPIPSRSVLEVWRYLGVDFMGVATITTSRVDLGRALARVTKAPLKPQQKLRLLRTYLLPKLTYGLVFGRLTAGRLQQLDREVRSAVRSWLKFPPGVPSAYFHAPVKSGGLGIVSLSACIPSLRRRRLLALQGSSWEVARAAADLDFVRQQLAWCDRATPSAPKPSSSAEFAAALHESVDGKELRQCSESLVSSQWVDWASEGIGARDYRHFHAIRVASLPTAVRCSRGSRGTTLPLCRACRSGNEHLYHVVQQCPRTHGGRILRHDAVAKQIAGALSSSGWDVERERLYHMPSDQGKKPDIVAVKPDQSCIILDVQVVNGSLDMEQTWRAKIRKYDTNDLRQAVSELKGVAPNNIRVMAATLSWRGVWCGKSATELRELGISVGVLRGITTRVLLGSYLNWWSFYRGTSLHPSLPPPPSSSSLIPRAGVG

SEQ ID NO: 24371 - protein, 1046 aa, Apolygus lucorum
METNTDRPHNPRQPIGSRGIRGGAQRRPRQGRRPSSPSSSSSSSLPSSSSTASLDHQCAHCERAFTTRSGLGVHIRRKHPVAANDEIDVERVQPRYASEDLRRMAADEVVAVRNGVRNINVYLSERFPTRTVIAIKNLRLKPHYKQLVQEAILANSGGASPASPIAGVDQQSAIQYPSPGTSGLLADLKTEVLRLGGQVGRIEGYESTYLQDLARRAAEGLDNLEDKVAAYLGRIFPRVGDATVTQHQGGPPPRVVLRGGRRAAKQARRREYHRVQSLWRKHPARVAAEVLEEPGEDQVQPPLQEFVDFWEPLLSAPSHNPGERVVPPVSTRDSLRGILCSPVLLDEAHKCRVKNSTSAGPDGVSARRWNKVPNTIKLLILNLLILAGRPPKALTRTRTVFIPKKGGSGPGGYRPISVSSVVFRHFQKVLASRLQVAGVIGDVQRAFRPADGTAENLTVLQTVISLARIKRRQFHLAALDVAKAFDTVSHLALTDCLRGVGAPSRLIEYVACLYREGVTVLEAGGEVSRDIVIGRGVRQGDPLSPLLFNLVVDTALGKLPTEVGFDLAPGVRVGALAFADDVILLAETREGLQIALNAFAKQLSRCGLVVNPDKCGSVSLVPSGRQHKVKVVDGSFVIGQAPIPSRSVLEVWRYLGVDFMGVATITASRVDLGRALARVTKAPLKPQQRLRLLRTYLLPKLTYGLVFGRLTAGRLQELDREVRSDVRSWLRFPPGVPSAYIHAPVKSGGLGIVSLSACIPSLRRQRLLALQGSSWEVARVAAGLDFVRQQLAWCDRATPSAPKPSSSAEFAAALHESVDGKELRQCSESLISSQWVDWASEGIGARDYRNFHAVRVATLPTAVRCSRGSRGMTDTLCRACRSGNEHLYHVVQQCPRTHGGRILRHDAVAKQIAGALSSSGWDVERERLYHMPSDQGKKPDIVALKPDRSCIILDVQVVNGSMDMEQTWRAKIRKYDRDDLRQAVSELKGVEPNNIRVMAATLSWRGVWCGKSATELRELGISVGVLRGVTRRVGTARLIFKLVVIL

SEQ ID NO: 24372 - protein, 957 aa, Apolygus lucorum
MGNVCCVHDVFCGSCKISILEHTRICRYTVLMQLVQEAILANSGGASPASPVAGMDQQSAIQYPSPGTSGLLADLKTEVLRLGGQVGRIEGYESTYLQDLARRAAEGLDNLEDEVAAYLGRIFPRVGDATVAQHQGGPPPRVVLRGGRRAAKQARRREYHRVQSLWRKHPARVAAEVLEEPGEDQVQPPLQEFVNFWEPLLSAPSHNPGERVVPPVSTRDSLRSILCSPVLLDEAHKCRVKNSTSAGPDGISARRWNKAPNTIKLLILNLLMLAGRPPKALTRTRTVFIPKKGGSGPGGYRPISVSSVVFRHFQKVLASRLQVAGVIGDVQRAFRPADGTAENLTVLQTVISLARIKRRQLHLAALDVAKAFDTVSHLALTDCLRGVGAPSRLIEYVACLYHEGVTVLEAGGEVSGDVRIGRGVRQGDPLSPLLFNLVVDTALGKLPTEVGFDLAPGVRVGALAFADDVILLAETREGLQIALNAFAKQLSRCGLVVNPDKCGSVSLVPSGRQHKVKVVDGGFVIGQAPIPSRSVLEVWRYLGVDFMGVATITASRVDLGRALARITKAPLKPQQRLRLLRTYLLPKLTYGLVFGRLTAGRLQELDREVRSAVRSWLRFPPGVPSAYIHAPVKSGGLGIVALSACIPSLRRQRLLALQGSSWEVARVAAGLDFVRQQLAWCDRATPSAPKPSSSAEFAAALHESVDGKEHRQCSESLISSQWVDWASEGIGARDYRNFHAVRVATLPTAVRCSRGSRGMTDTLCRACRSGNEHLYHVVQQCPRTHGGRILRHDVVAKQIAGALSSSGWDVERERLYHMPSDQGKKPDIVAVKPDRSCIILDVQVVNGSMDMEQTWRAKIRKYDRDDLRQAVSELKGVAPNNIRVMAATLSWRGVWCGKSATELRELGISVGVLRGVTRRVLLGSYLNWWSFYRGTSLHPSLPPPPSSSSLIPRAGVG

SEQ ID NO: 24373 - protein, 1095 aa, Apolygus lucorum
MTLWRLGRGPLLTGSLTLHHKRPPVMEQNINEPHNPRQPIGSRGIRGSAQRRPRQGRRPSSPSSSSSSSLPSSSSTASLNHQCAHCERAFTTRSSLGLHIRRKHPVAANAAIDIERIQPRYASEELRRMAADEAVAVRNGVRNINVYLNERFPTRTVIAIKNIRLKPHYKQLVQEAILANSSGASPASPIADVEQQPAIQYPSPGTSGLLADLKTEVLRLGGQVGRIEGYESTYLQDLVRRAVEGLDNLEDEVAAYLGRIFPRVGDATVTRHQGGPPPRMVLRGGRRAAKQARRREYHRVQSLWRKHPARVAAEVLEEPGENQVQPPLQEFVDFWEPLLSAPSHDPGECVVPPVSTRDSLRSIMCSPVLTDEAHKCRVRNSTSAGPDGVSARRWNKAPKTIKLLILNLLLLAGRPPKALTRTRTVFIPKKGGSGPGGYRPISVSSVVFRHFQKVLASRLQVAGVIGDVQRAFRPADGTAENLTVLQTVISLARIKRRQLHLAALDVAKAFDTVSHLALTDCLRGVGAPSRLIEYVACLYQEGVTVLEAGGEVSGDIRVGRGVRQGDPLSPLLFNLVVDTALGKLPTEVGFDLAPGVRVGALAFADDVILLAETREGLQIALNAFAKQLAGCGLVVNPDKCGSVSLVPSGRQHKVKVVDGGFVVGQSPIPSRSVLEVWRYLGVDFMGVATITASRVDLGRALARVTKAPLKPQQKLRLLRTYLLPKLTYGLVFGRLTAGRLQELDREVRSAVRSWLKFPPGVPSAYVHAPVKSSGLGIVSLSACIPSLRRRRLLALQGSSWEVARAAADLDFVRQQLAWCDRATPSAPKPSSSAEFAAALHESVVGKELRQCSESLVSSQWVDWASEGIGARDYRHFHAIRVASLPTAVRCSRGSRGTTLPLCRACRSGNEHLYHVVQQCPRTHGGRILRHDAVAKQIAGALSSSGWDVERERLYHMPSDQGKKPDIVAVKPDQSCIILDVQVVNGSLDMEQTWRAKIRKYDTNDLRQAVSELKGVAPNNIRVMAATLSWRGVWCGKSATELRELGISVGVLHGITTRVLLGSYLNWWSFYRGTSLHPSLPPPPSSSSLIPRAGVG

SEQ ID NO: 24374 - protein, 1070 aa, Apolygus lucorum
MDTNQDQPHNPRQPIGSRGIRGGAQRRPRQGRRPSSPSSFSSSSLPSSSSTASLNHQCAHCERAFTTRSGLGLHVRRKHPVAANAAIDIERIQPRYASEELRRMAADEAVAVRNGVRNINVYLNERFPTRTVIAIKNIRLKPHYKQLVQEAILANSSGASPASPIADVEQQPAIQYPSPGTSGLLADLKTEVLRLGGQVGRLEGYESTYLQDLVRRAAEGLDNLEDEVAAYLGRIFPRVGDATVTRHQGGPPPRMVLRGGRRAAKQARQREYHRVQGLWGKHPARVAAEVLEEPGENQVQPPLQEFVDFWEPLLSAPSHDPGECVVPPVSTRDSLRSIMCAPVLSDEAHKCRVRNSTSAGPDGVSARRWNKAPKTIKLLILNLLLLAGRPPKALTRTRTVFIPKKGGSGPGGYRPISVSSVVFRHFQKVLASRLQVAGVIGDVQRAFRPADGTAENLTVLQTVISLARIKRRQLHLAALDVAKAFDTVSHLALTDCLRGVGAPSRLIEYVACLYQEGVTVLEAGGEVSGDIRIGRGVRQGDPLSPLLFNLVVDTALGKLPTEVGFDLAPGVRVGALAFADDVILLAETREGLQIALNAFAKQLAGCGLVVNPDKCGSVSLVPSGRQHKVKVVDGGFVIGQSPIPSRSVLEVWRYLGVDFMGVATITASRVDLGRALARVTKAPLKPQQKLRLLRTYLLPKLTYGLVFGRLTAGRLQELDREVRSAVRSWLKFPPGVPSAYVHAPVKSGGLGIVSLSACIPSLRRRRLLALQGSSWEVARAAADLDFVRQQLAWCDRATPSAPKPSSSAEFAAALHESVDGKELRQCSESLVSSQWVDWASEGIGARDYRHFHAIRVASLPTAVRCSRGSRGTTLPLCRACRSGNEHLYHVVQQCPRTHGGRILRHDAVAKQIAGALSSSGWDVERERLYHMPSDQGKKPDIVAVKPDRSCIILDVQVVNGSLDMEQTWRAKIRKYDTNDLRQAVSELKGVAPNNIRVMAATLSWRGVWCGKSATELRELGISVGVLRGITTRVLLGSYLNWWSFYRGTSLHPSLPPPPSSSSLIPRAGVG

SEQ ID NO: 24375 - protein, 1070 aa, Apolygus lucorum
MNEENDEPHNPRLPIGTRGSRGGAQRRPRQGRRPSSPSSSSSSSLPSSSSTASLNHQCAHCERAFTTRSGLGLHVRRKHPVAANAAIDIERVQHRYASEELRRMAADEVVAVRDGVRNINVYLSERFPMRTVIAIKNIRLKPHYKQLVQEAILANSSGASPASPIADVEQRPAIQYPSPGTSGLLADLKTEVLRLGGQVGRIEGYESTYLQDLARRAAEGLDNLENEVAAYLGRIFPRVGDATVTQHRGGPPPGVVLRGGRRAAKQARRREYHRVQSLWRKHPARVAAEVLEEPGENQVQPPLQEFVDFWEPLLSAPSHDPGERVVPPVSTRDSLRSIMCAPVLSDEAHKCRVKNSTSAGPDGISARRWNKAPKTIKLLVLNLLLLAGRPPKALTRARTVFIPKKGGSGPGGYRPISVSSVVFRHFQKVLASRLQVAGIIGDVQRAFRPADGTAENLTVLQTVISLARMKRRQLHLAALDIAKAFDTVSHLALTDCLRGVGAPSRLIEYVACLYQEGVTVLEAGGEVSGDVRIGRGVRQGDPLSPLLFNLVVDTALGKLPTEVGFDLAPGVRVGALAFADDVILVAETREGLQIALNAFARQLARCGLVVNPDKCGSVSLVPSGRQHKVKVVDGGFVIGQSPIPSRSVLEVWRYLGVDFMGVATISASRVDLGRALARVTKAPLKPQQKLRLLRTYLLPKLTYGLVFGRLTAGRLQELDRQVRSAVRSWLRFPPGVPSAYVHAPVKSGGLGIVSLSACIPSLRRQRLLALQGSSWEVARAAADLDFVRQQLAWCDRATPSAPKPSSSAEFAAALHESVDGKELRQCSKSPVSSQWVDWASEGIGARDYRHFHAVRMATLPTAVRCSRGSRGTTLPLCRACRSGNEHLYHVVQQCPRTHGGRILRHDAVAKQIAGALSSSGWDVERERLYHMPSDQGKKPDIVAVKPDQSCIILDVQVVNGSLDMEQTWRAKIRKYDRNDLRQAVSELKGVAPNNIRVMAATLSWRGVWCGKSATELRELGISVGVLRGITTRVLLGSYLNWWSFYRGTSLHPSLPPPPSSSSLIPRAGVG

SEQ ID NO: 24376 - protein, 1070 aa, Apolygus lucorum
MEDTTEMPHNPRQPIGSRGIRGGAQRRPRQGRRPSSPSSSSSSSLPSSSSTASLNHQCSHCEWAFTTRSGLGLHIRRKHPVAANAAIDIERIQHRYASEELRRMAADEAVAVRNGVRNINVYLNERFPTRTVIAIKNIRLKPHYKQLVQEAILANSSGASPASPIADVEQQPAIQYPSPGTSGLLADLKTEVLRLGGQVGRIEGYESTYLQDLVRRAAEGLDNLEDEVAAYLGRIFPQVGDATVTRHQGGPPPRVVLRGGRRAAKQARRREYHRVQSLWRKHPARVAAEVLEEPGENQVQPPLQEFVDFWEPLLSAPSHDPGERVVPPVSTRDSLRSILCSPVLLDEAHKCRVKNSTSAGPDGVSARRWNKAPKTIKLLILNLLLLAGRPPKALTCTHTVFIPKKGGRGPGGYRPISVSSVVFRHFQKVLASRLQVAGVIGDVQRAFRPADGTAENLTVLQSVISLARIKRRQLHLAALDVAKAFDTVSHLALTDCLRGVGAPSRLIEYVACLYQEGVTVLEAGGEVSGDIRIGRGVRQGDPLSPLLFNLVVDTALGKLPTEVGFDLAPGVRVGALAFADDVILLAETREGLQIALNAFAKQLARCGLVVNPDKCGSVSLVPSGRQHKVKVVDGGFVVGQSPIPSRSVLEVWRYLGVDFMGVATITASRVDLGRALARVTKAPLKPQQKLRLLRTYLLPKLTYGLVFGRLTAGRLQQLDREVRSAVRSWLKFPPGVPSAYIHAPVKSGGLGIVSLSACIPSLRRRRLLALQGSSWEVARAAADLDFVRQQLAWCDRATPSAPKPSSSAEFAAALHESVDGKELRQCSESLVSSQWVDWASEGIGARDYRHFHAIRVASLPTAVQCSRGSRGTTLPLCRACRSGNEHLYHVVQQCPRTHGGRILRHDAVAKQIAGALSSSGWDVERERLYHMPSDQGKKPDIVAVKPDQSCIILDVQVVNGSLDMEQTWRAKIRKYDTNDLRQAVSELKGVAPNNIRVMAATLSWRGVWCGKSATELRELGISVGVLRGITTRVLLGSYLNCWSFYRGTSLHPSLPPPPSSSSLIPRAGVG

SEQ ID NO: 24377 - protein, 1070 aa, Apolygus lucorum
MERNIEWPHNPRQPIGSRGIRGGAQRRPRQGRRPSSPSSSSSSSQPSSSSTASLNHQCAHCERAFTTRSGLGLHISRKHPVAANAAIDIERIQHRYASEELRRMAADEAVAVRNGVRNINVYLNERFPTRTVIAIKNIRLKPHYKQLVQEAILANSSGASPASPIADVEQQPAIQYPSPGTSGLLADLKTEVLRLGGQVGRIEGYESTYLQDLVRRAAEGLDNLEDEVAAYLGRIFPRVGDATVTQHQGGPPPRVVLRGGRRAAKQARRREYHWVQSLWRKHPARVAAEVLEEPGENQVQPPLQEFVDFWEPLLSAPSHDPGERVVPPVSTRDSLRSIMCSPVLSDEAHKCRVKNSTSAGPDGVSARRWNKAPKTIKLLILNLLLLAGRPPKALTRTRTVFIPKKGGSGPGGYRPISVSSVVFRHFQKVLASRLQVAGVIGDVQRAFRPADGTAENLTVLQTVISLARIKRRQLHLAALDVAKAFDTVSHLALTDCLRGVGAPSRLIEYVACLYQEGVTVLEAGGEVSGDIRIGRGVRQGDPLSPLLFNLVVDTALGKLPTEVGFDLAPGVRVGALAFADDVILLAETREGLQIALNAFAKQLARCGLVVNPDKCGSVSLVPSGRQHKVKVVDGGFVVGQSPIPSRSVLEVWRYLGVDFMGVATITASRVDLGRALARVTKAPLKPQQKLRLLRMYLLPKLTYGLVFGRLTAGRLQQLDREVRSAVRSWLKFPPGVPSAYVHAPVKSGGLGIVSLSACIPSLRRWRLLALQGSSWEVARAAADLDFVRQQLAWCDRATPSAPKPSSSAEFAAALHESVDGKELRQCSESLVSSQWVDWASEGIGARDYRHFHAIRVASLPTAVRCSRGSRGTTLPLCRACRSGNEHLYHVVQQCPRTHGGRILRHDAVAKQIAGALSSSGWDVERERLYHMPSDQGKKPDIVAVKPDQSCIILDVQVVNGSLDMEQTWRAKIRKYDRDDLRQAVSELKGVAPNNIRVMAATLSWRGVWCGKSATELRELGISVGVLRGITTRVLLGSYLNWWSFYRGTSLHPSLPPPPSSSSLIPRAGVG

SEQ ID NO: 24378 - protein, 1095 aa, Apolygus lucorum
MTLWRLGRGPLSTGSLTLHLKRPPVMEQTVREPHNPRQPIGSRGIRGGAQRRPRQGRRPSSPSSSSSSSQPSSSSTASLNHQCAHCERAFTTRSGLGLHVSRKHPVAANAAIDIERIQHRYASEELRRMAADEAVAVRNGVRNINVYLNERFPTRTVIAIKNIRLKPHYKQLVQEAILANSSGASPASPIADVEQQPAIQYPSPGTSGLLADLKTEVLKLGGQVGRIEGYESTYLQDLVRRAAEGLDNLEDEVAAYLGRIFPRVGDVTVTQHQGGPPPRVVLRGGRRAAKQARRREYHRVQSLWRKHPARVAAEVLEEPGENQVQPPLQEFVDFWEPLLSAPSHDPGECVVPPVSTRDSLRSIMCSPVLSDEAHKCRVKNSTSAGPDGVSARRWNKAPKTIKLLILNLLLLAGRPPKALTRTRTVFIPKKGGSGPGGYRPISVSSVVFRHFQKVLASRLQVAGVIGDVQRAFRSADGTAENLTVLQTVISLARIKRRQLHLAALDVAKAFDTVSHLALTDCLRGVGAPSRLIEYVACLYQEGVTVLEAGGEVSGDIRIGRGVRQGDPLSPLLFNLVVDTALGKLPTEVGFDLAPGVRVGALAFADDVILLAETREGLQIALNAFAKQLARCGLVVNPDKCGSVSLVPSGRQHKVKVVDGGFVVGQSPIPSRSVLEVWRYLGVDFMGVATITTSRVDLGRALARVTKAPLKPQQKLRLLRTYLLPKLTYGLVFGRLTAGRLQELDREVRSAVRSWLKFPPGVPSAYFHAPVKSGGLGIVSLSACIPSLRRRRLLALQGSSWEVARAAADLDFVRQQLAWCDRATPSAPKPSSSAEFAAALHESVDGKELRQCSESLVSSQWVDWASEGIGARDYRHFHAIRVASLPTAVRCSRGSRGTTLPLCRACRSGNEHLYHVVQQCPRTHGGRILRHDAVAKQIAGALSSSGWDVERERLYHMPSDQGKKPDIVAVKPDQSCIILDVQVVNGSLDMEQTWRAKIRKYDTNDLRQAVSELKGVAPNNIRVMAATLSWRGVWCGKSAMELRELGISVGVLRGITTRVLLGSYLNWWSFYRGTSLHPSLPPPPSSSSLIPRAGVG

SEQ ID NO: 24379 - protein, 1008 aa, Apolygus lucorum
MNDNSSQPHNPRQPIGSRGIRGGAQRRPRQGRRPSSPSSSSSSSLPSSSSTASLDHQCAHCERAFTTRSGLGVHIRRKHPVAANDEIDVERVQPRYASEDLRRMAADEVVAVRNGVRNINVYLSERFPTRTVIAIKNLRLKPHYKQLVQEAILANSGGASPASPIAGVDQQSAIQYPSPGTSGLLADLKTEVLRLGGQVGRIEGYESTYLQDLARRAAEGLDNLEDMVAAYLGRIFPRVEDATVTQHQGGPPPRVVLRGGRRAAKQARRREYHRVQSLWRKHPARVAAEVLEEPGEDQVQPPLQEFVDFWEPLLSAPSHNPGERVVPPVSTRDSLRSILCSPVLLDEAHKCRVKNSTSAGPDGVSARRWNKAPNTIKLLILNLLILAGRPPKALTRTRTVFIPKKGGSGPGGYRPISVSSVVFRHFEKVLASRLQVAGVIGDVQRAFQPADGTAENLTVLQTVISLARIKRRQLHLAALDVAKAFDTVSHLALTDCLRGVGAPSRLIEYVACLYREGVTVLEAGGEVSRDIVIGRGVRQGDPLSPLLFNLVVDTALGKLPTEVGFDLAPGVRVGALAFADDVILLAETREGLQIALNAFAKQLSRCGLVVNPDKCGSVSLVPSGRQHKVKVVDGGFVIGQAPIPSRSVLEVWRYLGVDFMGVATITASRVDLGRALARVTRAPLKPQQRLRLLHTYLLPKLTYGLVFGRLTAGRLQELDREVHSAVRSWLKFPPGVPSAYIHAPVKSGGLGIVSLSACIPSLRRQRLLALQGSSWEVARVAAGLDFVRQQLAWCDRATPSAPKPSSSAEFAAALHESVDGKELRQCSESLISSQWVDWASEGIGAHDYRNFHAVCVATLPTAVRCSRGSRGMTDTLCRACRSGNEHLYHVVQQCPRTHGGRILRHDAVAKQIAGALSSSGWDVERERLYHMPSDQGKKPDIVAVKPDRSCIILDVQVVNGSMDMEQTWRAKIRKYDRDDLRQAVSELKGVEPNNIRVMAATLSWRGVW

SEQ ID NO: 24380 - protein, 1095 aa, Apolygus lucorum
MTLWRLGRGPLLTGSLTLHYKRPPVMNEEDDEPHNPRLPIGTRGSRGGAQRRPRQGRRPSSPSSSSSSSLPSSSSTASLNHQCAHCERAFTTRSGLGLHVRRKHPVAANAAIDIERVQHRYASEELRRMAADEVVAVRDGVRNINVYLSERFPMRTVIAIKNIRLKPHYKQLVQEAIMANSSGASPASPIADVEQQPAIQYPSPGTSGLLADLKTEVLRLGGQVGRIEGYESTYLQDLARRAAEGRDNLENEVAAYLGRIFPWVGDATVTQHQGGPPPGVVLRGGRRAAKQARRREYHWVQSLWRKHPAHVAAEVLEEPGENQVQPPLQEFVDFWEPLLSAPSHDPGERVVPPVSTRDSLRSIMCAPVLSDEAHKCRVKNSTSAGPDGISARRWNKAPKTIKLLVLNLLLLAGRPPKALTRARTVFIPKKGGSGPGGYRPISVSSVVFRHFQKVLASRLQVAGIIGDVQRAFRPADGTAENLTVLQTVISLARMKRRQLHLAALDVAKAFDTVSHLALTDCLCGVGAPSRLIEYVACLYQEGVTVLEAGGEVSGDVRIGRGIRQGDPLSPLLFNLVVDTALGKLPTEVGFDLAPGVRVGALAFADDVILLAETREGLQIALNAFARQLARCGLVVNPDKCGSVSLVPSGRQHKVKVVDGGFVIGQSPIPSRSVLEVWRYLGVDFMGVATISASRVDLGRALARVTKAPLKPQQKLRLLRTYLLPKLTYGLVFGRLTAGRLQELDRQVRSAVRSWLRFPPGVPSACVHAPVKSGGLGIVSLSACIPSLRRQRLLALQGSSWEVARAAADLDFVRQQLAWCDQATPSAPKPSSSAEFAAALHESVDGKELRQCSESPVSSQWVDWASEGIGARDYRHFHAVRMATLPTVVRCSRGSRGTTLPLCRACRSGNEHLYHVVQQCPRTHGGRILRHDAVAKQIAGASSSSGWDVERERLYHMPSDQGKKPDIVAVKPDQSCIILDVQVVNGSLDMEQTWRAKIRKYDRNDLRQAVSELKGVAPNNIRVMAATLSWRGVWCGKSATELRELGISVGVLRGITTRVLLGSYLNWWSFYRGTSLHPSLPPPPSSSSFIPRAGVG

SEQ ID NO: 24381 - protein, 1070 aa, Apolygus lucorum
MDNNTTRPHNPRQPIGSRGIRGGAQRRPRQGRRPSSPSSSSSSSLPSSSSTASLDHQCAHCERTFTTRSGLGVHIRGKHPVAANDEIDVERVQPRYASEDLRRMAADEVVAVRNGVRNINVYLSERFPTRTVIAIKNLRLKPHYKQLVQEAILANSSGASPASPIAGVDQQSAIQYPSPGTSGLLADLKTEVLRLGGQVGRIEGYESTYLQDLARRAAEGLDNLEDKVAAYLGRIFPRVGDATVTQHQGGPPPRVVLRGGRRAAKQARRREYHRVQSLWRKHPARVAAEVLEEPGEDQVQPPLQEFVDFWEPLLSAPSHNPGERVVPPVSTRDSLRSILCSPVLLDEAHKCRVKNSTSAGPDGVSARRWNKVPNTIKLLILNLLMLAGRPPKALTRTRTVFIPKKGGSGPGGYRPISVSSVVFRHFQKVLASRLQVAGVIGDVQRAFRPADGTAENLTVLQTVISLARIKRRQLHLAALDVAKAFDTVSHLALTDCLRGVGALSRLIEYVACLYREGVTVLEAGGEVSRDIVIGRGVRQGDPLSPLLFNLVVDTALGKLPTEVGFDLAPGVRVGALAFADDVILLAETREGLQIALNAFAKQLSRCGLVVNPDKCGSVSLVPSGRQHKVKVVDGGFVIGQAPIPSRSVLEVWRYLGVDFMGVATITASRVDLGRALARVTKAPLKPQQRLRLLRTYLLPKLTYWLVFGRLTAGRLQELDREVRSAVRSWLRFPPGVPSAYIHAPVKSGGLGIVSLSACIPSLRRQRLLALQGSSWEVARVAAGLDFVRQQLAWCDRATPSAPKPSSSAEFAAALHESVDGKELRQCSESLISSQWVDWASEGIGARDYRNFHAVRVATLPTAVRCSRGSRGMTDTLCRACRSGNEHLYHVVQQCPRTHGGRILRHDAVAKQIAGALSSSGWDVERERLYHMPSDQGKKPDIVAVKPDRSCIILDVQVVNGSMDMEQTWRAKIRKYDRDDLRQAVSELKGVEPNNIRVMAATLSWRGVWCGKSATELRELGISVGVLRGVTRRVLLGSYLNWWSFYRGTSLHPSLPPPPSSSSLIPRAGVG

SEQ ID NO: 24382 - protein, 1070 aa, Apolygus lucorum
MIDEADQPHNPRQPIGSRGIRGGAQRRPRQGRRPSSPSSSSSSSLPSSSSTASLDHQCAHCERAFTSRSGLGVHVRRKHPVAANAAIEIERVQPRYASEDLRRMAADEVVAVRNGVRNINVYLSERFPTRTVIAIKNLRLKPHYKQLVQEAILANSGGASPASPIAGVDQQSAIQYPSPGTSGLLAELKTEVLRLGGQVGRIEGYESTYLQDLARRAAEGLDNLEDMVAAYLGRIFPRVGDATVTRHQGRPPPRVVLRGGRRAAKQARRQEYHRVQSLWRKHPARVAAEVLEEPGEDQVQPPLQEFVDFWEPLLSAPSHNPGERVVPPVSTRDSLRSILCSPVLLDEAHKCRVKNSTSAGPDGVSARRWNKAPNTIKLLILNLLMLAGRPPKALTRTRTVFIPKKGGSGPGGYRPISVSSVVFRHFQKVLASRLQVAGVIGDVQRAFRPADGTAENLTVLQTVISLARIKRRQLHLAALDVAKAFDTVSHFALTDCLRGVGAPSRLIEYVACLYHEGVTVLEAGGEVSGDVRIGRGVRQGDPLSPLLFNLVVDTALGKLPTEVGFDLAPGVRVGALAFADDVILLAETREGLQIALNAFAKQLARCGLMVNPDKCGSVSLVPSGRQHKVKVVDGGFVVGQSPIPSRSVLEVWRYLGVDFMGVATITTSRVDLGRALARVTKAPLKPQQKLRLLRTYLLPKLTYGLVFGRLTAGRLQELDRQVRSAVRSWLKFPPGVPSAYFHAPVKSGGLGIVSLSACIPSLRRQRLLALQGSSWEVARAAADLDFVRQQLAWCDRATPSAPKPSSSAEFAAALHESVDGKELRQCSESLVSSQWVDWASEGIGAQDYRHFHAVRMATLPTAVRCSRGSRGTTLPLCRACRSGNEHLYHVVQQCPRTHGGRILRHDAVAKQIAGALSSSGWDVERERLYHMPSDQGKKPDIVAVKPDQSCIILDVQVVNGSLDMEQTWRAKIRKYDRDDLRQAVSELKGVVPNNIRVMAATLSWRGVWCGKSATELRELGISVGVLRGITTRVLLGSYLNWWSFYRGTSLHPSLPPPPSSSSLIPRAGVG

SEQ ID NO: 24383 - protein, 1070 aa, Apolygus lucorum
MEHNHQLPHNPRQPIGSRGIRGGAQRRPRQGRRPSSPSSSSSSSLPSSSSTASLDHQCAHCERAFTSRSGLGVHVRRKHPVAANAAIEIERVQPRYASEDLRRMAADEVVAVRNGVRNINVYLSERFPTRTVIAIKNLPLKPHYKQLVQEATLANSGGASPASPVAGMDQQSAIQYPSPGTSGLLADLKTEVLRLGGQVGRIEGYESTYLQDLARRAAEGLDNLEDEVAAYLGRIFPRVGDATVAQHQGGPPPRVVLRGGRRAAKQARRREYHRVQSLWRKHPARVAAEVLEEPGEDQVQPPLQEFVDFWEPLLSAPSHNPGERVVPPVSTRDSLRSILCSPVLLDEAHKCRVKNSTSAGPDGISARRWNKAPNTIKLLILNLLMLAGRPPKALTRTRTVFIPKKGGSGPGGYRPISVSSVVFRHFQKVLASRLQVAGVIGDVQRAFRPADGTAENLTVLQTVISLARIKRRQLHLAALDVAKAFDTVSHLALTDCLRGVGAPSRLIEYVACLYHEGVTVLEAGGEVSGDVRIGRGVRQGDPLSPLLFNLVVDTALGKLPTEVGFDLAPGVRVGALAFADDVILLAETREGLQIALNAFAKQLSRCGLVVNPDKCGSVSLVPSGRQHKVKVVDGGFVIGQAPIPSRSVLEVWRYLGVDFMGVATITASRVDLGRALARITKAPLKPQQRLRLLRAYLLPKLTYGLVFGRLTAGRLQELDREVRSAVRSWLRFPPGVPSAYIHAPVKSGGLGIVALSACIPSLRRQRLLALQGSSWEVARVAAGLDFVRQQLAWCDRATPSAPKPSSSAEFAAALHESVDGKELRQCSESLISSQWVDWASEGIGARDYRNFHAVRVATLPTAVRCSRGSRGMTDTLCRACRSGNEHLYHVVQQCPRTHGGRILRHDAVAKQIAGALSSSGWDVERERLYHMPSDQGKKPDIVAVKPDRSCIILDVQVVNGSMDMEQTWRAKIRKYDRDDLRQAVSELKGVAPNNIRVMAATLSWRGVWCGKSATELRELGISVGVLRGVTRRVLLGSYLNWWSFYRGTSLHPSLPPPPSSSSLIPRAGVG

SEQ ID NO: 24384 - protein, 1070 aa, Apolygus lucorum
MNQNVTEPHNPRRPIGTRGSGGGAQRRPRQGRRPSSPSSSSSSSLPSSSSTASLNHQCAHCERAFTTRSGLGLHVRRKHPVAANAAIEIERVQPRYASEDLRRMAADEAVAVRSGVRNINVYLNERFPARTVNAISKLRQRPHYKQLVQEAILANSSGASPASPIADVEQQPAIQNPSPGTSGLLADLKTEVLRLGGQVGRIEGYESTYLQDLARRAAEGSENLEDEVAAYLGRIFLRVGDATVTQHQRGPPLRMVLRGGRRAAKQARRREYHRVQSLWRKHPARVAAEVLEEPGDDQVQPPLQEFVNFWEPLLSAPSHDPGERVVPPVSTRDSLRSIMCSPVLLDEAHKCRVKNSTSAGPDGVSAHRWNKAPKTIKLLILNLLLLAGRPPKALTRARTVFIPKKGGSGPGGYRPISVSSVVFRHFQKVLASHLQVAGVIGDVQRAFRPADGTAENLTVLQTVISLARIKRRQLHLAALDVAKAFDTVSHLALTDCLRGVGAPSRLIEYVACLYHEGVTVLEAGGEVSRDIVIGRGVRQGDPLSPLLFNLVVDTALGKLPTEVGFDLAPGVRVGALAFADDVILLAETREGLQIALNAFAKQLARCGLVVNPDKCGSVSLVPSGRQHKVKVVDGGFVIGQSPIPSRSVLEVWRYLGVDFMGVATITASRVDLGRALARVTKAPLKPQQRLRLLRTYLLPKLTYGLVFGRLTAGRLQELDREVRSAVRSWLKFPPGVPSSYIHAPVKSGGLGIVSLSASIPSLRRQRLLALRGSSWGVARAAADLDFVRQQLAWCDRATPSAPKPSSSAEFAAALHESVDGKELRQCSESLISSQWVDWASEGIGARDYRHFHAVRVASLPTAVRCSRGSRGTTLPLCRACRGGSEHLYHVVQQCPRTHGGRILRHDAVAKQIAGALSSSGWDVERERLYHMPSDQGKKPDIVAVKPDQSCIILDVQVVNGSLDMEQTWRAKIRKYDTNDLRQAVSELKGVAPNNIRVMAATLSWRGVWCGKSATELRELGISVGVLRGITTRVLLGSYLNWWSFYRGTSLHPSLPPPPSSSSLIPRAGVG

SEQ ID NO: 24385 - protein, 967 aa, Apolygus lucorum
MAADEVVAVRNGVRNINVYLSERFPTRTVIAIKNLRLKPHYKQLVQEAILANSGGASPASPVAGVDQQSAIQYPSPGTSSLLADLKTEVLRLGGQVGRIEGYESTYLQDLARRAAEGLDNLEDEVAAYLGRIFPRVGDATVTQHQGGPPPRMVLRGGRRAAKQARRQEYHRVQSLWRKHPARVAAEVLEEPGEDQVQPPLQEFVDFWEPLLSAPSHNPGERVVPPVSTRDSLRSILCSPVLLDEAHKCRVKNSTSAGPDGVSARRWNKAPNTIKLLILNLLMLAGRPPKALTRTRTVFIPKKGGSGPGGYRPISVSSVVFRHFQKVLASRLQVAGVIGDVQRAFRPADGTAENLTVLQTVISLARIKRRQLHLAALDVAKAFDTVSHLALTDCLRGVGAPSRLIEYVACLYHEGVTVLEAGGEVSGDVRIGRGVRQGDPLSPLLFNLVVDTALGKLPTEVGFDLAPGVRVGALAFADDVILLAETREGLQIALNAFAKQLSRCGLVVNPDKCGSVSLVPSGRQHKVKVVDGGFVIGQAPIPSRSVLEVWRYLGVDFMGVATITASRVDLGRALARITKAPLKPQQRLRLLRTYLLPKLTYGLVFGRLTAGRLQELDREVRSAVRSWLRFPPGVPSAYIHAPVKSGGLGIVSLSACIPSLRRQRLLALQGSSWEVARVAAGLDFVRQQLAWCDRATPSAPKPSSSAEFAAALHESVDGKELRQCSESLISSQWVDWASEGIGARDYRNFHAVRVATLPTAVRCSRGSRGMTDTLCRACRSGNEHLYHVVQQCPRTHGGRILRHDAVAKQIAGALSSSGWDVERERLYHMPSDQGKKPDIVAVKPDRSCIILDVQVVNGSMDMEQTWRAKIRKYDRDDLRQAVSELKGVEPNNIRVMAATLSWRGVWCGKSATELRELGISVGVLRGVTRRVLLGSYLNWWSFYRGTSLHPSLPPPPSSSSLIPRAGVG

SEQ ID NO: 24386 - protein, 967 aa, Apolygus lucorum
MAADEVVAVRNGVRNINVYLSERFPTRTVIAIKNLRLKPHYKQLVQEAILANSDGASPASPIAGVDQQSAIQYPSPGTSGLLADLKTEVLRLGGQVGRIEGYESTYLQDLARRAAEGLDNLEDMVAAYLGRIFPRVGDATVTRHQGRPSPRVVLRGGRRAAKQARRREYHRVQSLWRKHPARVAAEVLEEPGEDQVQPPLQEFVDFWEPLLSAPSHNPGERVVPPVSTRDSLRSILCSPVLLDEAHKCRVKNSTSAGPDGVSARRWNKAPNTIKLLILNLLMLAGRPPKALTCTRTVFIPKKGGSGPGGYRPISVSSVVFRHFQKVLASRLQVAGVIGDLQRAFRPADGTAENLTVLQTVISLARIKRRQLHLAALDVAKAFDTVSHFALTDCLRGVGAPSRLIEYVACLYHEGVTVLEAGGEVSGDVRIGRGVRQGDPLSPLLFNLVVDTALGKLPTEVGFDLAPGVRVGALAFADDVILLAETREGLQIALNAFAKQLARCGLVVNPDKCGSVSLVPSGRQHKVKVVDGGFVVGQSPIPSRSVLEVWRYLGVDFMGVATITTSRVDLGRALARVTKAPLKPQQKLRLLRTYLLPKLTYGLVFGRLTAGRLQELDRQVRSAVRSWLKFPPGVPSAYFHAPVKSGGLGIVSLSACIPSLRRQRLLALQGSSWEVARAAADLDFVRQQLAWCDRATPSAPKPSSSAEFAAALHESVDGKELRQCSESLVSSQWVDWASEGIGARDYRHFHAVRMATLPTAVRCSRGSRGTTLPLCRACRSGNEHLYHVVQQCPRTHGGRILRHDAVAKQIAGALSSSGWDVERERLYHMPSDQGKKPDIVALKPDQSCIILDVQVVNGSLDMEQTWRAKIRKYDRDDLRQAVSELKGVVPNNIRVMAATLSWRGVWCGKSATELRELGISVGVLRGITTRVLLGSYLNWWSFYRGTSLHPSLPPPPSSSSLIPRAGVG

SEQ ID NO: 24387 - protein, 816 aa, Apolygus lucorum
MVLHGGRRAAKQARRREYHRVQSLWRKHPARVAAEVLEEPGDDQVQPPLQEFVNVWEPLLSAPSHDPGERVVPPVSTRDSLRSIMCSPVLLDEAHKCRVKNSTSAGPDGVSARRWNNAPKTIKLLILNLLLLAGRPPKALTRARTVFIPKKGGSGPGGYRPISVSSVVFRHFQKVLASSLQVAGVIGDVQRSFRPADGTAENLTVLQTVISLARIKRRQLHLATLDVAKAFDTVSHLALTDCLRGVGAPSRLIEYVACLYHEGVTVLEAGGEVSRDIVIGRGVRQGDPLSPLLFNLVVDTALGKLPTEVGFDLAPGVRVGALAFADDVILLAETREGLQIALNAFAKQLARCGLVVNPDKCGSVSLVPSGRQHKVKVVDGGFVIGQSPIPSRSVLEVWRYLGVDFMGVATITASRVDLGRALARVTKAPLKPQQRLRLLRTYLLPKLTYGLVFGRLTAGRLQELDREVRSAVRSWLKFPPGVPSSYIHAPVKSGGLGIVSLLASIPSLRRQRLLALRGSSWGVARAAADLDFVRQQLAWCDRATPSTPKPSSSAEFAAALHESVDGKELRQCSESLISSQWVDWASEGIGARDYRHFHAVRVASLPTAVRCSRGSRGTSLPLCRACRGGSEHLYHVVQQCPRTHGGRILRHDAVAKQIAGALSSSGWDVERERLYHMPSDQGKKPDIVAVKPDQSCIILDVQVVNGSLDMEQTWRAKIRKYDTNDLRQAVSELKGVAPNNIRVMAATLSWRGVWCGKSATELRELGISVGVLRGITTRVLLGSYLNWWSFYRGTSLHPSLPPPPSSSSLIPRAGVG

SEQ ID NO: 24388 - protein, 1015 aa, Apolygus lucorum
MDNNATRPHNPRQPIGSRGIRGGAQRRPRQGRRPSSPSSSSSSSLLSSSSTASLDHQCAHCERAFTTRSGLGVHIRRKHPVAANDEIDVERVQPRYASEDLRRMAADEVVAVRNGVRNINVYLSERFPTRTVIAIKNLRLKPHYKQLVQEAILANSSGASPASPIAGVDQQSAIQYPSPGTSGLLADLKTEVLRLGGQVGRIEGYESTYLQDLARRAAEGLDNLEDKVAAYLGRIFPRVGDATVTQHQGGPPPRVVLRGGRRAAKQARRREYHRVQSLWRKHPARVAAEVLEEPGEDQVQPPLQEFVDFWEPLLSAPSHNPGERVVPPVSTRDSLRSILCSPVLLDEAHKCRVKNSTSAGPDGVSARRWNKVPNTIKLLILNLLILAGRPPKALTRTRTVFIPKKGGSGPGGYRPISVSSVVFRHFQKVLASRLQVAGVIGDVQRAFRPADGTAENLTVLQTVISLARIKRRQLHLAALDVAKAFDTVSHLALTDCLRGVGAPSRLIEYVACLYREGVTVLEAGGEVSRDIVIGRGVRQGDPLSPLLFNLVVDTALGKLPTEVGFDLSPGVRVGALAFADDVILLAETREGLQIALNAFAKQLSRCGLVVNPDKCGSVSLVPSGRQHKVKVVDGGFVIGQAPIPSRSVLEVWRYLGVDFMGVATITASRVDLGRALARVTKAPLKPQQRLRLLRTYLLPKLTYGLVFGRLTAGRLQELDREVRSAVRSWLRFPPGVPSAYIHAPVKSGGLGIVSLSACIPSLRRQRLLALQGSSWEVARIAAGLDFVRQQLPWCDRATPSAPKPSSSAEFAAALHESVDGKELRQCSESLISSQWVDWASEGIGARDYRNFHAVRVATLPTAVRCSRGSRGMTDTLCRACRSGNEHLYHVVQQCPRTHGGRILRHDAVAKQIAGALSSSGWDVERERLYHMPSDQGKKPDIVAVKPDRSCIILDVQVVNGSMDMEQTWRAKIRKYDRDDLRQAVSELKGVEPNNIRVMAATLSWRGVWCGKSATE

SEQ ID NO: 24389 - protein, 1075 aa, Apolygus lucorum
MCFPVMENIPNEPHNPRRPIGSRGIRGGAQRRPRQGRRPSSPSSSSSSSLPSSSSTASLDHQCAHCERAFTSRSGLGVHVRRKHPVAANEEIDVERVQPKYASEDLRRMAADEVVAVRNGVRNINVYLSERFPRRTVIAIKNLRLKPHYKQLVQEAILANSSGASPASPVAGVDQQSAIQYPSPGTSGLLADLKTEVLRLGGQVGRIEGYESTYLQDLARRAAEGLDNLEEMVAAYLGRIFPRVGDATVTQHQGGHPPRVVLRGGRRAAKQARRREYHRVQSLWRKHPARAAAEVLEEPGEDQVQPPLQEFVDFWEPLLSAPSHNPGERVVPPVSTRDSLRSILCSPVLLDETHKCRVKNSTSAGPDGVSARCWNKAPNTIKLLILNLLMLAGRPPKALTRTRTVFIPKKGGSGPGGYRPISVSSVVFRHFQKVLASRLQVAGVIGDVQRAFWPADGTAENLTVLQTVISLARIKRRQLHLAALDVAKAFDTVSHLALTDCLRGVGAPSRLIEYVACLYHEGVTVLEAGGEVSGDVRIGRGVRQGDPLSPLLFNLVVDTALGKLPTEVGFDLAPGVRVGALAFADDVILLAETREGLQIALNAFAKQLSRCGLVVNPDKCGSVSLVLSGRQHKVKVVDGGFVIGQAPIPSRSVLEVWRYLGVDFMGVATITASRVDLGRALARITKAPLKPQQRLRLLRTYLLPKLTYGLVFGRLTAGRLQELDREVRSAVRSWLRFPPGVPSAYIHAPVKSGGLGIVSLSASIPSLRRQRLLALQGSSWEVARVAAGLDFVRQQLAWCDRATPSAPKPSSSAEFAAALHESVDGKELRQCSESLISSQWVDCSSEGIGARDYRNFHAVCVATLPTAVRCSRGSRGVTDTLCRACRSGNEHLYHVVQQCPRTHGGRILRHDAVAKQIAGALSSSGWDVERERLYHMPSDQGKKPDIVAVKPDRSCIILDVQVVNGSMDMKQTWRAKIRKYDRDDLRQAVSELKGVAPNNIRVMAATLSWRGVWCGKSATELRELGISVGVLRGVTRRVLLGSYLNWWSFYRGTSLHPSLPPPPSSSSLIPRAGVG

SEQ ID NO: 24390 - protein, 1079 aa, Apolygus lucorum
MSFEDPDLHDNLVVQLQVALFVLYYSFHPFVPSYQYTIPTWNVLLKELFVDGCLWLWSQISKSHSGIQISSRAFTSRSGLGVHVRRKHPVAANEEIDIERVQPRYASEDLRRMAADEVVAVRNGVRNINVYLSERFPTRTVIAIKNIRLKPHYKQLVQEAILANSGGASPASPVAGMDQQSAIQYPSPGTSGLLADLKTEVLRLGGQVGRIEGYESTYLQDLARRAAEGLDNLEDMVAAYLGRIFPRVGDATVTQHQGGPPPRVVLRGGRRAAKQARRREYHRVQSLWRKHPARVAAEVLEEPGEDQVQPPLQEFVDFWEPLLSAPSHNPGERVVPPVSTRDSLRSILCSLVLLDEAHKCRVKNSTSAGPDGVSARRWNKAPNTIKLLILNLLMLAGRPPKALTRTRTVFIPKKGGSGPGGYRPISVSSVVFRHFQKVLASRLQVAGVIGDVQRAFRPADGTAENLTVLQTVISLARIKRRQLHLAALDVAKAFDTVSHLALTDCLRGVGAPSRLIEYVACLYHEGVTVLEAGGEVSGDVRIGRGVRQGDPLSPLLFNLVVDTALGKLPTEVGFDLAPGVRVGALAFANDVILLAETREGLQIALNAFAKQLSRCGLVVNPDKCGSVSLVPSGRQHKVKVVDGGFVIGQAPIPSRSVLEVWRYLGVDFMGVATITASRVDLGRALARITKAPLKPQQRLRLLRTYLLPKLTYGLVFGRLTAGRLQELDREVRSAVRSWLRFPPGVPSAYIHAPVKSGGLGIVSLSACIPSLRRQRLLALQGSSWEVARVAAGLDFVRQQLAWCDRATPSAPKPSSSAEFAAALHESVDGKELRQCSESLISSQWVDWASEGIGARDYRNFHAVRVATLPTAVRCSRGSRGMTDTLCRACRSGNEHLYHVVQQCPRTHGGRILRHDAVAKQIAGALSSSGWDVERERLYHMPSDQGKKPDIVAVKPDRSCIILDVQVVNGSMDMEQTWRAKIRKYDRDDLRQAVSELKGVEPNNIRVMAATLSWRGVWCGKSATELRELGISVGVLRGVTRRVLLGSYLNWWSFYRGTSLHPSLPPPPSSSSLIPRAGVG

SEQ ID NO: 24391 - protein, 967 aa, Apolygus lucorum
MAADEVVAVRSGVRNINVYLSERFPMRTVIAIKNIRLKPHYKQLVQEAILANSGGASPASPIADVEQRPAIQYPSPGTSGLLADLKTEVLRLGGQVGRIEGYESTYLQDLARRAAEGLDNLENEVAAYLGRIFPRVGDATVTQHQGGPPPRVVLRGGRRAAKQARRREYHRVQSLWRKHPARVAAEVLEEPGENQVQPPLQEFVDFWEPLLSAPSHDPGERVVPPVSTRDSLRRVMCSPVLSDEAHKCRVKNSTSAGPDGISARRWNKAPKTIKLLVLNLLLLAGRPPKALTRARTVFIPKKGGSGPGGYRPISVSSVVFRHFQKVLASRLQVAGIIGDVQRAFRPADGTAENLTVLQTVISLARMKRRQLHLAALDVAKAFDTVSHLALTDCLRGVGAPSRLIEYVACLYQEGVTVLEAGGEVSGDVRIGRGVRQGDPLSPLLFNLVVDTALGKLPTEVGFDLAPGVRVGALAFADDVILLAETREGLQIALNAFAKQLARCGLVVNPDKCGSVSLVPSGRQHKVKVVDGGFVIGQSPIPSRSVLEVWRYLGVDFMGVATISASRVDLGRALARVTKAPLKPQQKLRLLRTYLLPKLTYGLVFGRLTAGRLQELDRQVRSAVRSWLRFPPGVPSAYVHAPVKSGGLGIVSLSACIPSLRRQRLLALQGSSWEVARAAADLDFVRQQLAWCDRATPSAPKPSSSAEFAAALHESVDGKELRQCSESPVSSQWVDWASEGIGARDYRHFHAVCIATLPTAVRCSRGSRGTTLPLCRACRSGNEHLYHVVQQCPRTHGGRILRHDAVAKQIAGALSSSGWDVERERLYHMPSDQGKKPDIIAVKPDQSCIILDVQVVNGSLDMEQTWRAKIRKYDRNDLRQAVSELKGVAPNNIRVMAATLSWRGVWCRKSATELRELGISVGVLRGITTRVLLGSYLNWWSFYRGTSLHPSLPPPPSSSSLIPRAGVG

SEQ ID NO: 24392 - protein, 1075 aa, Apolygus lucorum
MRFPVMNTEPTEPHNPRQPIGSRGIRGGAQRRPRQGRRPSSPSSSSSSSLPSSSSTASLNHQCAHCERAFTTRSGLGLHIRRKHPVAANAAIDIERIQPRYASEELRRMAADEAVAVPNGVRNINVYLNERFPTRTVIAIKNIRLKPHYKQLVQEAILANSSGASPASPIADVEQQPAIQYPSPGTSGLLADLKTEVLRLGGQVGRIEGYESTYLQDLVRRAVEGLDNLEDEVAAYLGRIFPQVGDATVTRHQGGPPPRMVLRGGRRAAKQARRREYHRVQSLWRKHPARVAAEVLEEPGENQVQPPLQEFVDFWEPLLSAPSHDPGECVVPSVSTRDSLRSIMCLPVLSDEAHKCRVRNSTSAGPDGVSARRWNKAPKTIKLLILNLLLLAGRPPKALTRTRTVFIPKKGGSGPGGYRPISVSSVVFRHFQKVLASRLQVAGVIGDVQRAFRPADGTAENLTVLQTVISLARIKRRQLHLAALDVAKAFDTVSHLALTDCLRGVGAPSRLIEYVACLYQEGVTVLEAGGEVSGDIRIGRGVRQGDPLSPLLFNLVVDTALGKLPTEVGFDLAPGVRVGALAFADDVILLAETREGLQIALNAFAKQLAGCGLVVNPDKCGSVSLVPSGRQHKVRVVDGGFVVGQSSIPSRSVLEVWRYLGVDFMGVATITASRVDLGRALARVTKAPLKPQQKLRLLRTYLLPKLTYGLVFGRLTAGRLQELDREVRSAVRSWLKFPPGVPSAYFHAPVKSGGLGIVSLSACIPSLRRQRLLALQGSSWEVARAAADLDFVRQQLAWCDRATPSAPKPSSSAEFAAALHESVDGKELRQCSESLLSSQWVDWASEGIGARDYRHFHAIRVASLPTAVRCSRGSRGTTLPLCRACRSGNEHLYHVVQQCPRTHGGRILRHDAVAKQIAGALSSSGWDVERERLYHMPSDQGKKPDIVAVKPDQSCIILDVQVVNGSLDMEQTWRAKIRKYDTNDLRQAVSELKGVAPNNIRVMAATLSWRGVWCGKSATELRELGISVGVLRGITTRVLLGSYLNWWSFYRGTSLHPSLPPPPSSSSLIPRAGVG

SEQ ID NO: 24393 - protein, 1070 aa, Apolygus lucorum
MDHNHQLPHNPRQPIGSRGIRGGTQRRPRQGRLPSSPSSSSSSSLPSSSSTASLDHQCAHCERAFTSRSGLGVHVRRKHPVAANAAIEIERVQPRYASEDLRRMAADEVVAVRNGVRNINVYLSERFPMRTVIAIKNLRLKPHYKQLVQEAILANSGGASPASPVAGMDQQSAIQYPSPGTSGLLADLKTQVLRLGGQVGRIEGYESTYLQDLARRAAEGLDNLEDEVAAYLGRIFPRVGDATVAQHQGGPPPRVVLRGGRRAAKQARRREYHWVQSLWRKHPARVAAEVLEGPGEDQVQPPLQEFVDFWEPLLSAPSHNPGERVVPPVSTRDSLRSILCSPVLLDEAHKCRVKNSTSAGPDGIPARRWNKAPNTIKLLILNLLMLAGRPPKALTRTRTVFIPKKGGSGPGGYRPISVSLVVFRHFQKVLASRLQVAGVIGDVQRAFRPADGTAENLTVLQTVISLARIKRRQLHLAALDVAKAFDTVSHLALTDCLRGVGAPSRLIEYVACLYHEGVTVLEAGGEVSGDVRIGRGVRQGDPLSPLLFNLVVDTALGKLPTEVGFDLAPGVRVGALAFADDVILLAETREGLQIALNAFAKQLSRCGLVVNPDKCGSVSLVPSGRQHKVKVVDGGFVIGQAPIPSRSVLEVWRYLGVDFMGVATITASCVDLGRALARITKAPLKPQQRLRLLRTYLLPKLTYGLVFGRLTAGRLQELDREVRSAVRSWLRFPPGVPSAYIHAPVKSGGLGIVALSACIPSLRRQRLLALQGSSWEVARVAAGLDFVRQQLAWCDRATPSAPKPSSSAEFAAALHESVDGKELRQCSESLISSQWVDWASEGIGARDYRNFHAVRVATLPTAVRCSRGSRGMTDTLCRACRSGNEHLYHVVQQCPRTHGGRILRHDAVAKQIAGALSSSGWDVERERLYHMPSDQGKKPDIVAVKPDRSCIILDVQVVNGSMDMEQTWRAKIRKYDRDDLRQAVSELKGVAPNNIRVMAATLSWRGVWCGKSATELRELGISVGVLRGVTRRVLLGSYLNWWSFYRGTSLHPSLPPPPSSSSLIPRAGVR

SEQ ID NO: 24394 - protein, 1095 aa, Apolygus lucorum
MTLWRIGREPLSTGSLALLNKRPPVMDETNEEPHNPRLPIGPRGSRGGAQRRPRQGRRPSSPSSSSSSSLPSSSSTASLNHQCAHCERAFTTRSGLGLHVRRKHPVAANAAIDIERIQHRYASEELRRMAADEAVAVRNGVRNINVYLSERFPMRTVIAIKNIRLKPHYKQLVQEVILANSSGASPASPVADVEQQPAIQHPSPGTSGLLADLKTEVLRLGGQVGRIEGYESTYLQDLARRAAEGLDNLENEVAAYLGRIFPRVGDATVTHHQEGPPPRVVLRGGRRAAKQARRREYHRVQSLWRKHPARVGAEVLEEPGENQVQPPLQEFVDFWEPLLSAPSHDPGERVVPPVSTRDSLRSIMCSPVLSDEAHKCRVKNSTSAGPDGISARRWNKAPRTIKLLLLNLLLLAGRPPKALTRTRTVFIPKKGGSGPGGYRPISVSSVVFLHFQKVLASRLQVAGIIGDVQRAFRPADGTAENLTVLQTVISLARMKRRQLHLAALDIAKAFDTVSHFALTDCLRGVGAPSRLIEYVACLYHEGVTVLEAGGEVSGDVRIGRGVRQGDPLSPLLFNLVVDTALGKLPTEVGFDLAPGVRVGALAFADDVILLAETREGLQIALNAFAKQLARCGLVVNPDKCGSVSLVPSGRQHKVKVVDGGFVIGQSPIPSRSVLEVWRYLGVDFMGVATISASRVDLGRALDRVTKAPVKPQQKLRLLRTYLLPKLTYGLVFGRLTAGRLQELDRQVRSAVRSWLRFPPGVPSAYVHAPVKSGGLGVVSLSACIPSLRRQRLLALQGSSWEVARAAADLDFVRQQLAWCDRATPSAPKPSSSAEFAAALHESVDGKELRQCSESPVSSQWVDWASEGIGARDYRHFHAVRMATLPTAVRCSRGSRGTTLPLCRACRSGNEHLYHVVQQCPRTHGGRILRHDAVAKQIAGALSSSGWDVERERLYHMPSDQGKKPDIVAVKPDQSCIILDVQVVNGSLDMEQTWRAKIRKYDRNDLRQAVSELKGVAPNNIRVMAATLSWRGVWCGKSATELRELGISVGVLRGITTRVLLGSYLNWWSFYRGTSLHPSLPPPPSSSSLIPRAGVG

SEQ ID NO: 24395 - protein, 938 aa, Apolygus lucorum
MRTVIAIKTIRLKPHYKQLVQEAILANSSGASPASPVADVEQQPAIQYPSPGTSGLLADLKTEVLRLGGQVGRIKGYESTYLQGLARRAAEGLDNLENEVAAYLGRIFPRVGDATVTQHQGGPPPGVVLRGGRRAAKQARWREYHRVQSLWRKHPARVAAVVLEEPGENQVQPTLQEFVDFWEPLLSAPSHDPGERVVPPVSTRDSLRGIMCSPVLSDEAHKCRVKNSTSAGPHGISARRWNKAPKTIKLLVLNLLLLAGRPPKALTRARTVFIPKKGGSGPGGYRPISVSSVVFRHFQKVLASRLQVAGIIGDVQRAFWPANGTAENLTVLQTVISLARMKRRQLHLAALDVAKAFDTVSHLALTDCLRGVGAPSRLIEYVACLYQEGVTVLEAGGEVSGDVQIGRGVRQGDPLSPLLFNMVVDTALGKLPTEVGFDLAPGVRVGALAFADDVILLAETREGLQIALNAFAKQLARCGLVVNPDKCGSVSLVPSGRQHKVKVVDGGFVMGQSPIPSRSVLEVWRNLGVDFMGVATISASRVDLGRALARVTKAPLKPQQKLRLLRTYLLPKLTYGLVFGRLTEGRLQKLDRQVRSAVRSWLRFPPGVPSAYVHAPVKSGGLGIVSLSACIPSLRRQRLLALQGSSWEVARAAADLDFVRQQLAWCDRATPSAPKPSSSAEFAAALHESVDGKELRQCSESPVSSQWVDWASEGIGARDYRHFHAVRMATLPTVVRCSRGSRGTTLPLCRACRSGNEHLYHVVQQCPQTHGGRILRHDAVAKQIAGALSSSGWDVERERLYHMPSDQGKKPDIVAVKPDQSCIILDVQDVNGSLDMEQTWRAKMRKYDRDDLRQAVSELKGVAPNNIRVMAATLSWRGKSATELRELGISVGVLRGITTRVLLGSYLNWWSFYRGTSLHPSLPPPPSSSSLIPRAGVG

SEQ ID NO: 24396 - protein, 1095 aa, Apolygus lucorum
MTLWRLGRGPLLTGSLTLHYKRPPVMENEQDQPHNPRQPIGSRGIRGGAQRRPRQGRRPSSPSSSSSSSLPSSSSTASLNHQCAHCERAFTTRSGLGLHIRRKHPVAANAAIDIERIQPRYASEELRRMAADEAVAVRNGVRNINVYLNERFPTRTVIAIKNIRLKPHYKQLVQEAILANSSGASPASPVADVEQQPAIQYPSPGTSGLLADLKTEVLRLGGQVGRIEGYESTYLQDLVRRAVEGLDNLEDEVAAYLGRIFPRVGDATVTRHQGGPPPRMVLRGGRRAAKQARRREYHRVQSLWRKHPARVAAEVLEEPGENQVQPPLQEFVDFWEPLLSAPSHDPGECVVPPVSTRESLRSIMCSPVLSDEAHKCRVRNSTSAGPDGVSARRWNKAPKTIKLLFLNLLLLAGRPPKALTRTRTVFIPKKGGSGPGGYRPISVSSVVFRHFQKVLASRLQVAGVIGDVQRAFRPADGTAENLTVLQTVISLARIKRRQLHLAALDVAKAFDTVSHLALTDCLRGVGAPSRLIEYVACLYQEGVTVLEAGGEVSGDVRIGRGVGQGDPLSPLLFNLVVDTALGKLPTEVGFDLAPGVRVGALAFADDVILLAETREGLQIALNAFAKQLAGCGLVVNPDKCGSVSLVPSGRQHKVKVVDGGFVVGQSPIPSRSVLEVWRYLGVDFMGVATITASRVDLGRALARVTKAPLKPQQKLRLLRTYLLPKLTYGLVFGRLTAGRLQELDREVRSAVRSWLKFPPGVPSAYVHAPVKSGGLGIVSLSACIPSLRRRRLLALQGSSWEVARAAADLDFVWQQLAWCDRATPSAPKPSSSAEFAAALHESVDGKELRQYSESLVSSQWVDWASEGIGARDYRHFHAIRVASLPTAVRCSRGSRGTTLPLCRACRSGNEHLYHAVQQCPRTHGGRILRHDAVAKQIAGALSSSGWDVERERLYHMPSDQGKKPDIVAVKPDQSCIILDVQVVNGSLDMEQTWRAKIRKYDTNDLRQAVSELKGVAPNNIRVMAATLSWRGVWCGKSATELRELGISVGVLRGITTRVLLGSYLNWWSFYRGTSLHPSLPPPPSSSSLIPRAGVG

SEQ ID NO: 24397 - protein, 1023 aa, Apolygus lucorum
MRIPVMEHNPQLPHNPRQPIGSRGIRGGAQRRPRQGRRPSSPSSSSSSSLPSSSSTASLDYQCAHCERAFTSRSGLGVHVRRKHPVAANEEIDIERVQPRYASEDLRRMAADEVVAVRNGVRNINVYLSERFPTRTVIAIKNIRLKPHYKQLVQEAILANSGGASPASPVAGMDQQSAIQYPSPGTSGLLADLKTEVLRLGGQVGRIEGYESTYLQDLARRAAEGLDNLEDMVAAYLGRIFPRVGDATVTQHQGGPPPRVVLRGGRRAAKQARRRAYHRVQSLWRKHPARVAAEVLEEPGEDQVQPPLQEFVDFWEPLLSAPSHNPGERVVPPVSTRDSLRSILCSPVLLDEAHKCRVKNSTSAGPDGVSARRWNKAPNTIKLLILNLLMLAGRPPKALTRTRNVFIPKKGGSGPGGYRPISVSSVVFRHFQKVLASRLQVAGVIGDVQRAFRPADGTAENLTVLQTVISLARIKRRQLHLAALDVAKAFDTVSHLALTDCLRGVGAPSRLIEYVACLYHEGVTVLEAGGEVSGDVRIGRGVRQGDPLSPLLFNLVVDTALGKLPTEVGFDLAPGVRVGALAFADDVILLAETREGLQIALNAFAKQLSRCGLVVNPDKCGSVSLVPSGRQHKVKVVDGGFVIGQAPIPSRSVLEVWRYLGVDFMGVATITASRVDLGRALARITKAPLKPQQRLRLLRTYLLPKLTYGLVFGRLTAGRLQELDREVRSAVRSWLRFPPGVPSAYIHAPVKSGGLGIVSLSACIPSLRRQRLLALQGSSWEVARVAAGLDFVRQQLAWCDRATPSAPKPSSSAEFAAALHESVDGKELRQCSESLISSQWVDWASEGIGARDYRNFHAVRVATLPTAVRCSRGSRGMTDTLCRACRSGNEHLYHVVQQCPRTHGGRILRHDAVAKQIAGALSSSGWDVERERLYHMPSDQGKKPDIVAVKPDRSCIILDVQVVNGSMDMEQTWRAKIRKYDRDDLRQAVSELKGVEPNNIRVMAATLSWRGVWCGKSATELRE

SEQ ID NO: 24398 - protein, 1070 aa, Apolygus lucorum
MIDEADEPHNPRQPIGSRGIRGGAQRRPRQGRRPSSPSSSSSSSLPSSSSTASLDHQCAHCERAFTSRSGLGVHVRRKHPVAANAAIEIERVQPRYASEDLRRMAADEVVAVRNGVRNINVYLSERFPTRTVIAIKNLRLKPHYKQLVQEAILANSGGASPASPIAGVDQQSAIQYPSPGTSGLLADLKTEVLRLGGQVGRIEGYESTYLQDLARRAAEGLDNLEDMVAAYLGRIFPRVGDATVTRHQGRPPPRVVLRGGRRAAKQARRQEYHRVQSLWRKHPARVAAEVLEEPGEDQVQPPLQEFVDFWEPLLSAPSHNPGERVVPPVSTRDSLRSILCSPVLLDEAHKCRVKNSTSAGPDGVSARRWNKAPNTIKLLILNLLMLAGRPPKALTRTRTVFIPKKGGSGPGGYRPISVSSVVFRHFQKVLASRLQVAGVIGDVQRAFRPADGTAENLTVLQTVISLARIKRRQLHLAALDVAKAFDTVSHFALTDCLRGVGAPSRLIEYVACLYHEGVTVLEAGGEVSGDVRIGRGVRQGDPLSPLLFNLVVDTALGKLPTEVGFDLAPGVRVGALAFADDVILLAETREGLQIALNAFAKQLARCGLVVNPDKCGSVSLVPSGRQHKVKVVDGGFVVGQSPIPSRSVLEVWRYLGVDFMGVATITTSRVDLGRALARVTKAPLKPQQKLRLLRTYLLPKLTYGLVFGRLTAGRLQELDRQVRSAVRSWLKFPPGVPSAYFHAPVKSGGLGIVSLSACIPSLRRQRLLALQGSSWEVARAAADLDFVRQQLAWCDRATPSAPKPSSSAEFAAALHESVDGKELRQCSESLVSSQWVDWASEGIGARDYRHFHAVRMATLPTAVRCSRGSRGTTLPLCRACRSGNEHLYHVVQQCPRTHGGRILRHDAVAKQIAGALSSSGWDVERERLYHMPSDQGKKPDIVAVKPDQSCIILDVQVVNGSLDMEQTWRAKIRKYDRDDLRQAVSELKGVVPNNIRVMAATLSWRGVWCGKSATELRELGISVGVLRGITTRVLLGSYLNWWSFYRGTSLHPSLPPPPSSSSLIPRAGVG

SEQ ID NO: 24399 - protein, 967 aa, Apolygus lucorum
MAADEVVAVRNGVRNINVYLSERFPTRTVIAIKNLRLKPHYKQLVQEAILANSGGASPASPIAGVDQQSAIQYPSPGTSGLLADLKTEVLRLGGQVGRIEGYESTYLQDLARRAAEGLDNLEDMVAAYLGRIFPRVGDATVTRHQGRPPPRVVLRGGRRAAKQARRQEYHRVQSLWRKHPARVAAEVLEEPGEDQFQPPLQEFVDFWEPLLSAPSHNPGERVVPPVSTRDSLRSILCSPVLLDEAHKCRVKNSTSAGPDGVSARRWNKAPNTIKLLILNLLMLAGRPPKALTRTRTVFIPKKGGSGPGGYRPISVSSVVFRHFQKVLASRLQVAGVIGDVQRAFRPADGTAENLTVLQTVISLARIKRRQLHLAALDVAKAFDTVSHFALTDCLRGVGAPSRLIEYVACLYHEGVTVLEAGGEGSGDVRIGRGVRQGDPLSPLLFNLVVDTALGKLPTEVGFDLAPGVRVGALAFADDVILLAETREGLQIALNAFAKQLARCGLVVNPDKCGSVSLVPSGRQHKVKVVDGGFVVGQSPIPSRSVLEVWRYLGVDFMGVATITTSRVDLGRALARVTKAPLKPQQKLRLLRTYLLPKLTYGLVFGRLTAGRLQELDRQVRSAVRSWLKFPPGVPSAYFHAPVKSGGLGIVSLSACIPSLRRQRLLALQGSSWEVARAAADLDFVRQQLAWCDRATPSAPKPSSSAEFAAALHESVDGKELRQCSESLVSSQWVDWASEGIGARDYRHFHAVRMATLPTAVRCSRGSRGTTLPLCRACRSGNEHLYHVVQQCPRTHGGRILRHDAVAKQIAGALSSSGWDVERERLYHMPSDQGKKPDIVAVKPDQSCIILDVQVVNGSLDMEQTWRAKIRKYDRDDLRQAVSELKGVVPNNIRVMAATLSWRGVWCGKSATELRELGISVGVLRGITTRVLLGSYLNWWSFYRGTSLHPSLPPPPSSSSLIPRAGVG

SEQ ID NO: 24400 - protein, 1070 aa, Apolygus lucorum
MDQTPEMPHNPRQPIGSRGIRGGAQRRPRQGRRPSSPSSSSSSSQPSSSSTASLNHQCAHCERAFTTRSGLGLHISRKHPVAANAAIDIERIQHRYASEELRRMAADEAVAVRNGVRNINVYLNERFPTRTVIAIKNIRLKPHYKQLVQEAILANSSGASPASPIADVEQQPAIQYPSPGTSGLLADLKTEVLRLGGQVGRIEGYESTYLQDLVRRAAEGLDNLEDEVAAYLGRIFPRVGDATVTQHQGGPPPRVVLRGGRRAAKQARRREYHRVQSLWRKHPARVAAEVLEEPGEKQVQPPLQEFVDFWEPLLSAPSHDPGERVVSPVSTRDSLRSIMCSPVLSDEAHKCRVKNSTSAGPDGVSARRWNKAPKTIKLLILNLLLLAGRPPKALTRTRTVFIPKKGGSGPGGYRPISVSSVVFRHFQKVLASRLQVAGVIGDVQRAFRSADGTAENLTVLQTVISLARIKRRQLHLAALDVAKAFDTVSHLALTDCLRGVGAPSRLIEYVACLYQEGVTVLEAGGEVSGDIRIGRGVRQGDPLSPLLFNLVVDTALGKLPTEVGFDLAPGVRVGALAFADDVILLAETREGLQIALNAFAKQLARCGLVVNPDKCGSVSLVPSGRQHKVKVVDGGFVVGQSPIPSRSVLEVWRYLGVDFMGVATITTSRVDLGRALARVTKAPLKPQQKLRLLRTYLLPKLTYGLVFGRLTAGRLQQLDREVRSAVRSWLKFPPGVPSAYFHAPVKSGGLGIVSLSACIPSLRRRRLLALQGSSWEVARAAADLDFVRQQLAWCDRATPSAPKPSSSAEFAAVLHESVDGKELRQCSESLVSSQWVDWASEGIGARDYRHFHAIRVASLPTAVRCSRGSRGTTLPLCRACRSGNEHLYHVVQQCPRTHGGRILRHDAVAKQIAGALSSSGWDVERERLYHMPSDQGKKPDIVAVKPDQSCIILDVQVVNGSLDMEQTWRAKIRKYDTNDLRQAVSELKGVAPNNIRVMAATLSWRGVWCGKSATELRELGISVGVLRGITTRVLLGSYLNWWSFYRGTSLHPSLPPPPSSSSLIPRAGVG

SEQ ID NO: 24401 - protein, 1070 aa, Apolygus lucorum
MEPTTNTPHNPRLPIGTRGSRGGAQRRPRQGRRPSSPSSSSSSSLPSSSSTASLDHQCAHCERAFTSRSGLGVHVRRKHPVAANEEINVERVQPRYASEDLRRMAADEVVAVRNGVRNINVYLSERFPTRTVIAIKNLRLKPHYKQLVQDAILANSSGASSASPVAGVDQQSAIQYPSPGTSGLLADLKTEVLRLGGQVGRIEGYESTYLQDLARRAVEGLDNLEDKVAAYLGRIFPRVGDATVTQHQGGPPPRVVLRGGRRAAKQARRREYHRVQSLWRKHPARVAAEVLEEPGEVQVQPPLQEFVDFWEPLLSAPSHNPGERVVPPVSTRDSLRSILCSPVLLDEAHKCRVKNSTSAGPDGISARRWNKAPNTIKLLILNLLILAGRPPKALTRTRTVFIPKKGGSGPGGYRPISVSSVVFRHFQKVLASRLQVAGVIGDVQRAFRPADGTAENLTVLQTVISLARIKRRQLHLAALDVAKAFDTVSHLALTDCLRGVGAPSRLIEYVACLYHEGVTVLEAGGEVSGDIRIGRGVRQGDPLSPLLFNLVVDTALGKLPTEVGFDLAPGVRVGALAFADDVILLAETREGLQIALNAFAKQLSRCGLVVNPDKCGSVSLVPSGRQHKVKVVDGGFVIGQAPIPSRSVLEVWRYLGVDFMGVATITASRVDLGRALARITKAPLKPQQRLRLLRTYLLPKLTYGLVFGRLTAGRLQELDREVRSAVRSWLRFPPGVPSAYIHAPVKSGGLGIVSLSACIPSLRRQRLLALQGSSWEVARVAAGLDFVRQQLAWCDRATPSAPKPSSSAEFAAALHESVDGKELRQCSESLISSQWVDWASEGIGARDYRNFHAVRVATLPTAVRCSRGSRGMTDTLCRACRSGNEHLYHVVQQCPRTHGGRILRHDAVAKQIAGALSSSGWDVERERLYHMPSDQGKKPDIVAVKPDRSCIILDVQVVNGSMDMEQTWRAKIRKYDRDDLRQAVSELKGVAPNNIRVMAATLSWRGVWCGKSATELRELGISVGVLRGVTRRVLLGSYLNWWSFYRGTSLHPSLPPPPSSSSLIPRAGVG

SEQ ID NO: 24402 - protein, 967 aa, Apolygus lucorum
MAADEAVAVRNGVRNINVYLNERFPTRTVIAIKNIRLKPHYKQLVQEAILANSSGASPASPIADVEQQPAIQYPSPGTSGLLADLKTEVLRLGGQVGRIEGYESTYLQDLVRRAAEGLDNLEDEVAAYLGRIFPRVGDVTVTQHQGGPPPRVVLRGGRRAAKQARRREYHRVQSLWRKHPARVAAEVLEEPGENQVQPPLQEFVDFWEPLLSAPSHDPGECVVPPVSTRDSLRSIMCSPVLSDEAHKCRVKNSTSAGPDGVSARRWNKAPKTIKLLILNLLLLAGRPPKALTRTRTVFIPKKGGSGPGGYRPISVSSVVFRHFQKVLASRLQVAGVIGDVQRAFRSADGTAENLTVLQTVISLARIKRRQLHLAALDVAKAFDTVSHLALTDCLRGVGAPSRLIEYVACLYQEGVTVLEAGGEVSGDIRIGRGVRQGDPLSPLLFNLVVDTALGKLPTEVGFDLAPGVRVGALAFADDVILLAETREGLQIALNAFAKQLARCGLVVNPDKCGSVSLVPSGRQHKVKVVDGGFVVGQSPIPSRSVLELWRYLGVDFMGVATITTSRVDLGRALARVTKAPLKPQQKLRLLRTYLLPKLTYGLVFGRLTAGRLQQLDREVRSAVRSWLKFPPGVPSAYFHAPVKSGGLGIVSLSACIPSLRRRRLLALQGSSWEVARAAADLDFVRQQLAWCDRAAPSAPKPSSSAEFAAALHESVDGKELRQCSESLVSSQWVDWASEGIGARDYRHFHAIRVASLPTAVRCSRGSRGTTLPLCRACRSGNEHLYHVVQQCPRTHGGRILRHDAVAKQIAGALSSSGWDVERERLYHMPSDQGKKPDIVAVKPDQSCIILDVQVVNGSLDMEQTWRAKIRKYDTNDLRQTVSELKGVAPNNIRVMAATLSWRGVWCGKSATELRELGISVGVLRGITTRVLLGSYLNWWSFYRGTSLHPSLPPPPSSSSLIPRAGVG

SEQ ID NO: 24403 - protein, 1070 aa, Apolygus lucorum
MINEADQPHNPRQPIGSRGIRGGAQRRPRQGRRPSSPSSSSSSSLPSSSSTASLDHQCAHCERAFTSRSGLGVHVRRKHPVAANAAIEIERVQPRYASEDLRRMAADEVVAVRNGVRNINVYLSERFPTRTVIAIKNLRLKPHYKQLVQEAILANSGGASPASPIAGVDQQSAIQYPSPGTSGLLADLKTEVLRLGGQVGRIEGYESTYLQDLARRAAEGLDNLEDTVAAYLGRIFPRVGDATVTRHQGRPPPRVVLRGGRRAAKQARRQEYHRVQSLWRKHPARVAAEVLEEPGEDQVQPPLQEFVDFWEPLLSAPSYNPGERVVPPVSTRDSLRSILCSPVLLDEAHKCRVKNSTSAGPDGVSARRWNKAPNTIKLLILNLLMLAGRPPKALTRTRTVFIPKKGGSGPGGYRPISVSSVVFRHFQKVLASRLQVAGVIGDVQRAFRPADGTAENLTVLQTVISLARIKRRQLHLAALDVAKAFDTVSHFALTDCLRGVGAPSRLIEYVACLYHEGVTVLEAGGEVSGDVRIGRGVRQGDPLSPLLFNLVVDTALGKLPTEVGFDLAPGVRVGALAFADDVILLAETREGLQIALNAFAKQLARCGLVVNPDKCGSVSLVPSGRQHKVKVVDGGFVVGQSPIPSRSVLEVWRYLGVDFMGVATITTSRVDLGRALARVTKAPLKPQQKLRLLRTYLLPKLTYGLVFGRLTAGRLQELDRQVRSAVRSWLRFPPGVPSAYFHAPVKSGGLGIVSLSACIPSLRRQRLLALQGSSWEVARAAADLDFVKQQLAWCDRATPSAPKPSSSAEFAAALHESVDGKELRQCSESLVSSQWVDWASEGIGARDYRHFHAVRMATLPTAVRCSRGSRGTTLPLCRACRSGNEHLYHVVQQCPRTHGGRILRHDAVAKQIAGALSSSGWDVERERLYHMPSDQGKKPDIVAVKPDQSCIILDVQVVNGSLDMEQTWRAKIRKYDRDDLRQAVWELKGVVPNNIRVMAATLSWRGVWCGKSATELRELGISVGVLRGITTRVLLGSYLNWWSFYRGTSLHPSLPPPPSSSSLIPRAGVG

SEQ ID NO: 24404 - protein, 1070 aa, Apolygus lucorum
MENNPEEPHNPRLPIGPRGSRGGAQRRPRQGRRPSSPSSSSSSSLPSSSSTASLNHQCAHCERAFTTRSGLGLHVRRKHPVAANAAIDIERIQHRYASEELRRMAADEAVAVRNGVRNINVYLSERFPMRTVIAIKNIRLKPHYKQLVQEVILANSSGASPASPVADVEQQPAIQHPSPGTSGLLADLKTEVLRLGGQVGRIEGYESTYLQDLARRAAEGLDNLENEVAAYLGRIFPRVGDATVTHHQGGPPPRVVFRGGRRAAKQARRREYHRVQSLWRKHPARVAAEVLEEPGENQVQPPLQEFVDFWEPLLSAPSHDPGERVVPPVSTRDSLRSIMCSPVLSDEAHKCRVKNSTSAGPDGISARRWNKAPRTIKLLLLNLLLLAGRPPKALTRTRTVFIPKKGGSGPGGYRLISVSSVVFRHFQKVLASRLQVAGIIGDVQRAFRPADGTAENLTVLQTVISLARMKRRQLHLAALDVAKAFDTVSHFALTDCLRGVGAPSRLIEYVACLYHEGVTVLEAGGEVSGDVRIGRGVRQGDPLSPLLFNLVVDTALGKLPTEVGFDLAPGVRVGALAFADDVILLAETREGLQIALNAFAKQLARCGLVVNPDKCGSVSLVPSGRQHKVKVVDGGFVIGQSPIPSRSVLEVWRYLGVDFMGVATISASRVDLGRALDRVTKAPLKPQQKLRLLRTYLLPKLTYGLVFGRLTAGRLQELDRQIRSAVRSWLRFPPGVPSAYVHAPVKSGGLGVVSLSACIPSLRRQRLLALQGSSWEVARAAADLDFVRQQLAWCDRATPSAPKPSSSAEFAAALHESVDGKELRQCSESPVSSQWVDWASEGIGARDYRHFHAVRMATLPTAVRCSRGSRGTTLPLCRACRSGNEHLYHVVQQCPRTHGGRILRHDAVAKQIAGALSSSGWDVERERLYHMPSDQGKKPDIVAVKPDQSCIILDVQVVNGSLDMEQTWRAKIRKYDRNDLRQAVSELKGVAPNNIRVMAATLSWRGVWCGKSATELRELGISVGVLRGITTRVLLGSYLNWWSFYRGTSLHPSLPPPPSSSSLIPRAGVG

SEQ ID NO: 24405 - protein, 899 aa, Apolygus lucorum
MVRMIYWRGGSRPSSQMTGQLTDQLLQVGRIEGYESTYLQDLVRRAAEGLDNLEDEVAAYLGRIFPRVGDATVTQHQGGPPPRVVLRGGRRAAKQARRQEYHRVQSLWRKHPARVAAEVLEEPGENQVQPPLQEFVDFWEPLLSAPSHDPGEHVVPPVSTRDSLRSILCSPVLLDEAHKCRVKNSTSAGPDGVSARRWNKAPKTIKLLILNLLLLAGRPPKALTRTQTVFIPKKGGSGPGGYRPISVSSVVFRHFQKVLASRLQVAGVIGDVQRAFRPADGTAENLTVLQTVISLARIKRRQLHLAALDVAKAFDTVSHLALTDCLRGVGAPSRFIEYVACLYQEGVTVLEAGGEVSGDIRIGRGVRQGDPLSPLLFNLVVDTALGKLPTEVGFDLAPGVRVGALAFADDVILLAETREGLQIALNAFAKQLARCGLVVNPDKCGSVSLVPSGRQHKVKVVDGGFVVGQSPIPSRSVLEVWRYLGVDFMGVATITTSRVDLGRALARVTKAPLKPQQKLRLLRTYLLPKLTYGLVFGRLTAGRLQQLDREVRSAVRSWLKFPPGVPSAYFHAPVKSGGLGIVSLSACIPSLRRRRLLALQGSSWEVPRAAADLDFVRQQLAWCDRATPSAPKPSSSAEFAAALHESVDGKELRQCSESLVSSQWVDWASEGIGARDYRHFHAIRVASLPTAVRCSRGSRGTTLPLCRACRSGNEHLYHVVQQCPRTHGGRILRHDAVAKQIAGALSSSGWDVERERLYHMPSDQGKKPDIVAVKPDQSCIILDVQVVNGSLDMEQTWRAKIRKYDRNDLRQAVSELKGVAPNNIRVMAATLSWRGVWCGKSATELRELGISVGVLRGITTRVLLGSYLNWWSFYRGTSLHPSLPPPPSSSSLIPRAGVG

SEQ ID NO: 24406 - protein, 1095 aa, Apolygus lucorum
MTLWRLGRGPLSTGSLTLKKKRIPVMNDNSSQPHNPRQPIGSRGIRGGAQRRPRQGRRPSSPSSSSSSSLPSSSSTTSLDHQCAHCERAFTTRSGLGVHIRRKHPVAANDEIDVERVQPRYASEDLRRMAADEVVAVRNGVRNINVYLSERFPTRTVIAIKNLRLKPHYKQLVQEAILANSGGASPASPIAGVDQQSAIQYPSPGTSGLLADLKTEVLRLGGQVGRIEGYESTYLQDLARRAAEGLDNLEDKVAAYLGRIFPQVGDATVTQHQGGPPPRVVLRGGRRAAKQARRREYHRVQSLWRKHPARVAAEVLEEPGEDQVQPPLQEFVDFWEPLLSAPSHNPGERVVPPVSTRDSLRSILCSPVLLDEAHKCRVKNSTSAGPDGVSARRWNKAPNTIKLLVLNLLILAGRPPKALTRTRTVFIPKKGGSGPGGYRPISVSSVVFRHFQKVLASRLQVAGVIGDVQRAFRPADGTAENLTVLQTVISLARIKRRQLHLAALDVAKAFDTVSHLALTDCLCGVGAPSRLIEYVACLYREGVTVLEAGGEVSGDIVIGRGVRQGDPLSPLLFNLVVDTALGKLPTEVGFDLAPGVRVGALAFADDVILLAETREGLQIALNAFAKQLSRCGLVVNPDKCGSVSLVPSGRQHKVKVVDGGFVIGQAPIPSRSVLEVWRYLGVDFMGVATITASRVDLGRALARVTKAPLKPQQRLRLLRTYLLPKLTYGLVFGRLTAGRLQELDREVRSAVRSWLRFPPGVPSAYIHAPVKSGGLGIVSLSACIPSLRRRRLLALQGSSWEVARVAAGLDFVRQQLAWCDRATPSAPKPSSSAEFAAALHESVDGKELRQCSESLISSQWVDWASEGIGARDYRNFHAVRVATLPTAVRCSRGSRGMTDTLCRACRSGNEHLYHVVQQCPRTHGGRILRHDAVAKQIAGALSSSGWDVERERLYHMPSDQGKKPDIVAVKPDRSCIILDVQVVNGSMDMEQTWRAKIRKYDRDDLRQAVSELKGVEPNNIRVMAATLSWRGVWCGKSATELRELGISVGVLRGVTRRVLLGSYLNWWSFYRGTSLHPSLPPPPSSSSLIPRAGVG

SEQ ID NO: 24407 - protein, 1061 aa, Apolygus lucorum
MEDTTEMPHNPRQPIGSRGIRGGAQRRPRQGRRPSSPSSSSTASLNHQCANCERAFTTRSGLGLHVRRKHPVAANAAIDIERIQHRYASEELRRMAADEAVAVRNGVRNINVYLNERFPTRTVIAIKNIRLRPHYKQLVQEAILANSSGASPASPIADVEQQPAIQYPSPGTSGLLADLKTEVLRLGGQVGRIEGYESTYLQDLVRRAAEGLDNLEDEVAAYLGRIFPRVGDVTVTQHQGGPPPRVVLRGGRRAAKQARRREYHRVQSLWRKHPARVAAEVLEEPGENQVQPPLQEFVDFWEPLLSAPSHDPGERVVPPVSTRDSLRSIMCSPVLSDEAHKCRVKNSTSAGPDGVSARRWNKAPKTIKLLILNLLLLAGRPSKALTRTRSVFIPKKGGSGPGGYRPISVSSVVFRHFQKVLASRLQVAGVIGDVQRAFRSADGTAENLTVLQTVISLARIKRRQLHLAALDVAKAFDTVSHLALTDCLRGVGAPSRLIEYVACLYQEGVTVLEAGGEVSGDIRIGRGVRQGDPLSPLLFNLVVDTALGKLPTEVGFDLAPGVRVGALAFADDVILLTETREGLQIALNAFAKQLARCGLVVNPDKCGSVSLVPSGRQHKVKVVDGGFVVGQSPIPSRSVLEVWRYLGVDFMGVATITTSCVDLGRALARVTKAPLKPQQKLRLLRTYLLPKLTYGLVFGRLTAGRLQQLDREVRSAVRSWLKFPPGVPSAYFHAPVKSGGLGIVSLSACIPSLRRRRLLALQGSSWEVARAAADLDFVRQQLAWCDRATPSAPKPSSSAEFAAALHESVDGKELRQCSESLVSSQWVDWASEGIGARDYRHFHAIRVASLPTAVRCSRGSRGTTLPLCRACRSGNEHLYHVVQQCPRTHGGRILRHDAVAKQIAGALSSSGWDVERERLYHMPSDQGKKPDIVAVKPDQSCIILDVQVVNGSLDMEQTWRAKIRKYDTNDLRQAVSELKGVAPNNIRVTAATLSWRGVWCGKSATELRELGISVGVLRGITTHVLLGSYLNWWSFYRGTSLHPSLPPPPSSSSLIPRAGVG

SEQ ID NO: 24408 - protein, 1070 aa, Apolygus lucorum
MDNNTTRPHNPRQPIGSRGIRGGAQRRPRQGRRPSSPSSSSSSSLPSSSSTASLDHQCAHCERAFTTRSGLGVHIRRKHPVAANDEIDVERVQPRYASEDLRRMAADEVVAVRNGVRNINVYLSERFPTRTVIAIKNLRLKPHYKQLVQEAILANSGGASPASPIAGVDQQSAIQYPSPGTSGLLADLKTEVLRLGGQVGRIEGYESTYLQDLARRAAEGLDNLEDKVAAYLGRIFPRVGDATVTQHQGGPPPRVVLRGGRRAAKQARRREYHRVQSLWRKHPARVAAEVLEEPGEDQVQPPLQEFVDFWEPLLSAPSHNPGERVVPPVSTRDSLRSILCSPVLLDEAHKCRVKNSTSAGPDGVSARRWNKVPNTIKLLILNLLILAGRPPKALTRTRTVFIPKKGGSGPGGYRPISVSSVVFRHFQKVLASRLQVAGVIGDVQRAFRPADGTAENLTVLQTVISLARIKRRQLHLAALDVAKAFDTVSHLALTDCLRGVGAPSRLIEYVACLYREGVTVLEAGGEVSRDIVIGRGVRQGDPLSPLLFNLVVDTALGKLPTEVGFDLAPGVRVGALAFADDVILLAETREGLQIALNAFAKQLSRCGLVVNPDKCGSVSLVPSGRQHKVKVVDGGFVIGQAPIPSRSVLEVWRYLGVDFMGVATITASRVDLGRALARVTKAPLKPQQRLRLLRTYLLPKLTYGLVFGRLTAGRLQELDREVRSAVRSWLRFPPGVPSAYIHAPVKSGGLGIVSLSACIPSLRRQRLLALQGSSWEVARVAAGLDFVRQQLAWCDRATPSAPKPSSSAEFAAALHESVDGKELRQCSESLISSQWVDWASEGIGARDYRNFHAVRVATLPTAVRCSRGSRGMTDTLCRACRSGNEHLYHVVQQCPRTHGGRILRHDAVAKQIAGALSSSGWDVERERLYHMPSDQGKKPDIVAVKPDRSCIILDVQVVNGSMDMEQTWRAKIRKYDRDDLRQAVSELKGVEPNNIRVMAATLSWRGVWCGKSATELRELGISVGVLRGVTRRVLLGSYLNWWSFYRGTSLHPSLPPPPSSSSLIPRAGVG

SEQ ID NO: 24409 - protein, 925 aa, Apolygus lucorum
MLVQEAILANSSGASPASPIADVEQQPAIQNPSPGTSGLLADLKTEVLRLGGQVGRIEGYESTYLQDLARRAAEGSENLEDEVAAYLGRIFLRVGDATVTQHQRGPPLRMVLRGGRRAAKQARRREYHRVQSLWRKHPARVAAEVLEEPGDDQVQPPLQEFVNFWEPLLSAPSHDPGERVVPPVSTRDSLRSIMCSPVLLDEAHKCRVKNSTSAGPDGVSARRWNKAPKTIKLLILNLLLLAGRPPKALTRARTVFIPKKGGSGPGGYRPISVSSVVFRHFQKVLASRLQVAGVIGDVQRAFRPADGTAENLTVLQTVISLARIKRRQLHLAALDVAKAFDTVSHLALTDCLRGVGAPSRLIEYVACLYHEGVTVLEAGGEVSRDIVIGRGVRQGDPLSPLLFNLVVDTALGKLPTEVGFDLAPGVRVGALAFADDVILLAETREGLQIALNAFAKQLARCGLVVNPDKCGSVSLVPSGCQHKVKVVDGGFVIGQSPIPSRSVLEVWRYLGVDFMGVATITASRVDLGRALARVTKAPLKPQQRLRLLRTYLLPKLTYGLVFGRLTAGRLQELDREVRSAVRSWLKFPPGVPSSYIHAPVKSGGLGIVSLSASIPSLRRQRLLALRGSSWGVARAAADLDFVRQQLAWCDRATPSAPKPSSSAEFAAALHESVDGKELRQCSESLISSQWVDWASEGIGARDYRHFHAVRVASLPTAVRCSRGSRGTTLPLCRACRGGSEHLYHVVQQCPRTHGGRILRHDAVAKQIAGALSSSGWDVERERLYHMPSDQGKKPDIVAVKPDQSCIILDVQVVNGSLDMEQTWRAKIRKYDTNDLRQAVSELKGVAPNNIRVMAATLSWRGVWCGKSATELRELGISVGVLRGITTRVLLGSYLNWWSFYRGTSLHPSLPPPPSSSSLIPRAGVG

SEQ ID NO: 24410 - protein, 967 aa, Apolygus lucorum
MAGDEVVAVRSGVRNVNVYLSERFPTRTVNAISKLRQRPHYRQLVQDAILANSSGASPASPIAGVEQQPAIQNPSPGTSGLLADLKTEVMRLGGQVGRIEGYESTYLQDLARRAAEGSENLEDEVAAYLGRIFPQVGDATVTQHQRGPPLRMVLRGGRRAAKQARRREYHRVQSLWRKHPARVAAEVLEEPGENQVQPPLQEFVDFWEPLLSAPSHDPGERVVPPVSTRDSLRGIMCSPVLLDEAHKCRVKNSTSAGPDGVSAHRWNKAPKTIKLLILNLLLLAGRPPKALTRTRTVFIPKKGGSGPGGYRPISVSSVVFRHFQKVLASRLQVAGVIGDVQRAFWPADGTAENLTVLQTVISLARIKRRQLHLAALDVAKAFDTVSHFALTDCLHGVGAPTRLIEYVACLYHEGVTVLEAGGGMSRDIMIGRGVRQGDPLSPLLFNLVVDTALGKLPTEVGFDLAPGVRVGALAFADDVILLAETREGLQIALNAFAKQLARCGLVVNPDKCGSVSLVPSGRQHKVKVVDGGFVIGQSPIPSRSVLEVWRYLGVDFMGVATITASRVDLGRALARVTKAPLKPQQKLRLLRTYLLPKLTYGLVFGRLTAGRLQELDREVRSAVRSWLKFPPGVPSAYIHAPVKSGGLGIVSLSASIPSLRRQRLLALRGSSWGVARAAADLDFVRQQLAWCDRATPSAPKPSSSAEFAAALHESVDGKELRQCSESLISSQWVDWASEGIGARDYRHFHAIRVACLPTAVRCTRGSRGATLPLCRACRSRSEHLYHVVQQCPRTHGGRILRHDAVAKQIAGALSSSGWDVERERLYHMPSDQGKKPDIVAVKPDQSCIILDVQVVNGSLDMEQTWRAKIRKYDTNDLRQAVSELKGVAPNNIRVMAATLSWRGVWCGKSATELRELGISVGVLRGITTRVLLGSYLNWWSFYRGTSLHPSLPPPPSSSSLIPRAGVG

SEQ ID NO: 24411 - protein, 942 aa, Apolygus lucorum
MAADEVVAVRDGVRNINVYLSERFPMRTVIAIKNIRLKPHYKQLVQEAILANSSGASPASPVADVEQQPAIQYPSPGTSGLLADLKTEVLRLRGQVGRIEGYESTYLQDLARRAAEGLDNLENEVAAYLGRIFPRVGDATVTQHQEGPPPRVVLRGGRRAAKQARRREYHRVQSLWRKHPARVAAEVLEEPGENQVQPPLQEFVDFWEPLLSAPSHDPGERVVPPVSTRDSLRSIMCSPVLSDEAHKCRVKNSTSAGPDGISARRWNKAPKTIKLLVLNLLLLAGRPPKALTRARTVFIPKKGGSGPGGYRPISVSSVVFRHFQKVLASRLQVAGIIGDVQRAFRPADGTAGNLTVLQTVISLARMKRRQLHLAALDVAKAFDTVSHLALTDCLRGVGAPSRLIEYVACLYQEGVTVLEAGGEVSGDVRIGRGVRQGNPLSPLLFNLVVDTALGKLPTEVGFDLAPGVQVGALAFADDVILLAETREGLQIALNAFAKQLARCGLVVNPDKCGSVSLVPSGRQHKVKVVDGGFVIGQSPIPSRSVLEVWRYLGVDFMGVATISASRVDLGRALARVTKAPLKPQQKLRLLRTYLLPKLTYGLVFGRLTAGRLQELDRQVRSAVRSWLRFPPGVPSAYVHAPVKSGGLGIVSLSACIPSLRRQRLLALQGSSWEVARAAADLDFVRQQLAWCDRATPSAPKPSSSAEFAAALHESVDGKELRQCSESPVSSQWVDWASEGIGARDYRHFHAVRMATLPTAVRCSRGSRGTTLPLCRACRSGNEHLYHVVQQCPRTHGGRILRHDAVAKQIAGALSSSGWDVERERLYHMPSDQGKKPDIVAVKPDQSCIILDVQVVNGSLDMEQTWRAKIRKYDRNDLRQAVSELKGVAPNNIRVMAATLSWRGVWCGKSAMELRELGISVGVLRGITTRVLLGSYLNWWSFY

SEQ ID NO: 24412 - protein, 1095 aa, Apolygus lucorum
MTLWRLGRGPLSTGSLTLHLKRPPVMEQTVREPHNPRQPIGSRGIRGGVQRRPRQGRRPSSPSSSSSSSQPSSSSTASLNHQCAHCERAFTTRSGLGLHVSRKHPVAANAAIDIERIQHRYASEELRRMAADEAVAVRNGVRNINVYLNERFPTRTVIAIKNIRLKPHYKQLVQEAILANSSGASPASPIADVEQQPAIQYPSPGTSGLLADLKTEVLRLGGQVGRIEGYESTYLQDLVRRAAEGLDNLEDEVAAYLGRIFPRVGDVTVTQHQGGPPPRVVLRGGRRAAKQARRREYHRVQSLWRKHPARVAAEVLEEPGENQVQPPLQEFVDFWEPLLSAPSHDPGECVVPPVSTRDSLRSIMCSPVLSDEAHKCRVKNSTSAGPGGVSARRWNKAPKTIKLLVLNLLLLAGRPPKALTRTRTVFIPKKGGSGPGGYRPISVSSVVFRHFQKVLASRLQVAGVIGDVQRAFRSADGTAENLTVLQTVISLARIKRRQLHLAALDVAKAFDTVSHLALTDCLRGVGAPSRLIEYVACLYQEGVTVLEAGGEVSGDIRIGRGVRQGDPLSPLLFNLVMDTALGKLPTEVGFDLAPGVRVGALAFADDVILLAETREGLQIALNAFAKQLARCGLVVNPDKCGSVSLVPSGRQHKVKVVDGGFVVGQSPIPSRSVLEVWRYLGVDFMGVATITTSRVDLGRALARVTKAPLKPQQKLRLLRTYLLPKLTYGLVFGRLTAGRLQQLDREVRSAVRSWLKFPPGVPSAYFHAPVKSGGLGIVSLSACIPSLRRRRLLALQGSSWEVARAAADLDFVRQQLAWCDRATPSAPKPSSSAEFAAALHESVDGKELRQCSESLVSSQWVDWASEGIGARDYRHFHAIRVASLPTAVRCSRGSRGTTLPLCRACRSGNEHLYHVVQQCPRTHGGRILRHDAVAKQIAGALSSSGWDVERERLYHMPSDQGKKPDIVAVKPDQSCIILDVQVVNGSLDMEQTWRAKIRKYDTNDLRQAVSELKGVAPNNIRVMAATLSWRGVWCGKSATELRELGISVGVLRGITTRVLLGSYLNWWSFYRGTSLHPSLPPPPSSSSLIPRAGVG

SEQ ID NO: 24413 - protein, 1069 aa, Apolygus lucorum
MERTNEPHNPRLPIGTRGSRGGAQRRPRQGRRPSSPSSSSSSSLPSSSSTASLSHQCAHCERAFTSRSGLGLHVRRKHPVAANAAIDIERVQHRYASEELRRMAADEALAVRNGVRNINVYLNERFPSRTVIAIKNIRLKPHYKQLVQEAILANSSGASPASPVADVEQQPAIQYPSPGSSGLLADLKTEVLRLGGQVGRIEGYDSAYLQDLARRAVEGPDNLEDDVAAYLGRTFPRVGDATVMQHRGGRPPTVGLHGGRRAAKQARRRRYQRVQRLWRKHPARVATEVLEEPGEDQVEPPLQEFVDFWEPLLSAPSHNPGERVVPPVSTRDSLRSIMCAPVLLDEAHRCCVKNSTSAGPDGVSARRWNKAPNTIKLLILNLLLLAGRPPKALTRSRTVFIPKKGGSGPGGYRPISISSVVFRHFQKVLASRLQVAGVIGDVQRAFRPGDGTAENLTVLQTVISLARMKRRQLHLAALDVAKAFDTVSHLALTDCLRGVGAPSRLIEYVACLYHEGVTVLEAGGEMSRDVLIGCGVRQGDPLSPLLFNLVVDTALGKLPTEVGFDLAPGVRVGALAFADDVILLAETREGLQIALNAFAKQLARCGLVVNPDKCGSVSLVPSGRQHKVKVVDGGFVVGQSPIPSRSVLEVWRYLGVDFMGVATITASRVDLGRALERVTKAPLKPQQKLRLLRTYLLPKLTYGLVFGRLTAGRLQELDRKVRSAVRSWLRFPPGVPSAYIHAPVKSGGLGIVSLSASIPSLRRQRLLALQGSSWEVARAAADLDFVRQQLAWCDRATPSAPKPSSSAEFAAALHESVDGKELRQCSESPISSQWVDWASEGIGARDYRHFHAIRVASLPTAVRCSRGSRGTTLPLCRACRSGNEHLYHVVQQCPRTHGGRILRHDAVAKQIAGALSSSGWDVERERLYHMPSDQGKKPDIVAVKPDQSCIILDVQVVNGSLDMEQTWRAKIRKYDRNDLRQAVSELKGVAPNNIRVMAATLSWRGVWCGKSATELRELGISVGVLRGITTRVLLGSYLNWWSFYRGTSLHPSLPPPPSSSSLIPRAGVG

SEQ ID NO: 24414 - protein, 1062 aa, Apolygus lucorum
MNQNVTEPHNPRRPIGTRGSGGGAQRRPRQGRRPSSPSSSSSSSLPSSSSTASLNHQCAHCERAFTTRSGLGLHVRRKHPVAANAAIEIEREQPRYASEDLRRMAADEAVAVRSGVRNINVYLNERFPARTVNAISKLRQRPHYKQLVQEAILANSSGASPASPIADVEQQPAIQNPSPGTSGLLADLKTEVLRLGGQVGRIEGYESTYLQDLARRAAEGSENLEDEVAAYLGRIFPRVGDATVTQHQRGPPLRMVLRGGRRAAKQARRREYHRVQSLWRKHPARVAAEVLEEPGDDQVQPPLQEFVNFWEPLLSAPSHDPGERVVPPVSTRDSLRSIMCSPVLLDEAHKCRVKNSTSAGPDGVSARRWNKAPKTIKLLILNLLLLAGRPPKALTRARTVFIPKKGGSGPGGYRPISVSSVVFRHFQKVLASRLQVAGVISDVQRAFRPADGTAENLTVLQTVISLARIKRRQLHLAALDVAKAFDTVSHLALTDCLRGVGAPSRLIEYVACLYHEGVTVLEAGGEVSRDIVIGRGVRQGDPLSPLLFNLVVDTALGKLPTEVGFDLAPGVRVGALAFADDVILLAETREGLQIALNAFAKQLARCGLVVNPDKCGSVSLVPSGRQHKVKVVDGGFVIGQSPIPSRSVLEVWRYLGVDFMGVATITASRVDLGRALARVTKAPLKPQQRLRLLRTYLLPKLTYGLVFGRLTAGRLQELDREVRSAVRSWLKFPPGVPSSYIHAPVKSGGLGIVSLSASIPSLRRQRLLALRGSSWGVARAAADLDFVRQQLAWCDRATPSAPKPSSSAEFAAALHESVDGRELRQCSESLISSQWVDWALEGIGACDYRHFHAVRVASLPTAVRCSRGSRGTTLPLCRACRGGSEHLYHVVQQCPQTHGGRILRHDAVAKQIAGALSSSGWDVERERLYHMPSDQGKKPDIVAVKPNQSCNGSLDMEQTWRAKIRKYDTDDLRQAVSELKGVAPNNIRVMAATLSWRGVWCGKSATELRELGISVGVLRGITTRVLLGSYLNWWSFYRGTSLHPSLPPPPSSSSLIPRAGVG

SEQ ID NO: 24415 - protein, 967 aa, Apolygus lucorum
MAADEVVAVRDGVRNINVYLSERFPMRTVIAIKNIRLKPHYKQLVQEAILANSSGASPASPIADVEQQPAIQYPSPGTSGLLADLKTEVLRLGGQVGRIEGYESTYLQDLARRAAEGLDNLENEVAAYLGRIFPRVGDATVTQHQGGPPPRVVLRGGRRAAKQARRREYHRVQSLWRKHPARVAAEVLEEPGENQVQPPLQEFVDFWEPLLSAPSHDPGERVVPPVSTSDSLRGIMCSPVLSDEAHKCRVKNSTSAGPDGISARRWNKAPKTIKLLVLNLLLLAGRPPKALTRARTVFIPKKGGSGPGGYRPISVSSVVFRHFQKVLASRLQVAGIIGDVQRAFRPADGTAENLTVLQTVISLARMKRRQLHLAALDVAKAFDTVSHLALTDCLHGVGAPSRLIEYVACLYQEGVTVLEAGGEVSGDVRIGRGVRQGDPLSPLLFNLVVDTALGKLPTEVGFDLAPGVRVGALAFADDVILLAETREGLQIALNAFAKQLARCGLVVNPDKCGSVSLVPSGRQHKVKVVDGGFVMGQSPIPSRSVLEVWRYLGVDFMGVATISASRVDLGRALARVTKAPLKPQQKLRLLRTYLLPKLTYGLVFGRLTAGRLQELDRQVRSAVRSWLRFPPGVPSAYFHAPVKSGGLGIVSLSACIPSLRRQRLLALQGSSWEVARAAADLDFVTQQLAWCDRATPSAPKPSSSAEFAAALHESVDGKELRQCSESPVSSQWVDWASEGIGARDYRHFHAVRVATLPTAVRCSRGSRGTTLPLCRACRSGNEHLYHVVQQCPRTHGGRILRHDAVAKQIAGALSSSGWDVERERLYHMPSDQGKKPDIVAVKPDQSCIILDVQVVNGSLDMEQTWRAKIRKYDRNDLRQAVSELKGVAPNNIRVMAATLSWRGVWCGKSATELRELGISVGVLRGITTRVLLGSYLNWWSFYRGTSLHPSLPPPPSSSSLIPRAGVG

SEQ ID NO: 24416 - protein, 844 aa, Apolygus lucorum
MVAAYLGRIFPRVGDATVTQHQGGPPPRVVLRGGRRAAKQARRREYHRVQSLWRKHPARVAAEVLEEPGEDQVQPPLQEFVDFWEPLLSAPSHNPGERVVPPVSTRDSLRSILCSPVLLDEAHKCRVKNSTTAGPDGVSARRWNKAPNTIKLLILNLLMLAGRPPKALTRTRTVFIPKKGGSGPGGYRPISVSSVVFRHFQKVLASRLQVAGVIGDVQRAFWPADGTAENLTVLQTVISLARIKRRQLHLAALDVAKAFDTVSHFALTDCLRGVGAPSRLIEYVACLYHEGVTVLEAGGEVSGDVRIGRGVRQGDPLSPLLFNLVVDTALGKLPTEVGFDLAPGVRVGALAFADDVILLAETREGLQIALNAFAKQLGRCGLVVNPDKCGSVSLVPSGRQHKVKVVDGGFVVGQSPIPSRSVLEVWRYLGVDFMGVATITTSRVDLGRALARVTKAPLKPQQKLRLLRTYLLPKLTYGLVFGRLTARRLQELDRQVRSAVRSWLKFPPGVPSAYFHAPVKSGGLGIVSLSACIPSLRRQRLLALQGSSWEVACAAADLDFVRQQLAWCDRATPSAPKPSSSAEFAAALHESVDGKELRQCSESLVSSQWVDWASEGIGARDYRHFHAVRMATLPTAVRCLRGSRGTTLPLCRACRSGNEHLYHVVQQCPRTHGGRILRHDAVAKQIAGALSSSGWDVERERLYHMPSDQGKKHDIVAVKPDQSCIILDVQVVNGSLDMEQTWRAKIRKYDRDDLRQAVSELKGVVPSNIRVMAATLSWRGVWCGKSATELRELGISVGVLRGITTRVLLGSYLNWWSFYRGTSLHPSLPPPPSSSSLIPRAGVG

SEQ ID NO: 24417 - protein, 732 aa, Apolygus lucorum
MCSPVLSDEAHKCRVKNSTSAGPDGISARRWNKAPKTIKLLVLNLLLLAGRPPKALTRARTVFIPKKGGSGPGGYRPISVSSVVFRHFQKVLASRLQVAGIIGDVQRAFRPADGTAENLTVLQTVISLARMKRRQLHLAALDVAKAFDTVSHLALTDCLRGVGAPSRLIEYVACLYREGVTVLEAGGEVSGDVRIGRGVRQGDPLSPLLFNLVVDTALGKLPTEVGFDLAPGVRVGALAFADDVILLAETREGLQIALNAFAKQLAGCGLVVNPDKCGSVSLVPSGRQHKVKVVDGGFVIGQSPIPSRSVLEVWRYLGVDFMGVATISASRVDLGRALARVTKAPLKPQQKLRLLRTYLLPKLTYGLVFGRLTAGRLQELDRQVRSAVRSWLRFPPGVPSAYVHAPVKSGGLGIVSLSACIPSLRRQRLLALQGSSWEVARAAADLDFVRQQLAWCDRATPSAPKPSSSAEFAAALHESVDGKELRQCSESPVSSQWVDWASEGIGARDYRHFHAVRMATLPTAVRCSRGSHGTTLPLCRACRSGNEHLYHVVQQCPRTHGGRILRHDAVAKQIAGALSSSSWDVERERLYHMPSDQGKKPDIVAVKPDQSCIILDVQVVNGSLDMEQTWRAKIRKYDRNDLRQAVSELKGVAPNNIRVMAATLSWRGVWCGKSATELRELGISVGVLRGITTRVLLGSYLNWWSFYRGTSLHPSLPPPPSSSSLIPRAGVG

SEQ ID NO: 24418 - protein, 1070 aa, Apolygus lucorum
MEYQPDQPHNPRQPIGSRGIRGGAQRRPRQGRRPSSPSSSSSSSLPSSSSTASLDHQCAHCERAFTSRSGLGVHVRRKHPVAANDEINVERVQPRYASEDLRRMAADEVVAVRNGVRNINVYLSERFPTRTVIAIKNLRLKPHYKQLVQEAILANSGGASPPSPIAGVDQQTAIQYPSPGTSGLLADLKTEVLRLGGQVGRIEGYESTYLQDLARRAAEGLDNLEDEVAAYLGRIFPRVGDATVTRHQGRPPPRVVLRGGRRAAKQARRREYHRVQSLWRKHPARAAAEVLEEPGEDQVQPPLQEFVDFWEPLLSAPSHNPGERVVPPVSTRDSLRSILCSPVLLDEAHKCRVKNSTSAGPDGVSARRWNKAPKTIKLLILNLLMLAGRPPKALTRTRTVFIPKKGGSGPGGYRPISVSSVVFRHFQKVLASRLQVAGVIGDVQRAFRPADGTAENLTVLQTVISLARIKRRQLHLAALDVAKAFDTVSHLALTDCLRGVGAPSRLIEYVACLYHEGVTVLEAGGEVSRDIRIGRGVRQGDPLSPLLFNLVVDTALGKLPTEVGFDLAPGVRVGALAFADDVILLAETREGLQIALNAFAKQLARCGLVVNPDKCGSVSLVPSGRQHKVKVVDGGFVVGQSPIPSRSVLEVWRYLGVDFMGVATITTSRVDLGRALARVTKAPLKPQQKLRLLRTYLLPKLTYGLVFGRLTAGRLQELDREIRSAVRSWLRFPPGVPSAYFHAPVKSGGLGIVSLSACIPSLRRQRLLALQGSSWEVARAAADLDFVRQQLAWCDRATPSAPKPSSSAEFAAALHESVDGKELRQCSESLVSSQWVDWASEGIGARDYRHFHAVRMATLPTAVRCSRGSRGTTLPLCRACRSGNEHLYHVVQQCPRTHGGRILRHDAVAKQIAGALSSSGWDVERERLYHMPSDQGKKPDIVAVKPDQSCIILDVQVVNGSLDMEQTWQAKIRKYDRDDLRQAVSELKGVAPNNIRVMAATLSWRGVWCGKSATELRELGISVGVLRGITTRVLLGSYLNWWSFYRGTSLHPSLPPPPSSSSLIPRAGVG

SEQ ID NO: 24419 - protein, 904 aa, Apolygus lucorum
MAADEVVAVRNGVRNINVNLSERFPTRTVIAIKNLRLKPHYKQLVQDAILANSSGASPASPVAGVDQQSAIQYPSPGTSGLLADLKTGVLRLGGQVGRIEGYESTYLQDLARRAVEGLDNLEDKVAAYLGRIFPRVGDATVTQHQGGPPPRVVLHGGPRAAKQARRREYHRVQSLWRKHPARVAAEVLEEPGEVQVQPPLQEFVNFWEPLLSAPSHNPGERVVPPVSTRDSLRSILCSTVLLDEAHKCCVKNSTSAGPDGISARHWNKAPNTIKLLILNLLILAGRPPKALTRTRTVFIPKKGGSGPGGYRPISVSSVVFRHFQKVLASRLQVAGVIGDVQRAFRPADGTAENLTVLQTVISLARIKRRQLHLATLDVAKAFDTVSHLALTDCLRGVGAPSRLIEYVACLYHEGVTVLEAGGEVSGDIGIGRGVRQGDPLSPLLFNLVVDTALGKLPTEVGFDLAPGVRVGALAFADDVILLAETREGLQIALNAFAKQLSRCGLVVNPDKCGSVSLVPSGRQHKVKVVDGGFVIGQAPIPSRSVLEVWRYLGVDFMGVATITASRVDLGRALARITKAPMKPQQRLRLLRTYLLPKLTYGLVFGRLTAGRLQELDREVRSAVRSWLRFPPGVPSAYIHAPVKSGGLGIVSLSACISSLRRQRLLALQGSSWEVARVAAGLDFVRQQLAWCDRATPSAPKPSSSAEFAAALHESVDGKELRQCSESLISSQWVDWASEGIGARDYRNFHAVRVATLPTAVRCSRGSRGMTDTLCRACRSGNEHLYHVVQQCPRTHGGRILRHDAVAKQIAGALSSSGWDVERERLYHMPSDQGKKPDIVAVKPDRSCIILDVQVVNGSMDMEQTWRAKIRKYDRDDLRQAVSELKGVAPNNYDYEHLFRYTFQH

SEQ ID NO: 24420 - protein, 1070 aa, Apolygus lucorum
MEYQPDQPHNPRQPIGSRGIRGGAQRRPRQGRRPSSPSSSSSSSLPSSSSTASLDHQCAHCERAFTSRSGLGVHVRRKHPVAANDEINVERVQPRYASEDLRRMAADEVVAVRNGVRNINVYLSERFPTRTVIAIKNLRLKPHYKQLVQEAILANSGGASPASPIADVDQQSAIQYPSPGTSGLLADLKTEVLRLGGQVGRIEGYESTYLQDLARRAAEGLDNLEDEVAAYLGRIFPRVGDATVTRHQGRPPPRVVLRGGCRAAKQARRREYHRVQSLWRKHPARAAAEVLEEPGEDQVQPPLQEFVDFWEPLLSAPSHNPGERVVPPVSTRDSLRSILCSPVLLDEAHKCRVKNSTSAGPDGVSARRWNKAPKTIKLLILNLLMLAGRPPKALTRTRTVFIPKKGGSGPGGYRPISVSSVVFRHFQKVLASRLQVTGVIGDVQRAFRPAGGTAENLTVLQTVISLARIKRRQLHLAALDVAKAFDTVSHLALADCLCGVGAPSRLIEYVACLYHEGVTVLEAGGEVSRDIRIGRGVRQGDPLSPLLFNLVVDTALGKLPTEVGFDLAPGVRVGALAFADDVILLAETREGLQIALNAFAKQLARCGLVVNPDKCGSVSLVPSGRQHKVKVVDGGFVVGQSPIPSRSVLEVWRYLGVDFMGVATITTSRVDLGRALARVTKAPLKPQQKLRLLRTYLLPKLTYGLVFGRLTAGRLQELDREIRSAVRSWLRFPPGVPSAYFHAPVKSDGLGIVSLSACIPSLRRQRLLALQGSSWEVARAAADLDFVRQQLAWCDRATPSAPKPSSSAEFAAALHESVDGKELRQCSESLVSSQWVDWASEGIGARDYRHFHAVRMATLPTAVRCSRGSRGTTLPLCRACRSGNEHLYHVVQQCPRTHGGRILRHDAVAKQIAGALSSSGWDVERERLYHMPSDQGKKPDIVAVKPDQSCIILDVQVVNGSLDMEQTWRAKIRKYDRDDLRQAVSELKGVAPNNIRVMAATLSWRGVWCEKSATELRELGISVGVLHGITTRVLLGSYLNWWSFYRGTSLHPSLPPPPSSSSLIPRAGVG

SEQ ID NO: 24421 - protein, 1070 aa, Apolygus lucorum
MEQNIEWPHNPRQPIGSRGIRGGAQRRPRQGRRPSSPSSSSSSSQPSSSSTASLNHQCAHCERAFTTRSGLGLHISRKHPVAANAAIDIERTQHRYASEELRRMAADEVVAVRDGVRNINVYLSERFPMRTVIAIKNIRLKPHYKQLVQEAILANSSGASPASPVADVEQQPAIQYPSPGTSGLLADLKTEVLRLGGQVGRIEGYESTYLQDLVRRAAEGLDNLEDEVAAYLGRIFPQVGDATVTQHQGGPPPRVVLRGGRRAAKQARRREYHRVQSLWRKHPARVAAEVLEEPGENQVQPPLQEFVDFWEPLLSAPSHDPGERVVPPVSTRDSLRSIMCSPVLSDEAHKCRVKNSTSAGPNGVSARRWNKAPKTIKLLILNLLLLAGRPPKALTRTRTVFIPKKGGSGPGGYRPISVSSVVFRHFQKVLASRLQVAGVIGDVQRAFRPADGTAENLTVLQTVISLARIKRRQLHLAALDVAKAFDTVSHLALTDCLRGVGAPSRLIEYVACLYQEGMTVLEAGGEVSGDIRIGRGVRQGDPLSPLLFNLVVDTALGKLPTEVGFDLAPGVRVGALAFADDVILLAETREGLQIALNAFAKQLARCGLVVNPDKCGSVSLVPSGRQHKVKVVDGGFVVGQSPIPSRSVLEVWRYLGVDFMGVATITASRVNLGRALARVTKAPLKPQQKLRLLRMYLLPKLTYGLVFGRLTAGRLQQLDREVCSAVRSWLKFPPGVPSAYVHAPVKSGGLGIVSLSACIPSLRRRRLLALQGSSWEVARAAADLDFVRQQLAWCDRATPSAPKPSSSAEFAAALHESVDGKELRQCSESLVSSQWVDWASEGIGARDYRHFHAIRVASLPTAVRCSRGSRGTTLPLCRACRSGNEHLYHVVHQCPRTHGGRILRHDAVAKQIAGALSSSGWDVERERLYHMPSDQGKKPDIVAVKPDQSCIILDVQVVNGSLDMEQTWRAKIRKYDTNDLRQAVSELKGVAPNNIRVMAATLSWRGVWCGKSATELRELGISVGVLRGITTRVLLGSYLNWWSFYRGTSLHPSLPPPPSSSSLIPRAGVG

SEQ ID NO: 24422 - protein, 1070 aa, Apolygus lucorum
MDNNTTRPHNPRQPIGSRGIRGGAQRRPRQGRRPSSPSSSSSSSLPSSSSTASLDHQCAHCERAFTTRSGLGVHIRRKHPVAANDEIDVERVQPRYASEDLRRMAADEVVAVRNGVRNINVYLSERFPTRTVIAIKNLRLKPHYKQLVQEAILANSSGASPASSIAGVDQQSAIQYPSPGTSGLLADLKTEVLRLGGQVGRIEGYESTYLQDLARRAAEGLDNLEHKVAAYLGRIFPRVGDATVTQHQGGPPPRVVLRGGRRAAKQARRREYHRVQSLWRKHPARVAAEVLEEPGEDQVQPPLQEFVDFWEPLLSAPSHNPGERVVPPVSTRDSLRSILCSPVLLDEAHKCRVKNSTSAGPDGVSARRWNKVPNTIKLLILNLLILAGRPPKALTRTRTVFIPKKGGSGPGGYRPISVSSVVFRHFQKVLASRLQVAGVIGDVQRAFRPADGTAENLTVLQTVISLARIKRRQLHLAALDVAKAFDTVSHLALTDCLRGVGAPSRLIEYVACLYREGVTVLEAGGEVSRDIVIGRGVRQGDPLSPLLFNLVVDTALGKLPTEVGFDLVPGVRVGALAFADDVILLAETREGLQIALNAFAKQLSRCGLVVNPDKCGSVSLVPSGRQHKVKVVDGGFVIGQAPIPSRSVLEVWRYLGVDFMGVATITASRVDLSRALARVTKAPLKPQQRLRLLRTYLLPKLTYGLVFGRLTAGRLQELDREVRSAVRSWLRFPPGVPSAYIHAPVKSGGLGIVSLSACIPSLRRQRLLALQGSSWEVARVAAGLDFVRQQLAWCDRATPSAPKPSSSAEFAAALHESVDGKELRQCSESLISSQWVDWASEGIGARDYRNFHAVRVATLPTAVRCSRGSRGMTDTLCRACRSGNEHLYHVVQQCPRTHGGRILRHDAVAKQIAGALSSSGWDVERERLYHMPSDQGKKPDIVAVKPDRSCIILDVQVVNGSMDMEQTWRAKIRKYDRDDLRQAVSELKGVEPNNIRVMAATLSWRGVWCGKSATELRELGISVGVLRGVTRRVLLGSYLNWWSFYRGTSLHPSLPPPPSSSSLIPRAGVG

SEQ ID NO: 24423 - protein, 1113 aa, Apolygus lucorum
MKESPIFPGGPLLKFQGWLNDPLAIREGTPVNGSPDPSLRFPVMNQNVTEPHNPRRPIGTRGSGGGAQRRPRQGRRPSSPSSSSSSSLPSSSSTASLNHQCAHCERAFTTRSGLGLHVRRKHPVAANAAIEIERVQPRYASEDLRRMAADEAVAVRSGVRNINVYLNERFPARTVNAISKLRQRPHYKQLVQEAILANSSGASPASPIADVEQQPAIQNPSPGTSGLLANLKTEVLRLGGQVGCIEGYESTYLQDLARRAAEGSENLEDEVAAYLGRIFPRVGDATVTQHQRGPPLRMVLRGGRRAAKQARRREYHRVQSLWRKHPARVAAEVLEEPGDDQVQPPLQEFVNFWEPLLSAPSHDPGERVVPPVSTRDSLRSIMCSLVLLDEAHKCRVKNSTSAGPDGVSARRWNKAPKTIKLLILNLLLLAGRPPKALTRARTVFIPKKGGSGPGGYRPISVSSVVFRHFQKVLASRLQVAGVIGDVQRAFRPADGTAENLTVLQTVISLACIKRRQLHLAALDVAKAFDTVSHLALTNCLRGVGAPSRLIEYVACLYHEGVTVLEAGGEVSRDIVIGRGVRQGDPLSPLLFNLVVDTALGKLPTEVGFDLAPGVRVGALAFADDVILFAETHEGLQIALNAFAKQLARCGLVVNPDKCGSVSLVPSGRQHKVKVVDGGFVIGQSPIPSRSVLEVWRYLGVDFMGVATITASRVDLGRALARVTKAPLKPQQRLRLLRTYLLPKLTYGLVFGRLTAGRLQELDREVRSAVRSWLKFPPGVPSSYIHAPVKSGGLGIVSLSASIPSLRRQRLLALRGSSWGVARAAADLDFVRQQLAWCDRATPSAPKPSSSAEFAAALHESVDGKELRQCSESLISSQWVDWALECIGARDYRHFHAVRVASLPTAVRCSRGSRGTTLPLCRACRGGSEHLYHVVQQCPRTHGGRILRHDAVAKQIAGALSSSGWDVERERLYHMPSDQGKKPDIVAVKPDQSCIILDVQVVNGSLDMEQTWRAKIRKYDTNDLRQAVSELKGVAPNNIRVMAATLSWRGVWCGKSATELRELGISVGVLRGITTRVLLGSYLNWWSFYRGTSLHPSLPPPPSSSSLIPRAGVG

SEQ ID NO: 24424 - protein, 1070 aa, Apolygus lucorum
MENQQHRPHNPRQPIGSRGIRGGAQRRPRQGRRPSSPSSSSSSSLPSSSSTASLDHQCAHCERAFTSRSGLGVHVRRKHPVAANDEINVERVQPRYASEDLRRMAADEVVAVRNGVRNINVYLSERFPMRTVIAIKNLRLKPHYKQLVQEAILANSGGASPASPIAGVDQQSAIQYPSPGTSGLLADLKTEVLRLGGQVGRIEGYESTYLQDLARRAAEGLDNLEDEVAAYLGRIFPRVGDATVTRHQGRPPPRVVLRGGPRAAKQARRREYHRVQSLWRKHPARVAAEVLEEPGEDQVQPPLQEFVDFWEPLLSAPSHNPGERVVPPVSTRDSLRSILCSPVLLDEAHKCRVKNSTSAGPDGVSARRWNKAPNTIKLLILNLLMLAGRPPKALTRTRTVFIPKKGGSGPGGYRPISVSSVVFRHFQKVLASRLQVAGVIGDVQRAFRPVDGTAENLTVLQTVILLARIKRRQLHLAALDVAKAFDTVSHLALTDCLRGVGAPSRLIEYVACLYHEGVTVLEAGGEVSRDIRIGRGVRQGDPLSPLLFNLVVDTALGKLPTEVGFDLAPGVRVGALAFADDVILLAETREGLQIALNAFAKQLARCGLVVNPDKCGSVSLVPSGRQHKVKVVDGGFVIGQSPIPSRSVLEVWRYLGVDFMGVATITTSRVDLGRALARVTKAPLKPQQKLRLLRTYLLPKLTYGLVFGRLTAGRLQELDREIRSAVRSWLRFPPGVPSAYFHAPVKSGGLGIVSLSACIPSLRRQRLLALQGSSWEVARAAADLDFVRQQLAWCDRATPSAPKPSSSAEFAAALHESVDGKELRQCSESLVSSQWVDWASEGIGARDYRHFHAVRMATLPTAVRCSRGSRGTTLPLCRACRSGNEHLYHVVQQCPRTHGGRILRHDAVAKQIAGALSSSGWDVERERLYHMPSDQGKKPDIVAVKPDQSCIILDVQVVNGSLDMEQTWRAKIRKYDTNDLRQAVSELKGVAPNNIRVMAATLSWRGVWCGKSATELRELGISVGVLRGITTRVLLGSYLNWWSFYRGTSLHPSLPPPPSSSSLIPRAGVG

SEQ ID NO: 24425 - protein, 1016 aa, Apolygus lucorum
MQLLLLALRAFTSRSGLGVHVRRRHPVAANEEIDIERVQPRYASEDLRRMAADEVVAVRNGVRNINVYLSERFPTRTVIAIKNLRLKPHYKQLVQEAILANSGGASPASPVADMDQQSAIQYPSPGTSGLLADLKTEVLRLGGQVGRIEGYESTYLQDLARRAAEGLDNLEDEIAAYLGRIFPRVGDATVTQHQGGPPPRVVLRGGRRAAKQARRREYHRVQSLWRKHPARVAAEVLEEPGENQVQPPLQEFVDFWEPLLSAPSHNPGERVVPPVSTRDSLRSIMCSPVLSDEAHKCRVKNSTSAGPDGISARRWNKAPRTIKLLLLNLLLLAGRPPKALTRARTVFIPKKGGSGPGGYRPISVSSVVFRHFQKVLASRLQVAGIIGDVQRAFRPADGTAENLTVLQTVISLARMKRRQLHLAALDVAKAFDTVSHFALTDCLRGVGAPSRLIEYVACLYQEGVTVLEAGGEVSGDVRIGRGVRQGDPLSPLLFNLVVDTALGKLPTEVGFDLAPGVRVGALAFADDVILLAETREGLQIALNAFAKQLARCGLVVNPDKCGSVSLVPSGRQHKVKVVDGGFVIGQSPIPSRSVLEIWRYLGVDFMGVATISASRVDLGRALARVTKAPLKPQQKLRLLRTYLLPKLTYGLVFGRLTVGRLQELDRQVRSAVRSWLRFPPGVPSAYVHAPVKSGGLGVVSLSACIPSLRRQRLLALQGSSWEVARAAADLDFVRQQLAWCDRATPSAPKPSSSAEFAAALHESVDGKELRQCSESPVSSQWVDWASEGIGARDYRHFHAVRMATLPTAVRCSRGSRGTTLPLCRACRSGNEHLYHVVQQCPRTHGGRILRHDAVAKQIAGALSSSGWDVERERLYHMPSDQGKKPDIVAVKPDQSCIILDVQVVNGSLDMEQTWRAKIRKYDRNDLRQAVSELKGVAPNNIRVMAATLSWRGVWCGKSATELRELGISVGVLRGITTRVLLGSYLNWWSFYRGTSFHPSLPPPPSSSSLIPRAGVG

SEQ ID NO: 24426 - protein, 1095 aa, Apolygus lucorum
MTLWRIGREPLSTGSLTLINKRSPVMEPNNDVPHNPRLPIGTRGSRGGAQRRPRQGRRPSSPSSSSSSSLPSSSSTASLDHQCAHCERAFTSRSGLGVHVRRRHPVAANEEIDIERVQPRYASEDLRRMAADEVVAVRNGVRNINVYLSERFPTRTVIAIKNLRLKPHYKQLVQEAILANSGGASPASPVADMDQQSAIQYPSPGTSGLLADLKTEVLRLGGQVGRIEGYESTYLQDLARRAAEGLDNLEDEIAAYLGRIFPRVGDATVTQHQGGPPPRVVLRGGRRAAKQARRREYHRVQSLWRKHPARVAAEVLEEPGENQVQPPLQEFVDFWEPLLSAPSHNPGERVVPPVSTRDSLRSIMCSPVLSDEAHKCRVKNSTSAGPDGISARRWNKAPRTIKLLLLNLLLLAGRPPKALTRARTVFIPKRGGSGPGGYRPISVSSVVFRHFQKVLASRLQVAGIIGDVQRAFRPADGTAENLTVLQTVISLARMKRRQLHLAALDVAKAFDTVSHFALTNCLRGVGAPSRLIEYVACLYQEGVTVLEVGGEMSGDVRIGRGVRQGDPLSPLLFNLVVDTALGKLPTEVGFDLAPGVRVGALAFADDVILLAETREGLQIALNAFAKQLARCGLVVNPDKCGSVSLVPSGRQHKVKVVDGGFVIGQSPIPSRSVLEVWRYLGVDFMGVATISASRVDLGRALARVTKAPLKPQQKLRLLRTYLLPKLTYGLVFGRLTAGRLQELDRQVRSAVRSWLRFPPGVPSAYVHAPVKSGGLGVVSLSACIPSLRRQRLLALQGSSWEVARAAADLDFVRQQLAWCDRATPSAPKPSSSAEFAAALHESVDGKELRQCSESPVSSQWVDWASEGIGARDYRHFHAVRMATLPTAVRCSRGSRGTTLPLCRACRSGNEHLYHVVQQCPRTHGGRILRHDAVAKQIAGALSSSGWDVERERLYHMPSDQGKKPDIVAVKPDQSCIILDVQVVNGSLDMEQTWRAKIRKYDRNDLRQAVSELKGVAPNNIRVMAATLSWRGVWCGKSATELRELGISVGVLRGITTRVLLGSYLNWWSFYRGTSLHPSLPPPPSSSSLIPRAGVG

SEQ ID NO: 24427 - protein, 816 aa, Apolygus lucorum
MVLRGGRRAAKQARRREYHRVQSLWRKHPARVAAEVLEEPGENQVQPPLQEFVDFWEPLLSAPSHDPGECVVPPVSTRESLRSIMCSPVLSDEAQKCRVRNSTSAGPDGVSARRWNKAPKTIKLLILNLLLLAGRPPKALTRTRTVFIPKKGGSGPGGYRPISVSSVVFRHFQKVLASRLQVAGVIGDVQRAFRPADGTAENLTVLQTVISLARIKRRQLHLAALDVAKAFDTVSHLALTDCLRGVGAPSRLIEYVACLYQEGVTVLEAGGEVSGDIRIGRGVRQGDPLSPLLFNLVVDTALGKLPTEVGFDLAPGVRVGALAFADDVILLAETREGLQIALNAFAKQLAGCGLVVNPDKCGSVSLVPSGRQHKVKVVDGGFVVGQSPIPSRSVLEVWRYLGVDFMGVATITASRVDLGRALARVTKAPLKPQQRLRLLRTYLLPKLTYGLVFGRLTAGRLQELDREVRSAVRSWLKFPPGVPSAYVHAPVKSGGLGIVSLSACIPSLPRRRLLALQGSSWEVARAAADLDFVRQQLAWCDRATPSAPKPSSSAEFAAALHESVDGKELRQCSESLVSSQWVDWASEGIGARDYRHFHAIRVASLPTAVRCSRGSRGTTLPLCRACRSGNEHLYHVVQQCPRTHGGRILRHDAVAKQIAGALSSSGWDVERERLYHMPSDQGKKPDIVAVKPDQSCIILDVQVVNGSLDKEQTWRAKIRKYDTSDLRQAVSELKGVAPNNIRVMAATLSWRGVWCGKSATELRELGISVGVLRGITTRVLLGSYLNWWSFYRGTSLHPSLPPPPSSSSLIPRAGVG

SEQ ID NO: 24428 - protein, 1070 aa, Apolygus lucorum
MDYNHQLPHNPRQPIGSRGIRGGAQRRPRQGRRPSSPSSSSSSSLPSSSSTASLDHQCAHCERAFTSRSGLGVHVRRKHPVAANAAIEIERVQPRYASEDLRRMAADEVVAVRNGVRNINVYLSERFPTRTVIAIKNLRLKPHYKQLVQEAILANSGGASPASPVAGMDQQSAIQYPSPGTSGLLADLKTEVLRLGGQVGRIEGYESTYLQDLARRAAEGLDNLEDEVAAYLGRIFPRVGDATVAQHQGGPPPRVVLRGGRRAAKQARRREYHRVQSLWRKHPARVAAEVLEEPGEDQVQPPLQEFVDFWEPLLSAPSHNPGERVVPPVSTRDSLRSILCSPVLLDEAHKCRVKNSTSAGPDGVSARRWNKAPNTIKLLILNLLMLAGRPPKALTRTRTVFIPKKGGSGPGGYRPISVSSVVFRHFQKVLASRLQVAGVIGDVQRAFRPADGTAENLTVLQTVISLARIKRRQLHLAALDVAKAFDTVSHLALTDCLRGVGAPSRLIEYVACLYHEGVTVLEAGGEVSGDVRIGRGVRQGDPLSPLLFNLVVDTALGKLPTEVGFDLAPGVRVGALAFADDVILLAETREGLQIALNAFAKQLSRCGLVVNPDKCGSVSLVPSGRQHKVKVVDGGFVIGQAPIPSRSVLEVWRYLGVDFMGVATITASRVDLGRALARITKAPLKPQQRLRLLRTYLLPKLTYGLVFGRLTAGRLQELDREVRSAVRSWLRFPPGVPSAYIHAPVKSGGLGIVALSACIPSLRRQRLLALQGSSWEVARVAAGLDFVRQQLAWCDRATPSAPKPSSSAEFAAALHESVDGKELRQCSESLISSQWVDWASEGIGARDYRNFHAVRVATLPTAVRCSRGSRGMTDTLCRACRSGNEHLYHVVQQCPRTHGGRILRHDAVAKQIAGALSSSGWDVERERLYHMPSDQGKKPDIVAVKPDRSCIILDVQVVNGSMDMEQTWRAKIRKYDRDDLRQAVSELKGVAPNNIRVMAATLSWRRVWCGKSATELRELGISVGVLRGVTRRVLLGSYLNWWSFYRGTSLHPSLPPPPSSSSLIPRAGVG

SEQ ID NO: 24429 - protein, 1073 aa, Apolygus lucorum
MDETLEQPHNPRQPIGSRGIRGGAQRRPRQGRRPSSPSSSSSSSLPSSSSTASLDHQCAHCERAFTSRSGLGVHVRRKHPVASNAAIEIERVQPRYASEDLRRMAADEVVAVRNGVRNINVYLSERFPTRTVIAIKNLRLKPHYKQLVQEAIQANSGGASPASPIAGVDQQSAIQYPSPGTSDLLADLKTEVLRLGGQVGRIEGYESTYLQDLARRAAEGLDNLEDMVAAYLGRIFPRVGDATVTQHQGRPSPRVVLRGGRRAAKQARRQEYHRVQSLWRKHPARVAAEVLEEPGGDQVQPPLQEFVDFWEPLLSAPSHNPGERVVPPVSTRDSLRSILCSPELLDEAHKCRVKNSTSAGPDGVSARRWNKAPNTIKLLILNLLMLAGRPPKALTRTRTVFIPKKGGSGPGGYRPISVSSVVFRHFQKVLASRLQVAGVIGDVQRAFRPADGTAENLTVLQTVISLARIKRRQLHLAALDVAKAFDTVSHFALTDCLRGVGAPSRLIEYVACLYHEGVTVLEAGGEVSGDVRIGRGVCQGDPLSPLLFNLVVDTALGKLPTEVGFDLAPGVRVGALAFADDVILLAETREGLQIALNAFAKQLARCGLVVNPDKCGSVSLVPSGRQHKVKVVDGGFVVGQSPIPSRSVLEVWRYLGVDFMGVATITTSRVDLGRAIARVTKAPLKPQQKLRLLRTYLLPKLTYGLVFGRLTAGRLQELDRQVRSAVRSWLKFPPGVPSAYFHAPVKSGGLGIVSLSACIPSLRRQRLLALRGSSWEVARAAADLDFVRQQLAWCDRATPSAPKPSSSAEFAAALHESVDGKELRQCSESLVSSQWVDWASEGIGARDYRHFHAVRMATLPTAVRCSRGSRGTTLPLCRACRSGNEHLYHVVQQCPAVAKQIAGALSSSGWDVERERLYHMPSDQGKKPDIVAVKPDQSCIILDVQVVNGSLDMEQTWRAKIRKYDRDDLWQAVSELKGVVPNNIRVMAATLSWRGVWCGKSATELRELGISVGVLRGITTRVLLGSYLNWWSFYRNHLRSLPLKPSESTPTLPRPAESTPTLPGNHTVGKQAP

SEQ ID NO: 24430 - protein, 967 aa, Apolygus lucorum
MAADEVVAVRNGVRNINVYLSECFPTRTVIAIKNLRLKPHYKQLVQEAILANSGGASTASQVAGMDQQSAIQYPSPGTSGLLADLKTEVLRLGGQVGRIEGYESTYLQDLARRAAEGLDNLEDEVAAYLGRIFPRVGDATVTQHQGGPPPRVVLRGGRRAAKQARWREYHRVQSLWRKHPARVAAEVLEEPGEDQVQPPLQEFVDFWEPLLSAPSHNPGERVVPPVSTRDSLRGILCSPVLLDEAHKCRVKNSTSAGPDGVSARRWNKAPNTIKLLILNLLMLAGRPPKALTRTRTVFIPKKGGSGPGGYRPISVSSVVFRHFQKVLASRLQVAGVIGDVQRAFRPADGTAENLTVLQTVISLARIKRRQLHLAALDVAKAFDTVSHLALTDCLRGVGAPSRLIEYVACLYHEGVTVLEAGGEVSGDVRIGRGVRQGDPLSPLLFNLVVDTALGKLPTEVGFDLAPGVRVGALAFADDVILLAETREGLQIALNAFAKQLSRCGLVVNPDKCGSVSLVPSGRQHKVKVVDGGFVIGQAPIPSRSVLEVWRYLGVDFMGVATITASRVDLGRALARITKAPLKPQQRLRLLRTYLLPKLTYGLVFGRLTAGRLQELDREVRSAVRSWLRFPPGVPSAYIHAPVKSGGLGIVALSACIPSLRRRRLLALQGSSWEVARVAAGLDFVRQQLAWCDRATPSAPKPSSSAEFAAALHESVDGKELRQCSESLISSQWVDWASEGIGARDYRNFHAVRVATLPTAVRCSRGSRGMTDTLCRACRSGNEHLYHVVQQCPRTHGGRILRHDAVAKQIAGALSSSGWDVERERLYHMPSDQGKKLDIVAVKPDRSCIILDVQVVNGSMDMEQTWRAKIRKYDRDDLRQAVSELKGVAPNNIRVMAATLSWRGVWCGKSATELRELGISVGVLRGVTRRVLLGSYLNWWSFYRGTSLHPSLPPPPSSSSLIPRAGVG

SEQ ID NO: 24431 - protein, 1095 aa, Apolygus lucorum
MTLWRLGRGPLLPGSLTLLKCASPVMNTNDDEPHNPRRPIGTRGSGGGAQRRPRQGRRPSSPSSSSSSSLPSSSSTASLNHQCAHCERAFTTRSGLGLHVRRKHPVAANAAIEIERVQPRYASEDLRRMAGDEVVAVRSGVRNINVYLSERFPTRTVNAISKLRQRPHYRQLVQDAILANSSGASPASPIADVEQQPAIQNPSPGTSGLLADLKTEVMRLGGQVGRIEGYESTYLQDLARRAAEGSENLEDEVAAYLGRIFPQVGDATVTRHQRGPPLRMVLRGGRRAAKQARRREYHRVQSLWRKHPARVAAEVLEEPGENQVQPPLQEFVDFWEPLLSAPSHEPGERVVPPVSTRDSLRGIMCSPVLLDEAHKCRVKNSTSAGPDGISARRWNKAPKTIKLLILNLLLLAGRPPKALTRTRTVFIPKKGGSGPGGYRPISVSSVVFRHFQKVLASRLQVAGVIGDVQRAFRPADGTAENLTVLQTVISLARLKRRQLHLAALDVAKAFDTVSHFALTDCLHGVGAPTRLIEYVACLYHEGVTVLEAGGEMSRDIMIGRGVRQGVPLSPLLFNLVVDTALGKLPTEVGFDLAPGVRVGALAFADDVILLAETREGLQIALNAFAKQLARCGLVVNPDKCGSVSLVPSGRQHKVKVVDGGFVIGQSPIPSRSVLEVWRYLGVDFMGVATITASRVDLGRALARVTKAPLKPQQKLRLLRTYLLPKLTYGLVFGRLTAGKLQELDREVRSAVRSWLKFPPGVPSAYFHAPVKSGGLGIVSLSASIPSLRRQRLLALRGSSWGVAHAAADLDFVRQQLAWCDRATPSAPKPSSSAEFAAVLHESVDGKELRQCSESLISSQWVDWASEGIGARDYRHFHAVRVASLPTAVRCTRGSRGATLPLCRACRSRSEHLYHVVQQCPRTHGGCILRHDAVAKQIAGALSSSSWDVERERLYHMPSDQGKKPDIVAVKPDQSCIILDVQVVNGSLDMEQTWRAKIRKYDTNDLRQAVSELKGVAPNNIRVMAATLSWRGVWCGKSATELRELGISVGVLRGITTRVLLGSYLNWWSFYRGTSLHPSLPPPPSSSSLIPRAGVG

SEQ ID NO: 24432 - protein, 1095 aa, Apolygus lucorum
MIDEADEPHNPRQPIGSRGIRGGAQRRPRQGRRPSSPSSSSSSSLPSSSSTASLDHQCAHCERAFTSRSGLGVHVRRKHPVAANAAIEIERVQPRYASEDLRRMAADEVVAVRNGVRNINVYLSERFPTRTVIAIKNLRLKPHYKQLVQEAILANSGGASPASPIAGVDQQSAIQYPSPGTSGLLADLKTEVLRLGGQVGRIEGYESTYLQDLARRAAEGLDNLEDMVAAYLGRIFPRVGDATVTRHQGRPPPRVVLRGGRRAAKQARRQEYHRVQSLWRKHPARVAAEVLEEPGEDQVQPPLQEFVDFWEPLLSAPSHNPGERVVPPVSTRDSLRSILCSPVLLDEAHKCRVKNSTSAGPDGVSARRWNKAPNMIKLLILNLLMLAGRPPKALTRTRTVFIPKKGGSGPGGYRPISVSSVVFRHFQKVLASRLQVAGVIGDVQRAFRPADGTAENLTVLQTVISLARIKRRQLHLAALDVAKAFDTVSHFALTDCLRGVGAPSRLIEYVACLYHEGVTVLEAGGEVSGDVRIGRGVRQGDPLSPLLFNLVVDTALGKLPTEVGFDLAPGVRVGALAFADDVILLAETREGLQIALNAFAKQLARCGLVVNPDKCGSVSLVPSGRQHKVKVVDGGFVVGQSPIPSRSVLEVWRYLGVDFMGVATITTSRVDLGRALARVTKAPLKPQQKLRLLRTYLLPKLTYGLVFGRLTVGRLQELDRQVRSAVRSWLKFPPGVPSAYFHAPVKSGGLGIVSLSACIPSLRRQRLLALQGSSWEVARAAADLDFVRQQLAWCDRATPSAPKPSSSAEFAAALHESVDGKELRQCSESLVSSQWVDWASEGIGARDYRHFHAIRMATLPTAVRCSRGSRGTTLPLCRACRSGNEHLYHVVQQCPRTHGGRILRHDAVAKQIAGALSSSGWDVERERLYHMPSDQGKKPDIVAIKPDQSCIILDVQVVNGSLDMEQTWRAKIRKYDRDDLRQAVSELKGVVPNNIRVMAATLSWRGVWCGKSATELRELGISVGVLRGITTRVLLGSYLNWWSFYRGTSLHPSLPPPPSSSSASGESWASSPLYLIYLFIFIYGVPPPSQKTFCL

SEQ ID NO: 24433 - protein, 901 aa, Apolygus lucorum
MWSSSLPFSIPPPPLLVDLNTEVLRLGGQVGRIEGYESTYLQDLLRRAVEGLDNLEDEVAAYLGRIFPRVGDATVTRHQGGPPPRMVLRGGRRAAKQARRREYHGVQSLWRKHPARVAAEVLEEPGENQVQPPLQEFVDFWESLLSAPSHDPGECVVPPVSTRESLRSIMCSPVLSDEAHKCCVRNSTSAGPDGVSARRWNKAPKMIKLLILNLLLLAGRPPKALTRTRTVFIPKKGGSGPGGYRPISVSSVVFGHFQEVLASRLQVTGVIGDVQRAFRPVDGTAENLTVLQTVISLARIKCRPLHLAPLDVAKAFDTVSHLALTHCLRGVGAPSRLIEYVACLYQEGVTVLEAGGEVSGDIRIGRGVCQGDLLSPLLFNLVVDRALGKLPTEVGFDLAPGVRVGALAFADDVILLAETREGLQIALNAFAKQLPGCGLVVNPDKCGSVSLVPSGRQHKVRVVDEGFVVGQSPIPSRSVLEVWRYLGVDFMGVATITASRVDLGTALARVTKAPLKPQQKLRLLRTYLLPKLTYGLVFGRLMAGRLQELDREVRSAVLSWLKFPPGVPSAYVHAPVKSGGLGIVSLSACIPSLRHRRLLALQGSSWVVDRAAADIDFVRQQLAWCDRATPSAPKPSSSAEFAAALHESVDGKELRQCSESLVSSQWVDWASEGIGARDYRHFHAIRVASLPTAVRCSRGGRGTTLPLCRACRSENEHLYHVVQQCPRTHGGRILRHDAVAKQIAGALSSSGWDVERERLYHMPSDQGKKPDIVAVKPDQSCIILDVQVVNGSLDMEQTWRAKIRKYDTNDLRQAVSELKGVAPNNIRVMAATLSWRGVWCGKSATELRELGISVGVLRGITTRVLLGSYLNWWSFYRGTSLHPSLPPPPSSSSLIPWAGVG

SEQ ID NO: 24434 - protein, 1070 aa, Apolygus lucorum
MDQNHQLPHNPRQPIGSRGIRGGAQRRPRQGRRPSSPSSSSSSSLPSSSSTASLDHQCAHCERAFTSRSGLGVHVRRKHPVAANAAIEIERVQPRYASEDLRRMAADEVVAVRNGVRNINVYLSERFPTRTVIAIKNLRLKPHYKQLVQEAILANSGGASPASPVAGMDQQSAIQYPSPGTSGLLADLKTEVLRLGGQVGRIEGYESTYLQDLARRAAEGLDNLEDEVAAYLGRIFPRVGDATVAQHQGGPPPRVVLRGGRRAAKQARRREYHRVQSLWRKHPARVAAEVLEEPGEDQVQPPLQEFVDFWEPLLSAPSHNPGERVVPPVSTRDSLRSILCSPVLLDEAHKCRVKNSTSAGPDGIPARRWNKAPNTIKLLILNLLMLAGRPPKALTRTRTVFIPKKGGSGPGGYRPISVSSVVFRHFQKVLASRLQVAGVIGDVQRAFRPADGTAENLTVLQTVISLARIKRRQLHLAALDVAKAFDTVSHLALTDCLRGVGAPSRLIEYVACLYHEGVTVLEAGGEVSGDVRIGRGVRQGDPLSPLLFNLVVDTALGKLPTEVGFDLAPGVRVGALAFADDVILLAETREGLQIALNAFAKQLSRCGLVVNPNKCGSVSLVPSGRQHKVKVVDGGFVIGQAPIPSRSVLEVWRYLGVDFMGVATITASRVDLGRALARITKAPLKPQQRLRLLRTYLLPKLTYGLVFGRLTAGRLQELDREVRSAVRSWLRFPPGVPSAYIHAPVKSGGLGIVALSACIPSLRRQRLLALQGSSWEVARVAAGLDFVRQQLAWCDRATPSAPKPSSSAEFAAALHESVDGKELRQCSESLISSQWVDWASEGIGARDYRNFHAVRVATLPTAVRCSRGSRGMTDTLCRACRSGNEHLYHVVQQCPRTHGGRILRHDAVAKQIAGALSSSGWDVERERLYHMPSDQGKKPDIVAVKPDRSCIILDVQVVNGSMDMEQTWRAKIRKYDRDDLRQAVSELKGVAPNNIRVMAATLSWRGVWCGKSATELRELGISVGVLRGVTRRVLLGSYLNWWSFYRGTSLHPSLPPPPSSSSLIPRAGVG

SEQ ID NO: 24435 - protein, 1070 aa, Apolygus lucorum
MEENPALPHNPRQPIGSRGIRGGAQRRPRQGRRPSSPSSSSSSSLPSSSSTASLNHQCAHCERAFSTRSGLGLHVRRKHPVAANAAIDIERIQHRYASEELRRMAADEVVAVRNGVRNINVYLSERFPMRTVIAIKNIRLKPHYKQLVQEAILANSSGASPASPIADVEQQSAIQYPSPGTSSLLADLKTEVMRLGGQVGRIEGYESAYLQDLVRRAAEGLDNLEDEVAAYLGRIFPRVEDTTVTQHQGGPPPRVMLRGGRRAAKQARRREYHRVQSLWKKHPARVAAEVLEEPGENQVQPPLQEFVDFWEPLLSAPSHDPGERVVPPVSTRDSLRGIMCLPVLSDEAHKCRVRNSTSAGPDGISARRWNKAPKTIKLLILNLLLLAGRPPKALTRARTVFIPKKGGSGPGGYRPISVSSVVFRHFQKVLASRLQVAGVIGDVQRAFRPADGTAENLTVLQTVISLARIKRRQLHLAALDVAKAFDTVSHLALTDCLRGVGAPSRLIEYVACLYQEGVTVLEAGGEVSGDVRIGRGVRQGDPLSPLLFNLVVDTALGKLPTEVGFDLAPGVRVGALAFADDVILLAETREGLQIALNAFAKQLARCGLVVNPDKCGSVSLVPSGRQHKVKVVDGGFVVGQSPIPARSVLEVWRYLGVDFMGVATITASRVDLGRALARVTKAPLKPQQKLRLLRTYLLPKLTYGLVFGRLTAGRLQELDREVRSAVRSWLRFPPGVPSAYVHALVKSGGLGIVSLSACIPSLRRQRLLALQGSSWEVARAAADLDFVRQQLAWCDRATPSAPKPSSSAEFAAALHESVDGKELRQCSESLVSSQWVDWASEGIGARDYRHFHAVRVAALPTAVRCSRGSRGTTLPLCRACRSGNEHLYHVVQQCPRTHGGRILRHDAVAKQIAGALSSSGWDVERERLYHMPSDQGKKPDIVAVKPDQSCIILDVQVVNGSLDMEQTWRAKIRKYDRDDLRQAVSELKGVAPNNIRVMAATLSWRGVWCGKSATELRELGISVGVLRGITTRVLLGSYLNWWSFYRGTSLHPSLPPPPSSSSLIPRAGVG

SEQ ID NO: 24436 - protein, 1075 aa, Apolygus lucorum
MRFPVMNTEPTEPHNPRQPIGSRGIRGGAQRRPRQGRRPSSPSSSSSSSLPSSSSTASLNHQCAHCERAFTTRSGLGLHIRRKHPVAANAAIDIERIQPRYASEELRRMAADEAVAVRNGVRNINVYLNERFPTRTVIAIKNIRLKPHYKQLVQEAILANSSGASPASPIADVEQQPAIQYPSPGTSGLLADLKTEVLRLGGQVGRIEGYESTYLQDLVRRAVEGLDNLEDEVAAYLGRIFPRVGDTTVTQHQGGPPPRMVLRGGRRAAKQARRREYHRVQSLWRKHPARVAAEVLEEPGENQVQPPLQEFVDFWEPFLSAPSHDPGECVVPPVSTRDSLRGIMCSPVLPDEAHKCRVRNSTSAGPDGVSARRWNKAPKTIKLLILNLLLLAGRPPKALTRTRTVFIPKKGGSGPGGYRPISVSSVVFRHFQKVLASRLQVAGVIGDVQRAFRPADGTAENLTVLQTVISLARIKRRQLHLAALDVAKAFDTVSHLALTDCLRGVGAPSRLIEYVACLYQEGVTVLEAGGEVSGDIRIGRGVRQGDPLSPILFNLVVDTALGKLPTEVGFDLAPGVRVGALAFADDVILLAETREGLQIALNAFAKQLAGCGLVVNPDKCGSVSLVPSGRQHKVKVVDGGFVVGQSSIPSRSVLEVWRYLGVDFMGVATITASRVDLGRALARVTKAPLKPQQKLRLLRTYLLPKLTYGLVFGRLTAGRLQELDREVRSAVRSWLKFPPGVPSAYVHAPVKSGGLGIVSLSACIPSLRRQRLLALQGSSWEVARAAADLDFVRQQLAWCDRATPSAPKPSSSAEFAAALHESVDGKELRQCSESLLSSQWVDWASEGIGARDYRHFHAIRVASLPTAVRCSRGSRGTTLPLCRACRSGNEHLYHVVQQCPRTHGGRILRHDAVAKQIAGALSSSGWDVERERLYHMPSDQGKKPDIVAVKPDQSCIILDVQVVNGSLDMEQTWRAKIRKYDTNDLRQAVSELKGVAPNNIRVMAATLSWRGVWCGKSATELRELGISVGVLRGITTRVLLGSYLNWWSFYRGTSLHPSLPPPPSSFSLIPRAGVG

SEQ ID NO: 24437 - protein, 1014 aa, Apolygus lucorum
MFHLGQGKKVCATSSSSCWRMKARVCLKVTIDIERIQHRYASEELRRMAADEAVAVRNGVRNINVYLNERFPTRTVIAIKNIRLKPHYKQLAQEAILTNSSGASPASPVADVEQQPAIQYPSPGTSGLLADLKTEVLRLGGQVGRIEGYESTYLQELVRRAVEGLDNLEDEVAAYLGRIFPRVGDATVTRHQGGPPPRMVLRGGRRAAKQARRREYHRVQSLWRKHPARVAAEVLEEPGENQVQPPLQEFVDFWEPLLSAPSHNPGERVVPPVSTRDSLRGIMCSPVLSDEAHKCRVRNSTSAGPDGVSARRWNKAPKTIKLLILNLLLLSGRPPKALTRTRTVFIPKKGGSGPGGYRPISVSSVVFRHFQKVLASRLQVAGVIGDVQRAFRPADGTAENLTVLQTVISLARIKRRQLHLAALDVAKAFDTVSHLALTDCLRGVGAPSRLIEYVACLYQEGVTVLEAGGEVSGDVRIGRGVRQGDPLSPLLFNLVVDTALGKLPTEVGFDLAPGVRVGALAFADDVILLAKTREGLQIALNAFAKQLARCGLLFNPDKCGSVSLVPSGRQHKVKVVDGGFIVGQSPIPSRSVLEVWRYLGVDFMGVATITASRVDLGRALACVTKAPLKPQQKLRLLRTYLLPKLTYGLVFGRLTAGRLQQLDREVRSAVRSWLKFPPGVPSAYFHAPVKSGGLGIVSLSACIPSLRRRRLLALQGSSWEVARAAADLDFVRQQLAWCDRATPSAPKPSSSAEFAAALHESVDGEELRQCSESLVSSQWVDWASEGIGARDYRHFHAIRVASLPTAVRCSRGSRGTTLPLCRACRSGNEHLYHVVQQCPRTHGGRILRHDAVAKQIAGALSSSGWDVERERLYHMPSDQGKKPDIVAVKPDQSCIILDVQVVNGSLDMEQTWRAKIRKYDTNDLRQAVSELKGVAPNNIRVMAATLSWRGVWCGKSATELRELGISVGVLRGITTRVLLGSYLNWWSFYRGTSLHPSLPPLPSSSSLIPRAGVG

SEQ ID NO: 24438 - protein, 1070 aa, Apolygus lucorum
MEENPALPHNPRQPIGSRGIRGGAQRRPRQGRRPSSPSSSSSSSLPSSSSTASLNHQCAHCERAFSTRSGLGLHVRRKHPVAANAAIDIERIQHRYASEELRRMAADEVVAVRNGVRNINVYLSERFPMRTVIAIKNIRLKPHYKQLVQEAILANSSGASPASPIADVEQQSAIQYPSPGTSGLLADLKTEVMRLGGQVGRIEGYESAYLQDLVRRAAEGLDNLEDEVAAYLGRIFPRVEDTTVTQHQGGPPPRVMLRGGRRAAKQARRREYHRVQSLWKKHPARVAAEVLEEPGENQVQPPLQEFVDFWEPLLSAPSHDPGERVVPPVSTRDSLRGIMCLPVLSDEAHKCRVRNSTSAGPDGISARRWNKAPKTIKLLILNLLLLAGRPPKALTRARTVFIPKKGGSGPGGYRPISVSSVVFRHFQKVLASRLQVAGVIGDVQRAFRPADGTAENLTVLQTVISLARIKRRQLHLAALDVAKAFDTVSHLALTDCLRGVGAPSRLIEYVACLYQEGVTVLEAGGEVSGDVRIGRGVRQGDPLSPLLFNLVVDTALGKLPTEVGFDLAPGVRVGALAFADDVILLAETREGLQIALNAFAKQLARCGLVVNPDKCGSVSLVPSGRQHKVKVVDGGFVVGQSPIPARSVLEVWRYLGVDFMGVATITASRVDLGRALARVTKAPLKPQQKLRLLRTYLLPKLTYGLVFGRLTAGRLQELDREVRSAVRSWLRFPPGVPSAYVHAPVKSGGLGIVSLSACIPSLRRQRLLALQGSSWEVARAAADLDFVRQQLAWCDRATPSAPKPSSSAEFAAALHESVDGKELRQCSESLVSSQWVDWASEGIGARDYRHFHAVRVAALPTAVRCSRGSRGTTLPLCRACRSGNEHLYHVVQQCPRTHGGRILRHDAVAKQIAGALSSSGWDVERERLYHMPSDQGKKPDIVAVKPDQSCIILDVQVVNGSLDMEQTWRAKIRKYDRDDLRQAVSELKGVALNNIRVMAATLSWRGVWCGKSATELRELGISVGVLRGITTRVLLGSYLNWWSFYRGTSLHPSLPPPPSSSSLIPRAGVG

SEQ ID NO: 24439 - protein, 935 aa, Apolygus lucorum
MRKRIILVTYLLVQEAILANSSGASPASPIADVEQQPAIQYPSPGTSGLLADLKTEVLRLGGQVGRIEGYESTYLQDLVRRAAEGLDNLEDEVAAYLGRIFPRVGDVTVTQHQGGPPPRVVLRGGRRAAKQARRREYHRVQSLWRKHPARVAAEVLEEPGENQVQPPLQEFVDFWEPLLSAPSHDPGECVVPPVSARDSLRSIMCSPVLSDEAHKCRVKNSTSAGPDGVSARRWNKAPKTIKLLILNLLLLAGRPPKALTRTRTVFIPKKGGSGPGGYRPISVSSVVFRHFQKVLASRLQVAGVIGDVQRAFRSADGTAENLTVLQTVISLARIKRRQLHLAALDVAKAFDTVSHLALTDCLRGVGAPSRLIEYVACLYQEGVTVLEAGGEVSGDIRIGRGVRQGDPLSPLLFNLVVDTALGKLPTEVGFDLARGVRVGALAFADDVILLAETREGLQIALNAFAKQLARCGLVVNPDKCGSVSLVPSGRQHKVKVVDGGFVVGQSPIPSRSVLEVWRYLGVDFMGVATITTSRVDLGRALARVTKAPLKPQQKLRLLRTYLLPKLTYGLVFGRLTAGRLQQLDREVRSAVRSWLKFPPGVPSAYFHAPVKSGGLGIVSLSACIPSLRRRRLLALQGSSWEVARAAADLDFVRQQLAWCDRATPSAPKPSSSAEFAAALHESVDGKELRQCSESLVSSQWVDWASEGIGARDYRHFHAIRVASLPTAVRCSRGSRGTTLPLCRACRSGNEHLYHVVQQCPRTHGGRILRHDAVAKQIAGALSSSGWDVERERLYHMPSDQGKKPDIVAVKPDQSCIILDVQVVNGSLDMEQTWRAKIRKYDRNDLRQAVSELKGVAPNNIRVMAATLSWRGVWCGKSATELRELGISVGVLRGITTRVLLGSYLNWWSFYRGTSLHPSLPPPPSSSSLIPRAGVG

SEQ ID NO: 24440 - protein, 1095 aa, Apolygus lucorum
MTLWRLGRDPLSTGSLTLHFKRPPVMENTQEQPHNPRLPIGTRGSRGGAQRRPRQGRRPSSPSSSSSSSLPSSSSTASLNHQCAHCERAFTTRSGLGLHVRRKHPVAANAAIDIERVQHRYASEELRRMAADEVVAVRDGVRNINVYLSERFPMRTVIAIKNIRLKPHYKQLVQEAILANSSGASPASPVADVEQQPAIQYPSPGTSGLLADLKTEVLRLGGQVGRIEGYESTYLQGLARRAAEGLDNLENEVAAYLGRIFPQVGDATVTQHQGGPPPGVVLRGGRRAAKQARRREYHRVQSLWRKHPARVAAEVLEEPGENQVQPPLQEFVDFWEPLLSAPSHDPGERVVPPVSTRDSLRSIMCSPVLSDEAHKCRVKNSTSAGPDGISARRWNKAPKTIKLLVLNLLLLAGRPPKALTRARTVFIPKKGGSGPGGYRPISVSSVVFRHFQKVLASRLQVAGIIGDVQRAFRPADGTAENLTVLQTVISLARMKRRQLHLAALDVAKAFDTVSHLALTDCLRGVGAPSRLIEYVACLYQEGVTVLEAGGEVSGDVRIGRGVRQGDPLSPLLFNLVVDTALGKLPTEVGFDLAPGVRVGALAFSDDVILLAETREGLQIALNAFAKQLAKCGLVVNPDKCGSVSLVPSGRQHKVKVVDGGFVIGQSPIPSRSVLEVWRYLGVDFMGVATISASRVDLGRALARVTKAPLKPQQKLRLLRTYLLPKLTYGLVFGRLTAGRLQELDRQVRSAVRSWLRFPPGVPSAYVHAPVKSGGLGIVSLSACIPSLRRQRLLALQGSSWEVARAAADLDFVRQQLAWCDRATPSAPKPSSSAEFAAALHESVDGKELRQCSESPVSSQWVDWASEGIGARDYRHFHAVRMATLPTAVRCSRGSRGTTLPLCRACRSGNEHLYHVVQQCPRTHGGRILRHDAVAKQIAGALSSSGWDVERERLYHMPSDQGKKPDIVAVKPDQSCIILDVQVVNGSLDMEQTWRAKIRKYDRNDLRQAVSELKGVAPNNIRVMAATLSWRGVWCGKSATELRELGISVGVLRGITTRVLLGSYLNWWSFYRGTSLHPSLPPPPSSSSLIPRAGVG

SEQ ID NO: 24441 - protein, 723 aa, Apolygus lucorum
MCSPVLSDEAHKCRVKNSTSAGPDGVSARRWNKAPKTIKLLILNLLLLAGRPPKALTRTQTVFIPKKGGSGPGGYRPISVSSVVFRHFQKVLVSRLQVAGVIGDVQRAFRSADGTAENLTVLQTVISLARIKRRQLHLAALDVAKAFDTVSHLALTDCLRGVGAPSRLIEYVACLYQEGVTVLEAGGEVSGDIRIGRGVRQGDPLSPLLFNLVVDTALGKLPTEVGFDLAPGVRVGALAFADDVILLAETREGLQIALNAFAKQLARCGLVVNPDKCGSVSLVPSGRQHKVKVVDGGFVVGQSPIPSRSVLEVWRYLGVDFMGVATITTSRVDLGRALARVTKAPLKPQQKLRLLRTYLLPKLTYGLVFGRLTAGRLQQLDREVRSAVRSWLKFPPGVPSAYFHAPVKSGGLGIVSLSACIPSLRRRRLLALQGSSWEVARAAADLDFVRQQLAWCDRATPFAPKPSSSAEFAAALHESVDGKELRQCSESLVSSQWVDWASEGIGARDYRHFHAIRVASLPTAVRCSRGSRGTTLPLCRACRSGNEHLYHVVQQCPRTHGGRILRHDAVAKQIAGALSSSGWDVERERLYHMPSDQGKKPDIVAVKPDQSCIILDVQVVNGSLDMEQTWRAKIRKYDTLKGVAPNNIRVMAATLSWRGVWCGKSATELRELGISVGVLRGITTRVLLGSYLNWWSFYRGTSLHPSLPPPPSSSSLIPRAGVG

SEQ ID NO: 24442 - protein, 1070 aa, Apolygus lucorum
MEQNISEPHNPRQPIGSRDIRGGAQRRPRQGRRPSSPSSSSSSSLPSSSSTASLNHQCAHCERAFTTRSGLGLQIRRKHPVAANAAIDIERIQPRYASEELRRMAADEAVAVRNGVRNINVYLNERFPTRTVIAIKNIRLKPHYKQLVQEAILANSSGASPASPIADVEQQPAIQYPSPGTSGLLADLKTEVLRLGGQVGRIEGYESTYLQDLVRRAVEGLDNLEDEVAAYLGRIFPRVGDATVTRHQGGPPPRMVLRGGRRAAKQARRREYHRVQSLWRKHPARVAAEVLEEPGENQVQPPLQEFVDFWEPLLSAPSHDPGECVVPPVSTRDSLRSIMCSPVLSDEAHKCRVRNSTSAGPDGVSARRWNKAPKTIKLLILNLLLLAGRPPKALTRTRTVFIPKKGGIGPGGYRPISVSSVVFRHFQKVLASRLQVAGVIGDVQRAFRPADGTAENLTVLQTVISLARIKRRQLHLAALDVAKAFDTVSHLALTDCLRGVGAPSRLIEYVTCLYQEGVTVLEAGGEVSGDIRIGRGVRQGDPLSPLLFNLVVDTALGKLPTDVGFDLAPGVRVGALAFADDVILLAETREGLQIALNAFAKQLAGCGLVVNPDKCGLVSLVPSGRQHKVKVVDGGFVVGQSPIPSRSVLEVWRYLGVDFMGVATITASRVDLGRALARVTKAPLKPQQKLRLLRTYLLPKLTYGLVFGRLTAGRLQELDREVRSAVRSWLKFPPGVPSAYVHAPVKSGGLGIVSLSACIPSLRRRRLLALQGSSWEVARAAADLDFVRQQLAWCDRATPSAPKPSSSAEFAAALHESVDGKELRQCSESLVSSQWVDWASEGIGARDYRHFHAIRVASLPTAVRCSRGSRGTTLPLCRACRSGNEHLYHVVQQCPRTHGGRILRHDAVAKQIAGALSSSGWDVERERLYRMPSDQGKKPDIVAVKPDQSCIILDVQVVNGSLDMEQTWRAKIRKYDTNDLRQAVSELKGVAPNNIRVMAATLSWRGVWCGKSATELRELGISVGILRGITTRVLLGSYLNWWSFYRGTSLHPSLPPPPSSSSLIPRAGVG

SEQ ID NO: 24443 - protein, 967 aa, Apolygus lucorum
MAGEEVVAVRSGVRNINVYLSERFPTRTVNAISKLRQRPHYRQLVQDAILANNSGASPASPIADVEQQPAIQNPSPGTSGLLADLKTEVMRLGGQVGRIEGYESTYLQDLARRAAEGSENLEDEVAAYLGRIFPQVGDATVTRHQRGPPLRMVLRGGRRAAKQARRREYHRVQSLWRKHPARVAAEVLEEPGENQVQPPLQEFVDFWEPLLSAPSHDPGERVVPPVSTRDSLRGIMCSPVLLDEAHKCRVKNSTSAGPDGISARRWNKAPKTIKLLILNLLLLAGRPPKALTRTRTVFIPKKGGSGPGGYRPISVSSVVFRHFQKVLASRLQVAGVIGDVQRAFRPADGTAENLTVLQTVISLARIKRRQLHLAALDVAKAFDTVSHFALTDWLHGVGAPTRLIEYVACLYHEGVTVLEAGGEMSRDIMIGRGVRQGDPLSPLLFNLVVDTALGKLPTEVGFDLAPGVRVGALAFADDVILLAETREGLQIALNAFAKQLARCGLVVNPDKCGSVSLVPSGRQHKVKVVDGGFVIGQSPIPSRSVLEVWRYLGVDFMGVATITASRVDLGRALARVTKAPLKPQQKLRLLRTYLLPKLTYGLVFGRLTAGRLQELDREVRSAVRSWLKFPPGVPSAYIHAPVKSGGLGIVSLSASIPSLRRQRLLALRGSSWGVARAAADLDFVRQQLAWCDRATPSAPKPSSSAEFAAALHESVDGKELRQCSESLISSQWVDWASEGIGARDYRHFHAVRVASLPTAVRCTRGSRGATLPLCRACRSRSEHLYHVVQQCPRTHGGRILRHDAVAKQIAGALSSSGWDVERERLYHMPSDQGKKPDIVAVKPDQSCIILDVQVVNGSLDMEQTWRAKIRKYDTNDLRQAVSELKGVAPNNIRVMAATLSWRGVWCGKSATELRELGISVDVLRGITTRVLLGSYLNWWSFYRGTSLHPSLPPPPSSSSLIPRAGVG

SEQ ID NO: 24444 - protein, 1094 aa, Apolygus lucorum
MTLWRLGRGPLLTGPLTLYMRFPVMDENLTEPHNPRRPIGTRGSRGGAQRRPRQGRRPSSPSSSSSSSLPSSSSTASLDHQCAHCERAFTSRSGLGVHVRRKHPVAANEEIDIERVQPRYASEDLRRMAADEVVAVRNGVRNINVYLSERFPTRTVIAIKNLRLKPHYKQLVQEAILANSGGASPASPVAGMDQQSAIQYPSPGTSGLLADLKTEVLRLGGQVGRIEGYESTYLQDLARRAVEGLDNLEDKVAAYLGRIFPRVGDATVTQHQGGPPPRVVLRGGRRAAKQARRREYHRVQSLWRKHPARVAAEVLEEPGEDQVQPPLQEFVDFWEPLLSAPSHNPGERVVPPVSTRDSLRSILCSPVLLDEAHKCRVKNSTSAGPDGVSARRWNKAPNTIKLLILNLLMLAGRPPKALTRTRTVFIPKKGGSGPGGYRPISVSSVVFRHFQKVLASRLQVAGVIGDVQRAFRPADGTAENLTVLQTVISLARIKRRQLHLAALDVAKAFDTVSHLALTDCLRGVGAPSRLIEYVACLYHEGVTVLEAGGEVSGDVRIGRGVRQGDPLSPLLFNLVVDTALGKLPTEVGFDLAPGVRVGALAFADDVILLAETREGLQIALNAFAKQLSRCGLVVNPDKCGSVSLVPSGRQHKVKVVDGGFVVGQAPIPSRSVLEVWRYLGVDFMGVATITASRVDLGRALARITKAPLKPQQRLRLLRTYLLPKLTYGLVFGRLTAGRLQELDREVRSAVRSWLRFPPGVPSAYIHAPVKSGGLGIVALSACIPSLRRQRLLALQGSSWEVARVAAGLDFVRQQLAWCDRATPSAPKPSSSAEFAAALHESVDGKELRQCSESLISSQWVDWASEGIGARDYRNFHAVRVATLPTAVRCSRGSRGMTDTLCRACRSGNEHLYHVVQQCPRTHGGRILRHDAVAKQIAGALSSSGWDVERERLYHMPSDQGKKPDIVAVKPDRSCIILDVQVVNGSTDMEQTWRAKIRKYDRDDLRQAVSELKGVEPNNIRVMAATLSWRGVWCGKSATELRELGISVGVLRGVTRRVLLGSYLNWWSFYRGTSLHPSLPPPPSSSSLIPRAGVG

SEQ ID NO: 24445 - protein, 967 aa, Apolygus lucorum
MAADEAVAVRNGVRNINVYLNERFPTRTVIAIKNIRLKPHYKQLVQEAILANSSGASPASPVADVEQQPAIQYPSPGTSGLLADLKTEVLRLGGQVGRIEGYESTYLQDLVRRAVEGLDNLEDEVAAYLGRIFPRVGDATVTRHQGGPPPRMVLRGGRRAAKQARRREYHRVQSLWRKHPARVAAEVLEEPGENQVQPPLQEFVDFWEPLLSAPSHDPGECVVPPVSTRESLRSIMCSPVLSDEAHKCRVRNSTSAGPDGVSARRWNKAPKTIKLLFLNLLLLAGRPPKALTRTRTVFIPKKGGSGPGGYRPISVSSVVFRHFQKVLASRLQVAGVIGDVQRAFQPADGTAENLTVLQTVISLARIKRRQLHLAALDVAKAFDTVSHLALTDCLRGVGAPSRLIEYVACLYQGGVTVLEAGGEVSGDVRIGRGVRQGDPLSPLLFNLVVDTALGKLPTEVGFDLAPGVRVGALAFADDVILLAETREGLQIALNAFAKQLAGCGLVVNPDKCGSVSLVPSGRQHKVKVVDGGFVVGQSPIPSRSVLEVWRYLGVDFMGVATITASRVDLGRALARVTKAPLKPQQKLRLLRTYLLPKLTYGLVFGRLTAGRLQELDREVRSAVRSWLKFPPGVPSAYVHAPVKSGGLGIVSLSACIPSLRRRRLLALQGSSWEVARAAADLDFVRQQLAWCDRATPSAPKPSSSAEFAAALHESVDGKELRQCSESLVSSQWVDWASEGIGARDYQHFHAIRVASLPTAVRCSRGSRGTTLPLCRACLSGNEHLNYVVQQCPRTHGGRILRHDAVAKQIAGALSSSGWDVERERLYHMPSDQGKKPDIVAVKPDQSCIILDVQVVNGSLDMEQTWRAKIRKYDTNDLRQAVSELKGVAPNNIRVMAATLSWRGVWCGKSATELRELGISVGVLRGITTRVLLGSYLNWWSFYRGTSLHPSLPPPPSSSSLIPRAGVG

SEQ ID NO: 24446 - protein, 732 aa, Apolygus lucorum
MCSPVLSDEAHKCRVKNSTSAGPDGISARRWNKAPKTIKLLVLNLLLLAGRPPKALTRARTVFIPKKGGSGPGGYRPISVSSVVFRHFQKVLASRLQVAGIIGDVQRAFRPADGTAENLTVLQTVISLARMKRRQLHLAALDVAKAFDTVSHLALTDCLRGVGAPSRLIEYVACLYQEGVTVLEAGGEVSGDVRIGRGVRQGDPLSPLLFNLVVDTALGKLPTEVGFDLAPGVRVGALAFADDVILLAETREGLQIALNAFAKQLARCGLVVNPDKCGSVSLVPSGRQHKVKVVDGGFVIGQSPIPSRSVLEVWRYLGVDFMGVATISASRVDLGRALARVTKAPLKPQQKLRLLRTYLLPKLTYGLVFGRLTAGRLQELDQQVRSAVRSWLRFPPGVPSAYVHAPVKSGGLGIVSLSACIPSLRRQRLLALQGSSWEVARAAADLDFVRQQLAWCDRATPSAPKPSSSAEFAAALHESVDGKELRQCSESPVSSQWVDWASEGIGARDYRHFHAVRMATLPTAVRCSRGSRGTTLPLCRACGSRNEHLYHVVQQCPRTHGGRILRHDAVAKQIAGALSSSGWDVERERLYHMPSDQGKKPDIVAVKPDQSCIILGVQVVNGSLDMEQTWRAKIRKYDRNDLRQAVSELKGVAPNNIRVMAATLSWRGVWCGKSAMELRELGISVGVLRGITTRVLLGSYLNWWSFYRGTSLHPSLPPPPSSSSLIPRAGVG

SEQ ID NO: 24447 - protein, 1094 aa, Apolygus lucorum
MTLWRIGREPLSTGSLTLSLRFPVMDKNQTEPHNPRRPIGTRGSRGGAQRRPRQGRRPSSPSSSSSSSLPSSSSTASLDHQCAHCERAFTSRSGLGVHVRRKHPVAANEEINVERVQPRYASEDLRRMAADEVVAVRNGVRNINVYLSERFPTRTVIAIKNLRLKPHYKQLVQEAILANSGGASPASPVAGVDQQSAIQYPSPGTSGLLADLKTEVLRLGGQVGRIEGYESTYLRDLARRAAEGLDNLEDEVAAYLGRIFPRVGDATVTQHQGGPPPRMVLRGGRRAAKQARRQEYHRVQSLWRKHPARVAAEVLEEPGEDQVQPPLQEFVDFWEPLLSAPSHNPGERVVPPVSTRDSLRSILCSPVLLDEAHKCRVKNSTSAGPDGVSARRWNKAPNTIKLLILNLLMLAGRPPKALTRTRTVFIPKKGGSGPGGYRPISVSSVVFRHFQKVLASRLQVAGVIGDVQRAFRPVDGTAENLTVLQTVISLARIKRRQLHLAALDVAKAFDTVSHLALTDCLRGVGAPSRLIEYVACLYHEGVTVLEAGGEVSGDVRIGRGVRQGDPLSPLLFNLVVDTALGKLPTEVGFDLAPGVRVGALAFADDVILLAETREGLQIALNAFAKQLSRCGLVVNPDKCGSVSLVPSGRQHKVKVVDGGFVIGQAPIPSRSVLEVWRYLGVDFMGVATITASRVDLGRALARITKAPLKPQQRLRLLRTYLLPKLTYGLVFGRLTAGRLQELDREVRSAVRSWLRFPPGVPSAYIHAPVKSGGLGIVSLSACIPSLRRQRLLALQGSSWEVARVAAGLDFVRQQLAWCDRATPSAPKPSSSAEFAAALHESVDGKELRQCSESLISSQWVDWASEGIGARDYRNFHAVRVATLPTAVRCSRGSRGMTDTLCRACRSGNEHLYHVVQQCPRTHGGRILRHDAVAKQIAGALSSSGWDVERERLYHMPSDQGKKPDIVAVKPDRSCIILDVQVVNGSMDMEQTWRAKIRKYDRDDLRQAVSELKGVEPNNIRVMAATLSWRGVWCGKSATELRELGISVGVLRGVTRRVLLGSYLNWWSFYRGTSLHPSLPPPPSSSSLIPRAGVG

SEQ ID NO: 24448 - protein, 1051 aa, Apolygus lucorum
MVPNEDHHLRTDSSHCACANVNFPSLPSSSSTASLDHQCAHCERAFTTRSGLGVHIRRKHPVAANDEIDVERVQPRYASEDLRRMAADEVVAVRNGVRNINVYLSERFPTRTVIAIKNLRLKPHYKQLVQEAILANSGGASPASPIADVDQQSAIQYPSPGTSGLLADLKTEVLRLGGQVGRIEGYESTYLQDLARRAAEGLDNLEDKVAAYLGRIFPRVGDATVTQHQGGPPPRVVLRGGRRAAKQARRREYHRVQSLWRKHPARVAAEVLEEPGEDQVQPPLQEFVDFWEPLLSAPSHNPGERVVPPVSTRDSLRSILCSPVLLDEAHKCRVKNSTSAGPDGVSARRWNKVPNTIKLLILNLLILAGRPPKALTRTRTVFIPKKGGSGPGGYRPISVSSVVFRHFQKVLASRLQVAGVIGDVQRAFRPADGTAENLTVLQTVISLARIKRRQLHLAALDVAKAFDTVSHLALIDCLRGVGAPSRLIEYVACLYREGVTVLEAGGEVSRDIVIGRGVRQGDPLSPLLFNLVVDTALGKLPTEVGFDLAPGVRVGALAFADDVILLAETREGLQIALNAFAKQLSRCGLVVNPDKCGSVSLVLSGRQHKVKVVDGGFVIGQVPIPSRSVLEVWRYLGVDFMGVATITASRVDLGRALARVTKAPLKPQQRLRLLRTYLLPKLTYGLVFGRLTAGRLQELDREVRSAVRSWLRFPPGVPSAYIHAPVKSGGLGIVSLSACIPSLRRQRLLALQGSSWEVARVAAGLDFVRQQLAWCDRATPSAPKPSSSAEFAAALHESVDGKELRQCSESLISSQWVDWASEGIGARDYRNFHAVRVATLPTAVRCSRGSRGMTDTLCRACWSGNEHLYHVVQQCPRTHGGRILRHDAVANQIAGALSSSGWDVERERLYHMPSDQGKKPDIVAVKPDRSCIILDVQVVNGSMDMEQTWRAKIRKYDRDDLRQAVSELKGVEPNNIRVMAATLSWRGVWCGKSATELRELGISVGVLRGVTRRVLLGSYLNWWSFYRGTSLHPSLPPPPSSSSLIPRAGVG

SEQ ID NO: 24449 - protein, 967 aa, Apolygus lucorum
MAADEAVAVRDGVRNINVYLSERFPMRTVIAIKNIRLKPHYKQLVQEVILANSSGASPASPVADVEQQPAIQHPSPGTSGLLADLKTEVLRLGGQVGRIEGYESTYLQDLARRAAEGLDNLENEVAAYLGRIFPRVGDATVTHHQGGPPPRVVLRGGRRAAKQARRREYHRVQSLWRKHPARVAAEVLEEPGENQVQPPLQEFVDFWQPLLSAPSHDPGERVVPPVSTRDSLRGIMCSPVLSDEAHKCRVKNSTSAGPDGISARRWNKAPRTIKLLLLNLLLLAGRPPKALTRTRTVFIPKKGGSGPGGYRPISVSSVVFRHFQKVLASRLQVAGIIGDVQRAFRPADGTAENLTVLQTVISLARMKRRQLHLAALDVAKAFDTVSHFALTDCLRGVGAPSRLIEYVACLYHEGVTVLEAGGEVSGDVRIGRGVRQGDPLSPLLFNLVVDTALGKLPTEVGFDLAPGVRVGALAFADDVILLAETREGLQIALNAFAKQLARCGLVVNPDKCGSVSLVPSGRQHKVKVVDGGFVIGQSPIPSRSVLEVWRYLGVDFMGVATISASRVDLGRALARVTKAPLKPQQKLRLLRTYLLPKLTYGLVFGRLTAGRLQELDRQVRSAVRSWLRFPPGVPSAYVHAPVKSGGLGIVSLSACIPSLRRQRLLALQGSSWEVARAAADLDFVRQQLAWCDRATPSAPKPSSSAEFAAALHESVDGKELRQCSESPVSSQWVDWASEGIGARDYRHFHAVRMATLPTAVRCSRGSRGTTLPLCRACRSGNEHLYHVVQQCPRTHGGRILRHDAVAKQIAGALSSSGWDVERERLYHMPSDQGKKPDIVAVKPDQSCIILDVQVVNGSLDMEQTWRSKIRKYDRNDLRQAVSELKGVAPNNIRVMAATLSWRGVWCGKSATELRELGISVGVLRGITTRVLLGSYLNWWSFYRGTSLHPSLPPPPSSSSLIPRAGVG

SEQ ID NO: 24450 - protein, 1095 aa, Apolygus lucorum
MTLWRIGREPLSTGSLALLNKRPPVMENNPEEPHNPRLPIGPRGSRGGAQRRPRQGRRPSSPSSSSSSSLPSSSSTASLNHQCAHCERAFTTRSGLGLHVRRKHPVAANAAIDIERIQHRYASEELRRMAADEAVAVRNGVRNINVYLSERFPMRTVIAIKNIRLKPHYKQLVQEVILANSSGASPASPVADVEQQPAIQHPSPGTSGLLADLKTEVLRLGGQVGRIEGYESTYLQDLARRAAEGLDNLENEVAAYLGRIFPRVGDATVTHHQGGPPPRVVLRGGRRAAKQARRREYHRVQSLWRKHPARVAAEVLEEPGENQVQPPLQEFVDFWEPLLSAPSHDPGERVVPPVSTRDSLRSIMCSPVLSDEAHKCRVKNSTSAGPDGISARCWNKAPRTIKLLLLNLLLLAGRPPKALTRTRTVFIPKKGGSGPGGYRPISVSSVVFRHFQKVLASRLQVAGIIGDVQRAFRPADGTAENLTVLQTVISLARMKRRQLHLAALDVAKAFDTVSHFALTDCLRGVGAPSQLIEYVACLYHKGVTVLEAGGEVSGDVRIGRGVRQGDPLSPLLFNLVVDTALGKLPTEVGFDLAPGVRVGALAFADDVILLAETREGLQIALNAFAKQLARCGLVVNPDKCGSVSLVPSGRQHKVKVVDGGFVIGQSPIPSRSVLEVWRYLGVDFMGVATISASRVDLGRALDRVTKAPLKPQQKLRLLRTYLLPKLTYGLVFGRLTAGRLQELDRQVRSAVRSWLRFPPGVPSAYVHAPVKSGGLGVVSLSACIPSLRRQRLLALQGSSWEVARAAANLDFVRQQLAWCDRATPSAPKPSSSAEFAAALHESVDGRELRQCSESPVSSQWVDWASEGIGARDYRHFHAVRMATLPTAVRCSRGSRGTTLPLCRACRSGNEHLYHVVQQCPRTHGGRILRHDAVAKQIAGALSSSGWDVERERLYHMPSDQGKKPDIVAVKPDQSCIILDVQVVNGSLDMEQTWRAKIRKYDRNDLRQAVSELKGVAPNNIRVMAATLSWRGVWCGKSATELRELGISVGVLRGITTRVLLGSYLNWWSFYRGTSLHPSLPPPPSSSSLIPRAGVG

SEQ ID NO: 24451 - protein, 1070 aa, Apolygus lucorum
MDTNQDQPHNPRQPIGSRGIRGGAQRRPRQGRRPSSPSSSSSSSLPSSSSTASLNHQCAHCERAFTTRSGLGLHVRRKHPVAANAAIDIERIQPRYASEELRRMAADEAVAVRNGVRNINVYLNERFPTRTVIAIKNIRLKPHYKQLVQEAILANSSGASPASPIADVEQQPAIQYPSPGTSGLLADLKTEVLRLGGQVGRIEGYESTYLQDLVRRAVEGLDNLEDEVAAYLGRIFPRVGDATVTRHQGGPPPRMVLRGGRRAAKQARRREYHRVQSLWRKHPARVAAEVLEEPGENQVQPPLQEFVDFWEPLLSAPSHDPGECVVPPVSTRDSLRSIMCSPVLSDEAHKCRVRNSTSAGPDGVSARRWNKAPKTIKLLILNLLLLAGRPPKALTRTRTVFIPKKGGSGPGGYRPISVSSVVFRHFQKVLASRLQVAGVIGDVQRAFRPADGTAENLTVLQTVISLARIKRRQLHLAALDVAKAFDTVSHLALTDCLRGVGAPSRLIEYVACLYQEGVTVLEAGGEVSGDVRIGRGVRQGDPLSPLLFNLVVDTALGKLPTEVGFDLAPGVRVGALAFADDVILLAETREGLQIALNAFAKQLAGCGLVVNPDKCGSVSLVPSGRQHKVKVVDGGFVVGQSPIPSRSVLEVWRYLGVDFMGVATITASRVDLGRALARVTKAPLKPQQKLRLLRTYLLPKLTYGLVFGRLTAGRLQELDREVRSAVRSWLKFPPGVPSAYVHAPVKSGGLGIVSLSACIPSLRRRRLLALQGSSWEVARAAADLDFVRQQLAWCDRATPSAPKPSSSAEFAAALHESVDGKELRQCSESLVSSQWVDWASEGIGARDYRHFHAIRVASLPTAVRCSRGSRGTTLPLCRACRSGNEHLYHVVQQCPRNHGGRILRHDAVAKQIAGALSSSGWDVERERLYHMPSDQGKKPDIVAVKPDRSCIILDVQVVNGSLDMEQTWRAKIRKYDTNDLRQAVSELKGVAPNNIRVMAATLSWRGVWCGKSATELRELGISVGVLRGITTRVLLGSYLNWWSFYRGTSLHPSLPPPLSSSSLIPRAGVG

SEQ ID NO: 24452 - protein, 967 aa, Apolygus lucorum
MAADEAVAVRNGVRNINVYLNERFPTRTVIAIKNIRLKPHYKQLVQEAILANSSGASPASPVADVEQQPAIQYPSPGTSGLLADLKTEVLRLGGQVGRIEGYESTYLQDLVRRAVEGLDNLEDEVAVYLGRIFPRVGDATVTRHQGGPPPRMVLRGGRRAAKQARRREYHRVQSLWRKHPARVAAEVLEEPGENQVQPPLQEFVDFWEPLLSAPSHDPGECVVPPVSTRESLRSIMCSPVLSDEAHKCRVRNSTSAGPDGVSARRWNKAPKTIKLLILNLLLLAGRPPKALTRTRTVFIPKKGGSGPGGYRPISVSSVVFRHFQKVLASRLQVAGVIGDVQRAFWPADGTAENLTVLQTVISLARIKRRQLHLAALDVAKAFDTVSHLALTDCLRGVGAPSRLIEYVACLYQEGVTVLEAGGEVSGDIRIGSGVCQGDPLSPLLFNLVVDTALGKLPTEVGFDLAPGVRVGALAFADDVILLAETREGLQIALNAFAKQLAGCGLVVNPDKCGLVSLVPSGRQHKVKVVDGGFVVGQSPIPSRSVLEVWRYLGVDFMGVATITASRVDLGRALARVTKAPLKPQQKLRLLRTYLLPKLTYGLVFGRLTAGRLQELDREVRSAVRSWLKFPPGVPSAYVHAPVKSGGLGIVSLSACIPSLRRRRLLALQGSSWEVARAAADLDFVRQQLAWCDRATPSAPKPSSSAEFAAALHESVDGKELRQCSESLVSSQWVDWASEGIGARDYRHFHAIRVASLPTAVRCSRGGRGTTLPLCRACRSGNEHLYHVVQQCPRTHGGRILRHDAVAKQIAGALSSSGWDVERERLYHMPSDQGKKPDIVAVKPDQSCIILDVQVVNGSLDMEQTWRAKIRKYDTNDLQQAVSELKGVAPNNIRVMAATLSWRGVWCGKSATELRELGISVGVLRGITTRVLLGSYLNWWSFYRGTSLHPSLPPPPSSSSLIPMAGVG

SEQ ID NO: 24453 - protein, 963 aa, Apolygus lucorum
MTFSGMLQISILMVPYENHYLRTDSSHCACANGNFHYKQLVQDAILANSSGASPASPVAGVDQQSAIQYPSPGTSGLLADLKTEVLRLGGQVGRIEGYESTYLQDLARRAVEGLDNLEDKVAAYLGRIFPRVGDATVTQHQGGPPPRVVLRGGRRAAKQARRREYHRVQSLWRKHPARVAAEVLEEPGEVQVQPPLQEFVDFWEPLLSAPSHNPGERVVPPVSTRDSLRSILCPPVLLDEAHKCRVKNSTSAGPDGISARRWNKAPNTIKLLILNLLILAGRPPKVLTRTRTVFIPKKGGSGPGGYRPISVSSVVFRHFQKVLASRLQVAGVIGDVQRAFRPADGTAENLTVLQTVISLARIKRRQLHLAALDVAKAFDTVSHLALTDCLRGVGAPSRLIEYVACLYHEGVTVLEAGGEVSGDIRIGRGVRQGDPLSPLLFNLVVDTALGKLPTEVGFDLAPGVRVGALAFADDVILLAETREGLQIALNAFAKQLSRCGLVVNPDKCGSVSLVPSGRQHKVKVVDGGFVIGQAPIPSRSVLEVWRYLGVDFMGVATITASRVDLGRALARITKAPLKPQQRLRLLRTYLLPKLTYGLVFGRLTAGRLQELDREVRSAVRSWLRFPPGVPSAYIHAPVKSGGLGIVSLSACIPSLRRQRLLALQGSSWEVARVAAGLDFVRQQLAWCDRATPSAPKPSSSAEFAAALHESVDGKELRQCSESLISSQWVDWASEGIGVRDYRNFHAVRVATLPTAVRCSRGSRGMTDTLCRACRSGNEHLYHVVQQCPRTHGGRILRHDAVAKQIAGALSSSGWDVERERLYHMPSDQGKKPDIVAVKPYRSCIILDVQVVNGSMDMEQTWRAKIRKYDRDDLRQAVSELKGVAPNNIRVMAATLSWRGVWCGKSATELRELGISVGVLRGVTRRVLLGSYLNWWSFYRGTSLHPSLPPPPSSSSLIPRAGVG

SEQ ID NO: 24454 - protein, 1095 aa, Apolygus lucorum
MTLWRIGREPLSTGSLTLHFKRPPVMDTENNQPHNPRLPIGTRGSRGGAQRRPRQGRRPSSPSSSSSSSLPSSSSTASLNHQFAHCERAFTTRSGLGLHVRRKHPVAANAAIDIERVQHRYASEELRRMAADEVVAVRDGVRNINVYLSERFPMRTVIAIKNIRLKPHYKQLVQEAILANSSGASPASPIAGVEQQPAIQYPSPGTSGLLADLKTEVLRLGGQVGRIDGYESTYLQDLARRAAEGLDSLENEVAAYLGRIFPRVGDATVTQHQEGPPPRVVLRGGRRAAKQARRREYHRVQSLWRKHPARVAAEVLEEPGENQVQPPLQEFVDFWEPLLSAPSHDPGERVVPPVSTRDSLRSIMCSPVLSDEAHKCRVKNSTSAGPDGISARRWNKAPKTIKLLVLNLLLLAGRPPKALTRARTVFIPKKGGSGPGGYRPISVSSVVFRHFQKVLASRLQVAGIIGDVQRAFRPADGTAENLTVLQTVISLARMKRRQLHLAALDVAKAFDTVSHLALTDCLRGVGAPSRLIEYVACLYQEGVTVLEAGGEVSGDVRIGRGVRQGDPLSPLLFNLVVDTALGKLPTEVGFDLAPGVRVGALAFADDVILLAETREGLQIALNAFAKQLARCGLVVNPDKCGSVSLVPSGRQHKVKVVDGGFVIGQSPIPSRSVLEVWRYLGVDFMGVATISASRVDLGRALARVTKAPLKPQQKLRLLRTYLLPKLTYGLVFGRLTAGRLQELDRQVRSAVRSWLRFPPGVPSAYVHAPVKSGGLGIVSLSACIPSLRRQRLLALQGSSWEVARAAADLDFVRQQLAWCDRATPSAPKPSSSAEFAAALHESVDGKELRQCSESPVSSQWVDWASEGIGARDYRHFHAVRMATLPTAVRCSRGSRGTTLPLCRACRSGNEHLYHVVQQCPRTHGGRILRHDAVAKQIAGALSSSGWDVERERLYHMPSDQGKKPDIVAVKPDQSCIILDVQVVNGSLDMEQTWRAKIRKYDRNDLRQAVSELKGVAPNNIRVMAATLSWRGVWCGKSATELRELGISVGVLRGITTRVLLGSYLNWWSFYRGTSLHPSLPPPPSSSSLIPRAGVG

SEQ ID NO: 24455 - protein, 1070 aa, Apolygus lucorum
MNQNVTEPHNPRRPIGTRGSGGGAQRRPRQGRRPSSPSSSSSSSLPSSSSTASLNHQCAHCERAFTTRSGLGLHVRRKHPVAANAAIEIERVQPRYASEDLRRMAADEAVAVRSGVRNINVYLNERFPARTVNAISKLRQRPHYKQLVQEAILANSSGASPASPIADVEQQPAIQNPSPGTSGLLADLKTEVLRLGGQVGRIEGYESTYLQDLARRAAEGSENLEDEVAAYLGRIFPRVGDATVMQHRRGPPLRMVLRGGRRAAKQARRREYHRVQSLWRKHPARVAAEVLEEPGDDQVQPPLQEFVNFWEPLLSAPSHDPGERVVPPVSTRDSLRSIMCSPVLLDEAHKCRVKNSTSAGPDGVSARRWNKAPKTIKLLILNLLLLAGRPPKALTRARTVFIPKKGGSGPGGYRPISVSSVVFRHFQKVLASRLQVAGVIGDVQRAFRPADGTAENLTVLQTVISLARIKRRQLHLAALDVAKAFDTVSHLALTDCLRGVGAPSRLIEYVACLYHEGVTVLEAGGEVSRDIVIGRGVRQGDPLSPLLFNLVVDTALGKLPTEVGFDLAPGVRVGALAFADDVILLAETREGLQIALNAFAKQLAGCGLVVNPDKCGSVSLVPSGRQHKVKVVDGGFVIGQSPIPSRSVLEVWRYLGVDFMGVATITASRVDLGRALARVTKAPLKPQQRLRLLRTYLLPKLTYGLVFGRLTAGRLQELDREVRSAVRSWLKFPPGVPSSYIHAPVKSGGLGIVSLSASIPSLRRQRLLALRGSSWGVARAAADLDFVRQQLAWCDRATPSAPKPSSSAEFAAALHESVDGKELRQCSESLISSQWVDWASEGIGARDYRHFHAVRVASLPTAVRCSRGSRGTTLPLCRACRGGSEHLYHVVQQCPRTRGGRILRHDAVAKQIAGALSSSGWDVERERLYHMPSDQGKKPDIVAVKPDQSCIILDVQVVNGSLDMEQTWRAKIRKYDTNDLRQAVSELKGVAPNNIRVMAATLSWRGVWCGKSATELRELGISVGVLRGITTRVLLGSYLNWWSFYRGTSLHPSLPPPSSSSSLIPRAGVG

SEQ ID NO: 24456 - protein, 732 aa, Apolygus lucorum
MCSPVLSDEAQKCRVKNSTSAGPDGISARRWNKAPKTIKLLVLNLLLLAGRPPKALTRARTVFIPKKGGSGPGGYRPISVSSVVFRHFQKVLASRLQVAGIIGDVQRAFRPADGTAENLTVLQTVISLARMKRRQLHLAALDVAKAFDTVSHLALTDCLCGVGAPSRLIEYVACLYREGVTVLEAGGEVSGDVRIGRGVRQGDPLSPLLFNLVVDTALGKLPTEVGFDLAPGVRVGALAFADDVILLAETREGLQIALNAFAKQLARCGLVVNPDKCGSVSLVPSGRQHKVKVVDGGFVIGQSPIPSRSVLEVWRYLGVDFMGVATISASRVDLGRALARVTKAPLKPQQKLRLLRTYLLPKLTYGLVFGRLTAGRLQELDRQVRSAVRSWLRFPPGVPSAYVHAPVKSGGLGIVSLSACIPSLRRQRLLALQGSSWEVARAAADLDFVRQQLAWCDRATPSAPKPSSSAEFAAALHESVDGKELRQCSESPVSSQWVDWASEGIGARDYRHFHAVRIATLPTAVRCSRGSRRTTLPLCRACRSGNEHLYHVVQQCPRTHGGRILRHDAVAKQIAGALSSSGWDVERERLYHMPSDQGKKPDIVAVKPDQSCIILDVQVVNGSLDMEQTWRAKIRKYDRNDLRQAVSELKGVAPNNIRVMAATLSWRGVWCGKSATELRELGISVGVLRGITTRVLLGSYLNWWSFYRGTSLHPALLPPPSSSSLIPRAGVG

SEQ ID NO: 24457 - protein, 1076 aa, Apolygus lucorum
MKRPPVMETTEEEPHNPRQPIGSRGIRGGAQRRPRQGRRPSSPSSSSSSSLPSSSSTASLNHQCAHCERAFTTRSGLGLHIRRKHPVAANDAIDIERIQHRYASEELRRMAADEAVAVRNGVRNINVYLNERFPTRTVIAIKNIRLKPHYKQLVQEAILANSSGASPASPIADVEQQPAIQYPSPGTSGLLADLKTEVLRLGGQVGRIEGYESTYLQDLVRRAAEGLDNLEDEVAAYLGRIFPRVGDATVTQHQGGPPPRVVLRGGRRAAKQARRREYHRVQSLWRKHPARVAAEVLEEPGENQVQPPLQEFVDFWEPLLSAPSHDPGERVVPPVSTRDSLRSILCSPVLLDEAHKCRVKNSTSAGPDGVSARRWNKAPKTIKLLILNLLLLAGRPPKALTRTRTVFIPKKGGSGPGGYRPISVSSVVFRHFQKVLASRLQVAGVIGDVQRAFRPADGTAENLTVLQTVISLARIKRRQLHLAALDVAKAFDTVSHLALTDCLRGVGAPSRLIEYVACLYQEGVTVLEAGGEVSGDIRIGRAVRQGDPLSPLLFNLVVDTALGKLPTEVGFDLAPGVRVGALAFADDVILLAETREGLQIALNAFAKQLARCGLVVNPDKCGSVSLVPSGRQHKVKVVDGGFVVGQSPIPSRSVLEVWRYLGVDFMGVATITTSRVDLGRALARVTKAPLKPQQKLRLLRTYLLPKLTYGLVFGRLTAGRLQQLDREVRSAVRSWLKFPPGVPSAYFHAPVKSGGLGIVSLSACIPSLRRRRLLALQGSSWEVARAAADLDFVRQQLAWCDRATPSAPKPSSSAEFAAALHESVDGKELRQCSESLVSSQWVDWASEGIGARDYRHFHAIRVASLPTAVRCSRGSRGTTLPLCRACRSGNEHLYHVVQQCPRTHGGRILRHDAVAKQIAGALSSSGWDVERERLYHMPSDQGKKPDIVAVKPDQSCIILDVQVVNGSLDMEQTWRAKIRKYDRNDLRQAVSELKGVAPNNIRVMAATLSWRGVWCGKSATELRELGISVGVLRGITTRVLLGSYLNWWSFYRGTSLHPSLPPPPSSSSLIPRAGVG

SEQ ID NO: 24458 - protein, 1095 aa, Apolygus lucorum
MTLWRIGREPLSTGSLALLNKRPPVMENNPEEPHNPRLPIGPRGSRGGAQRRPRQGRRPSSPSSSSSSSLPSSSSTASLNHQCAHCERAFTTRSGLGLHVRRKHPVAANAAIDIERIQHRYASEELRRMAADEAVAVRNGVRNINVYLSERFPMRTVIAIKNIRLKPHYKQLVQEVILANSSGASPASPVADVEQQPAIQHPSPGTSGLLANLKTEVLRLGGQVGRIEGYESTYLQDLARRAAEGLDNLENEVAAYLGRIFPRVGDATVTQHQGGPPPRVVLRGGRRAAKQARRREYHRVQSLWRKHPARVAAEVLEEPGENQVQPPLQEFVDFWEPLLSAPSHDPGERVVPPVSTRDSLRSIMCSPVLSDEAHKCRVKNSTSAGPDGISARRWNKAPRTIKLLLLNLLLLAGRPPKALTRTRTVFIPKKGGSGPGGYRPISVSSVVFRHFQKVLASRLQVAGIIGDVQRAFRPADGTAENLTVLQTVISLARMKRRQLHLAALDVAKAFDTVSHFALTDCLRGVGAPSRLIEYVACLYHEGVTVLEAGGEVSGDVRIGRGVRQGDPLSPLLFNLVVDTALGKLPTEVGFDLAPGVRVGALAFADDVILLAETREGLQIALNAFAKQLARCGLVVNPDKCGLVSLVPSGRQHKVKVVDGGFVIGQSPIPSRSVLEVWRYLGVDFMGVATISASRVDLGRALDRVTKAPLKPQQKLRLLRTYLLPKLTYGLVFGRLTAGRLQELDRQVRSAVRSWLRFPPGVPSAYVHAPVKSGGLGVVSLSACIPSLRRQRLLALQGSSWEVARAAADLDFVRQQLAWCDRATPSAPKPSSSAEFAAALHESVDGKELRQCSESPVSSQWVDWASEGIGARDYRHFHAVRMATLPTAVRCSRGSRGTTLPLCRACRSGNEHLYHVVQQCPRTHGGRILRHDAVAKQIAGALSSSGWDVERERLYHMPSDQGKKPDIVAVKPDQSCIILDVQVVNGSLDMEQTWRAKIRKYDRNDLQQAVSELKGVAPNNIRVMAATLSWRGVWCGKSATELRELGISVGVLRGITTRVLLGSYLNWWSFYRGTSLHPSLPPPPSSSSLIPRAGVG

SEQ ID NO: 24459 - protein, 1070 aa, Apolygus lucorum
METNTDRPHNPRQPIGSRGIRGGAQRRPRQGRRPSSPSSSSSSSLPSSSSTASLDHQCAHCEQAFTTRSGLGVHIRRKHPVAANDEIDVERVQPRYASEDLRRMAADEVVAVRNGVRNINVYLSERFPTRTVIAIKNLRLKPHYKQLVQEAILANSGGASPASPIAGVDQQSAIQYPSPGTSGLLADLKTEVLRLGGQVGRIEGYESTYLQELARRAAEGLDNLEDKVAAYLGRIFPRVGDATVTQHQGGPPPRVVLRGGRRAAKQARRREYHRVQSLWRKHLARVAAEVLEEPGEDQVQPPLQEFVDFWEPLLSAPSHNPGERVVPPVSTRDSLRGILCSPVLLDEAHKCRVKNSTSAGPDGVSARRWNKVPNTIKLLVLNLLILAGRPPKALTRTRTVFIPKKGGSGPGGYRPISVSSVVFRHFQKVLASRLQVAGVIGDVQRAFRPADGTAENLTVLQTVISLARIKRRQLHLAALDVAKAFDTVSHLALTDCLRGVGAPSRLIEHVACLYREGVTVLEAGGEVSRDIVIGRGVRQGDPLSPLLFNLVVDTALGKLPTEVGFDLAPGVRVGALAFADDVILLAETREGLQIALNAFAKQLSRCGLVVNPDKCGSVSLVPSGRQHKVKVVDGGFVIGQAPIPSRSVLEVWRYLGVDFMGVATITASRVDLGRALARVTKAPLKPQQRLRLLRTYLLPKLTYGLVFGRLTAGRLQELDREVRSAVRSWLRFPPGVPSAYIHAPVKSGGLGIVSLSACIPSLHRQRLLALQGSSWEVARVAAGLDFVRQQLAWCDRATPSAPKPSSSAEFAAALHESVDGKELRQCSESLISSQWVDWASEGIGARDYRNFHAVRVATLPTAVRCSRGSREVTDTLCRACRSGNEHLYHVVQQCPRTHGGRILRHDAVAKQIAGALSSSGWDVERERLYHMPSDQGKKPDIVAVKPDRSCIILDVQVVNGSMDMEQTWRAKIRKYDRDDLRQAVSELKGVEPNNIRVMAATLSWRGVWCGKSATELRELGISVGVLRGVTRRVLLGSYLNWWSFYRGTSLHPSLPPPPSSSSLIPRAGVG

SEQ ID NO: 24460 - protein, 1095 aa, Apolygus lucorum
MTLWRLGRGPLSTGSLTLHLKRPPVMEQTVREPHNPRQPIGSRGIRGGAQRRPRQGRRQSSPSSSSSSSQPSSSSTASLNHQCAHCERAFTTRSGLGLHVSRKHPVAANAAIDIERIQHRYASEELRRMAADEAVAVRNGVCNINVYLNERFPTRTVIAIKNIRLKPHYKQLVQEAILANSSGASPASPIADVEQQPAIQYPSPGTSGLLADLKTEVLRLGGQVGRIEGYESTYLQDQVRRAAEGLDNLEDEVAAYLGRIFPRVGDATVTQHQGGPPPRVVLRGGRRAAKQARRREYHRVQSLWGKHPARVAAEVLEEPGENQVQPPLQEFVDFWEPLLSAPSHDPGECVVPPVSTRDSLRSIMCSPVLSDEAHRCRVKNSTSAGPDGVSARRWNKAPKTIKLLILNLLLLAGRPPKALTRTRTVFIPKKGGSGPGGYRPISVSSVVFRHFQKVLASRLQVAGVIGDVQRAFRSADGTAENLTVLQTVISLARIKRRQLHLAALDVAKAFDTVSHLALTDCLRGVGAPSRLIEYVACLYQEGVTLLEAGGEVSGDIRIGRGVRQGDPLSPLLFNLVVDTALGKLPTEVGFDLAPGVRVGALAFADDVILLAETREGLQIALNAFAKQLARCGLVVNPDKCGSVSLVPSGRQHKVKVVDGGFVVGQSPIPSRSVLEVWRYLGVDFMGVATITTSRVDLGRALARVTKAPLKPQQKLRLLRTYLLPKLTYGLVFGRLTAGRLQQLDREVRSAVRSWLKFPPGVPSAYFHAPVKSGGLGIVSLSACIPSLRRWRLLALQGSSWEVARAAADLDFVRQQLAWCDRATPSAPKPSSSAEFAAALHESVDGKDLRQCSESLVSSQWVDWASEGIGARDYRHFHAIRVASLPTAVRCSRGSRGTTLPLCCACRSGNEHLYHVVQQCPRTHGGRILRHDAVAKQIAGALSSSGWDVERERLYHMPSDQGKKPDIIAVKPDQSCIILDVQVVNGSLDMEQTWRAKIRKYDTNDLRQAVSELKGVAPNNIRVMAATLSWRGVWCGKSATELRELGISVGVLRGITTRVLLGSYLNWWSFYRGTSLHPSLPPPPSSSSLIPRAGVG

SEQ ID NO: 24461 - protein, 1070 aa, Apolygus lucorum
MEPTTNTPHNPRLPIGTRGFRGGAQRRPRQGRRPSSPSSSSSSSLPSSSSTASLDHQCAHCERAFTSRSGLGVHVRRKHPVAANEEINVERVQPRYASEDLRRMAADEVVAVRNGVRNINVYLSERFPTRTVIAIKNLRLKPHYKQLVQDAILANSSGASPASPVAGVDQQSAIQYPSPGTSGLLADLKTEVLRLGGQVGRIEGYESTYLQDLARRAVEGLDNLEDKVAAYLGRIFPRVGDATVTQHQGGPPPRVVLRGGRRAAKQARRREYHRVQSLWRKHPARVAAEVLEEPGEVQVQPPLQEFVDFWEPLLSAPSHNPGERVVPPVSTRDSLRSILCSPVLLDEAHKCRVKNSTSAGPDGISARRWNKAPNTIKLLILNLLILAGRPPKALTRTRTVFIPKKGGSGPGGYRPISVSSVVFRHFQKVLASRLQVAGVIGDVQRAFRPADGTAENLTVLQTVISLARIKRRQLHLAALDVAKAFDTVSHLALTDCLRGVGAPSRLIEYVACLYHEGVTVLEAGGEVSGDIRIGRGVRQGDPLSPLLFNLVVDTALGKLPTEVGFDLAPGVRVGALAFADDVILLAETREGLQIALNAFAKQLSRCGLVVNPDKCGSVSLVPSGRQHKVKVVDGGFVIGQAPIPSRSVLEVWRYLGVDFMGVATITASRVDLGRALARITKAPLKPQQRLRLLRTYLLPKLTYGLVFGRLTAGRLQELDREVRSAVRSWLRFPPGVPSAYIHAPVKSGGLGIVSLSACIPSLRRQRLLALQGSSWEVARVAAGLDFVRQQLAWCDRATPSAPKPSSSAEFAAALHESVDGKELRQCSESLISSQWVDWASEGIGARDYRNFHAVRVATLPTAVRCSRGSRGMTDTLCRACRSGNEHLYHVVQQCPRTHGGRILRHDAVAKQIAGALSSSGWDVERERLYHMPSDQGKKPDIVAVKPDRSCIILDVQVVNGSMDMEQTWRAKIRKYDRDDLRQAVSELKGVAPSNIRVMAATLSWRGVWCGKSATELRELGISVGVLRGVTRRVLLGSYLNWWSFYRGTSLHPSLPPPPSSSSLIPRAGVG

SEQ ID NO: 24462 - protein, 914 aa, Apolygus lucorum
MRKREFSPVADMDQQSAIQYPSPGTSGLLADLKTEVLRLGGQVGRIEGYESTYLQDLARRAAEGLDNLEDEIAAYLGRSFPRIGDATVTQHQGGPPPRVVLRGGRRAAKQARRREYHRVQSLWRKHPARVAAEVLEEPGENQVQPPLQEFVDFWEPLLSAPSHNPGERVVPPVSTRDSLRSIMCSPVLSDEAHKCRVKNSTSAGPDGISARRWNKAPRTIKLLLLNLLLLAGRPPKALTRARTVFIPKKGGSGPGGYRPISVSSVVFRHFQKVLASRLQVAGIIGDVQRAFRPADGTAENLTVLQTVISLARMKRRQLHLAALDVAKAFDTVSHFALTDCLRGVGAPSRLIEYVACLYQEGVTVLEAGGEVSGDVRIRRGVRQGDPLSPLLFNLVVDTALGKLPTEVGFDLAPGVRVGALAFADDVILLAESREGLQIALNAFAKQLARCGLVVNPDKCGSVSLVPSGRQHKVKVVDGGFVIGQSPIPSRSVLEVWRYLGVDFMGVATISASRVDLGRALARVTKAPLKPQQKLRLFRTYLLPKLTYGLVFGRLTAGRLQELDRQVRSAVRSWLRFPPGVPSAYVHAPVKSGGLGVVSLSACIPSLRRQRLLALQGSSWEVARAAADLDFVRQQLAWCDRATPSAPKPSSSAEFAAALHESVDGKELRQCSESPVSSQWVDWASEGIGARDYRHFHAVRMATLPTAVRCSRGSRGTTLPLCRACRSGNEHLYHVVQQCPRTHGGRILRHDAVAKQIAGALSSSGWDVERERLYHMPSDQGKKPDIVAVKPDQSCIILDVQVVNGSLDMEQTWRAKIRKYDRNDLRQAVSELKGVAPNNIRVMAATLSWRGVWCGKSATELRELGISVGVLRGITTRVLLGSYLNWWSFYRGTSLHPSLPPPPSSSSLIPRAGVG

SEQ ID NO: 24463 - protein, 1045 aa, Apolygus lucorum
MDTNQDQPHNPRQPIGSRGIRGGAQRRPRQGRRPSSPSSSSSSSLPSSSSTASLNHQCAHCEQAFTTRSGLGLHVRRKHPVAANAAIDIERIQPRYASEELRRMAADEAVAVRNGVRNINVYLNERFPTRTVIAIKNIRLKPHYKQLVQEAILANSSGASPASPIADVEQQPAIQYPSPGTSGLLADLKTEVLRLGGQVGRIEGYESTYLQDLVRRAVEGLDNLEDEVAAYLGRIFPRVGDATVTRHQGGPPPRMVLRGGRRAAKQARRREYHRVQSLWGKHPARVAAEVLEEPGENQVQPPLQEFVDFWEPLLSAPSHDPGECVVPPVTTRDSLRSIMCSPVLSDEAHKCRVRNSASAGPGGVPARRWNKAPKTIKLLILNLLLLAGRPPKVLTRTRTVFIPKKGGSGPGGYRPISVSSVVFRHFQKVLASRLQVAGVIGDVQRAFRPADGTAENLTVLQTIISLARIKRRQLHLAALAVAKAFDTVSHLALTDCLRGVGAPFRLIEYVACLYQEGVTVLEAGGEVSGDIRIGRGVGQGDPLSPLLFNLVVDTALGKLPTEVGFDLAPGVRVGALAFADDVILLAETREGLQIALNAFAKQLAGCGLVVNPDKCGSVSLVPSGRQHKVKVVDGGFVIGRSPIPSRSVLEVWRYLGVDFMGVATITASRVDLGRALARVTKAPLKPQQKLRLLRTYLLPKLTYGLVFGRLTAGRLQELDREVRSAVRSWLKFPPGVPSAYVHAPVKSGGLGIVSLSACIPSLRRRRLLALQGSSWEVARAAADLDFVRQQLAWCDRATPSAPKPSSSAEFAAALHESVDGKELRQCSESLVSSQWVDWASEGIGARNYRHFHAIRVASLPTAVRCSRGSRGTTLPLCRACRSGNEHLYHVVQQCPRTHGGRILRHDAVAKQIAGALSSSGWDVERERLYHMPSDQGKKPDIVAVKPDRSCIILDVQVVNGSLDMEQTWRAKIRKYDTNDLRQAVSELKGVAPNNIRVMAATLSWRGVWCGKSATELRELGISVGVLRGITTRVLLGSYLNWWSFY

SEQ ID NO: 24464 - protein, 1095 aa, Apolygus lucorum
MTLWRLGRGPLSTGSLTLHLKRPPVMEQTVREPHNPRQPIGSRGIRGGAQRRPRQGRRPSSPSSSSSSSQPSSSSTASLNHQCAHCERAFTTRSGLGLHVSRKHPVAANAAIDIEQIQHRYASEELRRMAADEAVAVRNGVRNINVYLNERFPTRTVIAIKNIRLKPHYKQLVQEAILANSSGASLASPIADVEQQPAIQYPSPGTSGLLADLKTEVLRLGGQVGRIEGYESTYLQDLVRRAAEGLDNLEDEVAAYLGRIFPRVGDVTVTQHQGGPPPRVVLRGGRRAAKQARRREYHRVQSLWRKHPARVAAEVLEEPGENQVQPPLQEFVDFWEPLLSAPSHDPGECVVPPVSTRDSLRSIMCSPVLSDEAHKCRVKNSTSAGPDGVSARRWNKAPKTIKLLILNLLLLAGRPPKALTRTRTVFIPKKGGSGPGGYRPISVSSVVFRHFQKVLASRLQVAGVIGDVQRAFRSADGTAENLTVLQTVISLARIKRRQLHLAALDVAKAFDTVSHLALTDCLRGVGAPSRLIEYVACLYQEGVTVLEAGGEVSGDIRIGRGVRQGDPLSPLLFNLVMDTALGKLPTEVGFDLAPGVRVGALAFADDVILLAETREGLQIALNAFAKQLARCGLVVNPDKCGSVSLVPSGRQHKVKVVDGGFVVGQSPIPSRSELEVWRYLGVDFMGVATITTSRVDLGRALARVTKAPLKPQQKLRLLRTYLLPKLTYGLVFGRLTAGRLQQLDREVRSAVRSWLKFPPGVPSAYFHAPVKSGGLGIVSLSACIPSLRRRRLLALQGSSWEVARAAADLDFVRQQLAWCDRATPSAPKPSSSAEFAAALHESVDGKELRQCSESLVSSQWVDWASEGIGARDYRHFHAIHVASLPTAVRCSRGSRGTTLPLCRACRSGNEHLYHVVQQCPRTHGGRILRHDAVAKQIAGALSSSGWDVERERLYHMPSDQGKKPDIVAVKPDQSCIILDVQVVNGSLDMEQTWRAKIRKYDTNDLRQAVSELKGVAPNNIRVMAATLSWRGVWCGKSATELRELGISVGVLRGITTRVLLGSYLNWWSFYRGTSLHPSLPPPPSSSSLIPRAGVG

SEQ ID NO: 24465 - protein, 1076 aa, Apolygus lucorum
MKRPPVMETTEEEPHNPRQPIGSRGIRGGAQRRPRQGRRPSSPSSSSSSSLPSSSSTASLNHQCAHCERAFTTRSGLGLHIRRKHPVAANDAIDIERIQHRYASEELRRMAADEAVAVRNGVRNINVYLNERFPTRTVIAIKNIRLKPHYKQLVQEAILANSSGASPASPIADVEQQPAIQYPSPGTSGLLADLKTEVLRLGGQVGRIEGYESTYLQDLVRRAAEGLDNLEDEVAAYLGRIFPRVGDATVTQHQGGPPPRVVLRGGRRAAKQARRREYHRVQSLWRKHPARVAAEVLEEPGENQVQPPLQEFVDFWEPLLSAPSHDPGERVVPPVSTRDSLRSILCSPVLLDEAHKCRVKNSTSAGPDGVSARRWNKAPKTIKLLILNLLLLAGRPPKALTRTRTVFIPKKGGSGPGGYRPISVSSVVFRHFQKVLASRLQVAGVIGDVQRAFRPADGTAENLTVLQTVISLARIKRRQLHLAALDVAKAFDTVSHLALTDCLRGVGAPSRLIEYVACLYREGVTVLEAGGEVSRDIVIGRGVRQGDPLSPLLFNLVVDTALGKLPTEVGFDLAPGVRVGALAFADDVILLAETREGLQIALNAFAKQLARCGLVVNPDKCGSVSLVPSGRQHKVKVVDGGFVVGQSPIPSRSVLEVWRYLGVDFMGVATITTSRVDLGRALARVTKAPLKPQQKLRLLRTYLLPKLTYGLVFGRLTAGRLQQLDREVRSAVRSWLKFPPGVPSAYFHAPVKSGGLGIVSLSACIPSLRRRRLLALQGSSWEVARAAADLDFVRQQLAWCDRATPSAPKPSSSAEFAAALHESVDGKELRQCSESLVSSQWVDWASEGIGARDYRHFHAIRVASLPTAVRCSRGSRGTTLPLCRACRSGNEHLYHVVQQCPRTHGGRILRHDAVAKQIAGALSSSGWDVERERLYHMPSDQGKKPDIVAVKPDQSCIILDVQVVNGSLDMEQTWRAKIRKYDRNDLRQAVSELKGVAPNNIRVMAATLSWRGVWCGKSATELRELGISVGVLRGITTRVLLGSYLNWWSFYRGTSLHPSLPPPPSSSSLIPRAGVG

SEQ ID NO: 24466 - protein, 1069 aa, Apolygus lucorum
MENLTEPHNPRRPIGSRGIRGGAQRRPRQGRRPSSPSSSSSSSLPSSSSTASLDHQCAHCERAFTSRSGLGVHVRRKHPVAANEEIDVERVQPRYASEDLRRMAADEVVAVRNGVRNINVYLSERFPTRTVIAIKNLRLKPHYKQLVQEAILANSSGASPASPVAGVDQQSAVQYPSPGTSGLLADLKTEVLRLGGQVGRIEGYESTYLQDLARRAAEGLDNLEDMVAAYLGRIFLRVGDATVTQHQGGPPPRVVLRGGRRAAKQARRREYHRVQSLWRKHPARAAAEVLEEPGEDQVQPPLQEFVDFWEPLLSAPSHNPGERVVPPVSTRDSLRSILCSPVLLDEAHKCRVKNSTSAGPDGISARRWNKAPNTIKLLVLNLLMLAGRPPKALTRTRTVFIPKKGGSGPGGYRPISVSSVVFRHFQKVLASRLQVAGVIGDVQRAFRPADGTAENLTVLQTVISLARIKRRQLHLAALDVAKAFDTVSHLALTDCLRGVGAPSRLIEYVACLYHEGVTVLEAGGEVSGDVRIGRGVRQGDPLSPLLFNLVVDTALGKLPTEVGFDLAPGVRVGALAFADDVILLAETREGLQIALNAFAKQLSRCGLVVNPDKCGSVSLVPSGRQHKVKVVDGGFVIGQAPIPSRSVLEVWRYLGVDFMGVATITASRVDLGRALARITKAPLKPQQRLRLLRTYLLPKLTYGLVFGRLTVGRLQELDREVRSAVRSWLRFPPGVPSAYIHAPVKSGGLGIVSLSACIPSLRRQRLLALQGSSWEVARVAAGLDFVRQQLAWCDRATPSAPKPSSSAEFAAALHESVDGKELRQCSESLISSQWVDWASEGIGARDYRNFHAVRVATLPTAVRCSRGSRGVTDTLCRACRSGNEHLYHVVQQCPRTHGGRILRHDAVAKQIAGALSSSGWDVERERLYHMPSDQGKKPDIVAVKPDRSCIILDVQVVNGSMDMEQTWRAKIRKYDRDDLRQAVSELKGVAPNNIRVMAATLSWRGVWCGKSATELRELGISAGVLRGVTRRVLLGSYLNWWSFYRGTSLHPSLPPPPSSSSLIPRAGVG

SEQ ID NO: 24467 - protein, 1070 aa, Apolygus lucorum
MDNNLTEPHNPRRPIGTRGSRGGAQRRPRQGRRPSSPSSSSSSSLPSSSSTASLDHQCAHCERAFTSRSGLGVHVRRKHPVAANEEIDIERVQPRYASEDLRRMAADEVVAVRNGVRNINVYLSERFPTRTVIAIKNLRLRPHYKQLVQEAILANSGGASPASPVAGMDQQSAIQYPSPGTSGLLADLKTEVLRLGGQVGRIEGYESTYLQDLARRAAEGLDNLEDEIAAYLGRIFPRVGDVTVTQHQGGPPPRVVLRGGRRAAKQARRREYHRVQSLWRKHPARVAAEVLEEPGEDQVQPPLQEFVDFWEPVLSAPSHNPGERVVPPVSTRDSLRGILCSPVLLDEAHKCRVKNSTSAGPDGVSARRWNKAPNTIKLLILNLLMLAGRPPKALTRTRTVFIPKKGGSGPGGYRPISVSSVVFRHFQKVLASRLQVAGVIGDVQRAFRPADGTSENLTVLQTVISLARIKRRQLHLAALDVAKAFDTVSHLALTDCLRGVGAPSRLIEYVACLYHEGVTVLEAGGEVSGDVRIGRGVRQGDPLSPLLFNLVVDTALGKLPTEVGFDLAPGVRVGALAFADDVILLAETREGLQIALNAFAKQLSRCGLVVNPDKCGSVSLVPSGRQHKVKVVDGGFVIGQAPIPSRSVLEVWRYLGVDFMGVATITASRVDLGRALARITKAPLKPQQRLRLLRTYLLPKLTYGLVFGRLTAGRLQELDREVRSAVRSWLRFPPGVPSAYIHAPVKSGGLGIVALSACIPSLRRQRLLALQGSSWEVARVAAGLDFVRQQLAWCDRATPSAPKPSSSAEFAAALHESVDGKELRQCSESLISSQWVDWASEGIGARDYRNFHAVRVATLPTAVRCSRGSRGMTDTLCRACWSGNEHLYHVVQQCPRTHGGRILRHDAVAKQIAGALSSSGWDVERERLYHMPSDQGKKPDIVAVKPDRSCIILDVQVVNGSMDMEQTWRAKIRKYDRDDLRQAVSELKGVAPNNIRVMAATLSWRGVWCGKSATELRELGISVGVLRGVTRRVLLGSYLNWWSFYRGTSLHPSLPPPPSSSSLIPRAGVG

SEQ ID NO: 24468 - protein, 975 aa, Apolygus lucorum
MRKRKLRRMAADEVVAVRDGVRNINVYLSERFPMRTVIAIKNIRLKPHYKQLVQEAILANSSGASPASPVADVEQQPAIQYPSPGTSGLLADLKTEVLRLGGQVGRIEGYESTYLQGLARRAAVGLDNLENEVAAYLGRIFPRVGDATVTQHQGGPPPGVVLRGGRRAAKQARRREYHRVQSLWRKHPARVAAEVLEEPGENQVQPPLQEFVDFWEPLLSAPSHDPGERVVPPVSTRDSLRSIMCSPVLSDEAHKCRVKNSTSAGPDGISARRWNKAPKTIKLLVLNLLLLAGRPPKALTRARTVFIPKKGGSGPGGYRPISVSSVVFRHFQKVLASRLQVAGIIGDVQRAFRPADGTAENLTVLQTVISLARMKRRQLHLAALDVAKAFDTVSHLALTDCLRGVGAPSRLIEYVACLYQEGVTVLEAGGEVSGDVRIGRGVRQGDPLSPLLFNLVVDTALGKLPTEVGFDLAPGVRVGALAFADDVILLAETREGLQIALNAFAKQLARCGLVVNPDKCGSVSLVPSGRQHKVKVVDGGFVIGQSPIPSRSVLEVWRYLGVDFMGVATISASRVDLGRALARVTKAPLKPQQKLRLLRTYLLPKLTYGLVFGRLTAGRLQELDRQVRSAVRSWLRFPPGVPSAYVHAPVKSGGLGIVSLSACIPSLRRQRLLALQGSSWEVARAAADLDFVRQQLAWCDRATPSAPKPSSSAEFAAALHESVDGKELRQCSKSPVSSQWVDWASEGIGARDYRHFHAVRMATLPTAVRCSRGSRGTTLPLCRACRSGNEHLYHVVQQCPRTHGGRILRHDAVAKQIAGALSSSGWDVERERLYHMPSDQGKKPDIVAVKPDQSCIILDVQVVNGSLDMEQTWRAKIRKYDRNDLRQAVSELKGVAPNNIRVMAATLSWRGVWCGKSATELRELGISVGVLRGITTRVLLGSYLNWWSFYRGTSLHPSLPPPPSSSSLIPRAGVG

SEQ ID NO: 24469 - protein, 1095 aa, Apolygus lucorum
MTLWRLGRGPLSTGSLTLHLKRPPVMEQTVREPHNPRQPIGSRGIRGGAQRRPRQGRRPSSPSSSSSSSQPSSSSTASLNHQCAHCERAFTTRSGLGLRVSRKHPVAANAAIDIERIQHRYASEELRRMAADEAVAVRNGVRNINVYLNERFPTRTVIAIKNIRLRPHYKQLVQEAILANSSGASPASPIADVEQQPAIQYPSPGTSGLLADLKTKVLRLGGQVGRIEGYESTYLQDLVRRAAEGLDNLEDEVAAYLGRIFPRVGDVTVTQHQGGPPPRVVLRGGRRAAKQARRREYHRVQSLWRKHLARVAAEVLEEPGENQVQPPLQEFVDFWEPLLSAPSHDPGECVVSPVSTRDSLRSIMCSPVLSDEAHKCRVKNSTSAGPDGVSARRWNKAPKTIKLLILNLLLLAGRPPKALTRTRTVFIPKKGGSGPGGYRPISVSSVVFRHFQKVLASRLQVAGVIGDVQRAFRSADGTAENLTVLQTVISLARIKRRQLHLAALDVAKAFDTVSHLALTDCLRGVGAPSRLIEYVACLYQEGVTVLEAGGEVSGDIRIGRGVRQGDPLSPLLFNLVVDTALGKLPTEVGFDLAPGVRVGALAFADDVILLAETREGLQIALNAFAKQLARCGLVVNPDKCGSVSLVPSGRQHKVKVVDGGFVVGQSPIPSRSVLEVWRYLGVDFMGVATITTSRVDLGGALARVTKAPLKPQQKLRLLRTYLLPKLTYGLVFGRLTAGRLQQLDREVRSAVRSWLKFPPGVPSAYFHAPVKSGGLGIVSLSACIPSLRRRRLLALQGSSWEVARAAADLDFVRQQLAWCDRATPSAPKPSSSAEFAAALHESVDGKELRQCSESLVSSQWVDWASEGIGARDYRHFHAIRVASLPTVVRCSRGSRGTTLPLCRACQSGNEHLYHVVQQCPRTHGGRILRHDAVAKQIAGALSSSGWDVERERLYHMPSDQGKKPDIVAVKPDQSCIILDVQVVNGSLDMEQTWRAKIRKYDTNDLRQAVSELKGVAPNNIRVMAAALSWRGVWCGKSATELRELGISVGVLRGITTRVLLGSYLNWWSFYRGTSLHPSLPPPPSSSSLIPRAGVG

SEQ ID NO: 24470 - protein, 1070 aa, Apolygus lucorum
METNTDRPHNPRQPIGSRGIRGGAQRRPRQGRRPSSPSSSSSSSLPSSSSTASLDHQCAHCERAFTTRSGLGVHIRRKHPVAANDEIDVERVQPRYASEDLRRMAADEVVAVRNGVRNINVYLSERFPTRTVIAIKNLHLKPHYKQLVQEAILANSGGASPASPIAGVDQQSAIQYPSPGTSGLLADLKTEVLRLGGQVGRIEGYESTYLQDLARRAAEGLDNLEDKVAAYLGRIFPRVGDATVTQHQGGPPPTVVLRGGRRAAKQARRREYHRVQSLWRKHPARVAAEVLEEPGEDQVKPPLQEFVDFWEPLLSAPSHNPGERVVPPVSTRDSLRGILCSPVLLDEAHKCRVKNSTSAGPDGVSARRWNKVPNTIKLLILNLLILAGRPPKALTRTRTVFIPKKGGSGPGGYRPISVSSVVFRHFQKVLASRLQVAGVIGDVQRAFRPADGTAENLTVLQTVISLARIKRRQLHLAALDVAKAFDTVSHLAMTDCLRGVGAPSRLIEYVACLYREGVTVLEAGGEVSRDIVIGRGVRQGDPLSPLLFNLVVDTALGKLPTEVGFDLAPGVRVGALAFADDVILLAETREGLQIALNAFAKQLSRCGLVVNPDKCGSVSLVPSGRQHKVKVVDGGFVIGQAPIPSRSVLEVWRYLGVDFMGVATITASRVDLGRALARVTKAPLKPQQRLRLLRTYLLPKLTYGLVFGRLTAGRLQELDREVRSAVRSWLRFPPGVPSAYIHAPVKSGGLGIVSLSACIPSLRRQRLLALQGSSWEVARVAAGLDFVRQQLAWCDRATPSAPKPSSSAEFAAALHESVDGKELRQCSESLISSQWVDWASEGIGARDYRNFHAVRVATLPTAVRCSRGSRGMTDTLCRACRSGNEHLYHVVQQCPRTHGGRILRHDAVAKQIAGALSSSGWDVERERLYHMPSDQGKKPDIVAVKPDRSCIILDVQVVDGSMDMEQTWRAKIRKYDRDDLRQAVSELKGVEPNNIRVMAATLSWRGVWCGKSATELRELGISVGVLRGVTRRVLLGSYLNWWSFYRGTSLHPSLPPQPSSSSLIPRAGVG

SEQ ID NO: 24471 - protein, 1095 aa, Apolygus lucorum
MTLWRIGREPLSTGSLTLHFKRPPVMDQTDNMPHNPRLPIGTRGSRGGAQRRPRQGRRPSSPSSSSSSSQPSSSSTASLNHQCAHCERAFTTRSGLGLHVRRKHPVAANAAIDIERVQHRYASEELRRMAVDEVVAVRDGVRNINVYLSERFPMRTVIAIKNIRLKPHYKQLVQEAILANSSGASPASPVADVEQQPAIQYPSPGTSGLLADLKTEVLRLGGQVGRIEGYESTYLQDLARRAAEGLDNLENEVAAYLGRIFPRIGDATVTQHQGGPPPRVVLRGGRRAAKQARRREYHRVQSLWRKHPARVAAEVLEEPGENQVQPPLQEFVDFWEPLLSAPSHDPGERVVPPVSTRDSLRSIMCSPVLSDEAHKCRVKNSTSAGPDGISARRWNKAPKTIKLLVLNLLLLAGRPPKALTRARTVFIPKKGGSGPGGYRPISVSSVVFRHFQKVLASRLQVAGIIGDVQRAFRPADGTAENLTVLQTVISLARMKRRQLHLAALDVAKAFDTVSHLALTDCLRGVGAPSRLIEYVACLYQEGVTVLEAGGEVSGDVRIGRGVRQGDPLSPLLFNLVVDTALGKLPTEVGVDLAPGVRVGALAFADDVILLAETREGLQIALNAFAKQLARCGLVVNPDKCGSVSLVPSGRQHKVKVVDGGFVIGQSPIPSRSVLEVWQCLGVDFMGVATISASRVDLGRALARVTKAPLKPQQKLRLLRTYLLPKLTYGLVFGRLTARRLQELDRQVRSAVRSWLRFPPGVPSAYVHAPVKSGGLGIVSLSACIPSLRRQRLLALQGSSWEVARAAADLDFVRQQLAWCDRATPSAPKPSSSAEFAAALHESVDGKELRQCSESPVSSQWVDWASEGIGARDYRHFHAVRMATLPTAVRCSRGSRGTTLPLCRACRSGNEHLYHVVQQCPRTHGGRILRHDAVAKQIAGALSSSGWDVERERLYHMPSDQGKKPDIVAVKPDQSCIILDVQVVNGSLDMEQTWRAKIRKYDRNDLRQAVSELKGVAPNNIRVMAATLSWRGVWCGKSATELRELGISVGVLRGITTRVLLGSYLNWWSFYRGTSLHPSLPPPPSSSSLIPRAGVG

SEQ ID NO: 24472 - protein, 1070 aa, Apolygus lucorum
METNTDRPHNPRQPIGSRGIRGGAQRRPRQGRRPSSPSSSSSSSLPSSSSTASLDHQCAHCERAFTTRSGLGVHIRRKHPVAANDEIDVERVQPRYASEDLRRMAADEVVAVRNGVRNINVYLSERFPTRTVIAIKNLRLKPHYKQLVQEAILANSGGASPASPIAGVDQQSAIQYPSPGTSGLLADLKTEVLRLGGQVGRIEGYESTYLQDLARRAAEGLDNLEDKVAAYLGRIFPRVGDATVTQHQGGPPPRVLLRGGRRAAKQARRREYHRVQSLWRKHPARVAAEVLEEPGEDQVQPPLQEFVDFWEPLLSAPSHNPGERVVPPVSTRDSLRGILCSPVLLDEAHKCRVKNSTSAGPDGVSARRWNKVPNTIKLLILNLLILAGRPPKALTRTRTVFIPKKGGSGPGGYRPISVSSVVFRHFQKVLASRLQVAGVIGDVQRAFRPADGTAENLTVLQTVISLARIKRRQLHLAALDVAKAFDTVSHLALTDCLRGVGAPSRLIEYVACLYREGVTVLEAGGEVSRDIVIGRGVRQGDPLSPLLFNLVVDTALGKLPTEVGFDLAPGVRVGALAFADDVILLAETREGLQIALNAFAKQLSRCGLVVNPDKCGSVSLVPSGRQHKVKVVDGGFVIGRAPIPSRSVLEVWRYLGVDFMGVATITASRVDLGRALARVTKAPLKPQQRLRLLRTYLLPKLTYGLVFGRLTAGRLQELDREVRSAVRSWLRFPPGVPSAYIHAPVKSGGLGIVSLSACIPSLRRQRLLALQGSSWEVARVAAGLDFVRQQLAWCDRATPSAPKPSSSAEFAAALHESVDGKELRQCSESLISSQWVDWASEGIGARDYRNFHAVRVATLPTAVRCSRGSRGMTDTLCRACRSGNEHLYHVVQQCPRTHGGRILRHDAVAKQIAGALSSSGWDVERERLYHMPSDQGKKPDIVAVKPDRSCIILDVQVVNGSMDMEQTWRAKIRKYDRDDLRQAVSELKGVEPNNIRVMAATLSWRGVWCGKSATELRELGISVGVLRGVTRRVLLGSYLNWWSFYRGTSLHPSLPPPPSSSSLIPRAGVG

SEQ ID NO: 24473 - protein, 1065 aa, Apolygus lucorum
METNTDRPHNPRQPIGSRGIRGGAQRRPRQGRRPSSPSSSSSSSLPSSSSTASLDHQCAHCERAFTTRSGLGVHVRRKHPVAANDEIDVERVQPRYASEDLRRMAADEVVAVRNGVRNINVYLSERFPTRTVIAIKNLCLKPHYKQLVQEAILANSGGASPASPIAGVDQQSAIQYPSPGTSGLLADLKTEVLRLRGQVGRIEGYESTYLQYLARRAAEGLDNLEDKVAAYLGRIFPRVGDATVTQHQGGPPPRVVLRGGRRAAKQARRREYHRVQSLWRKHPARVAAEVLEEPGEDQVQPPLQEFVDFWEPLLSAPSHNPGERVVPPVSTRDSLRSILCSPVLLDEAHKCRVKNSTSAGPDGVSARRWNKVSNTIKLLILAGRPLKALTRTRTVFIPKKGGSGPGGYRMISVSAVVFRHFQKVLASCLQVAGVIGDVQRAFRPADGTAENLTVLQTVISLARIKRRQLHLAALDVAKAFDTVSHLALTNCLRGVGAPSRLIEYVACLYREGVTVLEAGGEVSRDIVIGRGVRQGDPLSPLLFNLVVDTALGKLPTEVGFDLAPGVRVGALAFADDVILLAETREGLQIALNAFAKQLSRCGLVVNPDKCGSVSLVPSGRQHKVKVVDGGFVIGQAPIPSRSVLEVWRYLGVDFMGVATITASRVDLGRALARVTKAPLKPQQRLRLLRTYLLPKLTYGLVFGRLTAGRLQELDREVRSAVRSWLRFPPGVPSAYIHAPVKSGGLGIVSLSACIPSLRRQRLLALQGSSWEVARVAAGLDFVRQQLAWCDRATPSAPKPSSSAEFAAALHESVDGKELRQCSESLISSQWVDWASEGIGARDYRNFHAIRVATLPTAVRCSRGSRGMTDTLCRACRSGNEHLYHVVQQCPRTHGGRILRHDAVAKQIAGALSSSGWDVERERLYHMPSDQGKKPDIVAVKPDRSCIILDVQVVNGSMDMEQTWRAKIRKYDRDDLRQAVSELKGVEPNNIRVMAATLSWRGVWCGKSATELRELGISVGVLRGVTRRVLLGSYLNWWSFYRGTSLHPSLPPQPSSSSLIPRAGVG

SEQ ID NO: 24474 - protein, 1070 aa, Apolygus lucorum
MENQQHQPHNPRQPIGSRGIRGGAQRRPRQGRRPSSPSSSSSSSLPSSSSTASLDHQCAHCERAFTSRSGLGVHVRRKHPVAANDEINVERVQPRYASEDLRRMAADEVLAVRNGVRNINVYLSECFPTRTVIAIKNLRLKPHYKQLVQEAILANSGGASPASPIAGVDQQSAIQYPSPGTSGLLADLKTEVLRLGGQVGRIEGYESTYLQDLARRAAEGLDNLEDEVAAYLGRIFPRVGDATVTRHQGRPPPRVVLCGGRRAAKQARWREYHRVQSLWRKHPARVAAEVLEEPGEDQVQPPLQEFVDFWEPLLSAPSHNPGERVVPPVSTRDSLRSILCSPVLLDEAHKCRVKNSTSAGPDGVSARRWNKAPNTIKLLILNLLMLAGRPPKALTHTRTVFIPKKGGSGPGGYRPISVSSVVFRHFQKVLASRLQVAGVIGDVQRAFRPADGTAENLTVLQTVISLARIKRRQLHLAALDVAKAFDTVSHLALTDCLRGVGAPSRLIEYVACLYHEGVTVLEAGGEVSRDIRIGRGVRQGDPLSPLLFNLVVDTALGKLPTEVGFDLAPGVRVGALAFADDVILLAETREGLQIALNAFAKQLARCGLVVNPDKCGSVSLVPSGRQHKVKVVDGGFVIGQSPIPSRSVLEVWRYLGVDFMGVATITTSRVDLGRALARVTKAPLKPQQKLRLLRTYLLPKLTYGLVFGRLTAGRLQELDREIRSAVRSWLRFPPGVPSAYFHAPVKSGGLGIVSLSACIPSLRRQRLLALQGSSWEVARAAADLDFVRQQLAWCDRATPSAPKPSSSAEFAAALHESVDGKELRLCSESLVSSQWVDWASEGIGARDYRHFHAVRMATLPTAVRCSRGSRGTTLPLCRACRSGNEHLYHVVQQCPRTHGGRILRHDAVAKQIAGALSSSGWDVERERLYHMPSDQGKKPDIVAVKPDQSCIILDVQVVNGSLDMEQTWRAKIRKYDRDDLRQAVSELKGVAPNNIRVMAATLSWRGVWCGKSATELRELGISVGVLRGITTRVLLGSYLNWWSFYRGTSLHPSLPPPPSSSSLIPRAGVG

SEQ ID NO: 24475 - protein, 967 aa, Apolygus lucorum
MAADEVVAVRNGVRNINVYLSERFPTRTVIAIKNLRLKPHYKQLVQEAILANSGGASPASPIAGVDQQSAIQYPSPGTSGLLADLKTEVLRLGGQVGRIEGYESTYLQDLARRAAEGLDNLEDMVAAYLGRIFPRVGDATVTRHQGRPSPRVVLRGGRRAAKQARRQEYHRVQSLWRKHPAHVAAEVLEEPGEDQVQPPLQEFVDFWEPLLSAPSHNPGERVVPPVSTRDSLRSILCSPVLLDEAHKCRVKNSTSAGPDGVSARRWNKALNTIKLLILNLLMLAGRPPKALTRTRTVFIPKKGGSGPGGYRPISVSSVVFRHFQKVLASRLQVAGVIGDVQRAFRPADGTAENLTVLQTVISLARIKRRQLHLAALDVAKAFDTVSHFALTDCLRGVGAPSRLIEYVACLYHEGVTVLEAGGEVSGDVRIGRGVRQGDPLSPLLFNLVVDTALGKLPTEVGFDLAPGVRVGALAFADDVILLAETREGLQIALNAFAKQLARCGLVGNPDKCGSVSLVPSGRQHKVKVVDGGFVVGQSPIPSRSVLEVWRYLGVDFMGVATITTSRVDLGRALARVTKAPLKPQQKLRLLRTYLLPKLTYGLVFGRLTAGRLQELDRLVRSAVRSWLKFPPGVPSAYFHAPVKSGGLGIVSLSACIPSLRRQRLLALQGSSWEVARAAADLDFVRQQLAWCDRATPSAPKPSSSAEFAAALHESVDGKELRQCSESLVSSQWVDWASEGIGARDYRHFHAVRMATLPTAVRCSRGSRGTTLPLCRACRSGNEHLYHVVQQCPRTHGGRILHHDAVAKQIAGALSSSGWDVERERLYHMPSDQGKKPDIVAVKPDQSCIILDVQVVNGSLDMEQTWRAKIRKYDRDDLRQAVSELKGVVPNNIRVMAATLSRRGVWCGKSATELRELGISVGVLRGITTRVLLGSYLNWWSFYRGTSLHPSLPPPPSSSSLIPRAGVG

SEQ ID NO: 24476 - protein, 1070 aa, Apolygus lucorum
MDYNHQLPHNPRQPIGSRGIRGGAQRRPRQGRWPSSPSSSSSSSLPSSSSTASLDHQCAHCERAFTSRSGLGVHVRRKHPVAANAAIEIERVQPRYASEDLRRMAADEVVAVRNGVRNINVYLSERFPTRTVIAIKNIRLRPHYKQLVQEAILANSGGASPASPVAGMDQQSAIQYPSPGTSGLLADLKTEVLRLGGQVGRIEVYESTYLQDLARRAAEGLDNLEDEVAAYLGRIFPRVGDATVAQHQGGPPPRVVLRGGRRAAKQARRREYHRVQSLWRKHPARVAAEVLEEPGEDQVQPPLQEFVDFWEPLLSAPSHNPGERVVPPVSTRDSLRSILCSPVLLDEAHKCRVKNSTSAGPDGISARRWNKAPNTIKLLILNLLMLAGRPPKALTRTRTVFIPKKGGSGPGGYRPISVSSVVFRHFQKVLASRLQVAGVIGDVQRAFRPADGTAENLTVLQTVISLARIKRRQLHLAALDVAKAFDTVSHLALTDCLRGVGAPSRLIEYVACLYHEGVTVLEAGGEVSGDVRIGRGVRQGDPLSPLLFNLVVDTALGKLPTEVGFDLAPGVRVGALAFADDVILLAETREGLQIALNAFAKQLSRCGLVVNPDKCGSVSLVPWGRQHKVKVVDGGFVIGQAPIPSRSVLEVWRYLGVDFMGVATITASRVDLGRALARITKAPLKPQQRLRLLRTYLLPKLTYGLVFGRLMAGRLQELDREVRSAVRSWLRFPPGVPSAYIHAPVKSGGLGIVALSACIPSLRRQRLLALQGSSWEVACVAAGLDFVRQQLAWCDRATPSAPKPSSSAEFAAALHESVDGKELRQCSESLISSQWVDWASEGIGARDYRNFHAVCVATLPTAVRCSRGSRGMTDTLCRACRSGNEHLYHVVQQCPRTHGGRILRHDAVAKQIAGALSSSGWDVERERLYHMPSDQGKKPDIVAVKPDRSCIILDVQVVNGSMDMEQTWRAKIRKYDRDDLRQAVSELKGVAPNNIRVMAATLSWRGVWCGKSATELRELGISVGVLRGVTRRVLLGSYLNWWSFYRGTSLHPSLPPPPSSSSLIPRAGVG

SEQ ID NO: 24477 - protein, 967 aa, Apolygus lucorum
MAADEVVAVRNGVRNINVYLSERFPTRTVIAIKNLRLKPHYKQLVQEAILANSGGASPASPIAGVDQQSAIQYPSPGTSGLLADLKTEVLRLGGQVGRIEGYESTYLQDLARRAAEGLDNLEDKVAAYQGRIFPRVGDAAVTQHQGGPPPREVLRGGRRAAKQARRREYHRVQSLWRKHPARVAAEVLEEPGEDQVQPPLQEFVDFWEPLLSAPSHNPGERVVPPVSTRDSLCSILCSPVLLDEAHKCRVKNSTSAGPDGVSARRWNKVPNTIKLLILNLLILAGRPPKALTRTRTVFIPKKGGSGPGGYRPISVSSVVFRHFQKVLASRLQVAGVIGDVQRAFRPADGTAENLTVLQTVISLARIKRRQLHLAALDVAKAFDTVSHLALTDCLRGVGAPSRLIEYVACLYREGVTVLEAGGEVSRDIVIGRGVRQGDPLSPLLFNLVVDTALGKLPTEVGFDLAPGVRVGALAFADDVILLAETREGLQIALNAFAKQLSRCGLVVNPDKCGSVSLVPSGRQHKVKVVDGGFVIGQAPIPSRSVLEVWRYLGVDFMGVATITASRVDLGRALARVTKAPLKPQQRLRLLRTYLLPKLTYGLVFGRLTAGRLQELDREVRSAVRSWLRFPPGVPSAYIHAPVKSGGLGIVSLSACIPSLRRQRLLALQGSSWEVARVAAGLDFVRQQLAWCDRATPSAPKPSSSAEFAAALHESVDGKELRQCSESLISSQWVDWASEGIGARDYRNFHAVRVATLPTAVRCSRGSRGMTDTLCRACRSGNEHLYHVVQQCPRTHGGRILRHDAVAKQIAGALSSSGWDVERERLYHMPSDQGKKPDIVAVKPDRSCIILDVQVVNGSMDMEQTWRAKIRKYDRDDLRQAMSELKGVEPNNIRVMAATLSWRGVWCGKSATELRELGISVGVLRGVTRRVLLGSYLNWWSFYRGTSLHPSLPPPPSSSSLIPRAGVG

SEQ ID NO: 24478 - protein, 1095 aa, Apolygus lucorum
MTLRRLGRGPLLPGSLTLLKCASPVMNTNDDEPHNPRRPIGTRGSGGGAQRRPRQGRRPSSPSSSSSSSLPSSSSTASLNHQCAHCERAFTTRSGLGLHVRRKHPVAANAAIEIERVQPRYASEDLRRMAGDEVVAVRSGVRNINVYLSERFPTRTVNAISKLRQRPHYRQLVQDAILANSSGASPASPIADVEQQPAIQNPSPGTSGLLADLKTEVMRLGGQVGRIEGYESTYLQDLARRAAEGSENLEDEVAAYLGRIFPQVGDATVTQHQRGPPLRMMLRGGRRAAKQARRREYHRVQSLWRKHPARVAAEVLEEPGENQVQPPLQEFVDFWEPLLSAPSHDPGERVVPPVSTRDSLRGIMCSPVLLDEAHKCRVKNSTSAGLDGISARRWNKAPKTIKLLILNLLLLAGRPPKALTRTRTVFIPKKGGSGPGGYRPISVSSVVFRHFQKVLASRLQVAGVIGDVQRAFRPADGTAENLTVLQTVISLARIKRRQLHLAALDVAKAFDTVSHFALTDCLHGVGAPTRLIEYVACLYHEGVTVLEAGGEMSRDIMIGRGVRQGDPLSPLLFNLVVDTALGKLPTEVGFDLAPGVRVGALAFADDVILLAETREGLQIALNAFAKQLARCGLAVNPDKCGSVSLVPSGRQHKVKVVDGGFVIGQSPIPSRSVLEVWRYLGVDFMGVATITASRVDLGRALARVTKAPLKPQQKLRLLRTYLLPKLTYGLVFGRLTAGRLQELDREVRSAVRSWLKFPPGVPSAYIHAPVKSGGLGIVSLSASIPSLRRQRLLALRGSSWGVARAAADLDFVRQQLAWCDRATPSAPKPSSSAEFAAALHESVDGKELRQCSESLISSQWVDWASEGIGARDYRHFHAVRVASLPTAVRCTRGSRGATLPLCRACRSRSEHLYHVVQQCPRTHGGRILRHDAVAKQIAGALSSSGWDVERERLYHMPSDQGKKPDIVAVKPDQSCIILDVQVVNGSLDMEQTWRAKIRKYDTNDLRQAVSELKGVAPNNIRVMAATLSWRGVWCGKSATELRELGISVGVLRGITTRVLLGSYLNWWSFYRGTSLHPSLPPPPSSSSLIPRAGVG

SEQ ID NO: 24479 - protein, 1070 aa, Apolygus lucorum
MEENSALPHNPRQPIGSRGIRGGAQRRPRQGRRPSSPSTSSSSSLPSSSSTASLNHQCAHCERAFSTRSGLGLHVRRKHPVAANAAIDIERIQHRYASEELRRMAADEVVAVRNGVRNINVYLSERFPMRTVIAIKNIRLKPHYKQLVQEAILANSSGASPASPIADVEQQSAIQYPSPGTSGLLADLKTEVMRLRGQVGRIEGYESAYLQDLVRRAAEGLDNLEDEVAAYLGRIFPRVEDTTVTQHQGGPPPRVVLRGGGRAAKQARRREYHRVQSLWKKHPARVAAEVLEEPGENQVQPPLQEFVDFWEPLLSAPSHDPGERVVPPVSTRDSLRGIMCLPVLSDEAHKCRVRNSTSAGPDGISARRWNKAPKTIKLLILNLLLLAGRPPKALTRARTVFIPKKGGSGPGGYRPISVSSVVFRHFQKVLASRLQVAGVIGDVQRAFRPADGTAENLTVLQTVVSLARIKRRQLHLAALDVAKAFDTVSHLALTDCLRGVGAPSRLIEYVACLYQEGVTVLEAGGEVSGDVRIGRGVRQGDPLSPLLFNLVVDTALGKLPTEVGFDLAPGVRVGALAFADDVILLAETREGLQIALNAFAKQLARCGLVVNPDKCGSVSLVPSGRQHKVKVVDGGFVVGQSPIPARSVLEVWRYLGVDFMGVATITASRVDLGRALARVTKAPLKPQQKLRLLRTYLLPKLTYGLVFGRLTAGRLQELDREVRSAVRSWLRFPPGVPSAYVHAPVKSGGLGIVSLSACIPSLRRQRLLALQGSSWEVARAAADLDFVRQQLAWCDRATPSAPKPSSSAEFAAALHESVDGKELRQCSESLVSSQWVDWASEGIGARDYRHFHAVRVAALPTAVRCSRGSRGTTLPLCRACRSGNEHLYHVVQQCPRTHGGRILRHDAVAKQIAGALSSSGWDVERERLYHMPSDQGKKPDIVAVKPDQSCIILDVQVVNGSLDMEQTWRAKIRKYDRDDLRQAVSELKGVAPNNIRVMAATLSWRGVWCGKSATELRELGISVGVLRGITTRVLLGSYLNWWSFYRGTSLHPSLPPPPSSSSLIPRAGVG

SEQ ID NO: 24480 - protein, 1052 aa, Apolygus lucorum
MIHGSKCTRNALLEIPVKKTTAISNCFNCQTTVISLNHQCAHCERAFSTRSGLGLHVRRKHPVAANAAIDIERIQHRYASEELRRMAADEVLAVRNGVRNINVYLSERFPMRTVIAIKNIRLKPHYKQLVQEAILANSSGASPASPIADVEQQSAIQYPSPGTSGLLADLKTEVMRLGGQVGRIEGYESAYLQDLVRRAAEGLDNLEDEVAAYLGRIFPRVEDTTVTQHQGGPPPRVMLRGGRRAAKQARRREYHRVQSLWKKHPARVAAEVLEEPGENQVQPPLQEFVDFWEPLLSAPSHDPGERVVPPVSTRDSLRGIMCLPVLSDEAHKCRVRNSTSAGPDGISARRWNKAPKMIKLLILNLLLLAGRPPKALTRARTVFIPKKGGSGPGGYRPISVSSVVFRHFQKVLASRLQVAGVIGDVQRAFRPADGTAENLTVLQTVVSLARIKRRQLHLAALDVAKAFDTVSHLALTDCLRGVGAPSRLIEYVACLYQEGVTVLEAEGEVSGDVRIGRGVRQGDPLSPLLFNLVVDTALGKLPTEVGFDLAPGVRVGALAFADDVILLAETREGLQIALNKFAKRLARCGLVVNPDKCGSVSLVPSGRQHKVKVVDGGFVVGQSPIPARSVLEVWRYLGVDFMGVATITASRVDLGRALARVTKAPLKPQQKLRLLRTYLLPKLTYGLVFGRLTAGRLQELDREVRSAVRSWLRFPPGVPSAYVHAPVKSGGLGIVSLSACIPSLRRQRLLALQGSSWEVARAAADLDFVRQQLAWCDRATPSAPKPSSSAEFAAALHESVDGKELRQCSESLVSSQWVDWASEGIGARDYRHFHAVRVAALPTAVRCSRGSRGTTLPLCRACRSGNEHLYHVVQQCPRTHGGRILRHDAVAKQIAGALSSSGWDVERERLYHMPSDQGKKPDIVAVKPDQSCIILDVQVVNGSLDMEQTWRAKIRKYDRDDLRQAVSEVKGVAPNNIRVMAATLSWRGVWCGKSATELRELGISVGVLRGITTRVLLGSYLNWWSFYRGTSLHPSLPPPPSSSSLIPRAGVG

SEQ ID NO: 24481 - protein, 844 aa, Apolygus lucorum
MVAAYLGRIFPRVGDATVTQHQGRPPPRVVLRGGRRAAKQARRQEYHRVQSLWRKHPAHVAAEVLEEPGEDQVQPPLQEFVDFWEPLLSAPSHNPGERVVPPVSTRDSLRSILCSPVLLDEAHKCRVKNSTSAGPNGVSARRWNKAPNTIKLLILNLLMLAGRPPKALTRTRTVFIPKKGGSGPGGYRPISVSSVVFRHFQKVLASRLQVAGVIGDVQRAFRPADGTAENLTVLQTVISLARIKRRQLHLAALDVAKAFDTVSHFALTNCLRGVGAPSRLIEFVACLYHEGVTVLEAGGEVSGDVRIGRGVRQGDPLSPLLFNLVVDTALGKLPTEVGFDLAPGVRVGALAFADDVILLAETREGLQIALNAFAKQLARCGLVVNPDKCGSVSLVPSGRQHKVKVVDGGFVVGQSPIPSRSVLEVWRYLGVDFMGVATITTSRVDLGRALARVTKAPLKPQQKLRLLRTYLLPKLTYGLVFGRLTAGRLQELDRQVRSAVRSWLKFPPGVPSAYFHAPVKSGGLGIVSLSACIPSLRRQRLLALQGSSWEVARAAADLDFVRQQLAWCDRATPSAPKPSSSAEFAAALHESVDGKELRQCSESLVSSQWVDWASEGIGARDYRHFHAVRMAALPTAVRCSRGSRGTTLPLCRACRSGNEHLYHVVQQCPRTHGGRILRHDAVAKQIAGALSSSGWDVERERLYHMPSDQGKKPDIVAVKPDQSCIILDVQVVNGSLDMEQTWRAKIRKYDRDDLRQAVSELKGVVPNNIRVMAATLSWRGVWCGKSATELRELGISVGVLRGITTRVLLGSYLNWWSFYRGTSLHPSLPPPPSSSSLIPRAGVG

SEQ ID NO: 24482 - protein, 1056 aa, Apolygus lucorum
MVPNEDHHLRTDSSHCACANVNFLIPFSSSLPSSSSTASLNHQCAHCERAFTTRSGLGLHVRRKHPVAANAAIDIERIQHRYASEELRRMAADEAVAVRNGVRNINVYLSERFPMRTVIAIKNIRLKPHYKQLVQEVILANSSGASPASPVADVEQQPAIQHPSPGTSGLLADLKTEVLRLGGQVGRIEGYESTYLQDLARRAAEGLDNLENEVAAYLGRIFPRVGDATVTHHQGGPPPRVVLRGGRRAAKQARRREYHRVQSLWRKHPARVAAEVLEEPGENQVQPPLQEFVDFWEPLLSAPSHDPGERVVPPVSTRDSLRSIMCSPVLSDEAHKCRVKNSTSAGPDGISARRWNKAPRTIKLLLLNLLLLAGRPPKALTRTRTVFIPKKGGSGPGGYRPISVSSVVFRHFQKVLASRLQVAGIIGDVQRAFRPADGTAENLTVLQTVISLARMKRRQLHLAALDVAKAFDTVSHFALTDCLRGVGAPSRLIEYVACLYHEGVTVLEAGGEVSGDVRIGRGVRQGDPLSPLLFNLVVDTALGKLPTEVGFDLAPGVRVGALAFADDVILLAETREGLQIALNAFAKQLARCGLVVNPDKCGSVSLVPSGRQHKVKVVDGGFVIGQSPIPSRSVLEVWRYLGVDFMGVATISASRVDLGRALDRVTKAPLKPQQKLRLLRTYLLPKLTYGLVFGRLTAGRLQELDRQVRSAVRSWLRFPPGVPSAYVHAPVKSGGLGVVSLSACIPSLRRQRLLALQGSSWEVARAAADLDFVRQQLAWCDRATPSAPKPSSSAEFAAALHESVDGKELRQCSESPVSSQWVDWASEGIGARDYRHFHAVRMATLPTGVRCSRGSRGTTLPLCRACRSGNEHLYHVVQQCPRTHGGRILRHDAVAKQIAGALSSSGWDVERERLYHMPSDQGKKPDIVAVKPDQSCIILDVQVVNGSLDMEQTWRAKIRKYDRNDLRQAVSELKGVAPNNIRVMAATLSWRGVWCGKSATELRELGISVGVLRGITTRVLLGSYLNWWSFYRGTSLHPSLPPPPSSSSLIPRAGVG

SEQ ID NO: 24483 - protein, 986 aa, Apolygus lucorum
MLMLYAAWEPRYASEELRRMAADEAVAVRNGVRNINVYLNERFPTRTVIAIKNIRLKPHYKQLVQEAILANSSGASPASPIADVEQQPAIQYPSPGTSGLLADLKTEVLRLGGQVGRIEGYESTYLQDLVRRAAEGLDNLEDEVAAYLGRIFPRVGDATVTRHQGGPPPRMVLRGGRRAAKQARRREYHRVQSLWGKHPARVAAEVLEEPGENQVQPSLQEFVDFWEPLLSAPSHDPGECVVPPVSTRDSLRSIMCSPMLSDEAHKCRVRNSTSAGPDGVSARRWNKAPKTIKLLILNLLLLAGRPPKALTRTRTVFIPKKGGSGPGGYRPISVSSVVFRHFQKVLASRLQVAGVIGDVQRAFRPADGTAENLTVLQTVISLARIKRRQLHLAALDVAKAFDTVSHLALTDCLRGVGAPSRLIEYVACLYQEGVTVLEAGGEVSGDIRIGRGVRQGDPLSPLLFNLVVDTALGKLPTEVGFDLAPGVRVGALAFADDVILLAETREGLQIALNAFAKQLAGCGLVVNPDKCGSVSLVPSGRQHKVKVVDGGFVIGQSPIPSRSVLEVWRYLGVDFMGVATITASRVDLGRALARVTKAPLKPQQKLRLLRTYLLPKLTYGLVFGRLTAGRLQELDREVRSAVGSWLKFPPGVPSAYVHAPVKSGGLGIVSLSACIPSLRRRRLLALQGSSWEVARAAADLDFVRQQLAWCDRATPSAPKPSSSAEFAAALHESVDGKELRQCSESLVSSQWVDWASEGIGARDYRHFHAIRVASLPTAVRCSRGSRGTTLPLCRACRSGNEHLYHVVQQCPRTHGGRILRHDAVAKQIAGALSSSGWDVERERLYHMPSDQGKKPDIVAVKPDRSCIILDVQVVNGSLDMEQTWRAKIRKYDTNDLRQAVSELKGVAPNNIRVMAATLSWRGVWCGKSATELRELGISVGVLRGITTRVLLGSYLNWWSFYRGTSLHPSLPPPPSSSSLIPRAGVG

SEQ ID NO: 24484 - protein, 960 aa, Apolygus lucorum
MAADEAVAVRNGVRNINVYLNERFPMRTVIAIKNIRLKPHYKQLVQEAILANSSGASPASPIADVEQQPAIQYPSPGTSGLLADLKTEVLRLGGQVGRIEGYESTYLQDLVRRAVEGLDNLEDEVAAYLGRIFPRVGDATVTRHQGGPPPRMVLRGGRRAAKQARRREYHRVQSLWRKHPARVAAEVLEEPGENQVQPPLQEFVDFWEPLLSAPSHDPGECVVPPVSTRDSLRSIMCSPVLSDEAHKCRVRNSTSAGPDGVSARRWNKAPKTIKLLILNLLLLAGRPPKALTHTRTVFIPKKGGSGPGGYRPISVSSVVFRHFQKVLASRLQVAGVIGDVQRAFRPADGTGENLTVLQTVISLARIKRRQLHLAALDVAKAFDTVSHLALTDCLRGVGAPSRLIEYVACLYQEGVTVLEAGGEVSGDIGVGRGVRQGDPLSPLLFNLVVDTALGKLPTEVGFDLAPGVRVGALAFADDVILLAETREGLQIALNAFAKQLAGCGLVVNPDKCGSVSLVPSGRQHKVKVVDGGFVVGQSPIPSRSVLEVWRYLGVDFMGVATITASRVDLGRALARITKAPLKPQQKLRLLRTYLLPKLTYGLVFGRLMAGRLQELDREVRSAVRSWLKFPPGVPSAYVHAPVKSGGLGIVSLSACIPSLRRRRLLALQGSSWEVARAAADLDFVRQQLAWCDRATPSAPKPSSSAEFAAALHESVDGKELRQCSESLVSSQWVDWASEGIGARDYRHFHAIRVASLPTAVRCSRGGRGTTLPLCRACRSGNEHLYHVVQQCPRTHGGRILRHDAVAKQIAGALSSSGWDVERERLYHMPSDQGKKPDQSCIILDVQVVNGSLDMEQTWRAKIRKYDTNDLRQAVSELKGVAPNNIRVMAATLSWRGVWCGKSATELRELGISVGVLRGITTRVLLGSYLNWWSFYRGTSLHPSLPPPPSSSSLIPRAGVG

SEQ ID NO: 24485 - protein, 1095 aa, Apolygus lucorum
MTLWRLGREPLLSGSLTLLKCASPVMNTNDDEPHNPRRPIGTRGSGGGAQRRPRQGRRPSSPSSSSSSSLPSSSSTASLNHQCAHCERAFTTRSGLGLHVRRKHPVAANAAIEIERVQPRYASEDLRRMAGDEVVAVRSGVRNMNVYLSERFPTRTVNAISKLRQRPHYRQLVQDAILANSSGASPASPIADVEQQPAIQNPCPGTSGLLADLKTEVMRLGGQVGRIEGYESTYLQDLARRAAEGSENLEDEVAAYLGRIFPQVGDATVTRHQRGPPLRMVLCGGRRAVKQARRREYHRVQSLWRKHPARVAAEVLEEPGENQVQPPLQEFVDFWEPLLSAPSHDPGERVVPPVSTRDSLRGIMCSPVLLDEAHKCRVKNSTSAGPDGISARRWNKAPKTIKLLILNLLLLAGRPPKALTRTRTVFIPKKGGSGPGGYRPISVSSVVFRHFQKVLASRLQVAGVIGDVQRAFRPADGTAENLTVLQTVISLARIKRWQLHLAALDVAKAFDTVSHFALTDCLRGVGAPTRLIEYVACLYHEGVMVLEAGGEMSRDIMIGRGVRQGDPLSPLLFNLVVDTALGKLPTEVGFDLAPGVRVGALAFADDVILLAETREGLQIALNAFAKQLARCGLVVNPDKCGSVSLVPSGRQHKVKVVDGGFVIGQSPIPSRSVLGVWRYLGVDFMGVATITASRVDLGRALARVTKAPLKPQQKLRLLRTYLLPKLTYGLVFGRLTAGRLQELDREVRSAVRSWLKFPPGVPSAYIHAPVKSGGLGIVSLSASIPSLRRQRLLALRGSSWGVARAAADLDFVRQQLAWCDRATPSAPKPSSSAEFAAALHESVDGKELRQCSESLISSQWVDWASEGIGARDYRHFHAVRVASLPTAVRCTRGSRGATLPLCRACRSRSEHLYHVVQQCPRTHGGRILRHDAVAKQIAGALSSSGWDVERERLYHMPSDQGKKPDIVAVKPDQSCIILDVQVVNGSLDMEQTWRAKIRKYDTNDLRQAVSELKGVAPNNIRVMAATLSWRGVWCGKSATELRELGISVGVLRGITTRVLLGSYLNWWSFYRGTSLHPSLPPPPSSSSLIPRAGVG

SEQ ID NO: 24486 - protein, 1070 aa, Apolygus lucorum
MDNNETRPHNPRQPIGSRGIRGGAQRRPRQGRRPSSPSSSSSSSLPSSSSTASLDHQCAHCERAFTTRSGLGVHIRRKHPVAANDEIDVERVQPRYASEDLRRMAADEVVAVRNGVRNINVYLSERFPTRTVIAIKNLRLKPHYKQLVQEAILANSSGASPASPIAGVDQQSAIQYPSPGTSGLLADLKTEVLRLGGQVGRIEGYESTYLQDLARRAVEGLDNLEDKVAAYLGRIFPRVGDATVTQHQGGPPPRVVLRGGRRAAKQARRREYHRVQSLWRKHPARVAAEVLEEPGEDQVQPPLQEFVDFWEPLLSAPSHNPGERVVPPVSTRDSLRSILCSPVLLDEAHKCRVKNSTSAGPDGVSARRWNKVPNTIKLLILNLLILAGRPPKALTRTRTVFIPKKGGSGPGGYRPISVSSVVFRHFQKVLASRLQVAGVIGDVQRAFRPADGTAENLTVLQTVISLARIKRRQLHLAALDVAKAFDTVSHLALTDCLRGVGAPSRLIEYVACLYREGVTVLEAGGEVSRDIVIGRGVRQGDPLSPLLFNLVVDTALGKLPTEVGFDLAPGVRVGALAFADDVILLAETREGLQIALNAFAKQLSRCGLVVNPDKCGSVSLVPSGRQHKVKVVDGGFVIGQAPVPSRSVLEVWRYLGVDFMGVATITASRVDLGRALARVTKAPLKPQQRLRLLRTYLLPKLTYGLVFGRLTAGRLQELDREVRSAVRSWLRFPPGVPSAYIHAPVKSGGLGIVSLSACIPSLRRQRLLALQGSSWEVARVAAGLDFVRQQLAWCDRATPSAPKPSSSAEFAAALHESVDGKELRQCSESLISSQWVDWASEGIGARDYRNFHAVRVATLPTAVRCSRGSRGMTDTLCRACRSGNEHLYHVVQQCPRTHGGRILRHDAVAKQIAGALSSSGWDVERERLYHMPSDQGKKPDIVAVKPDRSCIILDVQVVNGSMDMEQTWRAKIRKYDRDDLRQAVSELKGVEPNNIRVMAATLSWRGVWCGKSATELRELGISVGVLRGVTRRVLLGSYLNWWSFYRGTSLHPSLPPPPSSSSLIPRAGVG

SEQ ID NO: 24487 - protein, 1069 aa, Apolygus lucorum
MERTNEPHNPRLPIGTRGSRGGAQRRPRQGRRPSSPSSSSSSSLPSSSSTASLSHQCAHCERAFTSRSGLGLHVRRKHPVAANAAIDIERVQHRYASEELRRMAADEALAVRNGVRNINVYLNERFPSRTVIAIKNIRLKPHYKQLVQEAILANSSGASPASPVADVEQQPAIQYPSPGSSGLLADLKTEVLRLGGQVGRIEGYDSAYLQDLARRAVEGPDNLEDDVAAYLGRTFPRVGDATVMQHRGGRPPTVGLHGGRRAAKQARRRRYQRVQRLWRKHPARVATEVLEEPGEDQVEPPLQEFVDFWEPLLSAPSHNPGERVVPPVSTRDSLRSIMCAPVLLDEAHRCRVKNSTSAGPDGVSARRWNKAPNTIKLLILNLLLLAGRPPKALTRSRTVFIPKKGGSGPGGYRPISISSVVFRHFQKVLASRLQVAGVIGDVQRAFRPADGTAENLTVLQTVISLARMKRRQLHLAALDVAKAFDTVSHLALTDCLRGVGAPSRLIEYVACLYHEGVTVLEAGGEMSRDVLIGRGVRQGDPLSPLLFNLVVDTALGKLPTEVGFDLAPGVRVGALAFADDVILLAETREGLQIALNAFAKQLARCGLVVNPDKCGSVSLVPSSRQHKVKVVDGGFVVGQSPIPSRSVLEVWRYLGVDFMGVATITASRVDLGRALERVTKAPLKPQQKLRLLRTYLLPKLTYGLVFGRLTAGRLQELDRKVRSAVRSWLRFPPGVPSAYIHAPVKSGGLGIVSLSASIPSLRRQRLLALQGSSWEVARAAADLDFVRQQLAWCDRATPSAPKPSSSAEFAAALHESVDGKELRQCSESPISSQWVDWASEGIGARDYRHFHAIRVASLPTAVRCSRGSRGTTLPLCRACRSGNEHLYHVVQQCPRTHGGRILRHDAVAKQIAGALSSSGWDVERERLYHMPSDQGKKPDIVAVKPDQSCIILDVQVVNGSLDMEQTWRAKIRKYDRNDLRQAVSELKGVAPNNIRVMAATLSWRGVWCGKSATELRELGISVGVLRGITTRVLLGSYLNWWSFYRGTSLHPSLPPPPSSSSLIPRAGVG

SEQ ID NO: 24488 - protein, 1095 aa, Apolygus lucorum
MTLWRLGRGPLLTGSLTLHYKRPPVMENAQDQPHNPRQPIGSRGIRGGAQRRPRQGHRPSSPSSSSSSSLPSSSSTASLNHQCAHCERAFTTRSGLGLHIRRKHPVAANAAIDIERIQPRYASEELRRMAADEAVAVRNGVRNINVYLNERFPTRTVIAIKNIRLKPHYKQLVQEAILANSSGASPASPVADVEQQPAIQYPSPGTSGLLADLKTEVLRLGGQVGRIEGYESTYLQDLVRRAVEGLDNLEDEVAAYLGRIFPRVGDATVTRHQGGPPPRMVLRGGRRAAKQARRREYHRVQSLWRKHPARVAAEVLEEPGENQVQPPLQEFVDFWEPLLSAPSHDPGECVVPPVSTRESLHSIMCSPVLSDEAHKCRVRNSTSAGPDGVSARRWNKAPKTIKLLILNLLLLAGRPPKALTRTRTVFIPKKGGSGPGGYRPISVSSVVFRHFQKVLASRLQVAGVIGDVQRAFRPADGTAENLTVLQTVISLARIKRRQLHLAALDVAKAFDTVSHLALTDCLRGVGAPSRLIEYVACLYQEGVTVLEAGGEVSGDVRIGRGVRQGDPLSPLLFNLVVDTALGKLPTEVGFDLAPGVRVGALAFADDVILLAETREGLQIALNAFAKQLAGCGLVVNPDKCGSVSLVPSGRQHKVKVVDGGFVVGQSPIPSRSMLEVWRYLGVDFMGVATITASRVDLGRALARITKAPLKPQQKLRLLRTYLLPKLTYGLVFGRLTAGRLQELDREVRSAVRSWLKFPPGVPSAYVHAPVKSGGLGIVSLSACIPSLRRRRLLALQGSSWEVARAAADLDFVRQQLAWCDRATPSAPKPSSSAEFAAALHESVDGKELRQCSESLVSSQWVDWASEGIGARDYRHFHAIRVASLPTAVRCSRGSRGTTLPLCRACRSGNEHLYHVVQQCPRTHGGRILRHDAVAKQIAGALSSSGWDVERERLYHMPSDQGKKPDIVAVKPDQSCIILDVQVVNGSLDMEQTWRAKIRKYDTNDLRQAVSELKGVEPNNIRVMAATLSWRGVWCGKSATELRELGISVGVLRGITTRVLLGSYLNWWSFYRGTSLHPSLPPPPSSSSLIPRAGVG

SEQ ID NO: 24489 - protein, 932 aa, Apolygus lucorum
MRKREFPLLVQEAILANSSGASPASPIADVEQQPAIQYPSPGTSGLLADLKTEVLRLGGQVGRIEGYESTYLQDLARRAAEGLDNLENEVAAYLGRIFPRVGDATVTQHQGGPPPGVVLRGGRRAAKQARRREYHRVQSLWRKHPARVAAEVLEEPGENQVQPPLREFVDFWEPLLSAPSHDPGERVVPPVSTRDSLRSIMCAPVLSDEAHKCRVKNSTSAGPDGISARRWNKAPKTIKLLVLNLLLLAGRPPKALTRARTVFIPKKGGSGPGGYRPISVSSVVFRHFQKVLASRLQVAGIIGDVQRAFRPADGTAENLTVLQTVISLARMKRRQLHLAALDVAKAFDTVSHLALTDCLRGVGAPSRLIEYVACLYQEGVTVLEAGGEVSGDVRIGRGVRQGDPLSPLLFNLVVDTALGKLPTEVGFDLAPGVRVGALAFADDVILLAETREGLQIALNAFARQLARCGLVVNPDKCGSVSLVPSGRQHKVKVVDGGFVIGQSPIPSRSVLEVWRYLGVDFMGVATISASHVDLGRALARVTKAPLKPQQKLRLLRTYLLPKLTYGLVFGRLTAGRLQELDRQVRSAVRSWLRFPPGVPSAYVHAPVKSGGLGIVSLSACIPSLRRQRLLALQGSSWEVARAAAGLDFVRQQLAWCDRATPSAPKPSSSAEFAAALHESVDGKELRQCSESLISSQWVDWASEGIGARDYRHFHAVRMATLPTAVRCSRGSRGTTLPLCRACRSGNEHLYHVVQQCPRTHGGRILRHDAVAKQIAGALSSSGWDVERERLYHMPSDQGKKPDIVAVKPDQSCIILDVQVVNGSLDMEQTWRAKIRKYDRNDLRQAVSELKGVAPNNIRVMAATLSWRGVWCGKSATELRELGISVGVLRGITTRVLLGSYLNWWSFYRGTSLHPSLPPPPSSSSLIPRAGVG

SEQ ID NO: 24490 - protein, 1070 aa, Apolygus lucorum
MDNNATRPHNPRQPIGSRGIRGGAQRRPRQGRRPSSPSSSSSSSLPSSSSTASLDHQCAHCERAFTTRSGLGVHIRRKHPVAANDEIDVERVQPRYASEDLRRMAADEVVAVRNGVRNINVYLSERFPTRTVIAIKNLRLKPHYKQLVQEAILANSSGASPASPIAGVDQQSAIQYPSPGTSGLLADLKTEVLRLGGQVGRIEGYESTYLQDLARRAAEGLDNLEDKVAAYLGRIFPRVGDATVTQHQGGPPPRVVLRGGRRAAKQARRREYHRVQSLWRKHPARVAAEVLEEPGEDQVQPPLQEFVDFWEPLLSAPSHNPGERVVPPVSTRDSLRSILCSPVLLDEAHKCRVKNSTSAGPDGVSARRWNKVPNTIKLLILNLLILAGRPPKALTRTRTVFIPKKGGSGPGGYRPISVSSVVFRHFQKVLASRLQVAGVIGDVQRAFRPADGTAENLTVLQTVISLARIKRRQLHLAALDVAKAFDTVSHLALTDCLRGVGAPSRLIEYVACLYREGVTVLEAGGEVSRDIVIGRGVRQGDPLSPLLFNLVVDTALGKLPTEVGFDLAPGVRVGALAFADDVILLAETREGLQIALNAFAKQLSRCGLVVNPDKCGSVSLVPSGRQHKVKVVDGGFVIGQAPIPSRSVLEVWRYLGVDFMGVATITASRVDLGRALARVTKAPLKPQQRLRLLRTYLLPKLTYGLVFGRLTAGRLQELDREVRSAVRSWLRFPPGVPSAYIHAPVKSGGLGIVSLSACIPSLRRQRLLALQGSSWEVARVAAGLDFVRQQLAWCDRATPSAPKPSSSAEFAAALHESVDGKELRQCSESLISSQWVDWASEGIGARDYRNFHAVRVATLPTAVRCSRGSRGMTDTLCRACRSGNEHLYHVVQQCPRTHGGRILRHDAVAKQIAGALSSSGWDVERERLYHMPSDQGKKPDIVAVKPDRSCIILDVQVVNGSMDMEQTWRAKIRKYDRDDLRQAVSELKGVEPNNIRVMAATLSWRGVWCGKSATELRELGISVGVLRGVTRRVLLGSYLNWWSFYRGTSLHPSLPPPPSSSSLIPRAGVG

SEQ ID NO: 24491 - protein, 1095 aa, Apolygus lucorum
MTLWRIGREPLSTGSLALLNKRPPIMENNPEEPHNPRLPIGPRGSRGGAQRRPRQGRRPSSPSSSSSSSLPSSSSTASLNHQCAHCERAFTTRSGLGLHVRRKHPVAANAAIDIERIQHRYASEELRRMAADEAVAVRNGVRNINVYLSERFPMRTVIAIKNIRLKPHYKQLVQEVILANSSGASPASPVADVEQQPAIQHPSPGTSGLLADLKTEVLRLGGQVGRIEGYESTYLQDLARRAAEGLDNLENEVAAYLGRIFPRVGDATVTHHQGGPPPRVVLRGGRRAAKQARRREYHRVQSLWRKHPARVAAEVLEEPGENQVQPPLQEFVDFWEPLLSAPSHDPGERVVPPVSTRDSLCSIMCSPVLSDEAHKCRVKNSTSAGPDGISARRWNKAPRTIKLLLLNLLLLAGRPPKALTRTRTVFIPKKGGSGPGGYRPISVSSVVFRHFQKVLASRLQVAGIIGDVQRAFRPADGTAENLTVLQTVISLARMKRRQLHLAALDVAKAFDTVSHFALTDCLRGVGAPSRLIEYVACLYHEGVTVLEAGGEVSGDVRIGRGVRQGDPLSPLLFNLVVDTALGKLPTEVGFDLAPGVRVGALAFADDVILLAETREGLQIALNAFAKQLARCGLVVNPDKCGSVSLVPSGRQHKVKVVDGGFVIGQSPIPSRSVLEVWRYLGVDFMGVATISASRVDLGRALDRVTKAPLKPQQKLRLLRTYLLPKLTYGLVFGRLTAGRLQELDRQVRSAVRSWLRFPPGVPSAYVHAPVKSGGLGVVSLSACIPSLRRQRLLALQGSSWEVARAAADLDFVRQQLAWCDRVTPSAPKPSSSAEFAAALHESVDGKELRQCSESPVSSQWVDWASEGIGARDYRHFHAVRMATLPTAVRCSRGSRGTTLPLCRACRSGNEHLYHVVQQCPRTHGGRILRHDAVAKQIAGALSSSGWDVERERLYHMPSDQGKKPDIVAVKPDQSCIILDVQVVNGSLDMEQTWRAKIRKYDRNDLRQAVSELKGVAPNKIRVMAATLSWRGVWCGKSATELRELGISVGVLRGITTRVLLGSYLNWWSFYRGTSLHPSLPPPPSSSSLIPRAGVG

SEQ ID NO: 24492 - protein, 1069 aa, Apolygus lucorum
MENLTEPHNPRRPIGSRGIRGGAQRRPRQGRRPSSPSSSSSSSLPSSSSTASLDHQCAHCERAFTSRSGLGVHVRRKHPVAANEEIDVERVQPRYASEDLRRMAADEVVAVRNGVRNINVYLSERFPTRTVIAIKNLRLKPHYKQLVQEAILANSSGASPASPVAGVDQQSAIQYPSPGTSGLLADLKTEVLRLGGQVGRIEGYESTYLQDLARRAAEGLDNLEDMVAAYLGRIFPRVGDVTVTQHQGGPPPRVVLRGGRRAAKQARRREYHRVQSLWRKHPARAAAEVLEEPGEDQVQPPLQEFVDFWEPLLSAPSHNPGERVVPPVSTRDSLRSILCSPVLLDEAHKCRVKNSTSAGPDGISARRWNKAPNTIKLLVLNLLMLAGRPPKALTRTRTVFIPKKGGSGPGGYRPISVSSVVFRHFQKVLASRLQVAGVIGDVQRAFRPADGTAENLTVLQTVISLARIKRRQLHLAALDVAKAFDTVSHLALTDCLRGVGAPSRLIEYVACLYHEGVTVLEAGGEVSGDVRIGRGVRQGDPLSPLLFNLVVDTALGKLPTEVGFDLAPGVRVGALAFADDVILLAETREGLQIALNAFAKQLSRCGLVVNPDKCGSVSLVPSGRQHKVKVVDGGFVIGQAPIPSRSVLEVWRYLGVDFMGVATITASRVDLGRALARITKAPLKPQQRLRLLRTYLLPKLTYGLVFGRLTAGRLQELDREVRSAVRSWLRFPPGVPSAYIHAPVKSGGLGIVSLSACIPSLRRQRLLALQGSSWEVARVAAGLDFVRQQLAWCDRATPSAPKPSSSAEFAAALHESVDGKELRQCSESLISSQWVDWASEGIGARDYRNFHAVRVATLPTAVRCSRGSRGVTDTLCRACRSGNEHLYHVVQQCPRTHGGRILRHDAVAKQIAGALSSSGWDVERERLYHMPSDQGKKPDIVAVKPDRSCIILDVQVVNGSMDMEQTWRAKIRKYDRDDLRQAVSELKGVAPNNIRVMAATLSWRGVWCGKSATELRELGISAGVLRGVTRRVLLGSYLNWWSFYRGTSLHPSLPPPPSSSSLIPRAGVG

SEQ ID NO: 24493 - protein, 1070 aa, Apolygus lucorum
METTEEEPHNPRQPIGSRGIRGGAQRRPRQGRRPSSPSSSSSSSLPSSSSTASLNHQCAHCERAFTTRSGLGLHIRRKHPVAANDAIDIERIQHRYASEELRRMAADEAVAVRNGVRNINVYLNERFPTRTVIAIKNIHLKPHYKQLVQEAILANSSGASPASPIADVEQQPAIQYPSPGTSGLLADLKTEVLRLGGQVGRIEGYESTYLQDLVRRAAEGLDNLEDEVAAYLGRIFPRVGDATVTQHQGGPPPRVVLRGGRRAAKQARRREYHRVQSLWRKHPARVAAEVLEEPGENQVQPPLQEFVDFWEPLLSAPSHDPGERVVPPVSTRDSLRSILCSPVLLDEAHKCRVKNSTSAGPDGVSARCWNKAPKTIKLLILNLLLLAGRPPKALTRTWTVFIPKKGGSGPGGYRPISVSSVVFRHFQKVLASRLQVAGVIGDVQRAFRPADGTAENLTVLQTVISLARIKRRQLHLAALDVAKAFDTVSHLALTDCLRGVGAPSRLIEYVACLYQEGVTVLEAGGEVSGDIRIGRGVRQGDPLSPLLFNLVVDTALGKLPTEVGFDLAPGVRVGALAFADDVILLAETREGLQIALNAFAKQLARCGLVVNPDKCGSVSLVPSGRQHKVKVVDGGFVVGQSPIPSRSVLEVWRYLGVDFMGVATITTSRVDLGRALARVTKAPLKPQQKLRLLRTYLLPKLTYGLVFGRLTAGRLQQLDREVRSAVRSWLKFPPGVPSAYFHAPVKSGGLGIVSLSACIPSLRRRRLLALQGSSWEVARAAADLDFVRQQLAWCDRATPSAPTPSSSAEFAAALHESVDGKELRQCSESLVSSQWVDWASEGIGARDYRHFHAIRVASLPTAVRCSRGSRGTTLPLCRACRSGNEHLYHVVQQCPRTHGGRILRHDAVAKQIAGALSSSGWDVERERLYHMPSDQGKKPDIVAVKPDQSCIILDVQVVNGSLDMEQTWRAKIRKYDRNDLRQAVSELKGVAPNNIRVMAATLSWRGVWCGKSATELRELGISVGVLRGITTRVLLGSYLNWWSFYRGTSLHPSLPPPPSSSSLIPRAGVG

SEQ ID NO: 24494 - protein, 1095 aa, Apolygus lucorum
MTLWRLGRGPLLTGSLTLHYKRPPVMENEQDQPHNPRQPIGSRGIRGGAQRRPRQGRRPSSPSSSSSSSLPSSSSTASLNHQCAHCERAFTTRSGLGLHIRRKHPVAANAAIDIERIQPRYASEELRRMAADEAVAVRNGVRNINVYLNERFPTRTVIAIKNIRLKPHYKQLVQEAILANSSGASPASPVAGVEQQPAIQYPSPGTSGLLADLKTEVLRLGGQVGRIEGYESTYLQDLVRRAVEGLDNLEDEVAAYLGRIFPRVGDATVTRHQGGPPPRMVLRGGRRAAKQARRREYHRVRSLWRKHPARVAAEVLEEPGENQVQPPLQEFVDFWEPLLSAPSHDPGECVVTPVSTRESLRSIMCSPVLSDEAHKCRVRNSTSAGPDGVSARRWNKAPKTIKLLILNLLLLAGRPPKALTRTRTVFIPKKGGSGPGGYRPISVSSVVFRHFQKVLASRLQVAGVIGDVQRAFRPADGTAENLTVLQTVISLARIKRRQLHLAALDVAKAFDTVSHLALTDCLRGVGAPSRLIEYVACLYQEGVTVLEAGGEVSGDVRIGRGVRQGDPLSPLLFNLVVDTALGKLPTEVGFDLAPGVRVGALAFADDVILLAETREGLQIALNAFAKQLAGCGLVVNPDKCGSVSLVPSGRQHKVKVVDGGFVVGQSPIPSRSVLEVWRYLGVDFMGVATITASRVDLGRALARVTKAPLKPQQKLRLLRTYLLPKLTYGLVFGRLTAGRLQELDREVRSAVRSWLKFPPGVPSAYVHAPVKSGGLGIVSLSACIPSLRRRRLLALQGSSWEVARAAADLDFVRQQLAWCDRATPSAPKPSSSAEFAAALHESVDGKELRQCSESLVSSQWVDWASEGIGARDYRHFHAIRVASLPTAVRCSRGSRGTTLPLCRACRSGNEHLYHVVQQCPRTHGGRILRHDAVAKQIAGALSSSGWDVERERLYHMPSDQGKKPDIVAVKPDQSCIILDVQVVNGSLDMEQTWRAKIRKYDTNDLRQAVSELKGVAPNNIRVMAATLSWRGVWCGKSATELRELGISVGVLRGITTRVLLGSYLNWWSFYRGTSLHPSLPPPPSSSSLIPRAGVG

SEQ ID NO: 24495 - protein, 1070 aa, Apolygus lucorum
MNQEDDEPHNPRLPIGTRGSRGGAQRRPRQGRRPSSPSSSSSSSLPSSSSTASLSHQCAHCERAFTSRSGLGLHVRRKHPVAANAAIDIERVQHRYASEELRRMAADEALAVRNGVRNINVYLNERFPSRTVIAIKNIRLKPHYKQLVQEAILANSSGASPASPVADVEQQPAIQYPSPGSSGLLADLKTEVLRLGGKVGRIEGYDSAYLQDLARRAVEGPDNLEDDVAAYLGRTFPRVGDATVMQHQGGRPPTVVLHGGRRAAKQARRRRYQRVQRLWRKHPARVATEVLEEPGEDQVEPPLQEFVDFWEPLLSAPSHNPGERVVPPVSTRDSLRSIMCAPVLLDEAHRCRVKNSTSAGPDGVSARRWNKAPNTIKLLILNLLLLAGRPPKALTRSRTVFIPKKGGSGPGGYRPISISSVVFRHFQKVLASRLQVAGVIGDVQRAFRPADGTAENLTVLQTVISLARMKRRQLHLAALDVAKAFDTVSHLALTDCLRGVGAPSRLIEYVACLYHEGVTVLEAGGEMSRDVLIGRGVRQGDPLSPLLFNLVVDTALGKLPTEVGFDLAPGVRVGALAFADDVILLAETREGLQIALNAFAKQLARCGLVVNPDKCGSVSLVPSGRQHKVKVVDGGFVVGQSPIPSRSVLEVWRYLGVDFMGVATITASGVDLGRALERVTKAPLKPQQKLRLLRTYLLPKLTYGLVFGRLTAGRLQELDRKVRSAVRSWLRFPPGVPSAYIHAPVKSGGLGIVSLSASIPSLRRQRLLALQGSSWEVARAAADLDFVRQQLAWCDRATPSAPKPSSSAEFAAALHESVDGKELRQCSESPISSQWVDWASEGIGARDYRHFHAVRVASLPTAVRCSRGSRGTTLPLCRACRSGNEHLYHVVQQCPRTHGGRILRHDAVAKQIAGALSSSGWDVERERLYHMPSDQGKKPDIVAVKPDQSCIILDVQVVNGSLDMEQTWRAKIRKYDRNDLQQAVSELKGVAPNNIRVMAATLSWRGVWCGKSATELRELGISVGVLRGITTRVLLGSYLNWWSFYRGTSLHPSLPPPPSSASLIPRAGVG

SEQ ID NO: 24496 - protein, 967 aa, Apolygus lucorum
MAADEVVAVRNGVRNINVYLSERFPTRTVIAIKNLRLKPHYKQLVQDAIRANSSGASPASPVAGVDQQSAIQYPSPGTSGLLADLKTEVLRLGGQVGRIEGYESTYLQDLARRAVEGLDNLEDKVAAYLGRIFPRVGDATVTQHQGGPPPRVVLRGGRRAAKQARRREYHRVQSLWRKHLARVAAEVLEEPGEVQVQPPLQEFVDFWEPLLSAPSHNPGERVVPPVSTRDSLRSILCSPVLLDEAHKCRVKNSTSAGPDGISARRWNKAPNTIKLLILNLLILAGRPPKALTRTRTVFIPKKGGSGPGGYRPISVSSVVFRHFQKVLASRLQVAGVIGDVQRAFRPADGTAENLTVLQTVISLARIKRRQLHLAALDVAKAFDTVSHLALTDCLRGVGAPSRLIEYVACLYHEGVTVLEAGGEVSGDIRIGRGVRQGDPLSPLLFNLVVDSALGKLPTEVGFDLAPGVRVGALAFADDVILLAETREGLQIALNAFAKQLSRCGLVVNPDKCGSVSLVPSGRQHKVKVVDGGFVIGQAPIPSRSVLEVWRYLGVDFMGVATITASRVDLGRALARITKAPLKPQQRLRLLRTYLLPKLTYGLVFGRLTAGRLQELDREVRSAVRSWLRFPPGVPSAYIHAPVKSGGLGIVSLSACIPSLRRQRLLALQGSSWEVARVAAGLDFVRQQLAWCDRATPSAPKPSSSAEFAAALHESVDGKELRQCSESLISSQWVDWASEGIGARDYRNFHAVRVATLPTAVRCSRGSRGMTDTLCRACRSGNEHLYHVVQQCPRTHGGRILRHDAVAKQIAGALSSSGWDVERERLYHMPSDQGKKPDIVAVKPDRSCIILDVQVVNGSMDMEQTWRAKIRKYDRDDLRQAVSELKGVAPNNIRVMAATLSWRGVWCGKSATELRELGISVGVLRGVTRRVLLGSYLNWWSFYRGTSLHPSLPPPPSSSSLIPRAGVG

SEQ ID NO: 24497 - protein, 1067 aa, Apolygus lucorum
MEDTTEMPHNPRQPIGSQGIRGGAQRRPRQGRRPSSPSSSSSSSLPSSSSTASLNHQCAHCERAFTTRSGLGLHIRRKHPVAANDAIDIERIQHRYASEELRRMAADEAVAVRNGVRNINVYLNERFPTRTVIAIKNIRLKPHYKQLVQEAILANSSGASPASPIADVEQQPAIQYPSPGTSGLLADLKTEVLRLGGQVGRIEGYESTYLQDLVRRAAEGLDNLEDEVAAYLGRIFPRVGDATVTQHQGGPPPRVVLRGGRRAAKQARRREYHRVQSLWRKHPARVAAEVLEEPGENQVQPPLQEFVDFWEPLLSAPSHDPGERVVPPVSTRDSLRSILCSPVLLDEAHKCRVKNSTSAGVSARRWNKAPKTIKLLILNLLLLAGRPPKALTRTRTVFIPKKGGSGPGGYRPISVSSVVFRHFQKVLASRLQVAGVIGDVQRAFRPADGTAENLTVLQTVISLARIKRRQLHLAALDVAKAFDTVSHLALTDCLRGVGAPSRLIEYVACLYQEGVTVLEAGGEVSGDIRIGRGVRQGDPLSPLLFNLVVDTALGKLPTEVGFDLAPGVRVRALAFADDVILLAETREGLQIALNAFAKQLARCGLVVNPDKCGSVSLVPSGRQHKVKVVDGGFVVGQSPIPSRSVLEVWRYLGVDFMGVATITTSRVDLGRALARVTKAPLKPQQKLRLLRTYLLPKLTYGLVFGRLTAGRLQQLDREVRSAVRSWLKFPPGVPSAYFHAPVKSGGLGIVSLSACIPSLRRRRLLALQGSSWEVARAAADLDFVRQQLAWCDRATPSAPKPSSSAEFAAALHESVDGKELRQCSESLVSSQWVDWASEGIGARDYRHFHAIRVASLPTAVRCSRGSRGTTLPLCRACRSGNEHLYHVVQQCPRTHGGRILRHDAVAKQIAGALSSSGWDVERERLYHMPSDQGKKPDIVAVKPDQSCIILDVQVVNGSLDMEQTWRAKIRKYDRNDLRQAVSELKGVAPNNIRVMAATLSWRGVWCGKSATELRELGISVGVLRGITTRVLLGSYLNWWSFYRGTSLHPSLPPPPSSSSLIPRAGVG

SEQ ID NO: 24498 - protein, 1070 aa, Apolygus lucorum
MDYNHQLPHNPRQPIGSRGIRGGAQRRPRQGRRPSLPSSSSSSSLPSSSSTASLDHQCAHCERAFTSRSGLGVHVRRKHPVAANAAIEIERVQPRYASEDLRRMAADEVVAVRNGVRNINVYLSERFPTRTVIAIKNLRLKPHYKQLVQEAILANSGGASPASPVAGMDQQSAIQYPSPGTSGLLADLKTEVLRFGRQVGRIEGYESTYLQDLARRAAEGLDNLEDEVAAYLGRIFPRVGDATVAQHQGGPPPRVVLRGGRRAAKQARRREYHRVQSLWRKHPARVAAEVLEEPGEDQVQPPLQEFVDFWEPLLSAPSHNPGERVVPPVSTRDSLRSILCLPVLLDEAHKCRVKNSTSAGPDGISARRWNKAPNTIKLLILNLLMLAGRPPKALTRTRTVFIPKKGGSGPGGYQPISVSSVVFRHFQKVLASRLQVAGVIGDVQRAFRPADGTAENLTVLQTVISLARIKRRQLHLAALDVAKAFDTVSHLALTDCLRGVGAPSRLIEYVACLYHEGVTVLEAGGEVSGDVRIGRGVRQGDPLSPLLFNLVVDTALGKLPTEVGFDLAPGVRVGALAFADDVILLAETREGLQIALNAFAKQLSRCGLVVNPDKCGLVSLVPSGRQHKVKVVDGGFVIGQAPIPSRSVLEVWRYLGVDFMGVATITASRVDLGRALARITKAPLKPQQRLRLLRTYLLPKLTYGLVFGRLTAGRLQELDREVRSAVRSWLRFPPGVPSAYIHAPVKSGGLGIVALSACIPSLRRQRLLALQGSSWEVARVAAGLDFVRQQLAWCDRATPSAPKPSSSAEFAAALHESVDGKELRQCSESLISSQWVDWASEGIGARDYRNFHAVRVATLPTAVRCSRGSRGMTDTLCRACQSGNEHLYHVVQQCPRTHGGRILRHDAVAKQIAGALSSSGWDVERERLYHMPSDQGKKPDIVAVKPDRSCIILDVQVVNGSMDMEQTWRAKIRKYDRDDLRQAVSELKGVAPNNIRVMAATLSWRGVWCGKSATELRELGISVGVLRGVTRRVLLGSYLNWWSFYRGTSLHPSLPPPPSSSSLIPRAGVG

SEQ ID NO: 24499 - protein, 1094 aa, Apolygus lucorum
MTLWRLGRGPLLTGPLTLYMRFPVMDENLTEPHNPRRPIGTRGSRGGAQRRPRQGRRPSSPSSSSSSSLPSSSSTASLDHQCAHCERAFTSRSGLGVHVRRKHPVAANEEIDIERVQPRYASEDLRRMAADEVVAVRNGVRNINVYLSERFPTRTVIAIKNLRLKPHYKQLVQEAILANSGGASPASPVAGMDQQSAIQYPSPGTSGLLADLKTEVLRLGGQVGRIEGYESTYLQDLARRAVEGLDNLEDKVAAYLGRIFPRVGDATVTQHQGGPPPRVVLRGGRRAAKQARRREYHRVQSLWRKHPARVAAEVLEEPGEDQVQPPLQEFVDFWEPLLSAPSHNPGERVVPPVSTRDSLRSILCSPVLLDEAHKCRVKNSTSAGPDGVSARRWNKAPNTIKLLILNLLMLAGRPPKALTRTRTVFIPKKGGSGPGGYRPISVSSVVFRHFQKVLASRLQVAGVIGDVQRAFRPADGTAENLTVLQTVISLARIKRRQLHLAALDVAKAFDTVSHLALTDCLRGVGAPSRLIEYVACLYHEGVTVLEAGGEVSGDVRIGRGVRQGDPLSPLLFNLVVDTALGKLPTEVGFDLAPGVRVGALAFADDVILLAETREGLQIALNAFAKQLSRCGLVVNPDKCGSVSLVPSGRQHKVKVVDGGFVIGQAPIPSRSVLEVWRYLGVDFMGVATITASRVDLGRALARITKAPLKPQQRLRLLRTYLLPKLTYGLVFGRLTAGRLQELDREVRSAVRSWLRFPPGVPSAYIHAPVKSGGLGIVALSACIPSLRRQRLLALQGSSWEVARVAAGLDFVRQQLAWCDRATPSAPKPSSSAEFAAALHESVDGKELRQCSESLISSQWVDWASEGIGARDYRNFHAVRVATLPTAVRCSRGSRGMTDTLCRACRSGNEHLYHVVQQCPRTHGGRILRHDAVAKQIAGALSSSGWDVERERLYHMPSDQGKKPDIVAVKPDRSCIILDVQVVNGSTDMEQTWRAKIRKYDRDDLRQAVSELKGVEPNNIRVMAATLSWRGVWCGKSATELRELGISVGVLRGVTRRVLLGSYLNWWSFYRGTSLHPSLPPPPSSSSLIPRAGVG

SEQ ID NO: 24500 - protein, 1095 aa, Apolygus lucorum
MTLWRLGRGPLLTGSLTLHYKRPPVMENEQDQPHNPRQPIGSRGIRGGAQRRPRQGRRPSSPSSSSSSSLPSSSSTASLNHQCAHCERAFTTRSGLGLHIRRKHPVAANAAIDIERIQPRYASEELRRMAADEAVAVRNGVRNINVYLNERFPTRTVIAIKNIRLKPHYKQLVQEAILANSSGASPASPVADVEQQPAIQYPSPGTSGLLADLKTEVLRLGGQVGRIEGYESTYLQDLVRRAVEGLDNLEDEVAAYLGRIFPRVGDATVTRHQGGPPPRMVLRGGRRAAKQARRREYHRVQSLWRKHPARVAAEVLEEPGENQVQPPLQEFVDFWEPLLSAPSHDPGECVVPPVSTRESLRSIMCSPVLSDEAHKCRVRNSTSAGPDGVSARRWNKAPKTIKLLILNLLLLAGRPPKALTRTRTVFIPKKGGSGPGGYRPISVSSVVFRHFQKVLASRLQVAGVIGDVQRAFRPADGTAENLTVLQTVISLARIKRRQLHLAALDVAKAFDTVSHLALTDCLRGVGAPSRLIEYVACLYQEGVTVLEAGGEVSGDVRIGRGVRQGDPLSPLLFNLVVDTALGKLPTEVGFDLAPGVRVGALAFADDVILLAETREGLQIALNAFAKQLAGCGLVVNPDKCGSVSLVPSGRQHKVKVVDGGFVVGQSPIPSRSVLEVWRYLGVDFMGVATITASRVDLGRALARVTKAPLKPQQKLRLLRTYLLPKLTYGLVFGRLTAGRLQELDREVRSAVRSWLKFPPGVPSAYVHAPVKSGGLGIVSLSACIPSLRRRRLLALQGSSWEVARAAADLDFVRQQLAWCDRATPSAPKPSSSAEFAAALHESVDGKELRQCSESLVSSQWVDWASEGIGARDYRHFHAIRVASLPTAVRCSRGSRGTTLPLCRACRSGNEHLYHVVQQCPRTHGGRILRHDAVAKQIAVALSSSGWDVERERLYHMPSDQGKKPDIVAVKPDQSCIILDVQVVNGSLDMEQTWRAKIRKYDTNDLRQAVSELKGVAPNNIRVMAATLSWRGVWCGKSATELRELGISVGVLRGITTRVLLGSYLNWWSFYRGTSLHPSLPPPPSSSSLIPRAGVG

SEQ ID NO: 24501 - protein, 1070 aa, Apolygus lucorum
MDQNHQLPHNPRQPIGSRGIRGGAQRRPRQGRRPSSPSSSSSSSLPSSSSTASLDHQCAHCERAFTSRSGLGVHVRRKHPVAANAAIEIERVQPRYASEDLRRMAADEVVAVRNGVRNINVYLSERFPTRTVIAIKNLRLKPHYKQLVQEAILANSGGASPASPVAGMDQQSAIQYPSPGTSGLLADLKTEVLRLGGQVGRIEGYESTYLQDLARRAAEGLDNLEDEVAAYLGRIFPRVGDATVAQHQGGPPPRVVLRGGRRAAKQARRREYHRVQSLWRKHPARVAAEVLEEPGEDQVQPPLQEFVDFWEPLLSAPSHNSGERVVPPVSTRDSLRSILCSPVLLDEAHKCRVKNSTSAGPDGISARRWNKAPNTIKLLILNLLMLAGRPPKALTRTRTVFIPKKGGSGPGGYRPISVSSVVFRHFQKVLASRLQVAGVIGDVQRAFRPADGTAENLTVLQTVISLARIKRRQLHLAALDVAKAFDTVSHLALTDCLRGVGAPSRLIEYVACLYHEGVTVLEAGGEVSGDVRIGRGVRQGDPLSPLLFNLVVDTALGKLPTEVGFDLAPGVRVGALAFADDVILLAETREGLQIALNAFAKQLSRCGLVVNPDKCGSVSLVPSGRQHKVKVVDGGFVIGQAPIPSRSVLEVWRYLGVDFMGVATITASRVDLGRALARITKAPLKPQQRLRLLRTYLLPKLTYGLVFGRLTAGRLQELDREVRSAVRSWLRFPPGVPSAYIHAPVKSGGLGIVALSACIPSLRRQRLLALQGSSWEVARVAAGLDFVRQQLAWCDRATPSAPKPSSSAEFAAALHESVDGKELRQCSESLISSQWVDWASEGIGARDYRNFHAVRVATLPTAVRCSRGSRGMTDTLCRACRSGNEHLYHVVQQCPRTHGGRILRHDAVAKQIAGALSSSGWDVERERLYHMPSDQGKKPDIVAVKPDRSCIILDVQVVNGSMDMEQTWRAKIRKYDRDDLRQAVSELKGVAPNNIRVMAATLSWRGVWCGKSATELRELGISVGVLRGVTRRVLLGSYLNWWSFYRGTSLHPSLPPPPSSSSLIPRAGVG

SEQ ID NO: 24502 - protein, 1070 aa, Apolygus lucorum
MEDTTEMPHNPRQPIGSRGIRGDAQRRPRQGRRPSSPSSSSSSSLPSSSSTASLNHQCAHCERAFTTRSGLGLHIRRKHPVAANAAIDIERIQHRYASEELRRMAADEAVAVRNGVRNINVYLNERFPTRTVIAIKNIRLKPHYKQLVQEAILANSSGASPASPIADVEQQPAIQYPSPGTSGLLADLKTEVLRLGGQVGRIEGYESTYLQDLVRRAAEGLDNLEDEVAAYLGRIFPQVGDVTVARHQGGPPPRVVLHGGRRAAKQARRREYHRVQSLWRKHPARVAAEVLEEPGENQVQPPLQEFVDFWEPLLSAPSHDPGERVVPPVSTRDSLRSILCSPVLLDEAHKCRVKNSTSAGPDGVSARRWNKAPKTIKLLILNLLLLAGRPPKALTRTRTVFIPKKGGSGPGGYRPISVSSVVFRHFQKVLASRLQVAGVIGDVQRAFRPADGTAENLTVLQSVISLARIKRRQLHLAALDVAKAFDTVSHLALTDCLRGVGAPSRLVEYVACLYQEGVTVLEAGGEVSGDIRIGRGVRQGDPLSPLLFNLVVDTALGKLPTEVGFDLAPGVRVGALAFADDVILLAETCEGLQIALNAFAKQLARCGLVVNPDKCGSVSLVPSGRQHKVKVVDGGFVIGQSPIPSRSVLEVWRYLGVDFMGVSTITASRVDLGRALARVTKAPLKPQQKLRLLRTYLLPKLTYGLVFGRLTAGRLQQLDREVHSAVRSWLRFPPGVPSAYIHAPVKSGGLGIVSLSACIPSLRRRRLLALQGSSWEVARAAADLDFVRQQLAWCDRATPSAPKPSSSAEFAAALHESVDGEELRQCSESLVSSQWVDWASEGIGARDYRHFHAIRVASLPTAVRCSRGSRGTTLPLCHACRSGNEHLYHVVQQCPRTHGGRILRHDAVAKQIAGALSSSGWDVERERLYHMPSDQGKKPDIVAVKPDQSCIILDVQVVNGSLDMEQTWRAKIRKYDTNDLRQAVSELKGVAPDNIRVMAATLSWRGVWCGKSATELRELGISVGVLRGITTRVLLGSYLNWWSFYRGTSLHPSLPPPLSSSSLIPRAGVG

SEQ ID NO: 24503 - protein, 1095 aa, Apolygus lucorum
MTLWRLGRGPLLTGSLTLHSKRPPVMNEENDEPHNPRLPIGTRGSRGGAQRRPRQGRRPSSPSSSSSSSLPSSSSTASLNHQCAHCERAFTTRSGLGLHVRRKHPVAANAAIDIERVQHRYASEELRRMAADEVVAVRDGVRNINVYLSERFPMRTVIAIKNIRLKPHYKQLVQEAILANSSGASPASPIADVEQQPAIQYPSPGTSGLLADLKTEVLRLGGQVGRIEGYESTYLQDLAWRAAEGLDNLENEVAAYLGRIFPRVGDATVTQHRGGPPPGVVLRGGRRAAKQARPREYHRVQSLWRKHPARVAAEVLEEPGENQVQPPLQEFVDFWEPLLSAPSHDPGERVVPPVSTRDSLRSIMCAPVLSDEAHKCRVRNSTSAGPDGISARRWNKAPKTIKLLVLNLLLLAGRPPKALTRARTVFIPKKGGSGPGGYRPISVSSVVFRHFQKVLASRLQVAGIIGDVQRAFRPADGTAENLTVLQTVISLARMKRRQLHLAALDVAKAFDTVSHLALTDCLRGVGAPSRLIEYVACLYQEGVTVLEAGGEVSGDVRIGRGVRQGDPLSPLLFNLVVDTALGKLPTEVGFDLAPGVRVGALAFADDVILLAETREGLQIALNAFARQLARCGLVVNPDKCGSVSLVPSGRQHKVKVVDGGFVIGQSPIPSRSVLEVWRYLGVDFMGVATISASRVDLGRALARITKAPLKPQQRLRLLRTYLLPKLTYGLVFGRLTAGRLQELDRQVRSAVRSWLRFPPGVPSAYVHAPVKSGGLGIVSLSAYIPSLRRQRLLALQGSSWEVARAAADLDFVRQQLAWCDRATPSAPKPSSSAEFAAALHESVDGKELRQCSESPVSSQWVDWASEGIGARDYRHFHAVRMATLPTAVRCSRGSRGTTLPLCRACRSGNEHLYHVVQQCPRTHGGRILRHDAVAKQISGALSSSGWDVERERLYHMPSDQGKKPDIVAVKPDQSCIILDVQVVNGSLDMEQTWRAKIRKYDRNDLRQAVSELKGMAPNNIRVMAATLSWRGVWCGKSATELRELGISVGVLRGITTRVLLGSYLNWWSFYRGTSLHPSLPPPPSSSSLIPRAGVG

SEQ ID NO: 24504 - protein, 942 aa, Apolygus lucorum
MRTVIAIKNIRLKPHYKQLVQEAILANSSGASPASPIADVEQQPAIQYPSPGTSGLLADLKTEVLRLGGQVGRIEGYESTYLQDLVRRAAEGLDNLEDEVAAYLGRIFPRVGDATVTQHQGGPPPRVVLRGGRRAAKQARRREYHRVQSLWRKHPARVAAEVLEEPGENQVQPPLQEFVDFWEPLLSAPSHDPGERVVPPVSTRDSLRSIMCSPVLSDEAHKCRVKNSTSAGPDGVSTRRWNKAPKTIKLLILNLLLLAGRPPKALTRTRTVFIPKKGGSGPGGYRPISVSSVVFRHFQKVLASRLQVAGVIGDVQRAFRSADGTAENLTVLQTVISLARIKRRQLHLAALDVAKAFDTVSHLALTDCLRGVGAPSRLIEYVACLYQEGVTVLEAGGEVSGDIRIGRGVRQGDPLSPLLFNLVVDTALGKLPTEVGFDLAPGVRVGALAFADDVILLAETREGLQIALNAFAKQLARCGLVVNPDKCGSVSLVPSGRQHKVKVVDGGFVVGQSPIPSRSVLEVWRYLGVDFMGVATITTSRVDLGRALARVTKAPLKPQQKLRLLRTYLLPKLTYGLVFGRLTAGRLQQLDREVRSAVRSWLKFPPGVPSAYFHAPVKSGGLGIVSLSACIPSLRRRRLLALQGSSWEVARAAADLDFVRQQLAWCDRATPSAPKPSSSAEFAAALHESVDGKELRQCSESLVSSQWVDWASEGIGARDYRHFHAIRVASLPTAVRCSRGSRGTTLPLCRACRSGNEHLYHVVQQCPRTHGGRILRHDAVAKQIAGALSSSGWDVERGRLYHMPSDQGKKPDIVAVKPDQSCIILDVQVVNGSLDMEQTWRAKIRKYGTNDLRQAVSELKGVAPNNIRVMAATLSWRGVWCGKSATELRELGISVGVLHGITTRVLLGSYLNWWSFYRGTSLHPSLPPPPSSSSLIPRAGVG

SEQ ID NO: 24505 - protein, 1070 aa, Apolygus lucorum
MEDTTEMPHNPRQPIGSRGIRGGAQRRPRQGRRPSSPSSSSSSSLPSSSSTASLNHQCAHCERAFTTRSGLGLHIRRKHPVAANAAIDIERIQHRYASEELRRMAADEAVAVRNGVSNINVYLNERFPTRTVIAIKNIRLKPHYKQLVQEAILANSSGASPASPTADVEQQPAIQYPSPGTSGLLADLKTEVLRLGGQVGRVEGYESTYLQDLVRRAAEGLDNLEDEVAAYLGRIFPQVGDATVTRHQGGPPPRVVLRGGRRAAKQARRREYHRVQSLWRKHPARVAAEVLEEPGENQVQPPLQEFVDFWEPLLSAPSHDPGERVVPPVSTRDSLRSILCSPVLLDEAHKCRVKNSTSAGPDGVSARRWNKAPKTIKLLILNLLLLAGRPPKALTRTRTVFIPKKGGSGPGGYRPISVSSVVFRHFQKVLASRLQVAGVIGDVQRAFRPADGTAENLTVLQSVISLARIKRRQLHLAALDVAKAFDTVSHLALTDCLRGVGAPSRLIEYVACLYQEGVTVLEAGGEVSGDIRIGRGVRQGDPLSPLLFNLVVDTALGKLPTEVGFDLAPGVRVGALAFADDVVLLAETREGLQIALNAFAKQLARCGLVVNPDKCGSVSLVPSGRQHKVKVVDGGFVVGQSPIPSRSVLEVWRYLGVDFMGVATITASRVDLGRALARVTKAPLKPQQKLRLLRTYLLPKLTYGLVFGRLTAGRLQQLDREVRSAVRSWLKFPPGVPSAYIHAPVKSGGLGIVSLSACIPSLRRRRLLALQGSSWEVARAAADLDFVRQQLAWCDRATPSAPKPSSSAEFTAALHESVDGKELRQCSESLVSSQWVDWASEGIGARDYRHFHAIRVASLPTAVRCSRGSRGTTLPLCRACRSGNEHLYHVVQQCPRTHGGRILHHDAVAKQIAGALSSSGWDVERERLYHMPSDRGKKPDIVAVKPDQSCIILDVQVVNGSLDMEQTWRAKIRKYDTNDLRQAVSELKGVAPNNIRVMAATLSWRGVWCGKSATELRELGISVGVLRGITTRVLLGSYLNWWSFYRGTSLHPSLPPPPSSSSLIPRAGVG

SEQ ID NO: 24506 - protein, 1070 aa, Apolygus lucorum
MENNIRQPHNPRQPIGSRGIRGGAQRRPRQGRRPSSPSSSSSSSLPSSSSTASLDHQCAHCERAFTSRSGLGVHVRRKHPVAANDEINIERVQPRYASEDLRRMAADEVVAVRNGVRNINVYLSERFPTRTVIAIKNLRLKPHYKQLVQEAILANSGGASPASPIAGVDQQSAIQYPSPGTSGLLADLKTEVLRLGGQVGRIEGYESTYLQDLARRAAEGLDNLEDEVAAYLRRIFPRVGDATVTRHQGRPPPRVVLRGGRRAAKQARRREYHRVQSLWRKHPARVAAEVLEEPGEDQVQPPLQEFVDFWEPLLSAPSHNPGERVVPPVSTRDSLRSILSLPVLLDEAHKCRVKNSTSAGPDGVSARRWNKAPNTIKLLILNLLMLAGRPPKALTCTRTVFIPKKGGSGPGGYRPISVSSVVFRHFQKVLASRLQVAGVIGDIQRAFRPADGTAENLTVLQTVISLARIKRRQLHLAALDVAKAFDTVSHLALTDCLRGVGAPSRLIEYVACLYHEGVTVLEAGGEVSRDIRIGRGVRQGDPLSPLLFNLVVDTALGKLPTEVGFDLAPGVRVGALAFADDVILLAETREGLQIALNAFAKQLARCGLVVNPDKCGSVSLVSSGRQHKVKVVDGGFVIGQSPIPSRSVLEVWRYLGVDFMGVATITTSRVDLGRALARVTKAPLKPQQKLRLLRTYLLPKLTYGLVFGRLTAGRLQELDREIRSAVRSWLRFPPGVPSACFHAPVKSGGLGIVSLSACIPSLRRQRLLALQGSSWEVARAAADLDFVRQQLAWCDRATPSAPKPSSSAEFAAALHESVDGKELRQCSESLVSSQWVDWASEGIGARDYRHYHAVRMATLPTAVRCSRGSRGTTLPLCRACRSGNEHLYHVVQQCPRTHGGRILRHDAVAKQIAGALSSSGWDVERERLYHMPSDQGKKPDIVAVKPDQSCIILDVQVVNGSLDMEQTWRAKIGKYDRDDLRQAVSELKGVAPNNIRVMAATLSWRGVWCGKSATELRELGISVGVLRGITTRVLLGSYLNWWSFYRGTSLHPSLPPPPSSSSLIPRAGVG

SEQ ID NO: 24507 - protein, 1070 aa, Apolygus lucorum
MNQEDDEPHNPRLPIGTRGSRGGAQRRPRQGRRPSSPSPSSSSSLPSSSSTASLSHQCAHCERAFTSRSGLGLHVRRKHPVAANAAIDIERVQHRYASEELRRMAADEALAVRNGVRNINVYLNERFPSRTVIAIKNIRLKPHYKQLVQEAILANSSGASPASPVADVEQQPAIQYPSPGSSGLLADLKTEVLRLGGQVGRIEGYDSAYLQDLARRAVEGPDNLEDDVAAYLGRTFPRVVDATVMQHQGGRPPTVVLHGGRRAAKQARRRRYQRVQRLWRKHPARVATEVLEEPGEDQVEPPLQEFVDFWEPLLSAPSHNPGERVVPPVSTRDSLRSIMCAPVLLDEAQRCRVKNSTSAGPDGVSARRWNKAPNTIKLLILNLLLLAGRPPKALTRSRTVFIPKKGGSGPGGYRPISISSVVFRHFQKVLASRLQVAGVIGDVQRAFRPADGTAENLTVLQTVISLARMKRRQLHLAALDVAKAFDTVSHLALTDCLRGVGAPSRLIEYVACLYHEGVTVLEAGGEMSRDVLIGCGVRQGDPLSPLLFNLVVDTALGKLPTEVGFDLAPGVRVGALAFADDVILLAETREGLQIALNAFAKQLAGCGLVVNPDKCGSVSLVPSGRQHKVKVVDGGFVVGQSPIPSRSVLEVWRYLGVDFMGVATITASRVDLGRALERVTKAPLKPQQKLRLLRTYLLPKLTYGLVFGRLTAGRLQELDCKVRSAVRSWLRFPPGVPSAYIHAPVKSGGLGIVSLSASIPSLRRQRLLALQGSSWEVARAAADLDFVRQQLAWCDRATPSAPKPSSSAEFAAALHESVDGKELRQCSESPISSQWVDWASEGIGARDYRHFHAVRVASLPTAVRCSRGSRGTTLPLCRACRSGNEHLYHVVQQCPRTHDGRILRHDAVTKQIAGALSSSGWDVERERLYHMPSDQGKKPDIVAVKPDQSCIILDVQVVNGSLDMEQTWRAKIRKYDRNDLRQAVSELKGVAPNNIRVMAATLSWRGVWCGKSATELRELGISVGVLRGITTRVLLGSYLNWWSFYRGTSLHPSLPPPPSSASLIRRAGVG

SEQ ID NO: 24508 - protein, 844 aa, Apolygus lucorum
MVAAYLGRIFPRVGDATVTQHQGGHPPRVVLRGGRRAAKQARRREYHRVQSLWRKHPARAAAEVLEEPGEDQVQPPLQEFVDFWEPLLSAPSHNPGERVVPPVSTRDSLCSILCSPVLLDEAHKCRVKNSTSAGPDGVSARRWNKAPNTIKLLILNLLMLAGRPPKALTRTRTVFIPKKGGSGPGGYRPISVSSVVFRHFQKVLASRLQVAGVIGDVQRAFWPADGTAENLTVLQTVISLARIKRRQLHLAALDVAKAFDTVSHLALTDCLRGVGAPSRLIEYVACLYHEGVTVLEAGGEVSGDVRIGRGVRQGDPLSPLLFNLVVDTALGKLPTEVGFDLAPGVRVGALAFADDVILLAETREGLQIALNAFAKQLSRCGLVVNPDKCGSVSLVPSGRQHKVKVVDGGFVIGQAPIPSRSVLEVWRYLGVDFMGVATITASRVDLGRALARITKAPLKPQQRLRLLRTYLLPKLTYGLVFGRLTAGRLQELDREVRSAVRSWLRFPPGVPSAYIHALVKSGGLGIVSLSASIPSLRRQRLLALQGSSWEVARVAAGLDFVRQQLAWCDRATPSAPKPSSSAEFAAALHESVDGKELRQCSESLISSQWVDWASEGIGARDYRNFHAVCVATLPTAVRCSRGSRGVTDTLCRACRSGNEHLYHVVQQCPRTHGGRILRHDAVAKQIAGALSSSGWDVERERLYHMPSDQGKKPDIVAVKPDRSCIILDVQVVNGSMDMEQTWRAKIRKYDRDDLRQAVSELKGVAPNNIRVMAATLSWRGVWCGKSATELRELGISVGVLRGVTRRVLLGSYLNWWSFYRGTSLHPSLPPPPSSSSLIPRAGVG

SEQ ID NO: 24509 - protein, 967 aa, Apolygus lucorum
MAADEVVAVRNGVRNINVYLSERFPTRTVIAIKNLRLRPHYKQLVQEAILANSGGASPASPVAGVDQQSAIQYPSPGTSGLLADLKTEVLRLGGQVGRIEGYESTYLRDLARRAAEGLDNLEDEVAAYLGRIFPRVGDATVTQHQGGPPPRMVLRGGRRAAKQARRQEYHRVQSLWRKHPARVAAEVLEEPGEDQVQPPLQEFVDFWEPLLSAPSHNPGERVVPPVPTRDSLRSILCLPVLLDEAHKCRVKNSTSAGPDGVSARRWNKAPNTIKLLILNLLMLAGRPPKALTRTRTVFIPKKGGSGPGGYRPISVSSVVFRHFQKVLASRLQVAGVIGDVQRAFRPADGTAENLTVLQTVISLARIKRRQLHLAALDVAKAFDTVSHLALTDCLRGVGAPSRLIEYVACLYHEGVTVLEAGGEVSGDVRIGRGVRQGDPLSPLLFNLVVDTALGKLPTEVGFDLAPGVRVGALAFADDVILLAETREGLQIALNAFAKQLSRCGLVVNPDKCGSVSLVPSGRQHKVKVVDGGFVIGQAPIPSRSVLEVWRYLGVDFMGVATITASRVDLGRALARITKAPLKPQQRLRLLRTYLLPKLTYGLVFGRLTAGRLQELDREVRSAVRSWLRFPPGVPSAYIHALVKSGGLGIVSLSACIPSLRRQRLLALQGSSWEVARVAAGLDFVRQQLAWCDRATPSAPKPSSSAEFAAALHESVDGKELRQCSESLISSQWVDWASEGIGARDYRNFHAVRVATLPTAVRCSRGSRGMTDTLCRACRSGNEHLYRVVQQCPRTHGGRILRHDAVAKQIAGALSSSGWDVERERLYHMPSDQGKKPDIVAVKPDRSCIILDVQVVNGSMDMEQTWRAKIRKYDRDDLRQAVSELKGVEPNNIRVMAATLSWRGVWCGKSATELRELGISVGVLRGVTRRVLLGSYLNWWSFYRGTSLHPSLPPPPSSSSLIPRAGVG

SEQ ID NO: 24510 - protein, 1070 aa, Apolygus lucorum
MDEHLTEPHNPRRPIGTRGSRGGAQRRPRQGRRPSSPSSSSSSSLPSSSSTASLDHQCAHCERAFTSRSGLGVHVRRKHPVAANEEINVERVQPRYASEDLRRMAADEVVAVRNGVRNINVYLSERFPTRTVIAIKNLRLKPHYKQLVQDAILANSSGASPASPVAGVDQQSAIQYPSPGTSGLLADLKTEVLRLGGQVGRIEGYESTYLQDLARRAVEGLDNLEDKVAAYLGRIFPRVGDATVTQHQGGPPPRVVLRGGRRAAKQARRREYHRVQSLWRKHPARVAAEVLEEPGEVQVQPPLQEFVDFWEPLLSAPSHNPGERVVPPVSTRDSLRSILCSPVLLDEAHKCRVKNSTSAGPDGISARRWNKAPNTIKLLILNLLILAGRPPKALTRTRTVFIPKKGGSGPGGYRPISVSSVVFRHFQKVLASRLQVAGVIGDVQRAFRPADGTAENLTVLQTVISLARIKRRQLHLAALDVAKAFDTVSHLALTDCLRGVGAPSRLIEYVACLYHEGVTVLEAGGEVSGDIRIERGVRQGDPLSPLLFNLVVDTALGKLPTEVGFDLAPGVRVGALAFADDVILLAETREGLQIALNAFAKQLSRCGLVVNPDKCGSVSLVPSGRQHKVKVVDGGFVIGQAPIPSRSVLEVWRYLGVDFMGVATITASRVDLGRALARITKAPLKPQQRLRLLRTYLLPKLTYGLVFGRLTAGRLQELDREVHSAVRSWLRFPPGVPSAYIHAPVKSGGLGIVSLSACIPSLRRQRLLALQGSSWEVARVAAGLDFVRQQLAWCDRATPSAPKPSSSAEFAAALHESVDGKELRQCSESLISSQWVDWASEGIGARDYRNFHAVRVATLPTAVRCSRGSRGMTDTLCRACRSGNEHLYHVVQQCPRTHGGRILRHDAVAKQIAGALSSSGWDVERERLYHMPSDQGKKPDIVAVKPDRSCIILDVQVVNGSMDMEQTWRAKIRKYDRDDLRQAVSELKGVAPNNIRVMAATLSWRGVWCGKSATELRELGISVGVLRGVTRRVLLGSYLNWWSFYRGTSLHPSLPPPPSSSSLIPRAGVG

SEQ ID NO: 24511 - protein, 1070 aa, Apolygus lucorum
MDQTPEMPHNPRQPIGSRGIRGGAQRRPRQGRRPSSPSSSSSSSQPSSSSTASLNHQCAHCERAFTTRSGLGLHISRKHPVAANAAIDIERIQHRYASEELRRMAADEAVAVRNGVRNINVYLNERFPTRTVIAIKNIRLKPHYKQLVQEAILANSSGASPASPIADVEQQPAIQYPSPGTSGLLADLKTEVLRLGGQVGRIEGYESTYLQDLVRRAAEGLDNVEDEVAAYLGRIFPRVGDATVTQHQGGPPPRVVLRGGRRAAKQARRREYHRVQSLWRKHPARVAAEVLEEPGEKQVQPPLQEFVDFWEPLLSAPSHDPGERVVPPVSTRDSLRSIMCSPVLSDEAHKCRVKNSTSAGPDGVSARRWNKAPKTIKLLILNLLLLAGRPPKALTRTRTVFIPKKGGSGPGGYRPISVSSVVFRHFQKVLASRLQVAGVIGDVQRAFRSADGTAENLTVLQTVISLARIKRRQLHLAALDVAKAFDTVSHLALTDCLRGVGAPSRLIEYVACLYQEGVTVLEAGGEVSGDIRIGRGVRQGDPLSPLLFNLVVDTALGKLPTEVGFDLAPGVRVGALAFADDVILLAETREGLQIALNAFAKQLARCGLVVNPDKCGTVSLVPSGRQHKVKVVDGGFVVGQSPIPSRSVLEVWRYLGVDFMGVATITTSRVDLGRALARVTKAPLKPQQKLRLLRTYLLPKLTYGLVFGRLTAGRLQQLDREVRSAVRSWLKFPPGVPSAYFHAPVKSGGLGIVSLSACIPSLRRRRLLALQGSSWEVARAAADLDFVRQQLAWCDRATPSAPKPSSSAEFAAALHESVDGKELRQCSESLVSSQWVDWASEGIGARDYRHFHAIRVASLPTAVRCSRGSRGTTLPLCRACRSGNEHLYHVVQQCPRTHGGRILRHDAVAKQIAGALSSSGWDVERERLYHMPSDQGKKPDIVAVKPDQSCIILDVQVVNGSLDMEQTWRAKIRKYDTNDLRQAVSELKGVAPNNIRVMAATLSWRGVWCGKSATELRELGISVGVLRGITTRVLLGSYLNWWSFYRGTSLHPSLPPPPSSSSLIPRAGVG

SEQ ID NO: 24512 - protein, 816 aa, Apolygus lucorum
MVLRGGRRAAKQARRREYHRVQSLWRKHPARVAAEVLEEPGDDQVQPPLQEFVNFWEPLLSAPSHDPGERVVPPVSTRDSLRSIMCSPVLLDEAHKCRVKNSTSAGPDGVSARRWNKAPKTIKLLILNLLLLAGRPPKALTRARTVFIPKKGGSGPGGYRPISVSSVVFRHFQKVLASRLQVAGVIGDVQRAFRPADGTAENLTVLQTVISLARIKRRQLHLAALDVAKAFDTVSHLALTDCLRGVGAPSRLIEYVACLYHEGVTVLEAGGEVSRDIVIGRGVRQGDPLSPLLFNLVVDTALGKLPTEVGFDLAPGVRVGALAFADDVILLAETREGLQIALNAFAKQLARCGLVVNPDKCGSVSLVPSGRQHKVKVVDGGFVIGQSPIPSRSVLEVWRYLGVDFMGVATITASRVDLGRALARVTKAPLKPQQRLRLLRTYLLPRLTYGLVFGRLTAGRLQELDREVRSAVRSWLKFPPGVPSSYIHAPVKSGGLGIVSLSASIPSLRRQRLLALWGSSWGVARAAADLDFVRQQLAWCDRATPSAPKPSSSAEFAAALHESVDGKELRQCSESLISSQWVDWASEGIGARDYRHFHAVRVASLPTAVRCSRGSRGTTLPLCRACRGGSEHLYHVVQQCPRTHGGRILRHDAVAKQIAGALSSSGWDVERERLYHMPSDQGKKPDIVAVKPDQSCIILDVQVVNGSLDMEQTWRAKIRKYDMNDLRQAVSELKGVAPNNIRVMAATLSWRGVWCGKSAMELRELGISVGVLRGITTRVLLGSYLNWWSFYRGTSLHPSLPPPPFSSSLIPRAGVG

SEQ ID NO: 24513 - protein, 1094 aa, Apolygus lucorum
MTLWRIGREPLSTGSLTLFIKRPPVMERTNEPHNPRLPIGTRGSRGGAQRRPRQGRRPSSPSSSSSSSLPSSSSTASLSHQCAHCERAFTSRSGLGLHVRRKHPVAANAAIDIERVQHRYASEELRRMAADEALAVRSGVRNINVYLNERFPSRTVIAIKNIRLKPHYKQLVQEAILANSSGASPASPVADVEQQPAIQYPSPGSSGLLANLKTEVLRLGGQVGRIEGYDSAYLQDLARRAVEGPDNLEDDVAAYLGRTFPRVGDATVMQHRGGRPPTVGLHGGRRAAKQARRRGYQRVQRLWRKHPARVATEVLEEPGEDQVEPPLQEFVDFWEPLLSAPSHNPGERVVPPVSTRDSLRSIMCAPVLLDEAHRCRVKNSTSAGPDGVSARRWNKAPNTIKLLILNLLLLAGRPPKALTRSRTVFIPKKGGSGPGGYRPISISSVVFRHFQKVLASRLQVAGVIGDVQRAFRPADGTAENLTVLQTVISLARMKRRQLHLAALDVAKAFDTVSHLALTDCLRGVGAPSRLIEYVACLYHEGVTVLEAGGEMSRDVLIGRGVRQGDPLSPLLFNLVVDTALGKLPTEVGFDLAPGVRVGALAFADDVILLAETREGLQIALNAFAKQLARCGLVVNPDKCGSVSLVPSGRQHKVKVVDGGFVVGQSPIPSRSVLEVWRYLGVDFMGVATITASRVDLGRALERVTKAPLKPQQKLRLLRTYLLPKLTYGLVFGRLTAGRLQELDRKVRSAVRSWLRFPPGVPSAYIHAPVKSGGLGIVSLSASIPSLRRQRLLALQGSSWEVARAAADLDFVRQQLAWCDRATPSAPKPSSSAEFAAALHESVDGKELRQCSESPISSQWVDWASEGIGARDYRHFHAIRVASLPTAVRCSRGSRGTTLPLCRACRSGNEHLYHVVQQCPRTHGGRILRHDAVAKQIAGALSSSGWDVERERLYHMPSDQGKKPDIVAVKPDQSCIILDVQVVNGSLDMEQTWRAKIRKYDRNDLRQAVSELKGVAPNNIRVMAATLSWRGVWCGKSATELRELGISVGVLRGITTRVLLGSYLNWWSFYRGTSLHPSLPPPPSSSSLIPRAGVG

SEQ ID NO: 24514 - protein, 1070 aa, Apolygus lucorum
MNQNVTEPHNPRRPIGTRGSGGGAQRRPRQGRRPSSPSSSSSSSLPSSSSTASLNHQCAHCERAFTTRSGLGLHVRRKHPVAANAAIEIERVQPRYASEDLRRMAADEAVAVRSGVRNINVYLNERFPARTVNAISKLRQRPHYKQLVQEAILANSSGASPASPIADVEQQPAIQNPSPGTSGLLADLKTEVLRLGGQVGRIEGYESTYLQDLARRAAEGSENLEDEVAAYLGRIFLRVGDATVTQHQRGPPLRMVLRGGRRAAKQARRREYHRVQSLWRKHPARVAAEVLEEPGDDQVQPPLQEFVNFWEPLLSAPSHDPGERVVPPVSTRDSLRSIMCSPVLLDEAHKCRVKNSTSAGPDGVSARRWNKAPKTIKLLILNLLLLAGRPPKALTRARTVFIPKKGGSGPGGYRPISVSLVVFRHFQKVLASRLQVAGVIGDVQRAFRPADGTAENLTVLQTVISLARIKRRQLHLAALDVAKAFDTVSHLALTDCLRGVGAPSRLIEYVACLYHEGVTVLEAGGEVSRDIVIGRGVRQGDPLSPLLFNLVVDTALGKLPTEVGFDLAPGVRVGALAFADDVILLAETREGLQIALNAFAKQLARCGLVVNPDKCGSVSLVPSGRQHKVKVVDGGFVIGQSPIPSRSVLEVWRYLGVDFMGVATITASRVDLGRALARVTKAPLKPQQRLRLLRTYLLPKLTYGLVFGRLTAGRLQELDREVRSAVRSWLKFPPGVPSSCIHAPVKSGGLGIVSLSASIPSLRRQRLLALRGSSWGVARAAADLDFVRQQLAWCDRATPSAPKPSSSAEFAAALHESVDGKELRQCSESLISSQWVDWASEGIGARDYRHFHAVRVASLPTAVRCSRGSRGTTLPLCRACRGGSEHLYHVVQQCPRTHGGRILRHDAVAKQIAGALSSSGWDVERERLYHMPSDQGKKPDIVAVKPDQSCIILDVQVVNGSLDMEQTWRAKIRKYDTNDLRQAVSELKGVAPNNIRVMAATLSWRGVWCGKSATELRELGISVGVLRGITTRVLLGSYLNWWSFYRGTSLHPSLPPPPSSSSLIPRAGVG

SEQ ID NO: 24515 - protein, 1055 aa, Apolygus lucorum
MEYQPDQPHNPRQPIGSRGIRGGAQRRPRQGRRPSSPSSSSSSSLPSSSSTASLDHQCAHCERAFTSRSGLGVHVRRKHPVAANDEINVERVQPRYASEDLRRMAADEVVAVRNGVRNINVYLSERFPTRTVIAIKNLRLKPHYKQLVQEAILANSGGASPPSPIADVDQQSAIQYPSPGTSGLLADLKTEVLRLGGQVGRIEGYESTYLQDLARRAAEGLDNLEDEVAAYLGRIFPRVGDATVTRHQGRPPPRVVLRGGRRAAKQARRREYHRVLEEPGEDQVQPPLQEFVDFWEPLLSAPSHNPGERVVPPVSTRDSLRSILCSPVLLDEAHKCRVKNSTSAGPDGVSARRWNKAPKTIKLLILNLLMLAGRPPKALTRTRTVFIPKKGGSGPGGYRPISVSSVVFRHFQKVLASRLQVAGVIGDVQRAFRPADGTAENLTVLQTVISLARIKRRQLHLAALDVAKAFDTVSHLALTDCLRGVGAPSRLIEYVACLYHEGVTVLEAGGEVSRDIRIGRGVRQGDPLSPLLFNLVVDTALGKLPTEVGFDLAPGVRVGALAFADDVILLAETREGLQIALNAFAKQLARCGLVVNPDKCGSVSLVPSGRQHKVKVVDGGFVVGQSPIPSRSVLEVWRYLGVDFMGVATITTSRVDLGRALARVTKAPLKPQQKLRLLRTYLLPKLTYGLVFGRLTAGRLQELDREIRSAVRSWLRFPPGVPSAYFHAPVKSGGLGIVSLSACIPSLRRQRLLALQGSSWEVARAAADLDFVRQQLAWCDRATPSAPKPSSSAEFAAALHESVDGKELRQCSESLVSSQWVDWASEGIGARDYRHFHAVRMATLPTAVRCSRGSRGTTLPLCRACRSGNEHLYHVVQQCPRTHGGRILRHDAVAKQIAGALSSSGWDVERERLYHMPSDQGKKPDIVAVKPDQSCIILDVQVVNGSLDMEQTWRAKIRKYDRDDLRQAVSELKGVAPNNIRVMAATLSWRGVWCGKSATELRELGISVGVLRGITTRVLLGSYLNWWSFYRGTSLHPSLPPPPSSSSLIPRAGVG

SEQ ID NO: 24516 - protein, 1075 aa, Apolygus lucorum
MCFPVMENIPNEPHNPRRPIGSRGIRGGAQRRPRQGRRPSSPSSSSSSSLPSSSSTASLDHQCAHCERAFTSRSGLGVHVRRKHPVAANEEIDVERVQPRYASEDLRRMAADEVVAVRNGVRNINVYLSERFPTRTVIAIKNLRLKPHYKQLVQEAILANSSGASPASPVAGVDQQSAIQYPSPGTSGLLADLKTEVLRLGGQVGRIEGYESTYLQDLARRAAEGLDNLEDMVAAYLGRIFPRVGDATVTRHQGGHPPRVVLRGGRRAAKQARRREYHRVQSLWRKHPARAAAEVLEEPGEDQVQPPLQEFVDFWEPLLSAPSHNPGEGVVPPVSTRDSLRSILCSPVLLDEAHKCRVKNSTSAGPDGVSARRWNKAPNTIKLLILNLLMLAGRPPKALTHTRTVFIPKKGGSGPGGYRPISVSSVVFRHFQKVLASRLQVAGVIGDVQRAFRPADGTAENLTVLQTVISLARIKRRQLHLAALDVAKAFDTVSHLALTDCLRGVGAPSRLIEYVACLYHEGVTVLEAGGEVSGDVRIGRGVHQGDPLSPLLFNLVVDTALGKLPTEVGFDLAPGVRVGALAFADDVILLAETREGLQIALNAFAKQLSRCGLVVNPDKCGSVSLVPSGRQHKVKVVDGGFVIGQAPIPSRSVLEVWRYLGVDFMGVATITASRVDLGRALARITKAPLKPQQRLRLLRTYLLPKLTYGLVFGRLTAGRLQELDREVRSAVRSWLRFPPGVPSAYIHAPVKSGGLGIVSLSASIPSLRRQRLLALQGSSWEVARVAAGLDFVRQQLAWCDRATPSAPKPSSSAEFAAALHESVDGKELRQCSESLISSQWVDWASEGIGARDYRNFHAVRVATLPTAVRCSRGSRGVTDTLCRACRSGNEHLYHVVQQCPRTHGGRILRHDAVAKQIAGALSSSGWDVERERLYHMPSDQGKKPDIVAVKPDRSCIILDVQVVNGSMDMEQTWRAKIRKYDRDDLRQAVSELKGVAPNNIRVMAATLSWRGVWCGKSATELRELGISVGVLRGVTRRVLLGSYLNWWSFYRGTSLHPSLPPPPSSSSLIPRAGVG

SEQ ID NO: 24517 - protein, 1070 aa, Apolygus lucorum
METNTDRPHNPRQPIGSRGIRGGAQRRPRQGRRPSSPSSSSSSSLPSSSSTASLDHQCAHCERAFTTRSGLGVHIRRKHPVAANDEIDVERVQPRYASEDLRRMAADEVVAVRNGVRNINVYLSERFPTRTVIAIKNLRLKPHYKQLVQEAILANSGGASPASPIAGVDQQSAIQYPSPGTSGLLADLKTEVLRLGGQVGRIEGYESTYLQDLARRAAEGLDNLEDQVAAYLGRIFPRVGDATVTQHQGGPPPRVVLRGGRRAAKQARRREYHRVQSLWRKHPARVAAEVLEEPGEDQVQPPLQEFVDFWEPLLSAPSHNPGERVVPPVSTRDSLRGILCSPVLLDEAHKCRVKNSTSAGPDGVSARRWNKVPNTIKLLILNLLILAGRPPKALTRTRTVFIPKKGGSGPGGYRPISVSSVVFRHFQKVLASRLQVAGVIGDVQRAFRPADGTAENLTVLQTVISLARIKRRQLHLAGLDVAKAFDTVSHLALTDCLRGVGAPSRLIEYVACLYREGVTVLEAGGEVSRDIVIGRGVRQGDPLSPLLFNLVVDTALGKLPTELGFDLAPGVRVGALAFADDVILLTETREGLQIALNAFAKQLSRCGLVVNPDKCGSVSLVPSGRQHKVKVVDGGFVIGQAPIPSRSVLEVWRYLGVDFMGVATITASRVDLGRALARVTKAPLKPQQRLRLLRAYLLPKLTYGLVFGRLTAGRLQELDREVRSAVRSWLRFPPGVPSAYIHAPVKSGGLGIVSLSACIPSLRRQRLLALQGSSWEVARVAAGLDFVRQQLAWCDRATPSAPKPSSSAEFAAALHESVDGKELRQCSESLISSQWVDWASEGIGARDYRNFHAVRVATLPTAVRCSRGSRGMTDTLCRACRSGNEHLYHVVQQCPRTHGGRILRHDAVAKQIAGALSSSGWDVERERLYHMPSDQGKKPDIVAVKPDRSCIILDVQVVNGSMDMEQTWRAKIRKYDRDDLRQAVSELKGVEPNNIRVMAATLSWRGVWCGKSATELRELGISVGVLRGVTRRVLLGSYLNWWSFYRGTSLHPSLPPPPSSSSLIPRAGIG

SEQ ID NO: 24518 - protein, 1070 aa, Apolygus lucorum
MDNHTTRPHNPRQPIGSRGIRGGAQRRPRQGRRPSSPSSSSSSSLPSSSSTASLDHQCAHCERAFTTRSGLGVHIRRKHPVAANDEIDVERVQRRYASEDLRRMAADEVVAVRNGVRNINVYLSERFPTRTVIAIKNLRLKPHYKQLVQEAILANSGGASPASPIAGVDQQSAIQYPSPGTSGLLADLKTEVLRLGGQVGRIEGYESTYLQDLARRAAEGLDNLEDKVAAYLGRIFPRVGDATVTQHQGGPPPRVVLRGGRRAAKQARRREYHRVQSLWRKHPARVAAEVLEEPGEDQVQPPLQEFVDFWEPLLSAPSHNPGERVVPPVSTRDSLRSILCSPVLLDEAHKCRVKNSTSAGPDGVSACRWNKVPNTIKLLILNLLILAGRPPKALTRTRTVFIPKKGGSGPGGYRPISVSSVVFRHFQKVLASRLQVAGVIGDVQRAFRPADGTAENLTVLQTVISLARIKRRQLHLAALDVAKAFDTVSHLALTDCLRGVGAPSRLIEYVACLYREGVTVLEAGGEVSRDIVIGRGVRQGDPLSPLLFNLVVDTALGKLPTEVGFDLAPGVRVGALAFADDVILLAETREGLQIALNAFAKQLSRCGLVVNPDKCGSVSLVPSGRQHKVKVVDGGFVIGQAPIPSRSVLEVWRYLGVDFMGVATITASRVDLGRALARVTKAPLKPQQRLRLLRTYLLPKLTYGLVFGRLTAGRLQELDREVRSAVRSWLRFPPGVPSAYIHAPVKSGGLGIVSLSACIPSLRRQRLLALQGSSWEVARVAAGLDFVRQQLAWCDRATPSAPKPSSSAEFAAALHESVDGKELRQCSESLISSQWVDWASEGIGARDYRNFHAVRVATLPTAVRCSRGSRGMTDTLCRACRGGNEHLYHVVQQCPRTHGGRILRHDAVAKQIAGALSSSGWDVERERLYHMPSDQGKKPDIVAVKPDRSCIILDVQVVNGSMDMEQTWRAKIRKYDRDDLRQAVSELKGVEPNNIRVMAATLSWRGVWCGKSATELRELGISVGVLRGVTRRVLLGSYLNWWSFYRGTSLHPSLPPPPSSSSLIPRAGVG

SEQ ID NO: 24519 - protein, 411 aa, Apolygus lucorum
MGVATITTSRVDLGRALARVTKAPLKPQQKLRLLRTYLLPKLTYGLVFGRLTAGRLQQLDREVRSAVRSWLKFPPGVPSAYFHAPVKSGGLGIVSLSACIPSLRRRRLLALQGSSWEVARAAADLDFVRQQLAWCDRATPSAPKPSSSAEFAAALHESVDGKELRQCSESLVSSQWVDWASEGIGARDYRHFHAIRVASLPTAVRCSRGSRGTTLPLCRACRSGNEHLYHVVQQCPRTHGGRILRHDAVAKQIAGALSSSGWDVERERLYHMPSDQGKKPDIVAVKPDQSCIILDVQVVNGSLDMEQTWRAKIRKYDRNDLRQAVSELKGVAPNNIRVMAATLSWRGVWCGKSATELRELGISVGVLRGITTRVLLGSYLNWWSFYRGTSLHPSLPPPPSSSSLIPRAGVG

SEQ ID NO: 24520 - protein, 1070 aa, Apolygus lucorum
MEQTVREPHNPRQPIGSRGTRGGAQRRPRQGRRPSSPSSSSSSSQPSSSSTASLNHQCAHCERAFTTRSGLGLHVSRKHPVAANAAIDIERIQHRYASEELRRMAADEAVAVRNGVRNINVYLNERFPTRTVIAIKNIRLKPHYKQLVQEAILANSSGASPASPIADVEQQPAIQYLSPGTSGLLADLKTEVLRLGGQVGRIEGYESTYLQDLVRRAAEGLDNLEDEVAAYLGRIFPRVGDVTVTQHQGRPPPRVVLRGGRRAAKQARRREYHRVQSLWRKHPARVAAEVLEEPGENQVQPPLQEFVDFWEPLLSAPSHDPGECVVPPVSTRDSLRSIMCSPVLSDEAHKCRVKNSTSAGPDGVSARRWNKAPKTIKLLILNLLLLAGRPPKALTRTRTVFIPKKGGSGPGGYRPISVSSVVFRHFQKVLASRLQVAGVIGDVQRAFQSADGTAENLTVLQTVISLARIKRRQLHLAALDVAKAFDTVSHLALTDCLRGVGAPSRLIEYVACLYQEGVTVLEAGGEVSGDIRIGRGVRQGDPLSPLLFNLVVDTALGKLPTEVGFDLAPGVRVGALAFADDVILLAETREGLQIALNAFAKQLARCGLVVNPDKCGSVSLVPSGRQHKVKVVDGGFVVGQSPIPSRSVLEVWRYLGVDFMGVATITTSRVDLGRALARVTKAPLKPQQKLRLLRTYLLPKLTYGLVFGRLTAGRLQQLDREVRSAVRSWLKFPPGVPSAYFHAPVKSGGLGIVSLSACIASLRRRRLLALQGSSWEVARAAADLDFVRQQLAWCDRATPSAPKPSSSAAFAAALHESVDGKELRQCSESLVSSQWVDWASEGIGARDYRHFHAIRVASLPTAVRCSRGSRGTTLPLCRACRSGNEHLYHVVQQCPRTHGGRILRHDAVAKQIAGALSSSGWDVERERLYRMPSDQGKKPDIVAVKPDQSCIILDVQVVNGSLDMEQTWRAKIRKYDTNDLRQAVSELKGVAPNNIRVMAATLSWRGVWCGKSATELRELGISVGVLRGINTRVLLGSYLNWWSFYRGTSLHPSLPPPPSSSSLIPRAGVG

SEQ ID NO: 24521 - protein, 903 aa, Apolygus lucorum
MDQQSAIQYPSPGTSGLLADLKTEVLRLGGQVGRIEGYESTYLQDLARRAAEGLDNLEDEVAAYLGRIFPRVGDATVTQHQGGPPPRVVLRGGRRAAKQARRREYHRVQGLWRKHPARVAAEVLEEPGEVQVQPPLQEFVDFWEPLLSAPSHNPGERVVPPVSTRDSLRGILCSPVLLDEAHKCRVKNSTSAGPDGVSARRWNKAPNTIKLLILNLLMLAGRPPKALTRTRTVFIPKKGGSGPGGYRPISVSSVVFRHFQKVLASRLQVAGVIGDVQRAFRPADGTAENLTVLQTVISLARIKRRQLHLAALDVAKAFDTVSHLALTDCLRGVGAPSRLIEYVACLYHEGVTVLEAGGEVSGDVRIGRGVRQGDPLSPLLFNLVVDTALGKLPTEVGFDLAPGVRVGALAFADDVILLAETREGLQIALNAFAKQLSRCGLVVNPDKCGSVSLVPSGRQHKVKVVDGGFVIGQAPIPSRSVLEVWRYLGVDFMGVATITASRVDLGRALARITKAPLKPQQRLRLLRTYLLPKLTYGLVFGRLTAGRLQELDREVRSAVRSWLRFPPGVPSAYIHAPVKSGGLGIVALSACIPSLRRQRLLALQGSSWEVARVAAGLDFVRQQLAWCDRATPSAPKPSSSAEFAAALHESVDGKELRQCSESLISSQWVDWASEGIGARDYRNFHAVRVATLPTAVRCSRGSRGMTDTLCRACRSGNEHLYHVVQQCPRTHGGRILRHDAVAKQIAGALSSSGWDVERERLYHMPSDQGKKPDIVAVKPDRSCIILDVQVVNGSMDMEQTWRAKIRKYDRDDLRQAVSELKGVAPNNIRVMAATLSWRGVWCGKSATELRELGISVGVLRGVTRRVLLGSYLNWWSFYRGTSLHPSLPPPPSSSSLIPRAGVG

SEQ ID NO: 24522 - protein, 1070 aa, Apolygus lucorum
MIDEADQPHNPRQPIGSRGIRGGAQRRPRQGRRPSSPSSSSSSSLPSSSSTASLDHQCAHCERAFTSRSGLGVHVRRKHPVAANAAIEIERVQPRYASEDLRRMAADEVVAVRNGVRNINVYLSERFPTRTVIAIKNLRLKPHYKQLVQEAILANSGGASPASPIAGVDQQSAIQYPSPGTSGLLADLKTEVLRLGGQVGRIEGYESTYLQDLARRAAEGLDNLEDMVAAYLGRIFPRVGDATVTRHQGRPPPRVVLRGGRRAAKQARRQEYHRVQSLWRKHPARVAAEVLEEPGEDQVQPPLQEFVDFWEPLLSAPSHNPGERVVPPVSTRDSLRSILCSPVLLDEAHKCRVKNSTSAGPDGVSARRWNKAPNTIKLLILNLLMLAGRPPKALTRTRTVFIPKKGGSGPGGYRPISVSSVVFRHFQKVLASRLQVAGVIGDVQRAFRPADGTAENLTVLQTVISLARIKRRQLHLAALDVAKAFDTVSHFALTDCLRGVGAPSRLIEYVTCLYHEGVTALEAGGEVSGDVRIGRGVRQGDPLSPLLFNLVVDTALGKLPTEVGFDLAPGVRVGALAFADDVILLAETREGLQIALNAFAKQLARCGLVVNPDKCGSVSLVPSGRQHKVKVVDGGFVVGQSPIPSRSVLEVWRYLGVDFMGVATISASRVDLGRALARVTKAPLKPQQKLRLLRTYLLPKLTYGLVFGRLTAGRLQELDRQVRSAVRSWLKFPPGVPSAYFHALVKSGGLGIVSLSACIPSLRRQRLLALQGSSWEVARAAADLDFVRQQLAWCDRATPSAPKPSSSAEFAAALHESVDGKELRQCSESLVSSQWVDWASEGIGARDYRHFHAVRMATLPTAVRCSRGSRGTTLPLCRACRSGNEHLYHVVQQCPRTHGGRILRHDAVAKQIAGALSSSGWDVERERLYHMPSDQGKKPDIVAVKPDQSCIILDVQVVNGSLDMEQTWRAKIRKYDRDDLRQAVSELKGVVPNNIRVMAATLSWRGVWCGKSATELRELGISVGVLRGITTRVLLGSYLNWWSFYRGTSLHPSLPPPPSSSSLIPRAGVG

SEQ ID NO: 24523 - protein, 411 aa, Apolygus lucorum
MGVATITASRVDLGRALARVTKAPLKPQQRLRLLRTYLLPKLTYGLVFGRLTAGRLQELDREVRSAVRSWLRFPPGVPSAYIHAPVKSGGLGIVSLSACIPSLRRQRLLALQGSSWEVARVAAGLDFVRQQLAWCDRATPSAPKPSSSAEFAAALHESVDGKELRQCSESLISSQWVDWASEGIGARDYRNFHAVRVATLPTAVRCSRGSRGMTDTLCRACRSGNEHLYHVVQQCPRTHGGRILRHDAVAKQIAGALSSSGWDVERERLYHMPSDQGKKPDIVAVKPDRSCIILDVQVVNGSMDMEQTWRAKIRKYDRNDLRQAVSELKGVEPNNIRVMAATLSWRGVWCGKSATELRELGISVGVLRGVTRRVLLGSYLNWWSFYRGTSLHPSLPPPPSSSSLIPRAGVG

SEQ ID NO: 24524 - protein, 967 aa, Apolygus lucorum
MAADEVVAVRDGVRNINVYLSERFPMRTVIAIKNIRLKPHYKQLVQEAILANSSGASPASPIADVEQQPAIQYPSPGTSGLLADLKTEVLRLGGQVGRIEGYESTYLQDLARRAAEGLDNLENEVAAYLGRIFPRVGDATVTQHRGGPPPGVVLRGGRRAAKQARRREYHRVQSLWRKHPARVAAEVLEEPGENQVQPPLQEFVDFWEPLLSAPSHDPGERVVPPVSTRDSLRSIMCAPVLSDEAHKCRVKNSTSAGPDGISARRWNKAPKTIKLLVLNLLLLAGRPLEALTRARTVFIPKKGGSGPGGYRPISVSSVVFRHFQKVLASRLQVAGIIGDVQRAFRPADGTAENLTVLQTVISLARMKRRQLHLAALDVAKAFDTVSHLALTDCLHGVGAPSRLIEYVACLYQEGVTVLEAGGEVSGDVWIGRGVRQGDPLSPLLFNLVVDTALGKLPTEVGFDLAPGVQVGALAFADDVILLAETREGLQIALNAFARQLARCGLVVNPDKCGSVSLVPSGRQHKVKVVDGGFVIGQSPIPSRSVLEVWRYLGVDFMGVATISASRVDLGRALARVTKAPLKPQQKLRLLRTYLLPKLTYGLVFGRLTAGRLQELDQQVRSAVRSWLRFPPGVPSAYVHAPVKSGGLGIVSLSACIPSLRRQRLLALQGSSWEVARAAADLDFVRQQLAWCDRATPSAPKPSSSAEFAAALHESVDGKELRQCSESPVSSQWVDWASEGIGARDYRHFHAVRMATLPTAVRCSRGSRGTTLPLCRACRSGNEHLYHVVQQCPRTHGGRILRHDAVAKQIAGALSSSGWDVERERLYHMPSDQGKKPDIVAVKPDQSCIILDVQVVNGSLDMEQTWRAKIRKYDRNDLRQAVSELKGVAPNNIRVMAATLSWRGVWCGKSATELRELGISVGVLRGITTRVLLGSYLNWWSFYRGTSLHPSLPPPPSSSSLIPRAGVG

SEQ ID NO: 24525 - protein, 1070 aa, Apolygus lucorum
MEQNINEPHNPRQPIGSRGIRGGAQRRPRQGRRPSSPSSSSSSSLPSSSSTASLNHQCAHCERAFTTRSGLGLHIRRKHPVAANAAIDIERIQPRYASEELRRMAADEAVAVRNGVRNINVYLNERFPTRTVIAIKNIRLKPHYKQLVQEAILANSGGASPASPIADVEQQPAIQYPSPGTSGLLADLKTEVLRLGGQVGRIEGYESTYLQDLVRRAVEGLDNLEDEVAAYLGRIFPQVGDATVTRHQGGPPSRMVLRGGRRAAKQARRREYHRVQSLWRKHPARVAAEVLEEPGENQVQPPLQEFVDFWEPLLSAPSHDPGECVVPPVSTRDSLRSIMCLPVLSDEAHKCRVRNSTSAGPDGVSARRWNKAPKTIKLLILNLLLLAGRPPKALTRTRTVFIPKKGGSGPGGYRPISVSSVVFRHFQKVLASRLQVAGVIGDVQRAFRPADGTAENLTVLQTVISLARIKRRQLHLAALDVAKAFDTVSHLALTDCLRGVGAPSRLIEYVVCLYQEGVTVLEAGGEVSGDIRIGRGVRQGDPLSPLLFNLVVDTALGKLPTEVGFDLAPGVRVGALAFADDVILLAETREGLQIALNAFAKQLAGCGLVVNPDKCGSVSLVPSGRQHKVKVVDGGFVVGQSPIPSRSVLEVWRYLGVDFMGVATITASRVDLGRALARVTKAPLKPQQKLRLLRTYLLPKLTYGLVFGRLTAGRLQELDREVRSAVRSWLKFPPGVPSAYVHAPVKSGGLGIVSLSACIPSLRRRRLLALQGSSWEVARAAADLDFVRQQLAWCDRATPSAPKPSSSAEFAAALHESVDGKELRQCSESLVSSQWVDWASEGIGARDYRHFHAIRVASLPTAVRCSRGSRGTTLPLCRACRSGNEHLYHVVQQCPRTHGGRILRHDAVAKQIAGALSSSGWDVERERLYRMPSDQGKKPDIVAVKPDQSCIILDVQVVNGSLDMEQTWRAKIRKYDTNDLRQAVSELKGVAPNNIRVMAATLSWRGVWCGKSATELRELGISVGVLRGITTRVLLGSYLNWWSFYRGTSLHPSLPPPPSSSSLIPRAGVG

SEQ ID NO: 24526 - protein, 411 aa, Apolygus lucorum
MGVATITTSRVDLGRALARVTKAPLKPQQKLRLLRTYLLPKLTYGLVFGRLTAGRLQQLDREVRSAVRSWLKFPPGVPSAYFHAPVKSGGLGIVSLSACIPSLRRRRLLALQGSSWEVARAAADLDFVRQQLAWCDRATPSAPKPSSSAEFAAALHESVDGKELRQCSESLVSSQWVDWASEGIGARDYRHFHAIRVASLPTAVRCSRGSRGTTLPLCRACRSGNEHLYHVVQQCPRTHGGRILRHDAVAKQIAGALSSSGWDVERERLYHMPSDQGKKPDIVAVKPDQSCIILDVQVVNGSLDMEQTWWAKIRKYDRNDLRQAVSELKGVAPNNIRVMAATLSWRGVWCGKSATELRELGISVGVLRGITTRVLLGSYLNWWSFYRGTSLHPSLPPPPSSSSLIPRAGVG

SEQ ID NO: 24527 - protein, 1070 aa, Apolygus lucorum
MDTENNQPHNPRLPIGTRGSRGGAQRRPRQGRRPSSPSSSSSSSLPSSSSTASLNHQCAHCERAFTTRSGLGLHVRRKHPVAANAAIDIERVQHRYASEELRRMAADEVVAVRDGVRNINVYLSERFPMRTVIAIKNIRLKPHYKQLVQEAILANSSGASPASPIAGVEQQPAIQYPSPGTSGLLADLKTEVLRLGGQVGRIDGYESTYLQDLARRAAEGLDNLENEVAAYLGRIFPRVGDATVTQHQEGPPPRVVLRGGRRAAKQARRREYHRVQSLWRKHPARVAAEVLEEPGENQVQPPFQEFVDFWEPLLSAPSHDPGERVVPPVSTRDSLRSIMCSPVLSDEAHKCRVKNSTSAGPDGISARRWNKAPKTIKLLVLNLLLLAGRPPKALTRARTVFIPKKGGSGPGGYRPISVSSVVFRHFQKVLASRLQVAGIIGDVQRAFRPADGTAENLTVLQTVISLARMKRRQLHLAALDVAKAFDTVSHLALTDCLRGVGAPSRLIEYVACLYQEGVTVLEAGGEVSGDVRIGRGVRQGDPLSPLLFNLVVDTALGKLPTEVGFDLAPGVRVGALAFADDVILLAETREGLQIALNAFAKQLARCGLVVNPDKCGSVSLVPSGRQHKVKVVDGGFVIGQSPIPSRSVLEVWRYLGVDFMGVATISASRVDLGRALARVTKAPLKPQQKLRLLRTYLLPKLTYGLVFGRLTAGRLQELDRQVRSAVRSWLRFPPGVPSAYVHAPVKSGGLGIVSLSACIPSLRRQRLLALQGSSWEVARAAADLDFVRQQLAWCDRATPSAPKPSSSAEFAAALHESVDGKELRQCSESPVSSQWVDWASEGIGARDYRHFHAVRMATLPTAVRCSRGSRGATLPLCRACRSGNEHLYHVVQQCPRTHGGRILRHDAVAKQIAGALSSSGWDVERERLYHMPSDQGKKPDIVAVKPDQSCIILDVQVVNGSLDMEQTWRAKIRKYDRNDLRQAVSELKGVAPNNIRVMAATLSWRGVWCGKSATELRELGISVGVLRGITTRVLLGSYLNWWSFYRGTSLHPSLPPPPSSSSLIPRAGVG

SEQ ID NO: 24528 - protein, 1095 aa, Apolygus lucorum
MTLWRLGRGPLLSGSLTLLKCASPVMNTNDDEPHNPRRPIGMRGSGGGAQRRPRQGRRPSSPSSSSSSSLPSSSSTASLNHQCAHCERAFTTRSGPGLHVRRKHPVAANAAIEIERVQPRYASEDLRRMAGDEVVAVRSGVRNINVYLSERFPTRTVNAISKLRQRPHYRQLVQDAILANSSGASPASPIADVEQQPAIQNPSPGTSGLLADLKTEVMRLGGQVGRIEGYESTYLQDLARRAAEGSENLEDEVAAYLGRIFPQVGDATVTRHQRGPPLRMVLRGGRRAAKQARRREYHRVQSLWRKHPARVAAEVLEEPGENQVQPPLQEFVDFWEPLLSAPSHDPGERVVPPVSTRDSLRGIMCSPVLLDEAHKCRVKNSTSAGPDGISARRWNKAPKTIKLLILNLLLLAGRPPKALTRTRTVFIPKKGGSGPGGYRPISVSSVVFRHFQKVLASRLQVAGVIGDVQRAFRPADGTAENLTVLQTVISLARIKRRQLHLAALDVAKAFDTVSHFALTDCLRGVGAPTRLIEYVACLYHEGVTVLEAGGEMSRDIMIGRGVCQGDPLSPLLFNLVVDTALGKLPTEVGFDLASGVRVGALAFADDVILLAETREGLQIALNAFAKQLARCGLVVNPDKCGSVSLVPSGRQHKVKVVDGGFVIGQSPIPSRSVLEVWRYLGVDFMGVATITASRVDLGRALARVTKAPLKPQQKLRLLRTYLLPKLTYGLVFGRLTAGRLQELDREVRSAVRSWLKFPPGVPSAYIHAPVKSGGLGIVSLSASIPSLRRQRLLALRGSSWGVARAAADLDFVRQQLAWCDRATPSAPKPSSSAEFAAALHESVDGKELRQCSESLISSQWVDWASEGIGARDYRHFHAVRVASLPTAVRGTRGSRGATLPLCRACRSRSEHLYHVVQQCPRTHGGRILRHDAVAKQIAGALSSSGWDVERERLYHMPSDQGKKPDIVAVKPDQSCIILDVQVVNGSLDMEQTWRAKIRKYDTNDLRQAVSELKGVAPNNIRVMAATLSWRGVWCGKSATELRELGISVGVLRGITTRVLLGSYLNWWSFYRGTSLHPSLPPPPSSSSLIPRAGVR

SEQ ID NO: 24529 - protein, 844 aa, Apolygus lucorum
MVAAYLGRIFPRVGDATVTRHQGRPPPRVVLRGGRRAAKQARRQEYHRVQSLWRKHPARVAAEVLEEPGEDQVQPPLQEFVDFWEPLLSAPSHNPGERVVPPVSTRDSLRSILCSPVLLDEAHKCRVKNSTSAGPDGVSARRWNKAPNTIKLLILNLLMLAGRPPKALTRTRTVFIPKKGGSGPGGYRPISVSSVVFRHFQKVLASRLQVAGVIGDVQRVFRPADGTAENLTVLQTVISLARIKRRQLHLAALDVAKAFDTVSHFALTDCLRGIGAPSRLIEYVACLYHEGVTVLEAGGEVSGDVRIGRGVRQGDPLSPLLFNLVVDTALGKLPTEVGFDLAPGVRVGALAFADDVILLAETREGLQIALNAFAKQLARCGLVVNPDKCGSVSLVPSGRQHKVKVVDGGFVVGQSPIPSRSVLEVWRYLGVDFMGVATITTSRVDLGRALARVTKAPLKPQQKLRLLRTYLLPKLTYGLVFGRLTAGRLQELDRQVRSAVRSWLKFPPGVPSAYFHAPVKSGGLGIVSLSACIPSLRRQRLLALQGSSWEVARAAADLDFVRQQLAWCDRATPSAPKPSSSAEFAAALHESVDGKELRQCSESLVSSQWVDWASEGIGARDYRHFHAVRMATLPTAVRCSRGSRGTTLPLCRACRSGNEHLYHVVQQCPRTHGGRILRHDAVAKQIAGALSSSGWDVERERLYHMPSDQGKKPDIVAVKPDQSCIILDVQVVNGSLDMEQTWRAKIRKYDRDDLRQAVSELKGVVPNNIRVMAATLSWRGVWCGKSATELRELGISVGVLRGITTRVLLGSYLNWWSFYRGTSLHPSLPPPPSSSSLIPRAGVG

SEQ ID NO: 24530 - protein, 1095 aa, Apolygus lucorum
MTLWRLGRGPLLPGSLTLLKCASPVMNTNDDEPHNPRRPIGTRGSGGGAQRRPRQGRRPSSPSSSSSSSLPSSSSTASLNHQCAHCERAFTTRSGLGLHVRRKHPVAANAAIEIERVQPRYASEDLRRMAGDEVVAVRSGVRNINVYLSERFPTRTVNAISKLRQRPHYRQLVQDAILANSSGASPASPIADVEQQPAIQNPSPGTSGLLADLKTEVMRLGGQVGRIEGYESTYLQDLARRAAEGSENLEDEVAAYLGRIFPQVGDATVTRHQRGPPLRMVLRGGRRAAKQARRREYHRVQSLWRKHPARVAAEVLEEPGENQVQPPLQEFVDFWEPLLSAPSHDPGERVVPPVSTRDSLRGIMCSPVLLDEAHKCRVKNSTSAGPDGISARRWNKAPKTIKLLILNLLLLAGRPPKALTRTRTVFIPKKGGSGPGGYRPISVSSVVFRHFQKVLASRLQVAGVIGDVQRAFRPADGTAENLTVLQTVISLARIKRRQLHLAALDVAKAFDTVSHFALTDCLHGVGAPTRLIEYVACLYHEGVTVLEAGGEMSRDIMIGRGVRQGDPLSPLLFNLVVDTALGKLPTEVGFDLAPGVRVGALAFADDVILLAETREGLQIALNAFAKQLARCGLVVNPDKCGSVSLVPSGRQHKVKVVDGGFVIGQSPIPSRSVLEVWRYLGVDFMGVATITASRVDLGRALARVTKAPLKPQQKLRLLRTYLLPKLTYGLVFGRLTAGRLQELDREVRSAVRSWLKFPPGVPSAYIHAPVKSGGLGIVSLSASIPSLRRQRLLALRGSSWGVARAAADLDFVRQQLAWCDRATPSAPKPSSSAEFAAALHESVDGKELRQCSESLISSQWVDWASEGIGARDYRHFHAVRVASLPTAVRCTRGSRGATLPLCRACRSRSEHLYHVVQQCPRTHGGRILRHDAVAKQIAGALSSSGWDVERERLYHMPSDQGKKPDIVAVKPDQSCIILDVQVVNGSLDMEQTWRAKIRKYDTNDLRQAVSELKGVAPNNIRVMAATLSWRGVWCGKSATELRELGISVGVLRGITTRVLLGSYLNWWSFYRGTSLHPSLPPPPSSSSLIPRAGVG

SEQ ID NO: 24531 - protein, 1070 aa, Apolygus lucorum
MEPTTDTPHNPRLPIGTRGSRGGAQRRPRQGRRPSSPSSSSSSSLPSSSSTASLDHQCAHCERAFTSRSGLGVHVRRKHPVAANEEINVERVQPRYASEDLRRMAADEVVAVRNGVRNINVYLSERFPTRTVIAIKNLRLKPHYKQLVQDAILANSSGASPASPVAGVDQQSAIQYPSPGTSGLLADLKTEVLRLGGQVGRIEGYESTYLQDLARRAVEGLDNLEDKVAAYLGRIFPRVGDATVTQHQGGPPPRVVLRGGRRAAKQARRREYHRVQSLWRKHPARVAAEVLEEPGEVQVQPPLQEFVDFWEPLLSAPSHNPGERVVPPVSTRDSLRSILCSPVLLDEAHKCRVKNSTSAGPDGISARRWNKAPNTIKLLILNLLILAGRPPKALTRTRTVFIPKKGGSGPGGYRPISVSSVVFRHFQKVLASRLQVAGVIGDVQRAFRPADGTAENLTVLQTVISLARIKRRQLHLAALDVAKAFDTVSHLALTDCLRGVGAPSRLIEYVACLYHEGVTVLEAGGEVSGDIRIGRGVRQGDPLSPLLFNLVVDTALGKLPTEVGFDLAPGVRVGALAFADDVILLAETREGLQIALNAFAKQLSRCGLVVNPDKCGSVSLVPSGRQHKVKVVDGGFVIGQAPIPSRSVLEVWRYLGVDFMGVATITASRVDLGRALARITKAPLKPQQRLRLLRTYLLPKLTYGLVFGRLTAGRLQELDREVRSAVRSWLRFPPGVPSAYIHAPVKSGGLGIVSLSACIPSLRRQRLLALQGSSWEVARVAAGLDFVRQQLAWCDRATPSAPKPSSSAEFAAALHESVDGKELRQCSESLISSQWVDWASEGIGARDYRNFHAVRVATLPTAVRCSRGSRGMTDTLCRACRSGNEHLYHVVQQCPRTHGGRILRHDAVAKQIAGALSSSGWDVERERLYHMPSDQGKKPDIVAVKPDRSCIILDVQVVNGSMDMEQTWRAKIRKYDRDDLRQAVSELKGVAPNNIRVMAATLSWRGVWCGKSATELRELGISVGVLRGVTRRVLLGSYLNWWSFYRGTSLHPSLPPPPSSSSLIPRAGVG

SEQ ID NO: 24532 - protein, 1095 aa, Apolygus lucorum
MTLWRLGRGPLLTGSLTLHLKRPPLMEQTVREPHNPRQPIGSQGIRGGAQRRPRQGRRPSSPSSSSSSSLPSSSSTASLNHQCAHCERAFSTRSGLGLHVRRKHPVAANAAIDIERIQHRYASEELRRMAADEAVAVRIGVRNINVYLNERFPTRTVIAIKNIRLKPHYKQLVQEAILANSSGASPASPVADVEQQPAIQYPSPGTSGLLADLKTEVLRLGGQVGRIEGYESTYLQDLVRRAVEGLDNLEDEVAAYLGRIFPRVGDATVARHQGGPPPRMVLRGGRRAAKQARQREYHRVQSLWRKHPARVAAEVLEEPGENQVQPPLQEFVDFWEPLLSAPSHDPGERVVPPVSTRDSLRSIMCSPVLSDEAHKCRVRNSTSAGPDGVSARRWNKAPKTIKLLILNLLLLAGRPLKALTRARTVFIPKKGGSGPGGYRPISVSSVVFRHFQKVLASRLQVAGVIGDVQRAFRPADGTAENLTVLQTVISLARMERRQLHLAALDVAKAFDTVSHLALTDCLRGVGAPSRLIEYVACLYQEGVTVLEAGGEVSGDIRIGRGVRQGDPLSPLLFNLVVDTALGKLPTEVGFDLAPGVRVGALAFADDVILLAETREGLQIALNAFAKQLARCGLVVNPDKCGSVSLVPSGRQHKVKVVDGGFVVGQSPIPSRSVLEVWRYLGVDFMGVATITASRVDLGRALARVTKAPLKPQQKLRLLRTYLLPKLTYGLVFGRLTAGRLQQLDREVRSAVRSWLRFPPGVPSAYVHAPVKSGGLGIVSLSACIPSLRRRRLLALQGSSWEVARAAADLDFVRQQLAWCDRATPSAPKPSSSAEFAAALHESVDGKELRQCSESPVSSQWVDWASEGIGARDYRHFHAVRVASLPTAVRCSRGGRGTTLPLCRACRSGNEHLYHVVQQCPRTHGGRILRHDAVAKQIAGALSSSGWDVERERLYHMPSDQGKKPDIVAVKPDQSCIILDVQVVNGSLDMEQTWRAKIRKYDRDDLRQAVSELKGVAPNNIRVMAATLSWHGVWCGKSATELRELGISVGVLRGITTRVLLGSYLNWWSFYRGTSLHPSLPPPPSSSSLIPRAGVG

SEQ ID NO: 24533 - protein, 1070 aa, Apolygus lucorum
MEQNINEPHNPRQPIGSRGIRGGAQRRPRQGRRPSSPSSSSSSSLPSSSSSASLNHQCAHCERAFTTRSGLGLHIRRKHPVAANAAIDIERIQPRYASEELRRMAADEAVAVRNGVRNINVYLNERFPTRTVIAIKNIRLKPHYKQLVQEAILANSSGASPASPIADVEQQPAIQYPSPGTSGLLADLKTEVLRLGGQVGRIEGYESTYLQDLVRRAVEGLDNLEDEVAAYLGRIFPRVGDATVTRHQGGPPPRMVLRGGRRAAKQARRREYHRVQSLWRKHPARVAAEVLEEPGENQVQPPLQEFVDFWEPLLSAPSHDPGECVVPPVSTRDSLRSIMCSPVLSDEAHKCRVRNSTSAGPDGVSARRWNKAPKTIKLLILNLLLLAGRPPKALTRTRTVFIPKKGGSGPGGYRPISVSSVVFRHFQKVLASRLQVAGVIGDVQRAFRPADGTAENLTVLQIVISLARIKRRQLHLAALDVAKAFDTVSHLALTDCLRGVGAPSRLIEYVACLYQEGVTVLEAGGEVSGDIRIGRGVRQGDPLSPLLFNLVVDTALGKLPTEVGFDLAPGVRVGALAFADDVILLAETREGLQIALNAFAKQLAGCGLVVNPDKCGSVSLVPSGRQHKVKVVDGGFVVGQSPIPSRSVLEVWRYLGVDFMGVATITASHVDLGRALARVTKAPLKPQQKLRLLRTYLLPKLTYGLVFGRLTAGRLQELDREVRSAVRSWLKFPPGVPSAYVHAPVKSGGLGIVSLSACIPSLRRRRLLALQGSSWEVARAAADLDFVRQQLAWCDRATPSAPKPSSSAEFAAALHESVDGKELRQCSESLVSSQWVDWASEGIGARDYRHFHAIRVASLPTAVRCSRGSRGTTLPLCRACRSGNEHLYHVVQQCPRTHGGRILRHDAVAKQIAGALSSSGWDVERERLYRMPSDQGKKPDIVAVKPDQSCIILDVQVVNGSLDMEQTWRAKIRKYDTNDLRQAVSELKGVAPNNIRVMAATLSWRGVWCGKSATELRELGISVGVLRGITTRVLLGSYLNWWSFYRGTSLHPSLPPPPSSSSLIPRAGVG

SEQ ID NO: 24534 - protein, 1076 aa, Apolygus lucorum
MKRPPVMETTEEEPHNPRQPIGSRGIRGGAQRRPRQGRRPSSPSSSSSSSLPSSSSTASLNHQCAHCERAFTTRSGLGLHIRRKHPVAANDAIDIERIQHRYASEELRRMAADEAVAVRNGVRNINVYLNERFPTRTVIAIKNIRLKPHYKQLVQEAILANSSGASPASPIADVEQQPAIQYPSPGTSGLLADLKTEVLRLGGQVGRIEGYESTYLQDLVRRAAEGLDNLEDEVAAYLGRIFPRVGDATVTQHQGGPPPRVVLRGGRRAAKQARWREYHRVQSLWRKHPARVAAEVLEEPGENQVQPPLQEFVDFWEPLLSAPSHDPGERVVPPVSTRDSLRSILCSTVLLDEAHKCRVKNSTSAGPDGVSARRWNKAPKTIKLLILNLLLLAGRPPKALTRTRTVFIPKKGGSGPGGYRPISVSSVVFRHFQKVLASRLQVAGVIGDVQRAFRPADGTAENLTVLQTVISLARIKRRQLHLAALDVAKAFDTVSHLALTDCLRGVGAPSRLIEYVACLYQEGVTVLEAGGEVSGDIRIGRGVRQGDPLSPLLFNLVVDTALGKLPTEVGFDLAPGVRVGALAFADDVILLAETREGLQIALNAFAKQLARCGLVVNPDKCGSVSLVPSGRQHKVKVVDGGFVIGQSPIPSRSVLEVWRYLGVDFMGVATITTSRVDLGRALARVTKAPLKPQQKLRLLRTYLLPKLTYGLVFGRLTAGRLQQLDREVRSAVRSWLKFPPGVPSAYFHAPVKSGGLGIVSLSACIPSLRRRRLLALQGSSWEVARAAADLDFVRQQLAWCDRATPSAPKPSSSAEFAAALHESVDGKELRQCSESLVSSQWVDWASEGIGARDYRHFHAIRVASLPTAVRCSRGSRGTTLPLCRACRSGNEHLYHVVQLCPRTHGGRILRHDAVAKQIAGALSSSGWDVERERLYHMPSDQGKKPDIVAVKPDQSCIILDVQVVNGSLDMEQTWRAKIRKYDRNDLRQAVSELKGVAPNNIRVMAATLSWRGVWCGKSATELRELGISVGVLRGITTRVLLGSYLNWWSFYRGTSLHPSLPPPPSSSSLIPRAGVG

SEQ ID NO: 24535 - protein, 1070 aa, Apolygus lucorum
MEDTTEMPHNPRQPIGSRGIRGGAQRRPRQGRRPSSPSSSSSSSLPSSSSTASLNHQCAHCERAFTTRSGLGLHIRRKHPVAANAAIDIERIQHRYASEELRRMAADEAVAVRNGVRNINVYLNERFPTRTVIAIKNIRLKPHYKQLVQEAILANSSGASPASPTADVEQQPAIQYPSPGTSGLLADLKTEVLRLGGQVGRVEGYESTYLQDLVRRAAEGLDNLEDEVAAYLGRIFPQVGDATVTRHQGGPPPRVVLRGGRRAAKQARRREYHRVQSLWRKHPARVAAEVLEEPGENQVQPPLQEFVDFWEPLLSAPSHDPGERVVPPVSTRDSLRSILCSPVLLDEAHKCRVKNSTSAGPDGVSARRWNKAPKTIKLLILNLLLLAGRPPKALTRTRTVFIPKKGGSGPGGYRPISVSSVVFRHFQKVLASRLQVAGVIGDVQRAFRPADGTAENLTVLQSVILLARIKRRQLHLAALDVAKAFDTVSHLALTDCLRGVGAPSRLIEYVACLYQEGVTVLEAGGEVSGDIRIGRGVRQGDPLSPLLFNLVVDTALGKLPTEVGFDLAPGVRVGALAFADDVVLLAETREGLQIALNAFAKQLARCGLVVNPDKCGSVSLVPSGRQHKVKVVDGGFVVGQSPIPSRSVLEVWRYLGVDFMGVATITASRVDLGRALARVTKAPLKPQQKLRLLRTYLLPKLTYGLVFGRLTAGRLQQLDREVRSAVRSWLKFPPGVPSAYIHAPVKSGGLGIVSLSACIPSLRRRRLLALQGSSWEVARAAADLDFVRQQLAWCDRATPSAPKPSSSAEFAAALHESVDGKELRQCSESLVSSQWVDWASEGIGARDYRHFHAIRVASLPTAVRCSRGSRGTTLPLCRACRSGNEHLYHVVQQCPRTHGGRILRHDAVAKQIAGALSSSGWDVERERLYHMPSDQGKKPDIVAVKPDQSCIILDVQVVNGSLDMEQTWRAKIRKYDTNDLRQAVSELKGVAPNNIRVMAATLSWRGVWCGKSATELRELGISVGVLRGITTRVLLGSYLNWWSFYRGTSLHPSLPPPPSSSSLIPRAGVG

SEQ ID NO: 24536 - protein, 923 aa, Apolygus lucorum
MAADEVVAVRDGVRNINVYLSERFPMRTVIAIKNIRLKPHYKQLVQEAILANSSGASPASPIAGVEQQPAIQYPSPGTSGLLADLKTEVLRLGGQVGRIDGYESTYLQDLARRAAEGLDNLENEVAAYLGRIFPRVGDVTVTQHQEGPPPRVVLRGGRRAAKQARRREYHRVQSLWRKHPARVAAEVLEEPGENQVQPPLQEFVDFWEPLLSAPSHDPGERVVPPVSTRDSLRSIMCSPVLSDEAHKCRVKNSTSAGPDGISARRWNKAPKTIKLLVLNLLLLAGRPPKALTRARTVFIPKKGGSGPGGYRPISVSSVVFRHFQKVLASRLQVAGIIGDVQRAFRPADGTAENLTVLQTVISLARMKRRQLHLAALDVAKAFDTVSHLALTDCLRGVGAPSRLIEYVACLYQEGVMVLEAGGEVSGDVRIGRGVRQGDPLSPLLFNLVVDTALGKLPTEVGFDLAPGVRVGALAFADDVILLAETREGLQIALNAFAKQLARCGLVVNPDKCGSVSLVPSGRQHKVKVVDGGFVIGQSPIPSRSVLEVWRYLGVDFMGVATISASRVDLGRALARVTKAPLKPQQKLRLLRTYLLPKLTYGLVFGRLTAGRLQELERQVRSAVRSWLRFPPGVPSAYVHAPVKSGGLGIVSLSACIPSLRRQRLLALQGSSWEVARAAADLDFVRQQLAWCDRATPSAPKPSSSAEFAAALHESVDGKELRQCSESPVSSQWVDWASEGIGARDYRHFHAVRMATLPTAVRCSRGSRGTTLPLCRACRSGNEHLYHVVQQCPRTHGGRILRHDAVAKQIAGALSSSGWDVERERLYHMPSDQGKKPDIVAVKPDQSCIILYVQVVNGSLDMEQTWRAKIRKYDRNDLRQAVSELKGVEPNNIRVMAATLSWRGVWCGKSATELHELGISVGVL

SEQ ID NO: 24537 - protein, 816 aa, Apolygus lucorum
MVLRGGRRAAKQARRREYHRVQSLWRKHPARVAAEVLEEPGENQVQPPLQEFVDFWEPLLSAPSHDPGECVVPPVSTRDSLRSIMCSPVLSDEAHKCRVRNSTSAGPDGVSARRWNKAPKTIKLLILNLLLLAGRPPKALTRTRTVFIPKKGGSGPGGYRPISVSSVVFRHFQKVLASRLQVAGVIGDVQRAFRPADGTAENLTVLQTVISLARIKRRQLHLAALDVAKAFDTVSHLALTDCLRGVGAPSRLIEYVACLYQEGVTVLEAGGEVSGDILVGRGVRQGDPLSPLFFNLVVDTALGKLPTEVGFDLAPGVRVGALAFADDVILLAETREGLQIALNAFAKQLAGCGLVVNPDKCGSVSLVPSGRQHKVKVVDGGFVVGQSPIPSRSVLEVWRYLGVDFMGVATITASRVDLGRALARVTKAPLKPQQKLRLLRTYLLPKLTYGLVFGRLTAGRLQELDREVRSAVRSWLKFPSGVPSAYVHAPVKSGGLGIVSLSACIPSLRRRRLLALQGSSWEVARAAADLDFVRQQLAWCDRATPSAPKPSSSAEFAAALHESVDGKELRQCSESLVSSQWVDWASEGIGARDYRHFHAIRVASLPTAVRCSRGSRGTTLPLCRACRSGNEHLYHVVQQCPRTHGGRILRHDAVAKQIAGALSSSGWDVERERLYHMPSDQGKKPDIVAVKPDQSCIILDVQVVNGSLDMEQTWRAKIRKYDTNDLRQAVSELKGVAPNNIRVMAATLSWRGVWCGKSATELRELGISVGVLRGITTRVLLGSYLNWWSFYRGTSLHPSLPPPPSSSSLIPRAGVG

SEQ ID NO: 24538 - protein, 1095 aa, Apolygus lucorum
MTLWRLGRGPLSTGSLTLHLKRPPVMEQTVREPHNPRQPIGSRGIRGGAQRRPRQGRRPSSPSSSSSSSQPSSSSTASLNHQCAHCERAFTTRSGLGLHVSRKHPVAANAAIDIERIQHRYASEELRRMAADEAVAVRNGVRNINVYLNERFPTRTVIAIKNIRLKPHYKQLVQEAILANSSGASPASPIADVEQQPAIQYPSPGTSGLLADLKTEVLRLGGQVGRIEGYESTYLQDLVRRAAEGLDNLEDEVAAYLGRIFPRVGDVTVTQHQGGPPPRVVLRGGRRATKQARRREYHRVQSLWRKHPARVAAEVLEEPGENQVQPPLQEFVDFWEPLLSAPSHDPGECVVPPVSTRDSLRSIMCSPVLSDEAHKCRVKNSTSAGPDGVSARRWNKAPKTIKLLILNLLLLAGRPPKALTRTRTVFIPKKGGSGPGGYRPISVSSVVFRHFQKVLASRLQVAGVIGDVQRAFRSADGTAENLTVLQTVISLARIKCRQLHLAALDVAKAFDTVSHLALTDCLRGVGAPSRLIEYVACLYQEGVTVLEAGGEVSGDIRIGRGVRQGDPLSPLLFNLVVDTALGKLPTEVGFDLAPGVRVGALAFADDVILLAETREGLQIALNAFAKQLARCGLVVNPDKCGSVSLVPLGRQHKVKVVDGGFVVGQSPIPSRSVLEVWRYLGVDFMGVATITTSRVDLGRALARVTKAPLKPQQKLRLLRTYLLPKLTYGLVFGRLTAGRLQQLDREVRSAVRSWLKFPPGVPSAYFHAPVKSGGLGIVSLSACIPSLRRRRLLALQGSSWEVARAAADLDFVRQQLAWCDRATPSAPKPSSSAEFAAALHESVDGKELRQCSESLVSSQWVDWASEGIGARDYRHFHAIRVASLPTAVRCSRGSRGTTLPLCRACRSGNEHLYHVVQQCPRTHGGRILRHDAVAKQIAGALSSSGWDVERERLYHMPSDQGKKPDIVAVKPDQSCIILDVQVVNGSLDMEQTWRAKIRKYDTNDLRQAVSELKGVAPNNIRVMAATLSWRGVWCGKSATELRELGISVGVLRGITTRVLLGSYLNWWSFYRGTSLHPSLPPPPSSSSLIPRAGVG

SEQ ID NO: 24539 - protein, 967 aa, Apolygus lucorum
MAADEVVAVRNGVRNINVYLSERFPTRTVIAIKNLRLKPHYKQLVQDAILANSSGASPASPVAGVDQQSAIQYPSPGTSGLLADLKTEVLRLGGQVGRIEGYESTYLQDLARRAVEGLDNLEDKVAAYLGRIFPRVGDATVTQHQGGPPPRVVLRGGRRAAKQARRREYHRVQSLWRKHPARVAAEVLEEPGEVQVQPPLQEFVDFWEPLLSAPSHNPGERVVPPVSTRDSLRSILCSPVLLDEAHKCRVKNSTSAGPDGISARRWNKAPNTIKLLILNLLILAGRPPKALTRTRTVFIPKKGRSGPGGYRPISVSSVVFRHFQKVLASRLQVAGVIGDVQRAFRPADGTAENLTVLQTVISLARIKRRQLHLAALDVAKAFDTVSHLALTDCLRGVGAPSRLIEYVACLYHEGVTVLEAGGEVSGDIRIGRGVRQGDPLSPLLFNLVVDTALGKLPTEVGFDLAPGVRVGALAFADDVILLAETREGLQIALNAFAKQLSRCGLVVNPDKCGSVSLVPSGRQHKVKVVDGGFVIGQAPIPSRSVLEVWRYLGVDFMGVATITASRVDLGRALARITKAPLKPQQRLRLLRTYLLPKLTYGLVFGRLTAGRLQELDREVRSAVRSWLRFPPGVPSAYIHAPVKSGGLGIVSLSACIPSLRRQRLLALQGSSWEVARVAAGLDFVRQQLAWCDRATPSAPKPSSSAEFAAALHESVDGKELRQCSESLISSQWVDWASEGIGARDYRNFHAIRVATLPTAVRCSRGSRGMTDTLCRACRSGNEHLYHVVQQCPRTHGGRILRHDAVAKQIAGALSSSGWDVERERLYHMPSDQGKKPDIVAVKPDRSCIILDVQVVNGSMDMEQTWRAKIRKYDRDDLRQAVSELKGVAPNNIRVMAATLSWRGVWCGKSATELRELGISVGVLRGVTRRVLLGSYLNWWSFYRGTSLHPSLPPPPSSSSLIPRAGVG

SEQ ID NO: 24540 - protein, 1076 aa, Apolygus lucorum
MKRPPVMETTEEEPHNPRQPIGSRGIRGGAQRRPRQGRRPSSPSSSSSSSLPSSSSTASLNHQCAHCERAFTTRSGLGLHIRRKHPVAANDAIDIERIQHRYASEELRRMAADEAVAVRNGVRNINVYLNERFPTRTVIAIKNIRLKPHYKQLVQEAILANSSGASPASPIADVEQQPAIQYPSPGTSGLLADLKTEVLRLGGQVGRIEGYESTYLQDLVRRAAEGLDNLEDEVAAYLGRIFPRVGDATVTQHQGGPPPRVVLRGGRRAAKQARRREYHRVQSLWRKHPARVAAEVLEEPGENQVQPPLQEFVDFWEPLLSAPSHDPGERVVPPVSTRDSLRSILCSPVLLDEAHKCRVKNSTSAGPDGVSARRWNKAPKTIKLLILNLLLLAGRPPKALTRTRTVFIPKKGGSGPGGYRPISVSSVVFRHFQKVLASRLQVAGVIGDVQRAFRPADGTAENLTVLQTVISLARIKRRQLHLAALDVAKAFDTVSHLALTDCLRGVGAPSRLIEYVACLYQEGVTVLEAGGEVSGDMRIGRGVRQGDPLSPLLFNLVVDTALGKLPTEVGFDLAPGVRVGALAFADDVILLAETREGLQIALNAFAKQLARCGLVVNPDKCGSVSLVPSGRQHKVKVVDGGFVVGQSPIPSRSVLEVWRYLGVDFMGVATITTSRVDLGRALARVTKAPLKPQQKLRLLRTYLLPKLTYGLVFGRLTAGRLQQLDREVRSAVRSWLKFPPGVPSAYFHAPVKSGGLGIVSLSACIPSLRRRRLLALQGSSWEVARAAADLDFVRQQLAWCDRATPSAPKPSSSAEFAAALHESVDGKELRQCSESLVSSQWVDWASEGIGARDYRHFHAIRVASLPTAVRCSRGSRGTTLPLCRACRSGNEHLYHVVQQCPRTHGGRILRHDAVAKQIAGALSSSGWDVERERLYHMPSDQGKKPDIVAVKPDQSCIILDVQVVNGSLDMEQTWRAKIRKYDRNDLRQAVSELKGVAPNNIRVMAATLSWRGVWCGKSATELRELGISVGVLRGITTRVLLGSYLNWWSFYRGTSLHPSLPPPPSSSSLIPRAGVG

SEQ ID NO: 24541 - protein, 1075 aa, Apolygus lucorum
MCFPVMDNIPNEPHNPRQPIGSRGIRGGAQRRPRQGRRPSSPSSSSSSSLPSSSSTASLDHQCAHCERAFTSRSGLGVHVRRKHPVAANEEIDVERVQPRYASEDLRRMAADEVVAVRNGVRNINVYLSERFPTRTVIAIKNLRLKPHYKQLVQEAILANSSGASPASPVAGVDQQSAIQYPSPGTSGLLADLKTEVLRLGGQVGRIEGYESTCLQDLARRAAEGLDNLEDMVAAYLGRIFPRVGDATVTQHQGGPPPRVVLRGGRRAAKQARRREYHRVQSLWRKHPARAAAEVLEEPGEDQVQPPLQEFVDFWEPLLSAPSHNPGERVVPPVSTRDSLRSILCSPVLLDEAHKCRVKNSTSAGPDGVSARRWNKAPNTIKLLILNLLMLAGRPPKALTRTRTVFIPKKGGSGPGGYRPISVSSVVFRHFQKVLASRLQVAGVIGDVQRAFRPADGTAENLTVLQTVISLARIKRRQLHLAALDVAKAFDTVSHLALTDCLRGVGAPSRLIEYVACLYHEGVTVLEAGGEVSGDVRIGRGVRQGDPLSPLLFNLVVDTALGKLPTEVGFDLAPGVRVGALAFADDVILLAETREGLQIALNAFAKQLSRCGLVVNPDKCGSVSLVPSGRQHKVKVVDGGFVIGQAPIPSRSVLEVWRYLGVDFMGVATITASRVDLGRALARITKAPLKPQQRLRLLRTYLLPKLTYGLVFDRLTAGRLQELDREVRSAVRSWLRFPPGVPSAYIHAPVKSGGLGIVSLSACIPSLRRQRLLALQGSSWEVARVAAGLDFVRQQLAWCDRATPSAPKPSSSAEFAAALHESVDGKELRQCSESLISSQWVDWASEGIGARDYRNFHAVRVATLPTAVRCSRGSRGVTDTLCRACRSGNEHLYHVVQQCPRTHGGRILRHDAVAKQIAGALSSSGWDVERERLYHMPSDQGKKPDIVAVKPDRSCIILDVQVVNGSMDMEQTWRAKIRKYDRDDLRQAVSELKGVAPNNIRVMAATLSWRGVWCGKSATELRELGISVGVLRGVTRRVLLGSYLNWWSFYRGTSLHPSLPPPPSSSSLIPRAGVG

SEQ ID NO: 24542 - protein, 1095 aa, Apolygus lucorum
MTLWRLGRGPLLPGSLTLLKCASPVMNTNDDEPHNPRRPIGTRGFGGGAQRRPRQGRRPSSPSSSSSSSLPSSSSTASLNHQCAHCERAFTTRSGLGLHVRRKHPVAANAAIEIERVQPRYASEDLRRMVGDEVVAVRSGVRNINVYLSERFPTRTVNAISKLRQRPHYRQLVQDAILANSSGASPASPIAGVEQQPAIQNPSPGTSGLLADLKTEVMRLGGQVGRIEGYESTYLQDLARRAAEGSENLEDEVAAYLGRIFPRVGDATVTQHQRGPPLRMVLRGGRRAAKQARRREYHRVQSLWRKHPARVAAEVLEEPGENQVQPPLQEFVDFWEPLLSAPSHDPGERVVPPVSTRDSLRGIMCSPVLLDEAHKCRVKNSTSAGPDGVSARRWNKAPKTIKLLILNLLLLAGRPPKALTRTRTVFIPKKGGSGPGGYRPISVSSVVFRHFQKVLASRLQVAGVIGDVQRAFRPADGTAENLTVLQTVISLARIKRRQLHLAALDVAKAFDTVSHFALTDCLHGVGAPIRLIEYVACLYHEGVTVLEAGGEMSRDIMIGRGVRQGDPLSPLLFNLVVDTALGKLPTEVGFDLAPGVRVGALAFADDVILLAETREGLQIALNAFAKQLARCGLVVNPDKCGSVSLVPSGRQHKVKVVDGGFVIGQSPIPSRSVLEVWRYLGVDFMGVATITASRVDLGRALARVTKAPLKPQQKLRLLRTYLLPKLTYGLVFGRLTAGRLQELDREVRSAVRSWLKFPPGVPSAYSHAPVKSGGLGIVSLSASIPSLRRQRLLALRGSSWGVARAAADLDFVRQQLAWCDRATPSAPKPSSSAEFAAALHESVDGKELRQCSESLISSQWVDWASEGIGARDYRHFHAVRVACLPTGVRCTRGSRGATLPLCRACRSRSEHLYHVVQQCPRTHGGRILSHDAVAKQIAGALSSSGWDVERERLYHMPSDQGKKPDIVAVKPDQSCIILDVQVVNGSLDMEQTWRAKIRKYDTNDLRQAVSELKGVAPNNIRVMAATLSWRGVWCGKSATELRELGISVGVLRGITTRVLLGSYLNWWSFYRGTSLHPSLPPPPSSSSLIPRAGVG

SEQ ID NO: 24543 - protein, 1070 aa, Apolygus lucorum
MEDTTDMPHNPRQPIGSRGIRGGAQRRPRQGRRPSSPSSSSSSSLPSSSSTASLNHQCAHCERAFTTRSGLGLHIRRKHPVAANAAIDIERIQHRYASEELRRMAAEEAVAVRNGVRNINVYLNERFPTRTVIAIKNIRLKPHYKQLVQEAILANSSGASPASPIADVEQQPAIQYPSPGTSGLLADLKTEVLRLGGQVGRIEGYESTYLQDLVRRAAEGLDNLEDEVAAYLERIFPQVGDATVTRHQGGPPPRVVLRGGRRAAKQARRREYHRVQSLWRKHPARVAAEVLEEPGENQVQPPLQEFVDFWEPLLSAPSHDPGERVVPPVSTRDSLRSILCSPVLLDEAHKCRVKNSTSAGPDGVSARRWNKAPKTIKLLILNLLLLAGRPPKALTRTRTVFIPKKGGSGPGGYRPISVSSVVFRHFQKVLASRLQVAGVIGDVQRAFRPADGTAENLTVLQSVISLARIKRRQLHLAALDVAKAFDTVSHLALTDCLRGVGAPSRLIEYVACLYQEGVTVLEAGGEVSGDIRIGRGVRQGDPLSPLLFNLVVDTALGKLPTEVGFDLAPGVRVGALAFADDVILLAETREGLQIALNAFAKQLARCGLVVNPDKCGSVSLVPSGRQHKVKVVDGGFVVGQSPIPSRSVLEVWRYLGVDFMGVATITASRVDLGRALARVTKAPLKPQQKLRLLRTYLLPKLTYGLVFGRLTAGRLQQLDREVRSAVRSWLKFPPGVPSAYIHAPVKSGGLGIVSLSSCIPSLRRRRLLALQGSSWEVARAAADLDFVRQQLAWCDRATPSAPKPSSSAEFAAALHESVDGKELRQCSESLVSSQWVDWASEGIGARDYRHYHAIRVASLPTAVRCSRGSRGTTLPLCRACRSGNEHLYHVVQQCPRTHGGRILRHDAVAKQIAGALSSSGWDVERERLYHMPSDQGKKPDIVAVKPDQSCIILDVQVVNGSLDMEQTWRAKIRKYDTNDLRQAVSELKGVAPNNIRVMAATLSWRGVWCGKSATELRELGISVGVLRGITTRVLLGSYLNWWSFYRGTSLHPSLPPPPSSSSLIPRAGVG

SEQ ID NO: 24544 - protein, 1095 aa, Apolygus lucorum
MTLWRIGREPLSTGSLALLNKRPPVMDETNEEPHNPRLPIGPRGSRGGAQRRPRQGRRPSSPSSSSSSSLPSSSSTASLNHQCAHCERAFTTRSGLGLHVRRKHPVAANAAIDIERIQHRYASEELRRMAADEAVAVRNGVRNINVYLSERFPMRTVIAIKNIRLRPHYKQLVQEVILANSSGASPASPVADVEQQPAIQHPSPGTSGLLADLKIEVLRLGGQVGRIEGYESTYLQDLARRAAEGLDNLENEVAAYLGRIFPRVGDSTVTHHQGGPPPRVVLRGGRRAAKQARRREYHRVQSLWRKHPARVAAEVLEEPGENQVQPPLQEFVDFWEPLLSAPSHDPGERVVPPVSTRDSLRSIMCSPVLSDEAHKCRVKNSTSAGPDGISARRWNKAPRTIKLLLLNLLLLAGRPPKALTRTRTVFIPKKGGSGPGGYRPISVSSVVFRHFQKVLASRLQVAGIIGDVQRAFRPADGTAENLTVLQTVISLARMKRRQLHLAALDVAKAFDTVSHFALTDCLRGVGAPSRLIEYVACLYHEGVTVLEAGGEVSGDVRIGRGVRQGDPLSPLLFNLVVDTALGKLPTEVGFDLAPGVRVGALAFADDVILLAETREGLQIALNAFAKQLARCGLVVNPDKCGSVSLVPSGRQHKVKVVDGGFVIGQSPIPSRSVLEVWRYLGVDFMGVATISASRVDLGRALDRVTKAPLKPQQKLRLLRTYLLPKLTYGLVFGRLTAGRLQELDRQVRSAVRSWLRFPPGVPSAYVHAPVKSGGLGVVSLSACIPSLRRQRLLALQGSSWEVARAAADLDFVRQQLAWCDRATPSAPKPSSSAEFAAALHESVDGKELRQCSESPVSSQWVDWASEGIGARDYRHFHAVRMATLPTAVRCSRGSRGATLPLCRACRSGNEHLYHVVQQCPRTHGGRILRHDAVAKQIAGALSSSGWDVERERLYHMPSDQGKKPDIVAVKPDQSCIILDVQVVNGSLDMEQTWRAKIRKYDRNDLRQAVSELKGVVPNNIRVMAATLSWRGVWCGKSATELRELGISVGVLRGITTRVLLGSYLNWWSFYRGTSLHPSLPPPPSSSSLIPRAGVG

SEQ ID NO: 24545 - protein, 1095 aa, Apolygus lucorum
MTLWRIGREPLSTGSLTLSLRFPVMDKNQTEPHNPRRRPIGTRGSRGGAQRRPRQGRRPSSPSSSSSSSLPSSSSTASLDHQCAHCERAFTSRSGLGVHVRRKHPVAANEEINVERVQPRYASEDLRRMAADEVVAVRNGVRNINVYLSERFPTRTVIAIKNLRLKPHYKQLVQEAILANSGGASPASPVAGVDQQSAIQYPSPGTSGLLADLKTEVLRLGGQVGRIEGYESTYLRDLARRAAEGLDNLEDEVAAYLGRIFPRVGDATVTQHQGGPPPRMVLRGGRRAAKQARRQEYHRVQSLWRKHPARVAAEVLEEPGEDQVQPPLQEFVDFWEPLLSAPSHNPGERVVPPVSTRDSLRSILCSPVLLDEAHKCRVKNSTSAGPDGVSARRWNKAPNTIKLLILNLLMLAGRPPKALTRTRTVFIPKKGGSGPGGYRPISVSSVVFRHFQKVLASRLQVAGVIGDVQRAFRPADGTAENLTVLQTVISLARIKRRQLHLAALDVAKAFDTVSHLALTDCLRGVGAPSRLIEYVACLYHEGVTVLEAGGEVSGDVRIGRGVRQGDPLSPLLFNLVVDTALGKLPTEVGFDLAPGVRVGALAFADDVILLAETREGLQIALNAFAKQLSRCGLVVNPDKCGSVSLVPSGRQHKVKVVDGGFVIGQAPIPSRSVLEVWRYLGVDFMGVATITASRVDLGRALARITKAPLKPQQRLRLLRTYLLPKLTYGLVFGRLTAGRLQELDREVRSAVRSWLRFPPGVPSAYIHAPVKSGGLGIVSLSACIPSLRRQRLLALQGSSWEVARVAAGLDFVRQQLAWCDRATPSAPKPSSSAEFAAALHESVDGKELRQCSESLISSQWVDWASEGIGARDYRNFHAVRVATLPTAVRCSRGSRGMTDTLCRACRSGNEHLYHVVQQCPRTHGGRILRHDAVAKQIAGALSSSGWDVERERLYHMPSDQGKKPDIVAVKPDRSCIILDVQVVNGSMDMEQTWRAKIRKYDRDDLRQAVSELKGVEPNNIRVMAATLSWRGVWCGKSATELRELGISVGVLRGVTRRVLLGSYLNWWSFYRGTSLHPSLPPPPSSSSLIPRAGVG

SEQ ID NO: 24546 - protein, 1070 aa, Apolygus lucorum
MNEEDDEPHNPRLPIGTRGSRGGAQRRPRQGRRPSSPSSSSSSSLPSSSSTASLNHQCAHCERAFTTRSGLGLHVRRKHPVAANAAIDIERVQHRYASEELRRMAADEVVAVRDGVRNINVYLSERFPMRTVIAIKNIRLKPHYKQLVQEAILANSSGASPASPIADVEQQPAIQYPSPGTSGLLADLKTEVLRLGGQVGRFEGYESTYLQDLARRAAEGLDNLENEVAAYLGRIFPRVGDATVTQHQGGPPPGVVLRGGRRAAKQARRREYHRVQSLWRKHPARVAAEVLEEPGENQVQPPLQEFVDFWEPLLSAPSHDPGERVVPPVSTRDSLRSIMCAPVLSDEAHKCRVKNSTSAGPDGISARRWNKAPKTIKLLVLNLLLLAGRPPKALTRARTVFIPKKGGSGPGGYRPISVSSVVFRHFQKVLASRLQVAGIIGDVQRAFRPADGTAENLTVLQTVISLARMKRRQLHLAALDVAKAFDTVSHLALTDCLRGVGAPSRLIEYVACLYQEGVTVLEAGGEVSGDVRIGRGVRQGDPLSPLLFNLVVDTALGKLPTEVGFDLAPGVRVGALAFADDVILLAETREGLQIALNAFARQLARCGLVVNPDKCGSVSLVPSGRQHKVKVVDGGFVIGQSPIPSRSVLEVWRYLGVDFMGVATISASRVDLGRALARVTKAPLKPQQKLRLLRTYSLPKLTYGLVFGRLTAGRMQELDRQVRSAVRSWLRFPPGVPSAYVHAPVKSGGLGIVSLSACVPSLHRQRLLALQGSSWEVARAAADLDFVRQQLAWCDRATPSAPKPSSSAEFAAALHESVDGKELRQCSESPVSSQWVDWASEGIGARDYRHFHAVRMATLPTAVRCSRGSRGTTLPLCRACRSGNEHLYHVVQQCPRTHGGRILRHDAVAKQIAGALSSSGWDVERERLYHMPSDQGKKPDIVAVKPDQSCIILDVQVVNGSLDMEQTWRAKIRKYDRNDLRQAVSELKGVAPNNIRVMAATLSWRGVWCGKSATELRELGISVGVLRGITTRVLLGSYLNWWSFYRGTSLHPSLPPPPSSSSFIPRAGVG

SEQ ID NO: 24547 - protein, 955 aa, Apolygus lucorum
MDDNLTEPHNPRRPIGTRGSRGGAQRRPRQGRRPSSPSSSSSSSLPSSSSTASLDHQCAHCERAFTSRSGLGVHVRRKHPVAANEEIDIERVQPRYAPEDLRRMAADEVVAVRNGVRNINVYLSERFPTRTVIAIKNLRLRPHYKQLVQEAILANSGGASPASPVAGMDQQSAIQYPSPGTSGLLADLKTEVLRLGGQVGRIEGYESTYLQDLARQAAEGLDNLEDEVAAYLGRIFLRVGDATVTQHQGGPPPRVVLRGGRRAAKQARRREYHRVQSLWRKHPARVAAEVLEEPGEVQVQPPLQEFVDFWEPLLSAPSHNPGERMVPPVSTRDSLRGILCSPVLLDEAHKCRVKNSTSAGPDGVSARRWNKAPNTIKLLILNLLMLAGRPPKALTRTRTVFIPKKGGSGPGGYRPISVSSVVFRHFQKVLASRLQVAGVIGDVQRAFRPADGTAENLTVLQTVISLARIKRRQLHLAALDVAKAFDTVSHLALTDCLRGVGAPSRLIEYVACLYHEGVTVLEAGGEVSGDVRIGRGVRQGDPLSPLLFNLVVDTALGKLPTEVGFDLAPGVRVGALAFADDVILLAETREGLQIALNAFAKQLSRCGLVVNPDKCGSVSLVPSGRQHKVKVVDGGFVIGQAPIPSRSVLEVWRYLGVDFMGVATITASRVDLGRALARITKAPLKPQQRLRLLRTYLLPKLTYGLVFGRLTAGRLQELDREVRSAVRSWLRFPPGVPSAYIHAPVKSGGLGIVALSACIPSLRRQRLLALQGSSWEVARVAAGLDFVRQQLAWCDRATPSAPKPSSSAEFAAALHESVDGKELRQCSESLISSQWVDWASEGIGARDYRNFHAVRVATLPTAVRCSRGSRGMTDTLCRACRSGNEHLYHVVQQCPRTHGGRILRHDAVAKQIAGALSSSGWDVERERLYHMPSDQGKKPDIVAVKPDRSCIILDV

SEQ ID NO: 24548 - protein, 1072 aa, Apolygus lucorum
MTLWRIGRESLSTGSLTLHFKRPPVMDQTDNMPHNPRLPIGTRGSRGGAQRRPRQGRRPSSPSSSSSSSQPSSSSTASLNHQCAHCEQAFTTGSGLGLHVRRKHPVAANAAINIERVQHRYASEELRRMAADEVVAVRDGVRNINVYLSERFPMRTVIAIKNIRLKPHYKQLVQEAILANSSGASPASPVADVEQQPAIQYPSPGTSGLLAELKTEVLRLGGQVGRIEGYESTYLQDLARRAAEGLDNLENEVAAYLGRIFPRVGDATVTQHQGGPPPRVVLKHPARVAAEVLEEPGENQVQPPLQEFVDFWEPLLSAPSHNPGERVVPPVTTRDSLRSIMCSPVLSDEAHKCRVKNSTSAGPDGISARRWNKAPKTIKLLVLNLLLLAGRPPKALTRSRTVFIPKKGGSGPGGYRRISVSSVVFRHFQKVLASRLQVAGIIGDVQRAFRPADGTAENLTVLQTVISLARMKRRQLHLAALDVAKAFDTVSHLALTDCLRGVGAPSRLIEYVACLYQEGVTVLEAGGEVSGDVRIGRGVRQGDPLSPLLFNLVVDTALGKLPTEVGFDLAPGVRVGALAFADDVILLAETREGLQIALNAFAKQLARCGLVVNPDKCGSVSLVPSGRQHKVKVVDGGFVIGQSPIPSRSVLEVWRYLGVDFMGVATISASRVDLGRALARVTKAPLKPQQKLRLLRTYLLPKLTYGLVFGRLTAGRLQELDRQVRSAVPSWLRFPPGVPSAYVHAPVKSGGLGIVSLLACIPSLRRQRLLALQGSSWEVARAAADLDFVRQQLAWCDRATPSAPKPSLSAEFAAGLHESVDGKELRQCSESPVSSQWVDWASEGIGARDYRHFHAIRMATLPTAVQCSRGSRGTTLPLCRACRSGNEHLYHVVQQCPRTHGGRILRHDAVAKQIAGALSSSGWDVERERLYHMPSDQGKKPDIVAVKPDQSCIILDVQVVNGSLDMEQTWRAKIRKYDRNDLRLAVSELKGVAPNNIRVMAATLSWRGVWCGKSATELRELGISVGVLRGITTRVLLGSYLNWWSFYRGTSLHPSLPPPPSSSSLIPRAGVG

SEQ ID NO: 24549 - protein, 1070 aa, Apolygus lucorum
MDEHLTEPHNPRRPIGTRGSRGGAQRRPRQGRRPSSPSSSSSSSLPSSSSTASLDHQCAHCERAFTSRSGLGVHVRRKHPVAANEEINVERVQPRYASEDLRRMAADEVVAVRNGVRNINVYLSERFPTRTVIAIKNLRLKPHYKQLVQDAILANSSGASPASPVAGVDQQSAIQNPSPGTSGLLADLKTEVLRLGGQVGRIEGYESTYLQDLARRAVEGLDNLEDKVAAYLGRIFPRVGDATVTQHQGGPPPRVVLRGGRRAAKQARRREYHRVQSLWRKHPARVAAEVLEEPGEVQVQPPLQEFVDFWEPLLSAPSHNPGERVVPPVSTRDSLRSILCSQVLLDEAHKCRVKNSTSAGPDGISARRWNKAPNTIKLLILNLLILAGRPPKALTRTRTVFIPKKGGSGPGGYRPISVSSVVFRHFQKVLASRLQVAGVIGDVQRAFRPADGTAENLTVLQTVISLARIKRRQLHLAALDVAKAFDTVSHLALTDCLRGVGAPSRLIEYVACLYHEGVTVLEAGGEVSGDIRIGRGVRQGDPLSPLLFNLVVDTALGKLPTEVGFDLAPGVRVGALAFADDVILLAETREGLQIALNAFAKQLSRCGLVVNPDKCGSVPLVPSGRQHKVKVVDGGFVIGQVPIPSRSVLEVWRYLGVDFMGVATITASRVDLGRALARITKAPLKPQQRLRLLRTYLLPKLTYGLVFGRLTAGRLQELDREVGSAVRSWLRFPPGVPSAYIHAPVKSGGLGIVSLSACIPSLRRQRLLALQGSSWEVARVAAGLDFVRQQLAWCDRATPSAPKPSSSAEFAAALHESVDGKELRQCSESLISSQWVDWASEGIGARDYRNFHAVRVATLPTAVRCSRGSRGMTDTLCRACRSGNEHLYHVVQQCPRTHGGRILRHDAVAKQIAGALSSSGWDVERERLYHMPSDQGKKPDIVAVKPDRSCIILDVQVVNGSMDMEQTWRAKIRKYDRDDLRQAVSELKGVAPNNIRVMAATLSWRGVWCGKSATELRELGISVGVLRGVTRRVLLGSYLNWWSFYRGTSLHPSLPPPPSSSSLIPRAGVG

SEQ ID NO: 24550 - protein, 967 aa, Apolygus lucorum
MAADEAVAVRNGVRNINVYLSERFPMRTVIAIKNICLKPHYKQLVQEVILANSSGASPASPVADVEQQPAIQHPSPGTSGLLADLKTEVLRLGGQVGCIEGYESNYLQDLARRAAEGLDNLENDVAAYLGRIFPRVGDATVTHHQGGPPPRVVLRGGRRAAKQARRREYHRVQSLWRKHPARVAAEVLEEPGENQVQSPLQEFVDFWEPLLSAPSHDPGERVVPPVSTRDSLRSIMCSPVLSDEAHKCHVKNSSSAGPDGISARRWNKAPRTIKLLLLNLLLLAGRPPKALTRTRTVFIPKKGGSGPGGYRPISVSSVVFRHFQKVLASRLQVAGIIGDVQRAFRPADGTVENLTVLQTVISLARMKRRQLHLAALDVAKAFDTVSHFALTDCLRGVGAPSRLIEYVACLYHEGVTVLEAGGEVSGDVRIGRGVRQGDPLSPLLFNLVVDTALGKLPTEVGFDLAPGVRVGALAFADDVILLAETREGLQIALNAFAKQLARCGLVVNPDKCGSVSLVPSGRQHKVKVVDGGFVIGQSPIPSRSVLEVWRYLGVDFMGVATISASRVDLGRALDRVTKAPLKPQQKLRLLRTYLLPKLTYGLVFGRLTAGRLQELDRQVRSAVRSWLRFPPGVPSAYVHAPVKSGGLGVVSLSACIPSLRRQRLLALQGSSWEVARAAADLDFVRQQLAWCDRATPSAPKPSSSAEFAAALHESVDGKELRQCSESPVSSQWVDWASEGIGARDYRHFHAVRMATLPTAVRCSRGSRGTTLPLCRACRSGNEHLYHVVQQCPRTHGGRILRHDAVAKQIAGALSSSGWDVERERLYHMPSDQGKKPDIVAVKPDQSCIILDVQVVNGSLDMEQTWRAKIRKYDRNDLRQAVSELKGVAPNNIRVMAATLSWRGVWCGKSATELRELGISVGVLRGITTRVLLGSYLNWWSFYRGTSLHPSLPPPPSSSSLIPRAGVG

SEQ ID NO: 24551 - protein, 1094 aa, Apolygus lucorum
MTLWRLGRGPLLTGPLTLYMRFPVMDENLTEPHNPRRPIGTRGSRGGAQRRPRQGRRPSSPSSSSSSSLPSSSSTASLDHQCAHCERAFTSRSGLGVHVRRKHPVAANEEIDIERVQPRYASEDLCRMAADEVVAVRNGVRNINVYLSERFPTRTVIAIKNLRLTPHYKQLVQEAILANSGGASPASPVAGMDQQSAIQYPSPGTSGLLADLKTEVLRLGGQVGRIEGYESTYLQDLARRAVEGLDNLEDKVAAYLGRIFPRVGDATVTQHQGGPPPRVVLRGGRRAAKQARRREYHRVQSLWRKHPAHVAAEVLEEPGEDQVQPPLQEFVDFWEPLLSAPSHNPGERVVPPVSTRDSLRSILCSPVLLDEAHKCRVKNSTSAGPDGISARRWNKAPNTIKLLILNLLMLAGRPPKALTRTRTVFIPKKGGSGPGDYRPISVSSVVFRHFQKVLASRLQVAGVIGDVQRAFRPADGTAENLTVLQTVISLARIKRRQLHLAALDVAKAFDTVSHLALTDCLRGVGAPSRLIEYVACLYHEGVTVLEAGGEVSGDVRIGRGVRQGDPLSPLLFNLVVDTALGKLPTEVGFDLAPGVRVGALAFADDVILLAETREGLQIALNAFAKQLSRCGLVVNPDKCGSVSLVPSGRQHKVKVVDGGFVIGQAPIPSRSVLEVWRYLGVDFMGVATITASRVDLGRALARITKAPLKPQQRLRLLRTYLLPKLTYGLVFGRLTAGRLQELDREVRSAVRSWLRFPPGVPSAYIHAPVKSGGLGIVALSACIPSLRRQRLLALQGSSWEVARVAAGLDFVRQQLAWCDRATPSAPKPSSSAEFAAALHESVDGKELRQCSESLISSQWVDWASEGIGARDYRNFHAVRVATLPTAVRCSRGGRGMTDTLCRACRSGNEHLYHVVQQCPRTHGGRILRHDAVAKQIAGALSSSGWDVERERLYHMPSDQGKKPDIVAVKPDRSCIILDVQVVNGSTDMEQTWRAKIRKYDRDDLRQAVSELKGVEPNNIRVMAATLSWRGVWCGKSATELRELGISVGVLRGVTRRVLLGSYLNWWSFYRGTSLHPSLPPPPSSSSLIPRAGVG

SEQ ID NO: 24552 - protein, 1095 aa, Apolygus lucorum
MTLWRLGRGPLSTGSLTLHLKRPPVMEQTVREPHNPRQPIGSRGIRGGAQRRPRQGRRPSSPSSSSSSSQPSSSSTASLNHQCAHCERAFTTRSGLGLHVSRKHPVAANAAIDIERIQHRYASEELRRMAADEAVAVRNGVRNINVYLNERFPTRTVIAIKNIRLKPHYKQLVQEAILANSSGASPASPIADVEQQPAIQYPSPGTSGLLADLKTEVLRLGGQVGRIEGYESTYLQDLVRRAAEGLDNLEDEVAAYLGRIFPRVGDVTVTQHQGGPPPRVVLRGGRRAAKQARRREYHRVQSLWRKHPARVAAEVLEEPGENQVQPPLQEFVDFWEPLLSAPSHDPGECVVPPVSTRDSLRSIMCSPVLSDEAHKCRVKNSTSAGPDGVSARRWNKAPKTIKLLILNLLLLAGRPPKALTRTRTVFIPKKGGSGPGGYRPISVSSVVFRHFQKVLASRLQVAGVIGDVQRAFRSADGTAENLTVLQTVISLARIKRRQLHLAALDVAKAFDTVSHLALTDCLRGVGAPSRLIEYVACLYQEGVTVLEAGGEVSGDIRIGRGVRQGDPLSPLLFNLVVDTALGKLPTEVGFDLAPGVRVGALAFADDVILLAETREGLQIALNAFAKQLARCGLVVNPDKCGSVSLVPSGRQHKVKVVDGGFVVGQSPIPSRSVLEVWRYLGVDFMGVATITTSRVDLGRALARVTKAPLKPQQKLRLLRTYLLPKLTYGLVFGRLTAGRLQQLDREVRSAVRSWLKFPPGVPSAYFHAPVKSGGLGIVSLSACIPSLRRRRLLALQGSSWEVARAAADLDFVRQQLAWCDRATPSAPKPSSSAELAAALHESVDGKELRQCSESLVSSQWVDWASEGIGARDYRHFHAIRVASLPTAVRCSRGSRGTTLPLCRACRSGNEHLYHVVQQCPRTHGGRILRHDAVAKQIAGALSSSGWDVERERLYHMPSDQGKKPDIVAVKPDQSCIILDVQVVNGSLDMEQTWRAKIRKYDTNDLRQAVSELKGVAPNNIRVMAATLSWRGVWCGKSATELRELGISVGVLRGITTRVLLGSYLNWWSFYRGTSLHPSLPPPPSSSSLIPRAGVG

SEQ ID NO: 24553 - protein, 1070 aa, Apolygus lucorum
MERNIEWPHNPRQPIGSRGIRGGAQRRPRQGRRPSSPSSSSSSSQPSSSSTASLNHQCAHCERAFTTRSGLGLHISRKHPVAANAAIDIERIQHRYASEELRRMAADEAVAVRNGVRNINVYLNERFPTRTVIAIKNIRLKPHYKQLVQEAILANSSGASPASPIADVEQQPAIQYPSPGTSGLLADLKTEVLRLGGQVGRIEGYESTYLQDLVRRAAEGLDNLEDEVAAYLGRIFPRVGDATVTQHQGGPPPRVVLRGGRRAAKQARRREYHRVQSLWRKHPARVAAEVLEEPGENQVQPPLQEFVDFWEPLLSAPSHDPGERVVPPVSTRDSLRSIMCSPVLSDEAHKCRVKNSTSAGPDGVSARRWNKAPKTIKLLILNLLLLAGRPPKALTRTRTVFIPKKGGSGPGGYRPISVSSVVFRHFQKVLASRLQVAGVIGDVQRAFRPADGTAENLTVLQTVISLARIKRRQLHLAALDVAKAFDTVSHLALTDCLRGVGAPSRLIEYVACLYQEGVTVLEAGGEVSGDIRIGRGVRQGDPLSPLLFNLVVDTALGKLPTEVGFDLAPGVRVGALAFADDVILLAETREGLQIALNAFAKQLASCGLVVNPDKCGSVSLVPSGRQHKVKVVDGGFVVGQSPIPSRSVLEVWRCLGVDFMGVATITASRVDLGRALARVTKAPLKPQQKLRLLRMYLLPKLTYGLVFGRLTAGRLQQLDREVRSAVRSWLKFPPGVPSAYVHAPVKSGGLGIVSLSACIPSLRRRRLLALQGSSWEVARAAADLDFVRQQLAWCDRATPSAPKPSSSAEFAAALHESVDGKELRQCSESLVSSQWVDWASEGIGARDYRHFHAIRVASLPTAVRCSRGSRGTTLPLCRACRSGNEHLYHVVQQCPRTHGGRILRHDAVAKQIAGALSSSGWDVERERLYHMPSDQGKKPDIVAVKPDQSCIILDVQVVNGSLDMEQTWRAKIRKYDTNDLRQAVSELKGVAPNNIRVMAATLSWRGVWCGKSATELRELGISVGVLRGITTRVLLGSYLNWWSFYRGTSLHPSLPPPPSSSSLIPRAGVG

SEQ ID NO: 24554 - protein, 1070 aa, Apolygus lucorum
METNTDRPHNPRQPIGSRGIRGGAQRRPWQGRRPSSPSSSSSSSLPSSSSTASLDHQCAHCERAFTTRSGLGVHIRRKHPVAANDEIDVERVQPRYASEDLRRMAADEVVAVRNGVRNINVYLSERFPTCTVIAIKNLRLKPHYKQLVQEAILANSGGASPASPIAGVDQQSAIQYPSPGTSGLLADLKTQVLRLGGQVGRIEGYESTYLQDLARGAAEGLDNLEDKVAAYLGRIFPRVGDATVTQHQGGPPPRVVLRGGRRAAKQARRREYHRVQSLWRKHPARVAAEVLEEPGEDQVKPPLQEFVDFWEPLLSAPSHNPEERVVPPVSTRDSLRGILCSPVLLDEAHKCRVKNSTSAGPDGVSARRWNKVPNTIKLLILNLLILAGRPPKALTRTRTVFIPKKGGSGPGGYRPISVSSVVFRHFQKVLASRLQVAGVIGDVQRAFRPADGTAENLTVLQTVISLARIKRRQLHLAALDVAKAFDTVSHLALTDCPRGVGAPSRLIEYVACLYREGVTVLEAGGEVSRDIVIGRGVRQGDPLSPLLFNLVVDTALGKLPTEVGFDLAPGVRVGALAFADDVILLAETREGLQIALNAFAKQLSRCGLVVNPDKCGSVSLVPSGRQHKVKVVDGGFVIGQAPIPSRSVLEVWRYLGVDFMGVATITASRVDLGRALARVTKAPLKPQQRLRLLRTYLLPKLTYGLVFGRLTAGRLQELDREVRSAVRSWLRFPPGVPSAYIHAPVKSGGLGIVSLSTCIPSLRRQRLLALQGSSWEVARVAAGLDFVRQQLAWCDRATPSAPKPSSSAEFAAALHESVDGKELRQCSKSLISSQWVDWASEGIGARDYRNFHAVRVATLPTAVRCSRGSRGMTDTLCRACRSGNEHLYHVVQQCPRTHGGRILHHDAVAKQIAGALSSSGWDVERERLYHMPSDQGKKPDIVAVKPDRSCIILDVQVVNGSMDMEQTWRAKIRKYDRDDLRQAVSELKGVEPNNIRVMAATLSWRGVWCGKSATELRELGISVGVLRGVTRRVLLGSYLNWWSFYRGTSLHPSLPPQPSSSSLIPRAGVG

SEQ ID NO: 24555 - protein, 1095 aa, Apolygus lucorum
MTLWRIGREPLPTGSLTLHFKRPPVMENNQEMPHNPRLPIGTRGSRGGAQRRPRQGRRPSSPSSSSSSSLPSSSSTASLNHQCAHCERAFTTRSGLGLHVRRKHPVAANAAIDIERVQHRYASEELRRMAADEVVAVRDGVRNINVYLSERFPMRTVIAIKNIRLKPHYKQLVQEAILGNSGGASPASPIADVEQQPAIQYPSPGTSGLLADLKTEVWRLGGQVGRIEGYESTYLQDLARRAAEGLDNLENEVAAYLGRIFPRVGDATVTQHQGGPPPRVVLRGGRRAAKQARRREYHRVQSLWRKHPARVAAEVLEEPGENQVQPPLQEFVDFWEPLLSAPSHDPGERVVPPVSTRDSLRSVMCSPVLSDEAHKCRVKNSTSAGPDGISARRWNKAPKTIKLLVLNLLLLAGRPPKALTRARTVFIPKKGGSGPGGYRPISVSSVVFRHFQKVLASRLQVAGIIGDVQRAFRPADGTAENLTVLQTVISLARMKRRQLHLAALDVAKAFDTVSHLALTDCLRGVGAPSRLIEYVACLYQEGVTVLEAGGEVSGDVRIGRGVRQGDPLSPLLFNLVVDTALGELPTEVGFDLAPGVRVGALAFADDVILLAETREGLQIALNAFAKQLARCGLVVNPDKCGSVSLVPSGRHHKVKVVDGGFVIGQSPIPSRSVLEVWRYLGVDFMGVATISASRVDLGRALARVTKAPLKPQQKLRLLRTYLLPKLTYGLVFGRLTAGRLQELDRQVRSAVRSWLRFPPGVPSAYFHSPVKSGGLGIVSLSACIPSLRRQRLLALQGSSWEVARAAADLDFVRQQLAWCDRATPSAPKPSSSAEFAAALHESVDGKELRQCSESPVSSQWVDWASEGIGARDYRHFHAVRIATLPTAVRCSRGSRGTTLPLCRACRSGNEHLYHVVQQCPRTHGGRILRHDAVAKQIAGALSSSGWDVERERLYHMPSDQGKKPDIVAVKPDQSCIILDVQVVNGSLDMEQTWRAKIRKYDRNDLRQAVSELKGVAPNNIRVMAATLSWRGVWCGKSATELRELGISVGVLRGITTRVLLGSYLNWWSFYRGTSLHPSLPPPPSSSSLIPRAGVG

SEQ ID NO: 24556 - protein, 1082 aa, Apolygus lucorum
MFHALRTSVGLISRDKADQPHNPRQPIGSRGIRRGAQRRPRQGRRPSSPSSSSSSSLPSSSSTASLDHQCAHCERAFTSRSGLGVHVRRKHPVAANAAIEIERVQPRYASEDLRRMAADEVVAVRNGVRNINVYLSERFPTRTVIAIKNLRLKPHYKQLVQEAILANSGGASPASPIAGVDQQSAIQYPSPGTSGLLADLKTEVLRLGGQVGRIEGYESTYLQDLARRAAEGLDNLEDMVAAYLGRIFPRVGDATVTRHQGRPPPRVVLRGGRRAAKQARRQEYHRVQSLWRKHPARVAAEVLEEPGEDQVQPPLQEFVDFWEPLLSAPSHNPGERVVPPVSTRDSLRSILCSPVLLDEAHKCRVKNSTSAGPDGVSARRWNKAPNTIKLLILNLLMLAGRPPKALTRTRTVFIPKKGGSGPGGYRPISVSSVVFRHFQKVLASRLQVAGVIGDVQRAFRPADGTAENLTLLQTVISLARIKRRQLHLAALDVAKAFDTVSHFALTDCLRGVGAPSRLIEYVDCLYHEGVTVLEAGGEVSGDVRIGRGVRQGDPLSPLLFNLVVDTALGKLPTEVGFDLAPGVRVGALAFADDVILLAETREGLQITLNAFAKQLARCGLVVNPDKCGSVSLVPSGRQHKVKVVDGGFVVGQSPIPSRSVLEVWRYLGVDFMGVATITTSRVDLGRALARVTKAPLKPQQKLRLLRTYLLPKLTYGLVFGRLTAGRLQELDRQVRSAVRSWLKFPPGVPSAYFHAPVKSGGLGIVSLSACIPSLRRQRLLALQGSSWEVARAAADLDFVRQQLAWCDRATPSAPKPSSSAEFAAALHESVDGKELRQCSESLVSSQWVDWASEGIGACDYRHFHAVRMATLPTAVRCSRGSRGTTLPLCRACRSGNEHLYHVVQQCPRTHGGRILRHDAVAKQIAGALSSSGWDVERERLYHMPSDQGKKPNIVAVKPDQSCIILDVQVVNGSLDMEQTWRAKIRKYDRDDLRQAVSELKGVVPNNIRVMAATLSWRGVWCGKSATELRELGISVGVLRGITTRVLLGSYLNWWSFYRGTSLHPSLPPPPSSSSLIPRAGVG

SEQ ID NO: 24557 - protein, 1075 aa, Apolygus lucorum
MRFPVMNTEPTEPHNPRQPIGSRGIRGGAQRRPRQGRRPSSPSSSSSSSLPSSSSTASLNHQCAHCERAFTTRSGLGLHIRRKHPVAANAAIDIERIQPRYASEELRRMAADEAVAVRNGVRNINVYLNERFPTRTVIAIKNICLKPYYKQLVQEAILANSSGASPASPIADVEQQSAIQYPSPGTSGLLADLKTEVLRLGGQVGRIEGYESTYLQDLVRRAVEGLDNLEDEVAAYLGRIFPRVGDATVTRHQGGPPPRMVLRGGRRAAKQARRREYHWVQSLWRKHPARVAAEVLEEPGENQVQPPLQEFVDFWEPLLSAPSHDPGECVVPPVSTRDSLRSIMCSPVLSDEAHKCRVRNSTSAGPDGVSARRWNKAPKTIKLLILNLLLLAGRPPKALTRTRTVFIPKKGGSGPGGYRPISVSSVVFRHFQKVLASRLQVAGVIGDVQRAFRPADGTAENLTVLQTVISLARIKRRQLHLAALDVAKAFDTVSHLALTDCLRGVGAPSRLIEYVACLYQEGVMVLEAGGEVSGDIRIGRGVRQGDPLSPLLFNLVVDTALGKLPTEVGFDLAPGVRVGALAFADDVILLAETREGLQIALNAFAKQLAGCGLVVNPDKCGSVSLVPSGRQHKVKVVDGGFVVGQSSIPSRSVLEVWRYLGVDFMGVATITASRVDLGRALARVTKAPLKPQQKLRLLRTYLLPKLTYGLVFGRLTAGRLQELDREVRSAVRSWLRFPPGVPSAYVHAPVKSGGLGIVSLSACIPSLRRQRLLALQGSSWEVARAAADLDFVRQQLAWCDRATPSAPKPSLSAEFAAALHESVDGKELRHCSESLLSSQWVDWASEGIGARDYRHFHAIRVASLPTAVRCSRGSCGTTLPLCRACRSGNEHLYHVVQQCPRTHGGRILRHDAVAKQIAGALSSSGWDVERERLYRMPSDQGKKPDIVAVKPDQSCIILDVQVVNGSLDMEQTWRAKIRKYDTNDLRQAVSELKGVAPNNIRVMAATLSWRGVWCGKSATELRELGISVGVLRGITTRVLLGSYLNWWSFYRGTYLHPSLPPPPSSSSLIPRAGVG

SEQ ID NO: 24558 - protein, 1095 aa, Apolygus lucorum
MTLWRIGREPLSTGSLTLHFKRPPVMDQTDNMPHNPRLPIGTRGSRGGAQRRPRQGRRPSSPSSSSSSSQPSSSSTASLNHQCAHCERAFTTRSGLGLHVRRKHPVAANAAIDIERVQHRYASEELRRMAADEVVAVRDGVRNINVYLSERFPMRTVIAIKNIRLKPHYKQLVQEAILANSSGASPASPVADVEQQPAIQYPSPGTSGLLADLKTEVLRLGGQVGRIEGYESTYLQDLARRAAEGLDNLENEVAAYLGRIFPRVGDATVTQHQGGPPPRVVLRGGRRAAKQARRREYHRVQSLWRKHPARVAAEVLEEPGENQVQPPLQEFVDFWEPLLSAPSHDPGERVVPPVSTRDSLRSIMCSPVLSDEAHKCRVKNSTSAGPDGISARRWNKAPKTIKLLVLNLLLLAGRPPKALTRARTVFIPKKGGSGPGGYRPISVSSVVFRHFQKVLASRLQVAGIIGDVQRAFRPADGTAENLTVLQTVISLARMKRRQLHLAALDVAKAFDTVSHLALTDCLRGVGAPSRLIEYVACLYQEGVTVLEAGGEVSGDVRIGRGVRQGDPLSPLLFNLVVDAALGKLPTEVGFDLAPGVRVGALAFADDVILLAETREGLQIALNAFAKQLARCGLVVNPDKCGSVSLVPSGRQHKVKVVDGGFVIGQSPIPSRSVLEVWRYLGVDFMGVATISASRVDLGRALARVTKAPLKPQQKLRLLRTYLLPKLTYGLVFGRLTAGRLQELDRQVRSAVRSWLRFPPGVPSAYVHAPVKSGGLGIVSLSACIPSLRRQRLLALQGSSWEVARAAADLDFVRQQLAWCDRATPSAPKPSSSAEFAAALHESVDGKELRQCSESPVSSQWIDWASEGIGARDYRHFHAVRMATLPTAVRCSRGSRGTTLPLCRACRSGNEHLYHVVQQCPRTHGGRILRHDAVAKQIAGALSSSGWDVERERLYHMPSDQGKKPDIVAVKPDQSCIILDVQVVNGSLDMEQTWRAKMRKYDRNDLRQAVSELKGVAPNNIRVMAATLSWRGVWCGKSATELRELGISVGVLRGITTRVLLGSYLNWWSFYRGTSLHPSLPPPPSSSSLIPRAGVG

SEQ ID NO: 24559 - protein, 1058 aa, Apolygus lucorum
MVPYENYHLRTDGSHCACANVNSSPSSSSSSSLPSSSSTASLNHQCAHCERAFTTRSGLGLHIRRKHPVAANAAIDIERIQPRYVSEELRRMTADEAVAVRNGVRNINVYLNERFPTRTVIAIKNIRLKPHYKQLVQEAILANSSGASPASPVADVEQQPAIQYPSPGTSGLLADLKTGVLRLGGQVGRIEGYESTYLQDLVRRAVEGLDNLEDEVAAYLGRIFPRVGDATVTRHQGGPPPRMVLRGGRRAAKQARRREYHRVQSLWRKHPARVAAEVLEEPGENQVQPPLQEFVDFWEPLLSAPSHDPGECVVPPVSTRDSLRSIMCSPVLSDEAHKCRVRNSTSAGPDGVSARRWNKAPKTIKLLILNLLLLAGRPPKALTRTRTVFIPKKGGSGPGGYRPISVSSVVFRHFQKVLASRLQVAGVIGDVQRAFRPADGTAENLTVLQTVISLARIKRRQLHLAALDVAKAFDTVSHLALTDCLRGVGAPSRLIEYVACLYQEGVTVLEAGGEVSGDIRIGRGVRQGDPLSPLLFNLVVDTALGKLPTEVGFDLAPGVRVGALAFADDVILLAETREGLQIALNAFAKQLAGCGLVVNPDKCGSVSLVPSGRQHKVKVVDGGFVVGQSSIPSRSVLEVWRYLGVDFMGVATITASRVDLGRALARVTKAPLKPQQKLRLLRTYLLPELTYGLVFGRLTAGRLQELDREVRSAVRSWLKFPPGVPSAYVHAPVKSGGLGIVSLSACIPSLRRQRLLALQGSSWEVARAAADLDFVRQQLAWCDRATPSAPKPSSSAEFAAALHESVDGKELRQCSESLLSSQWVDWASEGIGARDYRHFHAIRVASLPTAVRCSRGGRGTTLPLCRACRSGNEHLYHVVQQCPRTHGGRILRHDAVAKQIAGALSSSGWDVERERLYRMPSDQGKKPDIVAVKPDQSCIILDVQVVNGSLDMEQTWRAKIRKYDTNDLRQAVSELKGVAPNNIRVMAATLSWRGVWCGKSATELRELGISVGVLRGITTRVLLGSYLNWWSFYRGTSLHPSLPPPPSSSSLIPRAGVG

SEQ ID NO: 24560 - protein, 930 aa, Apolygus lucorum
MIPYENHHLRTDSSHRACANVNFLVTDVEQQPAIQYPSPGTSGLLADLKTEVLRLGGQVGRIEGYESTYLRDLVRRAAEGLDNLEDEVAAYLGRIFPRVGDVTVTQHQGGPPPRVVLRGGRRAAKQARRREYHRVQSLWRKHPARVAAEVLEEPGENQVQPPLQEFVDFWEPLLSAPSHDPGECVVPPVSTRDSLRSIMCSPVLSDEAHKCRVKNSTSAGPDGVSARRWNKAPKTIKLLILNLLLLAGRPPKALTRTRTVFIPKKGGSGPGGYRPISVSSVVFRHFQKVLASRLQVAGVIGDVQRAFRSADGTAENLTVLQTVISLARIKRRQLHLAALDVAKAFDTVSHLALTDCLRGVGAPSRLIEYVACLYQEGVTVLEAGGEVSGDIRIRRGVRQGDPLSPLLFNLVVDTALGKLPTEVGFDLAPGVRVGALAFADDVILLAETREGLQIALNAFAKQLARCGLVVNPDKCGSVSLVPSGRQHKVKVVDGGFVVGQSPIPSRSVLEVWRYLGVDFMGVATITTSRVDLGRALARVTKAPLKPQQKLRLLRTYLLPKLTYGLVFGRLTAGRLQQLDREVRSAVRSWLKFPPGVPSAYFHAPVKSGGLGIVSLSACIPSLRRRRLLALQGSSWEVARAAADLDFVRQQLAWCDRATPSAPKPSSSAEFAAALHESVDGKELRQCSESLVSSQWVDWASEGIGARDYRHFHAIRVASLPTAVRCSRGSRGTTLPLCRACRSGNEHLYHVVQQCPRTHGGRILRHDAVAKQIAGALSSSGWDVERERLYHMPSDQGKKPDIVAVKPDQSCIILDVQVVNGSLDMEQTWRAKIRKYDTNDLRQAVSELKGVAPNNIRVMAATLSWRGVWCGKSATELRELGISVGVLRGITTRVLLGSYLNWWSFYRGTSLHPSLPPPPSSSSLIPRAGVG

SEQ ID NO: 24561 - protein, 1003 aa, Apolygus lucorum
MDNNSTRPHNPRQPIGSRGIRGGAQRRPRQGRRPSSPSSSSSSSLPSSSSTASLDHQCAHCERAFTTRSGLGVHIRRKHPIAANDEIDVERVQPRYASEDLRRMAADEVVAVRNGVRNINVYLSERFPTRTVIAIKNLRLKPHYKQLVQEAILANSGGASPASPIADVEQQPAIQYPSPGTTGLLADLKTEVLRLGGQVGRIEGYESTYLQDLARRAAEGLDNLEDKVAAYLGRIFPRVGDATVTQHQGGPPPRVVLRGGRRAAKQARRREYHRVQSLWRKHPARVAAEVLEEPGEDQVQPPLQEFVDFWEPLLSAPSHNPGERVVPPVSTRDSLRSILCSPVLLDEAHKCRVKNSTSAGPDGVSARRWNKVPNTIKLLILNLLILAGRPPKALTRTRTVFIPKKGGSGPGGYRPISVSSVVFRHFQKVLASRLQVAGVIGDVQRAFRPADGTAENLTVLQTVISLARIKRRQLHLAALDVAKAFDTVSHLALTDCLRGVGAPSRLIEYVTCLYREGVTVLEAGGEVSRDIVIGRGVRQGDPLSPLLFNLVVDTALGKLPTEVGFDLAPGVRVGALAFADDVILLAETREGLQIALNAFAKQLSRCGLVVNPDKCGSVSLVPSGRQHKVKVVDGGFVIGQAPIPSRSVLEVWRYLGVDFMGVATITASRVDLGGALARVTKAPLKPQQRLRLLRTYLLPKLTYGLVFGRLTAGRLQELDREVRSAVRSWLRFPPGVPSAYIHAPVKSGGLGIVSLSACIPSLRRQRLLALQGSSWEVARVAAGLDFVRQQLAWCDRATPSAPKPSSSAEFAAALHESVDGKELRQCSESLISSQWVDWASEGIGARDYRNFHAVRVATLPTAVRCSRGSRGMTDTLCRACRSGNEHLYHVVQQCPRTHGGRILRHDAVAKQLAGALSSSGWDVERERLYHMPSDQGKKPDIVAVKPDRSCIILDVQVVNGSMDMEQTWRAKIRKYDRDDLRQAVSELKGVEPNNIKVMAATLS

SEQ ID NO: 24562 - protein, 1070 aa, Apolygus lucorum
MEQNINEPHNPRQPIGSRGIRGGAQRRPRQGRRPSSPSSSSSSSLPSSSSTASLNHQCAHCERAFTTRSGLGLHIRRKHPVAANAAIDIERIQPRYASEELRRMAADEAVAVRNGVRNINVYLNERFPTRTVIAIKNIRLKPHYKQLVQEAILANSSGASPASPIADVEQQPAIQYPSPGTSGLLADLKTEVLRLGGQVGRIEGYESTYLQDLVRRAVEGLDNLEDEVAAYLGRIFPRVGDATVTRHQGGPPPRMVLRGGRRAAKQARRREYHRVQSLWRKHPARVAAEVLEEPGENQVQPPLQEFVDFWEPLLSAPSHDPGECVVPPVSTRDSLRSIMCSPVLSDEAHKCRVRNSTSAGPDGVSARRWNKAPKTIKLLILNLLLLAGRPPKALTRTRTVFIPKKGGSGPGGYRPISVSSVVFRHFQKVLASRLQVAGVIGDVQRAFRPADGTAENLTVLQTVISLARIKRRQLHLAALDVAKAFDTVSHLALTDCLRGVGAPSRLIEYVACLYQEGVTVLEAGGEVSGDIRIGRGVRQGDPLSPLLFNLVVDTALGKLPTEVGFDLAPGVRVGALAFADDVILLAETREGLQIALNAFAKQLAGCGLVVNPDKCGSVSLVPSGRQHKVKVVDGGFVVGQSPIPSRSVLEVWRYLGVDFMGVATITASRVDLGRALARVTKAPLKPQQKLRLLRTYLLPKLTYGLVFGRLTAGRLQELDREVRSTVRSWLKFPPGVPSAYVHAPVKSGGLGIVSLSACIPSLRRRRLLALQGSSWEVARAAADLDFVRQQLAWCDRATPSAPKPSSSAEFAAALHESVDGKELRQCSESLVSSQWVDWASEGIGARDYRHFHAIRVASLPTAVRCSRGSRGTTLPLCRACRSGNEHLYHVVQQCPRTHGGRILRHDAVAKQIAGALSSSGWDVERERLYRMPSDQGKKPDIVAVKPDQSCIILDVQVVNGSLDMEQTWRAKIRKYDTNDLRQAVSELKGVAPNNIRVMAATLSWRGVWCGKSATELRELGISVGVLRGITTRVLLGSYLNWWSFYRGTSLHPSLPPPPSSSSLIPRAGVG

SEQ ID NO: 24563 - protein, 1094 aa, Apolygus lucorum
MTLWRIGREPLSTGSLTLSLRFPVMDKNQTEPHNPRRPIGTRGSRGGAQRRPRQGRRPSSPSSSSSSSLPSSSSTASLDHQCAHCERAFTSRSGLGVHVRRKHPVAANEEINVERVQPRYASEDLRRMAADEVVAVRNGVRNINVYLSERFPTRTVIAIKNLRLKPHYKQLVQEAILANSGGASPASPVAGVDQQSAIQYPSPGTSGLLADLKTEVLRLGGQVGRIEGYESTYLRDLARRAAEGLDNLEDEVAAYLGRIFPRVGDATVTQHQGGPPPRMVLRGGRRAAKQARRQEYHRVQSLWRKHPARVAAEVLEEPGEDQVQPPLQEFVDFWEPLLSAPSHNPGERVVPPVSTRDSLRSILCSPVLLDEAHKCRVKNSTSAGPDGVSARRWNKAPNTIKLLILNLLMLAGRPPKALTRTRTVFIPKKGGSGPGGYRPISVSSVVFRHFQKVLASRLQVAGVIGDVQRAFRPADGTAENLTVLQTVISLARIKRRQLHLAALDVAKAFDTVSHLALTDCLRGVGAPSRLIEYVACLYHEGVTVLEAGGEVSGDVRIGRGVRQGDPLSPLLFNLVVDTALGKLPTEVGFDLAPGVRVGALAFADDVILLAETREGLQIALNAFAKQLSRCGLVVNPDKCGSVSLVPSGRQHKVKVVDGGFVIGQAPIPSRSVLEVWRYLGVDFMGVATITASRVDLGRALARITKAPLKPQQRLRLLRTYLLPKLTYGLVFGRLTAGRLQELDREVRSAVRSWLRFPPGVPSAYIHAPVKSGGLGIVSLSACIPSLRRQRLLALQGSSWEVARVAAGLGFVRQQLAWCDRATPSAPKPSSSAEFAAALHESVDGKELRQCSESLISSQWVDWASEGIGARDYRNFHAVRVATLPTAVRCSRGSRGMTDTLCRACRSGNEHLYHVVQQCPRTHGGRILRHDAVAKQIAGALSSSGWDVERERLYHMPSDQGKKPDIVAVKPDRSCIILDVQVVNGSLDMEQTWRAKIRKYDRDDLRQAVSELKGVEPNNIRVMAATLSWRGVWCGKSATELRELGISVGVLRGVTRRVLLGSYLNWWSFYRGTSLHPSLPPPPSSSSLIPRAGVG

SEQ ID NO: 24564 - protein, 1095 aa, Apolygus lucorum
MTLWRIGREPLSTGSLTLQFKRPPVMDTENNQPHNPRLPIGTRGSRGGAQRRPRQGRRPSSPSSSSSSSVPSSSSTASLNHQCAHCERAFTTRSGLGLHVRRKHPVAANAAIDIERVQHRYASEELRRMAADEVVAVRDGVRNINVYLSERFPMRTVIAIKNIRLKPHYKQLVQEAILANSSGASPASPIAGVEQQPAIQYPSPGTSGLLADLKTEVLRLGGQVGRIDGYESTYLQDLARRAAEGLDNLENEVAAYLGRIFPRVGDATVTQHQEGPPPRVVLRGGRRAAKQARRREYHRVQSLWRKHPARVAAEVLEEPGENQVQPPLQEFVDFWEPLLSAPSHDPGERVVPPVSTRDSLRSIMCSPVLSDEAHKCRVKNSTSAGPDGISARRWNKAPKTIKLLVLNLLLLAGRPPKALTRARTVFIPKKGGSGPGGYQPISVSSVVFRHFQKVLASRLQVAGIIGDVQRAFRPADGTAENLTVLQTVISLARMKRRQLHLAALDVAKAFDTVSHLALTDCLRGVGAPSRLIEYVACLYREGVTVLEAGGEVSGDVRIGRGVRQGDPLSPLLFNLVVDTALGKLPTEVGFDLAPGVRVGALAFADDVILLAETREGLQIALNAFAKQLARCGLVVNPDKCGSVSLVPSGRQHKVKVVDGGFVIGQSPIPSRSVLEVWRYLGVDFMGVATISASRVDLGRALARVTKAPLKPQQKLRLLRTYLLPKLTYGLVFGRLTAGRLQELDRQVRSAVRSWLRFPPGVPSAYVHAPVKSGGLGIVSLSACIPSLRRQRLLALQGSSWEVARAAADLDFVRQQLAWCDRATPSAPKPSSSAEFTAALHESVDGKELRQCSESPVSSQWVDWASEGIGARDYRHFHAVRMATLPTAVRCSRSSRGTTLPLCRACRSGNEHLYHVVQQCPRTHGGRILRHDAVAKQIAGALSSSGWDVERERLYHMPSDQGKKPDIVAVKPDQSCIILDVQVVNGSLDMEQTWRAKIRKYDRNDLRQAVSELKGVAPNNIRVMAATLSWRGVWCGKSATELRELGISVGVLRGITTRVLLGSYLNWWSFYRGTSLHPSLPPPPSSSSLIPRAGVG

SEQ ID NO: 24565 - protein, 1070 aa, Apolygus lucorum
MDDNTTRPHNPRQPIGSRGIRGGAQRRPRQGRRPSSPSSSSSSSLPSSSSTASLDHQCAHCERAFTSRSGLGVHVRRKHPVAANAAIGIERVQPRYASEDLRRMAADEVVAVRNGVRNINVYLSERFPTRTVIAIKNLRLKPHYKQLVQEAILANSGGASPASPVAGMDQQSAIQYPSPGTSGLLADLKTEVLRLRGQVGRIEGYESTYLQDLARRAAEGLDNLEDEVAAYLGRIFPRVGDATVAQHQGGPPPRVVLRGGRRAAKQARRREYHRVQSLWRKHPARVAAEVLEEPGEDQVQPPLQEFVDFWEPLLSAPSHNPGERVVPPVSTRDSLRSILCSPVLLDEAHKCRVKNSTSAGPDGISARRWNKAPNTIKLLILNLLMLAGRPPKALTRTRTVFIPKKGGSGPGGYRPISVSSVVFRHFQKVLASRLQVAGVIGDVQRAFRPADGTAENLTVLQTVISLARIKRRQLHLAALDVAKAFDTVSHLALTDCLRGVGAPSRLIEYVACLYHEGVTVLEAGGEVSGDVRIGRGVRQGDPLSPLLFNLVVDTALGKLPTEVGFDLAPGVRVGALAFADDVILLAETREGLQIALNAFAKQLSRCGLVVNPDKCGSVSLVPSGRQHKVKVVDGGFVIGQAPVPSRSVLEVWRYLGVDFMGVATITASRVDLGRALARITKAPLKPQQRLRLLRTYLLPKLTYGLVFGRLTAGRLQELDREVRSAVRSWLKFPPGVPSAYIHAPVKSGGLGIVALSACIPSLRRQRLLALQGSSWEVARVAAGLDFVRQQLAWCDRATPSAPKPSSSAEFAAALHESVDGKELRQCSESLISSQWVDWASEGIGARDYRNFHAVRVATLPTAVRCSRGSRGMTDTLCRACRSGNEHLYHVVQQCPRTHGGRILRHDAVAKQIAGALSSSGWDVERERLYHMPSDQGKKPDIVAVKPDRSCIILDVQVVNGSMDMEQTWRAKIRKYDRDDLRQAVSELKGVAPNNIRVMAATLSWRGVWCGKSATELRELGISVGVLRGVTRRVLLGSYLNWWSFYRGTSLHPSLPPPPSSSSLIPRAGVG

SEQ ID NO: 24566 - protein, 816 aa, Apolygus lucorum
MVLRGGRRAAKQARRREYHRVQSLWRKHPARVAAEVLEEPGENQVQPPLQEFVDFWEPLLSAPSHNPGERVVPPVSTRDSLRGIMCSPVLSDEAHKCRVRNSTSAGPDGVSARRWNKAPKTIKLLILNLLLLSGRPPKALTRTRTVFIPKKGGSGPGGYRPISVSSVVFRHFQKVLASRLQVAGVIGDVQRAFRPADGTAENLTVLQIVISLARIKRRQLHLAALDVAKAFDTVSHLALTDCLRGVGAPSRLIEYVACLYQEGVTVLEAGGEVSGDVRIGRGVRQGDPLSPLLFNLVVDTALGKLPTEVGFDLAPGVRVGALAFADDVILLAETREGLQIALNAFAKQLARCGLLVNPDKCGSVSLVPSGRQHKVKVVDGGFVVGQSPIPSRSVLEVWRYLGVDFMGVATITASRVDLGRALARVTKAPLKPQQKLRLLRTYLLPKLTYGLVFGRLTAGRLQQLDREVRSAVRSWLKFPPGVPSAYIHAPVKSGGLGIVSLSACIPSLRRRRLLALQGSSWEVARAAADLDFVRQQLAWCDRATPSAPKPSSSAEFAAALHESVDGKELRQCSESLVSSQWVDWASEGIGARDYRHFHAIRVASLPTAVRCSRGSRGTTLPLCRACRSGNEHLYHVVQQCPRTHGGRILRHDAVAKQIAGALSSSGWDVERERLYHMPSDQGKKPDIVAVKPDQSCIILDVQVVNGSLDMEQTWRAKIRKYDTNDLRQAVSELKGVAPNNIRVMAATLSWRGVWCGKSATELRELGISVGVLRGITTRVLLNSYLNWWSFYRGTSLHPSLPPPPSSSSLIPRAGVG

SEQ ID NO: 24567 - protein, 1070 aa, Apolygus lucorum
METTEEEPHNPRQPIGLRGIRGGAQRRPRQGRRPSSPSSSSSSSLPSSSSTASLNHQCAHCERAFTTRSGLGLHIRRKHPVAANDAIDIERIQHRYASEELRRMAADEAVAVRNGVRNINVYLNERFPTRTVIAIKNIRLKPHYKQLVQEAILANSSGASPASPIADVEQQPAIQYPSPGTSGLLADLKTEVLRLGGQVGRIEGYESTYLQDLVRRAAEGLDNLEDEVAAYLGRIFPWVGDATVTQHQGGPPPRVVLRGGRRAAKQARRREYHRVQSLWRKHPARVAAEVLEEPGENQVQPPLQEFVDFWQPLLSAPSHNPGERVVPPVSTRDSLRSILCSPVLLDEAHKCRVKNSTSAGPDGVSARRWNKAPKTIKLLILNLLLLAGRPPKALTRTRTVFIPKKGGSGPGGYRPISVSSVVFRHFQKVLASRLQVAGVIGDVQRAFRPADGTAENLTVLQTVISLARIKRRQLHLAALDVAKAFDTVSHLALTDCLRGVGAPSRLIEYVACLYQEGVTVLEAGGEVSGDIRIGRGVRQGDPLSPLLFNLVVDTALGKLPTEVGFDLAPGVRVGALAFADDVILLAETREGLQIALNAFAKQLARCGLVVNPDKCGSVSLVPSGRQHKVKVVDGGFVVGQSPIPSRSVLEVWRYLGVDFMGVATITASRVDLGRALARVTKAPLKPQQKLRLLRTCLLPKLTYGLVFGRLTAGRLQQLDREVRSAVRSWLKFPPGVPSAYIHAPVKSGGLGIVSLSACIPSLRCRRLLALQGSSWEVARAAADLDFVRQQLAWCDRATPSAPKPSSSAEFAAALHESVDGKELRQCSESLVSSQWVDWASEGIGARDYRHFHAIRVASLPTAVRCSRGSRGTTLPLCQACRSGNEHLYHVVQQCPRTHGGRILRHDAVAKQIAGALSSSGWDVERERLYHMPSDQGKKPDIVAVKPDQSCIILDVQVVNGSLDMEQTWRAKIRKYDTNDLRQAVSELKGVAPNNIRVMAATLSWRGVWCGKSATELRELGISVGVLRGITTRVLLGSYLNWWSFYRGTSLHPSLPPPPSSSSHIPRAGVG

SEQ ID NO: 24568 - protein, 1075 aa, Apolygus lucorum
MRFPVMNTEPTEPHNPRQPIGSRGIRGGAQRRPRQVRRPSSPSSSSSSSLPSSSSTASLNHQCAHCERAFTTRSGLGLHIRRKHPVAANAAIDIERIQPRYASEELRRMAADEAVAVRNGVRNINVYLNERFPTRTVIAIKNIRLKPHYKQLVQEAILANSSGASPASPIADVEQQPAIQYPSPGTSGLLADLKTEVLRLGGQVGRIEGYESTYLQDLVRRAVEGLDNLEDEVAAYLGRIFPRVGDATVTRHQGGPPPRMVLRGGRRAAKQARRREYHRVQSLWRKHPARVAAEVLEEPGENQVQPPLQEFVDFWEPLLSAPSHDPGECVVPPVSTRDSLRSIMCSPVLSDEAHKCRVRNSTSAGPDGVSARRWNKAPKTIKLLILNLLLLAGRPPKALTRTRTVFIPKKGGSGPGGYRPISVSSVVFRHFQKVLASRLQVAGVIGDVQRAFRPADGTAENLTVLQTVISLARIKRRQLHLAALDVAKAFDTVSHLALTDCLRGVGAPSRLIEYVACLYQEGVTVLEAGGEVSGDIRIGRGVRQGDPLSPLLFNLVVDTALGKLPTEVGFDLAPGVRVGALAFADDVILLAETREGLQIALNAFAKQLAGCGLVVNPDKCGSVSLVPSGRQHKVKVVDGGFVVGQSSIPSRSVLEVWRYLGVDFMGVATITASRVDLGRALARVTKAPLKPQQKLRLLRTYLLPKLTYGLVFGRLTAGRLQELDREVRSAVRSWLKFPPGVPSAYVHAPVKSGGLGIVSLSACIPSLRRQRLLALQGSSWEVARAAADLDFVRQQLAWCDRATPSAPKPSSSAEFAAALHESVDGKELRQCSESLLSSQWVDWASEGIGARDYRHFHAIRVASLPTAVRCSRGSRGTTLPLCRACRSGNEHLYHVVQQCPRTHGGRILRHDAVAKQIAGALSSSGWDVERERLYHMPSDQGKKPDIVAVKPDQSCIILDVQVVNGSLDMEQTWRAKIRKYDTNDLRQAVSELKGVAPNNIRVMAATLSWRGVWCGKSATELRELGISVGVLRGITTRVLLGSYLNWWSFYRGTSLHPSLPPPPSSSSLIPRAGVG

SEQ ID NO: 24569 - protein, 1075 aa, Apolygus lucorum
MCFPVMENIPNEPHNPRRPIGSRGIRGGAQRRPRQGRRPSSPSSSSSSSLPSSSSTASLDHQCAHCERAFTSRSGLGVHVRRKHPVAANEEIDVERVQPRYASEDLRRMAADEVVAVRNGVRNINVYLSERFPTRTVIAIKNLRLKPHYKQLVQEAILANSSGASPASPVAGVDQQSAIQYPSPGTSGLLADLKTEVLRLGGQVGRIEGYESTYLQDLARRAAEGLDNLEDMVAAYLGRIFPRVGDATVTQHQGGHPPRVVLRGGRRAAKQARRREYHRVQSLWRKHPARAAAEVLEEPGEDQVQPPLQEFVDFWEPLLSAPSHNPGERVVPPVSTRDSLCSILCSPVLLDEAHKCRVKNSTSAGPDGVSARRWNKAPNTIKLLILNLLMLAGRPPKALTRTRTVFIPKKGGSGPGGYRPISVSSVVFRHFQKVLASRLQVAGVIGDVQRAFRPADGTAENLTVLQTVISLARIKRRQLHLAALDVAKAFDTVSHLALTDCLRGVGAPSRLIEYVACLYHEGVTVLEAGGEVSGDVRIGRGVRQGDPLSPLLFNLVVDTALGKLPTEVGFDLAPGVRVGALAFADDVILLAETREGLQIALNAFAKQLSRCGLVVNPDKCGSVSLVPSGRQHKVKVVDGGFVIGQAPIPSRSVLEVWRYLGVDFMGVATITASRVDLGRALARITKAPLKPQQRLRLLRMYLLPKLTYGLVFGRLTAGRLQELDREVRSAVRSWLSFPPGVPSAYIHAPVKSGGLGIVSLSASIPSLRRQRLLALQGSSWEVARVAAGLDFVRQQLAWCDRATPSAPKPSLSAEFAAALHESVDGKELRQCSESLISSQWVDWASEGIGARDYRNFHAVRVATLPTAVRCSRGSRGVTDTLCRACRSGNEHLYHVVQQCPRTHGGRILRHDAVAKQIAGALSSSGWDVERERLYHMPSDRGKKPDIVAVKPDRSCIILDVQVVNGSMDMEQTWRAKIRKYDRDDLRQAVSELKGVAPNNIRVMAATLSWRGVWCGKRATELRELGISVGVLRGVTRRVLLGSYLNWWSFYRGTSLHPSLPPPPSSSSLIPRAGVG

SEQ ID NO: 24570 - protein, 1070 aa, Apolygus lucorum
MDETNEEPHNPRLPIGPRGSRGGAQSRPGQGRRPSSPSSSSSSSLPSSSSTASLNHQCTHCERAFTTRSGLGLHVRRKHPVAANAAIDIERIQHRYASEELRRMAADEAVAVRNGVRNINVYLSERFPMRTVIAIKNIRLKPHYKQLVQEVILANSSGASPASPVADVEQQPAIQHPSPGTSGLLADLKTEVLRLGGQVGRIEGYESTYLQDLARRAAEGLDNLENEVAAYLGRIFPRVGDATVTHHQGGPPPRVVLRGGRRAAKQARRREYHRVQSLWRKHPARMAAEVLEEPGENQVQPPLQEFVDFWEPLLSAPSHDPGERVVPPVSTRDSLRSIMCSPVLSDEAHKCRVKNSTSAGPDGISARRWNKAPRTIKLLLLNLLLLAGRPPKALTRTRTVFIPKKGRSGPGGYRPISVSSVVFRHFQKVLASRLQVAGIIGDVQRAFRPADGTAENLTVLQTVISLARMKRRQLHLAALDVAKAFDTVSHFALTDCLRGVGAPSRLIEYVACLYHEGVTVLEAGGEVSGDVRIGRGVRQGDPLSPLLFNLVVDTALGKLPTEVGFDLAPGVRVGALAFADDVILLAETREGLQIALNAFAKQLARCGLVVNPDKCGSVSLVPSGRQHKVKVVDGGFVVGQSPIPSRSVLEVWRYLGVDFMGVATISASRVDLGRALDRVTKAPLKPQQKLRLLRTYLLPRLTYGLVFGRLTAGRLQELDRQVRSAVRSWLRFPPGVPSAYVHAPVKSGGLGVVSLSACIPSLRRQRLLALQGSSWEVARAAADLDFVRQQLAWCDRATPSAPKPSSSAEFAAALHESVDGKELRQCSESPVSSQWVDWASEGIGARDYRHFHAVRMASLPTAVRCSRGSRGTTLPLCRACRSGNEHLYHVVQQCPRTHGGRILRHDAVAKQIAGALSSSGWDVERERLYHMPSDQGKKPDIVAVKPDQSCIILDVQVVNGSLDMEQTWRAKIRKYDRNDLRQAVSELKGVAPNNIRVMAATLSWRGVWCGKSATELRELGISVGVLRGITTRVLLGSYLNWWSFYRGTSLHPSLPPPPSSSSLIPRAGVG

SEQ ID NO: 24571 - protein, 1088 aa, Apolygus lucorum
MFPYENHHPRTDGSHCACANVNFLVPHNPRLPIGTRGSRGGAQRRPREGRRPSSPSSSSSSSQPSSSSTASLNHQCAHCERAFTTRSGLGLHVRRKHPVAANAAIDIERVQHRYASEELRRMAADEVVAVRDGVRNINVYLSERFPMRTVIAIKNIRLKPHYKQLVQEAILANSSGASPASPVADVEQQPAIQYPSPGTSGLLADLKTEVLRLGGQVGRIEGYESTYLQDLARRAAEGLDNLENEVAAYLGRIFPRVGDATVTQHQGGPPPRVVLRGGRRAAKQARRREYHRVQSLWRKHPARVAAEVLEEPGENQVQPPLQEFVDFWEPLLSAPSHDPGERVVPPVSTRDSLRSIMCLPVLSDEAHKCRVKNSTSAGPDGISARRWNKAPKTIKLLVLNLLLLAGRPPKALTRARTVFIPKKGGSGPGGYRPISVSSVVFRHFQKVLASRLLVAGIIGDVQRAFRPADGTAENLTVLQTVISLARMKRRQLHLAALDVAKAFDTVSHLALTDCLRGVGAPSRLIEYVACLYQEGVTVLDAGGEVSGDVRIGRGVRQGDPLSPLLFNLVVDTALGKLPTEVGFDLAPGVRVGALAFADDVILLAETREGLQIALNAFAKQLARCGLVVNPDKCGSVSLVPSGRQHKVKVVDGGFVIGQSPIPSRSVLEVWRYLGVDFMGVATISASRVDLGRALARVTKAPLKPQQKLRLLRTYLLPKLTYGLVFGRLTAGRLQELDRQVRSAVRSWLRFPPGVPSAYVHAPVKSGGLGIVSLSACIPSLRRQRLLALQGSSWEVARAAADLDFVRQQLAWCDRATPSAPKPSSSAEFAAALHESVDGKELRQCSESHVSSQWVDWASEGIGARDYRHFHAVRMATLPTAVRCSRGSRGTTLPLCRACRSGNEHLYHVVQQCPRTHGGRILRHDAVAKQIAGALSSSGWDVERERLYHMPSDQGKKPDIVAVKPDQSCIILDVQVVNGSLDMEQTWRAKIRKYDRNDLRQAVSELKGVAPNNIRVMAATLSWRGVWCGKSATELRELGISVGVLRGITTRVLLGSYLNWWSFYRGTSLHPSLPPPPSSSSLIPRAGVG

SEQ ID NO: 24572 - protein, 686 aa, Apolygus lucorum
MLAGRPPKALTRTRTVFIPKKGGSGPGGYRPISVSSVVFRHFQKVLASRLQVAGVIGDVQRAFRPADGTAENLTVLQTVISLARIKRRQLHLAALDVAKAFDTVSNLALTDCLRGVGAPSRLIEYVACLYHEGVTVLEAGGEVSRDIRIGRGVRQGDPLSPLLFNLVVDTALGKLPTEVGFDLAPGVRVGALAFADDVILLAETREGLQIALNAFAKQLARCGLVVNPDKCGSVSLVPSGRQHKVKVVDGGFVVGQSPIPSRSVLEVWRYLGVDFMGVATITTSRVDLGRALARVTKAPLKPQQKLRLLRAYLLPKLTYGLVFGRLTAGRLQELDREVRSAVRSWLRFPPGVPSAYFHAPVKSGGLGIVSLSASIPSLRRQRLLALQGSSWEVARAAADLDFVRQQLAWCDRATPSAPKPSSSAEFAAALHESVDGKELRQCSESLVSSQWVDWASEGIGARDYRHFHAVRMATLSTAVRCSRGSRGTTLPLCRACRSGNEHLYHVVQQCPRTHGGRILRHDAVAKQIAGALSSSGWDVERERLYHMPSDQGKKPDIVAVKPDQSCIILDVQVVNGSLDMEQTWRAKIRKYDRDDLRQAVSELKGVAPNNIRVMAATLSWRGVWCGKSAAELRELGISVGVLRGITTRVLLGSYLNWWSFYRGTSLHPSLPPPPSSSSLIPRAGVG

SEQ ID NO: 24573 - protein, 967 aa, Apolygus lucorum
MAADEAVAVRNGVRNINVYLNERFPTRTVIAIKNIRLKPHYKQLVQEAILANSSGASPASTIADVEQQPAIQYPSPGTSGLLADLKTEVLRLGGQVGRIEGYESTYLQDLVRRAVEGLDNLEDEVAAYLGRIFPRVGDATVTRHQGGPPPRMVLRGGRRAAKQARRREYHRVQSLWRKHPARVAAEVLEEPGENQVQPPLQEFVDFWEPLLSAPSHNPGECVVPPVSTRDSLRSIMCSPVLSDEAHKCRVRNSTSAGPDGVSARRWNKAPKTIKLLILNLLLLAGRPPKALTRTRTVFIPKKGGSGPGGYRPISVSSVVFRHFQKVLASRLQVAGVIGDVQRAFRPADGTAENLTVLQTVISLARIKRRQLHLAALDVAKAFDTVSHLALTDCLRGVGAPSRLIEYVACLYREGVTVLEAGGEVSGDVRIGRGVRQGDPLSPLLFNLVVDTALGKLPTEVGFDLAPGVRVGALAFADDVILLAETREGLQIALNAFAKQLAGCGLVVNPDKCGSVSLVPSGRQHKVKVVDGGFVVGQSPIPSRSVLEVWRYLGVDFMGVATITASRVDLGRALARVTKAPLKPQQKLRLLRTYLLPKLTYGLVFGRLTAGRLQELDREVRSAVRSWLKFPPGVPSAYVHAPVKSGGLGIVSLSACIPSLRRRRLLALQGSSWEVARAAADLDFVRQQLAWCDRATPSAPKPSSSAEFAAALHESVDGKELRQCSESLVSSQWVDWASEGIGARDYRHFHAIRVASLPTAVRCSRGGRGTTLPLCRACRSGNEHLYHVVQQCPRTHGGRILRHDAVAKQIAGALSSSGWDVERERLYHMPSDQGKKPDIVAVKPDQSCIILDVQVVNGSLDMEQTWRAKIRKYDTNDLRQAVSELKGVAPNNIRVMAATLSWRGVWCGKSATELRELGISVGVLRGITTRVLLGSYLNWWSFYRGTSLHPSLPPPPSSSSLIPRAGVG

SEQ ID NO: 24574 - protein, 1070 aa, Apolygus lucorum
MENQQHRPHNPRQPIGSRGIRGGAQRRPRQGRRPSSPSSSSSSSLPSSSSTASLDHQCAHCERAFTSRSGLGVHVRRKHPVAANDEINVERVQPRYASEDLRRMAADEVVAVRNGVRNINVYLSERFPTRTVIAIKNLRLKPHYKQLVQEAILANSGGASPASPIAGVDQQTAIQYPSPGTSGLLADLKTEVLRLGGQVGRIEGYESTYLQDLARRAAEGLDNLEDGVAAYLGRIFPRVGDATVTRHQGRPPPRVVLRGGRRAAKQARRREYHRVQSLWRKHPARVAAEVLEEPGEDQVQPPLQEFVDFWEPLLSAPSHNPGERVVPPVSTRDSLRSILCSPVLLDEAHKCRVKNSTSAGPDGVSARRWNKAPNTIKLLILNLLMLAGRPPKALTRTQTVFIPKKGGSGPGGYRPISVSSVVFRHFQKVLASRLQVAGVIGDVQRAFRPADGTAENLTVLQTVISLARIKRRQLHLAALDVAKAFDTVSHLARTDCLRGVGAPSRLIEYVACLYHEGVTVLEAGGEVSRDIRIGRGVRQGDPLSPLLFNLVVDTALGKLPTEVGFDLAPGVRVGALAFADDVILLAETREGLQIALNAFAKQLARCGLVVNPDKCGSVSLVPSGRQHKVKVVDGGFVVGQSPIPSRSVLEVWRYLGVDFMGVATITTSRVDLGRALARVTKAPLKPQQKLRLLRTYLLPKLTYGLVFGRLTAGRLQELDREIRSAVRSWLRFPPGVPSAYFHAPVKSGGLGIVSLSACIPSLRRQRLLALQGSSWEVARAAADLDFVRQQLAWCDRATPSAPKPSSSAEFAAALHESVDGKELRQCSESLVSSQWVDWASEGIGARDYRHFHAVRMATLPTAVRCSRGSRGTTLPLCRACRSGNEHLYHVVQQCPRTHGGRILRHDAVAKQIAGALSSSGWDVERERLYHMPSDQGKKPDIVAVKPDQSCIILDVQVVNGSLDMEQTWRAKIRKYDRDDLRQAVSELKGVAPNNIRVMAATLSWRGVWCGKSATELRELGISVGVLRGITTRVLLGSYLNWWSFYRGTSLHPSLPPPPSSSSLIPRAGVG

SEQ ID NO: 24575 - protein, 1075 aa, Apolygus lucorum
MRIPVMEHNPQLPHNPRQPIGSRGIRGGAQRRPRQGRRPSSPSSSSSSSQPSSSSTASLDYQCAHCERAFTSRSSLGVHVRRKHPVAANEEIDIERVQPRYASEDLRRMAADEVVAVRNGVRNINVYLSERFPTRTVIAIKNIRLKPHYKQLVQEAILANSGGASPASPVAGMDQQSAIQYPSPRTSGLLADLKTEVLRLGGQVGRIEGYESTYLQDLARRAAEGLDNLEDMVAAYLGRIFPRVGDATVTQHQGGPPSRVVLRGGRRAAKQARRREYHRVQSLWRKHPARAAAEVLEEPGEDQVQPPLQEFVDFWEPLLSAPSHNPGERVVPPVSTRDSLRSILCSPVLLDEAHKCRVKNSTSAGPDGVSARRWNKAPNTIKLLILNLLMLAGRPPKALTRTRTVFIPKKGGSGPGGYRPISVSSVVFRHFQKVLASRLQVAGVIGDVQRAFRPADGTAENLTVLQTVISLARIKRRQLHLAALDVAKAFDTVSHLALTDCLRGVGAPSRLIEYVACLYHEGVTVLEAGGEVSGDVRIGRGVRQGDPLSPLLFNLVVDTALDKLSTEVGFDLAPGVRVGALAFADDVILLAETREGLQIALNAFAKQLSRCGLVVNPDKCGSVSLVPSGRQHKVKVVDGGFVIGQAPIPSRSVLEVWRYLGVDFMGVATITASRVDLGRALARITKAPLKPQQRLRLLRTYLLPKLTYGLVFGRLTAGRLQELDREVRSAVRSWLRFPPGVPSAYIHAPVKSGGLGIVSLSACIPSLRRQRLLALQGSSWEVARVAAGLDFVRQQLAWCDRATPSAPKPSSSAEFAAALHESVDGKELRQCSESLISSQWVDWASEGIGARDYRNFHAVRVATLPTAVRCSRGSRGMTDTLCRACRSGNEHLYHVVQQCPRTHGGRILRHDAVAKQIAGALSSSGWDVERERLYHMPSDRGKKPDIVAVKPDRSCIILDVQVVNGSMDMEQTWRAKIRKYDRDDLRQAVSELKGVEPNNIRVIAATLSWRGVWCGKSATELRELGISVGVLRGVTRRVLLGSYLNWWSFYRGTSLHPSLPPPPSSSSLIPRAGVG

SEQ ID NO: 24576 - protein, 1070 aa, Apolygus lucorum
MENQQHRPHNPRQPIGSRGIRGGAQRRPRQGRRPSSPSSSSSSSLPSSSSTASLDHQCAHCERAFTSRSGLGVHVRRKHPVAANDEINVERVQPRYASEDLRRMAADEVVAVRNGVRNINVYLSERFPTRTVIAIKNLRLKPHYKQLVQEAILANSGGASPASPIAGVDQQSAIQYPSPGTSGLLADLKTEVLRLGGQVGRIEGYESTYLQDLARRAAEGLDNLEDEVAAYLGRIFPRVGDATVTRHQGRPPPRVVLRGGRRAAKQARRREYHRVQSLWRKHPARVAAEVLEEPGEDQVQPPLQEFVDFWEPLLSAPSHNPGERVVPPVSTRDSLRSILCSPVLLDEAHKCRVKNSTSAGPDGVSARRWNKAPNTIKLLILNLLMLAGRPPKALTRTRTVFIPKKGGSGPGGYRPISVSSVVFRHFQKVLASRLQVAGVIGDVQRAFRPADGTAENLTVLQTVISLARIKRRQLHLAALDVAKAFDTVSHLALTDCLRGVGAPSRLIEYVACLYHEGVTVLKAGGEVSRDIRIGRGVRQGDPLSPLLFNLVVDTALGKLPTEVGFDLAPGVRVGALAFADDVILLAETREGLQIALNAFAKQLARCGLVVNPDKCGSVSLVPSGRQHKVKVVDGGFVIGQSPIPSRSVLEVWRYLGVDFMGVATITTSRVDLGRALARVTKAPLKPQQKLRLLCTYLLPKLTYGLVFGRLTAGRLQELDREIRSAVRSWLRFPPGVPSAYFHAPVKSGGLGIVSLSACIPSLRRQRLLALQGSSWEVARAAADLDFVRQQLAWCDRATPSAPKPSSSAEFAAALHESVDGKELRQCSESLVSSQWVDWASEGIGARDYRHFHAVRMATLPTAVRCSRGSHGTTLPLCRACRSGNEHLYHVVQQCPRTHGGRILRHDAVAKQIAGALSSSGWDVERERLYHMPSDQGKKPDIVAVKPDQSCIILDVQVVNGSLDMEQTWRAKIRKYDRDDLRQVVSELKGVAPNNIRVMAATLSWRGVWCGKSATELRELGISVGVLRGITTRVLLGSYLNWWSFYRGTSLHPSLPPPPSSSSLIPRAGVG

SEQ ID NO: 24577 - protein, 1069 aa, Apolygus lucorum
MENLTEPHNPRRPIGSRGIRGGAQRRPRQGRRPSSPSSSSSSSLPSSSSIASLDHQCAHCERAFTSRSGLGVHVRRKHPVAANEEIDVERVQPRYASEDLRRMAADEVVAVRNGVRNINVYLSERFPTRTVIAIKNLRLKPHYKQLVQEAILANSSGASPASPVAGVDQQSAIQYPSPGTSGLLADLKTEVLRLGGQVGRIEGYESTYLQDLARRAAEGLDNLEDMVAAYLGRIFPRVGDATVTQHQGGPPPRVVLRGGRRAAKQARRREYHRVQSLWRKHPARAAAEVLEEPGEDQVQPPLQEFVDFWEPLLSAPSHNPGERVVPPVSTRDSLRSILCSPVLLDEAHKCRVKNSTSAGPDGISARRWNKAPNTIKLLVLNLLMLAGRPPKALTRTRTVFIPKKGGSGPGGYRPISVSSVVFRHFQKVLASRLQVAGVIGDVQRAFRPADGTAENLTVLQTVISLARIKRRQLHLAALDVAKAFDTVSHLALTDCLRGVGAPSRLIEYVACLYHEGVTVLEAGGEVSGDVRIGRGVRQGDPLSPLLFNLVVDTALGKLPTEVGFDLAPGVRVGALAFADDVILLAETREGLQIALNAFAKQLSRCGLVVNPDKCGSVSLVPSGRQHKVKVVDGGFVIGQAPIPSRSVLEVWRYLGVDFMGVATITASRVDLGRALARITKAPLKPQQRLRLLRTYLLPKLTYGLVFGRLTAGRLQELDREVRSAVRSWLRFPPGVPSAYIHAPVKSGGLGIVSLSACIPSLRRQRLLALQGSSWEVARVAAGLDFVRQQLAWCDRATPSAPKPSSSAEFAAALHESVDGKELRQCSESLISSQWVDWASEGIGARDYRNFHAVRVATLPTAVRCSRGSRGVTDTLCRACRSGNEHLYHVVQQCPRTHGGRILRHDAVAKQIAGALSSSGWDVERERLYHMPSDQGKKPDIVAVKPDRSCIILDVQVVNGSMDMEQTWRAKIRKYDRDDLRQAVSELKGVAPNNIRVMAATLSWRGVWCGKSATELRELGISAGVLRGVTRRVLLGSYLNWWSFYRGTSLHPSLPPPPSSSSLIPRAGVG

SEQ ID NO: 24578 - protein, 967 aa, Apolygus lucorum
MAADEAVAVRNGVRNINVYLNERFPTRTVIAIKNIRLKPHYKQLVQEAILANSSGASPASPIADVEQQPAIQYPSPGTSGLLADLKTEVLRLGGQVGRIEGYESTYLQDLVRRAAEGLDNLEDEVAAYLGRIFPRVGDVTVTQHQGGPPPRVVLRGGRRAAKQARRREYHRVQSLWRKHPARVAAEVLEEPGENQVQPPLQEFVDFWEPLLSAPSHDPGECVVPPVSTRDSLRSIMCSPVLSDEAHKCRVKNSTSAGPDGVSARRWNKAPKTIKLLILNLLLLAGRPPKALTRTRTVFIPKKGGSGPGGYRPISVSSVVFRHFQKVLASRLQVAGVIGDVQRAFRSADGTAENLTVLQTVISLARIKRRQLHLAALDVAKAFDTVSHLALTDCLRGVGAPSRLIEYVACLYQEGVTVLEAGGEVSGDIRIGRGVRQGDPLSPLLFNLVVDTALGKLPTEVGFDLAPGVRVGALAFADDVILLAETREGLQIALNAFAKQLARCGLVVNPDKCGSVSLVPSGRQHKVKVVDGGFVVGQSPIPSRSVLEVWRYLGVDFMGVATITTSRVDLGRALARVTKAPLKPQQKLRLLRTYLLPKLTYGLVFGRLTAGRLQQLDREVRSAVRSWLKFPPGVPSAYFHAPVKSGGLGIVSLSACIPSLRRRRLLALQGSSWEVARAAADLDFVRQQLAWCDRATPSAPKPSSSAEFAAALHESVDGKELRQCSESLVSSQWVDWASEGIGARDYRHFHAIRVASLPTAVRCSRGSRGTTLPLCRACRSGNEHLYHVVQQCPRTHGGRILRHDAVAKQIAGALSSSGWDVERERLYHMPSDQGKKPDIVAVKPDQSCIILDVQVVNGSLDMEQTWRAKIRKYDTNDLRQAVSELKGVAPNNIRVMAATLSWRGVWCGKSATELRELGISVGVLRGITTRVLLGSYLNWWSFYRGTSLHPSLPPPPSSSSLIPRAGVG

SEQ ID NO: 24579 - protein, 967 aa, Apolygus lucorum
MAADEAVAVRNGVRNINVYLSERFPLRTVIAIKNIRLKPHYKQLVQEVILANSSGASPASPVADVEQQPAIQHPSPGTSGLLADLKTEVLRLGGQVGRIEGYESTYLQDLARRAAEGLDNLENEVAAYLGRIFPQVGDATVTQHQGGPPPRVVLRGGRRAAKQARRREYHRVQSLWRKHPARVAAEVLEEPGENQVQPPLQEFVDFWEPLLSAPSHDPGERVVPPVSTRDSLRSIMCSPVLSDEAHKCRVKNSTSAGPDGISARRWNKAPRTIKLLLLNLLLLAGRPPKALTRTRTVFIPKKGGSGPGGYRLISVSSVVFRHFQKVLASRLQVAGIIGDVQRAFRPADGTAEDLIVLQTVISLARMKRRQLHLAALDVAKAFDTVSHFALTDCLRGVGAPSRLIEYVACLYHEGVTVLEAGGEVSGDVRIGRGVRQGDPLSPLLFNLVVDTALGKLPTEVGFDLAPGVRVGALAFANDVILLAETREGLQIALNAFAKQLARCGLVVNPDKCGSVSLVPSGRQHKVKVVDGGFVIGQSPIPSRSVLEVWRYLGVDFMGVATISASRVDLGRALARVTKAPLKPQQKLRLLRTYLLPKLTYGLVFGRLTAGRLQELDRQVRSAVRSWLRFPPGVPSAYVHAPVKSGGLGVVSLLACIPSLRRQRLLALQGSSWEVARAAADLDFVRQQLAWCDRATPSAPKPSSSAEFAAALYESVDGKELRQCSESPVSSQWVDWASEGIGARDYRHFHAVRMATLPTAVRCSRGSRGTTLPLCRACRSGNEHLYHVVQQCPRTHGGRILRHDAVAKQIAGALSSSGWDVERERLYHMPSDQGKKPDIVAVKPDQSCIILDVQVVNGSLDMEQTWRAKIRKYDRNDLRQAVSELKGVAPNNIRVMAATLSWRGVWCGKSATELRELGISVGVLRGITTRVLLGSYLNWWSFYRGTSLHPSLPPPPSSSSLIPRAGVG

SEQ ID NO: 24580 - protein, 1070 aa, Apolygus lucorum
MNDNSSQPHNPRQPIGSRGIRGGAQRRPRQGRRPSSPSSSSSSSLPSSSSTTSLDHQCAHCERAFTTRSGLGVHIRRKHPVAANDEIDVERVQPRYASEDLRRMAADEVVAVRNGVRNINVYLSERFPTRTVIAIKNLRLKPHYKQLVQEAILANSGGASPASPIAGVDQQSAIQYPSPGTSGLLADLKTEVLRLGGQVGRIEGYESTYLQDLARRAAEGLDNLEDKVAAYLGRIFPRVGDATVTQHQGGPPPRVVLRGGRRAAKQARRREYHRVQSLWRKHPARVAAEVLEEPGEDQVQPPLQEFVDFWEPLLSAPSHNPGERVVPPVSTRDSLRSILCSPVLLDEAHKCRVKNSTSAGPDGVSARRWNKAPNTIKLLVLDLLILAGRPPKALTRTRTVFIPKKGGSGPGGYRPISVSSVVFRHFQKVLASRLQVAGVIGDVQRAFRPADGTVENLMVLQTVISLARIKRRQLHLAALDVAKAFDTVSHLALTDCLRGVGAPSRLIEYVACLYREGVTVLEVGGEVSRDIVIGRGVRQGDPLSPLLFNLVVDTALGKLPTEVGFDLAPGVRVGALAFADDVILLAETREGLQIALNAFAKQLSRCGLVVNPDKCGSVSLVPSGRQHKVKVVDGGFVIGQAPIPSRSVLEVWRYLGVDFMGVATINASRVDLGRALARVTKAPLKPQQRLRLLRTYLLPKLTYGLVFGRLTAGRLQELDREVRSAVRSWLRFPPGVPSAYIHAPVKSGGLGIVSLSACIPSLRRRRLLALQGSSWEVARVAAGLDFVRQQLAWCDRATPSAPKPSSSAEFAAALHESVDGKELRQCSESLISSQWVDWASEGIGARDYRNFHAVRVATLPTAVRCSRGSRGMTDTLCRACRSGNEHLYHVVQQCPRTHGGRILRHVAVAKQIAGALSSSGWDVERERLYHMPSDQGKKPDIVAVKPDRSCIILDVQVVNGSMDMEQTWRAKIRKYDRDDLQQAVSELKGVAPNNIRVMAATLSWHGVWCGKSATELRELGISVGVLRGVTRRVLLGSYLNWWSFYRGTSLHPSLPPPPSSSSLIPRAGVG

SEQ ID NO: 24581 - protein, 991 aa, Apolygus lucorum
MRKREFPIEIERVQPRYASEDLRRMAADEVVAVRNGVRNINVYLSERFPTRTVIAIKNLRLKPHYKQLVQEAILANSGGASPASPVAGVDQQSAIQYPSPGTSGLLADLKTEVLRLGGQVGRIEGYESTYLQDLARRAAEGLDNLEDKVVAYLGRIFPRVGDATVTQHQGRPPPRVVLRGGRRAAKQARRQEYHRVQSLWRKHLARVAAEVLEEPGEDQVQPPLQEFVDFWEPLLSAPSHNPEERVVPPVSTRDSLRSILSSPVLLDEAHKCRVKNSTSAGPDGVSARRWNKAPKTIKLLILNLLMLAGRPPKALTRTRTVFIPKKGGSGPGGYRPISVSSVVFRHFQKVLASRLQVAGVIGDVQRAFRPADGTAENLTVLQTVISLARIKRRQLHLAALDVAKAFDTVSHLALTDCLRGVGAPSRLIEYVACLYHEGVTVLEAGGEVSRDIRIGRGVRQGDPLSPLLFNLVVDTALGKLPTEVGFDLAPGVRVGALAFADDVILLAETREGLQIALNAFAKQLARCGLVVNPDKCGSVSLVPSGRQHKVKVVDGGFVIGQSPIPSRSVLEVWRYLGVDFMGVATITTSRVDLGRALARVTKAPLKPQQKLRLLRTYLLPKLTYGLVFGRLTAGRLQELDREIRSAVRSWLRFPPGVPSAYFHAPVKSGGLGIVSLSACIPSLRRQRLLALRGSSWEVAHAAADLDFVRQQLAWCDRATPSAPKPSSSAEFAAALHESVDGKELRQCSESLVSSQWVDWASEGIGARDYRHYHAVRMATLPTAVRCSRGSRGTTLPLCRACRSGNEHLYHVVQQCPRTHGGRILRHDAVAKQIAGALSSSGWDVERERLYHMPSDQGKKPDIVAVKPDQSCIILDVQVVNGSLDMEQTWRAKIRKYDRDDLRQAVSELKGVAPNNIRVMAATLSWRGVWWGKSATELRELGISVGVLRGITTRVLLGSYLNWWSFYRGTSLHPSLPPPPSSSSLIPRAGVG

SEQ ID NO: 24582 - protein, 1070 aa, Apolygus lucorum
MIDEADEPHNPRQPIGSRGIRGGAQRRPRQGRRPSSPSSSSSSSLPSSSSTASLDHQCAHCERAFTSRSGLGVHVRRKHPVAANAAIEIERVQPRYASEDLRRMAADEVVAVRNGVRNINVYLSERFPTRTVIAIKNLRLKPHYKQLVQEAILANSGGASPASPIAGVDQQSAIQYPSPGTSGLLADLKTEVLRLGGQVGRIEGYESTYLQDLARRAAEGLDNLEDMVAAYLGRIFPRVGDATVTRHQGRPPPRVVLRGGRRAAKQARRREYHRVQSLWRKHPARVAAEVLEEPGEDQVQPPLQEFVDFWEPLLSAPSHNPGERVVPPVSTRDSLRSILCSPVLLDEAHKCRVKNSTSAGPDGVSARRWNKAPNTIKLLILNLLMLAGRPPKALTRTRTVFIPKKGGSGPGGYRPISVSSVVFRHFQKVLASRLQVAGVIGDVQRAFRPADGTAENLTVLQTVISLARIKRRQLHLAALDVAKAFDTVSHFALTDCLRGVGAPSRLIEYVACLYHEGVTVLEAGGEVSGDVRIGRGVRQGDPLSPLLFNLVVDTALGKLPTVVGFDLAPGVRVGALAFADDVILLAETREGLQIALNAFAKQLARCGLVVNPDKCGSVSLVPSGRQHKVKVVDGGFVVGQSPIPSRSVLEVWRYLGVDFMGVATITTSRVDLGRALARVTKAPLKPQQKLRLLRTYLLPKLTYGLVFGRLTAGRLQELDRQVRSAVRSWLKFPPGVPSAYFHAPVKSGGLGIVSLSACIPSLRRQRLLALQGSSWEVARAAADLDFVRQQLAWCDRATPSAPKPSSSAEFAAALHESVDGKELRQCSESLVSSQWVDWASEGIGARDYRHFHAVRMATLPTAVRCSRGSRGTTLPLCRACRSGNEHLYHVVQQCPRTHGGRILRHDAVAKQIAGALSSSGWDVERERLYHMPSDQGKKPDIVAVKPDQSCIILDVQVVNGSLDMEQTWRAKIRKYDRDDLRQAVSELKGVVPNNIRVMAATLSWRGVWCGKSATELRELGISVGVLRGITTRVLLGSYLNWWSFYRGTSLHPSLPPPPSSSSLIPRAGVG

SEQ ID NO: 24583 - protein, 1032 aa, Apolygus lucorum
MPTFGTKDQLGNNHQLLSQCAHCERAFTSRSGLGVHVRRKHPVAANEEINVERVQPRYASEDLRRMAADEVVAVRNGVRNINVYLSERFPTRTVIAIKNLRLKPHYKQLVQEAILANSGGASPASPVAGVDQQSAIQYPSPGTSGLLADLKTEVLRLGGQVGRIEGYESTYLRDLARRAAEGLDNLEDEVAAYLGRIFPRVGDATVTQHQGGPPPRMVLRGGRRAAKQARRREYHRVQSLWRKHPARVAAEVLEEPGEDQVQPPLQEFVDFWEPLLSAPSHNPGERVVPPVSTRDSLRSILCSPVLLDEAHKCRVKNSTSAGPDGVSARRWNKAPNTIKLLILNLLMLAGRPPKALTRTRTVFIPKKGGSGPGGYRPISVSSVVFRHFQKVLASRLQVAGVIGDVQRAFRPADGTAENLTVLQTVISLARIKRRQLHLAALDVAKAFDTVSHLALTDCLRGVGAPSRLIEYVACLYHEGVTVLEAGGEVSGDVRIGRGVRQGDPLSPLLFNLVVDTALGKLPTEVGFDLAPGVRVGALAFADDVILLAETREGLQIALNAFAKQLSRCGLVVNPDKCGSVSLVPSGRQHKVKVVDGGFVIGQAPIPSRSVLEVWRYLGVDFMGVATITASRVDLGRALARITKAPLKPQQRLRLLRTYLLPKLTYGLVFGRLTAGRLQELDREVRSAVRSWLRFPPGVPSAYIHAPVKSGGLGIVSLSACIPSLRRQRLLALQGSSWEVARVAAGLDFVRQQLAWCDRATPSAPKPSSSAEFAAALHESVDGKELRQCSESLISSQWVDWASEGIGARDYRNFHAVRVATLPTAVRCSRGSRGMTDTLCRACRSGNEHLYHVVQQCPRTHGGRILRHDAVAKQIAGALSSSGWDVERERLYHMPSDQGKKPDIVAVKPDRSCIILDVQVVNGSMDMEQTWRAKIRKYDRDDLRQAVSELKGVEPNNIRVMAATLSWRGVWCGKSATELRELGISVGVLRGVTRRVLLGSYLNWWSFYRGTSLHPSLPPPPSSSSLIPRAGVG

SEQ ID NO: 24584 - protein, 1070 aa, Apolygus lucorum
MDDNLTEPHNPRRPIGTRGSRGGAQRRPRQGRRPSSPSSSSSSSLPSSSSTASLDHQCAHCERAFTSRSGLGVHVRRKHPVAANEEIDIERVQPRYAPEDLRRMAADEVVAVRNGVRNINVYLSERFPTRTVIAIKNLRLKPHYKQLVQEAILANSGGASPASPVAGMDQQSAIQYPSPGTSGLLADLKTEVLRLGGQVGRIEGYESTYLQDLARRAAEGLDNLEDEVAAYLGRIFPRVGDATVTQHQGGPPPRVVLRGGRRAAKQARRREYHRVQSLWRKHPARVAAEVLEEPGEDQVQPPLQEFVDFWEPLLSAPSHNPGERVVPPVSTRDSLRGILCSPVLLDEAHKCRVKNSTSAGPDGVSARRWNKAPNTIKLLILNLLMLAGRPPKALTRTRTVFIPKKGGSGPGGYRPISVSSVVFRHFQKVLASRLQVAGVIGDVQRAFRPAGGTAENLTVLQTVISLARIKRRQLHLAALDVAKAFDTVSHLALTDCLRGVGAPSRLIEYVACLYHEGVTVLEAGGEVSGDVRIGRGVRQGDPLSPLLFNLVVDTALGKLPTEVGFDLAPGVRVGALAFADDVILLAETREGLQIALNAFAKQLSRCGLVVNPDKCGSVSLVPSGRQHKVKVVDGGFVIGQAPIPSRSVLEVWRYLGVDFMGVATITASRVDLGRALARITKAPLKPQQRLRLLRTYLLPKLTYGLVFGRLTAGRLQELDREVHSAVRSWLRFPPGVPSAYIHAPVKSGGLGIVALSACIPSLRRQRLLALQGSSWEVARVAAGLDFVRQQLAWCDRATPSAPKPSSSAEFAAALHESVDGKELRQCSESLISSQWVDWASEGIGARDYRNFHAVRVATLPTAVRCSRGSRGMTDTLCRACRSGNEHLYHVVQQCPRTHGGRILRHDAVAKQIAGALSSSGWDVERERLYHMPSDQGKKPNIVAVKPDRSCIILDVQVVNGSMNMEQTWRAKIRKYDRDDLRQAVSELKGVAPNNIRVMAATLSWRGVWCGKSATELRELGISVGVLCGVTRRVLLGSYLNWWSFYRGTSLHPSLPPPPSSSSLIPRAGVG

SEQ ID NO: 24585 - protein, 1095 aa, Apolygus lucorum
MTLWRIGREPLSTGSLTLHLKRPPVMDQTDNMPHNPRLPIGTRGSRGGAQRRPRQGRRPSSPSSSSSSSQPSSSSTASLNHQCAHCERAFTTRSGLGLHVRRKHPVAANAAIDIERVQHRYASEELRRMAADEVVAVRDGVRNINVYLSERFPMRTVIAIKNIRLKPHYKQLVQEAILANSSGASPASPIADVEQQPAIQYPSPGTSGLLADLKTEVLRLGGQVGRIEGYESTYLQDLARRAAEGLDNLENEVAAYLGRIFPRVGDATVTQHQGGPPPRVVLRGGRRAAKQARRREYHRVQSLWRKHPARVAAEVLEEPGENQVQPPLQEFVDFWEPLLSAPSHDPGERVVPPVSTRDSLRGIMCSPVLSDEAHKCCVKNSTSAGPDGISARRWNKAPKTIKLLLLNLLLLAGRPPKALTRARTVFIPKKGGSGPGGYRPISVSSVVFRHFQKVLASRLQVAGIIGDVQRAFRPADGTAENLTVLQTVISLARMKRRQLHLAALDVAKAFDTVSHLALTDCLRGVGAPSRLIEYVACLYQEGVTVLEAGGEVSGDVRIGRGVRQGDPLSPLLFNLVVDTALGKLPTEVGFDLAPGVRVGALAFADDVILLAETREGLQIALNAFAKQLARCGLVVNPDKCGSVSLVPSGRQHKVKVVDGGFVIGQSPIPSRSVLEVWRYLGVDFMGVATISASRVDLGRALARVTKAPLKPQQKLRLLRRYLLPRLTYGLVFGRLTAGRLQELDRQVRSAVRSWLRFPPGVPSAYFHAPVKSGGLGIVSLSACIPSLRRQRLLALQGSSWEVARAAADLDFVRQQLAWCDRATPSAPKPSSSAEFAAALHESVDGKELRQCSESPVSSQWVDWASEGIGARDYRHFHAVRVATLPTAVRCSRGSRGTTLPLCRACRSGNEHLYHVVQQCPRTHGGRILRHDAVAKQIAGALSSSGWDVERERLYHMPSDQGKKPDIVAVKPDQSCIILDVQVVNGSLDMEQTWRAKIRKYDRNDLRQAVSELKGVAPNNIRVMAATLSWRGVWCGKSATELRELGISVGVLRGITTRVLLGSYLNWWSFYRGTSLHPSLPPPPSSSSLIPRAGVG

SEQ ID NO: 24586 - protein, 1066 aa, Apolygus lucorum
MEDTTEMPHNPRQPIGSRGIRGGAQRRPRQGRRPSSPSSSSSSSLPSSSSTASLNHQCAHCERAFTTRSGLGLHIRRKHPVAANAAIDIERIQHRYASEELRRMAADEAVAVRNGVRNINVYLNERFPTRTVIAIKNIRLKPHYKQLVLANSSGASPASPIADVEQQPAIQYPSPGTSGLLADLKTEVLRLGGQVGRIEGYESTYLQDLVRRAAEGLDNLEDEVAAYLGRIFPQVGDATVTRHQGGPPPRVVLRGGRRAAKQARRREYHRVQSLWRKHPARVAAEVLEEPGENQVQPPLQEFVDFWEPLLSAPSHDPGERVVPPVSTRDSLRSILCSPVLLDEAHKCRVKNSTSAGPDGVSARRWNKAPKTIKLLILNLLLLAGRPPKALTRTRTVFIPKKGGSGPGGYRPISVSSVVFRHFQKVLASRLQVAGVIGDVQRAFRPADGTAENLTVLQSVISLARIKRRQLHLAALDVAKAFDTVSHLALTDCLRGVGAPSRLIEYVACLYQEGVTVLEAGGEVSGDIRIGRGVRQGDPLSPLLFNLVVDTALGKLPTEVGFDLAPGVRVGALAFADDVILLAETREGLQIALNAFAKQLARCGLVVNPDKCGSVSLVPSGRQHKVKVVDGGFVVGQSPIPSRSVLEVWRYLGVDFMGVATITASRVDLGRALARVTKAPLKPQQKLRLLRTYLLPKLTYGLVFGRLTAGRLQQLDREVRSAVRSWLKFPPGVPSAYIHAPVKSGGLGIVSLSACIPSLRRRRLLALQGSSWEVARAAADLDFVRQQLAWGDRATPSAPKPSSSAEFAAALHESVDGKELRQCSESLVSSQWVDWASEGIGARDYRHFHAIRVASLPTAVRCSRGSRGTTLPLCRACRSGNEHLYHVVQQCPRTHGGRILRHDAVAKQIAGALSSSGWDVERERLYHMPSDQGKKPDIVAVKPDQSCIILDVQVVNGSLDMEQTWRAKIRKYDTNDLRQAVSELKGVAPNNIRVMAATLSWRGVWCGKSATELRELGISVGALRGITTRVLLGSYLNWWSFYRGTSLHPSLPPPPSSSSLIPRAGVG

SEQ ID NO: 24587 - protein, 1070 aa, Apolygus lucorum
MNDNSSQPHNPRQPIGSRGIRGGAQRRPRQGRRPSSPSSSSSSSLPSSSSTTSLDHQCAHCERAFTTRSGLGVHIRRKHPVAANDEIDVERVQPRYASEDLRRMAADEVVAVRNGVRNINVYLSECFPTRTVIAIKNLRLKPHYKQLVQEAILANSGGASPASPIAGVDQQSAIQYPSPGTSGLLADLKTEVLRLGGQVGRIEGYESTYLQDLARRAAEGLDNLEDKVAAYLGRIFPRVGDATVTQHQGGPPPRVVLRGGRRAAKQARRREYHRVQSLWRKHPARVAAEVLEEPGEDQVQPPLQEFVDFWEPLLSAPSHNPGERVVPPVSTRDSLRSILCSPVLLDEAHKCRVKNSTSAGPDGVSARRWNKAPNTIKLLILNLLILAGRPPKALTRTRTVFIPKKGGSGPGGYRPISVSSVVFRHFQKVLASRLQVAGVIGDVQRAFRPADGTAENLTVLQTVISLARIKRRQLHLAALDVAKAFDTVSHLALTDCLRGVGAPSRLIEYVACLYREGVTVLEAGGEVSRDIVIGRGVRQGDPLSPLLFNLVVDTALGKLPTEVGFDLAPGVRVGALAFADDVILLAETREGLQIALNAFAKQLSRCGLVVNPDKCGSVSLVPSGRQHKVKVVDGGFVIGQAPIPSRSVLEVWRYLGVDFMGVATITASRVDLGRALARVTKAPLKPQQRLRLLRTYLLPKLTYGLVFGRLTAGRLQELDREVRSAVRSWLRFPPGVPSAYIHAPVKFGGLGIVSLSACIPSLRRRRLLALQGSSWEVARVAAGLDFVRQQLAWCDRATPSAPKPSSSAEFAAALHESVDGKELRQCSESLISSQWVDWASEGIGARDYWNFHAVRVATLPTAVRCSRGSRGMTDTLCRACRSGNEHLYHVVQQCPRTHGGRILRHDAVAKQIAGALSSSGWDVERERLYHMPSDQGKKPDIVAVKPDRSCIILDVQVVNGSMDMEQTWRAKIRKYDRDDLRQAVSELKGVEPNNIRVMAATLSWRGVWCGKSATELRELGISVGVLRGVTRRVLLGSYLNWWSFYRGTSLHPSLPPPPSSSSLIPRAGVG

SEQ ID NO: 24588 - protein, 1070 aa, Apolygus lucorum
MDTNQDQPHNPRQPIGSQGIRGGAQRRPRQGHRPSSPSSSSSSSLPSSSSTASLNHQCAHCERAFTTRSGLGLHIRRKHPVAANAAIDIERIQPRYASEELRRMAADEAVAVRNGVRNINVYLNERFPTRTVIAIKNIRLKPHYKQLVQEAILANSSGASPASPIADVEQQPAIQYPSPGTSGLLADLKTEVLRLGGQVGRIEGYESTYLQDLVRRAVEGLDNLEDEVAAYLGRIFPRVGDATVTRHQGGPPPRMVLRGGRRAAKQARRREYHRVQSLWGKHPARVAAEVLEEPGENQVQPPLQEFVDFWEPLLSAPSHDPGECVVPPVSTRDSLRSIMCSPVLSDEAHKCRVRNSTSAGPDGVSARRWNKAPKTIKLLILNLLLLAGRPPKAFTRTRTVFIPKKGGSGPGGYRPISVSSVVFRHFQKVLASRLQVAGVIGDVQRAFRPADGTAENLTVLQTVISLARIKRRQLHLAALDVAKAFDTVSHLALTDCLRGVGAPSRLIEYVACLYQEGVTVLEAGGEVSGDVRIGRGVRQGDPLSPLLFNLVVDTALGKLPTEVGFDLAPGVRVGALAFADDVILLAETREGLQIALNAFAKQLAGCGLVVNPDKCGSVSLVPSGRQHKVKVVDGGFVVGQSPIPSRSVLEVWRYLGVDFMGVATITASRVDLGRALARVTKAPLKPQQKLRLLRTYLLPKLTYGLVFGRLTAGRLQELDREVRSAVRSWLKFPPGVPSAYVHAPVKSGGLGIVSLSACIPSLRRRRLLALQGSSWEVARAAADLDFVRQQLAWCDRATPSAPKPSSSAEFAAALHESVDGKELRQCSESLVSSQWVDWASEGIGARDYRHFHAIRVASLPTAVRCSRGSRGTTLPLCRACRSGNEHLYHVVQQCPRTHGGRILRHDAVAKQIAGALSSSGWDVERERLYHMPSDQGKKPDIVAVKPDRSCIILDVQVVNGSLDMEQTWRAKIRKYDTNDLRQAVSELKGVAPNNIRVMAATLSWRGVWCGKSATELRELGISVGVLRGITTRVLLGSYLNWWSFYRGTSLHPSLPPPPSSSSLIPRAGVG

SEQ ID NO: 24589 - protein, 967 aa, Apolygus lucorum
MAADEVVAVRNGVRNINVYLSERFPTRTVIAIKNLRLKPHYKQLVQEAILANSGGASPASPVAGMDQQSAVQYPSPGTSGLLADLKTEVLRLGGQVGRIEGYESTCLQDLARWAVEGLDNLEDKVAAYLGRIFPRVGDATVTQHQGGPPPRVVLRGGRRAAKQARRREYHRVQSLWRKHPARVAAEVLEEPGEDQVQPPLQEFVDFWEPLLSAPSHNPGERVVPPVSTRDSLRSILCSPVLLDEAHKCRVKNSTSAGPDGVSGRRWNKAPNTIKLLILNLLMLAGRPPKALTRTRTVFIPKKGGSGPGGYRPISVSSVVFRHFQKVLASRLQVAGVIGDVQRAFRPADGTAENLTVLQTVISLARIKRRQLHLATLDVAKAFDTVSHLALTDCLRGVGAPSRLIEYVACLYHEVVTVLEAGGEVSGDVRIGRGVRQGDPLSPLLFNLVVDTALGKLPTEVGFDLAPGVRVGALAFANDVILLAETREGLQIALNAFAKQLARCGLVVNPDKCGSVSLVPSGRQHKVKVVDGGFVIGQAPIPSRSVLEVWRYLGVDFMGVATITASRVDLGRALARITKAPLKPQQRLRLLRTYLLPKLTYGLVFGRLTAGRLQELDREVRSAVRSWLRFPPGVPSAYIHAPVKSGGLGIVALSACIPSLHRQRLLALQGSSWEVARVAAGLDFVRQQLAWCDRATPSAPKPSSSAEFAAALHESVDGKELRQCSESLISSQWVDWASEGIGARDYRNFHAVRVATLPTAVRCSRGSRGMTDTLCRACRSGNEHLYHVVQQCPRTHGGRILRHDAVAKQIAGALSSSGWDVERERLYHMPSDQGKKPDIVAVKPDRSCIILDVQVVNGSTDMEQTWRAKIRKYDRDDLRRAVSELKGVEPNNIRVMAATLSWRGVWCGKSATELRELGISVGVLRGVTRRVLLGSYLNWWSFYRGTSLHPSLPPPPSSSSLIPRAGVG

SEQ ID NO: 24590 - protein, 1070 aa, Apolygus lucorum
MIDEADEPHNPRQPIGSRGIRGGAQRRPRQGRRPSSPSSSSSSSLPSSSSTASLDHQCAHCERAFTSRSGLGVHVRRKHPVAANAAIEIERVQPRYASEDLRRMAADEVVAVRNGVRNINVYLSERFPTRTVIAIKNLRLKPHYKQLVQEAILANSGGASPASPIAGVDQQSAIQYPSPGTSGLLADLKTEVLRLGGQVGRIEGYESTYLQDLARRAAEGLDNLEDMVAAYLGRIFPRVGDATVTRHQGRPPPRVVLRGGRRAAKQARWQEYHRVQSLWRKHPARVAAEVLEEPGEDQVQPPLQEFVDFWEPLLSAPSHNPGERVVPPVSTRDSLRSILCSPVLLDEAHKCRVKNSTSAGPDGVSARRWNKAPNMIKLLILNLLMLAGRPPKALTRTRTVFIPKKGGSGPGGYRPISVSSVVFRHFQKVLASRLQVAGVIGDVQRAFRPADGTAENLTVLQTVISLARIKRRQLHLAALDVAKAFDTVSHFALTDCLRGVGAPSRLIEYVACLYHEGVTVLEVGGEVSGDVRIGRGVRQGDPLSPLLFNLVVDTALGKLPTEVGFDLAPGVRVGALAFADDVILLAETREGLQIALNAFAKQLARCGLVVNPDKCGSVSLVPSGRQHKVKVVDGGFVVGQSPIPSRSVLEVWRYLGVDFMGVATITTSRVDLGRALARVTKAPLKPQQKLRLLRTYLLPKLTYGLVFGRLTAGRLQELDRQVRSAVRSWLKFPPDVPSAYFHAPVKSGGLGIVSLSACIPSLRRQRLLALQGSSWEVARAAADLDFVRQQLAWCDRATPSAPKPSSSAEFAAALHESVDGKELRQCSESLVSSQWVDWASEGIGARDYRHFHAVRMATLPTAVRCSRGSRGTTLPLCRACRSGNEHLYHVVQQCPRTHGGRILRHDAVAKQIAGALSSSGWDVERERLYHMPSDQGKKPDIVAVKPDQSCIILDVQVVNGSLDMEQTWRAKIRKYDRDDLRQAVSELKGVVPNNIRVMAATLSWRGVWCGKSATELRELGISVGVLRGITTRVLLGSYLNWWSFYRGTSLHPSLPPPPSSSSLIPRAGVG

SEQ ID NO: 24591 - protein, 1070 aa, Apolygus lucorum
MENTQEQPHNPRLPIGKRGSRGGAQRRPRQGRRPSSPSSSSSSSLPSSSSTASLNHQCAHCERAFTTRSGLGLHVRRKHPVAANAAIDIERVQHRYASEELRRMAADEVVAVRDGVRNINVYLSERFPMRTVIAIKNIRLKPHYKQLVQEAILANSSGASPASPVADVEQQPAIQYPSPGTSGLLADLKTEVLRLGGQVGRIEGYESTYLQGLARRAAEGLDNLENEVAAYLGRIFPRVGDATVTQHQGGPPPGVVLRGGRRAAKQARRREYHRVQSLWRKHPARVAAEVLEEPGENQVQPPLQEFVDFWEPLLSAPSHDPGERVVPPVSTRDSLRSIMCSPVLSDEAHKCRVKNSTSAGPDGISARRWNKAPKTIKLLVLNLLLLAGRPPKALTRARTVFIPKKGGSGPGGYRPISVSSVVFRHFQKVLASRLQVAGIIGDVQRAFRPADGTAENLTVLQTVISLARIKRRQLHLAALDVAKAFDTVSHLALTDCLRGVGAPSRLIEYVACLYQEGVTVLEAGGEVSGDVRIGRGVRQGDPLSPLLFNLVVDTALGKLPTEVGFDLAPGVRVGALAFADDVILLAETREGLQIALNAFAKQLARCGLVVNPDKCGSVSLVPSGRQHKVKVVDGGFVIGQSPIPSRSVLEVWRYLGVDFMGVATISASRVDLGRALARVTKAPLKPQQKLRLLRTYLLPKLTYGLVFGRLTAGRLQELDRQVRSAVRSWLRFPPGVPSAYVHAPVKSGGLGIVSLSACIPSLRRQRLLALQGSSWEVARAAADLDFVRQQLAWCDRATPSAPKPGSSAEFAAALHESVDGKELRQCSESPVSSQWVDWASEGIGARDYRHFHAVRMATLPTAVRCSRGSRGTTLPLCRACRGGNEHLYHVVQQCPRTHGGRILRHDAVAKQIAGALSSSGWDVERERLYHMPSDQGKKPDIVAVKPDQSCIILDVQVVNGSLDMEQTWRAKIRKYDRNDLRQAVSELKGVAPNNIRVMAATLSWRGVWSGKSATELRELGISVGVLRGITTRVLLGSYLNWWSFYRGTSLHPSLPPPPSSSSLIPRAGVG

SEQ ID NO: 24592 - protein, 1070 aa, Apolygus lucorum
MDQNHQLPHNPRQPIGSRGIRGGAQRRPRQGRRPSSPSSSSSSSLPSSSSTASLDHQCAHCERAFTSRSGLGVHVRRKHPVAANAAIEIERVQPRYASEDLRRMAADEVVAVRNGVRNINVYLSERFPTRTVIAIKNLRLKPHYKQLVQEAILANSGGASPASPVAGMDQQSAIQYPSPGTSGLLADLKTEVLRLGGQVGRIEGYESTYLQDLARRAAEGLDNLEDEVAAYLGRIFPRVGDATVAQHQGGPPPRVVLRGGRRAAKQARRREYHRVQSLWRKHPARVAAEVLEEPGEDQVQPPLQEFVDFWEPLLSAPSHNPGERVVPPVSTRDSLRSILCSPVLLDEAHKCRVKNSTSAGPDGISARRWNKAPNTIKLLILNLLMLAGRPPKALTRTRTVFIPKKGGSGPGGYRPISVSSVVFRHFQKVLASRLQVAGVIGDVQRAFRPADGTAENLTVLQTVISLARIKRRQLHLAALDVAKAFDTVSHLALTDCLRGVGAPSRLIEYVACLYHEGVTVLEAGGEVSGDVRIGRGVRQGDPLSPLLFNLVVDTALGKLPTEVGFDLAPGVRVGALAFADDVILLAETREGLQIALNAFAKQLSRCGLVVNPDKCGSVSLVPSGRQHKVKVVDGGFVIGQAPIPSRSVLEVWRYLGVDFMGVATITASRVDLGRVLARITKAPLKPQQRLRLLRTYLLPKLTYGLVFGRLTAGRLQELDREVRSAVRSWLRFPPGVPSAYIHAPVKSGGLGIVALSACIPSLRRQRLLALQGSSWEVARVAAGLDFVRQQLAWCDRATPSAPKPSSSAEFAAALHESVDGKELRQCSESLISSQWVDWASEGIGARDYRNFHAVRVATLPTAVRCSRGSRGMTDTLCRACRSGNEHLYHVVQQCPRTHGGRILRHDAVAKQIAGALSSSGWDVERERLYHMPSDQGKKPDIVAVKPDRSCIILDVQVVNGSMDMEQTWRAKIRKYDRDDLRQAVSELKGVAPNNIRVMAATLSWRGVWCGKSATELRELGISVGVLRGVTRRVLLGSYLNWWSFYRGTSLHPSLPPPPSSSSLIPRAGVG

SEQ ID NO: 24593 - protein, 1075 aa, Apolygus lucorum
MRFPVMNTEPTEPHNPRQPIGSRGIRGGAQRRPRQGRRPSSPSSSSSSSLPSSSSTASLNHQCAHCERAFTTRSGLGLHIRRKHPVAANAAIDIERIQPRYASEELRRMAADEAVAVRNGVRNINVYLNERFPTRTVIAIKNIRLKPHYKQLVQEAILANSSGASPASPIADVEQQPAIQYPSPGTSGLLADLKTEVLRLGGQVGRIEGYESTYLQDLVRRAVEGLDNLEDEVAAYLGRIFPRVGDATVTRHQGGPPPRMVLRGGRRAAKQARRREYHRVQSLWRKHPARVAAEVLEEPGENQVQPPLQEFVDFWEPLLSAPSHDPGECVVPPVSTRDSLRSIMCSPVLSDEAHKCRVRNSTSAGPDGVSARRWNKAPKTIKLLILNLLLLAGRPPKALTRTRTVFIPKKGGSGPGGYRPISVSSVVFRHFQKVLASRLQVAGVIGDVQRAFRPADGTAENLTVLQTVISLARIKRRQLHLAALDVAKAFDTVSHLALTDCLRGVGAPSRLIEYVACLYQEGVTVLEAGGEVSGDIRIGRGVRQGDPLSPLLFNLVVDTALGKLPTEVGFDLAPGVRVGALAFADDVILLAETREGLQIALNAFAKQLAGCGLVVNPDKCGSVSLVPSGRQHKVKVVDGGFVVGQSSIPSRSVLEVWRYLGVDFMGVATITASRVDLGRALARVTKAPLKPQQKLRLLRTYLLPKLTYGLVFGRLTAGRLQELDREVRSAVRSWLKFPPGVPSAYVHAPVKSGGLGIVSLSACIPSLRRQRLLALQGSSWEVARAAADLDFVRQQLAWCDRATPSAPKPSSSAEFAAALHESVDGKELRQCSESLISSQWVDWASEGIGARDYRHFHAIRVASLPTAVRCSRGGRGTTLPLCRACRSGNEHLYHVVQQCPRTHGGRILRHDAVAKQIAGALSSSGWDVERERLYHMPSDQGKKPDIVAVKPDQSCIILDVQVVNGSLDMEQTWRAKIRKYDTNDLRQAVSELKGVAPNNIRVMAATLSWRGVWCGKSATELRELGISVGVLRGITTRVLLGSYLNWWSFYRGTSLHPSLPPPPSSSSLIPRAGVG

SEQ ID NO: 24594 - protein, 1095 aa, Apolygus lucorum
MTLWRLGRGPLLSGSLTLLKCASPVMNTNDDEPHNPRRPIGTRGSGGGAQRRPRQGRRPSSPSSSSSSSLPSSSSTASLNHQCAHCERAFTTRSGLGLHVRRKHPVAANAAIEIERVQPRYASEDLRRMAGDEVVAVRSGVRNINVYLSERFPTRTVNAISKLRQRPHYRQLVQDAILANSSGASPASPIADVEQQPAIQNPSPGTSGLLADLKTEVMRLGGQVGRIEGYESTYLQDLARRAAEGSENLEDEVAAYLGRIFPQVGDATVTRHQRGPPLRMVLRGGRRAAKQARRREYHRVQSLWRKHPARVAAEVLEEPGENQVQPPLQEFVDFWEPLLSAPSHDPGERVVPPVSTRDSLRGIMCSPVLLDEAHKCRVKNSTSAGPDGISARRWNKAPKTIKLLILNLLLLAGRPPKALTRTRTVFIPKKGGSGPGGYRPISVSSVVFRHFQKVLASRLQVAGVIGDVQRAFRPADGTAENLTVLQTVISLARIKRRQLHLAALDVAKAFDTVSHFALTDCLRGVGAPTRLIEYVACLYHEGVTVLEAGGEMSRDIMIGRGVRQGDPLSPLLFNLVVDTALGKLPTEVGFDLAPGVRVGALAFADDVILLAETREGLQIALNAFAKQLARCGLVVNPDKCGSVSLVPSGRQHKVKVVDGGFVIGQSPIPSRSVLEVWRYLGVDFMGVATITASRVDLGRALARVTKAPLKPQQKLRLLRTYLLPKLTYGLVFGRLTAGRLQELDREVRSAVRSWLKFPPGVPSAYIHAPVKSGGLGIMSLSASIPSLRRQRLLALRGSSWGVAHAAADLDFVRQQLAWCDRATPSAPKPSSSAEFAAALHESVDGKELRQCSESLISSQWVDWASEGIGARDYRHFHAVRVASLPTAVRCTRGSRGATLPLCRACRSRSEHLYHVVQQCPRTHGGRILRHDAVAKQIAGALSSSGWDVERERLYHMPSDQGKKPDIVAVKPDQSCIILDVQVVNGSLDMEQTWRAKIRKYDTNDLRQAVSELKGVAPNNIRVMAATLSWRGVWCGKSATELRELGISVGVLRGITTRVLLGSYLNWWSFYRGTSLHPSLPPPPSSSSLIPRAGVG

SEQ ID NO: 24595 - protein, 1095 aa, Apolygus lucorum
MTPLATREGTPVNGFPDPSILAPPVMNDEADQPHNPRQPIGSRGIRGGAQRRPRQGRRPSSPSSSSSSSLPSSSSTASLDHQCAHCERAFTSRSGLGVHVRRKHPVAANAAIEIERVQPRYASEDLRRMAADEVVAVRNGVRNINVYLSERFPTRTVIAIKNLRLKPHYKQLVQEAILANSGGASPASPIAGVDQQSAIQYPSPGTSGLLADLKTEVLRLGGQVGRIEGYESTYLQDLARRAAEGLDNLEDMVVAYLGRIFPRVGDATVTRHQGRPPPRVVLRGGRRAAKQARRQEYHRVQSLWRKHPARVAAEVLEEPGEDQVQPPLQEFVDFWEPLLSAPSHNPGERVVPPVSTRDSLRSILCSPVLLDEAHKCRVKNSTSAGPDGVSARRWNKAPNTIKLLILNLLMLAGRPPKALTRTRTVFIPKKGGSGPGGYRPISVSSVVFRHFQKVLASRLQVAGVIGDVQRAFRPADGTAENLTVLQTVISLARIKRRQLHLAALDVAKAFDTVSHFALTDCLRGVGAPSRLIEYVACLYHEGVTVLEAGGEVSGDVRIGRGVRQGDPLSPLLFNLVVDTALGKLPTEVGFDLAPGVRVGALAFADDVILLAETREGLQIALNAFAKQLARCGLVVNPDKCGLVSLVPSGRQHKVKVVDGGFVVGQSPIPSRSVLEVWRYLGVDFMGVATITTSCVDLGRALARVTKAPLKPQQKLRLLRTYLLPKLTYGLVFGRLTAGRLQELDRQVRSAVRSWLKFPPGVPSAYFHAPVKSGGLGIVSLSACIPSLRRQRLLALQGSSWEVARAAADLDFVRQQLAWCDRATPSAPKPSSSAEFAAALHESVDGKELRQCSESLVSSQWVDWASEGIGARDYRHFHAVRMATLPTAVRCSRGSRGTTLPLCRACRSGNEHLYHVVQQCPRTHGGRILRHDAVAKQIAGALSSSGWDVERERLYHMPSDQGKKPDIVAVKPDQSCIILDVQVVNGSLDMEQTWRAKIRKYDRDDLRQAVSELKGVVPNNIRVMAATLSWRGVWCGKSATELRELGISVGVLRGITTRVLLGSYLNWWSFYRGTSLHPSLPPPPSSSSLIPRAGVG

SEQ ID NO: 24596 - protein, 1070 aa, Apolygus lucorum
MEQTNDTPHNPRLPIGTRGSRGGAQRRPRQGRWPSSPSSSSSSSLPSSSSTASLDHQCAHCERAFTSRSGLGVHVRRKHPVAANEAIDVERVQPRYASEDLRRMAADEVVAVRNGVRNINVYLSERFPTRTVIAIKNLRLKPHYKQLVQEAVLANSGGASPASPVAGVDQQSAIQYPSPGTSGLLADLKTEVLRLGGQVGRIEGYESTYLQDLARRAAEGLDNLEDEVAAYLGRIFPRVEDATVTQHPGGPPPRVVLRGGRRAAKQARRREYHRVQSLWRKHPARVAAEVLEEPGEDQVQPPLQEFVDFWEPLLSAPSHNPGERVVPPVSTRDSLRSILCSPVLLDEAHKCRVKNSTSAGPDGVSARRWNKAPNTIKLLILNLLILARRPPKALTRTRTVFIPKKGGSGPGGYRPISVSSVVFRHFQKVLASRLQVAGVIGDVQRAFRPADGTAENLTVLQTVISLVRIKRRQLHLAALDVAKAFDTVSHHALTDCLRGVGAPSRLIEYVACLYHEGVTVLEAGGEVSGDVRIGRGVRQGDPLSPLLFNLVVDTALGKLPTEVGFDLAPGVRVGALAFADDVILLAETREGLQIALNAFAKQLSRCGLVVNPDKCGSVSLVPSGRQHKVKVVDGGFVIGQAPIPSRSVLEVWRYLGVDFMGVATITASRVDLGWALARITKAPLKPQQRLRLLRAYLLPKLTYGLVFGRLTAGRLQELDREVRSAVRSWLRFPPGVPSAYIHAPVKSGGLGIVSLSACIPSLRRQRLLALQGSSWEVARVAAGLDFVRQQLAWCDRATPSAPKPSSSAEFAAALHESVDGKELRQCSESLISSQWVDWASEGIGAHDYRNFHAVRAATLPTAVRCSRGSRGMTDTLCRACRSGNEHLYHVVQQCPRTHGGRILRHDAVAKQIAGALSSSGWDVERERLYHMPSDQGKKPDIVAVKPDRSCIILDVQVVNGSMDMEQTWRAKIRKYDRDDLRQAVSELKGVEPNNIRVMAATLSWRGVWCGKSATELRELGISVGVLRGVTRRVLLGSYLNWWSFYRGTSLHPSLPPPPSSSSLIPRAGVG

SEQ ID NO: 24597 - protein, 1067 aa, Apolygus lucorum
MDETNEEPHNPRLPIGPRGSRGGAQRRPRQGRPPSSHSSSSSSSLPSSSSTASLNHQCAHCERAFTTRSGLGLHVRRKHPVAAIDIERIQHRYASEELRRMAADEAVAVRNGVCNINVYLSERFPMRTVIAIKNIRLKPHYKQLVQEVILANSSGASPASPVADVEQQPAIQHPSPGTSGLLADLKTEVLRLGGQVGRIEGYESTYLQDLARRAAEGLDNLENEVAAYLGRIFPRVGDATVTHHQGGPPPRVVLRGGRRAAKQARRREYHRVQSLWRKHLARVAAEVLEEPGENQVQPPLQEFVDFWEPLLSAPSHDPGERVVPPVSTRDSLRSIMCSPVLSDEAHKCCVKNSTSAGPDGISARRWNKAPRTIKLLLLNLLLLAGRPPKALTRTRTVFIPKKGGSGPGGYRPISVSSVVFRHFQKVLASRLQVAGIIGDVQRAFRPADGTAENLTVLQTVISLARMKRRQLHLAALDVAKAFDTVSHFALTDCLRGVGAPSRLIEYVACLYHEGVTVLEAGGEVSGDVRIGRGVRQGDPLSPLLFNLVVDTALGKLPTEVGFDLAPGVRVGALAFADDVILLAETREGLQIALNAFAKQLARCGLVVNPDKCGSVSLVPSGRQHKVKVVDGGFVIGQSPIPSRSVLEVWRYLGVDFMGVATISASRVDLGRALDRVTKAPLKPQQKLRLLCTYLLPKLTYGLVFGRLTAGRLQELDRQVRSAVRSWLRFPPGVPSAYVHAPVKSGGLGVVSLSACIPSLRRQRLLALQGSSWEVARAAADLDFVRQQLAWCDRATPSAPKPSSSAEFAAALHESVDGKELRQCSESPVSSQWVDWASEGIGARDYRHFHAVRMATLPTAVRCSRGSRGTTLPLCRACRSGNEHLYHVVQQCPRTHGGRILRHDAVAKQIAGALSSSGWDVERERLYHMPSDQGKKPDIVAVKPDQSCIILDVQVVNGSLDMEQTWRAKIRKYDRNDLRQAVSELKGVAPNNIRVMAATLSWRGVWCGKSATELRELGISVGVLRGITTRVLLGSYLNWWSFYRGTSLHPSLPPPPSSSSLIPRAGVG

SEQ ID NO: 24598 - protein, 1070 aa, Apolygus lucorum
MDETLEQPHNPRQPIGSRGIRGGAQRRPRQGRRPSSPSSSSSSSLPSSSSTASLDHQCAHCERAFTSRSGLGVHVRRKHPVAANAAIEIERVQPRYASEDLRRMAADEVVAVRNGVRNINVYLSERFPTRTVIAIKNLRLKPHYKQLVQEAILANSGGASPASPIAGVDQQSAIQYPSPRTSGLLADLKTEVLRLGGQVGRIEGYESTYLQDLARRAAEGLDNLEDMVAAYLGRIFPRVGDATVTRHQGRPSPRVVLRGGRRAAKQARRQEYHRVQSLWRKHPARVAAEVLEEPGEDQVQPPLQEFVDFWEPLLSAPSHNPGECVVPPVSTRDSLRGIMCSPVLSDEAHKCRVKNSTSAGPDGVSARRWNKAPKTIKLLILNLLMLAGRPSKALTRTRTVFIPKKGGSGPGGYRPISVSSVVFRHFQKVLASRLQVAGVIGDVQRAFRPADGTAENLTVLQTVISLARIKRRQLHLAALDVAKAFDTVSHFALTDCLRGVGAPSRLIEYVACLYHEGVTVLEAGGEVSGDVRIGRGVRQGDPLSPLLFNLVVDTALGKLPTEVGFDLAPGVRVGALAFADDVILLAETREGLQIALNAFAKQLARCGLVVNPDKCGSVSLVPSGRQHKVKVVDGGFVVGQSPIPSRSVLEVWRYLGVDFMGVATITTSRVDLGRALARVTKAPLKPQQKLRLLRTYLLPKLTYGLVFGRLTAGRLQELDRQVRSAVRSWLKFPPGVPSAYFHAPVKSGGLGIVSLSACIPSLRRQRLLALQGSSWEVARAAADLDFVRQQLAWCDRATPSAPKPSSSAEFAAALHESVDGKELRQCSESLVSSQWVDWASEGIGARDYRHFHAVRMATLPTAVRCSRGSRGTTLPLCRACRSGNEHLYHVVQQCPRTHGGRILRHDAVAKQIAGALSSSGWDVERERLYHMPSDQGKKPDIVAVKPDRSCIILDVQVVNGSLDMEQTWRAKIRKYDRDDLRQAVSELKGVVPNNIRVMAATLSWRGVWCGKSATELRELGISVGVLRGITTRVLLGSYLNWWSFYRGTSLHPSLPPPPSSSSLIPRAGVG

SEQ ID NO: 24599 - protein, 1070 aa, Apolygus lucorum
MDDNLTEPHNPRRPIGTRGSRGGAQRRPRQGRRPSSPSSSSSSSLPSSSSTASLDHQCAHCERAFTSRSGLGVHVRRKHPVAANEEIDIERVQPRYASEDVRRMAADEVVAVRNGVRNINVYLSERFPTRTVIAIKNLRLKPHYKQLVQEAILANSGGASPTSPVAGMDQQSAIQYPSPGTSGLLANLKTEVLRLGGQVGRIEGYESTYLQDLARRAAEGLDNLEDEVAAYLGRIFPRVGDVTVTQHQGGPPPRVVLRGGRRAAKQARRREYHRVQSLWRKHPARVAAEVLEEPGEDQVQPPLQEFVDFWEPLLSAPSHNPGERVVPPVSTRDSLRGILCSPVLLEEAHKCRVKNSTSAGPDGVSARRWNKAPNTIKLLILNLLMLAGRPPKALTRTRTVFIPKKGGSGPGGYRPISVSSVVFRHFQKVLASRLQVAGVIGDVQRAFRPADGTAENLTVLQTVISLARIKRRQLHLAALDVAKAFDTVSHLALTDCLRGVGAPSRLIEYVACLYHEGVTVLEAGGEVSRDVRIGRGVRQGDPLSPLLFNLVVDTALGKLPTEVGFDLAPGVRVGALAFADDVILLAETREGLQIALNAFAKQLSRCGLVVNPDKCGSVSLVPSGRQHKVKVVDGGFVIGQAPIPSRSVLEVWGYLGVDFMGVATITASRVDLGRALARITKAPLKPQQRLRLLRTYLLPKLTYGLVFGRLTAGRLQELDREVRSAVRSWLRFPPGVPSAYIHAPVKSGGLGIVALSACIPSLRRQRLLALQGSSWEVARVAAGLDFVRQQLAWCDRATPSAPKPSSSAEFAAALHESVDGKELRQCSESLISSQWVDWASEGIGARDYRNFHAVRVATLPTAVRCSRGSRGMTDTLCRACRSGNEHLYHVVQQCPRTHGGRILRHDAVAKQIAGALSSSGWDVERERLYHMPSDQGKKPDIVAVKPDRSCIILDVQVVNGSMDMEQTWRAKIRKYDRDDLRQAVSELKGVAPNNIRVMAATLSWRGVWCGKSATELRELGISVGVLRGVTRRVLLGSYLNWWSFYRGTSLHPSLPPPPSSSSLIPKAGVG

SEQ ID NO: 24600 - protein, 1070 aa, Apolygus lucorum
MDDQTDRPHNPRQPIGSRGIRGGAQRRPRQGRRPSSPSSSSSSSLPSSSSTASLDHQCAHCERAFTSRSGLGVHVRRKHPVAANAAIEIERVQPRYASEDLRRMAADEVVAVRNGVRNINVYLSERFPTRTVIAIKNLRLKPHYKQLVQEAILANSGGASPASPVAGVDQQSAIQYPSPGTSGLLADLKTEVLRLGGQVGRIEGYESTYLQDLARRAAEGLDNLEDKVAAYLGRIFPRVGDATVTQHQGRPPPRVVLRGGRRAAKQARRQEYHRVQSLWRKHPARVAAEVLEEPGEDQVLPPLQEFVDFWEPLLSAPSHNPEERVVPPVSTRDSLRSILSSPVLLDEAHKCRVKNSTSAGPDGISARRWNKAPNTIKLLILNLLMLAGRPPKALTRTRTVFIPKKGGSGPGGYRPISVSSVVFRHFQKVLASRLQVAGVIGDVQRVFRPADGTAENLTVLQTVISLARIKRRQLHLAALDVAKAFDTVSHLALTDCLRGVGAPSRLIEYVACLYHEGVTVLEAGGEVSRDIRIGRGVRQGDPLSPLLFNLVVDTALGKLPTEVGFDLAPGVRVGALAFADDVILLAETREGLQIALNAFAKQLARCGLVVNPNKCGSVSLVPSGRQHKVKVVDGGFVIGQSPIPSRSVLEVWRYLGVDFMGVATITTSRVDLGRALARVTKAPLKPQQKLRLLRTYLLPELTYGLVFGRLTAGRLQELDREIRSAVRSWLRFPPGVPSAYFHAPVKSGGLGIVSLSACIPSLRRQRLLALRGSSWEVARAAADLDFVRQQLAWCDRATPSAPKPSSSAEFAAALHESVDGKELRQCSESLVSSQWVDWASEGIGARDYRHYHAVRMATLPTAVRCSRGSRGTTLPLCRACRSGNEHLYHVVQQCPRTHGGRILRHDAVAKQIAGALSSSGWDVERERLYHMPSDQGKKPDIVAVKPDQSCIILDVQVVNGSLDMEQTWRAKIRKYDRDDLRQAVSELKGVAPNNIRVMAATLSWRGVWCGKSATELRELGISVGVLRGITTRVLLGSYLNWWSFYRGTSLHPSLPPPPSSSSLIPRAGVG

SEQ ID NO: 24601 - protein, 972 aa, Apolygus lucorum
MDRTPEMPHNPRQPIGSRGIRGGAQRRPRQGRRPSSPSSSSSSSQPSSSSTASLNHQCAHCERAFTTRSGLGLHVSRKHPVAANAAIDIERIQHRYASEELRRMAADEAVAVRNGVRNINVYLNERFPTRTVIAIKNIRLKPHYKQLVQEAILANSSGASPASPIADVEQQPAIQYPSPGTSGLLADLKTEVLRLGGQVGRIEGYESTYLQDLVRRAAEGLDNLEDEVAAYLGRIFPRVGDVTVTQHQGGPPSRVVLRGGRRAAKQARRREYHRVQSLWRKHPARVAAEVLEEPGENQVQPPLQEFVDFWEPLLSAPSHDPGECVVPPVSTRDSLRSIMCSPVLSDEAHKCRVKNSTSAGPDGVSARRWNKAPKTIKLLILNLLLLAGRPPKALTRTRTVFIPKKGGSGPGGYRPISVSSVVFRHFQKVLASRLQVAGVIGDVQRAFRSADGTAENLTVLQTVISLARIKRRQLHLAALDVTKAFDTVSHLALTDCLRGVGAPSRLIEYVACLYQEGVTVLEAGGEVSGDIRIGRGVRQGDPLSPLLFNLVVDTALGKLPTEVGFDLAPGVRVGALAFADDVILLPETREGLQIALNAFAKQLARCGLVVNPDKCGSVSLVPSGRQHKVKVVDGGFVVGQSPIPSRSVLEVWRYLGVDFMGVATITTSRVDLGRALARVTKAPLKPQQKLRLLRTYLLPKLTYGLVFGRLTAGRLQQLDREVRSAVRSWLKFPPGVPSAYFHAPVKSGGLGIVSLSACIPSLRRRRLLALQGSSWVVARAAADLDFVRQQLAWCDRATPSAPKPSSSAEFAAALHESVDGKELRQCSESLVSSQWVDWASEGIGARDYRHFHAIRVASLPTAVRCSGGSRGTTLPLCRACWSGNEHLYHVVQQCPRTHGGRILRHDAVAKQIAGALSSSGWDVERERDCITCQVTRVRSPTLLLSSPTSLALSWMSKLSMAAWTWSRLGGPR

SEQ ID NO: 24602 - protein, 1095 aa, Apolygus lucorum
MTLWRIGREPLSTGSLTLHFKRPPVMENNQEMPHNPRLPIGTRGSRGGAQRRPRQGRRPSSPSSSSSSSLPSSSSTASLNHQCAHCERAFTTRSGLGLHVRRKHPVAANAAIDIERVQHRYASEELRRMAADEVVAVRDGVRNINVYLSERFPMRTVIAIKNIRLRPHYKQLVQEAILANSGGASPASPIADVEQQPAIQYPSPGTSGLLADLKTEVLRLGGQVGRIEGYESTYLQDLARRAAEGLDNLENEVAAYLGRIFLRVGDATVTQHQGGLPPRVVLRGGRRAAKQARRREYHRVQSLWRKHPARVAAEVLEEPGENQVQPPLQEFVDFWEPLLSAPSHDPGERVVPPVSTRDSLRSVMCSPVLSDEAHKCRVKNSTSAGPDGISARRWNKAPKTIKLLVLNLLLLAGRPPKALTRARTVFIPKKGGSGPGGYRPISVSSVVFRHFQKVLASRLQVAGVIGDVQRAFRPADGTAENLTVLQTVISLARMKHRQLHLAALDVAKAFDTVSHLALTDCLRGVGAPSRLIEYVACLYQEGVTVLEAGGEVSGDVRIGRGVRQGDPLSPLLFNLVVDTALGKLPTEVGFDLAPGVRVGALAFADDVILLAETREGLQIALNAFAKQLARCGLVVNPDKCGSVSLVPSGRQHKVKVVDGGFVIGQSPIPSRSVLEVWRYLGVDFMGVATISASRVDLGRALARVTKAPLKPQQKLRLLRTYLLPKLTYGLVFGRLTAGRLQELDRQVRSAVRSWLRFPPGVPSAYVHAPVKSGGLGIVSLSACIPSLRRQRLLALQGSSWEVARAAADLDFVRQQLAWCDRATPSAPKPSSSAEFAAALHESVDGKELRQCSESPVSSQWVDWASEGIGARDYRHFHAVRIATLPTAVRCSRGSRGTTLPLCRACRSGNEHLYHVVQQCPRTHGGRILRHDAVAKQIAGALSSSGWDVERERLYHMPSDQGKKPDIVAVKPDQSCIILDVQVVNGSLDMEQTWRAKIRKYDRNDLRQAVSELKGVAPNNIRVMAATLSWRGVWCGKSATELRELGISVGVLRGITTRVLLGSYLNWWSFYRGTSLHPSLPPPPSSSSLIPRAGVG

SEQ ID NO: 24603 - protein, 986 aa, Apolygus lucorum
MDNNTTRPHNPRQPIGSRGIRGGAQRRPRQGRRPSSPSSSSSSSLPSSSSTASLDHQCAHCERAFTTRSGLGVHIRRKHPVAANDEIDVERVQPRYASEDLRRMAADEVVAVRNGVRNINVYLSERFPTRTVIAIKNLRLKPHYKQLVQEAILANSSGASPASPIAGVDQQSAIQYPSPGTSGLLADLKTEVLRLGGQVGRIEGYESTYLQDLARRAAEGLDNLEDKVAAYLGIIFPRVGDATVTQHQGGPPPRVVLRGGRRAAKQARRREYHRVQSLWRKHPARVAAEVLEEPGEDQVQPPLQEFVDFWEPLLSAPSHNPGERVVPPVSTRDSLRSILCSPVLLDEAHKCRVKNSTSAGPDGVSARRWNKVPNTIKLLILNLLMLAGRPPKALTRTRTVFIPKKGGSGPGGYRPISVSSVVFRHFQKVLASRLQVAGVIGDVQRAFRPADGTAENLTVLQTVISLARIKRRQLHLAALDVAKAFDTVSHLALTDCLRGVGAPSRLIEYVACLYREGVTVLKAGGEVSKDIVIGRGVRQGDPLSPLLFNLVVDTALGKLPTEVGFDLAPGVRVGALAFADDVILLAETREGLQIALNAFAKQLSRCGLVVNPDKCGSVSLVPSGRQHKVKVVDGGFVIGQAPIPSRSVLEVWRYLGVDFMGVATITASRVDLGRALAGVTKAPLKPQQRLRLLRTYLLPKLTYGLVFGRLTAGRLQELDREVRSAVRSWLRFPPGVPSAYIHAPVKSGGLGIVSLSACIPSLRRQRLLALQGSSWEVARVAAGLDFVRQQLAWCDRATPSAPKPSSSAEFAAALHESVDGKELRQCSESLISSQWVDWASEGIGARDYRNFHAVRVATLPTAVRCSRGSRGMTDTLCRACRSGNEHLYHVVQQCPRTHGGRILRHDAVAKQIAGALSSSGWDVERERLYHMPSDQGKKPDIVAVKPDKSCIILDVQVVNGSMDMEQTWRAKIRKYDRMIYGKQCQS

SEQ ID NO: 24604 - protein, 1075 aa, Apolygus lucorum
MRFPVMNTEPTEPHNPRQPIGSRGIRGGAQRRPRQGRRLSSPSSSSSSSLPSSSSTASLNHQCAHCERAFTTRSGLGLHIRRKHPVAANAAIDIERIQPRYASEELRRMAADEAVAVRNGVRNINVYLNERFPTRTVIAIKNIRLKPHYKQLVQEAILANSSGASPASPIADVEQQPAIQYPSPGTSGLLADLKTEVLRLGGQVGRIEGYESTYLQDLVRRAVEGLDNLEDEVAAYLGRIFPRVGDATVTRHQGGPPPRMVLRGGRRAAKQARRREYHRVQSLWRKHPERVAAEVLEEPGENQVQPPLQEFVDFWEPLLSAPSHDPGECVVPPVSTRDSLRSIMCSPVLSDEAHMCRVRNSTSAGPDGVSARRWNKAPKTIKLLILNLLLLAGRPPKALTRTRTVFIPKKGGSGPGGYRPISVSSVVFRHFQKVLASRLQVAGVIGDVQRAFRPADGTAENLTVLQTVISLARIKRRQLHLAALDVAKAFDTVSHLALTDCLRGVGAPSRLIEYVACLYQEGVTVLEAGGEVSGDIRIGRGVRQGDPLSPLLFNLVVDTALGKLPTEVGFDLAPGVRVGALAFADDVILLAETREGLQIALNAFAKQLAGCGLVVNPDKCGSVSLVPSGRQHKVKVVDGGFVVGQSSIPSRSVLEVWRYLGVDFMGVATITASRVDLGRALARVTKAPLKPQQKLRLLRTYLLPKLTYGLVFGRLTAGRLRELDREVRSAVRSWLKFPPGVPSAYVHAPVKSGGLGIVSLSACIPSLRRQRLLALQGSSWEVACAAADLDFVRQQLAWCDRATPSAPKPSSSAEFAAALHESVDGKELRQCSESLLSSQWVDWASEGIGARDYRHFHAIRVASLPTAVRCSRGSRGTTLPLCRACRSGNEHLYHVVQQCPRTHGGRILRHDAVAKQIAGALSSSGWDVERERLYHMPSDQGKKPDIVAVKPDQSCIILDVQVVNGSLDMEQTWRAKIRKYDTNDLRQAVSELKGVAPNNIRVMAATLSWRGVWCRKSATELRELGISVGVLRGITTRVLLGSYLNWWSFYRGTSLHPSLPPPPSSSSLIPRAGVG

SEQ ID NO: 24605 - protein, 1098 aa, Apolygus lucorum
MNRNAKRGAIREGTPVNGSPDPSLRFLVMNQNVTEPHNPRRPIGTRGSGGGAQRRPRQGRRPSSPSSSSSSSLPSSSSTASLNHQCAHCERAFTTRSGLGLHVRRKHPVAANAAIEIERVQPRYASEDLRRMAADEAVAVRSGVRNINVYLNERFPARTVNAISKLRQRPHYKQLVQEAILANSSGASPASPIADVEQQPAIQNPSPGTSGLLADLKTEVLRLGGQVGRIEGYESTYLQDLARRAAEGSENLEDEVAAYLGRIFPRVGDATVTQHQRGPPLRMVLRGGRRAAKQARRREYHRVQSLWRKHLARVAAEVLEEPGDDQVQPPLQEFVDFWEPLLSAPSHDPGERVVPPVSTRDSLRSIMCSPVLLDEAHKCRVKNSTSAGPDGVSARRWNKAPKTIKLLILNLLLLAGRPPKALTRARTVFIPKKGGSGPGGYRPISVSSVVFRHFQKVLASRLQVAGVIGDVQRAFRPADGTAENLTVLQTVISLARIKRRQLHLAALDVAKAFDTVSHLALTDCLRGVGAPSRLIEYVACLYHEGVTVLEAGGEVSRDIVIGRGVRQGDPLSPLLFNLVVDTALGKLPTEVGFDLAPGVRVGALAFADDVILLAETREGLQIALNAFAKQLARCGLVVNPDKCGSVSLVPSGRQHKVKVVDGGFVIGQSPIPSRSVLEVWRYLGVDFMGVATITASRVDLGRALARVTKAPLKPQQRLRLLRTYLLPKLTYGLVFGRLTAGRLQELDREVRSAVRSWLNFPPGVPSSYIHAPVKSGGLGIVSLSASIPSLRRQRLLALRGSSWGVARAAADLDFVRQQLAWCDRATPSAPKPSSSTEFAAALHESVDGKELRRCSESLISSQWVDWASEGIGARDYRHFHAVRVASLPTAVRCSRGSRGTTLPLCRACRGRSEHLYHVVQQCPRTHGGRILRHDAVAKQIAGALSSSGWDVERERLYHMPSDQGKKPDIVAVKPDQSCIILDVQVVNGSLDMEQTWRAKIRKYDTNDLRQAVSELKGVAPNNIRVMAATLSWRGVWCGKSATELRELGISVGVLRGITTRVLLGSYLNWWSFYRGTSLHPSLPPPPSSSSLIRRAGVG

SEQ ID NO: 24606 - protein, 1070 aa, Apolygus lucorum
MEDTTEMPHNPRQPIGSRGIRGGAQRRPRQGRRPSSPSSSSSSSLPSSSSTASLNHQCAHCERAFTTRSGLGLHIRRKHPVAANDAIDIEQIQHRYASEELRRMAADEAVAVRNGVRNINVYLNERFPTRTVIAIKNIRLKPHYKQLVQEAILANSSGASPASPIADVEQQPAIQYPSPGTSGLLADLKTEVLRLGGQVGRIEGYESTYLQDLVRRAAEGLDNLEDEVAAYLGRIFPRVGDATVTQHQGGPPPRVVLRGGRRAAKQARRREYHRVQSLWRKHPARVAAEVLEEPGEDQVQPPLQEFVDFWEPLLSAPSHDPGERVVPPVSTRDSLRSILCSPVLLDEAHKCRVKNSTSAGPDGVSARRWNKAPKTIKLLILNLLLLAGRPPKALTHTRTVFIPKKGGSGPGGYRPISVSLVVFRHFQKVLASRLQVAGVIGDVQRAFRPADGTAENLTVLQTVISLARIKRRQLHLAALDVAKAFDTVSHLALTDCLRGVGAPSRLIEYVACLYQEGVTVLEAGGEVSGDIRIGRGVRQGDPLSPLLFNLVVDTALGKLPTEVGFDLAPGVRVGALAFADDVILLAETREGLQIALNAFAKQLARCGLVVNPDKCGSVSLVPSGRQHKVKVVDGGFVVGQSPIPSRSVLEVWRYLGVDFMGVATITTSRVDLGRALARVTKAPLKPQQKLRLLRTYLLPKLTYGLVFGRLTAGRLQQLDREVRSAVRSWLKFPPGVPSAYFHAPVKSGGLGIVSLSACIPSLRRRRLLALQESSWEVARAAADLDFVRQQLAWCDRATPSAPKPSSSAEFAAALHESVDGKELRQCSESLVSSQWVDWASEGIGARDYRHFHAIRVASLPTAVRCSRGSRGTTLPLCRACRSGNEHLYHVVQQCPRTHGGRILRHDAVAKQIAGALSSSGWDVERERLYHMPSDQGKKPDIVAVKPDQSCIILDVQVVNGSLDMEQTWRAKIRKYDRNDLRQAVSELKGVAPNNIRVMAATLSWRGVWCGKSAMELRELGISVGVLRGITTRVLLGSYLNWWSFYRGTSLHPSLPPPPSSSSLIPRAGVG

SEQ ID NO: 24607 - protein, 1070 aa, Apolygus lucorum
METNTDRPHNPRQPIGSRGIRGGAQRRPRQGRRPSSPSSSSSSSLPSSSSTASLDHQCAHCERAFTTRSGLGVHIRRKHPVAANDEIDVERVQPRYASEDLRRMAADEVVAVRNGVRNINVYLSERFPTRTVIAIKNLRLKPHYKQLVQEAILANSGGASPASPIAGVDQQSAIQYPSPGTSGLLADLKTEVLRLGGQVGRIEGYESTYLQDLARRAAEGLDNLEDKVAAYLGRIFPRVGDATVTQHQGGPPPRVVLRGGRRAAKQARRREYRRVQSLWRKHPARVAAEVLEEPGEDQVKPPLQEFVDFWEPLLSAPSHSPGERVLPPVSTRDSLRGILCSPVLLDEAHKCRVKNSTSAGPDGVSARRWNKVPNTIKLLILNLLILAGRPPKALTRTRTVFIPKKGGSGPGGYRPISVSSVVFRHFQKVLASRLQVAGVIGDVQRAFRPADGTAENLTVLQTVISLARIKRRQLHLAALDVAKAFDTVSHLALTDCLRGVGAPSRLIEYVACLYREGVTVLEAGGEVSRDIVIGRGVRQGDPLSPLLFNLVVDTALGKLPTEVGFDLAPGVRVGALAFADDVILLAETREGLQIALDAFAKQLSRCGLVVNPDKCGSVSLVPSGRQHKVKVVDGGFVIGQAPIPSRSVLEVWRYLGVDFMGVATITASRVDLGRALAHVTKAPLKPQQRLRLLRTYLLPKLTYGLVFGRLTAGRLQELDREVRSAVRSWLRFPPGVPSAYIHAPVKSGGLGIVSLSACIPSLRRQRLLALQGSSWEVACVAAGLDFVRQQLAWCDRATPSAPKPSSSAEFAAALHESVDGKELRQCSESLISSQWVDWASEGIGARDYRNFHAVRVATLPTAVRCSRGSRGMTDTLCRACRSGNEHLYHVVQQCPRTHGGRILRHDAVAKQIAGALSSSGWDVERERLYHMPSDQGKKPDIVAVKPDRSYIILDVQVVNGSMDMEQTWRAKIRKYDRDDLRQAVSELKGVEPNNIRVMAATLSWRGVWCGKSATELRELGISVGVLRGVTRRVLLGSYLNWWSFYRGTSLHPSLPPQPSSSSLIPRAGVG

SEQ ID NO: 24608 - protein, 1076 aa, Apolygus lucorum
MKRPPVMDETLEQPHNPRQPIGSRGIRGGAQRRPRQGRRPSSPSSSSSSSLPSSSSTASLDHQCAHCERAFTSRSGLGVHVRRKHPVAANAAIEIERVQPRYASEDLRRMAADEVVAVRNGVRNINVYLSERFPTRTVIAIKNLRLKPHYKQLVQEAILANSGGASPASPIAGVDQQSAIQYPSPGTSGLLADLKTEVLRLGGQVGRIEGYESTYLQDLARRAAEGLDNLEDMVAAYLGRIFPRVGDATVTRHQGRPPPRVVLRGGRRAAKQARRQEYHRVQSLWRKHPARVAAEVLEEPGEDQVQPPLQEFVDFWEPLLSAPSHNPGERVVPPVSTRDSLRSILCSPVLLDEAHKCRVKNSTSAGPDGVSARRWNKAPNTIKLLILNLLMLAGRPPKALTRTRTVFIPKKGGSGPGGYRPISVSSVVFRHFQKVLASRLQVAGVIGDVQRAFRPADGTAENLTVLQTVISLARIKRRQLHLAALDVAKAFDTVSHFALTDCLRGVGAPSRLIEYVACLYHEGVTVLEAGGEVSGDVRIGRGVRQGDPLSPLLFNLVVDTALGKLPTEVGFDLAPGVRVGALAFADDVILLAETREGLQIALNAFAKQLARCGLVVNPDKCGSVSLVPSGRQHKVKVVDGGFVVGQSPIPSRSVLEVWRYLGVDFMGVATITTSRVDLGRALARVTKAPLKPQQKLRLLRTYLLPKLTYGLVFGRLTAGRLQELDRQVRSAVRSWLKFPPGVPSAYFHAPVKSGGLGIVSLSACIPSLRRQRLLALQGSSWEVARAAADLDFVRQQLAWCDRATPSAPKPSSSAEFAAALHESVDGKELRQCSESLVSSQWVDWASEGIGARDYRHFHAVRMATLPTAVRCSRGSRGTTLPLCRACRSGNEHLYHVVQQCPRTHGGRILRHDAVAKQIAGALSSSGWDVERERLYHMPSDQGKKPDIVAVKPDQSCIILDVQVVNGSLDMEQTWRAKIRKYDRDDLRQAVSELKGVVPNNIRVMAATLSWRGVWCGKSATELRELGISVGVLRGITTRVLLGSYLNWWSFYRGTSLHPSLPPPPSSSSLIPRAGVG

SEQ ID NO: 24609 - protein, 1095 aa, Apolygus lucorum
MTLWRIGREPLSTGSLTLLFKRPPVMDQTDNMPHNPRLPIGTRGSRGGAQRRPRQGRRPSSPSSSSSSSQPSSSSTASLNHQCAHCERAFTTRSGLGLHVRRKHPVAANAAIDIERVQHRYASEELRRMAADEVVAVRDGVRNINVYLSERFPMRTVIAIKNIRLKPHYKQLVQEAILANSSGASPASPVADVEQQLAIQYPSPGTSGLLADLKTEVLRLGGQVGRIEGYESTYLQDLARRAAEGLDNLENEVAAYLGRIFPRVGDATVTQHQGGPPPRVVLRGGRRAAKQARWREYHRVQSLWRKHPARVAAEVLEEPGENQVQPPLQEFVDFWEPLLSAPSHDPGERVVPPVSTRDSLRSIMCSPVLSDEAHKCRVKNSTSAGPDGISARRWNKAPKTIKLLVLNLLLLAGRPPKALTRARTVFIPKKGGSGPGGYRPISVSSVVFRHFQKVLASRLQVAGIIGDVQRAFRPADGTAENLTVLQTVISLARMKRRQLHLAALDVAKAFDTVSHLALTDCLRGVGAPSRLIEYVACLYQEGVTVLEAGGEVSGDVRIGRGVRQGDPLSPLLFNLVVDTALGKLPTEVGFDLAPGVRVGALAFADDVILLAETREGLQIALNAFAKQLARCGLVVNPDKCGSVSLVPSGRQHKVKVVDGGFVMGQSPIPSRSVLEVWRYLGVDFMGVATISASRVDLGRALARVTKAPLKPQQKLRLLRTYLLPKLTYGLVFGRLTAGRLQELDRQVRSAVRSWLRFPPGVPSAYVHAPVKSGGLGIVSLSACIPSLRRQRLLALQGSSWEVARAAADLDFVRQQLAWCDRATPSAPKPSSSAEFAAALHESVDGKELRQCSESPVSSQWVDWASEGIGARDYRHFHAVRMATLPTAVRCSRGSRGTTLPLCRACRSGNEHLYHVVQQCPRTHGGRILRHDAVAKQIAGALSSSGWDVERERLYHMPSDQGKKPDIVAVKPDQSCIILDVQVVNGSLDMEQTWRAKIRKYDRNDLRQAVSELKGVAPNNIRVMAATLSWRGVWCGKSATELRELGISVGVLRGITTRVLLGSYLNWWSFYRGTSLHPSLPPPPSSSSLIPRAGVG

SEQ ID NO: 24610 - protein, 1070 aa, Apolygus lucorum
MDDNTTRPHNPRQPIGSRGIRGGAQRRPRQGRRPSSPSSSSSSSLPSSSSTASLDHQCAHCERAFTSRSGLGVHVRRKHPVAANAAIEIERVQPRYASEDLRRMAADEVVAVRNGVRNINVYLSERFPTRTVIAIKNLRLKPHYKQLVQEAILANSGGASPASPVAGMDQQSAIQYPSPGTSGLLADLKTEVLRLGGQVGRIEGYESTYLQDLARRAAEGLDNLEDEVAAYLGRIFPRVGDATVAQHQGGPSPRVVLRGGRRAAKQARRREYHRVQSLWRKHPARVAAEVLEEPGEDQVQPPLQEFVDFWEPLLSAPSHNPGERVVPPVSTRDSLRSILCSPVLLDEAHKCRVKNSTSAGPDGISARRWNKAPNTIKLLILNLLMLAGRPPKALTRTRTVFIPKKGGSGPGGYRPISVSSVVFRHFQKVLASRLQVAGVIGDVQRAFRPADGTAENLTVLQTVISLARIKRRQLHLAALDVAKAFDTVSHLALTDCLHGVGAPSRLIEYVACLYHEGVTVLEAGGEMSGDVRIGRGVRQGDPLSPLLFNLVVDTALGKLPTEVGFDLAPGVRVGALAFADDVILLAETREGLQIALNAFAKQLSRCGLVVNPDKCGSVSLVPSGRQHKVKVVDGGFVIGQAPIPSRSVLEVWRYLGVDFMGVATITASRVDLGRALARITKAPLKPQQRLRLLRTYLLPKLTYGLVFGRLTAGRLQELDREVRSAVRSWLRFPPGVPSAYIHAPVKSGGLGIVALSACIPSLRRQRLLALQGSSWEVARVAAGLDFVRQQLAWCDRATPSAPKPSSSAEFAAALHESVDGKELRQCSESLISSQWVDWASEGIGARDYRNFHAVRVATLPTAVRCSRGSRGMTDTLCRACRSGNEHLYHVVQQCPRTHGGRILRHDAVAKQIAGALSSSGWDVERERLYHMPSDQGKKPDIVAVKPDRSCIILDVQVVNGSMDMEQTWRAKIRKYDRDDLRQAVSELKGVAPNNIRVMAATLSWRGVWCGKSATELRELGISVGVLRGVTRRVLLGSYLNWWSFYRGTSLHPSLPPPPSSSSLIPRAGVG

SEQ ID NO: 24611 - protein, 967 aa, Apolygus lucorum
MAADEVVAVRNGVRNINVYLSERFPTRTVIAIKNLRLKPHYKQLVQEAILANSGGASPASPIAGVDQQSAIQYPSPGTSGLLADLKTEVLRLGGQVGRIEGYESTYLQDLARRAAEGLDNLEDKVAAYLGRIFPRVGDATVTQHQGGPPPRVVLRGGRRAAKQARRREYHRVQSLWRKHPARVAAEVLEEPGEDQVKPPLQEFVDFWEPLLSAPSHNPGERVVPPVSTRDSLRGILCSPVLLDEAHKCRVRNSTSAGPDGVSARRWNKVPNTIKLLILNLLILAGRPPKALTRTRTVFIPKKGGSGPGGYRPISVSSVVFRHFQKVLASRLQVAGVIGDVQRAFRPADGTAENLTVLQTVISLARIKRRQLHLAALDVAKAFDTVSHLALTDCLRGVGAPSRLIEYVACLYREGVTVLEAGGEVSRDIVIGRGVRQGDPLSPLLFNLVVDTALGKLPTEVGFDLAPGVRVGALAFADDVILLAETREGLQIALNAFAKQLSRCGLVVNPDKCGSVSLVPSGRQHKVKVVDGGFVIGQAPIPSRSVLEVWRYLGVDFMGVATITASRVDLGRALARVTKAPLKPQQRLRLLRTYLLPKLTYGLVFGRLTAGRLQELDREVRSAVRSWLRFPPGVPSAYIHAPVKSGGLGIVSLSACIPSLRRQRLLALQGSSWEVARVAAGLDFVRQQLAWCDRATPSAPKPSSSAEFAAALHESVDGKELRQCSESLISSQWVDWASEGIGARDYRNFHAVRVATLPTAVRCSRGSRGMTDTLCRACRSGNEHLYHVVQQCPRTHGGRILRHDAVAKQIAGALSSSGWDVERERLYHMPSDQGKKPDIVAVKPDRSCIILDVQVVNGSMDMEQTWRAKIRKYDRDDLRQAVSELKGVEPNNIRVMAATLSWRGVWCGKSATELRELGISVGVLRGVTRRVLLGSYLNWWSFYRGTSLHPSLPPQPSSSSLIPRAGVG

SEQ ID NO: 24612 - protein, 1095 aa, Apolygus lucorum
MTLWRLGRGPLLTGSLTLHHKRPPVMGQNINEPHNPRQPIGSRGIRGGAQRRPRQGRRPSSPSSSSSSSLPSSSSTASLNHQCAHCERAFTTRSGLGLHIRRKHPVAANAAIDIERIQPRYASEELRRMAADEAVAVRNGVRNINVYLNERFPTRTVIAIKNIRLRPHYKQLVQEAILANSSGASPASPIADVEQQPAIQYPSPGTSGLLADLKTEVLRLGGQVGRIEGYESTYLQDLVRRAVEGLDNLEDEVAAYLGRIFPRVGDATVTRHQGGPPPRMVLRGGRRAAKQARRREYHRVQSLWRRHPARVAAEVLEEPGENQVQPPLQEFVDFWEPLLSAPSHDPGECVVPPVSTRDSLRSIMRSPVLSDEAHKCRVRNSTSAGPDGVSARRWNKAPKTIKLLILNLLLLAGRPPKALTRTRTVFIPKKVGSGPGGYRPISVSSVVFRHFQKVLASRLQVAGVIGDVQRAFRPADGTAENLTVLQTVISLARIKRRQLHLAALDVAKAFDTVSHLALTDCLRGVGAPSRLIEYVACLYQEGVTVLEAGGEVSGDIRVGCGVRQGDPLSPLLFNLVVDTALGKLPTEVGFDLAPGVRVGALAFADDVILLAETREGLQIALNAFAKQLAGCGLVVNPDKCGSVSLVPSGRQHKVKVVDGGFVVGQSPIPSRSVLEVWRYLGVDFMGVATITASRVDLGRALARVTKAPLKPQQKLRLLRTYLLPKLTYGLVFGRLTAGRLQELDREVRSAVRSWLKFPPGVPSAYVHAPVKSGGLGIVSLSACIPSLRRRRLLALQGSSWEVARAAADLDFVRQQLAWCDRATPSAPKPSSSAEFAAALHESVDGKELRQCSESLVSSQWVDWASEGIGARDYRHFHAIRVASLPTAVRCSRGSRGTTLPLCRACRSGNEHLYHVVQQCPRTHGGRILRHDAVAKQIAGALSSSGWDVERERLYHMPSDQGKKPDIVAVKPDQSCIILDVQVVNGSLDMEQTWRAKIRKYDTNDLRQAVSELKGVAPNNIRVMAATLSWRGVWCGKSATELRELGISVGVLRGITTRVLLGSYLNWWSFYRGTSLHPSLPPPPSSSSLIPRAGVG

SEQ ID NO: 24613 - protein, 686 aa, Apolygus lucorum
MLAGRPPKALTRTRTVFIPKKGGSGPGGYRPISVSSVVFRHFQKVLASRLQVAGVIGDVQRAFRPADGTAENLTVLQTVISLARIKRRQLHLAALDVAKAFDTVSHLALTDCLRGVGAPSRLIEYVACLYHEGVTVLEAGGEVSRDIRIGRGVRQGDPLSPLLFNLVVDTALGKLPTEVGFDLAPGVRVGALAFADDVILLAETREGLQIALNAFAKQLARCGLVVNPDKCGSVSLVPSGRQHKVKVVDGGFVVGQSPIPSRSVLEVWRYLGVDFMGVATITTSRVDLGRALARVTKAPLKPQQKLRLLRTYLLPKLTYGLVFGRLTAGRLQELDREIRSAVRSWLRFPPGVPSAYFHAPVKSGGLGIVSLSACIPSLRRQRLLALQGSSWEVARAAADLDFVRQQLAWCDRATPSAPKPSSSAEFAAALHESVDGKELRQCSESLVSSQWVDWASEGIGARDYQHFHAVRMATLPTAVRCSRGSRGTTLPLCRACRSGNEHLYHVVQQCPRTHGGRILRHDAVAKQIAGALSSSGWDVERERLYHMPSDQGKKPDIVAVKPDQSCIILDVQVVNGSLDMEQTWRAKIRKYDRDDLRQAVSELKGVAPNNIRVMAATLSWRGVWCGKSATELRELGISVGVLRGITTRVLLGSYLNWWSFYRGTSLHPSLPPPPSSSSLIPRAGVG

SEQ ID NO: 24614 - protein, 1109 aa, Apolygus lucorum
MTLWRLGRGPLLPGSLTLLKCASPVMNTNDDEPHNPRRPIGTRGSGGGAQRRPRQGRRPSSPSSSSSSSLPSSSSTASLNHQCAHCERAFTTRSGLGLHVRRKHPVAANAAIEIERVQPRYASEDLRRMAGDEVVAVRSGVRNINVYLSERFPTRTVNAISKLRQRPHYRQLVQDAILANSSGASPASPIAGVEQQPAIQNPSPGTSGLLADLKTEVMRLGGQVGRIEGYESTYLQDLARRAAEGSENLEDEVAAYLGRIFPRVGDATVTQHQRGPPLRMVLRGGRRAAKQARRREYHRVRSLWRKHPAHVAAEVLEEPGENQVQPPLQEFVDFWEPLLSAPSHDPGERVVPPVSTRDSLRGIMCSPVLLDEAHKCRVKNSTSAGPDGVSARRWNKAPKTIKLLILNLLLLAGRPPKALTRTRTVFIPKKGGSGPGGYRPISVSSVVFRHFQKVLASRLQVAGVIGDVQRAFRPADGTAENLTVLQTVISLARIKRRQLHLAALDVAKAFDTVSHFALTDCLHGVGAPTRLIEYVACLYHEGVTVLEAGGEISRDIMIGRGVRQGDPLSPLLFNLVVDTALGKLPTEVGFDLAPGVRVGALAFADDVILLAETREGLQIALNAFAKQLARCGLVVNPDKCGSVSLVPSGRQHKVKVVDGGFVIGQSPIPSRSVLEVWRYLGVDFMGVATITASRVDLGRALARVTKAPLKPQQKLRLLRTYLLPKLTYGLVFGRLTAGRLQELDREVRSAVRSWLKFPPGVPSAYIHAPVKSGGLGIVSLSASIPSLRRQRLLALRGSSWGVARAAADLDFVRQQLAWCDRATPSAPKPSSSAEFAAALHESVDGKELRQCSESLISSQWVDWASEGIGARDYRHFHAVRVACLPTAVRCTRGSRGATLPLCRACRSRSEHLYHVVQQCPRTHGGRILRHDAVAKQIAGALSSSGWDVERERLYHMPSDQGKKPDIVAVKPDQSCIILDVQVVNGSLDMEQTWRAKIRKYDRNDLRQAVSELKGVAPNNIRVMAATLSWRGVWCGKSATELRELGISVGVLRGITTRVLLGSYLNWWSFYRGTSLHPSLPPPPSSSSLIPSGSWIMDFKILLKFEVPCG

SEQ ID NO: 24615 - protein, 904 aa, Apolygus lucorum
MAADEVVAVRNGVRNINVYLSERFPTRTVIAIKNLRLRPHYKQLVQEAILANSGGASPASPIAGVDQQSAIQYPSPGTSGLLADLKTEVLRLGGQVGRIEGYESTYLQDLARRAAEGLDNLEDMVVAYLGRIFPRVGDATVTRHQGRPPPRVVLRGGRRAAKQARRQEYHRVQSLWRKHPARVAAEVLEEPGEDQVQPPLQEFVDFWEPLLSAPSHNPGERVVPPVSTRDSLRSILCSPVLLDEAHKCRVKNSTSAGPTGVSARRWNKAPNTIKLLILNLLMLAGRPPKALTRTRTVFIPKKGGSGPGGYRPISVSSVVFRHFQKVLASRLQVAGVIGDVQRAFRPADGTAENLTVLQTVISLARIKRRQLHLAALDVAKAFDTVSHFALTDCLRGVGAPSRLIEYVACLYHEGVTVLEAGGEVSGDVRIGRGVRQGDPLSPLLFNLVVDTALGKLPTEVGFDLAPGVRVGALAFADDVILLAETREGLQIALNAFAKQLARCKLVVNPDKCGSVSLVPSGRQHKVKVVDGGFVVGQSPIPSRSVLEVWRYLGVNFMGVATITTSRVDLGRALARVTKAPLKPQQKLRLLRTYLLPKLTYGLVFGRLTAGRLQELDRQVRSAVRSWLKFPPGVPSAYFHAPVKSGGLGIVSLSACIPSLRRQRLLALQGSSWKVARAAADLDFVRQQLAWCDRATPSAPKPSSSAEFAAALHESVDGKELRQCSESLVSSQWVDWASEGIGARDYRHFHAVRMATLPTAVRCSGGSRGTTLPLCRACWSGNEHLYHVVQQCPRTHGGRILRHDAVAKQIAGALSSSGWDVERERLYHMPSDQGKKPDIVAVKPDQSCIILDVQVVNGSLDMEQTWRAKIRKYDRDDLRQAVSELKGVVPNNIRVMAATLSWRGV

SEQ ID NO: 24616 - protein, 1070 aa, Apolygus lucorum
MEQNIEWPHNPRQPIGSQGIRGGAQRCPRQGRRPSSPSSSSSSSQPSSSSTASLNHQCAHCERAFTTRSGLGLHVSRKHPVAANDAIDIERIQHRYASEELRRMAADEAVAVRNGVRNINVYLNERFPTRTVIATKNIRLKPHYKQLVQEAILANSSGASPASPIADVEQQPAIQYPSPGTSGLLADLKTEVLRLGGQVGRIEGYESTYLQDLVRRAAEGLDNLEDEVAAYLGRIFPRVGDATVTQHQGGPPPRVVLRGGRRAAKQARRREYHRVQSLWRKHPARVAAEVLEEPGENQVQPPLQEFVDFWEPLLSAPSHDPGERVVPPVSTRDSLRSIMCSPVLSDEAHKCRVKNSTSAGPDGVSARRWNKAPKTIKLLILNLLLLAGRPPKALTRTRTVFIPKKGGSGPGGYRPISVSSVVFRHFQKVLASRLQVAGVIGDVQRAFRPADGTAENLTVLQTVISLARIKRRQLHLAALDVAKAFDTVSHLALTDCLRGVRAPSRLIEYVACLYQEGVTVLEAGGEVSGDIRIGRGVRQGDPLSPLLFNLVVDTALGKLPTEVGFDLAPGVRVGALAFADDVILLAETREGLQIALNAFAKQLARCGLVVNPDKCGSVSLVPSGRQHKVKVVDGGFVVGQSPIPSRSVLEVWRCLGVDFMGVATITASRVDLGRALARITKAPLKPQQKLRLLRMYLLPKLTYGLVFGRLTAGRLQQLDREVRSAVRSWLKFPPGVPSAYVHAPVKSGGLGIVSLSACIPSLRRRRLLALQGSSWEVARAAADLDFVRQQLAWCDRATPSAPKPSSSAEFAAALHESVDGKELRQCSESLVSSQWVDWASEGIGARDYRHFHAIRVASLPTAVRCSRGSRGTTLPLCRACRSGNEHLYHVVQQCPRTHGGRILRHDAVAKQIAGALSSSGWDVERERLYHMPSDQGRKPDIVAVKPDQSCIILDVQVVNGSLDMEQTWRAKIRKYDTNDLRQAVSELKGVAPNNIRVMAATLPWHGVWCGKSATELLELGISVGVLRGITTCVLLGSYLNWWSFYRGTSLHPSLPPPPSSSSLIPRAGVG

SEQ ID NO: 24617 - protein, 1095 aa, Apolygus lucorum
MTLWRIGREPLSTGSLTLHLKRPPVMDQTDNMPHNPRLPIGTQGSRGGAQRRPRQGRRPSSPSSSSSSSQPSSSSTASLNHQCAHCERAFTTRSGLGLHVRRKHPVAANAAIDIERVQHRYASEELRRMAADEVVAVRDGVRNINVYLSERFPMRTVIAIKNIRLKPHYKQLVQEAILANSSGASPASPIADVEQQPAIQYPSPGTSGLLADLKTEVLRLGGQVGRIEGYESTYLQDLARRAAEGLDNLENEVAAYLGRIFPRVGDATVTQHQGGPPPRVVLRGGRRAAKQARRREYHRVQSLWRKHPARVAAEVLEEPGENQVQPPLQEFVDFWEPLLSAPSHDPGERVVPPVSTRDSLRGIMCSPVLSDEAHKCRVKNSTSAGPDGISARRWNKAPKTIKLLVLNLLLLAGRPPKALTRARTVFIPKKGGSGPGGYRPISVSSVVFRHFQKVLASRLQVAGIIGDVQRAFRPADGTAENLTVLQTVISLARMKRRQLHLAALDVAKAFDTVSHLALTDCLRGVGAPSRLIEYVACLYQEGVTVLEAGGEVSGDVRIGRGVRQGDPLSPLLFNLVVDTALGKLPTEVGFDLAPGVRVGALAFADDVILLAETREGLQIALNAFAKQLARCGLVVNPAKCGSVSLVPSGRQHKVKVVDGGLVIGQSPIPSRSVLEVWRYLGVDFMGVATISASRVDLGRALARVTKAPLKPQQKLRLLRTYLLPKLTYGLVFGRLTAGRLQELDRQVRSAVRSWLRFPPGVPSAYFHAPVKSGGLGIVSLSACIPSLRRQRLLALQGSSWEVARAAADLDFVRQQLAWCDRATPSAPKPSSSAEFAAALHESVDGKELRQCSESPVSSQWVDWASEGIGARDYRHFHAVRVATLPTAVRCSGGSRGTTLPLCRACRSGNEHLYHVVQQCPRTHGGRILRHDAVAKQIAGALSSSGWDVERERLYHMPSDQGKKPDIVAVKPDQSCIILDVQVVNGSLDMEQTWRAKIRKYDRNDLRQAVSELKGVAPNNIRVMAATLSWRGVWCGKSATELRELGISVGVLRGITTRVLLGSYLNWWSFYRGTSLHPSLPPPPSSSSLIPRAGVG

SEQ ID NO: 24618 - protein, 1070 aa, Apolygus lucorum
MNQEDDQPHNPRLPIGTRGSRGGAQRRPRQGRRPSSPSSSSSSSLPSSSSTASLSHQCAHCERAFTSRSGLGLHVRRKHPVAANAAIDIERVQHRYASEELRRMAADEALAVRNGVRNINVYLNERFPSRTVIAIKNIRLKPHYKQLVQEAILANSSGASPASPVADVEQQPAIQYPSPGSSGLLADLKTEVLRLGGQVGRIEGYDSAYLQDLARRAVEGPDNLEDDVAAYLGRTFPRVGDATVMQHQGGRPPTVVLHGGRRAAKQARRRRYQRVQRLWRKHPARVATEVLEEPGEDQVEPPLQEFVDFWEPLLSAPSHNPGERVVPPVSTRDSLRSIMCAPVLLDEAHRCRVKNSTSAGPDGVSARRWNKAPNTIKLLILNLLLLAGRPPKALTRSRTVFIPKKGGSGPGGYRPISISSVVFRHFQKVLASRLQVAGVVGDVQRAFRPADGTAENLTVLQTVISLARMKRRQLHLAALDVAKAFDTVSHLALTDCLRGVGAPSRLIEYVACLYHEGVTVLEAGGEMSRDVLIGRGVRQGDPLSPLLFNLVVDTALGKLPTEVGFDLAPGVRVGALAFADDVILLAETREGLQIALNAFAKQLARCGLVVNPDKCGSVSLVPSGRQHKVKVVDGGFVVGQSPIPSRSVLEVWRYLGVDFMGVATITASRVDLGGALERVTKAPLKPQQKLRLLRTYLLPKLTYGLVFGRLTAGRLQELDRKVRSAVRSWLRFPPGVPSAYIHAPVKSGGLGIVSLSASIPSLRRQRLLALQGSSWEVARAAADLDFVRQQLAWCDRATPSAPKPSSSAEFAAALHESVDGKELRQCSESPISSQWVDWASEGIGARDYRHFHAVRVASLPTAVRCSRGSRGTTLPLCRACRSGNEHLYHVVQQCPRTHGGRILRHDAVAKQIAGALSSSGWDVERERLYHMPSDQGKKPDIVAVKPDQSCIILDVQVVNGSLDMEQTWRAKIRKYDRNDLRQAVSELKGVAPNNIRVMAATLSWRGVWCGKSATELRELGISVGVLRGITTRVLLGSYLNWWSFYRGTSLHPSLPPPPSSASLIPRAGVG

SEQ ID NO: 24619 - protein, 1070 aa, Apolygus lucorum
MIDEADQPHNPCQPIGSRGIRGGAQRRPRQGRRPSSPSSSSSSSLPSSSSTASLDHQCAHCERAFTSRSGLGVHVRRKHPVAANAAIEIERVQPRYASEDLRRMAADEVVAVRNGVRNINVYLSERFPTRTVIAIKNLRLKPHYKQLVQEAILANSGGASPASPIAGMDQQSAIQYPSPGTSGLLADLKTEVLRLGGQVGRIEGYESTYLQDLARRAAEGLDNLEDMVAAYLGRIFPRVGDATVTRHQGRPPPRVVLRGGRRAAKQARRQEYHRVQSLWRKHPARVAIEVLEEPGEDQVQPPLQEFVDFWEPLLSAPSHNPGERVVPPVSTRDSLRSILCSPVLLDEAHKCRVKNSTSAGPDGVSARRWNKAPNTIKLLILNLLMLAGRPLKALTRTRTVFIPKKGGSGPGGYRPISVSSVVFRHFQKVLASRLQVAGVIGDVQRAFRPADGTAENLTVLQTVISLARIKRRQLHLAALDVAKAFDTVSHFALTDCLCGVGAPSRLIEYVACLYHEGVTVLEAGGEVSGDVRIRRGVRQGDPLSPLLFNLVVDTALGKLPTEVGFDLAPGVRVGALAFADDVILLAETREGLQIALNAFAKQLARCGLVVNPDKCGSVSLVPSGRQHKVKVVDGGFVVGQSPIPSRSVLEVWRYLGVDFMGVATITTSRVDLGRALARVTKAPLKPQQKLRLLRTYLLPKLTYGLVFGRLTAGMLQELDRQVRSAVRSWLKFPPGVPSAYFHAPVKSGGLGIVSLSACIPSLRRQRLLALQGSSWEVARAAADLDFVRQQLAWCDQATPSAPKPSSSAEFAAALHESVDGKELRQCSESLVSSQWVDWASEGIGARDYRHFHAVRMATLPTAVRCSRGSRGTTLPLCRACRSGNEHLYHVVQQCPRTHGGRILRHDAVAKQIAGALSSSGWDVERERLYHMPSDQGKKPDIVAVKPDQSCIILDVQVVNGSLDMEQTWRAKIRKYDRDDLRQAVSELKGVVPNNIRVMAATLSWRGVWCGKSATELRELGISVGVLRGITTRVLLGSYLNWWSFYRGTSLHPSLPPPPSSSSLIPRAGVG

SEQ ID NO: 24620 - protein, 1102 aa, Apolygus lucorum
MRKRGFPFLSLLPREGTPVNGFPDPSQLAPPVMEQTNDTPHNPRLPIGTRGSRGGAQRRPRQGRRPSSPSSSSSSSLPSSSSTASLDHQCAHCERAFTSRSGLGVHVRRKHPVAANEAIDVERVQPRYASEDLRRMAADEVVAVRNGVRNINVYLSERFPTRTVIAIKNLRLKPHYKQLVQEAILANSGGASPASPVAGVDQQSAIQYPFPGTSGLLADLKTEVLRLGGQVGRIEGYESTYLQDLARRAAEGLDNLEDEVAAYLGRIFPRVEDATVTQHQGGPPPRVVLRGGRRAAKQARRREYHRVQSLWRKHPARVAAEVLEEPGEDQVQPPLQEFVDFWEPLLSAPSHNPGERVVPPVSTRDSLRSILCSPVLLDEAHKCRVKNSTSAGPDGVSARRWNKAPNMIKLLILNLLILAGRPPKALTRTRTVFIPKKGGSGPGGYRPISVSSVVFRHFQKVLASRLQVAGVIGDVQRAFRTADGTAENLTVLQTVISLARIKRRQLHLAALDVAKAFDTVSHHALTDCLRGVGAPSRLIEYVACLYHEGVTVLEAGGEVSGDVRIGRGVRQGDPLSPLLFNLVVDTALGKLPTEVGFDLAPGVRVGALAFADDVILLAETREGLQIALNAFAKQLSRCGLVVNPDKCGSVSLVPSGRQHKVKVVDGGFVIGQAPIPSRSVLEVWRYLGVDFMGVATITASRVDLGRALARITKAPLKPQQRLRLLRTYLLPKLTYGLVFGRLTAGRLQELDREVRSAVRSWLRFPPGVPSAYIHAPVKSGGLGIVSLSACIPSLRRQRLLALQGSSWEVARVAAGLDFVRQQLAWCDRATPSAPKPSSSAEFAAALHESVDGKELRQCSESLISSQWVDWASEGIGARDYRNFHAVRAATLPTAVRCSRGSRGMTDTLCRSCRSGNEHLYHVVQQCPRTHGGRILRHDAVAKQIAGALSSSGWDVERERLYHMPSDQGKKPDIVAVKPDRSCIILDVQVVNGSMDMEQTWRAKIRKYDRDDLRQAVSELKGVEPNNIRVMAATLSWRGVWCGKSATELRELGISVGVLRGVTRRVLLGSYLNWWSFYRGTSLHPSLPPPPSSSSLIPRAGVG

SEQ ID NO: 24621 - protein, 1070 aa, Apolygus lucorum
MDETLEQPHNPRQPIGSRGIRGGAQRRPRQGRRPSSPSSSSSSSLPSSSSTASLDHQCAHCERAFTSRSGLGVHVRRKHPVAANAAIEIERVQPRYASEDLRRMAADEVVAVRNGVRNINVYLSERFPTRTVVAIKNLRLKPHYKQLVQEAILANSGGASPASPIAGVDQQSAIQYPSPGTYGLLADLKTEVLRLRGQVGRIEGYESTYLQDLARRAAEGLDNLEDMVAAYLGRIFPRVGDATVTQHQGRPSPRVVLRGGRRAAKQARRQEYHRVQSLWRKHPARVAAEVLEEPGEDQVQPPLQEFVDFWEPLLSAPSHNPGERVVPPVSTRDSLRSILCSPVLLDEAHKCRVKNSTSAGPDGVSARRWNKAPNTIKLLILNLLMLAGRPPKALTRTRTVFIPKKGGSGPGGYRPISVSSVVFRHFQKVLASRLQVAGVIGDVQRAFRPADGTAENLTVLQTVISLARIKRRQLHLAALDVAKAFDTVSHFALTDCLRGVGAPSRLIEYVACLYHEGVTVLEAGGEVSGDVRIGRGVRQGDPLSPLLFNLVVDTALGKLPTEVGFDLAPGVQVGALAFADDVILLAETREGLQIALNAFAKQLARCGLVVNPDKCGSVSLVPSSRQHKVKVVDGGFVVGQSPIPSRSVLEVWRYLGVDFMGVATITTSRVDLGRALARVTKAPLKPQQKLRLLRSYLLPKLTYGLVFGRLTAGRLQELDRQVRSAVRSWLKFPPGVPSAYFHAPVKSGGLGIVSLSACIPSLRRQRLLALQGSSWEVARAAADLDFVRQQLAWCDRATPSAPKPSSSAEFAAALHESVDGKELRQCSESLVSSQWVDWASEGIGARDYRHFHAVRMATLPTAVRCSRGSRGTTLPLCRACRSGNEHLYHVVQQCPRTHGGRILRHDAVAKQIAGALSSSGWDVERERLYHMPSDQGKKPDIVAVKPDQSCIILDVQVVNGSLDMEQTWRAKIRKYDRDDLRQAVSELKGVVPNNIRVMAATLSWRGVWCGKSATELRELGISVGVLRGITTRVLLGSYLNWWSFYRGTSLHPSLPPPPSSSSLIPRAGVG

SEQ ID NO: 24622 - protein, 967 aa, Apolygus lucorum
MAADEVVAVRNGVRNINVYLSERFPTRTVIAIKNLRLKPHYKQLVQDAILANSSGASPASPVAGVDQQSAIQYPSPGTSGLLADLKTEVLRLGGQVGRIEGYESTYLQDLARRAVEGLDNLEDKVAAYLGRIFPRVGDATVTQHQGGPPPRVVLRGGRRAAKQARRREYHRVQSLWRKHPARVAAEVLEEPGEVRVQPPLQEFVDFWEPLLSAPSHNPGERVVPPVSTRDSLRSILCSPVLLDEAHKCRVKNSTSTGPDGISARRWNKAPNTIKLLILNLLILAERPPKALTRTRTVFIPKKGGSGPGGYRPISVSSVVFRHFQKVLASRLQVAGVIGDVQRAFRPADGTAENLTVLQTVISLARIKRRQLHLAALDVAKAFDTVSHLALTDCLRGVGAPSRLIEYVACLYHEGVTVLEAGGEVSGDIRIGRGVRQGDPLSPLLFNLVVDTALGKLPTEVGFDLAPGVRVGALAFADDVILLAETREGLQIALNAFAKQLSRCGLVVNPDKCGSVSLVPSGRQHKVKVVDGGFVIGQAPIPSRSVLEVWRYLGVDFMGVATITASRVDLGRALARITKAPLKPQQRLRLLRTYLLPKLTYGLVFGRLTAGRLQELDREVRSAVRSWLRFPPGVPSAYIHAPVKSGGLGIVSLSACIPSLRRQRLLALQGSSWEVARVAAGLDFVRQQLAWCDRATPSAPKPSSSAEFAAALHESVDGKELRQCSESLISSQWVDWASEGIGARDYRNFHAVRVATLPTAVRCSRGSRGMTDTLCHACRSGNEHLYHVVQQCPRTHGGRILRHDAVAKQIAGALSSSGWDVERERLYHMPSDQGKKPDIVAVKPDRSCIILDVQVVNGSMDMEQTWRAKIRKYDRDDLRQAVSELKGVAPNNIRVMAATLSWRGVWCGKSATELRELGISVGVLRGVTRRVLLGSYLNWWSFYRGTSLHPSLPPPPSSSSLIPRAGVG

SEQ ID NO: 24623 - protein, 1068 aa, Apolygus lucorum
MDQTPEMPHNPRQPIGSRGIRGGAQRRPRQGRRPSSPSSSSSSSQPSSSSSLNHQCAHCERAFTTRSGLGLHVSRKHPVAANAAINIERIQHRYASEELRRMAADEAVAVRNGVRNINVYLNERFPTRTVIAIKNIRLKPHYKQLVQEAILANSSGASPASPIADVEQQPAIQYPSPGTSGLLADLKTEVLRLGGQVGRIEGYESTYLQDLVRRAAEGLDNLEDEVAAYLGRIFPRVGDVTVTQHQGGPPSRVVLRGGRRAAKQARRREYHRVQSLWRKHPARVAAEVLEEPGENQVQPPLQEFVDFWEPLLSAPSHDPGERVVPPVSTRDSLRSIMCSPVLSDEAHKCRVKNSTSAGPDGVSARRWNKAPKTIKLLILNLLLLAGRPPKALTRTRTVFIPKKGGSGPGGYRPISVSSVVFRHFQKVLASRLQVAGVIGDVQRAFRSADGTAENLTVLQTVISLARIKRRQLHLAALDVAKAFDTVSHLALTDCLRGVGAPSRLIEYVACLYQEGVTVLEAGGEVSGDIRIGRGVRQGDPLSPLLFNLVVDTALGKLPTEVGFDLAPGVRVGALAFADDVILLAETREGLQIALNAFAKQLARCGLVVNPDKCGSVSLVPSGRQHKVKVVDGGFVVGQSPIPSRSVLEVWRYLGVDFMGVATITTSRVDLGRALARVTKAPLKPQQKLRLLRTYLLPKLTYGLVFGRLTAGRLQQLDREVRSAVRSWLKFPPGVPSAYFHAPVKSGGLGIVSLSACIPSLRRWRLLALQGSSWEVARAAADLDFVRQQLAWCDRATPSAPKPSSSAEFAAALHESVDGKELRQCSESLVSSQWVDWASEGIGARDYRHFHAIRVASLPTAVRCSRGSRGTTLPLCRACRSGNEHLYHVVQQCPRTHGGRILRHDAVAKQIAGALSSSGWDVERERLYHMPSDQGKKPDIVAVKPDQSCIILDVQVVNGSLDMEQTWRAKIRKYDTNDLRQAVSELKGVAPNNIRVMAATLSWRGVWCGKSATELRELGISVGVLRGITTRVLLGSYLNWWSFYRGTSLHPSLPPPPSSSSLIPRAGVG

SEQ ID NO: 24624 - protein, 1070 aa, Apolygus lucorum
MIDEADQPHNPRQPIGSRGIRGGAQRRPRQGRRPSSPSSSSSSSLHSSSSTASLDHQCAHCERAFTSRSGLGVHVRRKHPVAANAAIEIERVQPRYASEDLRRMAADEVVAVRNGVRNINVYLSERFPTRTVIAIKNLRLKPHYKQLVQEAILANSGGASPASPIAGVDQQSAIQYPSPGTSGLLADLKTEVLRLGGQVGRIEGYESTYLQDLARRAAEGLDNLEDMVAAYLGRIFPRVGDATVTRHQGRPPPRVVLRGGRRAAKQARRQEYHRVQSLWRKHPARVAAEVLEEPGEDQVQPPLQKFVDFWERLLSAPSHNPGERVVPPVSPRDSLRSILCSPVLLDEAHKCRVKNSTSAGPDGVSARRWNKAPNTIKLLILNLLMLAGRPPKALTRTRTVFIPKKGGSGPGGYRPISVSSVVFRHFQKVLASRLQVAGVIGDVQRAFRPADGTAENLTVLQTVISLSRIKRRQLHLAALDVAKAFDTVSHFALTDCLRGVGAPSRLIEYVACLYHEGVTVLEAGGEVSGDVRIGRGVRQGDPLSPLLFNLVVDTALGKLPTEVGFDLAPGVRVGALAFADDVILLAETREGLQIALNAFAKQLARCGLVVNPDKCGSVSLVPSGRQHKVKVVDGGFVVGQSPFPSRSVLEVWRYLGVDFMGVATITTSRVDLGRALARVTKAPLKPQQKLRLLRTYILPKLTYGLVFGRLTAGRLQELDRQVRSAVRSWLKFPPGVPSAYFHAPVKSGGLGIVSLSACIPSLRRQRLLALQGSSWEVARAAADLDFVRQQLAWCDRATPSAPKPSSSAEFAAALHESVDGKELRQCSESLVSSQWVDWASEGIGARDYRHFHAVRMATLPTAVRCSRGSRGTTLPLCRACRSGNEHLYHVVQQCPRTHGGRILRHDAVAKQIAGALSSSGWDVERERLYHMPSDQGKKPDIVAVKPDQSCIILDVQVVNGSLDMEQTWRAKIRKYDRDDLRQAVSELKGVVPNNIRVMAATLSWRGVWCGKSATELRELGISVGVLRGITTRVLLGSYLNWWSFYRGTSLHPSLPPPPSSSSLIPRAGVG

SEQ ID NO: 24625 - protein, 1070 aa, Apolygus lucorum
MDRTPEMPHNPRQPIGSRGIRGGAQRRPRQGRRPSSPSSSSSSSQPSSSSTASLNHQCAHCERAFTTRSGLGLHVSRKHPVAANAAIDIERIQHRYAFEELRRMAADEAVAVRNGVHNINVYLNERFPPRTVIAIKNIRLKPHYKQLVQEAILANSSGASPASPIADVELQPAIQYPSPGTSGLLADLKTEVLRLGGQVGRIEGYESTYLQDLVRRAAEGLDNLEDEVAAYLGRIFPRVGDVTVTQHQGGPPPRVVLRGGRRAAKQARRREYHRVQSLWRKHPARVAAEVLEEPGENQVQPPLQEFVDFWEPLLSAPSHDPGECVVPPVSTRDSLRSIMCSPVLSDEAHKCRVKNSTSAGPDGVSARRWNKAPKTIKLLILNLLLLAGRPPKALTRTRTVFIPKKGGSGPGGYRPISVSSVVFRHFQKVLASRLQVAGVIGDVQRAFRSADGTAENLTVLQTVISLARIKRRQLHLAALDVAKAFDTVSHLALTDCLRGVGAPSRLIEYVACLYQEGVTVLEAGGEVSGDIRIGRGVRQGDPLSPLLFNLVVDTALGKLPTEVGFDLAPGVRVGALAFADDVILLAETREGLQIALNAFAKQLARCGLVVNPDKCGSVSLVPSGRQHKVKVVDGGFVVGQSPIPSRSVLEVWRCLGVDFMGVATITTSRVDLGRALARVTKAPLKPQQKLRLLRTYLLPKLTYGLVFGRLTAGRLQQLDREVRSAVRSWLKFPPGVPSAYFHAPVKSGGLGIVSLSACIPSLRRRRLLALQGSSWEVARAAADLDFVRQQLAWCDRATPSAPKPSSSAEFAAALHESVDGKELRQCSESLVSSQWVDWASEGIGARDYRHFHAIRVASLPTAVRCSRGSRGTTLPLCRACRSGNEHLYHVVQQCPRTHGGRILRHDAVAKQIAGALSSSGWDVERERLYHMPSDQGKKPDIVAVKPDQSCIILDVQVVNGSLDMEQTWRAKIRKYDRNDLRQAVSELKGVAPNNIRVMAATLSWRGVWCGKSATELRELGISVGVLRGITTRVLLGSYLNWWSFYRGTSLHPSLPPPPSSSSLIPRAGVV

SEQ ID NO: 24626 - protein, 968 aa, Apolygus lucorum
MAADEVVAVRDGVRNINVYLSERFPMRTVIAIKNIRLRPHYKQLVQEAILANSGGASPASPIADVEQQPAIQYPSPGTSGLLADLKTEVLRLGGQVGRIEGYESTYLQDLARRAAEGLDNLENEVAAYLGRIFPRVGDATVTQHQGGPPPRVVLRGGRRAAKQARRREYHRVQSLWRKHPARVAAGVLEEPGVNQVQPPLQEFVDFWEPLLSAPSHDPGERVVPPVSTRDSLRSVMCSPVLSDEAHKCRVKNSTSAGPDGISARRWNKAPKTIKLLVLNLLLLAGRPPKALTRARTVFIPKKGGSGPGGYRPISVSSVVFRHFQKVLASRLQVAGIIGDVQRAFRPADGTAENLTVLQTVISLARMKRRQLHLAALDVAKAFDTVSHLALTDCLRGVGAPSRLIEYVACLYQEGVTVLEAGGEVSGDVRIGRGVRQGDPLSPLLFNLVVDTALGKLPTEVGFDLAPGVRVGALAFADDVILLAETREGLQIALNAFAKQLARCGLVVNPDKCGSVSLVPSGRQHKVKVVDGGFVIGQSPIPSRSVLEVWRYLGVDFMGVATISASHVDLGRALARVTKAPLKPQQKLRLLRTYLLPKLTYGLVFGRLTAGRLQELDRQVRSAVRSWLRFPPGVPSAYVHAPVKSGGLGIVSLSACIPSLRRQRLLALQGSSWEVARAAADLDFVRQQLAWCDRATPSAPKPSSSAEFAAALHESVDGKELRQCSESPVSSQWVDWASEGIGARDYRHFHAVRIATLPTAVRCSRGSRGTTLPLCRACRSGNEHLYHVVQQCPRTHGGRILRHDAVAKQIAGALSSSGWDVVERERLYHMPSDQGKKPDIVAVKPDQSCIILDVQVVNGSLDMEQTWRAKIRKYDRNDLRQAVSELKGVAPNNIRVMAATLSWRGVWCGKSATELRELGISVGVLRGITTRVLLGSYLNWWSFYRGTSLHPSLPPPPSSSSLIPRAGVG

SEQ ID NO: 24627 - protein, 1130 aa, Apolygus lucorum
MEQNIEWPHNPRQPIGSRGIRGGAQRRPRQGRRPSSPSSSSSSSQPSSSSTASLNHQCAHCERAFTTRSGLGLHISRKHPVAANDAIDIERIQHRYASEELRRMAADEAVAVRNGVRNINVYLNERFPTRTVIAIKNIRLKPHYKQLVQEAILANSSGASSASPIADVEQQPAIQYPSPGTSGLLADLKTEVLRLGGQVGRIEGYESTYLQDLVRRAAEGLDNLEDEVAAYLGRIFPQVGDATVTQHQGGPPPRVVLRGGRRAAKQARRREYHRVQSLWRKHPARVAAEVLEEPGENQVQPPLQEFVDFWEPLLSAPSHDPGERVVPPVSTRDSLRSIMCSPVLSDEAHKCRVKNSTSAGPNGVSARRWNKAPKTIKLLILNLLLLAGRPPKALTRTRTVFIPKKGGSGPGGYRLISVSSVVFRHFQKVLASRLQVAGVIGDVQRAFRPVDGTAENLTVLQTVISLARIKRRQLHLAALDVAKAFDTVSHLALTDCLRGVGAPSRLIEYVACLYQEGVTVLVAGGEVSGDIRIGRGVRQGDPLSPLLFNLVVDTALGKLPTEVGFDLAPGVRVGALAFADDVILLAETREGLQIALNAFAKQLARCGLVVNPDKCGSVSLVPSGRQHKVKVVDGGFVVGQSLIPSRSMLEVWRYLGVDFMGVATITTSRVDLGRALARVTKAPLKPQQKLRLLRTYLLPKLTYGLVFGRLTAGRLQQLDREVRSAVRSWLKFPPGVPSAYFHAPVKSGGLGIVSLSACIPSLRRQRLLALQGSSWEVARAAADLDFVRQQLAWCDRATPSAPKPSSSAEFAAALHESVDGKELRQCSESLVSSQWVDWASEGIGARDYRHFHAIRVASLPTAVRCSRVSRGTTLPLCRACRSGNEHLYHVVQQCPRTHGGRILRHDAVAKQIAGALSSSGWDVERERLYHMPSDQGKKPDIVAVKPDQSCIILDVQVVNGSLDMEQTWRAKIRKYDRNDLRQAVSELKGVAPNNIRVMAATLSWRGVWCGKSATELRELGISVGVLRGITTRVLLGSYLNWWSFYRGTSFILLSHPHLPHLPSSLGPASGESWASSPLFYLFIYFVFMACPLRQKRHFVFEGRSKKKKKKKKDSSLASLVLQVGGSALGQ

SEQ ID NO: 24628 - protein, 1070 aa, Apolygus lucorum
MENTQEQPHNPRLPIGTRGSRGGAQRRPRQGRRPSSPSSSSSSSLPSSSSTASLNHQCAHCERAFTTRSGLGLHVRRKHPVAANAAIDIERVQHRYASEELRRMAADEVVAVRDGVRNINVYLSERFPMRTVIAIKNIRLKPHYKQLVQEAILANSSGASPASPVADVEQQPAIQYPSPGTSGLLADLKTEVLRLGGQVGRIEGYESTYLQGLARRAAEGLDNLENEVAAYLGRIFPRVGDATVTQHQGGPPPGVVLRGGRRAAKQARRREYHRVQSLWRKHPARVAAEVLEEPGENQVQPPLQEFVDFWEPLLSAPSHDPGERVVPPVSTRDSLRGIMCSPVLSDEAHKCRVKNSTSAGPDGISARCWNKAPKTIKLLVLNLLLLAGRPPKALTRARTVFIPKKGGSGPGGYRPISVSSVVFRHFQKVLASRLQVAGIIGDVQRAFRPADGTAENLTVLQTVISLARMKRRQLHLAALDVAKAFDTVSHLALTDCLRGVGAPSRLIEYVACLYQEGVTVLEAGGEVSGDVRIGRGVRQGDPLSPLLFNLVVDTALGKLPTEVGFDLAPGVRVGALAFADDVILLAETREGLQIALNAFAKQLARCGLVVNPDKCGSVSLVPSGRQHKVKVVDGGFVIGQSPIPSRSVLEVWRYLGVDFMGVATISASRVDLGRALARVTKAPLKPQQKLRLLRTYLLPKLTYGLVFGRLTAGRLQELDRQVRSAVRSWLRFPPGVPSAYVHAPVKSGGLGIVSLSACIPSLRRQRLLALQGSSWEVARAAADLDFVRQQLAWCDRATPSAPKPSSSAEFAAALHESVDGKELRQCSESPVSSQWVDWASEGIGARDYRHFHAVRMATLPTAVRCSRGSRGTTLPLFRACRSGNEHLYHVVQQCPRTYGGRILRHDAVAKQIAGALSSSGWDVERERLYHMPSDQGKKPDIVAVKPDQSCIILDVQVVNGSLDMEQTWRAKIRKYDRNDLRQAVSELKGVAPNNIRVMAATLSWRGVWCGKSATELRELGISVGVLRGITTRVLLGSYLNWWSFYRGTSLHPSLPPSPSSSSLIPRAGVG

SEQ ID NO: 24629 - protein, 732 aa, Apolygus lucorum
MCSPVLSDEAHKCRVKNSTSAGPDGISARRWNKAPKTIKLLVLNLLLLAGRPPKALTRARTVFIPKKGGSGLGGYRPISVSSVVFRHFQKVLASRLQVAGIIGDVQRAFRPADGTAENLTVLQTVISLARMKRRQLHLAALDVAKAFDTVSHLALTDCLRGVGAPSRLIEYVACLYQEGVTVLEAGGEVSGDVRIGRGVRQGDPLSPLLFNLVVDTALGKLPTEVGFDLAPGVRVGALAFADDVILLAETREGLQIALNAFAKQLARCGLVVNPDKCGSVSLVPSGRQHKVKVVDGGFVVGQSPIPSRSVLEVWRYLGVDFMGVATISASRVDLGRALARVTKAPLKPQQKLRLLRTYLLPKLTYGLVFGRLTAGRLQELDRQVRSAVRSWLRFPPGVPSAYVHAPVKSGGLGIVSLSACIPSLRRQRLLALQGSSWEVARAAADLDFVRQQLAWCDRATPSAPKPSLSAEFAAALHESVDGKELRQCSESPVSSQWVDWASEGIGARDYRHFHAVRMATLPTAVRCSRGSRGTTLPLCRACRSGNEHLYHVVQQCPRTHGGRILRHDAVAKQIAGALSSSGWDVERERLYHMPSDQGKKPDIVAVKPDQSCIILDVQVVNGSLDMEQTWRAKIRKYDRNDLRQAVSELKGVAPNNIRVMAATLSWRGVWCGKSATELRELGISVGVLRGITTRVLLGSYLNWWSFHRGTSLHPSLPPPPSSSSLIPRAGVG

SEQ ID NO: 24630 - protein, 1070 aa, Apolygus lucorum
MDQTDNMPHNPRLPIGTRGSRGGAQRRPRQGRRPSSPSSSSSSSQPSSSSTASLNHQCAHCERAFTTRSGLGLHVRRKHPVAANAAIDIERVQHRYASEELRRMAADEVVAVPDGVRNINVYLSERFPMRTVIAIKNIRLKPHYKQLVQEAILANSSGASPASPIADVEQQPAIQYPSPGTSGLLADLKTEVLRLGGQVGRIEGYESTYLQDLARRAAEGLDNLENEVAAYLGRIFPRVGDATVTQHQGGPPPRVVLRGGRRAAKQARRREYHRVQSLWRKHPARVAAEVLEEPGENQVQPPLQEFVDFWEPLLSAPSHDPGERVVPPVSTRDSLRGIMCSPVLSDEAHKCRVKNSTSAGPDGISARRWNKAPKTIKLLVLNLLLLAGRPPKALTRARTVFIPKKGGSGPGGYRPISVSSVVFRHFQKVLASRLQVAGIIGDIQRAFRPADGTAENLTVLQTVISLARMKRRQLHLAALDVAKAFDTVSHLALTDCLRGVGAPSRLIEYVVCLYQEGVTVLEAGGEVSGDVRIGRGVRQGDPLSPLLFNLVVDTALGKLPTEVGFDLAPGVRVGALAFADDVILLAETREGLQIALNAFAKQLARCGLVVNPDKCGSVSLVPSGRQHKVKVVDGGFVIGQSPIPSRSVLEVWRYLGVDFMGVATISASRVDLGRALARVTKAPLKPQQKLRLLRTYLLPRLTYGLVFGRLTAGRLQELDRQVRSAVRSWLRFPPGVPSAYFHAPVKSGGLGIVSLSACIPSLRRQRLLALQGSSWEVARAAADLDFVRQQLAWCDRATPSAPKPSSSAEFAAALHESVDGKELRQCSESPVSSQWVDWASEGIGARDYRHFHAVRVATLPTAVRCSRGSRGTTLPLCRACRSGNEHLYHVVQQCPRTHGGRILRHDAVAKQIAGALSSSGWDVERERLYHMPSDQGKKPDIVAVKPDQSCIILDVQVVNGSLDMEQTWRAKIRKYDRNDLRQAVSEVKGVAPNNIRVMAATLSWRGVWCGKSATELRELGISVGVLRGITTRVLLGSYLNWWSFYRGTSLHPSLPPPPSSSSLIPRAGVG

SEQ ID NO: 24631 - protein, 1070 aa, Apolygus lucorum
MERNIEWPHNPCQPIGSRGIRGGAQRRPRQGRRPSSPSSSSSSSQPSSSSTASLNHQCAHCERAFTTRSGLGLHISRKHPVAANAAIDIERIQHRYASEELRRMAADEAVALRNGVRNINVYLNERFPTRTVIAIKNIRLKPHYKQLVQEAILANSSGASPASPIADVEQQPAIQYPSPGTSGLLADLKTEVLRLGGQVGRIEGYESTYLQDLVRRAAEGLDNLEDEVAAYLGRIFPRVGDATVTQHQGGPPPRVVLRGGRRAAKQARRREYHRVQSLWRKHPARVAVEVLEEPGENQVQPPLQEFVDFWEPLLSAPSHDPGERVVPPVSTRDSLRSIMCSPVLSDEAHKCRVKNSTSAGPDGVSARRWNKAPKTIKLLILNLLLLAGRPPKALTRTRTVFIPKKGGSGPGGYRPISVSSVVFRHFQKVLASRLQVAGVIGDVQRAFRPADGTAENLTVLQTVISLARIKRRQLHLAALDVAKAFDTVSHLALTDCLRGVGAPSRLIEYVACLYQEGVTVLEAGGEVSGDIRIGRGVRQGDPLSPLLFNLVVDTALGKLPTEVGFDLAPGVRVGALAFADDVILLAETREGLQIALNAFAKQLARCGLVVNPDKCGSVSLVPSGRQHKVKVVDGGFFVGQSPIPSRSVLEVWRYLGVDFMGVATITASRVDLGRALARVTKAPLKPQQKLRLLRMYLLPKLTYGLVFGRLTAGRLQQLDREVRSAVRSWLKFPPGVPSAYVHAPVKSGGLGIVSLSACIPSLRRRRLLALQGSSWEVARAAADLDFVRQQLAWCDRATPSAPKPSSSAEFAAALHESVDGKELRQCSESLVSSQWVDWASEGIGARDYRHFHAIRVACLPTAVRCSRGSRGTTLPLCRACRSGNEHLYHVVQQCPRTHGGRILRHDAVAKQIAGALSSSGWDVERERLYHMPSDQGKKPDIVAVKPDQSCIILDVQVVNGSLDMEQTWRAKIRKYDTNDLRQAVSELKGVAPNNIRVMAATLSWRGVWCGKSATELRELGISVGVLRGITTRVLLGSYLNWWSFYRGTSLHPSLPPPPSSSSLIPRAGVG

SEQ ID NO: 24632 - protein, 967 aa, Apolygus lucorum
MAADEVVAVRNGVRNINVYLSERFPTRTVIAIKNIRLKPHYKQLVQEAILANSGGASPASPIAGMDQQSAIQYPSPGTSGLLAELKTEVLRLGGQVGRIEGYESTYLQDLARRAAEGLDNLEDMVAAYLGRIFPRVGDGTVTQHQGGPPPRVVLRGGRRAAKQARRREYHRVQSLWRKHPARVAAEVLEEPGEDQVQPPLQEFVDFWEPLLSAPSHNPGERVVPPVSTRDSLRSTLCSPVLLDEAHKCRVKNSTSAGPDGVSARRWNKAPNTIKLLILNLLMLAGRPPKELTRTRTVFIPKKRGSGPGGYRPISVSSVVFRHFQKVLASRLQVAGVIGDVQRAFRPADGTAENLTVLQTVISLARIKRRQLHLAALDVAKAFDTVSHLALTDCLRGVGAPSRLIEYVACLYHEGVTVLEAGGEVSGDLRIGRGVRQGDPVSPLLFNLVVDTALGKLPTEVGFDLAPGVRVGALAFADDVILLAETREGLQIALNAFAKQLSRCGLVVNPDKCGSVSLVPSGRQHKVKVVDGGFVIGQAPIPSRSVLEVWRYLGVDFMGVATITASRVDLGRALARITKAPLKPQQRLRLLRTYLLPKLTYGLVFSRLSAGRLQELDREVRSAVRSWLRFPPGVPSAYIHAPVKSGGLGIVSLSACIPSLRRQRLLALQGSSWEVARVAAGLDFVRQQSAWCDRATPSAPKPSSSAEFAAALHESVDGKELRQCSESLISSQWVDWASEGIGARDYRNFHAVRVATLPTAVQCSRGSRGMTDTLCRACQSGNEHLYHVVQQCPQTHGGRILRHDAVAKQIAGALSSSGWDVERERLYHMPSDQGKKPDIVAVKPDRSCIILDVQVVNGSMDMEQTWRAKIRKYDRDDLRQAVSELKGVEPNNIRVMAATLSWRGVWCGKSATELRELGISVGVHRGVTRRVLLGSYLNWWSFYRGTSLHPSLPPPPSSSSLIPRAGVG

SEQ ID NO: 24633 - protein, 1020 aa, Apolygus lucorum
MRNREFPCAHCERAFTSRSGLGLHVRRKHPVAANAAIDIERVQHRYASEELRRMAADEALAVRNGVRNINVYLNERFPSRTVIAIKNIRLKPHYKQLVQEAILANSSGASPASPVADMEQQPAIQYPSPGSSGLLADLKTEVLRLGGQVGRIEGYDSAYLQDLARRAVEGPDNLEDDVAAYLGRTFPRVGDATVMQHQGGRPPTVVLHGGRRAAKQARRRRYQRVQRLWRKHPARVATEVLEEPGEDQVEPPLQEFVDFWEPLLSAPSHNPGERVVPPVSTRDSLRSIMCAPVLLDEAHRCRVKNSTSAGPDGVSAQRWNKAPNTIKLLILNLLLLAGRPPKALTRSRTVFIPKKGGSGPGGYRPISISSVVFRHFQKVLASRLQVAGVIGDVQRAFRPADGTAENLTVLQTVISLARMKRRQLHLAALDVAKAFDTVSHLALTDCLRGVGAPSRLIEYVACLYHEGVTVLEAGGEMSRDVLIGRGVRQGDPLSPLLFNLVVDTALGKLPTEVGFDLAPGVRVGALAFADDVILLAETREGLQIALNAFAKQLARCGLVVNPDKCGSVSLVPSGRQHKVKVVDGGFVVGQSPIPSRSVLEVWRYLGVDFMGVATITASRVDLGRALERVTKAPLKPQQKLRLLRTYLLPKLTYGLVFGRLTAGRLQELDRKVRSAVRSWLRFPPGVPSAYIHAPVKSGGLGIVSLSASIPSLRRQRLLALQGSSWEVARAAADLDFVRQQLAWCDRATPSAPKPSSSAEFAAALHESVDGKELRQCSESPISSQWVDWASEGIGARDYRHFHAIRVASLPTAVRCSRGSRGTTLPLCRACRSGNEHLYHVVQQCPRTHGGRILGHDAVAKQIAGALSSSGWDVERERLYHMPSDQGKKPDIVAVKPDQSCIILDVQVVNGSLDMEQTWQAKIRKYDRNDLRQAVSELKGVAPNNIRVMAATLSWRGVWCGKSATELRELGISLGVLRGITTRVLLGSYLNWWSFYRGTSLHPSLPPPPSSSSLIPRAGVG

SEQ ID NO: 24634 - protein, 1075 aa, Apolygus lucorum
MCFPVMENIPNEPHNPRRPNGSRGIRGGAQRRPRQGRRPSSPSSSSSSSLPSSSSTAPLDHQCAHCERAFTSRSGLGVHVRRKHPVAANEEIDVERVQPRYASEDLRRMAADEVVAVRNGVRNINVYLSERFPTRTVIAIKNLRLKPHYKQLVQEAILANSSGASPASPVAGVDQQSAIQYPSPGTSGLLADLKTEVLRLGGLVGRIEGYESTYLQDLARRAAEGLDNLEDMVAAYLGRIFPRVGDATVTQHQGGHPPRVVLRGGRRAAKQARRREYHRVQSLWRKHPARAAAEVLEEPGEDQVQPPLQEFVDFWEPLLSAPSHNPGERVVPPVSTRDSLRSILCSPVLLDEAHKCRVKNSTSAGPDGVSARRWNKAPNTIKLLILNLLMLAGRPPKALTRTRTVFIPKKGGSGPGGYRPISVSSVVFRHFHKVLASRLQVAGVIGDVQRAFRPADGTAENLTVLQTVISLARIKRRQLHLAALDIAKAFDTVSHLALTDCLCGVGAPSRLIEYVACLYHEGVTVLEAGGEVSGDVRIGRGVRQGDPLSPLLFNLVVDTALGKLPTEVGFDLAPGVRVGALAFADDVILLAETREGLQIALNAFAKQLSRCGLVVNPDKCGSVSLVPSGRQHKVKVVDGGFVIGQAPIPSRSVLEVWRYLGVDFMGVATITASHVDLGRALARITKAPLKPQQRLRLLRTYLLPKLTYGLVFGRLTAGRLQELDREVRSAVRSWLRFPPGVPSAYIHAPVKSGGLGIVSLSASIPSLRRQRLLALQGSSWEVARVAAGLDFVRQQLAWCDRATPSAPKPSSSAEFAAALHESVDGKELRQCSESLLSSQWVDWASEGIGARDYWNFHAVRVATLPTAVRCSRGSRGVTDTLCRACRSGNEHLYHVVQQCPRTHGGRILRHDAVAKQIAGALSSSGWDVERERLYHMPSDQGKKPDIVAVKPDRSCIILDVQVVNGSMDMEQTWRAKIRKYDRDDLRQAVSELKGVAPNNITVMAATLSWRGVWCGKSATELRELGISVGVLRGVTRRVLLGSYLNWWSFYRGTSLHPSLPPPPSSSSLIPRAGVG

SEQ ID NO: 24635 - protein, 1070 aa, Apolygus lucorum
MEQNISEPHNPRQPIGSRGIRGGAQRRPRQGRRPSSPSSSSSSSLPSSSSTASLNHQCAHCERAFTTRSGLGLHIRRKHPVAANAAIDIERIQPRYASEELRRMAADEAVAVRNGVRNINVYLNERFPTRTVIAIKNIRLKPHYKQLVQEAILANSSGASPASPIADVEQQPAIQYPSPGTSGLLADLKTEVLRLGGQVGRIEGYESTYLQDLVRRAVEGLDNLEDEVAAYLGRIFPRVGDATVTRHQGGPPPRMVLRGGRRAAKQARRREYHRVQSLWRKHPARVAAEVLEEPGENQVQPPLQEFVDFWEPLLSAPSHDPGECVVPPVSTRDSLRSIMCSPVLSDEAHKCRVRNSTSAGPDGVSARRWNKAPKTIKLLILNLLLLAGRPPKALTRTRTVFIPKKGGSGPGGYRPISVSSVVFRHFQKVLASRLQVAGVIGDVQRAFRPADGTAENLTVLQTVISLARIKRRQLHLAALDVAKAFDTVSHLALTDCLRGVGAPSRLIEYVACLYQEGVTVLEAGGEVSGDIRIGRGVRQGDPLSPLLFNLVVDTALGKLPTEVGFDLAPGVRVGALAFADDVILLAETREGLQIALNAFAKQLAGCGLVVNPDKCGSVSLVPSGRQHKVKVVDGGFVVGQSPIPSRSVLEVWRCLGVDFMGVATITASRVDLGRALARVTKAPLKPQQKLRLLRTYLLPKLTYGLVFGRLTAGRLQELDREVRSAVRSWLKFPPGVPSAYVHAPVKSGGLGIVSLSACIPSLRRRRLLALQGSSWEVARAAADLDFVRQQLAWCDRATPSAPKPSSSAEFAAALHESVDGKELRQCSESLVSSQWVDWASEGIGARDYRHFHAIRVASLPTAVRCSRGSRGTTLPLCRACRSGNEHLYHVVQQCPRTHGGRILRHDAVAKQIAGALSSSGWDVERERLYRMPSDQGKKPDIVAVKPDQSCIILDVQVVNGSLDMEQTWRAKIRKYDTNDLRQAVSELKGVAPNNIRVMAATLSWRGVWCGKSATELRELGISVGVLRGITTRVLLGSYLNWWSFYRSTSLHPSLPPPPSSSSLIPRAGVG

SEQ ID NO: 24636 - protein, 1070 aa, Apolygus lucorum
MEQNIEWPHNPRQPIGSRGIRGGAQRRPRQGRRPSSPSSSSSSSQPSSSSTASLNHQCAHCERAFTTRSGLGLHISRKHPVAANAAIDIERIQHRYASEELRRMAADEVVAVRDGVRNINVYLSERFPMRTVIAIKNIRLKPHYKQLVQEAILANSSGASPASPVADVEQQPAIQYPSPGTSGLLADLKTEVLRLGGQVGRIEGYESTYLQDLVRRAAEGLDNLEDEVAAYLGRIFPRVGDATVTQHQGGPPPRVVLRGGRRAAKQARRREYHRVQSLWRKHPARVAAEVLEEPGENQVQPPLQEFVDFWEPLLSAPSHDPGERVVPPVSTRDSLRSIMCSPVLSDEAHKCRVKNSTSAGPDGVSARRWNKAPKTIKLLILNLLLLAGRPPKALTHTRTVFIPKKGGSGPGGYRPISVSSVVFRHFQKVLASRLQVAGVIGDVQRAFRPADGTAENLTVLQTVISLARIKRRQLHLAALDVAKAFDTVSHLALTDCLRGVGAPSRLIEYVACLYQEGVTVLEAGGEVSRDIVIGRGVRQGDPLSPLLFNLVVDTALGKLPTEVGFDLAPGVRVGALAFADDVILLAETREGLQIALNAFAKQLARCGLVVNPDKCGSVSLVSSGRQHKVKVVDGGFVVGQSPIPSRSVLEVWRYLGVDFMGVATITASRVDLGRALARVTKAPLKPQQKLRLLRVYLLPKLTYGLVFGRLTAGRLQQLDREVRSAVRSWLKFPPGVPSAYVHAPVKSGGLGVVSLSACIPSLRRRRLLALQGSSWEVARAAADLDFVRQQLAWCDRATPSAPKPSSSAEFAAALHESVDGKELRQCSESLVSSQWVDWASEGIGARDYRHFHAIRVASLPTAVRCSRGSRGTTLPLCRACRSGNEHLYHVVQQCPRTHGGRILRHDAVAKQIAGALSSSGWDVERERLYHMPSDQGKKPDIVAVKPDQSCIILDVQVVNGSLDMEQTWRAKIRKYDTNDLRQAVSELKGVAPNNIRVMAATLSWRGVWCGKSATELRELGISVGVLRGITTRVLLGSYLNWWSFYRGTSLHPSLPPPPSSSSLIPRAGVG

SEQ ID NO: 24637 - protein, 1070 aa, Apolygus lucorum
MEDETQVPHNPRQPIGSRGIRGGAQRRPRQGRRPSSPSSSSSSSLPSSSSSASLNHQCAHCERAFTTRSGFGLHIRRKHPVAANAAIDIERIQHRYASEELRRMAADEAVAVRNGVRNINVYLNERFPTRTVIAIKNIRLKPHYKQLVQEAILANNSGASPASPVADVEQQPAIQYPSPGTSGLLADLKTEVLRLGGQVGRIEGYESTYLQDLVRRAVEGLDNLEDEVAAYLGRIFPRVGDATVTRHQGGPPPRMVLRGGRRAAKQARRREYHRVQSLWRKHPARVAAEVLEEPGENQVQPPLQEFVDFWEPLLSAPSHDPGERVVPPVSTRDSLRSIMCSPVLSDEAHKCRVKNSTSAGPDGISARRWNKAPKTIKLLVLNLLLLAGRPPKALTRARTVFIPKKGGSGPGGYRPISVSSVVFRHFQKVLASRLQVAGIIGDVQRAFRPADGTAENLTVLQTVISLARMKRRQLHLAALDVAKAFDTVSHLALTDCLRGVGAPSRLIEYVACLYQEGVMVLEAGGEVSGDVRIGRGVRQGDPLSPLLFNLVVDTALGKLPTEVGFDLAPGVRVGALAFADDVILLAETREGLQIALNAFAKQLARCGLVVNPDKCGSVSLVPSGRQHKVKVVDGGFVIGQSPIPSRSVLEVWRYLGVDFMGVATISASRVDLGRALARVTKAPLKPQQKLRLLRTYLLPKLTYGLVFGRLTAGRLQELDRQVRSAVRSWLRFPPGVPSAYVHAPVKSGGLGIVSLSACIPSLRRQRLLALQGSSWEVARAAADLDFVRQQLAWCDRATPSAPKPSSSAEFAAALHESVDGKELRQCSESPVSSQWVDWASEGIGARDYRHFHAVRMATLPTAVRCSRGSRGTTLPLCRACRSGNEHLYHVVQQCPRTHGGRILRHDEVAKQIAGALSSSGWDVERERLYHMPSDQGKKPDIVAVKPDQSCIILDVQVVNGSLDMEQTWRAKIRKYDRNDLRQAESELKGVAPNNIRVMAATLSWRGVWCGKSATELRELGISVGVLRGITTRVLLGSYLNWWSFYRGTSLHPSLPPPPSSSSLIPRAGVG

SEQ ID NO: 24638 - protein, 964 aa, Apolygus lucorum
MDTNQDQPHNPRQPIGSRGIRGGAQRRPRQGRRPSSPSSSSSSSLPSSSSTASLNHQCAHCERAFTTRSGLGLHVRWKHPVAANAAIDIERIQPRYASEELRRMAADEAVAVRNGVPNINVYLNERFPTRTVIAIKNIRLKPHYKQLVQEAILANSSGASPASPIADVEQQPAIQYPSPGTSGLLADLKTEVLRLGGQVGRIEGYESTYLQDLVRRAVEGLDNLEDEVAAYLGRIFPRVGDATVTRHQGGPPPRMVLRGGRRAAKQARRREYHRVQSLWRKHPARVAAEVLEEPGENQVQPPLQEFVDFWEPLLSAPSHDPGECVVPPVSTRDSLRSIMCSPVLSDEAHKCRVRNSTSAGPDGVSARRWNKAPKTIKLLILNLLLLAGRPPKALTRTRTVFIPKKGGSGPGGYRPISVSSVVFRHFQKVLASRLQVAGVIGDVQRAFRPADGTAENLTVLQTVISLARIKRRQLHLAALDVAKAFDTVSHLALTDCLRGVGAPSRLIEYVACLYQEGVTVLEAGGEVSGDVRIGRGVRQGDPLSPILFNLVVDTALGKLPTEVGFDLAPGVRVGALAFADDVILLAETREGLQIALNAFAKQLAGCGLVVNPDKCGSVSLVPSGRQHKVKVVDGGFVVGQSPIPSRSVLEVWRYLGVDFMGVATITASRVDLGRALARVTKAPLKPQQKLRLLRTYLLPKLTYGLVFGRLTAGRLQELDREVRSAVRSWLKFPPGVPSAYVHAPVKSGGLGIVSLSACIPSLRRRRLLALQGSSWEVARAAADLDFVRQQLAWCDRATPSAPKPSSSAEFAAALHESVDGKELRQCSESLVSSQWVDWASEGIGARDYRHFHAIRVASLPTAVRCSRGSRGTTLPLCRACRSGNEHLYHVVQQCPRTHGGRILRHDAVAKQIAGALSSSGWDVERERLYHMTSDQGKKPDIVALHYPGCPSCQWQLGHGADLAG

SEQ ID NO: 24639 - protein, 967 aa, Apolygus lucorum
MAADEVVAVRNGVRNINVYLSERFPTRTVIAIKNIRLKPHYKQLVQEVILANSSGASPPSPVADVEQQPAIQHPSPGTSGLLADLKTEVLRLGGQVGRIEGYESTYLQDLARRAAEGLDNLENEVAAYLGRIFPRVGDATVTHHQGGPPPRVVLRGGRRTAKQARRREYHRVQSLWRKHPARVAAEVLEEPGENQVQPPLQEFVDFWEPLLSAPSHDPGERVVPPASTRDSLRGIMCSPVLSDEAHKCRVKNSTSAGPDGISARRWNKAPRTIKLLLLNLLLLAGRPLKALTRTRTVFIPKKGGSGPGGYRPISVSSVVFRHFQKVLASRLQVAGIIGDVQRAFRPADGTAENLTVLQTVISLARMKRRQLHLAALDVAKAFDTVSHFALTDCLRGVGAPSRLIEYVACLYHEGVTVLEAGGEVSGDVRIGRGVRQGDPLSPLLFNLVVDTALGKLPTEVGFDLAPGVRVGALAFADDVILLAETREGLQIALNAFAKQLARCGLVVNPDKCGSVSLVPSGRQHKVKVVDGGFVIGQSPIPSRSVLEVWRYLGVDFMGVATISASRVDLGRALARVTKAPLKPQQKLRLLRTYLLPKLTYGLVFGRLTGGRLQELDRQVRSAVRSWLRFPPGVPSAYVHAPVKSGGLGVVSLSACIPSLRRQRLLALQGSSWEVARAAADLDFVRQQLAWCDRATPSAPKPSSSAEFAAALHESVDGKELRQCSESPVSSQWVDWASEGIGARNYRHFHAVRMATLPTAVRCSRGSRGTTLPLCRACRSGNEHLYHVVQQCPRTHGGRILRHDAVAKQIAGALSSSGWDVERERLYHMPSDQGKKPDIVAVKPDQSCIILDVQVVNGSLDMEQTWRAKIRKYDRNDLRQAVSELKGVAPNNIRVMAATLSWRGVWCGKSATELRELGISVGVLRGITTRVLLGSYLNWWSFYRGTSLHPSLPPPPSSSSLIPRAGVG

SEQ ID NO: 24640 - protein, 1095 aa, Apolygus lucorum
MTLWRIGREPLSTGSLTLHFKRPPVMDQTDNMPHNPRLPIGTRGSRGGAHRRPRQGRRPSSPSSSSSSSQPSSSSTASLNHQCAHCERAFTTRSGLGLHVRRKHPVAANAAIDIERVQHRYASEELRRMAADVVVAVRDGVRNINVYLSERFPMRTVIAIKNIRLKPHYKQLVQEAILANSSGASPASPVADVEQQPAIQYPSPGTSGLLADLKTEVLRLGGQVGRIEGYESTYLQDLARRAAEGLDNLENEVAAYLGRIFPRVGDATVTQHQGGPPPRVVLRGGRRAAKQARRREYHRVQSLWRKHPARVAAEVLEEPGENQVQPPLQEFVDFWEPLLSAPSHDPGERVVPPVSTRDSLRSIMCSPVLSDEAHKCRVKNSTSAGPDGISARRWNKAPKTIKLLVLNLLLLAGRPPKALTRARTVFIPKKGGSGPGGYRPISVSSVVFRHFQKVLASRLQVAGIIGDVQRAFRPADGTAENLTVLQTVISLARMKRRQLHLAALDVAKAFDTVSHLALTDCLRGVGAPSRLIEYVACLYQEGVTVLEAGGEVSGDVRIGRGVRQGDPLSPLLFNLVVDTALGKLPTEVGFDLAPGVRVGALAFADDVILLAETREGLQIALNAFAKQLARCGLVVNPDKCGSVSLVPSGRQHKVKVVDGGFVIGQSPIPSRSVLEVWRYLGVDFMGVATISASRVDLGRALARVTKAPLKPQQKLRLLRTYLLPKLTYGLVFGRLTAGRLQELDRQVRSAVRSWLRFPPGVPSAYVHAPVKSGGLGIVSLSACIPSLRRQRLLALQGSSWEVARAAADLDFVRQQLAWCDRATPSAPKPSSSAEFAAALHESVDGKELRQCSESPVSSQWVDWASEGIGARDYRHFHAVRMATLPTAVRCSRGSRGTTLPLCRACRSGNEHLYHVVQQCPRTHGGRILRHDAVAKQIAGALSSSGWDVERERLYHMPSDQGKKPDIVAVKPDQSCIILDVQVVNGSLDMEQTWRAKIRKYDRNDLRQAVSELKGVEPNNIRVMAATLSWRGVWCGKSATELRELGISVGVLRGITTRVLLGSYLNWWSFYRGTSLHPSLPPPPSSSSLIPRAGVG

SEQ ID NO: 24641 - protein, 1070 aa, Apolygus lucorum
MNEENEEPHNPRLPIGTRGSRGGAQRRPRQGRRPSSPSSSSSSSLPSSSSTASLNHQCAHCERAFTTRSGLGLHVRRKHPVAANAAIDIERVQHRYASEELRRMAADEVVAVRDGVRNINVYLSERFPMRTVIAIKNIRLKPHYKQLVQEAILANSSGASPASPIADVEQRPAIQYPSPGTSGLLADLKTEVLRLGGQVGRIEGYESTYLQDLARRAAEGLDNLENEVAAYLGRIFPRVGDATVTQHWGGPRPGVVLRGGRRAAKQARRREYHRVQSLWRKHPARVAAEVLEEPGENQVQPPLQEFVDFWEPLLSAPSHDPGERVVPPVSTRDSLRSIMCAPVLSDEAHKCRVKNSTSAGPDGISARRWNKAPKTIKLLVLNLLLLAGRPPKALTRARTVFIPKKGGSGPGGYRPISVSSVVFRHFQKVLASRLQVAGIIGDVQRAFRPADGTAENLTVLQTVISLARMKRRQLHLAALDVAKAFDTVSHLALTDCLRGVGAPSRLIEYVACLYQEGVTVLEAGGEVSGDVRIGRGVRQGDPLSPLLFNLVVDTALGKLPTEVGFDLAPGVRVGALAFADDVILLAETREGLQIALNAFARQLARCGLVVNPDKCGSVSLVPSGRQHKVKVVDGGFVIGQSPIPSRSMLEVWRYLGVDFVGVATISASRVDLGRALARVTKAPLKPQQKLRLLRTYLLPKLTYGLVFGRPTAGRLQELDRQVRSAVCSWLRFPPGVPSACVHAPVKSGGLGIVTLSACIPSLRRQRLLALQGSSWEVARAAADLDFVRQQLAWCDRATPSAPKPSSSAEFAAALHESVDGKKPRQCSESLVSSQWVDWALEGIGARDYRHFHAVCMATLPTAVQCSRGSRGTTLPLCRACWSGNEHLYHVVQQCPRTHGGRILRHDAVAKQIAGALSSSGWDVERERLYHMPSDQGKKPDIVAVKPDQSCIILDVQVVNGSLVMEQTWRAKIRKYDRNDLRQAVSELKGVAPNNIRVMAATLSWRGVWCGKSATELRELGITVGVLCGITTRVLLGSYLNWWSFYRGTSLHPSLPPPPSSSSLIPRAGVG

SEQ ID NO: 24642 - protein, 878 aa, Apolygus lucorum
MRLGGQVGRIEGYESTYLQDLARRAAEGSEMLEDEVAAYLGRIFPRVGDATVTRHQRGPPLRMVLRGGRRAAKQARRREYHRVQSLWGKHPARVAAEVLEEPGENQVQPPLQEFVDFWEPLLSAPSHDPGERVVPPVSTRDSLRGIMCSPVLLDEAHKCRVKNSTSAGPDGISARRWNKAPKTIKLLILNLLLLAGRPPKALTRTRTVFIPKKGGSGPGGYRPISVSSVVFRHFQKVLASRLQVAGVIGDVQRAFRPADGTAENLTVLQTVISLARIKRRQLHLAALDVAKAFDTVSHFALTDCLHGVGAPTRLIEYVACLYHEGVTVLEAGGEMSRDIMIGRGVRQGDPLSPLLFNLVVDTALGKLPTEVGFDLAPGVRVGALAFADDVILLAETREGLQIALNTFAKQLARCGLVVNPDKCGSVSLVPSGRQHKVKVVDGGFVIGQSPIPSRSVLEVWRYLGVDFMGVATITASRVDLGRALARVTKAPLKPQQKLRLLRTYLLPRLTYGLVFGRLTAGRLQELDREVRSAVRSWLKFPPGVPSAYIHAPVKSGGLGIVSLSASIPSLRRQRLLALRGSSWGVARAAADLDFVRQQLAWCDRATPSAPKPSSSAEFAAALHESVDGKELRQCSESLISSQWVDWASEGIGARDYRHFHAVRVASLPTAVRCTRGSRGATLPLCRACRSRSEHLYHVVQQCPRTHGGRILRHDAVAKQIAGALSSSGWDVERERLYHMPSDQGKKPDIVAVKPDQSCIILDVQVVNGSLDMEQTWRAKIRKYDMNDLRQAVSELKGVAPNNIRVMAATLSWRGVWCGKSATELRELGIPVGVLRGITTRVLLGSYLNWWSFYRGTSLHPSLPPPPSSSSLIPRAGVG

SEQ ID NO: 24643 - protein, 967 aa, Apolygus lucorum
MAADEVVAVRNGVRNINVYLSERFPMRTVIAIKNIRLKPHYKQLVQEAILANSSGASPASPIADVEQQSAIQYPSPGTSGLLADLKTEVMRLGGQVGRIEGYESAYLQDLVRRAAEGLDNLEDEVAAYLGRIFPRVEDTTVTQHQGGPPPRVMLRGGRRAAKQARRREYHRVQSLWKKHPARVAAEVLEEPGENQVQPPLQEFVDFWEPLLSAPSHDPGERVVPPVSTRDSLRGIMCLPVLSDEAHKCRVRNSTCAGPDGISARRWNKAPKTIKLLILNLLLLAGRPPKALTRARTVFIPKKGGSGPGGYRPISVSSVVFRHFQKVLASRLQVAGVIGDVQRAFRPADGTAENLTVLQTVVSLARIKRRQLHLAALDVAKAFDTVSHLALTDCLRGVGAPSRLIEYVACLYQEGVTVLEAGGEVSRDVRIGRGVRQGDPLSPLLFNLVVDTALGKLPTEVGFDLAPGVRVGALAFADDVILLAETREGLQIALNAFAKQLARCGLVVNPDKCGSVSLVPSGRQHKVKVVDGGFVVGQSPIPARSVLEVWRYLGVDFMGVATITASRVDLGRALARVTKAPLKPQQKLRLLRTYLLPKLTYGLVFGRLTAGRLQQLDREVRSAVRSWLKFPPGVPSAYFHAPVKSGGLGIVSLSACIPSLRRRRLLALQGSSWEVARAAADLDFVRQQLAWCDRATPSAPKPSSSAEFAAALHESVDGKELRQCSESLVSSQWVDWASEGIGARDYRHFHAIRVASLPTAVRCSRGSRGTTLPLCRACRSGNEHLYHVVQQCPRTHGGRILRHDAVAKQIAGALSSSGWDVERERLYHMPSDQGKKPDIVAVKPDQSCIILDVQVVNGSLDMEQTWRAKIRKYDRNDLRQAVSELKGVAPNNIRVMAATLSWRGVWCGKSATELRELGISVGVLRGITTRVLLGSYLNRWSFYRGTSLHPSLPPPPSSSSLIPRAGVG

SEQ ID NO: 24644 - protein, 1070 aa, Apolygus lucorum
MNQEDDQPHNPRLPIGTRGSRGGAQRRPRQGRRPSSPSSSSSSSLPSSSSTASLSHQCAHCERAFTSRSGLGLHVRRKHPVAANAAIDIERVQHRYASEELRRMAADEALAVRNGVRNINVYLNERFPSRTVIAIKNIRLKPHYKQLVQEAILANSSGASPASPVADMEQQPAIQYPSPGSSGLLADLKTEVMRLGGQVGRIEGYDSAYLQDLARRAVEGPDNLEDDVAAYLGRTFPRVGDATVMQHQGGRPPTVVLHGGRRAAKQARRRRYQRVQRLWRKHPARVATEVLEEPGEDQVEPPLQEFVDFWEPLLSAPSHNPGERVVPPVSTRDSLRSIMCAPVLLDEAHRCRVKNSTSAGPDGVSARRWNKAPNTIKLLILNLLLLAGRPPKALTRSRTVFIPKKGGSGPGGYRPISISSVVFRHFQKVLASRLQVAGVIGDVQRAFRPADGTAENLTVLQTVISLARMKRRQLHLAALDVAKAFDTVSHLALTDCLRGVGAPSRLIEYVACLYHEGVTVLEAGGEMSRDVLIGRGVRQGDPLSPLLFNLVVDTALGKLPTEVGFDLAPGVRVGALAFADDVILLAETREGLQIALNAFAKQLARCGLVVNPDKCGSVSLVPSGRQHKVKVVDGGFVVGQSPIPSRSVLEVWRYLGVDFMGVATITASRVDLGRALERVTKAPLKPQQKLRLLRTYLLPKLTYGLVFGRLTAGRLQELDRKVRSAVRSWLRFPPGVPSAYIHAPVKSGGLGIVSLSASIPSLRRQRLLALQGSSWEVARAAADLDFVRQQLAWCDRATPSAPKPSSSAEFAAALHESVDGKELRQCSESPISSQWVDWASEGIGARDYRHFHAVRVASLPTAVRCSRGSRGTTLPLCRACRSGNEHLYHVVQQCPRTHGGRILRHDAVAKQIAGALSSSGWDVERERLYHMPSDQGKKPDIVAVKPDQSCIILDVQVVNGSLDMEQTWRAKIRKYDRNDLRQAVSELKGVAPNNIRVMAATLSWRGVWCGKSATELRELGISVGVLRGITTRVLLGSYLNWWSFYRGTSLHPSLPPPPSSASLIPRAGVG

SEQ ID NO: 24645 - protein, 1095 aa, Apolygus lucorum
MTLWRLGRGPLSMGSLTLKSRASPVMNNNTHQPHNPRQPIGSRGSRGGAQRRPRQGRRPSSPSSSSSSSLPSSSSTASLDHQCAHCERAFTSRSGLGVHVRRKHPVAANEEINVERVQPRYASEDLRRMAADEVVAVRNGVRNINVYLSERFPTRTVIAIKNLRLKPHYKQLVQEAILANSGGASPASPIAGVDQQSAIQYPSPGTSGLLADLKTEVLRLGGQVGRIEGYESTYLQDLARRAAEGLDNLEDEVAAYLERIFPRVGDATVTQHQRGPPPRMVLRGGRRAAKQARRREYHRVQSLWRKHPARVAAEVLEEPGEDQVQPPLQEFVDFWEPLLSAPSHNPGERVVPPVSTRDSLRSILCSPVLLDEAHKCRVKNSTSAGPDGVSARRWNKAPNTIKLLILNLLMLAGRPPKALTRTRTVFIPKKGGSGPGGYRPISVSSVVFRHFQKVLASRLQVAGVIGDVQRAFRPADGTAENLTVLQTVISLARIKRRQLHLAALDVAKAFDTVSHLALTDCLRGVGAPSRLIEYVACLYHEGVTVLEAGGEVSRDIRIGRGVRQGDPLSPLLFNLVVDTALGKLPTEVGFDLAPGVRVGALAFADDVILLAETREGLQIALNAFAKQLARCGLVVNPDKCGSVSLVPSGRQHKVKVVDGGFVVGQSPIPSRSVLEVWRYLGVDFMGVATITTSRVDLGRALVRVTKAPLKPQQKLRLLRAYLLPKLTYGLVFGRLTAGRLQELDREVRSAVRSWLRFPPGVPSAYFHAPVKSGGLGIVSLSASIPSLRRQRLLALQGSSWEVARAAADLDFVRQQLAWCDRATPSAPKPSSSAEFAAALHESVDGKELRQCSESLVSSQWVDWASEGIGARDYRHFHAIRMATLSTAVRCSRGSRGTTLPLCRACRSGNEHLYHVVQQCPRTHGGRILRHDAVAKQIAGALSSSGWDVERERLYHMPSDQGKKPDIVAVKPDQSCIILDVQVVNGSLDMEQTWRAKIRKYDRDDLRQAVSELKGVAPNNIRVMAATLSWRGVWCGRSATELRELGISVGVLRGITTRVLLGSYLNWWSFYRGTSLHPSLPPPPSSSSLIPRAGVG

SEQ ID NO: 24646 - protein, 967 aa, Apolygus lucorum
MATDEAVAVRSGVRNINVYLRERFPARTVNAISKLRQRPHYKQLVQEAILANSSGASPASPIADVEQQPAIQNPSPGTSGLLADLKTEVLRLGGQVGRIEGYESTYLQDLARRAAEGSENLEDEVAAYLGRIFPRVEDATVTQHQRRPPLRMVLRGGRRAAKQARRREYHRVQSLWRKHPARVAAEVLEEPGDDQVQPPLQEFVNFWEPLLSAPSHDPGERVVPPVSTRDSLRSIMCSPVLLDEAHKCRVKNSTSAGPDGVSARRWNKAPKTIKLLILNLLLLAGRPPKALTRARTVFIPKKGGSGPGGYRPISVSSVVFRHFQKVLASRLQVAGVIGDVQRAFRPADGTAENLTVLQTVISLARIKRRQLHLAALDVAKAFDTVSHLALTDCLRGVGAPSRLIEYVACLYHEGVTVLEAGGEVSRDIVIGRGVRQGDPLSPLLFNLVVDTALGKLPTDVGFDLAPGVRVGALAFADDVILLAETREGLQIALNAFAKQLARCGLVVNPDKCGSVSLVPSGRQHKVKVVDGGFVIGQSPIPSRSVLEVWRYLGVDFMGVATITASRVDLGRALARVTKAPLKPQQRLRLLRTYLLPKLTYGLVFGRLTAGRLQDLDREVRSAVRSWLKFPPGVPSSYIHAPVKSGGLGIVSLSASIPTLRRQRLLALRGSSWGVARAAADLDFVRQQLAWCDRATPSAPKPSSSAEFAAALHESVDGKELRQCSESLISSQWVDWASEGIGARDYRHFHAVRVASLPTAVRCSRGSRGTTLPLCRACRGGSEHLYHVVQQCPRTHGGRILRHDAVAKQIAGALSSSGWDVERERLYHMPSDQGKKPDIVAVKPDQSCIILDVQVVNGSLDMEQTWRAKIRKYDTNDLRQAVSELKGVAPNNIRVMAATLSWRGVWCGKSATELRELGISVGVLRGITTRVLLGSYLNWWSFYRGTSLHPSLPPPPSSSSLIPRAGVG

SEQ ID NO: 24647 - protein, 1070 aa, Apolygus lucorum
MNEENDEPHNPRLPIGTRGSRGGAQRRPRQGRRPSSPSSSSSSSLPSSSSTASLNHQCAHCERAFTTRSGLGLHIRRKHPVAANAAIDIERVQHRYASEELRRMAADEVVAVRDGVRNINVFLSERFPMRTVIAIKNIRLKPHYKQLVQEAILANSSGASPASPIADVEQQPAIQYPSPGTSGLLADLKTEVLRLGGQVGRIEGYESTYLQDLARRAAEGLDNLENEVAAYLGRIFPRVGDATVTQHQGGPPPGVVLRGGRRAAKQARRREYHRVQSLWRKHPARVAAEVLEEPGENQVQPPLQEFVDFWEPLLSAPSHDPGERVVPPVSTRDSLRSIMCAPVLSDEAHKCRVKNSTSAGPDGISARRWNKAPKTIKLLVLNLLLLAGRPPKALTRARTVFIPKKGGSGPGGYRPISVSSVVFRHFQKVLASRLQVAGIIGDVQRAFRPADGTAENLTVLQTVISLARMKRRQLHLAALDVAKAFDTVSHLALTDCLRGVGAPSRLIEYVACLYQEGVTVLEAGGEVSGDVRIGRGVRQGDPLSPLLFNLVVDTALGKLPTEVGFDLAPGVRVGALAFADDVILLAETREGLQIALNAFARQLARCGLVVNPDKCGSVSLVPSGRQHKVKVVDGGFVIGQSPIPSRSVLEVWRYLGVDFMGVATISASRVDLGRALARVTKAPLKPQQKLRLLRTYLLPKLTYGLVFGRLTAGRLQELDRQVRSAVRSWLRFPPGVPSAYVHAPVKSGGLGIVSLSACIPSLRRQRLLALQGSSWEVARAAADLDFVRQQLAWCDRATPSAPKPSSSAEFAAALHESVDGKELRQCSESPVSSQWVDWASEGIGARDYQHFHAVRMATLPTAVRCSRGSRGTTLPLCRACRSGNEHLYHVVQQCPRTHGGRILRHDAVAKQIAGALSSSGWDVERERLYHMPSDQGKKPDIVAVKPDQSCIILDVQVVNGSLDMEQTWRAKIRKYDRNDLRQAVSELKGVAPNNIRVMAATLSWRGVWCGKSATELRELGISVGVLRGITTRVLLGSYLNWWSFYRGTSLHPSLPPPPSSSSLIPRAGVG

SEQ ID NO: 24648 - protein, 1070 aa, Apolygus lucorum
MDTNQDQPHNPRQPIGSRGIRGGAQRRPRQGRRPSSPSSSSSSSLPSSSSTASLNHQCAHCERAFTTRSGLGLHVRRKHPVAANAAIDIERIQPRYASEELRRMAADEAVAVRNGVRNINVYLNERFPTRTVIAIKNIRLKPHYKQLVQEAILANSSGASPASPIADVEQQPAIQYPSPGTSGLLADLKTEVLRLGGQVGRIEGYESTYLQDLVRRADEGLDNLEDEVAAYLGRIFPRVGDATVTRHQGGPPPRMVLRGGRRAAKQARRREYHWVQSLWRKHPARVAAEVLEEPGENQVQPPLQEFVDFWEPLLSAPSHDPGECVVPPVSTRDSLRSIMCSPVLSDEAHKCRVRNSTSAGPGGVSARRWNKAPKTIKLLILNLLLLAGRPPKALTRTRTVFIPKKGGSGPGGYRPISVSWVVFRHFQKVLASRLQVAGVIGDVQRAFRPADGTAENLTVLQTVISLARIKRRQLHLAALDVAKAFDTVSHLALTDCLRGVGAPSRLIEYVACLYQEGVTVLKAGGEVSGDIRIGRGVRQGDPLSPLLFNLVVDTALGKLPTEVGFDLAPGVRVGALAFADDVILLAGTREGLQIALNAFAKQLAGCGLVVNPDKCGSVSLVPSGRQHKVKVVDGGFVIGQSPIPSRSVLEVWRYLGVDFMGVATITASRVDLGRALARVTKAPLKPQQKLRLLRTYLLPKLTYGLVFGRLTAGRLQELDREVRSAVRSWLKFPPGVPSAYVHAPVKSSGLGIVSLSACIPSLRRRRLLALQGSSWEVARAAADLDFVRQQLAWCDRATPSAPKPSSSAEFAAALHESVDGKELRQCSESLVSSQWVDWASEGIGARDYRHFHAIRVASLPTAVRCSRGSRGTTLPLCRACRSGNEHLYHVVQQCPRTHGGRILRHDAVAKQIAGALSSSGWDVERERLYHMPSDQGKKPDIVAVKPDRSCIILDVQVVNGSLDMEQTWRAKIRKYDTNDLRQAVSELKGVAPNNIRVMAATLSWRGVWCGKSATELRELGISVGVLRGITTRVLLGSYLNWWSFYRGTSLHPSLPPPPSSSSLIPRAGVG

SEQ ID NO: 24649 - protein, 883 aa, Apolygus lucorum
MKTEVLRLGGQVGRIEGYESTYLQDLARRAAEGLDNLEDKVAAYLGRIFPRVGDATVTQHQGGPPPRVVLRGGLRAAKQARRREYHRVQSLWRKHPARVAAEVLEEPGEDQVQPPLQEFVDFWEPLLSAPSHNPGERVVPPVSTRDSLRSILCSPVLLDEAHKCRVKNSTSAGPDGVSAHRWNEAPNTIKLLVLNLLILAGRPPKALTRTRTVFIPKKGGSGPGGYRPISVSSVVFRHFQKVLASRLQVAGVIGDVQRAFRPADGTAENLTVLQTVISLARIKRRQLHLAALDVAKAFDTVSHLALTDCLRGVGAPSRLIEYVACLYREGVTVLEAGGEVSRDIVIGRGVRQGDPLSPLLFNLVVDTALGKLPTEVGFDLAPGVRVGALAFADDVILLAETREGLQIALNAFAKQLSRCGLVVNPDKCGSVSLVPSGRQHRVKVVDGGFVIGQAPIPSRSVLEVWRYLGVDFMGVATITASRVDLGRALARVTKAPLKPQQRLRLLRTYLLPKLTYGLVFGRLTAGRLQELDREVRSAVCSWLRFPPGVPSAYIHAPVKSGGLGIVSLSACIPSLRRRRLLALQGSSWEVARVAAGLDFVRQQLAWCDRATPSAPKPSSSAEFAAALHESVDGKQLRQCSESLISSQWVDWASEGIGARDYRNFHAVHVATLPTAVRCSRGSRGMTDTLCRTCRSGNEHLYHVVQQCPRTHGGQILHHDAVAKQIAGALSSSGCDVERERLYHMPSDQGKKPGIVAVKPDRSCIILDVQVVNGSMEMEQTWRAKIRKYDRDDLRQAVSQLKGVEPNNIGVMAATLLWHGVWCRKSATELRELGISVGVLRGVTRRVLLSSYLNWWSFYRGTSLHPSLPPPPSSSSLIPRAGVG

SEQ ID NO: 24650 - protein, 1070 aa, Apolygus lucorum
MEDETQVPHNPRQPIGSRGIRGGAQRRPRQGRRPSSPSSSSSSSLPSSSSTASLDHQCAHCERAFTSRSGLGVHVRRRHPVAANDKINVERVQPRYASEDLRRMAADEVVAVRNGVRNINVYLSERFPTRTVIAIKNLRLKPHYKQLVQEAILANSGGASPASPIADVDQQSAIQYPSPGTSGLLADLKTEVLRLGGQVGRIEGYESTYLQDLARRAAEGLDNLEDEVAAYLGRIFPRVGDATVTRHQGRPPPRVVLRGGRRAAKQARRREYHRVQSLWRMHPARAAAEVLEEPGEDQVQPPLQEFVDFWEPLLSAPSHNPGERVVPPVSTRDSLRSILCSPVLLDEAHKCRVKNSTSAGLDGVSARRWNKAPKTIKLLILNLLMLAGRPPKALTRTRTVFIPKKGGSGPGGYRPISVSSVVFRHFQKVLASRLQVAGVIGDVQRAFRPADGTAENLTVLQTVISLARIKRRQLHLAALDVAKAFDTVSHLALTDCLCGVGAPSRLIEYVACLYHEGVTVLEAGGEVSRDIRIGRGVRQGDPLSPLLFNLVVDTALGKLPTEVGFDLAPGVRVGALAFADDVILLAETREGLQIALNAFAKQLARCGLVVNPYKCGSVSLVPSGRQHKVKVVDGGFVVGQSPIPSRSVLEVWWYLGVDFMGVATITTSRVDLGRALARVTKAPLKPQQKLRLLRTYLLPKLTYGLVFGRLTAGRLQELDREIRSAVRSWLRFPPGVPSAYFHAPVKSGGLGIVSLSACIPSLRRQRLLALQGSSWEVARAAADLDFVRQQLAWCDRATPSAPKPSSSAEFAAALHESVDGKELRQCSESLVSSQWVDWASEGIGARDYRHFHAVRMATLPTAVRCSRGSRGTTLPLCRACRSGNEHLYHVVQQCPRTHGGRILRHDAVAKQIAGALSSSGWDVERERLYHIPSDQGKKPDIVAVKPDQSCIILDVQVVNGSLDMEQTWRAKIRKYDRDDLRQAVSELEGVAPNNIRVMAATLSWRGVWCGKSATELRELGISVGVLRGITTRVLLGSYLNWWSFYRGTSLHPSLPPPPSSSSLIPRAGVG

SEQ ID NO: 24651 - protein, 1070 aa, Apolygus lucorum
MDQNHQLPHNPRQPIGSRGIRGGAHRRPRQGRRPSSPSSSSSSSLPSSSSTASLDHQCAHCERAFTSRSGLGAHVRRKHPVAANAAIEIERVQPRYASEDLRRMAADEVVAVRNGVRNINVYLSERFPTRTVIAIKNLRLKPHYKQLVQEAILANSGGASPASPVAGMDQQSAIQYPSPGTSGLLADLKTEVLRLGGQVGRIEGYESTYLQDLARRAAEGLDNLEDEVAAYLGRIFPRVGDATVAQHQGGPPPRVVLRGGRRAAKQARRQEYHRVQSLWRKHPARVAAEVLEEPGEDQVQPPLQEFVDFWEPLLSAPSHNPGERVVPPVSTRDSLRSILCSPVLLDEAHKCRVKNSTSAGPDGISARRWNKAPNTIKLLILNLLMLAGRPPKALTRTRTVFIPKKGGSGPGGYRPISVSSVVFRHFQKVLASRLQVAGVIGDVQRAFRPADGTAENLTVLQTVISLARIKRRQLHLAALDVAKAFDTVSHLALTDCLRGVGAPSRLIEYVACLYHEGVTVLEAGGEVSGDVRIGRGVRQGDPLSPLLFNLVVDTALGKLPTEVGFDLAPGVRVGALAFADDVILLAETREGLQIALNAFAKQLSRCGLVVNPDKCGSVSLVPSGRQHKVKVVDGGFVIGQAPIPSRSVLEVWRYLGVDFMGVATITASRVDLVRALARITKAPLKPQQRLRLLRTYLLPKLTYGLVFGRLTAGKLQELDREVRSAVRSWLRFPPGVPSAYIHAPVKSGGLGIVALSACIPSLRRQRLLALQGSSWEVARVAAGLDFVRQQLAWCDRATPSAPKPSSSAEFAAALHESVDGKELRQCSESLISSQWVDWASEGSGARDYRNFHAVRVATLPTAVRCSRGSRGMTDTLCRACRSGNEHLYHVVQQCPRTHGGRILRHDAVAKQIAGALSSSGWDVERERLYHMPSDQGKKPDIVAVKPDRSCIILDVQVVNGSMDMEQTWRAKIRKYDRDDLRQAVSELKGVAPNNIRVMAATLSWRGVWCGKSATELRELGISVGVLRGVTRRVLLGSYLNWWSFYRGTSLHPSLPPPPSSSSLIPRAGVG

SEQ ID NO: 24652 - protein, 732 aa, Apolygus lucorum
MCSPVLSDEAHKCRVKNSTSAGPDGVSARRWNKAPKTIKLLILNLLLLAGRPPKALTRTRTVFIPKKGGSGPGGYRPISVSSVVFRHFQKVLASRLQVAGVIGDVQRAFRSADGTAENLTVLQTVISLARIKRRQLHLAALDVAKAFDTVSHLALTDCLRGVGAPSRLIEYVACLYQEGVTVLEAGGEVSGDIRIGRGVRQGDPLSPLLFNLVVDTALGKLPTEVGFDLAPGVRVGALAFADDVILLAETREGLQIALNAFAKQLARCGLVVNPDKCGSVSLVPSGRQHKVKVVDGGFVVGQSPIPSRSVLEVWRYLGVDFMGVATITTSRVDLGRALARVTKAPLKPQQKLRLLRTYLLPKLTYGLVFGRLTAGRLQQLDREVRSAVRSWLKFPPGVPSAYFHAPVKSGGLGIVSLSSCIPSLRRRRLLALQGSSWEVARAAADLDFVRQQLAWCDRATPSAPKPSSSAEFAAALHESVDGKELRQCSESLVSSQWVDWASEGIGARDYRHFHAIRVASLPTAVRCSRGSRGTTLPLCRACRSGNEHLYHVVQQCPRTHGGRILRHDVVAKQIAGALSSSGWDVERERLYHMPSDQGKKPDIVAVKPDQSCIILDVQVVNGSLDMEQTWRAKIRKYDTNDLRQAVSELKGVAPNNIREMAATLSWRGVWCGKSATELRELGISVGVLRGITTRVLLGSYLNWWSFYRGTSLHPSLPPPPSSSSLIPRAGVG

SEQ ID NO: 24653 - protein, 1070 aa, Apolygus lucorum
MNDEADQPHNPRQPIGSRGIRGGTQRRPRQGRRPSSPSSSSSSSLPSSSSTASLDHQCAHCERAFTSRSGLGVHVRRKHPVAANAAIEIERVQPRYASEDLRRMAADEVVAVRNGVRNINVYLSKRFPTRTVIAIKNLRLKPHYKQLVQEAILANSGGASPASPIAGVDQQSAIQYPSPGTSGLLADLKTEVLRLGGQVGRIEGYESTYLQDLARRAAEGLDNLEDMVAAYLGRIFPRVGDATMTRHQGRPPPRVVLRGGRRAAKQARRQEYHRVQSLWRKHPARVAAEVLEEPGEDQVQPPLQEFVDFWEPLLSAPSHNPGERVVPPVSTRNSLRSILCSPVLLDEAHKCRVKNSTSAGPDGVSARRWNKAPNTIKLLILNLLMLAGRPPKALTRTRTVFIPKKGGSGPGGYRPISVSSVVFRHFQKVLASRLQVAGVIGDVQRAFRPADGTAENLTVLQTVISLARIKRRQLHLAALDVAKAFDTVSHFALTDCLRGVGAPSRLIEYVACLYHEGVTVLEAGGEVSGDIRIGRGVRQGDPLSPLLFNLVVDTALGKLPTEVGFDLAPGVRVGALAFADDVILLAETREGLQIALNAFAKQLARCGLVVNPDKCGSVSLVPSGRQHKVKVVDGGFVVGQSPIPSRSVLEVWRYLGVDFMGVATITTSRVDLGRALARVTKAPLKPQQKLRLLRTYLLPKLTYGLVFGRLTAGRLQELDRQVRSAVRSWLKFPPGVPSAYFHAPVKSGGLGVVSLSACIPSLRRQRLLALQGSSWEVARAAADLDFVRQQLAWCDRATPSAPKPSSSAEFAAALHESVDGKELRQCSESLVSSQWVDWASEGIGARDYRHFHAVRMATLPTAVRCSRGSRGTTLPLCRACRSGNEHLYHVVQQCPRTHGGRILRHDAVAKQIAGALSSSGWDVERERLYHMPSDQGKKPDIVAVKPDQSCIILDVQVVNGSLDMEQTWRAKIRKYDRDDLQQAVSELKGVVPNNIRVMAATLSWRGVWCGKSATELRELGISVGVLRGITTRVLLGSYLNWWSFYRGTSLHPSLPPPPSSSSLIPRAGVG

SEQ ID NO: 24654 - protein, 1018 aa, Apolygus lucorum
MERNIEWPHNPRQPIGSRGIRGGAQRRPRQGRRPSSPSSSSSSSQPSSSSTASLNHQCAHCERAFTTRSGLGLHISRKHPVAANAAIDIERIQHRYASEELRRMAADEAVAVRNGVRNINVYLNERFPTRTVIAIKNIRLKPHYKQLVQEAILANSSGASPASPIADVEQQPAIQYPSPGTSGLLADLKTEVLRLGGQVGRIEGYESTYLQDLVRRAAEGLDNLEDEVAAYLGRIFPRVGDATVTQHQGGPPPRVVLRGGRRAAKQARRREYHRVQSLWRKHPARVAAEVLEEPGENQVQPPLQEFVDFWEPLLSAPSHDPGERVVPPVSTRDSLRSIMCSPVLSDKAHKCRVKNSTSAGPDGVSARRWNKAPKTIKLLILNLLLLAGRPPKALTRTRTVFIPKKGGSGPGGYRPISVSSVVFRHFQKVLASRLQVAGVIGDVQRAFRPADGTAENLTVLQTVISLARIKRRQLHLAALDVAKAFDTVSHLALTDCLRGVGAPSRLIEYVACLYQEGVTVLEAGGEVSGDIRIGRGVRQGDPLSPLLFNLVVDTALGKLPTEVGFDLAPGVRVGALAFADDVILLAETREGLQIALNAFAKQLARCGLVVNPDKCGSVSLVPSGRQHKVKVVDGGFVVGQSPIPSRSVLEVWRYLGVDFMGVATITASRVDLGRALARVTKAPLKPQQKLRLLRMYLLPKLTYGLVFGRLTAGRLQQLDREVRSAVRSWLKFPPGVPSAYVHAPVKSGGLGIVSLSACIPSLRRRRLLALQGSSWEVARAAADLDFVRQQLAWYDRATPSAPKPSSSAEFAAALHESVDGKELRQCSECLVSSQWVDWASEGIGARDYRHFHAIRVASLPTAVRCSRGSRGTTLPLCRACRSGNEHLYHVVQQCPRTHGGRILRHDAVAKQIAGALSSSGWDVERERLYHMPSDQGKKPDIVAVKPDQSCIILDVQVVNGSLDMEQTWRAKIRKYDTNDLRQAVSELKGVAPNNIRVMAATLSWRGVWCGKSATELRE

SEQ ID NO: 24655 - protein, 1075 aa, Apolygus lucorum
MPIPVMEYNPQLPHNPRQPIGSRGIRGGAQRRPRQGRRPSSPSSSSSSSLPSSSSTASLDYQCAHCERAFTSRSGLGVHVRRKHPVAANEEIDIERVQPRYASEDLRRMAADEVVAVRNGVRNINVYLSERFPTRTVIAIKNIRLKPHYKQLVQEAILANSGGASPASPVAGMDQQSAIQYPSPGTSGLLADLKTEVLRLGGQVGRIEGYESTYLQDLARRAAEGLDNLEDMVAAYLGRIFPRVGDATVTQHQGGPPSRVVLRGGRRAAKQARRREYHRVQSLWRKHPARVAAEVLEEPGEDQVQPPLQEFVDFWEPLLSAPSHNPGERVVPPVSTRDSLRSILCSPVLLDEAHKCRVKNSTSAGPDGVSARRWNKAPNTIKLLILNLLMLAGRPPKALTRTRTVFIPKKGGSGPGGYRPISVSSVVFRHFQKVLASRLQVAGVIGDVQRAFRPADGTAENLTVLQTVISLARIKRRQLHLAALDVAKAFDTVSHLALTDCLRGVGAPSRLIEYVACLYHEGVTVLEAGGEVSGDVRIGRGVRQGDPLSPLLFNLVVDTALGKLPTEVGFDLAPGVRVGALAFADDVILLAETREGLQIALNAFAKQLSRCGLVVNPDKCGSVSLVPSGRQHKVKVVDGGFVIGQAPIPSRSVLEVWRYLGVDFMGVATITASRVDLGRALARITKAPLKPQQRLRLLRTYLLPKLTYGLVFGRLTAGRLQELDREVRSAVRSWLRFPPGVPSAYIHAPVKSGGLGIVSLSACIPSLRRQRLLALQGSSWEVARVAAGLDFVRQQLAWCDRATPSAPKPSSSAEFAAALHESVDGKELRQCSESLISSQWVDWASEGIGARDYRNFHAVRVATLPTAVRCSRGSRGMTDTLCRACRSGNEHLYHVVQQCPRTHGGRILRHDAVAKQIAGALSSSGWDVERERLYHMPSDQGKKPDIVAVKPDRSCIILDVQVVNGSMDMEQTWRAKIRKYDRDDLRQAVSELKGVEPNNIRVMAATLSWRGVWCGKSATELRELGISVGVLRGVTRRVLLGSYLNWWSFYRGTSLHPSLPPPPSSSSLIPRAGVG

SEQ ID NO: 24656 - protein, 1070 aa, Apolygus lucorum
MDTNQDQPHNPRQPIGSRGIRGGAQRRPRQGRRPSSPSSSSSSSLPSSSSTASLNHQCAHCERAFTTRSGLGLHVRRKHPVAANAAIDIERIQPRYASEELRRMAADEAVAVRNGVRNINVYLNERFPTRTVIAIKNIRLKPHYKQLVQEAILANSSGASPASPIADVEQQPAIQYPSPGTSGLLADLKTEVLRLGGQVGRIEGYESTYLQDLVRRAVEGLDNLEDEVAAYLRRIFPRVGDATMTRHQGGPPPRMVLRGGRRAAKQARRREYHRVQSLWRKHPARVAAEVLEEPGENQVQPPLQEFVDFWEPLLSAPSHDPGECVVPPVSTRDSLRSIMCSPVLSDEAHKCRVRNSTSAGPDGVSARRWNKAPKTIKLLILNLLLLAGRPPKALTRTRTVFIPKKGGSGPGGYRPISVSSVVFRHFQKVLASRLQVAGVIGDVQRAFRPADGTAENLTVLQTVISLARIKRRQLHLAALDVAKAFDTVSHLALTDCLRGVGAPSRLIEYVACLYQEGVTVLEAGGEVSGDVRIGRGVRQGDPLSPLLFNLVVDTALGKLPTEVGFDLAPGVRVGALAFADDVILLAETREGLQIALNAFAKQLAGCGLVVNPDKCGSVSLVPSGRQHKVKVVDGGFVVGQSPIPSRSVLEVWRYLGVDFMGVATITASRVDLGRALARVTKAPLKPQQKLRLLRTYLLPKLTYGLVFGRLTAGRLQELDREVRSAVRSWLKFPPGVPSAYVHAPVKSGGLGIVSLSACIPSLRRRRLLALQGSSWEVARAAADLDFVRQQLAWCDRATPSAPKPSSSAEFAAALHESVDGKELRQCSESLVSSQWVDWASEGIGARDYRHFHAIRVASLPTAVRCSRGSRGTTLPLCRACRSGNEHLYHVVQQCPRTHGGRILRHDAVAKQIAGALSSSGWDVERERLYHMPSDQGKKPDIVAVKPDRSCIILDVQVVNGSLDMEQTWRAKIRKYDTNDLRQAVSELKGVAPNNIRVMAATLSWRGVWCGKSATELRELGISVGVLRGITTRVLLGSYLNWWSFYRGTYLHPSLPPPPSSSSLIPRAGVG

SEQ ID NO: 24657 - protein, 1070 aa, Apolygus lucorum
MDEHLTEPHNPRRPIGTRGSRGGAQRRPRQGRRPSSPSSSSSSSLPSSSSTASLDHQCAHCERAFTSRSGLGVHVRRKHPVAANEEINVERVQPRYASEDLRRMAADEVVAVRNGVRNINVYLSERFPTRTVIAIKNLRLKPHYKQLVQDAILANSSGASPASPVAGVDQQSAIQYPSPGTSGLLADLKTEVLRLGGQVGRIEGYESTYLQDLARRAVEGLDNLEDKVAAYLGRIFPRVGDATVMQQQGGPPPRVVLRGGRRAAKQARRREYHRVQSLWRKHPARVAAEVLEEPGEVQVQPPLQEFVDFWEPLLSAPSHNPGERVVPPVSTRDSLRSILCSPVLLDEAHKCRVKNSTSAGPDGISARRWNKAPNTIKLLILNLLILAGRPPKALTRTRTVFIPKKGGSGPGGYRPISVSSVVFRHFQKVLASRLQVAGVIGDVQRAFQPADGTAENLTVLQTVISLARIKRRQLHLAALDVAKAFDTVSHLALTDCLRGVGAPSRLIEYVACLYHEGVTVLEAGGEVSGDIRIGRGVRQGDPLSPLLFNLVVDTALGKLPTEVGFDLAPGVRVGALAFADDVILLAETREGLQIALNAFAKQLSRCGLVVNPDKCGSVSLVPSGRQHKVKVVDGGFVIGQAPIPSRSVLEVWRYLGVDFMGVATITASRVDLGRALARITKAPLKPQQRLRLLRTYLLPKLTYGLVFGRLTAGRLQELDREVRSAVRSWLRFPPGVPSAYIHAPVKSGGLGIVSLSACIPSLRRQRLLALQGSSWEVARVAAGLDFVRQQLAWCDRATPSAPKPSSSAEFAAALHEAVDGKELRQCSESLISSQWVDWASEGIGARDYRNFHTVRVATLPTAVRCSRGSRGMTDTLCRACRSGNEHLYHVVQQCPRTHGGRILRHDAVAKQIAGALSSSGWDVERERLYHMPSDQGKKPDIVAVKPDRSCIILDVQVVNGSMDMEQTWRAKIRKYDRDDLRQAVSELKGVAPNNIRVMAAALSWRGVWCGKSATELRELGISVGVLRGVTRRVLLGSYLNWWSFYRGTSLHPSLPPPPSSSSLIPRAGVG

SEQ ID NO: 24658 - protein, 1070 aa, Apolygus lucorum
MEQTNDTPHNPRLPIGTRGSRGGAQRRPRQGRRPSSPSSSSSSSLPSSSSTASLDHQCAHCERAFTSRSGLGVHVRRKHPVAANEAIDVERVQPRYASEDLRRMAADEVVAVRNGVRNINVYLSERFPTRTVIAIKNLRLKPHYKQLVQEAILANSGGASPASPVAGVDQQSAIQYPSPGTSGLLADLKTEVLRLGGQVGRIEGYESTYLQDLARRAAEGLDNLEDEVAAYLGRIFPRVEDATVTQHQGGPPPRVVLRGGRRAAKQARRREYHRVQSLWRKHPARVAAEVLEEPGEDQVQPPLQEFVDFWEPLLSAPSHNPGERVVPPVSTRDSLRSILCSPVLLDEAHKCRVKNSTSAGPDGVSARRWNKAPNTIKLLILNLLILAGRPPKALTRTRTVFIPKKGGSGPGGYRPISVSSVVFRHFQKVLASRLQVAGVIGDVQRAFRPADGTAENLTVLQTVISLARIKRRQLHLAALDVAKAFDTVSHHALTDCLRGVGAPSRLIEYVACLYHEGVTVLEAGGEVSGDVRIGRGVRQGDPLSPLLFNLVVDTALGKLPTEVGFDLAPGVRVGALAFADDVILLAETREGLQIALNAFAKQLSRCGLVVNPDKCGSVSLVPSGRQHKVKVVDGGFVIGQAPIPSRSVLEVWRYLGVDFMGVATITASRVDLGRALARITKAPLKPQQRLRLLRTYLLPKLTYGLVFGRLTAGRLQELDREVRSAVRSWLRFPPGVPSAYIHAPVKSGGLGIVSLSACIPSLRRQRLLALQGSSWEVARVAAGLDFVRQQLAWCDRATPSAPKPSSSAEFAAALHESVDGKELRQCSESLISSQWVDWASEGIGARDYRNFHAVRAATLPTAVRCSRGSRGMTDTLCRACRSGNEHLYHVVQQCPRTHGGRILRHDAVAKQIAGALSSSGWDVERERLYHMPSDQGKKPDIVAVKPDRSCIILDVQVVNGSMDMEQTWRAKIRKYDRDDLRQAVSELKGVEPNNIRVMAATLSWRGVWCGKSATELRELGISVGVLRGVTRRVLLGSYLNWWSFYRGTSLHPSLPPPPSSSSLIPRAGVG

SEQ ID NO: 24659 - protein, 816 aa, Apolygus lucorum
MVLRGGRRAAKQARRQEYHRVQSLWRKHPARVAAEVLEEPGEDQVQPPLKEFVDFWEPLLSAPSHNPGERVVPPVSTRDSLRSILCSPVLLDEAHKCRVKNSTSAGPDGVSARRWNKAPNTIKLLILNLLMLAGRPPKALTRTRTVFIPKKGGSGPGGYRPISVSSVVFRHFQKVLASRLQVAGVIGDVQRAFRPADGTAENLTVLQTVISLARIKRRQLHLAALDVAKAFDTVSHLALTDCLRGVGAPSRLIEYVACLYHEGVMVLEAGGEVSGDVRIGRGVRQGDPLSPLLFNLVVDTALGKLPTEVGFDLAPGVRVGALAFADDVILLAETREGLQIALNAFAKQLSRCGLVVNPDKCGSVSLVPSGRQHKVKVVDGGFVIGQAPIPSRSVLEVWRYLGVDFMGVATITASRVDLGRALARITKAPLKPQQRLRLLRTYLLPKLTYGLVFGRLTVGRLQELDREVRSAVRSWLRFPPGVPSAYIHAPVKSGGLGIVSLSACIPSLRRQRLLALQGSSWEVARVAAGLDFVRQQLAWCDRATPSAPKPSSSAEFAAALHESVDGKELRQCSESLISSQWVDWASEGIGARDYRNFHAVRVATLPTAVRCSRGSRGMTDTLCRACRSGNEHLYHVVQQCPRTHGGRILRHDAVAKQIAGALSSSGWDVERERLYHMPSDQGKKPDIVAVKPDRSCIILDVQVVNGSMDMEQTWRAKIRKYDRDDLRQAVSELKGVEPNNIRVMAATLSWRGVWCGKSATELRELGISVGVLRGVTRRVLLGSYLNWWSFYRGTSLHPSLPPPPSSSSLIPRAGVG

SEQ ID NO: 24660 - protein, 971 aa, Apolygus lucorum
MPKRENRKHQCGQMKDIMEAERNLSERFPTRTVNAISKLRQRPHYRQLVQDAILANSSGASPASPIADVEQQPAIQNPSPGTSGLLADLKTEVMRLGGQVGRIEGYESTYLQDLARRAAEGSENLEDEVAAYLGRIFPQVGDATVTRHQRGPPLRMVLRGGRRAAKQARRREYHRVQSLWRKHPARVAAEVLEEPGENQVQPPLQEFVDFWEPLLSAPSHDPGERVVPPVSTRDSLRGIMCSPVLFDEAHKCRVKNSTSAGPDGISARRWNKAPKTIKLLILNLLLLEGRPPKALTRTRTVFIPKKGGSGPGGYRPISVSSVVFRHFQKVLASRLQVAGVIGDVQRAFRPADGTAENLTVLQTVISLARIKRRQLHLAALDVAKAFDTVSHFALTDCLHGVGAPTRLIEYVACLYHEGVTVLEAGGEMSRDIMIGRGVRQGDPLSPLLFNLVVDTALGKLPTEVGFDLAPGVRVGALAFADDVILLAETREGLQIALNAFAKQLARCGLVVNPDKCGSVSLVPSGRQHKVKVVDGGFVIGQSPIPSRSVLEVWRYLGVDFMGVATITASRVDLGRALARVTKAPLKPQQKLRLLRTYLLPKLTYGLVFGRLTAGRLQELDREVRSAVRSWLKFPPGVPSAYIHAPVKSGGLGIVSLSASIPSLRRQRLLALRGSSWGVARAAADLDFVRQQLAWCDRATPSAPKPSSSAEFAAALHESVDGKELRQCSESLISSQWVDWASEGIGARDYRHFHAVRVASLPTAVRCTRGSRGATLPLCRACRSRSEHLYHVVQQCPRTHGGRILRHDAVAKQIAGALSSSGWDVERERLYHMPSDQGKKPDIVAVKPDQSCIILDVQVVNGSLDMEQTWRAKIRKYDTNDLRQAVSELKGVAPNNIRVMAATLSWRGVWCGKSATELRDLGISVGVLRGITTRVLLGSYLNWWSFYRGTSLHPSLPPPPSSSSLIPRAGVG

SEQ ID NO: 24661 - protein, 1095 aa, Apolygus lucorum
MTLWRIGREPLSTGSLTLHFKRPPVMDQTDSMPHNPRLPIGTRGSRGGAQRRPRQGRRPSSPSSSSSSSQPSSSSTASLNHQCAHCERAFTTRSGLGLHVRRKHPVAANAAIDIERVQHRYASEELRRMAADEVVAVRDGVRNINVYLSERFPMRTVIAIKNIHLKPHYKQLVQEAILANSSGASPASPVADVEQQPAIQYPSPGTSGLLADLKTEVLRLGGQVGRIEGYESTYLQDLARRAAEGLDNLENEVAAYLGRIFPRVGDATVTQHQGGPPPRVVLRGGRRAAKQARRREYHRVQSLWRKHPARVAAEVLEEPGENQVQPPLQEFVDFWEPLLSAPSHDPGERVVPPVSTRDSLRSIMCSPVLSDEAHKCRVKNSTSAGPDGISARRWNKAPKTIKLLVLNLLLLAGRPPKALTRARTVFIPKKGGSGPGDYRPISVSSVVFRHFQKVLASRLQVAGIIGDVQRAFRPADGTAENLTVLQTVISLARMKRRQLHLAALDVAKAFDTVSHLALTDCLRGVGAPSRLIEYVACLYQEGVTVLEAGGEVSGDVRIGRGVRQGDPLSPLLFNLVVDTALGKLSTEVGFDLAPGVRVGALAFADDVILLAETREGLQIALNAFAKQLARCGLVVNPDKCGSVSLVPSGRQHKVKVVDGGFVIGQSPIPSRSVLEVWGYLGVDFMGVATISASRVDLGRALARVTKAPLKPQQKLRLLRTYLLPKLTYGLVFGRLTAGRLQELDRQVRSAVRSWLWFPPGVPSAYVHAPVKSGGLGIVSLSACIPSLRRQRLLALQGSSWEVARAAADLDFVRQQLAWCDRATPSAPKPSSSAEFAAALHESVDGKELRQCSESPVSSQWVDWASEGIGARDYRHFHAVRMATLPTAVRCSRGSRGTTLPLCRACRSGNEHLYHVVQQCPRTHGGRILRHDAVAKQIAGASSSSGWDVERERLYHMPSDQGKKPDIVAVKPDQSCIILDVQVVNGSLDMEQTWRAKIRKYDRNDLRQAVSELKGVAPNNIRVMAATLSWRGVWCGKSATELRELGISVGVLRGITTRVLLGSYLNWWSFYRGTSLHPSLPPPPSSSSLIPRDGVG

SEQ ID NO: 24662 - protein, 878 aa, Apolygus lucorum
MAADEVVAVRDGVRNINVYVSERFPMRTVIAIKNIRLKPHYKQLVQEAILANSSGASPASPIAGVEQQPAIQYPSPGTSGLLADLKTEVLRLGGQVGRIDGYESTYLQDLARRAAEGLDSLENEVAAYLGRIFPRVGDATVTQHQEGPPPRVVLRGGRRAAKQARRREYHRVQSLWRKHPARVAAEVLEEPGENQVQPPLQEFVDFWEPLLSAPSHEPGERVVPPVSTRDSLRSIMCSPVLSDEAHKCRVKNSTSAGPDGISARRWNKAPKTIKLLVLNLLLLAGRPPKALTRARTVFIPKKGGSGPGGYRPISVSSVVFRHFQKVLASRLQVAGIIGDVQRAFRPADGTAENLTVLQTVISLARMKRHQLHLAALDVAKAFDTVSHLALTDCLRGVGAPSRLIEYVACLYQEGVTVLEAGGEVSGDVRIGRGVRQGDPLSPLLFNLVVDTALGKLPTEVGFDLAPGVRVGALAFADDVILLAETREGLQIALNAFAKQLARCGLVVNPDKCGSVSLVPSGRQHKVKVVDGGFVIGQSPIPSRSVLEVWRYLGVDFMGVATISASRVDLGRALARVTKAPLKPQQKLRLLRTYLLPKLTYGLVFGRLTAGRLQELDRQVRSAVRSWLRFPPGVPSAYVHAPVKSGGLGIVSLSACIPSLRRQRLLALQGSSWEVARAAADLDFVRQQLAWCDRATPSAPKPSSSAEFAAALHESVDGKELRQCSESPVSSQWVDWASEGIGARDYRHFHAVRMATLPTAVRCSRGSRGTTLPLCRACRSGNEHLYHVVQQCPRTHGGRILRHDAVAKQIAGALSSSGWDVERERLYHMPSDQGKKPDIVAVKPDQSCIILDVQVVNGSLDMEQTWRAKIRKYDRFTAF

SEQ ID NO: 24663 - protein, 1075 aa, Apolygus lucorum
MRFPVMNTEPTEPHNPRQPIGSRGIRGGAQRRPRQGRRPSSPSSSSSSSLPSSSSTASLNHQCAHCERAFTTRSGLGLHIRRKHPVAANAAIDIERIQPRYASEELRRMAADEAVAVRNGVRNINVYLNERFPTRTVIAIKNIRLKPHYKQLVQEAILANSSGASPASPIADVEQQPAIQYPSPGTSGLLADLKTEVLRLGGQVGRIEGYESTYLQDLVRRAVEGLDNLEDEVAAYLGRIFPRVGDATVTRHQGGPPPRMVLRGGRRAAKQARRREYHRVQSLWRKHPARVAAEVLEEPGENQVQPPLQEFVDFWEPLLSAPSHDPGECVVPPISTRDSLRSIMCSPVLSDEAHKCRVRNSTSAGPDGVSARRWNKAPKTIKLLILNLLLLAGRPPKALTRTRTVFIPKKGGSGPGGYRPISVSSVVFRHFQKVLASRLQVAGVIGDVQRAFRPADGTAENLTVLQTVISLARIKRRQLHLATLDIAKAFDTVSHLALTDCLRGVGAPSRLIEYVACLYQEGVTVLEAGGEVSGDIRIGRGVRQGDPLSPLLFNLVVDTALGKLPTEVGFDLAPGVRVGALAFADDVILLAETRGGLQIALNAFAKQLAGCGLVVNPDKCGSVSLVPSGRQHKVKVVDGGFVVGQSSIPSRSVLEVWRYLGVDFMGVATITASRVDLGRALARVTKAPLKPQQKLRLLRTYLLPKLTYGLVFGRLTAGRLQELDREVRSAVRSWLKFPPGVPSAYVHAPVKSGGLGIVSLSACIPSLRRQRLLALQGSSWEVARAAADLDFVRQQLAWCDRATPSAPKPSSSAEFAAALHESVDGKELRQCSESLLSSQWVDWASEGIGARDYRHFHAIRVASLPTAVRCSRGSRGTTLPLCRACRSGNEHLYHVVQQCPRTHGGRILRHDAVAKQIAGALSSSGWDVERERLYRMPSDQGKKPDIVAVKPDQSCIILDVQVVNGSLDMEQTWRAKIRKYDTNDLRQAVSELKGVAPNNIRVMAATLSWRGVWCGKSATELRELGISVGVLRGITTRVLLGSYLNWWSFYRGTSLHPSLPPPPSSSSLIPRAGVG

SEQ ID NO: 24664 - protein, 1005 aa, Apolygus lucorum
MDEHLTEPHNPRRPIGTRGSRGGAQRRPRQGRRPSSPSSSSSSSLPSSSSTASLDHQCAHCERAFTSRSGLGVHVRRKHPVAANEEINVERVQPRYASEDLRRMAADEVVAVRNGVRNINVYLSERFPTRTVIAIKNLRLKPHYKQLVQDAILANSSGASPASPVAGVDQQSAIQYPSPGTSGLLADLKTEVLRLGGQVGRIEGYESTYLQDLARRAVEGLDNLEDKVAAYLGRIFPRVGDATVTQHQGGPPPRVVLRGGRRAAKQARRREYHRVQSLWRKHPARVAAEVLEEPGEVQIQPPLQEFVDFWEPLLSAPSHNPGERVVPPVSTRDSLRSILCSPVLLDEAHKCRVKNSTSAGPDGISARRWNKAPNTIKLLILNLLILAGRPPKALTRTRTVFIPKKGGSGPGGYRPISVSSVVFRHFQKVLASRLQVAGVIGDVQRAFRPADGTAENLTVLQTVISLARIKCRQLHLAALDVAKAFDTVSHLALTDCLRGVGAPSRLIEYVACLYHEGVTVLEAGGEVSGDIQIGRGVRQGDPLSPLLFNLVVDTALGKLPTEVGFDLAPGVRVGALAFADDVILLAETREGLQIALNAFAKQLSRCGLVVNPDKCGSVSLVPSGRQHKVKVVDGGFVIGQAPIPSRSVLEVWRYLGVDFMGVATITASRVDLGRALARITKAPLKPQQRLRLLRTYLLPKLTYGLVFGRLTAGRLQELDREVRSAVRSWLRFPPGVPSAYIHAPVKSGGLGIVSLSACIPSLRRQRLLALQGSSWEVARVAAGLDFVRQQLAWCDRATPSAPKPSSSDEFAAALHESVDGKELRQCSESLISSQWVDWASEGIGARDYRNFHAVRVATLPTAVRCSRGSRGMTDTLCRACRSGNEHLYHVVQQCPRTHGGRILRHDAVAKQIAGALSSSGWDVERERLYHMPSDQGKKPDIVAVKPDRSCIILDVQVVNGSMDMEQTWRAKIRKYDRDDLRQAVSELKGVAPNNIRMMAATFSWR

SEQ ID NO: 24665 - protein, 955 aa, Apolygus lucorum
MKALNVYLRERFPARTVNAISKLRQRPHYKQLVQEAILANSSGASPASPIADVEQQPAIQNPSPGTSGLLADLKTEVLRLGGQVGRIEGYESTYLQDLARRAAEGSENLEDEVAAYLGRIFPRVEDATVTQHQRGPPLRMVLRGGRRAAKQARRREYHRVQSLWRKHPARVAAEVLEEPGDDQVQPPLQEFVNFWEPLLSAPSHDPGERVVPPVSTRDSLRSIMCSPVLLDEAHKCRVKNSTSAGPDGVSARHWNKAPKTIKLLILNLLLLAGRPPKALTRARTVFIPKKGGSGPGGYRPISVSSVVFRHFQKVLASRLQVAGVIGDVQRAFRPADGTAENLTVLQTVISLARIKRRQLHLAALDVAKAFDTVSHLALTDCLRGVGAPSRLIEYVACLYHEGVTVLEAGGEVSRDIVIGRGVRQGDPLSPLLFNLVVDTALGKLPTEVGFDLAPGVRVGALAFADDVILLAETREGLQIALNAFAKQLARCGLVVNPDKCGSVSLVPSGRQHKVKVVDGGFVIGQSPIPSRSVLEVWRYLGVDFMGVATITASRVDLGRALARVTKAPLKPQQRLRLLRTYLLPKLTYGLVFGRLTAGRLQELDREVHSAVRSWLKFPPGVPSSYIHAPVKCGGLGIVSLSASIPSLRRQRLLALRGSSWGVARAAADLDFVRQQLAWCDRATPSAPKPSSSAEFAAALHESVDGKELRQCSESLISSQWVDWASEGIGARDYRHFHAVRVASLPTAVRCSRGSRGSTLPLCRACRGGSEHLYHVVQQCPRTHGGRILRHDAVAKQIAGALSSSGWDVERERLYHMPSDQGKKPDIVAVKPDQSCIILDVQVVNGSLDMEQTWRAKIRKYDTNDLRQAVSELKGVAPNNIRVMAATLSWRGVWCGKSATELRELGISVGVLRGITTRVLLGSYLNWWSFYRGTSLHPSLPPPPSSSSLIPRAGVG

SEQ ID NO: 24666 - protein, 1095 aa, Apolygus lucorum
MTLWRLGRGPLLTGSLTLHYKRPPVMNEEDDEPHNPRLPIGTRGSRGGAQRRPRQGRRPSSPSSSSSSSLPSSSSSASLNHQCAHCERAFTTRSGLGLHVRRKHPVAANAAIDIERVQHRYASEELRRMAADEVVAVRDGVRNINVYLSERFPMRTVIAIKNIRLKPHYKQLVQEAILANSSGASPASPIADVEQQPAIQYPSPGTSGLLADLKTEVLRLGGQVGRIEGYESTYLQDLARRAAKGLDNLENEVAAYLGRIFPRVGDATVTQHQGGPPPGVVLRGGRRAAKQARRREYHRVQSLWRKHPARVAAEVLEEPGENQVQPPLREFVDFWEPLLSAPSHDPGERVVPPVSTRDSLRSIMCAPVLSDEAHKCRVKNSTSAGPDGISARRWNKAPKTIKLLVLNLLLLAGRPPKALTRARTVFIPKKGGSGPGGYRPISVSSVVFRHFQKVLASRLQVAGIIGDVQRAFRPADGTAENLTVLQTVISLARMKRRQLHLAALDVAKAFDTVSHLALTDCLRGVGAPSRLIEYVACLYQEGVTVLEAGGEVSGDVRIGRGVRQGDPLSPLLFNLVVDTALGKLPTEVGFDLAPGVRVGALAFADDVILLAETREGLQIALNAFARQLARCGLVVNPDKCGSVSLVPSGRQHKVKVVDGGFVIGQSPIPSRSVLEVWRYLGVDFMGVATISASRVDLGRALARVTKAPLKPQQKLRLLRTYLLPKLTYGLVFGRLTAGRLQELDRQVRSAVRSWLRFPPGVPSAYVHAPVKSGGLGIVSLSACIPSLRRQRLLALQGSSWEVARAAADLDFVRQQLAWCDRATPSAPKPSSSAEFAAALHESVDGKELRQCSESLISSQWVDWASEGIGARDYRHFHAVRMATLPTAVRCSRGSRGTTLPLCRACRSGNEHLYHVVQQCPRTHGGRILRHDAVAKQIAGALSSSGWDVERERLYHMPSDQGKKPDIVAVKPDQSCIILDVQVVNGSLDMEQTWRAKIRKYDRDDLRQAVSELKGVAPNNIRVMAATLSWRGVWCGKSATELRELGISVGVLRGITTRVLLGSYLNWWSFYRGTSLHPSLPPPPSSSSLIPRAGVG

SEQ ID NO: 24667 - protein, 981 aa, Apolygus lucorum
MNEEDDEPHNPRLPIGTRGSRGGAQRRPRQGRRPSSPSSSSSSSLPSSSSTASLNHQCAHCERAFTTRSGLGLHVRRKHPVAANAAIDIERVQHRYASEELHRMAADEVVAVRNGVRNINVYLSERFPMRTVIAIKNIRLKPHYKQLVQEAILANSSGASPASPIADVEQQPAIQYPSPGTSGLLADLKTEVLRLGGQVGRIEGYESTYLQDLARRAAEGLGNLENEVAAYLGRIFPRVGDATVTQHQGGPPPRVVLRGGRRAAKQARRREYHRVQSLWRKHPARVAAGVLEEPGENQVQPPLQEFVDFWEPLLSAPSHDPGERVVPPVSTRDSLRSVMCSPVLSDEAHKCRVKNSTSAGPDGISARRWNKAPKTIKLLVLNLLLLAGRPPKALTRARTVFIPKKGGSGPGGYRPISVSSVVFRHFQKVLASRLQVAGIIGDVQRAFRPADGTAENLTVLQTVISLARMKRRQLHLAALDVAKAFDTVSHLALTDCLHGVGAPSRLIEYVACLYQEGVTVLEAGGEVSGDVRIGRGVRQGDPLSPLLFNLVVDTALGKLPTEVGFDLAPGVRVGALAFADDVILLAETREGLQIALNAFAKQLARCGLVVNPDKCGLVSLVPSGRQHKVKVVDGGFVIGQSPIPSRSVLEVWQCLGVDFMGVATISASRVDLGRALARVTKAPLKPQHKLRLLRTYLLPKLTYGLVFGRLTAGRLQELDRQVRSAVRSWLRFPPGVPSAYVHAPVKSGGLGIVSLSACIPSLRRQRLLALQGSSWEVARAAADLDFVRQQLAWCDRATPSAPKPSSSAEFAAALHESVDGKELRQCSESPVSSQWVDWASEGIGARDYRHFHAVRMATLPTAVRCSRGSRGTTLPLCRACRSGNEHLYHVVQQCPRTHGGRILRHDAVAKQIAGALSSSGWDVERERLYRMPSDQGKKPDIVAIKPDQSCIILDVQVVNGSLDMEQTWRAKIRKYDRNDLR

SEQ ID NO: 24668 - protein, 1095 aa, Apolygus lucorum
MTLWRLGRGPLLSGSLTLLKCASPVMNTNDDEPHNPRRPIGTRGSGGGAQRRPRQGRRPSSPSSSSSSSLPSSSSTASLNHQCAHCERAFTTRSGLGLHVRRKHPVAANAAIEIERVQPRYASEDLRRMAGDEVVAVRSGVRNINVYLSERFPTRTVNAISKLRQRPHYRQLVQDAILANSSGASPASPIADVEQQPAIQNPSPGTSGLLADLKTEVMRLGGQVGRIEGYESTYLQDLARRAAEGSENLEDEVAAYLGRIFPQVGDATVTRHQRGPPLRMVLRGGRRAAKQARRREYHRVQSLWRKHPARVAAEVLEEPGENQVQPPLQEFVDFWEPLLSAPSHDPGERVVPPVSTRDSLRGIMCSPVLLDEAHKCRVKNSTSAGTDGISARRWNKAPKTIKLLILNLLLLAGRPPKALTRTRTVFIPKKGGSGPGGYRPISVSSVVFRHFQKVLASRLQVAGVIGDVQRAFRPADGTAENLTVLQTVISLARIKRRQLHLAALDVAKAFDTVSHFALTDCLRGVGAPTRLIEYVACLYHEGVTVLEAGGEMSRDIMIGRGVRQGDPLSPLLFNLVVDTALGKLPTEVGFDLAPGVRVGALAFADDVILLAETREGLQIALNAFAKQLARCGLVVNPDKCGSVSLVPSGRQHKVKVVDGGFVIGQSPIPSRSVLEVWRYLGVDFMGVATITASRVDLGRALARVTKAPLKPQQKLRLLRTYLLPKLTYGLVFGRLTAGRLQELDREVRSAVRSWLKFPPGVPSAYIHAPVKSGGLGIVSLSASIPSLRRQRLLALRGSSWGVARAAADLDFVRQQLAWCDRATPSAPKPSSSAEFAAALHESVDGKELRQCSESLISSQWVDWASEGIGARDYRHFHAVRVASLPTAVRCTRGSRGATLPLCRACRSRSEHLYHVVQQCPRTHGGRILRHDAVAKQIAGALSSSGWDVERERLYHMPSDQGKKPDIVAVKPDQSCIILDVQVVNGSLDMEQTWRAKIRKYDTNDLRQAVSELKGVAPNNIRVMAATLSWRGVWCGKSATELRELGISVGVLRGITTRVLLGSYLNWWSFYRGTSLHPSLPPPPSSSSLIPRAGVG

SEQ ID NO: 24669 - protein, 978 aa, Apolygus lucorum
MCFPVMENIPNEPHNPRRPIGSRGIRGGAQRRPRQGRRPSSPSSSSSSSLPSSSSTASLDHQCAHCERAFTSRSGLGVHVRRKHPVAANEEIDVERVQPRYASEDLRRMAADEVVAVRNGVRNINVYLSERFPTRTVIAIKNLRLKPHYKQLVQDAILANSSGASPASPVAGVDQQSAIQYPSPGTSGLLADLKTEVLRLGGQVGRIEGYESTYLQDLARRAVEGLDNLEDKVAAYLGRIFPRVGDATVTQHQGGPPPRVVLRGGRRAVKQARRREYHRVQSLWRKHPARVAAEVLEEPGEVQVQPPLQEFVDFWEPLLSAPSHNPGERVVPPVSTRDSLRSILCSPVLLDEAHKCRVKNPTSAGPDGISARRWNKAPNTIKLLILNLLILAGRPPKALTRTRTVFIPKKGGSGPGGYRPISVSSVVFRHFQKVLASRLQVAGVIGDIQRAFRPADGTAENLTVLQTVISLARIKRRQLHLAALDVAKAFDTVSHLALTDCLRGVGAPSRLIEYVACLYHEGVTVLEAGGEVSGDVRIGRGVRQGDPLSPLLFNLVVDTALGKLPTEVGFDLAPGVRVGALAFADDVILLTETREGLQIALNAFAKQLSRCGLVVNPDKCGSVSLVPSGRQHKVKVVDGGFVIGQAPIPSRSVLEVWWYLGVDFMGVATITASRVDLGRALARITKAPLKPQQRLRLLRTYLLPKLTYRLVFGRLTAGRLQELDREVRSAVRSWLRFPPGVPSAYIHAPVKSGGLGIVSLSASIPSLHRQRLLALQGSSWEVARVAAGLDFVRQLLAWCDRATPSAPKPSLSAEFAAALHESVDGKELRQCSESLISSQWVDWASEGIGARDYRNFHAVRVATLPTAVRCSRGSRGVTDTLCRACRSGNEHLYHVVQQCPRTHGGRILRHDAVAKQIAGALSSSGWDVERERLYHMPSDQGKKPDIVAVKPDRSCIILDVQVVNGSMDMEQTWRAKIR

SEQ ID NO: 24670 - protein, 411 aa, Apolygus lucorum
MGVATITTSRVDLGRALARVTKAPLKPQQKLRLLRTYLLPKLTYGLVFGRLTAGRLQQLDREVRSAVRSWLKFPPGVPSAYFHAPVKSGGLGIVSLSACIPSLRRRRLLALQGSSWEVARAAADLDFVRQQLAWCDRATPSAPKPSSSAEFAAALHESVDGKELRQCSESLVPSQWVDWASEGIGARDYRHFHAIRVASLPTAVRCSRGSRGTTLPLCRACRSGNEHLYHVVQQCPRTHGGRILRHDAVAKQIAGALSSSGWDVERERLYHMPSDQGKKPDIVAVKPDQSCIILDVQVVNGSLDMEQTWRAKIRKYDRNDLRQAVSELKGVAPNNIRVMAATLSWRGVWCGKSATELRELGISVGVLRGITTRVLLGSYLNWWSFYRGTSLHPSLPPPRSSSSLIPRAGVG

SEQ ID NO: 24671 - protein, 1008 aa, Apolygus lucorum
MTLWRLGRGPLLTGPLTLYMRFPVMDENLTEPHNPRRPIGTRGSRGGAQRRPRQGRRPSSPSSSSSSSLPSSSSTASLDHQCAHCERAFTSRSGLGVHVRRKHPVAANEEIDIERLQPRYASEDLRRMAADEVVAVRNGVRNINVYLSERFPTRTVIAIKNLRLKPHYKQLVQEAILANSGGASPASPVAGMDQQSAIQYPSPGTSGLLANLKTEVLRLGGQVGRIEGYESTYLQDLARRAVERLDNLEDKVAAYLGRIFPRVGDATVTQHQGGPPPRVVLRGGRRAAKQARRREYHRVQSLWRKHPARVAAEVLEEPGEDQVQPPLQEFVDFWEPLLSAPSHNPGERVVPPVSTRDSLRSILCSPVLLDEAHKCRVKNSTSAGPDGVSARRWNKAPNTIKLLILNLLMLARRPPKALTHTRTVFIPKKGGSGPGGYRPISVSSVVFRHFQKVLASRLQVAGVIGDVKRAFQPADGTAENLTVLQTVISLARIKRRQLHLTALDVAKAFDTVSHLALTDCLRGVGAPSRLIEYVACLYHEGVTVLEAGGEVSGDVRIGRGVRQGDPLSPLLFNLVVDTALGKLPTEVGFDLAPGVRVGALAFADDVILLAETREGLQIALNAFAKQLSRCGLVVNPDKCGSVSLVPSGRQHKVKVVDGGFVIGQAPIPSRSVLEVWRYLGVDFMGVATITASRVDLGRALARITKAPLKPQQRLRLLRTYLLPKLTYGLVFGRLTAGRLQELDREVRSAVRSWLRFPPGVPSAYIHAPVKSSGLGIVALSACIPSLRRQRLLALQGSSWEVARVAAGLDFVRQQLAWCDRATPSAPKPSSSAEFAAALHESVDGKELRQCSESLISSQWVDWASEGIGARNYRNFHAVRVATLPTEVRCSRGSRGMTDTLCRACRSGNEHLYHVVQQCPRTHGGRILRHDAVAKQIAGALSSSGWDVERERLYHMPSDQGKKPDIVAVKPDRSCIILDVQVVNGSTDMEQTWRAKIRKYDRDDLRQAV

SEQ ID NO: 24672 - protein, 1070 aa, Apolygus lucorum
MENQQHRPHNPRQPIGSRGIRGGAQRRPRQGRRPSSPSSSSSSSLPSSSSTASLDHQCAHCERAFTSRSGLGVHVRRKHPVAANDEINVERVQPRYASEDLRRMAADEVVAVRNGVRNINVYLSERFPMRTVIAIKNLRLKPHYKQLVQEAILANSGGASPASPIAGVDQQSAIQYPSPGTSGLLADLKTEVLRLGGQVGRIEGYESTYLQDLARRAAEGLDNLEDEVAAYLGRIFPRVGDATVTRHQGRPPPRVVLRGGRRAAKQARRREYHRVQSLWRKHPARVAAEVLEEPGEDQVQPPLQEFVDFWEPLLSAPSHNPGERVVPPVSTRDSLRSILCSPVLLDEAHKCRVKNSTSAGPDGVSARRWNKAPNTIKLLILNLLMLAGRPPKALTRTRTVFIPKKGGSGPGGYRPISVSSVVFRHFQKVLASRLQVAGVIGDVQRAFRPVDGTAENLTVLQTVISLARIKRRQLHLAALDVAKTFDTVSHLALTDCLRGVGAPSRLIEYVACLYHEGVTVLEAGGEVSRDIRIGRGVRQGDPLSPLLFNLVVDTALGKLPTEVGFDLAPGVRVGALAFADDVILLAETREGLQIALNAFAKQLARCGLVVNPDKCGSVSLVPSGRQHKVKVVDGGFVIGQSPIPSRSVLEVWRYLGVDFMGVATITTSRVDLGRALARVTKAPLKPQQKLRLLRTYLLPKLTYGLVFGRLTAGRLQELDREIRSAVRSWLRFPPGVPSAYFHAPVKSGGLGIVSLSACIPSLRRQRLLALQGSSWEVARAAADLDFVRQQLAWCDRATPSAPKPSSSAEFAAALHESVDGKELRQCSESLVSSQWVDWASEGIGARDYRHFHAVRMATLPTAVRCSRGSRGTTLPLCRACRSGNEHLYHVVQQCPRTHGGRILRHDAVAKQIAGALSSSGWDVERERLYHMPSDQGKKPDIVAVKPDQSCIILDVQVVNGSLDMEQTWRAKIRKYDRDDLRQAVSELKGVAPNNIWVMAATLSWRGVWCGKSATELRELGISVGVLRGITTRVLLGSYLNWWSFYRGTSLHPSLPPPPSSSSLIPRAGVG

SEQ ID NO: 24673 - protein, 1070 aa, Apolygus lucorum
MEQTNDTPHNPRLPIGTRGSRGGAQRRPRQGRRPSSPSSSSSSSLPSSSSTASLDHQCAHCERAFTSRSGLGVHVRRKHPVAANEAIDVERVQPRYASEDLRRMAADEVVAVRNGVRNINVYLSERFPTRTVIAIKNLRLKPHYKQLVQEAILANSGGASPASPVAGVDQQSAIQYPSPGTSGLLADLKTEVLRLGGQVGRIEGYESTYLQDLARRAAEGLDNLEDKVAAYLGRIFPRVGDATVTQHQGGPPPRVVLRGGRRAAKQARRREYHRVQSLWRKHPARVAAEVLEEPGEDQVQPPLQEFVDFWEPLLSAPSHNPGERVVPPVSTRDSLRSILCSPVLLDEAHKCRVKNSTSAGPDGVSARRWNKAPNTIKLLILNLLILAGRPPKALTRTRTVFIPKKGGSGPGGYRPISVSSVVFRHFQKVLASCLQVAGVIGDVQRAFRPADGTAENLTVLQTVISLARFKRRQLHLAALDVAKAFDTVSHHALTDCLRGVGAPSRLIEYVACLYHEGVTVLEAGGEVSGDVRIGRGVRQGDPLSPLLFNLVVDTALGKLPTEVGFDLAPGVRVGALAFADDVILLAETREGLQIALNAFAKQLSRCGLVVNPDKCGSVSLVPSGRQHKVKVVDGGFVIGQAPIPSRSVLEVWRYLGVDFMGVATITASRVDLGRALARITKAPLKPQQRLRLLRTYLLPKLTYGLVFGRLTAGRLQELDREVRSTVRSWLRFPPGVPSAYIHAPVKSGGLGIVSLSACIPSLRRQRLLALQGSNWEVARVAAGLDFVRQQLAWCDRATPSAPKPSSSAEFAAALHESVDGKELRQCSESLISSQWVDWASEGIGARDYRNFHAVRAATLPTAVRCSRGSRGMTDTLCRACRSGNEHLYHVVQQCPRTHGGRILRHDAVAKQIAGALSSSGWDVERERLYHMTSDQGKKPDIVAVKPDRSCIILDVQVVNGSMDMEQTWRAKIRKYDRDDLRQAVSELKGVEPNNIRVMAATLSWRGVWCGKSATELRELGISVGVLRGVTRRVLLGSYLNWWSFYRGTSLHPSLPPPPSSSSLIPRAGVG

SEQ ID NO: 24674 - protein, 942 aa, Apolygus lucorum
MRTVIAIKNIRLKPHYKQLVQEAILANSSGASPASPIAGVEQQPAIQYPSPGTSGLLADLKTEVLRLGGQVGRIDGYESTYLQDLARRAAEGLDNLENEVAAYLGRIFPRVGDATVTQHQEGPPPRVVLRGGRRAAKQARRREYHRVQSLWRKHPARVAAEVLEEPGENQVQPPLQEFVDFWEPLLSAPSHDPGERVVPPVSTRDSLRSIMCSPVLSDEAHKCRVKNSTSAGPDGISARRWNKAPKTIKLLVLNLLLLAGRPPKALTRARTVFIPKKGGSGPGGYRPISVSSVVFRHFQKVLASRFQVAGIIGDVQRAFRPADGTAENLTVLQTVISLARMKRRQLHLAALDVAKAFDTVSHLALTDCLRGVGAPSRLIEYVACLYQEGVTVLEAVGEVSGDVRIGRGVRQGDPLSPLLFNLVVDTALGKLPTEVGFDLAPGVRVGALAFADDVILLAETREGLQIALNAFAKQLARCGLVVNPDKCGSVSLVPSGRQHKVKVVDGGFVIGQSPIPSRSVLEVWRYLGVDFMGVATISASRVDLGRALARVTKAPLKPQQKLRLLRTYLLPKLTYGLVFGRLTAGRLQELDRQVRSAVRSWLRFPPGVPSAYVHAPVKSGGLGIVSLSACIPSLRPQRLLALQGSSWEVARAAADLDFVRQQLAWCDRATPSAPKPSSSAEFAAALHESVDGKELRQCSESSVSSQWVDWASKGIGARDYRHFPAVRMATLPTAVRCSRGSRGTTLPLCRACRSGNEHLYHVVQQCPRTHGGRILSHDAVAKQIAGALSSSGWDVERERLYHMPSDQGKKPDIVAVKPDQSCIILDVQVVNGSLDMEQTWRAKIRKYDRNDLQQAVSELKGVAPNNIRVMAATLSWRGVWCGKSATELRELGISVGVLRGITTRVLLGSYLNWWSFYRGTSLHPSLPPPPSSSSLIPRAGVG

SEQ ID NO: 24675 - protein, 1095 aa, Apolygus lucorum
MTLWRLGREPLSTGSLTLHFKRPPVMENTQEQPHNPRLPIGTRGSRGGAQRRPRQGRRPSSPSSSSSSSLPSSSSTASLNHQCAHCERAFTTRSGLGLHIRRKHPVAANAAIDIERVQHRYASEELRRMAADEVVAVRDGVRNINVYLSERFPMRTVIAIKNIRLKPHYKQLVQEAILANSSGASPASPVADVEQQPAIQYPSPGTSGLLANLKTEVLRLGGQVGRIEGYESTYLQGLARRAAEGLDNLENEVAAYLGRIFPRVGDATVTQHQGGPPPGVVLRGGCRAAKQARRREYHRVQSLWRKHPARVAAEVLEEPGENQVQPPLQEFVDFWEPLLSAPSHDPGERVVPPVSTRDSLRGIMCLPVLSDEAHKCRVKNSTSAGPDGISARRWNKAPKTIKLLVLNLLLLAGRPPKALTRARTVFIPKKGGSGPGGYRPISVSSVVFRHFQKVLASRLQVAGIIGDVQRAFRPADGTAENLTVLQTVISLARMKRRQLHLAALDVAKAFDTVSHLALTDCLRGVGAPSRLIEYVACLYQEGVTVLEAGGEVSGDVRIGRGVRQGDPLSPLLFNLVVDTALGKLPTEVGFDLAPGVRVGALAFADDVILLAETREGLQIALNAFAKQLARCGLVVNPDKCGSVSLVPSGRQHKVKVVDGGFVIGQSPIPSRSVLEVWRYLGVDFMGVATISASRVDLGRALARVTKAPLKPQQKLRLLRTYLLPKLTYGLVFGRLTAGRLQELDRQVRSAVRSWLRFPPGVPSAYVHAPVKSGGLGIVSLSACIPSLRRQRLLALQGSSWEVARAAADLDFVRQQLAWCDRATPSAPKPSSSAEFTAALHESVDGKELRQCSESPVSSQWVDWASEGIGARDYRHFHAVRMATLPTAVRCSRGSRRTTLPLCRACRSGNEHLYHVVQQCPRTHGGRILRHDAVAKQIAGALSSSGWDVERERLYHMPSDQGKKPDIVAVKPDQSCIILDVQVVNGSLDMEQTWRAKIRKYDRNDLRQAVSELKGVAPNNIRVMAATLSWRGVWCGKSATELRELGISVGVLRGITTRVLLGSYLNWWSFYRGTSLHPSLPPPPSSSSLIPRAGVG

SEQ ID NO: 24676 - protein, 1070 aa, Apolygus lucorum
MIDEADQPHNPRQPIGSRGIRGGAQRSPRQGRRPSSPSSSSSSSLPSSSSTASLDHQCAHCERAFTSRSGLGVHVRRKHPVAANAAIEIERVQPRYASEDLRRMAADEVVAVRNGVRNINVYLSERFPTRTVIAIKNLRLKPHYKQLVQEAILANSGGASPASPIAGVDQQSAIQYPSPGTSGLLADLKTEVLRLGGQVGRIEGYESTYLQDLARRAAEGLDNLEDMVAAYLGRIFPRVGDATVTRHQGRPPPRVVLRGGRRAAKQARRQEYHRVQSLWRKHPARVAAEVLEEPGEDQVQPPLQEFVDFWEPLLSAPSHNPGERVVPPVSTRDSLRSILCSPVLLDEAHKCRVKNSTSAGPDGVSARRWNKAPNTIKLLILNLLMLAGRPPKALTRTRTVLIPKKGGSGPGGYRPISVSSVVFRHFQKVLASRLQVAGVIGDVQRAFRPADGTAENLTVLQTVISLARIKRRQLHLAALDVAKAFDTVSHFALTDCLRGVGAPSRLLEYVACLYHEGVTVLEAGGEVSGDVRIGRGVRQGDPLSPLLFNLVVDTALGKLPTEVGFDLAPGVRVGALAFADDVILLAETREGLQIALNAFAKQLARCGLVVNPDKCGSVSLVPSGRQQKVKVVDGGFVVGQSPIPSRSVLEVWRYLGVDFMGVATITTSRVDLGRALARVTKAPLKPQQKLRLLRTYLLPKLTYGLVFGRLTAGRLQELDRQVRSAVRSWLKFPPGVPSAYFHAPVKSGGLGIVSLSACIPSLRRQRLLALQGSSWEVARAAADLDFVRQQLAWCDRATPSAPKPSSSAEFAAALHESVDGKELRQCSESLVSSQWVYWASEGIGARDYRHFHAVRMATLPTAVRCLRGSRGTTLPLCRACRSGNEHLYHVVQQCPRTHGGRILRHDAVAKQIAGALSSSGWDVEWERLYHMPSDQGKKPDIVAVKPDQSCIILDVQVVNGSLDMEQTWRAKIRKYDRDDLRQAVSELKGVVPNNIRVMAATLSWRGVWCGKSATELRELGISVGVLRGITTRVLLSSYLNWWSFYRGTSLHPSLPPPPSSSSLIPRAGVG

SEQ ID NO: 24677 - protein, 732 aa, Apolygus lucorum
MCSPVLSDEAHKCRVKNSTSAGPDGISARRWNKAPRTIKLLLLNLLLLAGRPPKALTRTRTVFIPKKGGSGPGGYRPISVSSVVFRHFQKVLASRLQVAGIIGDVQRAFRPADGTAENLTVLQTVISLARMKRRQLHLAALDVAKAFDTVSHFALTDCLRGVGAPSRLIEYVACLYHEGVTVLEAGGEVSGDVRIERGVRQGDPLPPLLFNLVVDTALGKLPTEVGFDLAPGVRVGALAFDDDVILLAETREGLQIALNAFAKQLARCGLVVNPDKCGSVSLVPSGRQHKVKVVDGGFVIGQSPIPSRSVLEVWRYLGVDFMGVATISASRVDLGRALARVTKAPLKPQQKLRLLRTYLLPKLTYGLVFGRLTAGRLQELDRQVRSAVRSWLRFPPGVPSAYVHAPVKSGGLGIVSLSACIPSLRRQRLLALQGSSWEVARAAADLDFVRQQLAWCDRATPSAPKPSSSAEFAAALHESVDGKELRQCSESPVSSQWVDWASEGIGARDYRHFHAVRMATLPTAVRCSRGSRGTTLPLCRACRSGNEHLYHVVQQCPRTHGGRILRHDAVAKQIAGALSSSGWDVERERLYHMPSDQGKKPDIVAVKPDQSCIILDVQVVNGSLDMEQTWRAKIRKYDRNDLRQAVSELKGVAPNNIRVMAATLSWRGVWCGKSATELRELGISVGVLRGITTRVLLGSYLNWWSFYRGTSLHPSLPPPPSSSSLIPRAGVG

SEQ ID NO: 24678 - protein, 878 aa, Apolygus lucorum
MRLGGQVGRIEGYESAYLQDLVRRAAEGLDNLEDEVAAYLGRIFPRVEDTTVTQHQGGPPPRVMLRGGRRAAKQARRREYHRVQSLWKKHPARVAAEVLEEPGENQVQPPLQEFVDFWEPLLSAPSHDPGERVVPPVSTRDSLRGIMCSPVLSDEAHKCRVRNSTSAGPDGISARRWNKAPKTIKLLILNLLLLAGRPPKALTRARTVFIPKKGGSGPGGYRPISVSSVVFRHFQKVLASRLQVAGVIGDVQRAFRPADGTAENLTVLQTVISLARIKRRQLHLAALDVAKAFDTVSHLALTDCLRGVGAPSRLIEYVACLYQEGVMVLEAGGEVSGDVRIGRGVRQGDPLSPLLFNLVVDTALGKLPTEVGFDLAPGVRVGALAFADDVILLAETREGLQIALNAFAKQLARCGLVVNPDKCGSVSLVPSGRQHKVKVVDGGFVVGQSPIPARSVLEVWRYLGVDFMGVATITASRVDLGRALARVTKAPLKPQQKLRLLRTYLLPKLTYGLVFGRLTAGRLQELDREVRSAVRSWLRFPPGVPSAYVHAPVKSGGLGIVSLSACIPSLRRQRLLALQGSSWEVARAAADLDFVRQQLAWCDRATPSAPKPSSSAEFAAALHESVDGKELRQCSESLVSSQWVDWASEGIGARDYRHFHAVRVAALPTVVRCSRGSRGTTLPLYRACRSGNEHLYHVVQQCPRTHGGRILRHDAVAKQIAGALSSSSWDVERERLYHMPSDQGKKPDIVAVKPDQSCIILDVQVVNGSLDMEQTWRAKIRKYDSDDLRQAVSELKGVAPNNIRVMAATLSWRGVWCGKSATELRELGISVGVLRGITTRVLLGSYLNWWSFYRGTSLHPSLPPPPSSSSLIPRAGVG

SEQ ID NO: 24679 - protein, 1095 aa, Apolygus lucorum
MTLWRQGRGPLSTGSLTLKKKRSPVMEENSALPHNPRQPIGSRGIRGGAQRRPRQGRRPSSPSSSSSSSLPSSSSTASLNHQCAHCERAFSTRSGLGLHVRRKHPVAANAAIDIERIQHRYASEELRRMAADEVVAVRNGVRNINVYLSERFPMRTVIAIKNIRLKPHYKQLVQEAILANSSGASPASPIADVEQQSAIQYPSPGTSGLLADLKTEVMRLGGQVGRIEGYESAYLQDLVRRAAEGLDNLEDEVAAYLGRIFPRVEDTTVTQHQGGPPPRVMLRGGRRAAKQARRREYHRVQSLWKKHPARVAAEVLEEPGENQVQPPLQEFVDFWEPLLSAPSHDPGERVVPPVSTRDSLRGIMCLPVLSDEAHKCRVRNSTSAGPDGISARRWNKAPKTIKLLILNLLLLAGRPPKALTRARTVFIPKKGGSGPGGYRPISVSSVVFRHFQKVLASRLQVAGVIGDVQRAFRPADGTAENLTVLQTVVSLARIKRWQLHLAALDVAKAFDTVSHLALTDCLRGVGAPSRLIEYVACLYQEGVTVLEAGGEVSGDVRIGRGVRQGDPLSPLLFNLVVDTALGKLPTEVGFDLAPGVRVGALAFADDVILLAETREGLQIALNAFAKQLARCGLVVNPDKCGSVSLVPSGRQHKVKVVDGGFVVGQSPIPARSVLEVWRYLGVDFMGVATITASRVDLGRALARVTKAPLKPQQKLRLLRTYLLPKLTYGLVFGRLTAGRLQELDREVRSAVRSWLRFPPGVPSVYVHAPVKSGGLGIVSLSACIPSLRRQRLLALQGSSWEVARAAADLDFVRQQLAWCDRATPSAPKPSSSAEFAAALHESVDGKELRQCSESLVSSQWVDWASEGIGARDYRHFHAVRVAALPTAVRCSRGSRGTTLPLCRACRSGNEHLYHVVQQCPRTHGGRILRHDAVAKQIAGALSSSGWDVERERLYHMPSDQGKKPDIVAVKPDQSCIILDVQVVNGSLDMEQTWRAKIRKYDRDDLRQAVSELKGVAPNNIRVMAATLSWRGVWCGKSATELRELGISVGVLRGITTRVLLGSYLNWWSFYRGTSLHPSLPPPPSSSSLIPRAGVG

SEQ ID NO: 24680 - protein, 1075 aa, Apolygus lucorum
MRFPVMNTEPTEPHNPRQPIGSRGIRGGAQRRPRQGRRPSSPSSSSSSSLPSSSSTASLNHQCAHCERAFTTRSGLGLHIRRKHPVAANAAIDIERIQPRYASEELRRMAADEAVAVRNGVRNINVYLNERFPTRTVIAIKNIRLKPHYKQLVQEAILANSSGASPASPIADVEQQPAIQYPSPGTSGLLADLKTEVLRLGGQVGRIEGYESTYLQDLVRRAVEGLDNLEDEVAAYLGRIFPRVGDATVTQHQGGPPPRMVLRGGRRAAKQARRREYHRVQSLWRKHPARVAAEVLEEPGENQVQPPLQEFVDFWEPLLSAPSHDPGECVVPPVSTRDSLRGIMCSPVLPDEAHKCRVRNSTSAGPDGVFARRWNKAPKTIKLLILNLLLLAGRPPKALTRTRTVFIPKKGGSGPGGYRPISVSSVVFRHFQKVLASRLQVAGVIGDVQRAFRPADGTAENLTVLQTVISLARIKRRQLHLAALDVAKAFDTVSHLALTDCLRGVGAPSRLIEYVACLYQEGVTVLEAGGEVSGDIRIGRGVRQGDPLSPLLFNLVVDTALGKLPTEVGFDLAPGVRVGALAFADDVILLAETREGLQIALNAFAKQLAGCGLVVNPDKCGSVSLVPSGRQHKVKVVDGGFVVGQSSIPSRSVLEVWRYLGVDFMGVATITASRVDLGRALARVTKAPLKPQQKLRLLRTYLLPKLTYGLVFGRLTAGRLQELDREVRSAVRSWLKFPPGVPSAYVHAPVKSGGLGIVSLSACIPSLRRQRLLALQGSSWEVARAAADLDFVRQQLAWCDRATPSAPKPSSSAEFAAALHESVDGKELRQCSESLLSSQWVDWASEGIGARDYRHFHAIRVASLPTAVRCSRGSRGTTLPLCRACRSGNEHLYHVVQQCPRTHGGRILRHDAVAKQIAGALSSSGWDVERERLYHMPSDQGKKPDIVAVKPDQSCIILDVQVVNGSLDMEQTWRAKIRKYDTNDLRQAVSELKGVAPNNIRVMAATLSWRGVWCGKSATELRELGISVGVLRGITTRVLLGSYLNWWSFYRGTSLHPSLPPPPSSSSLIPRAGVG

SEQ ID NO: 24681 - protein, 967 aa, Apolygus lucorum
MAADEVVAVRNGVRNINVYLSERFPTRTVIAIKNLRLKPHYKQLVQDAILANSSGASPASPVAGVDQQSAIQYPSPGTSGLLADLKTEVLRLGGQVGRIEGYESTYLQDLARRAVEGLDNLEDKVAAYLGRIFPRVGDATVTQHQGGPPPRVVLRGGRRAAKQARRREYHRVQSLWRKHPARVAAEVLEEPGEVQVQPPLQEFVDFWEPLLSAPSHNPGERVVPPVSTRDSLRSILCSPVLLDEAHKCRVKNSTSAGPDGISARRWNKAPNTIKLLILNLLILAGRPPKALTRTRTVFIPKKGGSGPGGYRPISVSSVVFRHFQKVLASRLQVAGVIGDVQRAFRPADGTAENLTVLQTVISLARIKRRQLHLAALDVAKAFDTVSHLALTDCLRGVGAPSRLIEYVACLYHEGVTVLEAGGEVSGDIQIGRGVRQGDPLSPLLFNLVVDTALGKLPTEVGFDLAPGVRVGALAFADDVILLAETREGLQIALNAFAKQLSRCGLVVNPDKCGSVSLVPSGRQHKVKVVDGGFVIGQAPIPSRSVLEVWRYLGVDFMGVATITASRVDLGRALARITKAPLKPQQRLRLLRTYLLPKLTYGLVFGRLTAGRLQELDREVRSAVRSWLRFPPGVPSAYIHAPVKSGGLGIVSLSACIPSLRRQRLLALQGSSWEVARVAAGLDFVRQQLAWCDRATPSAPKPSSSAEFAAALHESVDGKELRQCSESLISSQWVDWASEGIGARDYRNFHAVRVATLPTAVRCSRGSRGMTDTLCRACRSGNEHLYHVVQQCPRTHGGRILRHDAVAKQIAGALSSSGWDVERERLYHMPSDQGKKPDIVAVKPDRSCIILDVQVVNGSMDMEQTWRAKIRKYDRDDLRQAVSELKGVAPNNIRVMAATLSWRGVWCGKSATELRELGISVGVLRGVTRRVLLGSYLNWWSFYRGTSLHPSLPPPPSSSSLIPRAGVG

SEQ ID NO: 24682 - protein, 1077 aa, Apolygus lucorum
MRFPVMNTEPTEPHNPRQPIGSRGIRGGAQRRPRQGRRPSSPSSSSSSSSSLPSSSSTASLNHQCAHCERAFTTRSGLGLHIRRKHPVAANAAIDIERIQPRYASEELRRMAADEAVAVCNGVRNINVYLNERFPTRTVIAIKNIRLKPHYKQLVQEAILANSSGASPASPIADVEQQPAIQYPSPGTSGLLADLKTEVLRLGGQVGRIEGYESTYLQDLVRRAVEGLDNLEDEVAAYLGRIFPRVGDATVMWHQGGPPPRMVLRGGRRAAKQARRREYHRVQSLWRKHPARVAAEVLEEPGENQVQPPLQEFVDFWEPLLSAPSHDPGECVVPPVSTRDSLRSIMCSPVLSDEAHKCHVRNSTSAGPDGVSARHWNKAPKTIKLLILNLLLLAGRPPKALTRTRTVFIPKKGGSGPGGYRPISVSSVVFRHFQKVLASRLQVAGVIGDVQRAFRPADGTAENLTVLQTVITLARIKRRQLHLAALDVAKAFDTVSHLALTDCLRGVGAPSRLIEYVACLYQEGVTVLEAGGEVSGDIRIGRGVRQGDPLSPLLFNLVVDTALGKLPTEVGFDLAPGVRVGALAFADDVILLAETREGLQIALNAFAKQLAGCGLVVNPDKCGSVSLVPSGRQHKVKVVDGGFVVGQSPIPSRSVLEVWRYLGVDFMGVATITASRVDLGRALARVTKAPLKPQQKLRLLRTYLLPKLTYGLVFGRLTAGRLQELDREVRSAVRSWLKFPPGVPSAYVHAPVKSGGLGIVSLSACIPSLRRQRLLALQGSSWEVARAAADLDFVRQQLAWCDRATPSAPKPSSSAEFAAALHESVDGKELRQCSESLVSSQWVDLASEGIGARDYRHFHAIRVASLPTAVRCSRGSRGTTLPLCRACRSGNEHLYHVVQQCPRTHGGRILRHDAVAKQIAGALSSSGWDVERERLYHMPSDQGKKPDIVAVKPDQSCIILDVQVVNGSLDMEQTWRAKIRKYDTNDLRQAVSELKGVAPNNIRVMAATLSWRGVWCGKSATELRELGISVGVLRGITSRVLLGSYLNWWSFYRGTSLHPSLPPPPSSSSLIPRAGVG

SEQ ID NO: 24683 - protein, 1095 aa, Apolygus lucorum
MTLWRLGRGPLLTGSLTLHHKRPPVMEQNINEPHNPRQPIGSRGIRGGAQRRPRQGRRPSSPSSSSSSSLPSSSSTASLNHQCAHCERAFTTRSGLGLHIRRKHPVAANAAIDIERIQPRYASEELRRMAADEAVAVRNGVRNINVYLNERFPTRTVIAIKNIRLKPHYKQLVQEAILANSSGASPASPIADVEQQSAIQYPSPGTSGLLADLETEVLRLGGQVGRIEGYESTYLQDLVRRAVEGLDNLEDEVAAYLGRIFPRVGDATVTRHQGGPPPRMVLRGGRRAAKQARRREYHRVQSLWRKHPARVAAEVLEEPGENQVQPPLQEFVDFWEPLLSAPSHDPGECVVPPVSTRDSLRSIMCSPVLTDEAHKCRVRNSTSAGPDGVSARRWNKAPKTIKLLILNLLLLAGRPPKALTRTRTVFIPKKGGSGPGGYRPISVSLVVFRHFQKVLASRLQVAGVIGDVQRAFRPADGTAENLTVLQTVISLARIKRRQLHLAALDVAKAFDTVSHLALTDCLRGVGAPSRLIEYVACLYQEGVTVLEAGGEVSGDIRVGRGVRQGDPLSPLLFNLVVDTALGKLPTEVGFDLAPGVRVGALAFADDVILLAETREGLQIALNAFAKQLAGCGLVVNPDKCGSVSLVPSGRQHKVKVVDGGFVVGQSPIPSRSVLEVWRYLGVDFMGVATITASRVDLGRALARVTKAPLKPQQKLRLLRMYLLPKLTYGLVFGRLTAGRLQELDREVRSAVRSWLKFPPGVPSAYVHAPVKSGGLGIVSLSACIPSLRRRRLLALQGSSWEVARAAADLDFVRQQLAWCDRATPSAPKPSSSAEFAAALHESVDGKELRQCSESLVSSQWVDWASEGIGARDYRHFHAIRVASLPTAVRCSRGSRGTTLPLCRACRSGNEHLYHVVQQCPRTHGGRILRHDAVAKQIAGALSSSGWDVERERLYHMPSDQCKKPDIVAVKPDQSCIILDVQVVNGSLDMEQTWRAKIRKYDTNDLRQAVSELKGVAPNNIRVMAATLSWRGVWCGKSATELRELGISVGVLRGITTRVLLGSYLNWWSFYRGTSLHPSLPPPPSSSSLIPRAGVG

SEQ ID NO: 24684 - protein, 1070 aa, Apolygus lucorum
MEQTNDTPHNPRLPIGTRGSRGGAQRRPRQGRRPSSPSSSSSSSLPSSSSTASLDHQCAHCERAFTSRSGLGVHVRRKHPVAANEAIDVERVQPRYASEDLRRMAADEVVAVRNGVRNINVYLSERFPTRTVIAIKNLRLKPHYKQLVQEAILANSGGASPASPVAGVDQQSAIQYPSPGTSGLLADLKTEVLRLGGQVGRIEGYESTYLQDLARRAAEGLDNLEDEVAAYLGRIFPRVEDATVTQHQGGPPPRVVLRGGRRAAKQARRREYHRVQSLWRKHPARVAAEVLEEPGEDQVQPPLQEFVDFGEPLLSAPSHNPGERVVPPVSTRDSLRSILCSPVLLDEAHKCRVKNSTSAGPDGVSARRWNKAPNTIKLLILNLLILAGRPPKALTRTRTVFIPKKGGSGPGGYRPITVSSVVFRHFQKVLASRLQVAGVIGDVQRAFRPADGTAENLTVLQTVISLARIKRRQLHLAALDVAKAFDTVSHQALTDCLRAVGAPSRLIEYVACLYHEGVTVLEAGGEVSGDVRIGRGVRQGDPLSPLLFNLVVDTALGKLPTEVGFDLAPGVRVGALAFADDVILLAETREGLQIALNAFAKQLSRCGLVVNPDKCGSVSLVPSGRQHKVKVVDGGFVIGQAPIPSRSVLEVWRCLGVDFMGVATITASRVDLGRALARITKAPLKPQQRLRLLRTYLLPKLTYGLVFGRLTAGRLQELDREVRSAVRSWLRFPPGVPSAYIHAPVKSGGLGIVSLSACIPSLRRQRLLALQGSSWEVARVAAGLDFVRQQLAWCDRATPSAPKPSSSAEFAAALHESVDGKELRQCSESLISSQWVDWASEGIGARHYRNFHAVRVATLPTAVRCSRGSRGMTDTLCRACRSGNEHLYHVVQQCPRTHGGRILRHDAVAKQIAGALSSSGWDVERERLYHMPSDQGKKPDIVAVKPDRSCIILDVQVVNGSMDMEQTWRAKIRKYDRDDLRQAVSELKGVEPNNIRVMAATLSWRGVWCGKSATELRELGISVGVLRGVTRRVLLGSYLNWWSFYRGTSLHPSLPPPPSSSSLIPRAGVG

SEQ ID NO: 24685 - protein, 1113 aa, Apolygus lucorum
MVPYENHYLPHDGSHCACANVNFLNELPLSTGSLTLHFKRPPVMENTHEQPHNPRLPIGTRGSRGGAQRRPRQGRRPSSPSSSSSSSLPSSSSTASLNHQCAHCERAFTTRSGLGLHVRRKHPVAANAAIDIERVQHRYASEELRRMAADEVVAVRDGVRNINVYLSERFPMRTVIAIKNIRLKPHYKQLVQEAILANSSGASPASPVADVEQQPAIQYPSPGTSGLLADLKTEVLRLGGQVGRIEGYESTYLQGLARRAAEGLDNLENEVAAYLGRIFPRVGDATVTRHQGGPPPGVVLRGGRRAAKQARRREYHRVQSLWRKHPARVAAEVLEEPGENQVQPPLQEFVDFWEPLLSAPSHDPGERVVPPVSTRDSLRGIMCSPVLSDEAHKCRVKNSTSAGPDGISARRWNKAPKTIKLLVLNLLLLAGRPPKVLTRARTVFIPKKGGSGPGGYRPISVSSVVFRHFQKVLASRLQVAGIIGDVQRAFRPADGTAENLTVLQTVISLARMKRRQLNLAALDVAKAFDTVSHLALTDCLRGVGAPSRLIEYVACLYQEGVTVLEAGGEVSGDVRIGRGVRQGDPLSPLLFNLVVDTALGKLPTEVGFDLAPGVRVGALAFADDVILLAETREGLQIALNAFAKQLARCGLVVNPDKCGSVSLVPSGRQHKVKVVDGGFVIGQSPIPSRSVLEVWRYLGVDFMGVATISASRVDLGRALARVTKAPLKPQQKLRLLRTYLLPKLTYGLVFGRLTAGRLQELDRQVRSAVRSWLRFPPGVPSAYVHAPVKSGGLGIVSLSACIPSLRRQRLLALQGSSWEVARAAADLDFVRQQLAWCDRATPSAPKPSSSAEFAAALHESVDGKELRQCSESPVSSQWVDWASEGIGARDYRHFHAVRMATLPTAVRCSRGSRGTTLPLCRACRSGNEHLYHVVQQCPRTHGGRILRHDAVAKQIAGALSSSGWDVERERLYHMPSDQGKKPDIVAVKPDQSCIILDVQVVNGSLDMEQTWRAKIRKYDRNDLRQAVSELKGVAPNNIRVMAATLSWRGLWCGKSAMELRELGISVGVLRGITTRVLLGSYLNWWSFYRGTSLHPSLPPPPSSSSLIPRAGVG

SEQ ID NO: 24686 - protein, 1095 aa, Apolygus lucorum
MTLWRLGREPLSTGSLTLHFKRPPVMENTQEQPHNPRLPIGTRGSRGGAQRRPRQGRRPSSPSSSSSSSLPSSSSTASLNHQCAHCERAFTTRSGLGLHVRRKHPVAANAAIDIERVQHRYASEELRRMAADEVVAVRDGVRNINVYLSERFPMRTVIAIKNIRLKPHYKQLVQEAILANSSGASPASPVADVEQQPAIQYPSPGTSGLLADLKTEVLRLGGQVGRIEGYESTYLQGLARRAAEGLDNLENEVAAYLGRIFPRVGDATVTQHQGGPPPGMVLRGGRRAAKQARRREYHRVQSLWRKHPARVAAEVLEEPGENQVQPPLQEFVDFWEPLLSAPSHDPGERVVPPVSTRDSLRGIMCSPVLSDEAHKCRVKNSTSAGPDGISARRWNKAPKTIKLLVLNLLLLAGRPPKALTRARTVFIPKKGGSGPGGYRPISVSSVVFRHFQKVLASRLQVAGIIGDVQRAFRPADGTAENLTVLQTVISLARMKRRQLHLAALDVPKAFDTVSHLALTDCLHGVGASSRLIEYVACLYQEGVTVLEAGGEVSGDVRIGRGVRQGDPLSPLLFNLVVDTALGKLPTEVGFDLAPGVRVGALAFADDVILLAETREGLQIALNAFAKQLARCGLVVNPDKCGSVSLVPSGRQHKVKVVDGGFVIGQSPIPSRSVLEVWRYLGVDFMGVATISASRVDLGRALARVTKAPLKPQQKLRLLRTYLLPKLTYGLVFGRLTAGRLQELDRQVRSAVRSWLRFPPGVPSAYVHAPVKSGGLGIVSLSACIPSLRRQRLLALQGSSWEVACAAADLDFVRQQLAWCDRATPSAPKPSSSAEFAAALHESVDGKELRQCSESPVSSQWVDWASEGIGARDYRHFHAVRMATLPTAVRCSRGSRGTTLPLCRACRSGNEHLYHVVQQCPRTHGGRILRHDAVAKQIAGALSSSGWDVERERLYHMPSDQGKKPDIVAVKPDQSCIILDVQVVNGSLDMEQTWRAKIRKYDRNDLRQAVSELKGVAPNNIRVMAATLSWRGVWCGKSATELRELGISVGVLRGITTRVLLGSYLNWWSFYRGTSLHPSLPPPPSSSSLIPRAGVG

SEQ ID NO: 24687 - protein, 967 aa, Apolygus lucorum
MVADEVVAVRNGVRNINVYLSERFPTRTVIAIKNLRLKPHYKQLVQEAILANSGGASPASPIAGVDQQSAIQYPSPGTSGLLADLKTEVLRLGGQVGRIEGYESIYLQDLARRAAEGLDNLEDKVAAYLGRIFPQVGDATVTLHQGGPPPRVVLRGGRRAAKQARRREYHRVQSLWRKHPARVAAEVLEEPGEDQVQPPLQEFVDFWEPLLSAPSHNPGERVVPPVSTRDSLRSILCSPVLLDEAHKCRVKNSTSAGPDGVSARRWNKAPNTIKLLVLNLLILAGRPPKALTRTRTVFIPKKGGSGPGGYRPISVSSVVFRHFQKVLASRLQVAGVIGDVQRAFRPADGTAENLTVLQTVISLARIKRRQLHLAALDVAKAFDTVSHLALTDCLRGVGAPSRLIEYVACLYREGVTVLEAGGEVSRDIVIGRGVRQGDPLSPLLFNLVVDTALGKLPTEVGFDLAPGVRVGALAFADDVILLAETREGLQIALNAFAKQLSRCGLVVNPDKCGSVSLVPSGRQHKVKVVDGGFVIGQAPIPSRSVLEVWRYLGVDFMGVATITASRVDLGRALARVTKAPLKPQQRLRLLCTYLLPKLTYGLVFGRLTAGRLQELDREVRSAVRSWLRFPPGVPSAYIHAPVKSGGLGIVSLSACIPSLRRRRLLALQGSSWEVARVAAVLDFVRQQLAWCDRATPSAPKPSSSAEFAAALHESVDGKELRQCSESLISSQWVDWASEGIGARDYRNFHAVRVATLPTAVRCSRGSRGMTDTLCRACRSGNEHLYHVVQQCPRTHGGRILRHDAVAKQIAGALSSSGWDVERERLYHMPSDQGKKPDIVAVKPDRSCIILDVQVVNGSMDMEQTWRAKIRKYDRDDLRQAVSELKGVEPNNIRVMAATLSWRGVWCGKSATELRELGISVGVLRGVTRRVLLGSYLNWWSFYRGTSLHPSLPPPPSSSSLIPRAGVG

SEQ ID NO: 24688 - protein, 967 aa, Apolygus lucorum
MVADEAVAVRNGVCNINVYLNERFPTRTVIAIKNLRLRPHYKQLVQEAILANSSGASPASPIADVEQQPAVQYPSPGTSGLLADLKTEVLRLGGQVGRIEGYESAYLHDLVRRAAEGLANLEDEVAAYLGRIFPRVGDATVTRHQGGPPPRVVLRGGRRAAKQARRREYHRVQSLWRKHPARVAAEVLEEAGENQVQPPLQEFVDFWEPLLSAPSHDPGERVVPPVSTRDSLRSILCSPVLLEEAHKCRVKNSTSAGPDGVSARRWNKAPKTIKLLILNLLLLAGRPPKALTRTRTVFIPKKGGSGPGGYRPISVSSVVFRHFQKVLASRLQVAGVIGDVQRAFRPADGTAENLTVLQSVISLARIKRRQLHLAALDVAKAFDTVSHLALTDCLRGVGAPSRLIEYVACLYQEGVTVLEAGGEVSGDIRIGRGVRQGDPLSPLLFNLVVDTALGKLPTEVGFDLAPGVRVGALAFADDVILLAETREGLQIALNAFAKQLARCGLVVNPDKCGSVSLVPSGRQHKVKVVDGGFVVGQSPIPSRSVLEVWRYLGVDFMGVATITASRVDLGRALARVTKAPLKPQQKLRLLRTYLLPKLTYGLVFGRLTAGRLQQLDREVRSAVRSWLKFPPGVPSAYIHAPVKSGGLGIVSLSACIPSLRRRRLLALQGSSWEVARAAADLDFVRQQLAWCDRATPSAPKPSSSAEFAAALHESVDGKELRKCSESLVSSQWVDWASEGIGARDYRHFHAIRVASLPTAVRCSRGSRGTTLPLCRACRSGNEHLYHVVQQCPRTHGGRILRHDAVAKQIAGALSSSGWDVERERLYHMPSDQGKKPDIVAVKPDQSCIILDVQVVNGSLDMEQTWRAKIRKYDTNDLRQAVSELKGVAPNNIRVMAATLSWRGVWCGKSATELRELGISVGVLRGITTRVLLGSYMNWWSFYRGTSLHPSLPPPPSSSSLIPRAGVG

SEQ ID NO: 24689 - protein, 995 aa, Apolygus lucorum
MTLWRLGRGPLLTGPLTLYMRFPVMDRNLTEPHNPRRPIGTRGSRGGAQRRPRQGRRPSSPSSSSSSSLPSSSSTASLDHQCAHCERAFTSRSGLGVHVRRKHPVAANEEIDIERVQPRYASEDLRRMAADEVVAVRNGVRNINVYLSERFPTRTVIAIKNLRLKPHYKQLVQEAILANSGGASPASPVAGMDQQSAIQYPSPGTSGLLADLKTEVLRLGGQVGRIEGYESTYLQDLARRAVEGLDNLEDKVAAYLGRIFPRVGDATVTQHQGGPPPRVVLRGGRRAAKQARRREYHRVQSLWRKHPARVAAEVLEEPGEDQVQPPLQEFVDFWEPLLSAPSHNPGERVVPPVSTRDSLRSILCSPVLLDEAHKCRVKNSTSAGPGGVSARRWNKAPNTIKLLILNLLMLAGRPPKALTRTRTVFIPKKGGSGPGGYRPISVSSVVFRHFQKVLASRLQVAGVIGDVQRAFRPADGTAENLTVLQTVISLARIKRRQLHLAALDVAKAFDTVSHLALTNCLHGVGAPSRLIEYVACLYHEGVTVLEAGGEVSGDVRIGRGVRQGDPLSPLLFNLVVDTALGKLPTEVGFDLAPGVRVGALAFADDVILLAETREGLQIALNAFAKQLARCGLVVNPDKCGSVSLVPSGRQHKVKVVDGGFVIGQAPIPSRSVLEVWRYLGVDFMGVATITASRVDLGRALARITKAPLKPQQRLRLLRTYLLPKLTYGLVFGRLTAGRLQELDREVRSAVRSWLRFPPGVPSAYIHAPVKSGGLGIVALSACIPSLRRQRLLALQGSSWEVARVAAGLDFVRQQLAWCDRATPSAPKPSSSAEFAAALHESVDGKELRQCSESLISSQWVDWASEGIGARDYWNFHAVRVATLPTAVRCSRGSRGMTDTLCRACRSGNEHLYHVVQQCPRTHGGRILRHDAVAKQIAGALSSSGWDVKGRDYTTCQVTGVRSLTLLLSSPTGLALSWMSRLLMAARTWSRPGGLR

SEQ ID NO: 24690 - protein, 1095 aa, Apolygus lucorum
MTLWRLGRGPLLPGSLTLLKCASPVMNTNNDEPHNPRRPIGTRGSGGGAQRRPRQGRRPSSPSSSSSSSLPSSSSTASLNHQCAHCERAFTTRSGLGLHVRRKHPVAANAAIEIERVQPRYASEDLRRMAGDEVVAVRSGVRNINVYLSERFPTRTVNAISKLRQRPHYRQLVQDAILANSSGASPASPIADVEQQPAIQNPSPGTFGLLADLKTEVMRLGGQVGRIEGYESTYLQDLARRAAEGSENLEDEVAAYLGRIFPQVGDATVTRHQRGPPLRMVLRGGRRAAKQARRREYHQVQSLWRKHPARVAAEVLEEPGENQVQPPLQEFVDFWEPLWSAPSHDPGERVVPPVSTRDSLRGIMCSPVLLDEAHKCRVKNSTSAGPDGISACRWNKAPKTIKLLILNLLLLAGRPPKALTRTRTVFIPKKGGSGPGGYRPISVSSVVFRHFQKVLASRLQVAGVIGDVQRAFRPADGTAENLTVLQTVISLARIKRRQLHLAALDVAKAFDTVSHFALTDCLHGVGAPTRLIEYVACLYHEGVTVLEAGGEMSRDIMIGRGVRQGDPLSPLLFNLVVDTALGKLPTEVGFDLAPGVRVGALAFADDVILLAETREGLQIALNAFAKQLARCGLVVNPDKCGSVSLVPSGRQHKVKVVDGGFVIGQSPIPSRSVLEVWRYLGVDFMGVATITASRVDLGRALARVTKAPLKPQQKLRLLRTYLLPKLTYGLVFGRLTAGRLQELDREVRSAVRSWLKFPPGVPSAYIHAPVKSGGLGIVSLSASIPSLRRQRLLALRGSSWGVARAAADLDFVRQQLAWCDRATPSAPKPSSSAEFAAALHESVDGKELRQCSESLISSQWVDWASEGIGARDYRHFHAVRVASLPTAVRCTRGSRGATLPLCRACRSRSEHLYHVVQQCPRTHGGRILRHDAVSKQIAGALSSSGWDVERERLYHIPSDQGKKPDIVAVKPDQSCIILDVQVVNGSLDMEQTWRAKIRKYDTNDLRQAVSELKGVAPNNIRVMAATLSWRGVWCGKSATELRELGISVGVLRGITTRVLLGSYLNWWSFYRGTSLHPSLPPPPSSSSLIPRAGVG

SEQ ID NO: 24691 - protein, 967 aa, Apolygus lucorum
MAADEAVAVRNGVRNINVYLNERFPTRTVIAIKNIRLKPHYKQLVQEAILANSSGASPASPVADVEQQPAIQYPSPGTSGLLADLKTEVLRLGGQVGRIEGYESTYLQDLVRRAVEGLDNLEDEVAAYLGRIFPRVGDATVTRHQGGPPPRMVLRGGRRAAKQARRREYYRVQSLWRKHPARVAAEVLEEPGENQVQPPLQEFVDFWEPLLSAPSHDPGECVVPPVSTRESLRSIMCSPVLSDEAHKCRVRNSTSAGPDGVSARRWNKAPKTIKLLILNLLLLAGRPPKALTRTRTVFIPKKGGSGPGGYRPISVSSVVFRHFQKVLASRLQVAGVIGDVQRAFRPADGTAENLTVLQTVISLARIKRRQLHLAALDVAKAFDTVSHLALTDCLRGVGAPSRLIEYVACLYQEGVTVLEAGGEVSGDIRIGRGVRQGDPLSPLLFNLVVDTALGKLPTEVGFDLAPGVRVGALAFADDVILLAETREGLQIALNAFAKQLAGCGLVVNPDKCGSVSLVPSGRQHKVKVVDGGFVVGQSPIPSRSVLEVWRYLGVDFMGVATITASRVDLGRALARVTKAPLKPQQKLRLLRTYLLPKLTYGLVFGRLTAGRLQELDREVRSAVRSWLKFPPGVPSAYVHAPVKSGGLGIVSLSACIPSLRRRRLLALQGSSWEVARAAADLDFVRQQLAWCDRATPSAPKPSSSAEFAAALHESVDGKELRQCSESLVSSQWVDWASEGIGARDYRHFHAIRVASLPTAVRCSRGSRGTTLPLCRACRSGNEHLYHVVQQCPRTHGGRILRHDAVAKQIAGALSSSGWDVERERLYHMPSDQGKKPDIVAVKPDQSCIILDVQVVNGSLDMEQTWRAKIRKYDTNDLRQAVSELKGVAPNNIRVMAATLSWRGVWCGKSATELRELGISVGVLRGITTRVLLGSYLNWWSFYRGTSLHPSLPPPPSSSSLIPRAGVG

SEQ ID NO: 24692 - protein, 942 aa, Apolygus lucorum
MRTVIAIKNIRLKPHYKQLVQEAILANSSGASPASPIADVEQQPAIQYPSPGTSGLLADLKTEVLRLGGQVGRIEGYESTYLQDLARRAAEGLDNLENEVAVYLGRIFPRVGDATVTQHQGGPPPGVVLHGGRRAAKQARRREYHRVQSLWRKHPARVAAEVLEEPGENQVQPPLQEFVDFWEPLLSAPSHDPGERVVPPVSTRDSLRSIMCAPVLSDEAHKCRVKNTTSTGPDGISARRWNKAPKTIKLLVLNLLLLAGRPPKALTRARTVFIPKKGGSGPGGYRPISVSSVVFRHFQKVLASRLQVAGIIGDVQRAFRPADGTAENLTVLQTVISLARMKRRQLHLAALDVAKAFDTVSHLALTDCLRGVGAPSRLIEYVACLYQEGVTVLEAGGEVSGDVRIGRGVRQGDPLSPLLFNLVVDTALGKLPTEVGFDLAPGVRVGALAFADDVILLAETREGLQIALNAFARQLARCGLVVNPDKCGSVSLVPSGRQHKVKVVDGGFVIGQSPIPSRSVLEVWRYLGVDFMGVATISASRVDLGRALARVTKAPLKPQQKLRLLRTYLLPKLTYGLVFGRLTAGRLQELDRQVRSAVRSWLRFPPGVPSAYVHAPVKSGGLGIVSLSACIPSLRRQRLLALQGSSWEVARAAADLDFVRQQLAWCDRATPSAPKPSSSAEFAAALHESVDGKELRQCSESPVSSQWVDWASEGIGARDYRHFHAVRMATLPTAVRCSRGSRGTTLPLCRACRSGNEHLYHVVQQCPRTHRGRILRHDAVAKQIAGALSSSGWDVERERLYHMPSDRGKKPDIVAVKPDQSCIILDVQVVNGSLDMEQTWRAKIRKYDRNDLRQAVSELKGVAPNNIRVMAATLSWRGVWCGKSATELRELGISVGVLHGITTRVLLGSYLNWWSFYRGTSLHPSLPPPPSSSSLIPRAGVG

SEQ ID NO: 24693 - protein, 690 aa, Apolygus lucorum
MLAGRPPKALTRTRTVFIPKKGGSGPGGYRPISVSSVVFRHFQKVLASRLQVAGVIGDVQRAFRPADGTAENLTVLQTVISLARIKRRQLHLAALDVAKAFDTVSHLALTDCLRGVGAPSRLIEYVACLYREGVTVLEAGGEVSRDIVIGRGVRQGDPLSPLLFNLVVDTALGKLPTEVGFDLAPGVRVGALAFADDVILLAETREGLQIALNAFAKQLSRCGLVVNPDKCGSVSLVPSGRQHKVKVVDGGFVIGQAPIPSRSVLEVWRYLGVDFMGVATITASRVDLGRALARITKAPLKPQQRLRLLRTYLLPKLTYGLVFGRLTAGRLQELDREVRSAVRSWLRFPPGVPSAYIHAPVKSGGLGIVSLSACIPSLRRQRLLALQGSSWEVARVAAGLDFVRQQLAWCDRATPSAPKPSSSAEFAAALHESVDGKELRQCSESLISSQWVDWASEGIGARDYRNFHAVRVATLPTAVRCSRGSRGMTDTLCRACRSGNEHLHAHLLHVVQQCPRTHGGRILRHDAVAKQIAGALSSSGWDVERERLYHMPSDQGKKPDIVAVKPDRSCIILDVQVVNGSMDMEQTWRAKIRKYDRDDLRQAVSELKGVEPNNIRVMAATLSWRGVWCGKSATELRELGISVGVLRGVTRRVLLGSYLNWWSFYRGTSLHPSLPPPPSSSSLIPRAGVG

SEQ ID NO: 24694 - protein, 1070 aa, Apolygus lucorum
METNQDQPHNPRQPIGSRGIRGGAQRRPRQGRRPSSPSSSSSSSLPSSSSTASLNHQCAHCERAFTTRSGLGLHIRRKHPVAANDAIDIERIQHRYASEELRRMAADEAVAVRNGVRNINVYLNERFPTRTVIAIKNIRLRPHYKQLVQEAILANSSGASPASPIADVEQQPAIQYPSPGTSGLLADLKTEVLRLGGQVGRIEGYESTYLQDLVRRAAEGLDNLEDEVAAYLGRIFPRVGDATVTQHQGGPPPRVVLRGGRRAAKQARRREYHRVQSLWRKHPARVAAEVLEEPGENQVQPPLQEFVDFWEPLLSAPSHDPGERVVPPVSTRDSLRSILCSPVLLDEAHKCRVKNSTSAGPDGVSARRWNKAPKTIKLLILNLLLLAGRPPKALTRTRTVFIPKKGGSGPGGYRPISVSSVVFRHFQKVLASRLQVAGVIGDVQRAFRPADGTAENLTVLQTVISLARIKRRQLHLAALDVAKAFDTVSHLALTDCLRGVGAPSRLIEYVACLYQEGVTVLEAGGEVSGDIRIGRGVRQGDPLSPLLFNLVVDTALGKLPTEVGFDLAPGVRVGALAFADDVILLAETREGLQIALNAFAKQLARCGLVVNPDKCGSVSLVPSGRQHKVKVVDGGFVVGQSPIPSRSVLEVWRYLGVDFMGVATITTSRVDLGRALARVTKAPLKPQQKLRLLRTYLLPKLTYGLVFGRLTAGRLQQLDREVRSAVRSWLKFPPGVPSAYFHAPVKSGGLGIVSLSACIPSLRRRRLLALQGSSWEVARAAADLDFVRQQLAWCDRATPSAPKPSSSAEFAAALHESVDGKELRQCSESLVSSQWVDWASEGIGARDYRHFHAIRVASLPTAVRCSRGSRGTTLPLCRACRSGNEHLCHVVQQCPRTHGGRILRHDAVAKQIAGALSSSGWDVERERLYHMPSDQGKKPDIVAVKPDQSCIILDVQVVNGSLDMEQTWRAKIRKYDRNDLRQAVSELKGVAPNNIRVMAATLSWRGVWCGKSATELRELGISVGVLRGITTRVLLGSYLNWWSFYRGTSLHPSLPPPPSSSSLIPRAGVG

SEQ ID NO: 24695 - protein, 1095 aa, Apolygus lucorum
MTLWRLGRGPLLPGSLTLLKCASPVMNTNDDEPHNPRRPIGTRGSGGGAQRRPRQGRRPSSPSSSSSSSLPSSSSTASLNHQCAHCERAFTTRSGLGLHVRRKHPVAANAAIEIERVQPRYASEDLRRIAGDEVVAVRSGVRNINVYLSERFPTRTVNAISKLRQRPHYRQLVQDAILANSSGASPASPIAGVEQQPAFQNPSPGTSGLLADLKTEVMRLGGQVGRIEGYESTYLQDLARRAAEGSENLEDEVAAYLGRIFPRVGDATVTQHQRGPPLRMVLRGGRRAAKQARRREYHRVQSLWRKHPARVAAEVLEEPGENQVQPPLQEFVDFWEPLLSAPSHDPGERVVPPVSTRDSLRGIMCSPVLLDEAHKCRVKNSTSAGPDGVSARRWNKAPKTIKLLILNLLLLAGRPPKALTRTRTVFIPKKGGSGPGGYRPISVSSVVFRHFQKVLASRLQVAGVIGDVQRAFRPADGTAENLTVLQTVISLARIKRRQLHLAALDVAKAFDTVSHFALTDCLHGVGAPTRLIEYVACLYHEGVTVLEAGGEMSRDIMIGRGVRQGDPLSPLLFNLVVDTALGKLPTEVGFDLAPGVRVGALAFADDVILLAETREGLQIALNAFAKQLARCGLVVNPDKCGSVSLVPSGRQHKVKVVDGGFVIGQSPIPSRSVLEVWRYLGVDFMGVATITASCVDLGRALARVTKAPLKPQQKLRLLRTYLLPKLTYGLVFGRLTAGRLQELDREVRSAVRSWLKFPPGVPSAYIHAPVKSGGLGIVSLSASIPSLRRQRLLALRGSSWGVARAAADLDFVRQQLAWCNRATPSAPKPSSSAEFAAALHESVDGKELRQCSESLISSQWVDWASEGIGARDYRHFHAVRVACLPTAVRCTRGSRGATLPLCRACRSRSEHLYHVVQQCPRTHGGRILRHDAVAKQIAGALSSGGWDVERERLYHMPSDQGKKPDIVAVKPDQSCIILDVQVVNGSLDMEQTWRAKIRKYDTNDLRQAVSELKGVAPNNIRVMAATLSWRGVWCGKSATELRELGISVGVLRGITTRVLLGSYLNWWSFYRGTSLHPSLPPPPSSSSLIPRAGVG

SEQ ID NO: 24696 - protein, 1095 aa, Apolygus lucorum
MTLWRIGREPLSMGSLTLHLKRPPVMDQTDNMPHNPRLPIGTRGSRGGAQRRPRQGRRPSSPSSSSSSSQPSSSSTASLNHQCAHCERAFTTRSGLGLHVRRKHPVAANAAIDIERVQHRYASEELRRMAADEVVAVRDGVRNINVYLSERFPMRTVIAIKNIRLKPHYKQLVQEAILANSSGASPASPIADVEQQPAIQYPSPGTSGLLADLKTEVLRLGGQVGRIEGYESTYLQDLARRAAEGLDNLENEVAAYLGRIFPRVGDATVTQHQGGPPPRVVLRGGRRAAKQARRREYHRVQSLWRKHPARVAAEVLEEPGENQVQPPLQEFVDFWEPLLSAPSHDPGERVVPPVSTRDSLRGIMCSPVLSDEAHKCRVKNSTSAGPDGISARRWNKAPKTIKLLVLNLLLLAGRPPKALTRARTVFIPKKGGSGPGGYRPISVSSVVFRHFQKVLASRLQVAGIIGDVQRAFRPADGTAENLTVLQTVISLARMKRRQLHLAALDVAKAFDTVSHLALTDCLRGVGAPSRLIEYVACLYQEGVTVLEAGGEVSGDVRIGRGVRQGDPLSPLLFNLVVDTALGKLPTEVGFDLAPGVRVGALAFADDVILLAETREGLQIALNAFAKQLASCGLVVNPDKCGSVSLVPSGRQHKVKVVDGGFVIGQSPIPSRSVLEVWRYLGVDFMGVATISASRVDLGRALARVTKAPLKPQQKLRLLRTYLLPRLTYGLVFGRLTAGRLQELDRQVRSAVRTWLRFPPGVPSAYFHAPVKSGGLGIVSLSACIPSLRRQRLLALQGSSWEVARAAADLDFVRQQLAWCDRATPSAPKPSLSAEFAAALHESVDGKELRQCSESPVSSQWVDWASEGIGARDYRHFHAVRVATLPTAVRCSRGSRGTTLPLCRACRSGNEHLYHVVQQCPRTHGGRILRHDAVAKQIAGALSSSGWDVERERLYHMPSDQGKKPDIVAVKPDQSCIILDVQVVNGSLDMEQTWRAKIRKYDRNDLRQAVSELKGVAPNNIRVMAATLSWRGVWCGKSATELRELGISVGVLRGITTRVLLGSYLNWWSFYRGTSLHPSLPPPPSSSSLIPRAGVG

SEQ ID NO: 24697 - protein, 966 aa, Apolygus lucorum
MAADEVVAVRDGVRNINVYLSERFPMRTVIAIKNIRLKPHYKQLVQEAILANSSGASPASPIADVEQQPAIQYPSPGTSGLLADLKTEVLRLGGQVGRIEGYESTYLQDLARRAAEGLDNLENEVAAYLGRIFPRVGDATVTQHQGGPPPGVVLRGGRRAAKQARRREYHRVQSLWRKHPARVAAEVLEEPGENQVQPPLQEFVDFWEPLLSAPSHDPGERVVPPVSTRDSLRSIMCAPVLSDEAHKCRVKNSTSAGPDGISARRWNKAPKTIKLLILNLLLAGRPPKALTRARTVFIPKKGGSGPGGYQPISVSSVVFRHLQKVLASRLQVAGIIGDVQRAFRPADGTAENLTVLQTVISLARMKRRQLHLAALDVAKAFDTVSHLALTDCLHGVGAPSRLIEYVACLYQEGVTVLEAGGEVSGDVRIGRGVRQGDPLSPLLFNLVVNTALGKLPTEVGFDLAPGVRVGALAFADDVILLAETREGLQIALNAFARQLARCGLVVNPDKCGSVSLVPSGRQHKVKVVDGGFVIGQSPIPSRSVLEVWRYLGVDFMGVATISASRVDLGRALARVTKAPLKPQQKLRLLRTYLLPKLTYGLVFGRLTAGRLQELDRQVRSAVRSWLRFPPGVPSAYVHAPVKSGGLGIVSLSACIPSLRRQRLLALQGSSWEVARAAADLDFVRQQLAWCDRATPSAPKPSLSAEFAAALHESVDGKELRQCSESPVSSQWVDWASEGIGACDYRHFHAVRMATLPTAVRCSRGSRGTTLPLCRACRSGNEHLYHVVQQCPRTHGGRILRHDAVAKQIAGALSSSGWDVERERLYHMPSDQGKKPDIVAVKPDQSCIILDVQVVNGSLDMEQTWRAKIRKYDRNDLRQAVSELKGVEPNNIRVMAATLSWRGVWCGKSATELRELGISVGVLRGITTRVLLGSYLNWWSFYRGTSLHPSLPPPPSSSSFIPRAGVG

SEQ ID NO: 24698 - protein, 1095 aa, Apolygus lucorum
MTLWRLGRGPLLTGSLTLHYKRPPVMNEEDDEPHNPRLPIGTRGSRGGAQRRPRQGRRPSSPSSSSSSSLPSSSSTASLNHQCAHCERAFTTRSGLGLHVRRKHPVAANAAIDIERVQHRYASEELRRMAADEVVAVRDGVRNINVYLSEHFPMRTVIAIKNIRLKPHYKQLVQEAILANSSGASPASPIADVEQQPAIQYPSPGTSGLLADLKTEVLRLGGQVGRIEGYESTYLQDLARRAAEGLDNLENEVAAYLGRIFPRVGDATVTQHQGGPPPGVVLRGGRRAAKQARRREYHRVQSLWRKHPARVAAEVLEEPGENQVQPPLREFVDFWEPLLSAPSHDPGERVVPPVSTRDSLRSIMCAPVLSDEAHKCRVKNSTSAGPDGISARRWNKAPKTIKLLVLNLLLLAGRPPKALTRARTVFIPKKGGSGPGGYRPISVSSVVFRHFQKVLASRLQVAGIIGDVQRAFRPADGTAENLTVLQTVISLARMKRRQLHLAALDVAKAFDTVSHLALTDCLRGVGAPSRLIEYVASLYQEGVTVLEAGGEVSGDVRIGRGVRQGDPLSPLLFNLVVDTALGKLPTEVGFDLAPGVRVGALAFADDVILLAETREGLQIALNAFARQLARCGLVVNPDKCGSVSLVPSGRQHKVKVVDGGFVIGQSPIPSRSVLEVWRYLGVDFMGVATISASRVDLGRALARVTKAPLKPQQKLRLLRTYLLPKLTYGLVFGRLTAGRLQELDRQVRSAVRSWLRFPPGVPSAYVHAPVKSGGLGIVSLSACIPSLRRQRLLALQGSSWEVARAAADLDFVRQQLAWCDRATPSAPKPSSSAEFAAALHESVDGKELRQCSESLISSQWVDWASEGIGARDYRHFHAVRMATLPTAVRCSRGSRGTTLPLCRACRSGNEHLYHVVQQCPGTHGGRILRHDAVAKQIAGALSSSGWDVERERLYHMPSDQGKKPDIVAVKPDQSCIILDVQVVNGSLDMEQTWRAKIRKYDRNDLRQAVSELKGVAPNNIRVMAATLSWRGVWCGKSATELRELGISVGVLRGITTRVLLGSYLNWWSFYRGTSLHPSLPPPPSSSSLIPRAGVG

SEQ ID NO: 24699 - protein, 1075 aa, Apolygus lucorum
MRIPLMEHNPQLPHNPRQPIGSRGIRGGAQRRPRQGRRPSSPSSSSSSSLPSSSSTASFDYQCAHCERAFTSRSGLGVHVRRKHPVAANEEIDIERVQPRYASEDLRRMAADEVVAVRNGVRNINVYLSERFPTRTVIAIKNIRLKPHYKQLAQEAILANSGGASPASPVAGMDQQSAIQYPSPGTSGLLADLKTEVLRLGGQVGRIEGYESTYLQDLARRAAEGLDNLEDMVAAYLGRIFPRVGDATVTQHQGGPPSRVVLRGGRRAAKQARRREYHRVQSLWRKHPARAAAEVLEEPGEDQVQPPLQEFVDFWEPLLSAPSHNPGERVVPPVSTRDSLRSILCSPVLLDEAHKCRVKNSTSAGPDGVSARRWNKAPNTIKLLILNLLMLAGRPPKALTRTRTVFIPKKGGSGPGGYRPISVSSVVFRHFQKVLASRLQVAGVIGDVQRAFRPADGTAENLTVLQTVISLARIKRRQLHLAALDVAKAFDTVSHLALTDCLRGVGAPSRLIEYVACLYHEGVTVLEAGGEVSGDVRIGRGVRQGDPLSPLLFNLVVDTALGKLPTEVGFDLAPGVRVGALAFADDVILLAETREGLQIALNAFAKQLSRCGLVVNPDKCGSVSLVPSGRQHKVKVVDGGFVIGQAPIPSRSVLEVWRYLGVDFMGVATITASRVDLGRALARITKAPLKPQQRLRLLRTYLLPKLTYGLVFGRLTAGRLQELDREVRSAVRSWLRFPPGVPSAYIHAPVKSGGLGIVSLSACIPSLRRQRLLALQGSSWEVARVAAGLDFVRQQLAWCDRATPSAPKPSSSAEFAAALHESVDGKELRQCSESLISSQWVDWASEGIGARDYRNFHAVRVATLPTAVRCSRGSRGMTDTLCRACRSGNEHLYHVVQQCPRTHGGRILRHDAVAKQIAGALSSSGWDVERERLYHMPSDRGKKPDIVAVKPDRSCIILDVQVVNGSMDMEQTWRAKIRKYDRDDLRQAVSELKGVEPNNIRVMAATLSWRGVWCGKSATELRELGISVGVLRGVTRRVLLGSYLNWWSFYRGTSLHPSLPPPPSSSSLIPRAGVG

SEQ ID NO: 24700 - protein, 1070 aa, Apolygus lucorum
MENQQHRPHNPRQPIGSRGIRGGAQRRPRQGRRPSSPSSSSSSSLPSSSSTASLDHQCAHCERAFTSRSGLGVHVRRKHPVAANDEINVERVQPRYASEDLRRMAADEVVAVRNGVRNINVYLSERFPTRTVIAIKNLRLKPHYKQLVQEAILANSGGASPASPIAGVDQQSAIQYPSPGTSGLLADLKTEVLRLGGQVGRIEGYESTYLQDLARRAAEGLDNLEDEVAAYLGRIFPRVGDATVTRHQGRPPPRVVLRGGRRAAKQARRRVYHRVQSLWRKHPARVAAEVLEEPGEDQVQPPLQEFVDFWEPLLSAPSHNPGERVVPPVSTRDSLRSILCSPVLLDEAHKCRVKNSTSAGPDGVSARRWNKAPNTIKLLILNLLMLAGRPPKALTRTRTVFIPKKGGSGPGGYRPISVSSVVFRHFQKVLASRLQVAGVIGDVQRAFRPADGTAENLTVLQTVISLARIKRRQLHLAALDVAKAFDTVSHLALTDCLRGVGAPSRLIEYVACLYHEGVTVLEAGGEVSRDIRIGRGVRQGDPLSPLLFNLVVDTALGKLPTEVGFDLAPGVRVGALAFADDVILLAETREGLQIALNAFAKQLARCGLVVNPDKCGSVSLVPSGRQHKVKVVDGGFVIGQSPVPSRSVLEVWRYLGVDFMGVATITTSRVDLGRALARVTKAPLKPQQKLRLLRTYLLPKLTYGLVFGRLTAARLQELDREIRSAVRSWLRFPPGVPSAYFHAPVKSGGLGIVSLSACIPSLRRQRLLALQGSSWEVARAAADLDFVRQQLAWCDRATPSAPKPSSSAEFAAALHESVDGKELRQCSESLVSSQWVDWASEGIGARDYRHFHAVRMATLPTAVRCSRGSRGTTLPLCRACRSGNEHLYHVVQQCPRTHGGRILRHDAVAKQIAGALSSSGWDVERERLYHMPSDQGKKPDIVAIKPDQSCIILDVQVVNGSLDMEQTWRAKIRKYDRDDLRQAVSELKGVAPNNIRVMAATLSWRGVWCGKSATELRELGISVGVLRGITTRVLLGSYLNWWSFYRGTSLHPSLPPPPSSSSLIPRAGVG

SEQ ID NO: 24701 - protein, 1070 aa, Apolygus lucorum
MEQTNDTPHNPRLPIGTRGSRGGAQRRPRQGRRPSSPSSSSSSSLPSSSSTASLDHQCAHCERAFTSRSGLGVHVRWKHPVAANEAIDVERVQPRYASEDLRRMAADEVVAVRNGVRNINVYLSERFPTRTVIAIKNLRLKPHYKQLVQEAILANSGGASPASPVAGVDQQSAIQYPSPGTSGLLADLKTEVLRLGGQVGRIEGYESTYLQGLARRAAEGLDNLEDEVAAYLGRIFPWVEDATMTQHQGGPPPRVVSRGGRRAAKQARRREYHQVQSLWKKHPARVAAEVLEEPGEDQVQPPLQEFVDFWEPLLSAPSHNPGERVVPPVSTRDSLRSILCSPVLLDEAHKCRVKNSTSAGPDGVSARRWNKAPNTIKLLILNLLILAGRPPKALTRTRTVFIPKKGGSGPGGYRPISVSSVVFRHFQKVLASRLQVAGVIGDVQRAFRPADGTAENLTVLQTVISLARIKRRQLHLAALDVAKAFDTVSHHALTDCLRGVGAPSRLIEYVACLYHEGVTVLEVGGEVSGDVQIGRGVRQGDPLSPLLFNLVVDTALGKLPTEVGFDLAPGVRVGALAFADDVILLAETREGLQIALNAFAKQLSRCGLVVNPDKCGSVSLVPSGRQHKVKVVDGGFVIGQAPIPSRSVLEVWRYLGVDFMGVATITASRVDLGRVLARITKAPLKPQQRLRLLRTYLLPKLTYGLVFGRLTVGRLQELDREVRSAVRSWLRFPPGVPSAYIHAPVKSGGLGIVSLSACIPSLRRQRLLALQGSSWEVARVAAGLDFVRQQLAWCDRATPSAPKPSSSAEFAAALHESVDGKELRQCSESLISSQWVDWASEGIGARDYRNFHAVRAATLPTAVRCSRGSRGMTDTLCRACRSGNEHLYHVVQQCPRTHGGRILRHDAVAKQIAGALSSSGWDVERERLYHMPSDQGKKPDIVAVKPDRSCIILDVQVVNGSMDMEQTWRAKIRKYDRDDLRQAVSELKGVEPNNIRVMAATLSWRGVWCGKSATELRELGISVGVLRGVTRRVLLGSYLNWWSFYRGTSLHPSLPPPPSSSSLIPEAGVG

SEQ ID NO: 24702 - protein, 1095 aa, Apolygus lucorum
MTLWRIGREPLSTGSLTLHFKRPPVMDQTDNMPHNPRLPIGTRGSRGGAQRRPRQGRRPSSPSSSSSSSQPSSSSTASLNHQCAHCERAFTTRSGLGLHVRRKHPVAANAAIDIERVQHRYASEELRRMAADEVVAVRDGVRNINVYLSERFPMRTVIAIKNIRLKPHYKQLVQEAILANSSGASPASPVADVEQQPAIQYPSSGTSGLLADLKTEVLRLGGQVGRIEGYVSTYLQDLARRAAEGLDNLENEVAAYLGRIFPRVGDATVTQHQGGPPPRVVLRGGRRAAKQARRREYHRVQSLWRKHPARVAAEVLEEPGENQVQPPLQEFVDFWEPLLSAPSHDPGECVVPPVSTRDSLRSIMCSPVLSDEAHKCRVKNSTSAGPDGISARRWNKAPKTIKLLVLNLLLLAGRPPKALTRARTVFIPRKGGSGPGGYRPISVSSVVFRHFQKVLASRLQVAGIIGDVQRAFRPADGTAENLTVLQTVISLARMKRRQLHLAALDVAKAFDTVSHLALTDCLRGVGAPSRLIEYVACLYQEGVTVLEAGGEVSGDVRIGRGVRQGDPLSPLLFNLVVDTALGKLPTEVGFDLAPGVRVGALAFADDVILLAETREGLQIALNAFAKQLARCGLVVNPDKCGSVSLVPSGRQHKVKVVDGGFVIGQSPIPSRSVLEVWRYLGVDFMGVATISASRVDLGRALARVTKAPLKPQQKLRLLRTYLLPKLTYGLVFGRLTAGRLQELDRQVRSAVRSWLRFPPGVPSAYVHAPVKSGGLGIVSLSACIPSLRRQRLLALQGSSWEVARAAADLDFVRQQLAWCDRATPSAPKPSSSAEFAAALHESVDGKELRQCSESPVSSQWVDWASEGIGARDYRHFHAVRMATLPTAVRCSRGSRGSTLPLCRACRSGNEHLYHVVQQCPRTHGGRILRHDAVAKQIAGALSSSGWDVERERLYHMPSDQGKKPDIVAVKPDQSCIILDVQVVNGSLDMEQTWRAKIRKYDRNDLRQAVSELKGVAPNNIRVMAATLSWRGVWCGKSATELHELGISVGVLRGITTRVLLGSYLNWWSFYRGTSLHPSLPPPPSSSSLIPRAGVG

SEQ ID NO: 24703 - protein, 1095 aa, Apolygus lucorum
MTLWRLGRGPLLTGSLTLHYKRPPVMENQQDQPHNPRQPIGSRGIRGGAQRRPRQGRRPSSPSSSSSSSLPSSSSTASLNHQCAHCERAFTTRSGLGLHIRRKHPVAANAAIDIERIQPRYASEELRRMAADEAVAVRNGVRNINVYLNERFPTRTVIAIKNIRLKPHYKQLVQEAILANSSGASPASPVADVEQQPAIQYPSPGTSGLLADLKTEVLRLGGQVGRIEGYESTYLQDLVRRAVEGLDNLEDEVAAYLGRIFPRVGDATVTRHQGGPPPRVVLRGGRRAAKQARRREYHRVQSLWRKHPARVAAEVLEEPGENQVQPPLQEFVDFWEPLLSAPSHDPGECVVPPVSTRESLRSIMCSPVLSDEAHKCRVRNSTSAGPDGVSARRWNKAPKTIKLLILNLLLLAGRPPKALTRTRTVFIPKKGGSGPGGYRPISVSSVVFRHFQKVLASRLQVAGVIGDVQRAFRPADGTAENLTVLQTVISLARIKRRQLHLAALDVAKAFDTVSHLALTDCLRGVGAPSRLIEYVACLYQEGVTVLEAGGEVSGDIRIGRGVRQGDPLSPLLFNLVVDTALGKLPTEVGFDLAPGVRVGALAFADDVILLAETREGLQIALNAFAKQLAGCGLVVNPDKCGSVSLVPSGRQHKVKVVDGGFVVGQSPIPSRSVLEVWRYLGVDFMGVATITASRVDLGRALARVTKAPLKPQQKLRLLRTYLLPKLTYGLVFGRLTAGRLQELDREVRSAVRSWLKFPPGVPSAYVHAPVKSGGLGIVSLSACIPSLRRRRLLALQGSSWEVARAAADLDFVRQQLAWCDRATPSAPKPSSSAEFAAALHESVDGKELRQCSESLVSSQWVDWASEGIGARDYRHFHAIRVASLPTAVRCSRGSRGTTLPLCRACRSGNEHLYHVVQQCPRTHGGRILRHDAVAKQIAGALSSSGWDVERERLYHMPSDQGKKPDIVAVKPDQSCIILDVQVVNGSLDMEQTWRAKIRKYDTNDLRQAVSELKGVAPNNIRVMAATLSWRGVWCGKSATELRELGISVGVLRGITTRVLLGSYLNWWSFYRGTSLHPSLPPPPSSSSLIPRAGVG

SEQ ID NO: 24704 - protein, 967 aa, Apolygus lucorum
MAADEAVAVRNGVRNINVYLNERFPTRTVIAIKNIRLKPHYKQLVQEAILANSSGASPASPVADVEQQPAIQYPSPGTSGLLADLKTEVLRLGGRVGRIEGYESTYLQDLVRRAAEGLDNLEDEVAAYLGRIFPRVGDATVTRHQGGPPPRMVLRGGRRAAKQARRREYHRVQSLWRKHPARVAAEVLEEPGENQVQPPLQEFVDFWEPLLSAPSHDPGECVVPPVSTRESLRSIMCSPVLSDEAHKCCVRNSTSAGPDGVSARRWNKAPKTIKLLILNLLLLAGRPPKALTRTRTVFIPKKGGSGPGGYRPISVSSVVFRHFQKVLASRLQVAGVIGDVQRAFRPADGTAENLTVLQTVISLARIKRRQLHLAALDVAKAFDTVSHLALTDCLRGVGAPSRLIEYVACLYQEGVTVLEAGGEVSGDIRIGRGVRQGDPLSPLLFNLVVDTALGKLPTEVGFDLAPGVRVGALAFADDVILLAETREGLHIALNAFAKQLAGCGLVVNPDKCGSVSLVPSGRQHKVKVVDGGFVVGQSPIPSRSVLEVWRYLGVDFMGVATITASRVDLGRALARVTKAPLKPQQKLRLLRTYLLPKLTYGLVFGRLTAGRLQELDREVRSAVRSWLKFPPGVPSAYVHAPVKSGGLGIVSLSACIPSLRRRRLLALQGSSWEVARAAADLDFVRQQLAWCDRATPSAPKPSSSAEFAAALHESVDGKELRQCSESLVSSQWVDWASEGIGARDYRHFHAIRVASLPTAVRCSRGGRGTTLPLCRACRSGNEHLYHVVQQCPWTHGGRILRHDAVAKQIAGALSSSGWDVERERLYHMPSDQGKKPDIVAVKPDQSCIILDVQVVNGSLDMEQTWRAKIRKYDTNDLRQAVSELKGVAPNNIRVMAATLSWRGVWCGKSATELRELGISVGVLRGITTRVLLGSYLNWWSFYRGTSLHPSLPPPPSSSSLIPRAGVG

SEQ ID NO: 24705 - protein, 1040 aa, Apolygus lucorum
MTLWRLGREPLSTGSLTLHFKRPPVMENTQEQPHNPRLPIGTRGSRGGAQRRPRQGRRPSSPSSSSSSSLPSSSSTASLNHQCAHCERAFTTRSGLGLHVRRKHPVAANAAIDIERVQHRYASEELRRMAADEVVAVRNGVRNINVYLSERFPMRTVIAIKNIRLKPHYKQLVQEAIMANSSGASPASPVADVEQQPAIQYPSPGTSGLLADLKTEILRLGGQVGRIEGYESTYLQGLARRAAEGLDNLENEVAAYLGRIFPRVGDATVTQHQGGPPPGVVLRGGRRAAKQARRREYHRVQSLWRKHPARVAAEVLEEPGENQVQPPLQEFVDFWEPLLSAPSHDPGERVVPPVSTRDSLRSIMCSPVLSDEAHKCRVKNSTSAGPDGISARRWNKAPKTIKLLVLNLLLLVGRPPKALTRARLVFIPKKGGSGPGGYRPISVSSVVFRHFQKVLASRLQVAGIIGDVQRAFRPADGTAENLTVLQTVISLARMKRRQLHLAALDVAKAFDTVSHLALTDCLRGVGAPSRLIEYVACLYQEGVTVLEAGGEVSGDVRIGRGVRQGDPLSPLLFNLVVDTALGKLPTEVGFDLAPGVRVGALAFADDVILLAETREGLQIALNAFAKQLARCGLVVNPDKCGSVSLVPSGRQHKVKVVDGGFVIGQSPIPSRSVLEVWRYLGVDFMGVATISASRVDLGRALARVTKAPLKPQQKLRLLRTYLLPKLTYGLVFGRLTAGRLQELDRQVRSAVRSWLRFPPGVPSAYVHAPVKSGGLGIVSLSACIPSLRRQRLLALQGSSWEVARAAADLDFVRQQLAWCDRATPSAPKPSLSAEFAAALHESVDGKELRQCSESPVSSQWVDWASEGIGARDYRHFHAVRMATLPTAVRCSRGSRGTTLPLCRACRSGNEHLYHVVQQCPRTHGGRILRHDAVAKQIAGALSSSGWDVERERLYHMPSDQGKKPDIVAVKPDQSCIILDVQVVNGSLDMEQTWRAKIRKYDRNDLRQAVSELKGVAPNNIRVMAATLSWRGVWCGKSATE

SEQ ID NO: 24706 - protein, 1070 aa, Apolygus lucorum
MDNNTTRPHNPRQPIGSRGIRGGAQRRPRQGRRPSSPSSSSSSSLPSSSSTASLDHQCAHCERAFTTRSGLGVHIRRKHPVAANDEIDVERVQPRYASEDLRRMAADEVVAVRNGVRNINVYLSERFPTCTVIAIKNLRLKPHYKQLVQEAILANSSGASPASPIAGVDQQSAIQYPSPGTSGLLADLKTEVLRLGGQVGRIEGYESTYLQDLARRAAEGLDNLEDKVAAYLGRIFPRVGDATVTQHQGGPPSRMVLRGGRRAAKQARRREYHRVQSLWRKHPARVAAEVLEEPGEDQVQPPLQEFVDFWEPLLSAPSHNPGERVVPPVSTRDSLRSILCSPVLLDEAHKCRVKNSTSAGPDGVSARRWNKVPNTIKLLILNLLILAGRPPKALTRTRTVFIPKKGGSGPGGYRPISVSSVVFRHFQKVLASRLQVAGVIGDVQRAFRPADGTAENLTVLQTVISLARIKRRQLHLAALDVAKAFDTVSHLALTDCLRGVGAPSRLIEYVACLYREGVTVLEAGGEVSRDIVIGRGVRQGDPLSPLLFNLVVDTALGKLPTEVGFDLAPGVRVGALAFADDVILLAETREGLQIALNAFAKQLSRCGLVVNPDKCGSVSLVPSGRQHKVKVVDGGFVIGPAPIPSRSVLEVWWYLGVDFMGVATITASRVDLGRALARVTKAPLKPQQRLRLLRTYLLPKLTYGLVFGRLTAGRLQELDREVRSAVRSWLRFPPGVPSAYIHAPVKSGGLGIVSLSACIPSLRRQRLLALQGSTWEVARVAAGLDFVRQQLAWCDRATPSAPKPSLSAEFAAALHESVDGKELRQCSESLISSQWVDWASEGIGARDYQNFHAVRVATLPTAVRCSRGSRGMTDTLCRACRSGNEHLYHVVQQCPRTHGGRILRHDAVAKQIAGALSSSGWDVERERLYHMPSDQGKKPDIVAIKPDRSCIILDVQVVNGSMDMEQTWRAKIRKYDRDDLWQAVSELKGVEPNNIKVMAATLSWRGVWCGKSATELRELGISVGVLRGVTRRVLLGSYLNWWSFYRGTSLHPSLPPPPSSSSLIPRAGVG

SEQ ID NO: 24707 - protein, 967 aa, Apolygus lucorum
MVADEVVAVRNGVRDINVYLSERFPTRTVIAIKNLRLKPHYKQLVQEAILANSSGASPASPVAGVDQQSAIQYPSPGTSGLLADLKTEVLRLGGQVGRIEGYESTYLQDLARRAAEGLDNLEDMVAAYLGRIFPRVGDATVTQHQGGHPPRVVLRGGRRAAKLARRREYHRVQSLWRKHPARAAAEVLEEPGEDQVQPPLQEFVDFWEPLLSAPSHNPGERVVPPVSTRDSLRSILCSPVLLDEAHKCRVKNSTSAGPDGVSARRWNKAPNTIKLLILNLLMLAGRPPKALTRTRTVFIPKKGGSGPGGYRPISVSSVVFRHFQKVLASRLQVAGVIGDVQRAFRPADGTAENLTVLQTVISLARIKRRQLHLAALDVAKAFDTVSHLALTDCLRGVGAPSRLIEYVACLYHEGVTVLEAGGEVSGDVRIGRGVRQGDPLSPLLFNLVVDTALGKLPTEVGFDLAPGVRVGALAFADDVILLAETREGLQIALNAFAKQLSRCGLVVNPDKCGSVSLVPSGRQHKVKVVDGGFVIGQAPIPSRSVLEVWRYLGVDFMGVATITASRVDLGRALARITKAPLKPQQRLRLLRMYLLPKLTYGLVFGRLTAGRLQELDREVRSAVRSWLRFPPGVPSAYIHAPVKSGGLGIVSLSASIPSLRRQRLLALQGSSWEVARVAAGLDFVRQQLAWCDRATPSAPKPSSSAEFAAALHESVDGKELRQCSESLISSQWVDWASEGIGARDYRNFHAVRVATLPTAVRCSRGSRGVTDTLCRACRSGNEHLYHVVQQCPRTHGGRILRHDAVAKQIAGALSSSGWDVERERLYHMPSDQGKKPDIVAVKPDRSCIILDVQVVNGSMDMEQTWRAKIGKYDRDDLRQAVSELKGVAPNNIRVMAATLSWRGVWCGKSATELRELGISVGVLRGVTRRVLLGSYLNWWSFYRGTSLHPSLPPPPSSSSLIPRAGVG

SEQ ID NO: 24708 - protein, 1095 aa, Apolygus lucorum
MTLWRLGRGPLLPGSLTLLKCASPVMNTNDDEPHNPRRPIGTRGSGGGAQRRPRQGRRPSSPSSSSSSSLPSSSSTASLNHQCAHCERAFTTRSGLGLHVRRKHPVAANAAIEIERVQPRYASEDLRRMAGDEVVAVRSGVRNINVYLSERFPTRTVNAISKLRQRPHYRQLVQDAILANSSGASPASPIADVEQQPAIQNPSPGTSGLLADLKTEVMRLGGQVGRIEGYESTYLQDLARRAAEGSENLEDEVAAYLGRIFPQVGDATVTRHQRGPPLRMVLRGGRRAAKQARWREYHRVQSLWRKHPARVAAEVLEEPGENQVQPPLQEFVDFWEPLLSAPSHDPGERVVPPVSTRDSLRGIMCSPVLLDEAHKCRVKNSTSAGPDGISARRWNKAPKTIKLLILNLLLLAGRPPKALTRTRTVFIPKKGGSGPGGYRPISVSSVVFRHFQKVLASRLQVAGVIGDVQRAFRPADGTAENLTVLQTVISLARIKRRQLHLAALDVAKAFDTVSHFALTDCLHGVGAPTRLIEYVACLYHEGVTVLEAGGEMSRDIMIGRGVRQGDPLSPLLFNLVVDTALGKLPTEVGFDLAPGVRVGALAFADDVILLAETREGLQIALNAFAKQLARCGLVVNPDKCGSVSLVPSGRQHKVKVVDGGFVIGQSPIPSRSVLEVWRYLGVDFMGVATITASRVDLGRALARVTKAPLKPQQKLRLLRTYLLPKLTYGLVFGRLTAGRLQELDREVRSAVRSWLKFPPGVPSAYIHAPVKSGGLGIVSLSASIPSLRRQRLLALRGSSWGVAHAAADLDFVRQQLAWCDRATPSAPKPSSSAEFAAALHESVDGKELRQCSESLISSQWVDWASEGIGARDYRHFHAVRVASLPTAVRCTRGSRGATLPLCRACRSRSEHLYHVVQQCPRTHGGRILRHDAVAKQIAGALSSSGWDVGRERLYHMPSDQGKKPDIVAVKPDQSCIILDVQVVNGSLDMEQTWRAKIRKYDTNDLRLAVSELKGVAPNNIRVMAATLSWRGVWCGKSATELREFGISVGVLRGITTRVLLGSYLNWWSFYRGTSLHPSLPPPPSSSSLIPRAGVG

SEQ ID NO: 24709 - protein, 942 aa, Apolygus lucorum
MRTVIAIKNIRLKPHYKQLVQEAILANSSGASPASPVADVEQQPAIQYPSPGTSGLLADLKTEVLRLGGQVGRIEGYESTYLQDLARRAAEGLDNLEDEVAAYLGRIFPRVGDATVTQHQGGPPPRVVLRGGRRAAKQARRREYHRVQSLWRKHPARVAAEVLEEPGENQVQPPLQEFVDFWEPLLSAPSHDPGERVVPPVSTRDSLRSIMCSPVLSDEAHKCRVKNSTSAGPDGVSARRWNKAPKTIKLLILNLLLLAGRPPKALTRTRTVFIPKKGGSGPGGYRPISVSSVVFRHFQKVLASRLQVAGVIGDVQRAFRPADGTAENLTVLQTVISLARIKRRQLHLAALDVAKAFDTVSHLALTDCLRGVGAPSRLIEYVACLYQEGVTVLEAGGEVSGDIRIGRGVRQGDPLSPLLFNLVVDTALGKLPTEVGFDLAPGVRVGALAFADDVILLAETREGLQIALNAFAKQLARCGLVVNPDKCGSVSLVPSGRQHKVKVVDGGFVVGQSPIPSRSVLEVWRYLGVDFMGVATITASRVDLGRALARVTKAPLKPQQKLRLLRMYLLPKLTYGLVFGRLTAGRLQQLDREVRSAVRSWLKFPPGVPSAYVHAPVKSGGLGIVSLSACIPSLRRRRLLALQGSSWEVARAAADLDFVRQQLAWCDRATPSAPKPSSSAEFAAALHESVDGKELRQCSESLVSSQWVDWASEGIGARDYRHFHAIRVASLPTAVRCSRGSRGTTLPLCRACRSGNEHLYHVVQQCPRTHGGRILRHDAVAKQIAGALSSSGWDVERERLYHMPSDQGKKPDIVAVKPDQSCIILDVQVVNGSLDMEQTWWAKIRRYDTNDLRQAVSELKGVAPNNIRVMAATLSWRGVWCGKSATELRELGISVGVLRGITTRVLLGSYLNCWSFYRGTSLHPSLPPPPSSSSLIPRAGVG

SEQ ID NO: 24710 - protein, 1095 aa, Apolygus lucorum
MTLWRQGRGPLLTGSLTLKKKRSPVMEENSALSHNPRQPIGSRGIRGGAQRRPRQGRRPSSPSSSSSSSLPSSSSTASLNHQCAHCERAFSTRSGLGLHVRRKHPVAANAAIDIERIQHRYASEELRRMAADEVVAVRNGVRNINVYLSERFPMRTVIAIKNIRLKPHYKQLVQEAILANSSGASPASPIADVEQQSAIQYPSPGTFGLLADLKTEVMRLGGQVGRIEGYESAYLQDLVRRAAEGLDNLEDEVAAYLGRIFPRVEDMTVTQHQGGPPPRVMLRGGRRAGKQARRREYHRVQSLWKKHPARVAVEVLEEPGENQVQPPLQEFVDFWEPLLSAPSHDPGERVVPPVSTRDSLRGIMCLPVLSDEAHKCRVRNSTSAGPDGISARRWNKAPKTIKLLILNLLLLAGRPPKALTRARTVFIPKKGGSGPGGYRPISVSSVVFRHFQKVLASRLQVAGVIGDVQRAFRPADGTAENLTVLQTVVSLARIKRRQLHLAALDVAKAFDTVSHLALTDCLRGVGAPSRIIEYVACLYQEGVTVLEAGGEVSGDVRIGRGVRQGDPLSPLLFNLVVDTALGKLPTEVGFDLAPGVRVGALAFADDVILLAETREGLQIALNAFAKQLARCGLVVNPDKCGSVSLVPSGRQHKVKVVDGGFVVGQSPIPARSVLEVWRYLGVDFMGVATITASRVDLGRALARVTKAPLKPQQKLRLLRTYLLPKLTYGLVFGRLTAGRLQELDREVRSAVRSWLRFPPGVPSAYVHAPVKSGGLGIVSLSACIPSLRRQRLLALQGSSWEVARAAADLDFVRQQLAWCDRATPSAPKPSSSAEFAAALHESVDGKELRQCSESLVSSQWVDWASEGIGARDYRHFHAVRVAALPTAVRCSRGSRGTTLPLCRACRSGNEHLYHVVQQCPRTHGGRILRHDAVAKQIAGALSSSSWDVERERLYHMPSDQGKKPDIVAVKPDQSCIILDVQVVNGSLDMEQTWRAKIRKYDRDDLRQAVSELKGVAPNNIRVMAATLSWRGVWCGKSATELRELGISVGVLRGITTRVLLGSYLNWWSFYRGTSLHPSLPPPHSSSSLIPRAGVG

SEQ ID NO: 24711 - protein, 967 aa, Apolygus lucorum
MAADEVVAVRNGVRNINVYLSERFPTRTVIAIKNLRLKPHYKQLVQEAILANSGGASPASPVAGVDQQSAIQYPSPGTSGLLADLKTEVLRLGGQVGRIEGYESTYLQDLARRAAEGLDNLEDEVAAYLGRIFPRVEDATVTQHQGGPPPRVVLRGGRRAAKQARRREYHRVQSLWRKHPARVAAEVLEEPGEDQVQPPLQEFVDFWEPLLSAPSHSPGERVVPPVSTRDSLRSILCSPVLLDEAHKCRVKNSTSAGPDGVSARRWNKAPNTIKLLILNLLILAGRPPKALTRTRTVFIPKKGGSGPGGYRPISVSSVVFRHFQKVLASRLQVAGVIGDVQRAFRPADGTAENLTVLQTVISLARIKRRQLHLAALDVAKAFDTVSHHALTDCLRGVGAPSRLIEYVACLYHEGVTVLEAGGEVSGDVRIGRGVRQGDPLSPLLFNLVVDTALGKLPTEVGFDLAPGVRVGALAFADDVILLAETREGLQIALNAFAKQLSRCGLVVNPDKCGSVSLVPSGRQHKVKVVDGGFVIGQAPIPSRSVLEVWRYLGVDFMGVATITASRVDLGRALARITKAPLKPQQRLRLLRTYLLPKLTYGLVFGRLTAGRLQELDREVRSAVRSWLRFPPGVPSAYIHAPVKSGGLGIVSLSACIPSLRRQRLLALQGSSWEVARVAAGLDFVRQQLAWCDRATPSAPKPSSSAEFAAALHESVDGKELRQCSESLISSQWVDWASEGIGARDYRNFHAVRAATLPTAVRCSRGSRGVTDTLCRACRSGNEHLYHVVQQCPRTHGGRILRHDAVAKQIAGALSSSGWDVERERLYHMPSDQGKKPDIVAVKPDRSCIILDVQVVNGSMDMEQTWRAKIRKYDRDDLRQAVSELKGVEPNNIRVMAATLSWRGVWCGKSATELRELGISVGVLRGVTRRVLLGSYLNWWSFYRGTSLHPSLPPPPSSSSLIPRAGVG

SEQ ID NO: 24712 - protein, 1075 aa, Apolygus lucorum
MCFPVMENIPNEPHNPRRPIGSRGIRGGAQRRPRQGRRPSSPSSSSSSSLPSSSSTASLDHQCAHCERAFTSRSGLGVHVRRKHPVAANEEIDVERVQPRYASEDLRRMAADEVVAVRNGVRNINVYLSERFPTRTVIAIKNLRLRPHYKQLVQEAILANSSGASPASPVAGVDQQSAIQYPSPGTSGLLADLKTEVLRLGGQVGRIEGYESTYLQDLARRAAEGLDNLEDMVAAYLGRIFPRVGDATVTQHQGGHPPRVVLRGSRRAAKQARRREYHRVQSLWRKHPARAAAEVLEEPGEDQVQPPLQEFVDFWEPLLSAPSHNPGERVVPPVSTRDSLRSILCSPVLLDEAHKCRVKNSTSAGPDGVSARRWNKAPNTIKLLILNLLMLAGRPPKALTRTRTVFIPKKGGSGPGGYRPISVSSVVFRHFQKVLASRLQVAGVIGDVQRAFRPADGTAENLTVLQTVISLARIKRRQLHLAALDVAKAFDTVSHLALTDCLRGVGAPSRLIEYVACLYHEGVTVLKAGGEVSGDVRIGRGVRQGDPLSPLLFNLVVDTALGKLPTEVGFDLVPGVRVGALAFADDVILLAETREGLQIALNAFAKQLSRCGLVVNPDKCGSVSLVPSGRQHKVKVVDGGFVIGQAPIPSRSVLEVWRYLGVDFMGVATITASRVDLGRALARITKAPLKPQQRLRLLRTYLLPKLTYGLVFGRLTAGRLQELDREVRSAVRSWLRFPPGVPSAYIHAPVKSGGLGIVSLSASIPSLRRQRLLALQGSSWEVACVAAGLDFVRQQLAWCDRATPSAPKPSSSAEFAAALHESVDGKELRQCSESLISSQWVDWASEGIGARDYRNFHAVRVATLPTAVRCSRGSRGVTDTLCRACRSGNEHLYHVVQQCPRTHGGRILRHDAVAKQIAGALSSSGWDVGRERLYHMPSDRGKKPDIVAVKPDRSCIILDVQVVNGSMDMEQTWQAKIRKYDRDDLRQAVSELKGVAPNNIRVMAATLSWRGVWCGKSATELRELGISVGVLRGVTRRVLLGSYLNWWSFYRGTSLHPSLPPPPSSSSLIPRAGVG

SEQ ID NO: 24713 - protein, 686 aa, Apolygus lucorum
MLAGRPPKALTRTRTVFISKKGGSGPGGYRPISVSSVVFRHFQKVLASRLQVAGVIGDVQRAFRPADGTAENLTVLQTVISLARIKRRQLHLAALDVAKAFDTVSHLALTDCLRGVGAPSRLIEYVACLYHEGVTVLEAGGEVSGDVRIGRGVHQGDPLSPLLFNLVVDTALGKLPTEVGFDLTPGVRVGALAFADDVILLAETREGLQIALNAFAKQLSRCGLVVNPDKCGSVSLVPSGRQHKVKVVDGGFVIGQAPIPSRSVLEVWRYLGVDFMGVATITASRVDLGRALARITKAPLKPQQRLRLLRTYLLPKLTYGLVFSRLTAGRLQELDREVRSAVCSWLRFPPGVPSAYIHAPVKSGGLGIVALSACIPSLRRQRLLALQGSSWEVARVAAGLDFVRQQLAWCDRATPSAPKPSSSAEFAAALHESVDGKELRQCSESLISSQWVDWASEGIGARDYRNFHAVRVATLPTAVRCSRGSRGMTDTLCRACRSGNEHLYHVVQQCPRTHGGRILRHDAVAKQIAGALSSSGWDVERERLYHMPSDQGKKPDIVAIKPDRSCIILDVQVVNGNMDMEQTWRAKIRKYDRDDLRQAVSELKGVAPNNIRVMAATLSWRGVWCGKSATELRELGISVGVLRGVTRRVLLGSYLNWWSFYRGTSLHPSLPPPPSSSSLIPRAGVG

SEQ ID NO: 24714 - protein, 910 aa, Apolygus lucorum
MSCRPADVEQQPAIQYPSPGTSGLLADLKTEVLRLGGQVGRIEGYESTYLQDLARRAAEGLDNLENEVAAYLGRIFPRVGDATVTQHQGGPPPRVVLRGGRRAAKQARRREYHRVQSLWRKHPARVAAEVLEEPGENQVQPPLQEFVDFWEPLLSAPSHDPGERVVPPVSTRDSLRSIMCSPVLSDEAHKCRVKNSTSAGPDGISARRWNKAPKTIKLLVLNLLLLAGRPPKALTRARTVFIPKKGGSGPGGYRPISVSSVVFRHFQKVLASRLQVAGIIGDVQRAFRPADGTAENLTVLQTVISLARMKRRQLHLAALDVAKAFDTVSHLALTDCLRGVGAPSRLIEYVACLYQEGVTVLEAGGEVSGDVRIGRGVRQGDPLSPLLFNLVVDTALGKLPTEVGFDLAPGVRVGALAFADDVILLAETREGLQIALNAFAKQLARCGLVVNPDKCGSVSLVPSGRQHKVKVVDGGFVIGQSPIPSRSVLEVWRYLGVDFMGVATISASRVDLGRALARVTKAPLKPQQKLRLLRTYLLPKLTYGLVFGRLTAGRLQELDRQVRSAVRSWLRFPPGVPSAYVHAPVKSGGLGIVSLSACIPSLRRQRLLALQGSSWEVARAAADLDFVRQQLAWCDRATPSAPKPSSSAEFVAALHESVDGKELRQCSESPVSSQWVDWASEGIGARDYRHFHAVRMATLPTAVRCSRGSRGTTLPLCRACRSGNEHLYHVVQQCPRTHGGRILRHDAVAKQIAGALSSSGWDVERERLYHMPSDRGKKPDIVATKPDQSCIILDVQVVNGSLDMEQTWRAKIRKYDRNDLRQAVSELKGVAPNNIRVMAATLSWRGVWCGKSATELRELGISVGVLRGITTRVLLGSYLNWWSFYRGTSLHPSHPPPPSSSSLIPRAGVG

SEQ ID NO: 24715 - protein, 1070 aa, Apolygus lucorum
MNDNSSQPHNPRQPIGSRGIRGGAQRRPRQGRRPSSPSSSSSSSLPSSSSTTSLDHQCAHCERAFTTRSGLGVHIRRKHPVAANDEIDVERVQPRYASEDLRRMAADEVVAVRNGVRNINVYLSERFPTRTVIAIKNLRLKPHYKQLVQEAILANSGGASPASPIAGVDQQSAIQYPSPGTSGLLADLKTEVLRLGGQVGRIEGYESTYLQDLARRAAEGLDNLEDKVAAYLGRIFPRVGDATVTQHQGGPPPRVVLRGGRRAAKQARRREYHRVQSLWRKHPARVAAEVLEEPGEDQVQPPLQEFVDFWEPLLSAPSHNPGERVVPPVSTRDSLRSILCSPVLLDEAHKCRVKNSTSAGPDGVSARRWNKAPNTIKLLVLNLLILAGRPPKALTRTRTVFIPKKGGSGPGGYRPISVSSVVFRHFQKVLASRLQVAGVIGDVQRAFRPADGTAENLTVLQTVISLARIKRRQLHLAAMDVAKAFDTVSHLALTDCLRGVGAPSRLIEYVACLYREGVTVLEAGGEVSRDIVIGRGVRQGDPLSPLLFNLVVDTALGKLPTEVGFDLAPGVRVGALAFADDVILLAETREGLQIALNAFAKQLSRCGLVVNPDKCGSVSLVPSGRQHKVKVVDGGFVIGQAPIPSRSVLEVWRYLGVDFMGVATITASRVDLGRALARVTKAPLKPQQRLRLLCTYLLPKLTYGLVFGRLTAGRLQELDREVRSAVRSWLRFPPGVPSAYIHVPVKSGGLGIVSLSACIPSLRRRRLLALQGSSWEVARVAAGLDFVRQQLAWCDRATPSAPKPSSSAEFAAALHESVDGKELRQCSESLISSQWVDWALEGIGARDYRNFHAVRVATLPTAVRCSRGSRGMTDTLCRACRSGNEHLYHVVQQCPRTHGGRILRHDAVAKQIAGALSSSGWDVERERLYHMPSDQGKKPDIVAVKPDRSCIILDVQVVNGSMDMEQTWRAKIRKYDRDDLRQAVSELKGVEPNNIRVMAATLSWRGVWCGKSATELRELGISVGVLRGVTRRVLLGSYLNWWSFYRGTSLHPSLPPPPSSSSLIPRAGVG

SEQ ID NO: 24716 - protein, 1095 aa, Apolygus lucorum
MTLWRLGRGPLSMGSLTLKSRASPVMNNNTHQPHNPRQPIGSRGSRGGAQRRPRQGRRPSSPSSSSSSSLPSSSSTASLDHQCAHCERAFTSRSGLGVHVRRKHPVAANEEINVERVQPRYASEDLRRMAADEVVAVRNGVRNINVYLSERFPMRTVIAIKNLRLKPHYKQLVQEAILANSGGASPASPIAGVDQQSAIQYPSPGTSGLLADLKTEVLRLGGQVGRIEGYESTYLQDLARRAAEGLDNLEDEVAAYLGRIFPRVGDATVTQHQGGPPPRVVLRGGRRAAKQARRREYHRVQSLWRKHPARVAAEVLEEPGEDQVQPPLQEFVDFWEPLLSAPSHNPGERVVPPVSTRDSLRSILCSPVLLDEAHKCRVKNSTSAGPDGVSARRWNKAPNTIKLLILNLLMLAGRPPKALTRTRTVFIPKKGGSGPGGYRPISVSSVVFRHFQKVLASRLQVAGVIGDVQRAFRPADGTAENLTVLQTVISLARIKRRQLHLAALDVAKAFDTVSHLALTDCLRGVGAPSRLIEYVACLYHEGVTVLEAGGEVSRDIRIGRGVSQEDPLSPLLFNLVVDTALGKLPTEVGFDLAPGVRVGALAFADDVILLAETREGLQIALNAFAKQLARCGLVVNPDKCGSVSLVPSGRQHKVKVVDGGFVVGQSPIPSRSVLEVWRYLGVDFMGVATITTSRVDLGRALARVTKAPLKPQQKLRLLRAYLLPKLTYGLVFGRLTAGRLQELDREVRSAVRSWLRFPPGVPSAYFHAPVKSGGLGIVSLSASIPSLRRQRLLALQGSSWEVARAAADLDFVRQQLAWCDRATPSAPKPSSSAEFAAALHESVDGKELRQCSESLVSSQWVDWASEGIGAPDYRHFHAVRMATLSTAVRCSRGSRGTTLPLCRACRSGNEHLYHVVQQCPRTHGGRILRHDAVAKQIAGALSSSGWDVERERLYHMPSDQGKKPDIVAVKPDQSCIILDVQVVNGSLDMEQTWRAKIRKYDRDDLRQAVSELKGVAPNNIRMMAATLSWRGVWCGKSATELRELGISVGVLRGITTRVLLGSYLNWWSFYRGTSLHPSLPPPPSSSSLIPRAGVG

SEQ ID NO: 24717 - protein, 967 aa, Apolygus lucorum
MAADEAVAVRNGVRNINVYLNERFPTRTVIAIKNIRLKPHYKQLVQEAILANSSGASPASPIADVEQQPAIQYPSPGTSGLLADLKTEVLRLGGHVGRIEGYESTYLQDLVRRAAEGLDNLEDEVAAYLGRIFPRVGDVTVTQHQGGPPPRVVLRGGRRAAKQARRREYHRVQSLWRKHPARVAAEVLEEPGENQVQPPLQEFVDFWEPLLSAPSHDPGECVVPPVSTRDSLRSIMCSPVLSDEAHKCCVKNSTSAGPDGVSARRWNKAPKTIKLLVLNLLLLAGRPPKALTRTRTVFIPKKGGSGPGGYRPISVSSVVFRHFQKVLASRLQVAGVIGDVQRAFRSADGTAENLTVLQTVISLARIKRRQLHLAALDVAKAFDTVSHLALTDCLRGVGAPSRLIEYVACLYQEGVTVLEAGGEVSGDIRIGRGVRQGDPLSPLLFNLVVDTALGKLPTEVGFDLAPGVRVGALAFADDVILLAETREGLQIALNAFAKQLARCGLVVNPDKCGSVSLVPSGRQHKVKVVDGGFVVGQSPIPSRSVLEVWRYLGVDFMGVATITTSRVDLGRALARVTKAPLKPQQKLRLLRTYLLPKLTYGLVFGRLTAGRLQQLDREVRSAVRSWLKFPPGVPSAYFHAPVKSGGLGIVSLSACIPSLRRRRLLALQGSSWEVARAAADLDFVRQQLAWCNRATPSAPKPSSSAEFAAALHESVDGKELRQCSESLVSSQWVDWASEGIGARDYRHFHAIRVASLPTAVRCSRGSRGTTLPLCRACRSGNEHLYHVVQQCQRTHGGRILRHDAVAKQIAGALSSSGWDVERERLYHMPSDQGKKPDIVAVKPDQSCIILDVQVVNGSLDMEQTWRAKIRKYDTNDLRQAVSELKGVAPNNIRVMAATLSWRGVWCGKSATELRELGISVGVLRGITTRVLLGSYLNWWSFYRGTSLHPSLPPPPSSSSLIPRAGVG

SEQ ID NO: 24718 - protein, 977 aa, Apolygus lucorum
MRFPVMNTEPTEPHNPRQPIGSRGIRGGAQRRPRQGHRPSSPSSSSSSSLPSSSSTASLNHQCAHCERAFTTRSGLGLHIRRKHPVAANAAIDIERIQPRYASEELRRMAADEAVAVRNGVRNINVYLNERFPTRTVIAIKNIRLKPHYKQLVQEAILANSSGASPASPIADVEQQPAIQYPSPGTSGLLADLKTEVLRLGGQVGRIEGYESTYLQDLVRRAVEGLDNLEDEVAAYLGRIFPRVGDATVTRHQGGPPPRMVLRGGRRAAKQARRREYHRVQSLWRKHPARVAAEVLEEPGENQVQPPLQEFVDFWEPLLSAPSHDPGECVVPPVSTRDSLRGIMCSPVLPDEAHKCRVRNSTSAGPDGVSARRWNKAPKTIKLLILNLLLLVGRPPKALTRTRTVFIPKKGGSGPGGYRPISVSSVVFRHFQKVLASRLQVAGVIGDVQRAFQPADGTAENLTVLQTVISLARIKRRQLHLAALDVAKAFDTVSHLALTDCLRGVGAPSRLIEYVACLYQEGVTVLEAGGEVSGDIRIGRGVRQGDPLSPLLFSLVVDTALGKLPTEVGFDLAPGVRVGALAFADDVILLAETREGLQIALNAFAKQLARCGLVVNPDKCGSVSLVPSGRQHKVKVVDGGFVVGQSSIPSRSVLEVWRYLGVDFMGVATITASRVDLGRALARVTKAPLKPQQKLRLLRTYLLPKLTYGLVFGRLTAGRLQELDREVRSAVRSWLKFPPGVPSAYVHAPVKSGGLGIVSLSACIPSLRRQRLLALQGSSWEVARAAADLDFVRQQLAWCDRATPSAPKPSSSAEFAAALHESVDGKELRQCSESLLSSQWVDWASEGIGARDYRHFHAIRVASLPTAVRCSRGGRGTTLPLCRACRSGNEHLYHVVQQCPRTHGGRILRHDAVAKQIAGALSSSGWDVERERDCITCQVTRVRSPTLLPSNPTSLALSWMSKLSMAAWTWSRLGGPR

SEQ ID NO: 24719 - protein, 1070 aa, Apolygus lucorum
MENNIRQPHNPRQPIGSRGIRGGAQRRPRQGRRPSSPSSSSSSSLPSSSSTASLDHQCAHCERAFTSRSGLGVHVRRKHPVAANDEINIERVQPRYASEDLRRMAADEVVAVRNGVRNINVYLSERFPTRTVIAIKNLRLKPHYKQLVQEAILANSGGASPASPIAGVDQQSAIQYPSPGTSGLLADLKTEVLRLGGQVVRIEGYESTYLQDLARRAAEGLDNLEEEVAAYLRRIFPRVGDATVTRHQGRPPPRVVLRGGRRAAKQARRREYHRVQSLWRKHPARVAAEVLEEPGDDQVQPPLQEFVDFWEPLLSAPSHNPGERVVPPVSTRDSLRSILSLPVLLDEAHKCRVKNSTSAGPDGVSARRWNKAPNTIKLLILNLLMLAGRPPKALTRTRTVFIPKKGGSGPGGYRPISVSSVVFRHFQKVLASRLQVAGVIGDVQRAFRPADGTAENLTVLQTVISLARIKRRQLHLAALDVAKAFDTVSHLALTDCLRGVGAPSRLIEYVACLYHEGVTVLEAGGEVSRDIRIGRGVRQGDPLSPLLFNLVVDTALGKLPTEVGFDLAPGVRVGALAFADDVILLAETREGLQIALNAFAKQLARCGLVVNPDKCGSVSLVPSGRQHKVKVVDGGFAIGQSPIPSRSVLEVWRYLGVDFMGVATITTSRVDLGRALARVTKAPLKPQQKLRLLRTYLLPKLTYGLVFGRLTAGRLQELDREIRSAVRSWLRFPPGVPSAYFHAPVKSGGLGIVSLSACIPSLRRQRLLALQGSSWEVARAAADLDFVRQQLAWCDRATPSAPKPSSSAEFAAALHESVDGKELRQCSESLVSSQWVDWASEGIGARDYRHYHAVRMATLPTAVRCSRGSRGTTLPLCRACRSGNEHLYHVVQQCPRTHGGRILRHDAVAKQIAGALSSSGWDVERERLYHMPSDQGKKPDIVAVKPDQSCIILDVQVVNGSLDMEQTWRAKIRKYDRDDLRQAVSELKGVAPNNIRVMAATLSWRGVWCGKSATELRELGISVGVLRGITTRVLLGSYLNWWSFYRGTSLHPSLPPPPSSSSLIPRAGVG

SEQ ID NO: 24720 - protein, 1075 aa, Apolygus lucorum
MRFPVMNTEPTEPHNPRQPIGSRGIRGGAQRRPRQGRRPSSPSSSSSSSLPSSSSTASLNHQCAHCERAFTTRSGLGLHIRRKHPVAANAAIDIERIQPRYASEELRRMAADEAVAVRSGVRNINVYLNERFPTRTVIAIKNIRLKPHYKQLVQEAILANSSGASPASPIADVEQQPAIQYPSPGTSGLLADLKTEVLRLGGQVGRIEGYESTYLQDLVRRAVEGLDNLEDEVAAYLGRIFPRVGDATVTRHQGGPPPRMVLRGGRRAAKQARRREYHRVQSLWRKHPARVAAEVLEEPGENQVQPPLQEFVDFWEPLLSAPSHDPGECVVPPVSTRDSLRSIMCSPVLSDEAHKCRVRNSTSAGPDGVSARRWNKAPKTIKLLILNLLLLAGRPPKALTRTRTVFIPKKGGSGPGGYRPISVSSVVFRHFQKVLASRLQVAGVIGDVQRAFRPADGTAENLTVLQTVISLARIKRRQLHLAALDVAKAFDTVSHLALTDCLRGVGAPSRLIEYVACLYQEGVTVLEAGGEVSGDIRIGRGVRQGDPLSPLLFNLVVDTALGKLPTEVGFDLAPGVRVGALAFADDVILLAETREGLQIALNAFAKQLAGCGLVVNPDKCGSVSLVPSGRQHKVKVVDGGFVVGQSSIPSRSVLEVWRYLGVDFMGVATITASRVDLGRALARVTKAPLKPQQKLRLLRTYLLPKLTYGLVFGRLTAGRLQELDREVRSAVRSWLKFPPGVPSAYVHAPVKSGGLGIVSLSACIPSLRRQRLLALQGSSWEVARAAADLDFVRQQLAWCDRATPSAPKPSSSAEFAAALHESVDGKELRQCSESLLSSQWVDWASEGIGARDYRHFHAIRVASLPTAVRCSRGSRGTTLPLCRACRSGNEHLYHVVQQCPRTHGGRILRHDAVAKQIAGALSSSGWDVERERLYRMPSDQGKKPDIVAVKPDQSCIILDVQVVNGSLDMEQTWRAKIRKYDTNDLRQAVSELKGVAPNNIRVMAATLSWRGVWCGKSATELRELGISVGVLRGITTRVLLGSYLNWWSFYRGTSLHPPLPPPPSSSSLIPRAGVG

SEQ ID NO: 24721 - protein, 1095 aa, Apolygus lucorum
MTLWRLGRGPLSMGSLTLKSRASPVMNNNTHQPHNPRQPIGSRGSRGGAQRRPRQGRRPSSPSSSSSSSLPSSSSTASLDHQCAHCERAFTSRSGLGVHVRRKHPVAANEEINVERVQPRYASEDLRRMAADEVVAVRNGVRNINVYLSERFPMRTVIAIKNLRLKPHYKQLVQEAILANSGGASPASPIAGVDQQSAIQYPSPGTSGLLADLKTEVLRLGGQVGRIEGYESTYLQDLARRAAEGLDNLEDEVAAYLGRIFPRVGDATVTQHQGGPPPRVVLRGGRRAAKQARRREYHRVQSLWRKHPARVAAEVLEEPGEDQVQPPLQEFVDFWEPLLSAPSHNPGERVVPPVSTRDSLRSILCSPVLLDEAHKCRVKNSTSAGPDGVSARRWNKAPNTIKLLILNLLMLAGRPPKALTRTRTVFIPKKGGSGPGGYRPISVSSVVFRHFQKVLASRLQVAGVIGDVQRAFRPADGTAENLTVLQTVISLARIKRRQLHLAALDVAKAFDTVSHLALTDCLRGVGAPSRLIEYVACLYHEGVTVLEAGGEVSRDIRIGRGVRQGNPLSPLLFNLVVDTALGKLPTEVGFDLAPGVRVGALAFADDVILLAETREGLQIALNAFAKQLARCGLVVNPDKCGSVSLVPSGRQHKVKVVDGGFVVGQSPIPSRSVLEVWRYLGVDFMGVATITTSRVDLGRALARVTKAPLKPQQKLRLLRAYLLPKLTYGLVFGRLTAGRLQELDREVRSAVRSWLRFPPGVPSAYFHAPVKSGGLGIVSLSASIPSLRRQRLLALQGSSWEVARAAADLDFVRQQLAWCDRATPSAPKPSSSAEFAAALHESVDGKELRQCSESLVSSQWVDWASEGIGARDYRHFHAVRMATLSTAVRCSRGSRGTTLPLCRACRSGNEHLYHVVQQCPRTHGGRILRHDAVAKQIAGALSSSGWDVERERLYHMPSDQGKKPDIVAVKPDQSCIILDVQVVNGSLDMEQTWRAKIRKYDRDDLRQAVSELKGVAPNNIRVMAATLSWRGVWCGKSATELRELGISVGVLRGITTRVLLGSYLNWWSFYRGTSLHPSLPPPPSSSSLIPRAGVG

SEQ ID NO: 24722 - protein, 967 aa, Apolygus lucorum
MAADEVVAVRNGVRNINVYLSERFPTRTVIAIKNLRLKPHYKQLVQEAILANSGGASPASPIAGVDQQSAIQYPSPGTSGLLADLKTEVLRLGGQVGRIEGYESTYLQDLARRAAEGLDNLEDMVAAYLGRIFPRVGDATVTQHQGRPSPRVVLRGGRRAAKQARRQEYHRVQSLWRKHPARVAAEVLEEPGEDQVQPPLQEFVDFWEPLLSAPSHNPGERVVPPVSTRDSLRSILCSPVLLDEAHKCRVKNSTSAGPDGVSARRWNKAPNTIKLLILNLLMLAGRPPKALTRTRTVSIPKKGGSGPGGYRPISVSLVVFRHFQKVLASRLQVAGVIGDVQRAFRPADGTAENLTVLQTVISLARIKRRQLHLAALDVAKAFDTVSHFALTDCLRGVGAPSRLIEYVACLYHEGVTVLEAGGEVSGDVRIGRGVRQGDPLSPLLFNLVVDTALGKLPTEVGFDLAPGVRVGALAFADDVILLAETREGLQIALNAFAKQLARCGLVVNPDKCGSVSLVPSGRQHKVKVVDGGFVVGQSPIPSQSVLEVWRYLGVDFMGVATITTSRVDLGRALARVTKAPLKPQQKLRLLRTYLLPKLTYGLVFGRLTAGRLQELDRQVRSAVRSWLKFPPGVPSAYFHAPVKSGGLGIVFLSACIPSLRRRRLLALQGSSWEVARAAADLDFVRQQLAWCDRATPSAPKPSSSAEFAAALHESVDGKELRQCSESLVSSQWVDWASEGIGARDYRHFHAVRMATLPTAVRCSRGSRGTTLPLCRTCRSGNEHLYHVVQQCPRTHGGRILRHDAVAKQIAGALSSSGWDVERERLYHMPSDQGKKPDIVAVKPDQSCIILDVQVVNGSLDMEQTWRAMIRKYDRDDLRQAVSELKGVVPNNIRVMAATLSWRGVWCGKSATELRELGISVGVLRGITTRVLLGSYLNWWSFYRGTSLHPSLPPPPSSSSLIPRAGVG

SEQ ID NO: 24723 - protein, 1068 aa, Apolygus lucorum
MDETLEQPHNPRQPIGSRGIRGGAQRRPRQGRRPSSPSSSSSSSLPSSSSTASLDHQCAHCERAFTSRSGLGVHVRRKHPVAANAAIEIERVQPRYASEDLCRMAADEVVAVRNGVRNINVYLSERFPTRTVIAIKNLRLKPHYKQLVQEAILANSGGASPASPIAGVDQQSAIQYPSPGTSGLLADLKTEVLRLGGQVGRIEGYESTYLQDLARRAAEGLDNLEDMVAAYLGRIFPRVGDATVTQHQGRPSPRVVLRGGRRAAKQARRQEYHRVQSLWRKHPARVAAEVLEEPGEDQVQPPLQEFVDFWEPLLSAPSHNPGERVVPPVSTRDSLRSILCSPVLLDEAHKCRVKNSTSAGPDGVSARRWNKAPNTIKLLILNLLMLAGRPPKALTRTRTVFIPKKGGSGPGGYRPISVSSVVFRHFQKVLASRLQVAGVIGDVQRAFRPADGTAENLTVLQTVISLARIKRRQLHLAALDVAKAFDTVSHFALTNCLRGVGAPSRLIEYVACLYHEGVTVLEAGGEVSGDVRIGRGVRQGDPLSPLLFNLVVDTALGKLPTEVGFDLAPGVRVGALAFADDVILLAETREGLQIALNAFAKQLARCGLVVNPDKCGSVSLVPSGRQHKVKVVDGGFVVGQSPIPSRSVLEVWRYLGVDFMGVATITTSRVDLGRALARVTKAPLKPQQKLRLLRTYLLPKLTYGLVFGRLTAGRLQELDRQVRSAVRSWLKFPPGVPSAYFHAPVKSGGLSIVSLSACIPSLRRQRLLALQGSSWEVARAAADLDFVRQQLAWCDRATPSAPKPSSSAEFAAALHESVDGKELRQCSESLVSSQWVDWASEGIGALDYRHFHAVRMATLPTAVRCSRGSRGTTLCRACRSGNEHLYHVVQQCPRTHGGRILRHDAVAKQIAGALSSSGWDVERERLYHMPSDQGKKPDIVAVKPDQSCIILDVQVVNGSLDMEQTWRAKIRKYDRDDLRQAVSELKGVVPNNIRVMAATLSWCGVWCGKSATELRELGISVGVLRGITTRVLLGSYLNWWSFYRGTSLHPSLPPPPSSSSLIPRAGVG

SEQ ID NO: 24724 - protein, 1095 aa, Apolygus lucorum
MTLWRIGREPLSTGSLTLHLKRPPVMDQTDNMPHNPRLPIGTRGSRGGAQRRPRQGRRPSSPSSSSSSSQPSSSSTASLNHQCAHCERAFTTRSGLGLHVRRKHPVAANAAIDIERVQHRYASEELRRMAADEVVAVRDGVRNINVYLSERFPMRTVIAIKNIRLKPHYKQLVQEAILANSSGASPASPIADVEQQPAIQYPSPGTSGLLADLKTEVLRLGGQVGRIEGYESTYLQDLARRAAEGLDNLENEVAAYLGRIFPRVGDATVTQHQGGPPPRVVLRGGRRAAKQARRREYHRVQSLWRKHPARVAAEVLEEPGENQVQPPLQEFVDFWEPLLSAPSHDPGERVVPPVSTRDSLRGIMCSPVLSDEAHKCRVKNSTSAGPDGISAQRWNKAPKTIKLLVLNLLLLAGRPPKALTRARTVFIPKKGGSGPGGYRPISVSSVVFRHFQKVLASRLQVAGIIGDVQRAFRPADGTAENLTVLQTVISLARMKRRQLHLAALDVAKAFDTVSHLALTDCLRGVGAPSRLIEYVACLYQEGVTVLEAGGEVSGDVRIGRGVRQGDPLSPLLFNLVVDTALGKLPTEVGFDLAPGVRVGALAFADDVILLAETREGLQIALNAFAKQLARCGLVVNPDKCGSVSLVPSGRQHKVKVVDGGFVIGQSPIPSRSVLEVWRYLGVDFMGVATISASRVDLGRALARVTKAPLKPQQKLRLLRTYLLPKLTYGLVFGRLTAGRLQELDRQVRSAVRSWLRFPPGVPSAYFHAPVKSGGLGIVSLSACIPSLRRQRLLALQGSSWEVARAAADLDFVRQQLAWCDRATPSAPKPSSSAEFAAALHESVDGKELRQCSESPVSSQWVDWASEGIGARDYRHFHAVRVATLPTAVRCSRGSRGTTLPLCRACRSGNEHLYHVVQQCPRTHGGRILRHDAVAKQIAGALSSSGWDVERERLYHMPSDQGKKPDIVAVKPDQSCIILDVQVVNGSLDMEQTWRAKIRKYDRNDLRQAVSELKGVAPNNIRVMAATLSWRGVWCGKSATELRELGISVGVLRGITTRVLLGSYLNWWSFYRGTSLHPSLPPPPSSSSLIPRAGVG

SEQ ID NO: 24725 - protein, 967 aa, Apolygus lucorum
MAADEVVAVRDGVRNINVYLSERFPMRTVIAIKNIRLKPHYKQLVQEAILANSSGASPASPIADVEQQPAIQYPSPGTSGLLADLKTEVLRLGGQVGRIEGYESTYLQDLARRAAEGLDNLENEVAAYLGRIFPRVGDATVTQHQGGPPPGVVLRGGRRAAKQARRREYHRVQSLWRKHPARVAAEVLEEPGENQVQPPLQEFVDFWEPLLSAPSHDPGERVVPPVSTRDSLRSIMCAPVLSDEAHKCRVKNSTSAGPDGISARRWNKAPKTIKLLVLNLLLLAGRPPKALTRARTVFIPKKGGSGPGGYRPISVSSVVFRHFQKVLASRLQVAGIIGDVQRAFRPADGTAENLTVLQTVISLARMKRRQLHLAALDVAKAFDTVSHLALTDCLRGVGAPSRLIEYVACLYQEGVTVLEAGGEVSGDVRIGRGVRQGDPLSPLLFNLVVDTALGKLPTEVGFDLAPGVRVGALAFADDVILLAETREGLQIALNAFARQLARCGLVVNPDKCGSVSLVPSGRQHKVKVVDGGFVIGQSPIPSRSVLEVWRYLGVDFMGVATISASRVDLGRALARVTKAPLKPQQKLRLLRSYLLPKLTYGLVFGRLTAGRLQELDRQVRSAVRSWLRFPPGVPSAYVHAPVKSGGLGIVSLSACIPSLRRQRLLALQGSSWEVARAAADLDFVRQQLAWCDRATPSAPKPSSSAEFAAALHESVDGKELRQCSESPVSSQWVDWASEGIGARDYRHFHAVRMATLPTAVQCSRGSRGTTLPLCRACRSGNEHLYHVVQQCPRTHGGRILRHDAVAKQIAGALSSSGWDVERERLYHMPSDQGKKPDIVAVKPDQSCIILDVQVVNGSLDMEQTWRAKIRKYDRNDLRQAVSELKGVAPNNIRVMAATLSWRGVWCGKSATELRELGISVGVLRGITTRVLLGSYLNWWSFYRGTSLHPSLPPPPSSSSLIPRAGVG

SEQ ID NO: 24726 - protein, 1075 aa, Apolygus lucorum
MCFPVMENIPNEPHNPRRPIGSRGIRGGAQRRPRQGRRPSSPSSSSSSSLPSSSSTASLDHQCAHCERAFTSRSGLGVHVRRKHPVAANEEIDVERVQPRYASEDLRRMAADEVVAVRNGVRNINVYLSERFPTRTVIAIKNLRLKPHYKQLVQEAILANSSGASPASPVAGVDQQSAIQYPSPGTSGLLADLKTEVLRLGGQVGRIEGYESTYLQDLARRAAEGLDNLEDMVAAYLGRIFPRVGDATVTQHQGGHPPRVVLRGGRRAAKQARRREYHRVQSLWRKHPARAAAEVLEEPGEDQVQPPLQEFVDFWEPLLSAPSHNPGERVVPPVSTRDSLRSILCSPVLLDEAHKCRVKNSTSAGPDGVSARRWNKAPNTIKLLILNLLMLAGRPPKALTRTRTVFIPKKGGSGPGGYRPISVSSVVFRHFQKVLASRLQVAGVIGDVQRAFRPADGTAENLTVLQTVISLARIKRRQLHLAALDVAKAFDTVSHLALTDCLRGVGAPSRLIEYVACLYHEGVTVLEAGGEVSGDVRIGRGVRQGDPLSPLLFNLVVDTALGKLPTEVGFDLAPGVRVGALAFADDVILLAETREGLQIALNAFAKQLSRCGLVVNPDKCGSVSLVPSGRQHKVKVVDGGFVIGQAPIPSRSVLEVWRYLGVDFMGVATITASRVDLGRALARITKAPLKPQQRLRLLRTYLLPKLTYGLVFGRLTAGRLQELDREVRSAVRSWLRFPPGVPSAYIHAPVKSGGLGIVSLSASIPSLRRQRLLALQGSSWEVARVAAGLDFVRQQLAWCDRATPSAPKPSSSAEFAAALHESVDGKELRQCSESLISSQWVDWASEGIGARDYRNFHAVRVATLPTAVRCSRGSRGVTDTLCRACRSGNEHLYHVVQQCPRTHGGRILRHDAVAKQIAGALSSSGWDVERERLYHMPSDQGKKPDIVAVKPDRSCIILDVQVVNGSMDMEQTWRAKIRKYDRDDLRQAVSELKGVAPNNIRVMAATMSWRGVWCGKSATELRELGISVGVLRGVTRRVLLGSYLNWWSFYRGTSLHPSLPPPPSSSSLIPRAGVG

SEQ ID NO: 24727 - protein, 902 aa, Apolygus lucorum
MFCSDMSTSRTAPTSLTRSRTSLSSEDGIPLISRQLISWACSLSFICPSNSITRTSRAEHPALTFSWRTVRVESSAVSLPISSVTRVVLRGGRRAAKQARRREYHRVQSLWRKHPARAAAEVLEEPGEDQVQPPLQEFVDFWEPLLSAPSHNPGERVVPPVSTRDSLRSILCSPVLLDEAHKCRVKNSTSAGPDGVSARRWNKAPNTIKLLVLNLLMLAGRPPKALTRTRTVFIPKKGGSGPGGYRPISVSSVIFRHFQKVMASRLQVAGVIGDVQRAFRPADGTAENLTVLQTVISLARIKRRQLHLAALDVAKAFDTVSHLALTDCLRGVGAPSRLIEYVACLYHEGVTVLEAGGEVSGDVRIGRGVRQGDPLSPLLFNLVVDTALGKLPTEVGFDLAPGVRVGALAFADDVVLLAQTREGLQIALNAFAKQLSRCGLVVNPDKCGSVSLVPSGRQHKVKVVDGGFVIGQAPIPSRSVLEVWRYLGVDFMGVATITASRVDLGRALARITKAPLKPQQRLRLLRTYLLPKLTYGLVFGRLTAGRLQELDREVRSAVRSWLRFPPGVPSAYIHAPVKSGGLGIVSLSACIPSLRRQRLLALQGSSWEVARVAAGLDFVRQQLAWCDRATPSAPKPSSSAEFAAALHESVDGKELRQCSESLISSQWVDWASEGIGARDYRNFHAVRVATLPTAVRCSRGSRGVTDTLCRACRSGNEHLYHVVQQCPRTHGGRILRHDAVAKQIAGALSSSGWDVERERLYHMPSDQGKKPDIVAVKPDWSCIILDVQVVNGSMDMEQTWRAKIRKYDRDDLRQAVSELKGVAPNNIRVMAATLSWRGVWCGKSATELRELGISVGVLRGVTRHVLLGSYLNWWSFYRGTSLHPSLPPPPSSSSLIPRAGVG

SEQ ID NO: 24728 - protein, 1095 aa, Apolygus lucorum
MTLWRIGREPLSTGSLALLNKRPPVMENNPEEPHNPRLPIGPRGSRGGAQRRPRQGRRPSSPSSSSSSSLPSSSSTASLNHQCAHCERAFTTRSGLGLHVRRKHPVAANAAIDIERIQHRYASEELRRMAADEAVAVRNGVRNINVYLSERFPMRTVIAIKNIRLKPHYKQLVQEVILANSSGASPASPVADVEQQPAIQHPSPGTSGLLADLKTEVLRLGGQVGRIEGYESTYLQDLARRAAEGLDNLENEVAAYLGRIFPRVGDATVTHHQGGPPPRVVLRGGRRAAKQARRREYHRVQSLWRKHPARVAAEVLEEPGENQVQPPLQEFVDFWEPLLSAPSHDPGERVVPPVSTRDSLRSIMCSPVLSDEAHKCRVKNSTSAGPDGISARRWNKAPRTIKLLLLNLLLLAGRPPKALTRTRTVFIPKKGGSGPGGYRPISVSSVVFRHFQKVLASRLQVAGIIGDVQRAFRPADGTAENLTVLQTVISLARMKRRQLHLAALDVAKAFDTVSHIALTDCLRGVGAPSRLIEYVACLYHEGVTVLEAGGEVSGDVRIGRGVRQGDPLSPLLFNLVVDTALGKLPTEVGFDLAPGVRVGALAFADDVILLAETREGLQIALNAFAKQLARCGLVVNPDKCGSVSLVPSGRQHKVKVVDGGFVIGQSPIPSRSVLEVWRYLGVDFMGVATISASRVDLGRALDRVTKAPLKPQQKLRLLRTYLLPKLTYGLVFGRLTAGRLQELDRQVRSAVCSWLRFPPGVPSAYVHAPVKSGGLGVVSLSACIPSLRRQRLLALQGSSWEVARAAADLDFVRQQLAWCDRATPSAPKPSSSAEFAAALHESVDGKELRQCSESPVSSQWVDWASEGIGARDYRHFHAVRMATLPTAVRCSRGSRGTTLPLCRACRSGNEHLYHVVQQCPRTHGGRILRHDAVAKQIAGALSSSGWDVERERLYHMPSDQGKKPDIVAVKPDQSCIILDVQVVNGSLDMEQTWRAKIRKYDRNDLRQAVSELKGVAPNNIRVMAATLSWRGVWCGKSATELRELGISVGVLRGITTRVLLGSYLNWWSFYRGTSLHPSLPPPPSSSSLIPRAGVG

SEQ ID NO: 24729 - protein, 1095 aa, Apolygus lucorum
MTLWRRGRGPLLTGSLTLHYKRPPVMENAQDQPHNPRQPIGSRGIRGGAQRRPRQGRRPSSPSSSSSSSLPSSSSTASLNHQCAHCERAFTTRSGLGLHIRRKHPVAANAAIDIERIQPRYASEELRRMAADEAVAVRNGVHNINVYLNERFPTRTVIAIKNIRLKPHYKQLVQEAILANSSGASPASPVADVEQQPAIQYPSPGTSGLLADLKTEVLRLGGQVGRIEGYESTYLQDLVRRAVEGLDNLEDEVAAYLGRIFPRVGDATVTRHQGRPPPRMVLRGGRRAAKQARRREYHRVRSLWRKHPARVAAEVLEEPGENQVQPPLQEFVDFWEPLLSAPSHDPGERVVPPVSTRESLRSIMCSPVLSDEAHKCRVRNSTSAGPDGVSARRWNKAPKTIKLLILNLLLLAGRPPKALTRTRTVFIPKKGGSGPGGYRPISVSSVVFRHFQKVLASRLQVAGVIGDVQRAFRPADGTAENLTVLQTVISLARIKRRQLHLAALDVAKAFDTVSHLALTDCLRGVGAPSRLIEYVACLYQEGVTVLEAGGEVSGDVRIGRGVRQGDPLSPLLFNLVVDTALGKLPTEVGFDLAPGVRVGALAFADDVILLAETREGLQIALNAFAKQLAGCGLVVNPDKCGSVSLVPSGRQHKVKVVDGGFVVGQSPIPSRSVLEVWRYLGVDFMGVATITASRVDLGRALARVTKAPLKPQQKLRLLRTYLLPKLTYGLVFGRLTAGRLQELDREVRSAVRSWLNFPPGVPSAYVHAPVKSGGLGIVSLSACIPSLRRRRLLALQGSSWEVARAAADLDFVRQQLAWCDRATPSAPKPSSSAEFAAALHESVDGKELRQCSESLVSSQWVDWASEGIGARDYRHFHAIRVASLPTAVRCSRGSRGTTLPLCRACRSGNEHLYHVVQQCPRTHGGRILRHDAVAKQIAGALSSSGWDVERERLYHMPSDQGKKPDIVAVKPDQSCIILDVQVVNGSLDMEQTWRAKIRKYDRNDLRQAVSELKGVEPNNIRVMAATLSWRGVWCGKSATELRELGISVGVLRGITTRVLLGSYLNWWSFYRGTSLHPSLPPPPSSSSLIPRAGVG

SEQ ID NO: 24730 - protein, 1095 aa, Apolygus lucorum
MTLWRLGRGPLLTGSLTLHHKRPPVMEQNINEPHNPRQPIGSRGIRGGAQRRPRQGRRPSSPSSSSSSSLPSSSSTASLNHQCAHCERAFTTRSGLGLHIRRKHPVAANAAIDIERIQPRYASEELRRMAADEAVAVRNGVRNINVYLNERFPTRTVIAIKNIRLKPHYKQLVQEAILANSSGASPASPIADVEQQPAIQYPSPGTSGLLADLKTEVLRLGGQVGRIEGYESTYLQDLVRRAVEGLDNLEDEVAAYLGRIFPRVGDATVTRHQGGPPPRMVLRGGRRAAKQARRREYHRVQSLWRRHPARVAAEVLEEPGENQVQPPLQEFVDFWEPLLSAPSHDPGECVVPPVSTRDSLRSIMCSPVLSDVAHKCRVRNSTSAGPDGVSARRWNKAPKTIKLLILNLLLLAGRPPKALTRTRTVFIPKKGGSGPGGYRPISVSSVVFRHFQKVLASRLQVAGVIGDVQRAFRPADGTAENLTVLQTVISLARIKRRQLHLAALDVAKAFDTVSHLALTDCLRGVGAPSRLIEYVACLYQEGVTVLEAGGEVSGDIRVGRGVRQGDPLSPLLFNLVVDTALGKLPTEVGFDLAPGVRVGALAFADDVILLAETREGLQIALNAFAKQLAGCGLLVNPDKCGSVSLVPSGRQHKVKVVDGGFVVGQSPIPSRSVLEVWRYLGVDFMGVATITASCVDLGRALARVTKAPLKPQQKLRLLRTYLLPKLTNGLVFGRLTAGRLQELDREVRSAVRSWLKFPPGVPSAYVHAPVKSGGLGIVSLSAYIPSLRRRRLLALQGSSWEVAGAAADLDFVRQQLAWCDRATPSAPKPSSSAEFAAALHESVDGKELRQCSESLVSSQWVDWASEGIGARDYRHFHAIRVASLPTAVRCSRGSRGTTLPLCRACRSGNEHLYHVVQQCPRTHGGRILRHDAVAKQIAGALSSSGWDVERERLYHMPSDQGKKPDIVAVKPDQSCIILDVQVVNGSLDMEQTWRAKIRKYDTNDLRQAVSELKGVAPNNIRVMAATLSWRGVWCGKSATELRELGISVGVLRGITTRVLLGSYLNWWSFYRGTSLHPSLPPPPSSSSLIPRAGVG

SEQ ID NO: 24731 - protein, 1069 aa, Apolygus lucorum
MENLTEPHNPRRPIGSRGIRGGAQRRPRQGRRPSSPSSSSSSSLPSSSSTASLDHQCAHCERAFTSRSGLGVHVRRKHPVAANEEIDVERVQPRYASEDLRRMAADEVVAVRNGVRNINVYLSERFPTRTVIAIKNLRLKPHYKQLVQEAILANSSGASPASPVAGVDQQSAIQYPSPGTSGLLADLKTEVLRLGGQVGRIEGYESTYLQDLARRATEGLDNLEDMVAAYLGRIFPRVGDATVTQHQGGPPPRVVLRGGRRAAKQARRREYHRVQSLWRKHPARAAAEVLEEPGEDQVQPPLQEFVDFWEPLLSAPSHNPGERVVPPVSTRDSLRSILCSPVLLDEAHKCRVRNSTSAGPDGISARRWNKAPNTIKLLILNLLMLVGRPPKALTRTRTVFIPKKGGSGPGGYRPISVSSVVFRHFQKVLASRLQVAGVIGDVQRAFRPADGTAENLTVLQTVISLARIKRRQLHLAALDVAKAFDTVSHLALTDCLRGVGAPSRLIEYVACLYHEGVTVLEAGGEVSGDVRIGRGVRQGDPLSPLLFNLVVDTALGKLPTEVGFDLAPGVRVGALAFADDVILLAETREGLQIALNAFAKQLSRCGLVVNPDKCGSVSLVPSGRQHKVKVVDGGFVIGQAPIPSRSVLEVWRYLGVDFMGVATITASRVDLGRALARITKAPLKPQQRLRLLRTYLLPKLTYGLVFGRLTAGRLQELDREVRSAVRSWLRFPPGIPSAYIHAPVKSGGLGIVSLSACIPSLRRQRLLALQGSSWEVARVAAGLDFVRQQLAWCDRATPSAPKPSSSAEFAAALHESVDGKELRQCSESLISSQWVDWASEGIGARDYRNFHAVRVATLPTAVRCSRGSRGVTDTLCRACRSGNEHLYHVVQQCPRTHGGRILRHDAVAKQIASALSSSGWDVERERLYHMPSDQGKKPDIVAVKPDRSCIILDAQVVNGSMDMEQTWWAKIRKYDRDDLRQAVSELKGVAPNNIRVMAATLSWRGVWCGKSATELRELGISAGVLRGVTRGVLLGSYLNLWSFYRGTSLHPSLPPPPSSSSLIPRAGVG

SEQ ID NO: 24732 - protein, 1070 aa, Apolygus lucorum
MEPTTNTPHNPRLPIGTRGFRGGAQRRPRQGRRPSSPSSSSSSSLPSSSSTASLDHQCAHCERAFTSRSGLGVHVRRKHPVAANEEINVERVQPRYASEDLRRMAADEVVAVRNGVRNINVYLSERFPTRTVIAIKNLRLKPHYKQLVQDAILANSSGASPASPVAGADQQSAIQYPSPGTSGLLANLKTEVLRLGGQVGRIEGYESTYLQDLARRAVEGLDNLEDKVAAYLGRIFPRVGDATVTQHQGGPPPRVVLRGGRRAAKQARRREYHRVQSLWRKHPARVAAEVLEEPGEVQVQPPLQEFVDFWEPLLSAPSHNPGERVVPPVSTRDSLRSILCSPVLLDEAHKCRVKNSTSAGPDGISARRWNKAPNTIKLLILNLLILAGRPPKALTRTRTVFIPKKGGSGPGGYRPISVSSVVFRHFQKVLASRLQVAGVIGDVQRAFRPADGTAENLTVLQTVISLARIKRRQLHLAALDVAKAFDTVSHLALTDCLRGVGAPSRLIEYVACLYHEGVTVLEAGGEVSGDIRIGRGVRQGDPLSPLLFNLVVDTALGKLPTEVGFDLAPGVRVGALAFADDVILLAETREGLQIALNAFAKQLSRCGLVVNPDKCGSVSLVPSGRQHKVKVVDGGFVIGQAPIPSRSVLEVWRYLGVDFMGVATITASRVDLGRALARITKAPLKPQQRLRLLRTYLLPKLTYGLVFGRLTAGRLQELDREVRSAVRSWLRFPPGVPSAYIHAPVKSGGLGIVSLSACIPSLRRQRLLALQGSSWEVARVAAGLDFVRQQLAWCDRATPSAPKPSSSAEFAAALHESVDGKELRQCSESLISSQWVDWASEGIGARDYRNFHAVRVATLPTAVRCSRGSRGMTDTLCRACRSGNEHLYHVVQQCPRTHGGRILRHDAVAKQIAGALSSSGWDVERERLYHMPSDQGKKPDIVAVKPDRSCIILDVQVVNGSMDMEQTWRAKIRKYDRDDLRQAVSELKGVAPNNIRVMAATLSWRGVWCGKSATELRELGISVGVLRGVTRRVLLGSYLNWWSFYRGTSLHPSLPPPPSSSSLIPRAGVG

SEQ ID NO: 24733 - protein, 844 aa, Apolygus lucorum
MVAAYLGRIFPRVGDATVTRHQGRPPPRVVLRGGRRAAKQARRQEYHRVQSLWRKHPARVAAEVLEEPGEDQVQPPLQEFVDFWEPLLSAPSHNPGERVVPPVSTRDSLRSILCSPVLLDEAHKCRVKNSTSAGPDGVSARRWNKAPNTIKLLILNLLMLAGRPPKALTRTRTVFIPKKGGSGPGGYRPISVSSVVFRHFQKVLASRLQVAGVIGDVQRAFWPADGTAENLTVLQTVISLARIKRRQLHLAALDVAKAFDTVSHFALTDCLRGVGAPSRLIEYVACLYHEGVTVLEAGGEVSGDVRIGRGVRQGDPLSPLLFNLVVDTALGKLPTEVGFDLAPGVRVGALAFADDVILLAETREGLQIALNAFAKQLARCGLVVNPDKCGSVSLVPSGRQHKVKVVDGGFVVGQSPIPSRSVLEVWRYLGVDFMGVATITTSRVDLGRALARVTKAPLKPQQKLRLLRTYLLPKLTYGLVFGRLKAGRLQELDRQVRSAVRSWLKFPPGVPSAYFHAPVKSRGLGIVSLLACIPSLRRQRLLALQGSSWEVARAAADLDFVRQQLAWCDQATPSAPKPSSSAEFAAALHESVDGKELRQCSESLVSSQWVDWASEGIGARDYRHFHAVRMATLPTAVRCSRGSRGTTLPLCRACRSGNEHLYHVVQQCPRTHGGRILRHDAVAKQIAGALSSSGWDVERERLYHMPSDQGKKPDIVAVKPDQSCIILDVQVVNGSLDMEQTWRAKIRKYDRDDLRQAVSELKGVVPNNIRVMAATLSWRGVWCGKSATELRELGISVGVLRGITTRVLLGSYLNWWSFYRGTSLHPSLPPPPSSSSLIPRAGVG

SEQ ID NO: 24734 - protein, 1099 aa, Apolygus lucorum
MTLWRLGRGPLLKGSLTLHYKRPPPPPPVMENEQDQPHNPRQPIGSRGIRGGAQRRPRQGRRPSSPSSSSSSSLPSSSSTASLNHQCAHCERAFTTRSGLGLHISRKHPVAANAAIDIERIQPRYASEELRRMAADEAVAVRNGVRNINVYLNERFPTRTVIAIKNIRLKPHYKQLVQEAILANSSGASPASPVADVEQQPAIQYPSPGTSGLLADLKTEVLRLGGQVGRIEGYESTYLQDLVRRAVEGLDNLEDEVAAYLGRIFPRVGDATVTRHQGGPPPRMVLRGGRRAAKQARRREYHRVRSLWRKHPARVAAEVLEEPGENQVQPPLQEFVDFWEPLPSAPSHDPGECVVPPVSTRESLRSIMCSPVLSDEAHKCRVRNSASAGPDGVSARRWNKAPKTIKLLILNLLLLAGRPPKALTRTRTVFIPKKGGSGPGGYRPISVSSVVFRHFQKVLASRLQVAGVIGDVQRAFRPAGGTAENLTVLQTVISLARIKRRQLHLAALDVAKAFDTVSHLALTDCLRGVGAPSRLIEYVACLYQEGVTVLEAGGEVSGDIRIGRGVRQGDPLSPLLFNLVVDTALGKLPTEVGFDLAPGVRVGALAFADDVILLAETREGLQIALNAFAKQLAGCGLVVNPDKCGSVSLVPSGRQHKVKVVDGGFVVGQSPIPSRSVLEVWRYLGVDFMGVATITASRVDLGRALARVTKAPLKPQQKLRLLRTYLLPKLTYGLVFGRLTAGRLQELDREVRSAVRSWLKFPPGVPSAYVHAPVKSGGLGIVSLSACIPSLRRQRLLALQGSSWEVARAAADLDFVRQQLAWCDRATPSAPKPSSSAEFAAALHESVDGKELRQCSESLVSSQWVDWASEGIGARDYRHFHAIRVASLPTAVRCSRGGRGTTLPLCRACRSGNEHLYHVVQQCPRTHGGRILCHDAVAKQIAGALSSSGWDVERERLYHMPSDQGKKPDIVAVKPDQSCIILDVQVVNGSLDMEQTWRAKIRKYDTNDLRQAVSDLKGVAPNNIRVMAATLSWRGVWCGKSATELRELGISVGVLRGITTRVLLGSYLNWWSFYRGTSLHPSLPPPPSSSSLIPRAGVG

SEQ ID NO: 24735 - protein, 967 aa, Apolygus lucorum
MAADEAVAVRNGVRNINVYLNERFPTRTVIAIKNIRLKPHYKQLVQEAILANSSGASPASPIADVEQQPAIQYPSPGTSGLLADLKTEVLRLGGQVGRIEGYESTYLQDLVRRAAEGLDNLEDEVAAYLGRIFPRVGDATVTQHQGGPPPRVVLRGGRRAAKQARRREYHRVQSLWRKHPARVAAEVLEEPGEKQVQPPLQEFVDFWEPLLSAPSHDPGERVVPPVSTRDSLRSIMCSPVLSDEAHKCRVKNSTSAGPDGVSARRWNKAPKTIKLLILNLLLLAGRPPKALTRTRTVFIPKKGGSGPGGYRPISVSSVVFRHFQKVLASRLQVAGVIGDVQRAFRSADGTAENLTVLQTVISLARIKRRQLHLAALDVAKAFDTVSHLALTDCLRGVGAPSRLIEYVACLYQEGVTVLEAGGEVSGDIRIGRGVRQGDPLSPLLFNLVVDTALGKLPTEVGFDLAPGVRVGALAFADDVILLAETREGLQIALNAFAKQLARCGLVVNPDKCGSVSLVPSGRQHKVKVVDGGFVVGQSPIPSRSVLEVWRYLGVDFMGVATITTSRVDLGRALARVTKAPLKPQQKLRLLRTYLLPKLTYGLVFGRLTAGRLQQLDREVRSAVRSWLKFPPGVPSAYFHAPVKSGGLGIVSLSACIPSLRRRRLLALQGSSWEVARAAADLDFVRQQLAWCDRATPSAPKPSSSAEFAAALHESVDGKELRQCSESLVSSQWVDWASEGIGARDYRHFHAIRVASLPTAVRCSRGGRGTTLPLCRACRSGNEHLYHVVQQCPRTHGGRILRHDAVAKQIAGALSSSGWDVERERLYHMPSDQGKKPDIVAVKPDQSCIILDVQVVNGSLDMERTWRAKIRKYDTNDLRQAVSELKGVAPNNIRVMAATLSWRGVWCGKSATELRELGISVGVLRGITTRVLLGSYLNWWSFYRGTSLHPSLPPPPSSSSLIPRAGVG

SEQ ID NO: 24736 - protein, 967 aa, Apolygus lucorum
MAADEAVAVRNGVRNINVYLNERFPTRTVIAIKNIRLKPHYKQLVQEAILANSSGASPASPVADVEQQPAIQYPSPGTSGLLADLKTEVLRLGGQVGRIEGYESTYLQDLVRRAVEGLDNLEDEVAAYLGRIFPRVGDATVTRHQGGPPPRMVLRGGRRAAKQARRREYHRVQSLWRKHPARVAAEVLEEPGENQVQPPLQEFVDFWEPLLSAPSHDPGECVVPPVSTRDSLRSIMCSPVLSDEAHKCRVRNSTSAGPDGVSARRWNKAPKTIKLLILNLLLLAGRPPKALTRTRTVFIPKKGGSGPGGYRPISVSSVVFRHFQKVLASRLQVAGVIGDVQRAFRPADGTAENLTVLQTVISLARIKRRQLHLAALDVAKAFDTVSHLALTDCLRGVGAPSRLIEYVACLYQEGVTVLEAGGEVSGDIRIGRGVRQGDPLSPLLFNLVVDTALGKLPTEVGFDLAPGVRVGALAFADDVILLAETREGLQIALNAFAKQLAGCGLVVNPDKCGSVSLVPSGRQHKVKVVDGGFVVGQSSIPSRSVLEVWRYLGVDFMGVATITASRVDLGRALARVTKAPLKPQQKLRLLRTYLLPKLTYGLVFGRLTAGRLQELDREVRSAVRSWLKFPPGVPSAYVHAPVKSGGLGIVSLSACIPSLRRQRLLALQGSSWEVARAAADLDFVRQQLAWCDRATPSAPKPSSSAEFAAALHESVDGKELRQCSESLLSSQWVDWASEGIGARDYRHFHAIRVASLPTAVRSSRGGRGTTLPLCRACRSGNEHLYHVVQQCPRTHGGRILRHDAVAKQIAGALSSSGWDVERERLYRMPSDQGKKPDIVAVKPDQSCIILDVQVVNGSLDMEQTWRAKIRKYDTNDLRQAVSELKGVAPNNIRVMAATLSWRGVWCGKSATELRELGISVGVLRGITTRVLLGSYLNWWSFYRGTSLHPSLPPPPSSSSLIPRAGVG

SEQ ID NO: 24737 - protein, 967 aa, Apolygus lucorum
MAADEVVAVRNGVRNINVYLSERFPTRTVIAIKNLRLKPHYKQLVQEAILANSGGASPASPVADMDQQSAIQYPSPGTSGLLADLKTEVLRLGGQVGRIEGYESTYLQDLARRAAEGLDNLEDEIVAYLGRIFPRVGDATVTQHQGGPPPRVVLRGGRRAAKQARRREYHRVQSLWRKHPARVAAEVLEEPGENQVQPPLQEFVDFWEPLLSAPSHSPGERVVPPVSTRDSLRSIMCSPVLSDEAHKCRVKNSTSAGPDGISARRWNKAPRTIKLLLLNLLLLAGRPPKALTRARTVFIPKKGGGGPGGYRPISVSSVVFRHFQKVLASRLQVAGIIGDVQRAFRPADGTAENLTVLQTVISLARMKRRQLHLAALDVAKAFDTVGHFALTDCLRGVGAPSRLIEYVACLYQEGVTVLEAGGEVSGDVRIGRGVRQGDPLSPLLFNLVVDTALGKLPTEVGFDLAPGVRVGALAFADDVILLAETREGLQIALNAFAKQLARCGLVVNPDKCGSVSLVPSGRQHKVKVVDGGFVIGQSPIPSRSVLEVWRYLGVDFMGVATISASRVDLGRALARVTKAPLKPQQKLRLLRTYLLPKLTYGLVFGRLTAGRLQELDRQVRSAVRSWLRFPPGVPSAYVHAPVKSGGLGVVSLSACIPSLRRQRLLALQGSSWEVARAAADLDFVRQQLAWCDRATPSAPKPSSSAEFAAALHESVDGKELRQCSESPVSSQWVDWASEGIGARDYRHFHAVRMATLPTAVRCSRGSRGTTLPLCRACRSGNEHLYHVVQQCPRTHGGRILRHDAVAKQIAGALSSSGWDVERERLYHMPSDQGKKPDIVAVKPDQSCIILDVQVVNGSLDMEQTWRAKIRKYDRNDLRQAVSELKGVAPNNIRVMAATLSWRGVWCGKSATELRELGISVGVLRGITTRVLLGSYLNWWSFYRGTSLHPSLPPPPSSSSLIPRAGVG

SEQ ID NO: 24738 - protein, 1095 aa, Apolygus lucorum
MTLWRIGREPLSTGSLALLNKRPPVMENNPEEPHNPRLPIGPRGSRGGAQRRPRQGRRPSSPSSSSSSSLPSSSSTASLNHQCAHCERAFTTRSGLGLHVRRKHPVAANAAIDIERIQHRYASEELRRMAADEAVAVRNGVRNINVYLSERFPMRTVIAIKNIRLKPHYKQLVQEVILANSSGASPASPVADVEQQPAIQHPSPGTSGLLADLKTEVLRLGGQVGRIEGYESTYLQDLARRAAEGLDNLENEVAAYLGRIFPRVGDATVTHHQGGPPPRVVLRGGRRAAKQARRREYHRVQSLWRKHPARVAAEVLEEPGENQVQPPLQEFVDFWEPLLSAPSHDPGERVVPPVSTRDSLRSIMCSPVLSDEAHKCRVKNSTSAGPDGISARRWNKAPRTIKLLLLNLLLLAGRPPKALTRTRTVFIPKKGGSGPGGYRPISVSSVVFRHFQKVLASRLQVAGIIGDVQRAFRPADGTAENLTVLQTVISLARMKRRQLHLAALDVAKAFDTVSHFALTDCLRGVGAPSRLIEYVACLYHEGVTVLEAGGEVSGDVRIGRGVRQGDPLSPLLFNLVVDTALGKLPTEVGFDLAPGVRVGALAFADDVILLAETREGLQIALNAFAKQLARCGLVVNPDKCGSVSLVPSGRQHKVKVVDGGFVIGQSPIPSRSVLEVWRYLGVDFMGVATISASRVDLGRALDRVTKAPLKPQQKLRLLRTYLLPKLTYGLVFGRLTAGRLQELDRQVRSAVRSWLRFPPGVPSAYVHAPVKSGGLGVVSLSACIPSLRRQRLLALQGSSWEVARAAADLDFVRQQLAWCDRATPSAPKPSSSAEFAAALHESVDGKELRQCSESPVSSQWVDWASEGIGARDYRHFHAVRMATLPTAVRCSRGSRGTTLPLCRACRSGNEHLYHVVQQCPRTHGGRILRHDAVAKQIAGALSSSGWDVERERLYHMPSDQGKKPDIVAVKPDQSCIILDVQVVNGSLDMEQTWRAKIRKYDRNDLRQAVSELKGVAPNNIRVMAATLSWRGVWCGKSATELRELGISVGVLRGITTRVLLGSYLNWWSFYRGTSLHPSLPPPPSSSSLIPRAGVG

SEQ ID NO: 24739 - protein, 732 aa, Apolygus lucorum
MCSPVLSGEAHKCRVKNSTSAGPDGVSARRWNKAPKTIKLLILNLLLLAGRPPKALTRTRTVFIPKKGGSGPGGYRPISVSSVVFRHFQKVLASRLQVAGVIGDVQRAFRPADGTAENLIVLQTVISLARIKRRQLHLAALDAAKAFDTVSHLALTDCLRGVGASSRLIEYVACLYQEGVTVLEAGGEVSGDIRIGRGVRQGDPLSPLLFNLVVVTALGKLPTEVGFDLAPGVRVGALAFADDVILLAETREGLQIALNAFAKQLARCGLVVNPDKCGSVSLVPSGRQHKVKVVDGGFVVGQSPIPSRSVLEVWRYLGVDFMGVATITTSRVDLGRALARVTKAPLKPQQKLRLLRTYLLPKLTYGLVFGRLTAGRLQQLDREVRSAVRSWLKFPPGVPSAYFHAPVKSGGLGIVSLSACIPSLRRRRLLALQGSSWEVARAAADLDFVRQQLAWCDRATPSAPKPSSSAEFAAALHESVDGKELRQCSESLVSSQWVDWASEGIGACDYRHFHAIRVASLPTAVRCSRGSRGTTLPLCRACRSGNEHLYHVVQQCPRTHGGRILRHDAVAKQIAGALSSSGWDVERERLYHMPSDQGKKPDIVAVKPDQSCIILDVQVVNGSLDMEQTWRAKIRKYDTNDLRQAVSELKGVAPNNIRVMAATLSWRGVWCGKSATELRELGISVGVLRGITTRVLLGSYLNWWSFYRGTSLHPSLPPPPSSSSLIPRAGVG

SEQ ID NO: 24740 - protein, 1095 aa, Apolygus lucorum
MTLWRLGRGPLSMGSLTLKSRASPVMNNNTHQPHNPRQPIGSRGSRGGAQRRPRQGRRPSSPSSSSSSSLPSSSSTASLDHQCAHCERAFTSRSGLGVHVRRKHPVAANEEINVERVQPRYASEDLRRMAADEVVAVRNGVRNINVYLSERFPMRTVIAIKNLRLKPHYKQLVQEAILANSGGASPASPIAGVDQQSAIQYPSPGTSGLLADLKTEVLRLGGQVGRIEGYESTYLQDLARRAAEGLDNLEDEVAAYLGRIFPRVGDATVTQHQGGPPPRVVLRGGRRAAKQARRREYHRVQSLWRKHPARVAAEVLEEPGEDQVQPPLQEFVDFWEPLLSAPSHNPGEQVVPPVSTRDSLRSILCSPVLLDEAHKCRVKNSTSAGPDGVSARRWNKAPNTIKLLILNLLMLAGRPPKALTRTRTVFIPKKGGSGPGGYRPISVSSVVFRHFQKVLASRLQVAGVIGDVQRAFRPADGTAENLTVLQTVISLARIKRRQLHLAALDVAKAFDTVSHLALTDCLRGVGAPSRLIEYVACLYHEGVTVLEAGGEVSRDIRIGRGVRQGDPLSPLLFNLVVDTALGKLPTEVGFDLAPGVRVGALAFADDVILLAETREGLQIALNAFAKQLARCGLVVNPDKCGSVSLVPSGRQHKVKVVDGGFVVGQSSIPSRSVLEVWRYLGVDFMGVATITTSRVDLGRALARVTKAPLKPQQKLRLLRAYLLPKLTYGLVFGRLTAGRLQELDREIRSAVRSWLRFPPGVPSAYFHAPVKSGGLGIVSLSASIPSLRRQRLLALQGSSWEVARAAADLDFVRQQLAWCDRATPSAPKPSSSAEFAAALHESVDGKELRQCSESLVSSQWVDWASEGIGARDYRHFHAVRMATLSTAVRCSRGSRGTTLPLCRACRSGNEHLYHVVQQCPRTHGGRILRHDAVAKQIAGALSSSGWDVERERLYHMPSDQGKKPDIVAVKPDQSCIILDVQVVNGSLDMEQTWRAKIRKYDRDDLRQAVSELKGVAPNNIRVMAAALSWRGVWCGKSATELRELGISVGVLRGITTRVLLGSYLNWWSFYRGTSLHPSLPPPPSSSSLIPRAGVG

SEQ ID NO: 24741 - protein, 1002 aa, Apolygus lucorum
MERNIEWPHNPRQPIGSRGIRGGAQRRPRQGRRPSSPSSSSSSSQPSSSSTASLNHQCAHCERAFTTRSGLGLHISRKHPVAANAAIDIERIQHRYASEELRRMAADEAVAVRNGVRNINVYLNERFPTRTVIAIKNIRLKPHYKQLVQEAIVANSSGASPASPIADVEQQPAIQYPSPGTSGLLADLKTEVLRLGGQVGRIEGYESTYWQDLVRRAAEGLDNLEDEVAAYLGRIFPRVGDATVTQHQGGPPPRVVLRGGRRAAKQARRREYHRVQSLWRKHPARVAAEVLEEPGENQVQPPLQEFVDFWEPLLSAPSHDPGERVVPPVSTRDSLRSIMCSPVLSDEAHKCRVKNSTSAGPDGVSARLWNKAPKTIKLLILNLLLLAGRPPKALTRTRTVFIPKKGGSGPGGYRPISVSSVVFRHFQKVLASRLQVAGVIGDVQRAFRPADGTAKNLTVLQTVISLARIKRRQLHLAALDVAKAFDTVSHLALTDCLRGVGAPSRLIEYVACLYQECVTVLEAGGEVSGDIRIGRGVRQGDPLSPLLFNLVVDTALGKLPTEVGFDLAPGVRVGALAFADDVILLAETREGLQIALNAFAKQLARCGLVVNPDKCGSVSLVPSGRQHKVKVVDGGFVVGQSPIPSRSVLEVWRYLGVDFMGVATITASRVDLGRALARVTKAPLKPQQKLRLLRMYLLPKLTYGLVFGRLTAGRLQQLDREVRSAVRSWLKFPPGVPSAYVHAPVKSGGLGIVSLSACIPSLRRRRLLALQGSSWEVARAAADLDFVRQQLAWCDRATPSAPKPSLSAEFAAALHESVDGKELRQCSESLVSSQWVDWASEGIGARDYRHFHAIRVASLPTAVRCSRGSRGTTLPLCRACRSGNEHLYHVVQQCPRTHGGRILRHDAVAKQIAGALSSSGWDVERERLYHMPSDQGKKPDIVAVKPDQSCIILDVQVVNGSLDMEQTWRAKIRKYDTNDLRQAVSELKGVAPNNIRVMAAVV

SEQ ID NO: 24742 - protein, 958 aa, Apolygus lucorum
MDDQTDRPHNPRQPIGSRGIRGGAQRRPRQGRRPSSPSSSSSSSLPSSSSTASLDHQCAHCERAFTSRSGLGVHVRRKHPVAANAAIEIERVQPRYASEDLRRMAADEVVAVRNGVRNINVYLSERFPTRTVIAIKNLRLKPHYKQLVQEAILANSGGASPASPVAGVDQQSAIQYPSPGTSGLLADLKTEVLRLGGQVGRIEGYESTYLQDLARRAAEGLDNLEDKVAAYLGRIFPRVGDATVTQHQGRPPPRVVLRGGCRAAKQARRQEYHRVQSLWRKHPARVAAEVLEEPGEDQVQPPLQEFVDFWEPLLSAPSHNPEERVVPPVSTRDSLRSILSSPVLLDEAHKCRVKNSTSAGPDGISARRWNKAPNTIKLLILNLLMLAGRPPKALTRTRTVFIPKKGGSGPGGYRPISVSSVVFHHFQKVLASRLQVAGVIGDVQRAFRPADGTAENLTVLQTVISLARIKRRQLHLAALDVAKAFDTVSHLALTDCLRGVGAPSRLIEYVACLYHEGVTVLEAGGEVSRDIRIGRGVRQGDPLSPLLFNLVVDTALGKLPTEVGFDLAPGVRVGALAFADDVILLAETREGLQIALNAFAKQLARCGLVVNPDKCGSVSLVPSGRQHKVKVVDGGFVIGQSPIPSRSVLEVWRYLGVDFMGVATITTSRVDLGRALARVTKAPLKPQQKLRLLRTYLLPKLTYGLVFGRLTAGRLQELDREIRSAVRSWLRFPPGVPSAYFHAPVKSGGLGIVSLSACIPSLRRQRLLALRGSSWEVARAAADLDFVRQQLAWCDRATPSAPKPSSSAEFAAALHESVDGKELRQCSESLVSSQWVDWASEGIGARDYRHYHAVRMATLPTAVRCSRGSRGTTLPLCRACRSGNEHLYHVVQQCPRTHGGRILRHDAVAKQIAGALSSSGWDVERERDCITCQVTRVRSPTSLPSSPTSLALSWMSKL

SEQ ID NO: 24743 - protein, 966 aa, Apolygus lucorum
MAADEALAVRNGVRNINVYLNEHFPSRTVIAIKNIRLKPHYKQLVQEAILANSSGASPASPVADVEQQPAIQYPSPGSSGLLADLKTEVLRLGGQVGRIEGYDSAYLQDLARRAVEGPDNLEDDVAAYLGRTFPRVGDATVMQHQGGRPPTVVLHGGRRAAKQARRRRYQRVQRLWKHPARVATEVLEEPGEDQVEPSLQEFVDFWEPLLSAPSHNPGERVVPPVSTRDSLRRIMCAPVLLDEAHRCRVKNSTSAGPDGVSARRWNKAPNTIKLLILNLLLLAGRPPKALTRSRTVFIPKKGGSGPGGYRPISISSVVFRHFQKVLASRLQVAGVIGDVQRAFRPADGTAENLTVLQTVISLARMKRRQLHLAALDVAKAFDTVSHLALTDCLRGVGAPSRLIEYVACLYHEGVTVLEAGGEMSRDVLIGRGVRQGDPLSPLLFNLVVDTALGKLPTEVGFDLAPGVRVGALAFADDVILLAETREGLQIALNAFAKQLARCGLVVNPDKCGSVSLVPSGRQHKVKVVDGGFVVGQSPIPSRSVLEVWRYLGVDFMGVATITASRVDLGRALERVTKAPLKPQQKLRLLRTYLLPKLTYGLVFGRLTAGRLQELDRKVRSAVRSWLRFPPGVPSAYIHAPVKSGGLGIVSLSASIPSLRRQRLLALQGSSWEVARAAADLDFVRQQLAWCDRATPSAPKPSSSAEFAAALHESVDGKELRQCSESPISSQWVDWASEGIGARDYQHFHAVRVASLPTAVRCSRGSRGTTLPLCRACRSGNEHLYHVVQQCPRTHGGRILRHDAVAKQIAGALSSSGWDVERERLYHMPSDQGKKPDIVAVKPDQSCIILDVQVVNGSLDMEQTWRAKIRKYDRNDLRQAVSELKGVAPNNIRVMAATLSWRGVWCGKSATELRELGISVGVLRGITTRVLLGSYLNWWSFYRGTSLHPSLPPPPSSASLIPRAGVG

SEQ ID NO: 24744 - protein, 1070 aa, Apolygus lucorum
MENNIRQPHNPRQPIGSRGIRGGAQRRPRQGRRPSSPSSSSSSSLPSSSSTASLDHQCAHCERAFTSRSGLGVHVRRKHPVAANDEINIERVQPRYASEDLRRMAADEVVAVRNGVRNINVYLSERFPTRTVIAIKNLRLKPHYKQLVQEAILANSGGASPASPIAGVDQQSAIQYPSPGTSGLLADLKTEVLRLGGQVGRIEGYESTYLQDLARRAAEGLDNLEDEVAAYLRRIFPRVGDATVTRHQGRPPPRVVLRGGRRAAKQARGREYHRVQSLWRKHPARVAAEVLEEPGEDQVQPPLQEFVDFWEPLLSAPSHNPGERVVPPVSTRDSLRSILSLPVLLDEAHKCRVKNSTSAGPDGVSARRWNKAPNTIKLLILNLLMLAGRPPKALTRTRTVFIPKKGGSGPGGYRPISVSSVVFRHFQKVLASRLQVAGVIGDVQRAFRPADGTAENLTVLQTVISLARIKRRQLHLAALDVAKAFDTVSHLALTDCLRGVGAPSRLIEYVACLYHEGVTVLEAGGEVSRDIRIGRGVRQGDPLSPLLFNLVVDTALGKLPTEVGFDLAPGVRVGALAFADDVILLAETREGLQIALNAFAKQLARCGLMVNPDKCGSVSLVPSGRQHKVKVVDGGFVIGQSPIPSRSVLEVWRYLGVDFMGVATITTSRVDLGRALARVTKAPLKPQQKLRLLRTYLLPKLTYGLVFGRLTAGRLQELDREIRSAVRSWLRFPPGVPSAYFHAPVKSGGLGIVSLSACIPSLRRQRLLALQGSSWEVARAAADLDFVRQQLAWCDRATPSAPKPSSSAEFAAALHESVDGKELRQCSESLVSSQWVDWASEGIGARDYRHYHAVRMATLPTAVRCSRGSRGTTLPLCRACRSGNEHLYHVVQQCPRTHGGRILRHDAVAKQIAGALSSSGWDVERERLYHMPSDQGKKPDIVAVKPDQSCIILDVQVVNGSLDMEQTWRAKIRKYDRDDLRQAVSELKGVAPNNIRVMAATLSWRGVWCGKSATELRELGISVGVLRGITSRVLLGSYLNWWSFYRGTSLHPSLPPPPSSSSLIPRAGVG

SEQ ID NO: 24745 - protein, 1069 aa, Apolygus lucorum
MENLTEPHNPRRPIGSRGIRGGAQRRPRQGRRPSSPSSSSSSSLPSSSSTASLDHQCAHCERAFTSRSGLGVHVRRKHPVAANEEIDVERVQPRYASEDLRRMAAVEVVAVRNGVRNINVYLSERFPTRTVIAIKNIRLKPHYKQLVQEAILANSSGASPASPVAGVDQQSAIQYPSPGTSGLLANLKTKVLRLGGQVGRIEGYESTYLQDLARRAAEGLDNLEDMVAAYLGRIFPRVGDATVTQHQGGPPPRVVLRGGRRAAKLARRREYHRVQSLWRKHPARAAAEVLEEPGEDQVQPPLQEFVDFWEPLLSAPSHNPGERVVPPVSTRDSLRSILCSPVLLDEAHKCRVRNSTSAGPDGVSARRWNKAPNTIKLLVLNLLMLAGRPPKALTRTRTVFIPKKGGSGPGGYRPISVSSVVFRHFQKVLASRLQVAGVIGDVQRAFRPADGTAENLTVLQTVISLARIKRRQLHLAALDVAKAFDTVSHLALTDCLRGVGAPSRLIEYVACLYHEGVTVLEAGGEVSGDVRIGRGVRQGDPLSPLLFNLVVDTALGKLPTEVGFDLAPGVRVGALAFADDVILLAETREGLQIALNAFAKQLSRCGLVVNPDKCGSVSLVPSGRQHKVKVVDGGFVIGQAPIPSRSVLEVWRYLGVDFVGVATITASRVDLGRALARITKAPLKPQQRLRLLRTYLLPKLTYGLVFGRLTAGRLQELDREVRSAVRSWLRFPPGVPSAYIHAPVKSGGLGIVSLSACIPSLRRQRLLALQGSSWEVARVAAGLDFVRQQLAWCDRATPSAPKPSSSAEFAAALHESVDGKELRQCSESLISSQWVDWASEGIGARDYRNFHAVRVATLPTAVRCSRGSRGVTDTLCRACRSGNEHLYHVVQQCPRTHGGRILRTDAVAKQIAGALSSSGWDVERERLYHMPSDQGKKPDIVAVKPDRSCIILDVQVVNGSMDMEQTWRAKIRKYDRDDLRQAVSELKGVAPNNIRVMAATLSWRGVWCGKSATELRELGISVGVLRGVTRRVLLGSYLNWWSFYRGTSLHPSLPPPPSSSSLIPRAGVG

SEQ ID NO: 24746 - protein, 1070 aa, Apolygus lucorum
MDNNSTRPHNPRQPIGSRGIRGGAQRRPRQGRRPSSPSSSSSSSLPSSSSTASLDHQCAHCERAFTTRSGLGVHIRRKHPIAANDEIDVERVQPRYASEDLRRMAADEVVAVRNGVRNINVYLSERFPTRTVIAIKNLRLKPHYKQLVQEAILANSGGASPASPIAGVDQQSAIQYPSPGTTGLLADLKTEVLRLGGQVGRIEGYESTYLQDLARRAAEGLDNLEDKVAAYLGRIFPRVGDATVTQHQGGPPPREELRGGRRAAKQARRREYHRVQSLWRKHPARVAAEVLEEPGEDQVQPPLQEFVDFWEPLLSAPSHNPGERVVPPVSTRDSLRSILCSPVLLDEAHKCLVKNSTSAGPDGVSARRWNKVPNTIKLLILNLLILAGRPPKALTRTPTVFIPKKGGSGPGGYRPISVSSVVFRHFQKVLASRLQVAGVIGDVQRAFRPADGTAENLTVLQTVISLARIKRRQLHLAALDVAKAFDTVSHLALTDCLRGVGAPSRLIEYVACLYREGVTVLEAGGEVSRDIVIGRGVRQGDPLSPLLFNLVVDTALGKLPSEVGFDLAPGVRVGALAFADDVILLAETREGLQIALNAFAKQLSRCGLVVNPDKCGSVSLVPSGRQHKVKVVDGGFVIGQAPIPSRSVLEVWRYLGVDFMGVATITASRVDLGRALARVTKAPLKPQQRLRLLRTYLLPKLTYGLVFGRLTAGRLQELDREVRSAVRSWLRFPPGVPSAYIHAPVKSGGLGIVSLSACIPSLRRQRLLALQGSSWEVARVAAGLDFVRQQLAWCDRATPSAPKPSSSAEFAAALHESVDGKELRQCSESLISSQWVDWASEGIGARDYRNFHAVRVATLPTAVRCSRGSRGMTDTLCRACRSGNEHLYHVVQQCPRTHGGRILRHDAVAKQIAGALSSSGWDVERERLYHMPSDQGKKPDIVAVKPDRSCIILDVQVVNGSMDMEQTWRAKIRKYDRDDLRQAVSELKGVEPNNIRVMAATLSWRGVWCGKSATELRELGISVGVLRGVTRRVLLGSYLNWWSFYRGTSLHPSLPPPPSSSSLIPRAGVG

SEQ ID NO: 24747 - protein, 1070 aa, Apolygus lucorum
MENQQHRPHNPRQPIGSRGIRGGAQRRPRQGSRPSSPSSSSSSSLPSSSSTASLDHQCAHCERAFTSRSGLGVHVRRKHPVAANDEINVERVQPRYASEDLRRMAADEVVAVRNGVRNINVYLSERFPTRTVIAIKNLRLRPHYKQLVQEAILANSGGASPASPIAGVDQQTAIQYPSPGTSGLLADLKTEVLRLGGQVGRIEGYESTYLQDLARRAAEGLDNLEDEVAAYLGRIFPRVGDATVTQHQGRPPPRVVLRGGRRAAKQARRREYHRVQSLWRKHPARVAAEVLEEPGEDQVQPPLQEFVDFWEPLLSAPSHDPGERVVPPVSTRDSLRSILCSPVLLDEAHKCRVKNSTSAGPDGVSARRWNKAPNTIKLLILNLLMLAGRPPKALTRTRTVFIPKKGGSGPGGYRPISVSSVVFRHFQKVLASRLQVAGVIGDVQRAFQPADGTAENLTVLQTVISLARIKRRQLHLAALDVAKAFDTVSHLALTDCLCGVGAPSRLIEYVACLYHEGVTVLEAGGEVSRDILIGRGVRQGDPLSPLLFNLVVDTALGKLPTEVGFDLAPGVRVGALAFADDVILLAETREGLQIALNAFAKQLARCGLVVNPDKCGSVSLVPSGRQHKVKVVDGGFVVGQSPIPSRSVLEVWRYLGVDFMGVATITTSRVDLGRALARVTKAPLKPQQKLRLLRTYLLPKLTYGLVFGRLTAGRLQELDREIRSAVRSWLRFPPGVPSAYFHAPVKSGGLGIVSLSACIPSLRRQRLLALRGSSWEVARAAADLDFVRQQLAWCDRATPSAPKPSSSAEFAAALHESVDGKELRQCSESLVSSQWVDWALEGIGARDYRHFHAVRMATLPTAVRCSRGSRGTTLPLCRACRSGNEHLYHVVQQCPRTHGGRILRHDAVAKQIAGALSSSGWDVERERLYHMPSDQGKKPDIVAIKPDQSCIILDVQVVNGSLDMEQTWRAKIRKYDRDDLRQAVSELKGVAPNNIRVMAATLSWRGVWCGKSATELRELGISVGVLRGITTRVLLGSYLNWWSFYRGTSLHPSLPPPPSSSSLIPRAGVG

SEQ ID NO: 24748 - protein, 844 aa, Apolygus lucorum
MVAAYLGRIFPRVGDATVTQHQGGPPPRVVLRGGRRAAKQARRREYHRVQSLWRKHPARAAAEVLEEPGEDQVQPPLQEFVDFWEPLLSAPSHNPGERVVPPVSTRDSLRSILCSPVLLDEAHKCRVKNSTSAGPDGISARRWNKAPNTIKLLVLNLLMLAGRPPKALTRTRTVFIPKKGGSGPGGYRPISVSSVVFRHFQKVLASRLQVAGVIGDVQRAFRPADGTAENLTVLRTVISLARIKRRQLHLAALDVAKAFDTVSHLALTDCLRGVGAPSRLIEYVACLYHEGVTVLEAGGEVSGDVRIGRGVRQGDPLSPLLFNLVVDTALGKLPTEVGFDLAPGVRVGALAFADDVILLAETREGLQIALNAFAKQLSRCGLVVNPDKCGSVSLVPSGRQHKVKVVDGGFVIGQAPIPSRSVLEVWRYLGVDFMGVATITASRVDLGRALARITKAPLKPQQRLRLLRTYLLPKLTYGLVFGRLTAGRLQELDREVRSAVRSWLRFPPGVPSAYIHAPVKSGGLGIVSLSACIPSLHRQRLLALQGSSWEVARVAAGLDFVRQQLAWCDRATPSAPKPSSSAEFAAALHESVDGKELRQCSESLISSQWVDWASEGIGARDYRNFHAVRVATLPTAVRCSRGSRGVTDTLCRACRSGNEHLYHVVQQCPRTHGGRILRHDAVAKQIAGALSSSCWDVERERLYHMPSDQGKKPDIVAVKPDRSCIILDVQVVNGSMDMEQTWRAKIRKYDRDDLRQAVSELKGVAPNNIRVMAATLSWRGVWCGKSATELRELGISAGVLRGVTRRVLLGSYLNWWSFYRGTSLHPSLPPPPSSSSLIPRAGVG

SEQ ID NO: 24749 - protein, 967 aa, Apolygus lucorum
MAADEVVAVRNGVRNINVYLSERFPTRTVIAIKNLRLKPHYKQLVQEAILANSSGASPASSIAGVDQQSAIQYPSPGTSGLLADLKTEVLRLGGQVGRIEGYESTYLQDLARRAAEGLDNLEDKVAAYLGRIFPRVGDATVTQHQGGPPPRVVLRGGRRAAKQARRREYHRVQSLWRKHPARVAAEVLEEPGEDQVQPLLQEFVDFWEPLLSAPSHNPGERVVPPVSTRDSLRSILCSPVLLDEAHKCRVKNSTSAGPDGVSARRWNKVPNTIKLLILNLLILAGRPPKALTRTRTVFIPKKGGSGPGGYRPISVSSVVFRHFQKVLASRLQVAGVIGDVQRAFQPADGTAENLTVLQTVISLARMKRRQLHLAALDVAKAFDTVSHLALTDCLRGVGAPSRLIEYVACLYRKGVTVLEAGGEVSRDIVIGRGVRQGDPLSPLLFNLVVDTALGKLPTEVGFDLAPGVRVGALAFADDVILLAETREGLQIALNAFAKQLSRCGLVVNPDKCGSVSLVPSGRQHKVKVVDGGFVIGQAPVPSRSVLEVWRYLGVDFMGVATITASRVDLGRALARVTKAPLKPQQRLRLLRTYLLPKLTYGLVFGRLTAGRLQELDREVRSAVRSWLRFPPGVPSAYIHAPVKSGGLGIVSLSACIPSLRRQRLLALQGSSWEVARVAAGLDFVRQQLAWCDRATPSAPKPSSSAEFAAALHESVDGKELRQCSESLISSQWVDWASEGIGARDYRNFHAVRVATLPTAVRCSRGSRGMTDTLCRACRSGNEHLYHVVQQCPRTHGGRILRHDAVAKQIAGALSSSGWDVERERLYHMPSDQGKKPDIVAVKPDRSCIILDVQVVNGSMDMEQTWRAKIRKYDRDDLRQAVSELKGVEPNNIRVMAATLSWRGVWCGKSATELRELGISVGVLHGVTRRVLLGSYLNWWSFYRGTSLHPSLPPPLSSSSLIPRAGVG

SEQ ID NO: 24750 - protein, 1070 aa, Apolygus lucorum
MNQEDDEPHNPRLPIGTRGSRGGAQRRPRQGRRPSSPSSSSSSSLPSSSSTASLSHQCAHCERAFTSRSGLGLHVRRKHPVAANAAIDIERVQHRYASEELRRMAADEALAVRNGVRNINVYLNERFPSRTVIAIKNIRLKPHYKQLVQEAILANSSGASPASPVADVEQQPAIQYPSPGSSGLLADLKTEVLRLGGQVGRIEGYDSANLQDLARRAVEGPDNLEDDVAAYLGRTFPRVGDATVMQHQGGRPPTVVLHGGRRAAKQARRRRYQRVQRLWRKHPARVATEVLEEPGEDQVEPPLQEFVDFWEPLLSAPSHNPGERVVPPVSTRDSLRSIMCAPVLLDEAHRCRVKNSTSAGPDGVSARRWNKAPNTIKLLILNLLLLAGRPPKALTRSRTVFIPKKGGSGPGGYRPISISSVVFRHFQKVLASRLQVAGVIGDVQRAFRPADGTAENLTVLQTVISLARMKRRQLHLAALDVAKAFDTVSHLALTDCLRGVGAPSRLIEYVACLYHEGVTVLEAGGEMSRDVLIGRGVRQGDPLSPLLFNLVVDTALGKLPTEVGFDLAPGVRVGALAFADDVILLAETREGLQVALNAFAKQLARCGLVVNPDKCGSVSLVPSGRQHKVKVVDGGFVVGQSPIPSRSVLEVWRYLGVDFMGVATITASRVDLGRALERVTKAPLKPQQKLRLLRTYLLPKLTYGLVFGRLTAGRLQELDRKVRSAVRSWLRFPPGVPSAYIHAPVKSGGLGIVSLSASIPSLRRQRLLALQGSSWEVARAAADLDFVRQQLAWCDRATPSAPKPSSSAEFAAALHESVDGKELRQCSESPISSQWVDWASEGIGARDYRHFHAVRVASLPTAVRCSRGSRGTTLPLCRACRSGNEHLYHVVQQCPRTHGGRILRHDAVAKQIAGALSSSGWDVERERLYHMPSDQGKKPDIVAVKPDQSCIILDVQVVNGSLDMEQTWRAKIRKYDRNDLRQAVSELKGVAPNNIRVMAATLSWRGVWCGKSATELRELGISVGVLRGITTRVLLGSYLNWWSFYRGTSLHPSLPPPPSSASLIPRAGVG

SEQ ID NO: 24751 - protein, 1095 aa, Apolygus lucorum
MTLWRLGRGPLSTGSLTLHLKRPPFMEQTVREPHNPRQPIGSRGIRGGAQRRPRQGRRPSSPSSSSSSSQPSSSSTASFNHQCAHCERAFTTRFGLGLHVSRKHPVAVNAAIDIERIQHRYASEELRRMAADEAVAVRNGVRNINVYLNERFPMRTVITIKNIRLKPHYKQLVQEAILANSSGASPASPIADVEQQPAIQYPSPGTSGLLADLKTEVLRLGGQVGRIEGYESTYLQDLVRRAAEGLDNLEDEVADYLGRIFPRVGDATVTQHQGGPPPRVVLRGGRRAAKQARRQEYHRVQSLWRKHPARVAAEVLEEPGENQVQPPLQEFVDFWEPLLSAPSHDPGECVVPPVSTRDSLRSIMCSPVLSDEAHKCRVKNSTSAGPDGVSTRRWNKAPKTIKLLILNLLLLAGRPPKALTRTRTVFIPKKGGSGPGGYRPISVSSVVFRHFQKVLASRLQVAGVIGDVQRAFRSADGTAENLTVLQTVISLARIKRRQLHLAALDVAKAFDTVSHLALTDCLRGVGAPSRLIEYVACLYQEGVTVLEAGGEVSGDIRIGRGVRQGDPLSPLLFNLVVDTALGKLPTEVGFDLAPGVRVGALAFADDVILLAETREGLQIALNAFAKQLARCGLVVNPDKCGSVSLVPSGRQHKVKVVDGGFVVGQSPIPSRSVLEVWRYLGVDFMGVATITTSRVDLGRALARVTKAPLKPQQKLRLLRTYLLPKLTYGLVFGRLTAGRLQQLDREVRSAVRSWLKFPPGVPSAYFHAPVKSGGLGIVSLSACIPSLRCRRLLALQGSSWEVARAAADLDFVRQQLAWCDRATPSAPKPSSSAEFAAALHESVDGKELRQCSESLVSSQWVDWASEGIGARDYRHFHAIRVASLPTAVRCSRGSRGTTLPLCRACRSGNEHLYHVVQQCPRTHGGRILRHDAVAKRIAGALSSSGWDVERERLYHMPSDQGKKPDIVAVKPDQSCIILDVQVVNGSLDMEQTWRAKIRKYDTNDLRQAVSELKGVAPNNIRVMAATLSWRGVWCGKSATELRELGISVGVLRGNTTRVLLGSYLNWWSFYRGTSLHPSLPPPPSSSSIIPRAGVG

SEQ ID NO: 24752 - protein, 1091 aa, Apolygus lucorum
MTLWRLGRGPLLPGSLTLLKCASPVMNTNDDEPHNPRRPIGTRGSGGGAQRRPRQGRRPSSPSSSSSSSLPSSSSTASLNHQCAHCERAFTTRSGLGLHVRRKHPVAANAAIEIERVQPRYASEDLRRMAGDEVVAVRSGVRNINVYLSERFPTRTVNAISKLRQRPHYRQLVQDAILANSSGASPASPIAGVEQQPAIQNPSPGTSGLLADLKTEVMRLGGQVGRIEGYESTYLQDLARRAAEGSENLEDEVAAYLGRIFPQVGDATVTQHQRGPPLRMVLRGGRRAAKQARRREYHRVQSLWRKHLARVAAEVLEEPGENQVQPPLQEFVDFWEPLLSAPSHDPGERVVPPVSTRDSLRGIMCSPVLLDEAHKCRVKNSTSAGPDGVSARRWNKAPKTIKLLILNLLLLAGRPPKALTRTRTVFIPKKRGSGPGGYRPISVSSVVFRHFQKVLASRLQVAGVIGDVQRAFRPAENLTVLQTVISLARIKRRQLHLAALDVAKAFDTVSHFALTDCLHGVGAPTRLIEYVACLYHEGVTVLEAGGEMSRDIMIGRGVRQGDPLSPLLFNLVVDTALGKLPTEVGFDLAPGVRVGALAFADDVILLAETREGLQIALNAFAKQLARCGLVVNPDKCGSVSLVPSGRQHKVKVVDGGFVIGQSPIPSRSVLEVWRYLGVDFMGVATITASRVDLGRALARVTKAPLKPQQKLRLLRTYLLPKLTYGLVFGRLTAGRLQELDREVRSAVRSWLKFPPGVPSAYIHAPVKSGGLGIVSLSASIPSLRRQRLLALRGSSWGVARAAADLDFVRQQLAWCDRATPSAPKPSWSAEFAAALHESVDGKELRQCSESLISSQWVDWASEGIGARDYRHFHAVRVACLPTAVRCTRGSRGATLPLCRACRSRSEHLYHVVQQCPRTHGGRILRHDAVAKQIAGALSSSGWDVERERLYHMPSDQGKKPDIVAVKPDQSCIILDVQVVNGSLDMEQTWRAKIRKYDTNDLRQAVSELKGVAPNNIRVMAATLSWRGVWCGKSATELRELGISVGVLRGITTRVLLGSYLNWWSFYRGTSLHPSLPPPPSSSSLIPRAGVG

SEQ ID NO: 24753 - protein, 1075 aa, Apolygus lucorum
MRIPVMEHNPQLPHNPRQPIGSRGIRGGAQRRPRQGRRPSSPSSSSSSSLPSSSSTASLDYQCAHCERAFTSRSGLGVHVRRKHPVAANEEIDIERVQPRYASEDLRRMAADEVVAVRNGVRNINVYLSERFPTRTVIAIKNIRLKPHYKQLVQEAILANSGGASPASPVAGMDQQSAIQYPSPGTSGLLADLKTEVLRLGGQVGRIEGYESTYLQDLARRAAEGLDNLEDMVAAYLGRIFPRVGDATVTQHQGGPPPRVVLRGGRRAAKQARRREYHRVQSLWRKHPARVAAEVLEEPGEDQVQPPLQEFVDFWEPLLSAPSHNPGERVVPPVSTRDSLRSILCSPVLLDEAHKCRVKNSTSAGPDGVSARRWNKAPNTIKLLILNLLMLAGRPPKALTRTRTVFIPKKGGSGHGGYRPISVSSVVFRHFQKVLASRLQVAGVIGDVQRAFRPADGTAENLTVLQTVISLARIKRRQLHLAALDVAKAFDTVSHLALTDCLRGVGAPSRLIEYVACLYHEGVTVLEVGGEVSGDVRIGRGVRQGDPLSPLLFNLVVDAALGKLPTEVGFDLAPGVRVGALAFADDVILLAETREGLQIALNAFAKQLSRCGLVVNPDKCGSVSLVPSGRQHKVKVVDGGFVIGQAPVPSRSVLEVWRYLGVDFMGVATITASRVDLGRALARITKAPLKPQQRLRLLRTYLLPKLTYGLVFGRLTAGRLQELDREVRSAVRSWLRFPPGVPSAYIHAPVKSGGLGIVSLSACIPSLRRQRLLALQGSSWEVARVAAGLDFVRQQLAWCDRATPSAPKPSSSAEFAAALHESVDGKELRQCSESLISSQWVDWASEGIGARDYRNFHAVRVATLPTAVRCSRGSRGMTDTLCRACRSGNEHLYHVVQQCPRTHGGRILRHDAVAKQIAGALSSSGWDVERERLYHMPSDQGKKPDIVAVKPDRSCIILDVQVVNGSMDMEQTWRAKIRKYDRDDLRQAVSELKGVEPNNIRVMAATLSWRGVWCGKSATELRELGISVGVLRGVTRRVLLGSYLNWWSFYRGTSLHPSLPPPPSSSSLIPRAGVG

SEQ ID NO: 24754 - protein, 1070 aa, Apolygus lucorum
MNQEDDEPHNPRLPIGTRGSRGGAQRRPRQGRRPSSPSSSSSSSLPSSSSTASLSHQCAHCERAFTSRSGLGLHVRRKHPVAANAAIDIERVQHRYASEELRRMAADEALAVRNGVRNINVYLNERFPSRTVIAIKNIRLKPHYKQLVQEAILANSSGASPASPVADVEQQPAIQYPSPGSSGLLADLKTEVLRLGGQVGRIEGYDSAYLQDLARRAVEGPDSLEDDVAAYLGRTFPRVGDATVMQHQGGRPPTVVLHGGRRAAKQARRRRYQRVQRLWRKHPARVATEVLEEPGEDQVEPPLQEFVDFWEPLLSAPSHNPGERVVPPVSTRDSLRSIMCAPVLLDEAHRCRVKNSTSAGPDGVSARRWNKAPNTIKLLILNLLLLAGRPPKALTRSRTVFIPKKGGSGPGGYRPISISSVVFRHFQKVLASRLQVAGVIGDVQRAFRPADGTAENLTVLQTVISLARMKRRQLHLAALDVAKAFDTVSHLALTDCLRGVGAPSRLIEYVACLYHEGVTVLEAGGEMSRDVLIGRGVRQGDPLSPLLFNLVVDTALGKLPTEVGFDLAPGVRVGALAFADDVILLAETREGLQIALNAFAKQLARCGLVVNPDKCGSVSLVPSGRQHKVKVVDGGFVVGQSPIPSRSVLEVWRYLGVDFMGVATITASRVDLGRALERVTKAPLKPQQKLRLLRTYLLPRLTYGLVFGRLTAGRLQELDRKVRSAVRSWLRFPPGVPSAYIHAPVKSGGLGIVSLSASIPSLRRQRLLALQGSSWEVARAAADLDFVRQQLAWCDRATPSAPKPSSSAEFAAALHESVDGKELRQCSESPISSQWVDWASEGIGARDYRHFHAVRVASLPTAVRCSRGSRGTTLPLCSACRSGNEHLYHVVQQCPRTHGGRILRHDAVAKQIAGALSSSGWDVERERLYHMPSDQGKKPDIVAVKPDQSCIILDVQVVNGSLDMEQTWRAKIRKYDRNDLRQAVSELKGVAPNNIRVMAATLSWRGVWCGKSATELRELGISVGVLRGITTRVLLGSYLNWWSFYRGTSLHPSLPPPPSSASLIPRAGVG

SEQ ID NO: 24755 - protein, 1070 aa, Apolygus lucorum
MEDTTEMPHNPRQPIGSRGIRGGAQRRPRQGRRPSSPSSSSSSSLPSSSSTASLNHQCAHCERAFTTRSGLGLHIRRKHPVAANDAIDIERIQHRYASEELRRMAADEAVAVRNGVRNINVYLNERFPTRTVIAIKNIRLKPHYKQLVQEAILANSSGASPASPIADVEQQPAIQYPSPGTSGLLADLKTEVLRLGGQVGRIEGYESTYLQDLVRRAAEGLDNLEDEVAAYLGRIFPRVGDATVTQHQGGSPPRVVLRGGRRAAKQARRREYHRVQSLWRKHPARVAAEVLEEPGENQVQPPLQEFVDFWEPLLSAPSHDPGERVVPPVSTRDSLRSILCSPVLLDEAHKCRVKNSTSAGPDGVSARRWNKAPKTIKLLILNLLLLAGRLPKALTRTRTVFIPKKGGSGPGGYRPISVSSVVFRHFQKVLASRLQVAGVIGDVQRAFRPADGTAENLTVLQTVISLARIKRRQLHLAALDVAKAFDTVSHLALTDCLRGVGAPSRLIEYVACLYQEGVTVLEAGGEVSGDIRIGRGVRQGDPLSPLLFNLVVDTALGKLPTEVGFDLAPGVRVGALAFADDVILLAETREGLQIALNAFAKQLARCGLVVNPDKCGSVSLVPSGRQHKVKVVDGGFVVGQSPIPSRSVLEVWRYLGVDFMGVATITTSRVDLGRALARVTKAPLKPQQKLRLLRTYLLPKLTYGLVFGRLTAGRLQQLDREVRSAVRSWLKFPPGVPSAYFHAPVKSGGLGIVSLSACIPSLRRRRLLALQGSSWEVARAAADLDFVRQQLAWCDRATPSAPKPSSSAEFAAALHESVDGKELRQCSESLVSSQWVDWASEGIGARDYRHFHAICVASLPTAVRCSRGSRGTTLPLCRACRSGNEHLYHVVQQCPRTHGGRILRHDAVAKQIAGALSSSGWDVERERLYHMPSDQGKKPDIVAVKPDQSCIILDVQVVNGSLDMEQTWRAKIRKYDRNDLRQAVSELKGVAPNNIRVMAATLSWRGVWCGKSATELRELGISVGVLRGITTRVLLGSYLNWWSFYRGTSLHPSLPPPPSSSSLIPRAGVG

SEQ ID NO: 24756 - protein, 1070 aa, Apolygus lucorum
MDEHLTEPHNPRRPIGTRGSRGGAQRRPRQGRRPSSPSSSSSSSLPSSSSTASLDHQCAHCERAFTSRSGLGVHVRRKHPVAANEEINVERVQPRYASEDLRRMAADEVVAVCNGVRNINVYLSERFPTRTVIAIKNLRLKPHYKQLVQDAILANSSGASPASPVAGGDQQSAIQYPSPGTSGLLADLRTEVSRLGGQVGRIEGYESTYLQDLARRAVEGLDNLEDKVAAYLGRIFPRVGDATVTQHQGGPPPRVVLRGGRRAAKQARRREYHRVQSLWRKHPARVAAEVLEEPGEIQVQPPLQEFVDFWEPLLSAPSHNPGERVVPPVSTRDSLRSILCLPVLLDEAHKCRVKNSTSAGPDGISARRWNKAPNTIKLLILNLLILAGRPPKALTRTRTVFIPKKGGSGPGGYRPISVSSVVFRHFQKVLASRLQVAGVIGDVQRAFRPADGTAENLTVLQTVISLARIKRRQLHLAALDVAKAFDTVSHLALTDCLRGVEAPSRLIEYVACLYHEGVTVLKAGGEVSGDIRIGRGVRQGDPLSPLLFNLVVDTALGKLPTEVGFDLAPGVRVGALAFADDVILLAETREGLQIALNAFAKQLSRCGLVVNPDKCGSVSLVPSGRQHKVKVVDGGFVIGQAPIPSQSVLEVWRYLGVDFMGVATITASRVDLGRALARITKAPLKPQQRLRLLRTYLLPKLTYGLVFSRLTARRLQELDREVRSAVRSWLRFPPGVPSAYIHAPVKSGGLSIVSLSACIPSLRRQRLLALQGSSWEVARVAAGLDFVRQQLAWCDRATPSAPKPSSSAEFAAALHESVDGKELRQCSESLISSQWVDWASEGIGARDYRNFHAVRVATLPTAVRCSRGSRGMTDTLCRACRSGNEHLYHVVQQCPRTHGGRILRHDAVAKQIAGALSSSGWDVERERLYHMPSDQGKKPDIVAVKPNRSCIILDVQVVNGSMDMEQTWRAKIRKYDRDDLRQAVSELKGVAPNNIRVMAATLSWRGVWCGKSATELRELGISVGVLRGVTRRVLLGSYLNWWSFYRGTSLHPSLPPPPSSSSLIPRAGVG

SEQ ID NO: 24757 - protein, 1070 aa, Apolygus lucorum
MDYNHQLPHNPRQPIGSRGIRGGAQRRPRQGHRPSSPSSSSSSSLPSSSSTASLDHQCAHCERAFTSRSGLGVHVRRKHPVAANAAIEIERVQPRYASEDLRRMAADEVVAVRNGVRNINVYLSERFPTRTVIAIKNLRLKPHYKQLVQEAILANSGGASPASPVAGVDQQSAIQYPSPGTSGLLADLKTEVLRLGGQVGRIEGYESTYLQDLARRAAEGLDNLEDEVAAYLGRIFPRVGDATVAQHQGGPPPRVVLRGGRRAAKQARRREYHRVQSLWRKHPARVAAEVLEEPGEDQVQPPLQEFVDFWEPLLSAPSHNPGERVVPPVSTRDSLRSILCSPVLLDEAHKCRVKNSTSAGPDGISARRWNKAPNTIKLLILNLLMLAGRPPKALTRTRTVFIPKKGGSGPGGYRPISVSSVVFRHFQKVLASRLQVAGVIGDVQRAFRPADGTAENLTVLQTVISLARIKRRQLHLAALDVAKAFDTVSHLALTDCLRGVRAPSRLIEYVACLYHEGVTVLEAGGEVSGDVRIGRGVRQGDPLSPLLFNLVVDTALGKLPTEVGFDLAPGVRVGALAFADDVILLAETREGLQIALNAFAKQLSRCGLVVNPDKCGSVSLVPSGRQHKVKVVDGGFVIGQAPIPSRSVSEVWRYLGVDFMGVATITASRVDLGRALARITKAPLKPQQRLRLLRTYLLPKLTYGLVFGRLTAGRLQELDREVRSAVRSWLRFPPGVPSAYIHAPVKSGGLGIVALSACIPSLRRQRLLALQGSSWEVARVAAGLDFVRQQLAWCDRATPSAPKPSSSAEFAAALHESVDGKELRQCSESLISSQWVDWASEGIGARDYRNFHAVRVATLPTAVRCSRGSRGMTDTLCRACRSGNEHLYHVVQQCPRTHGGRILRHDAVAKQIAGALSSSGWDVERERLYHMPSDQGKKPNIVAVKPDRSCIILDVQVVNGSMDMEQTWRAKIRKYDRDDLRQAVSELKGVAPNNIRVMAATLSWRGVWCGKSATELRELGISVGVLCGVTRRVLLGSYLNWWSFYRGTSLHPSLPPPPSSSSLIPRAGVG

SEQ ID NO: 24758 - protein, 1070 aa, Apolygus lucorum
MNQNVTEPHNPRRPIGTRGSGGGAQRRPRQGRRPSSPSSSSSSSLPSSSSTASLNHQCAHCERAFTTRSGLGLHVRRKHPVAANAAIEIERVQPRYASEDLRRMAADEAVAVRSGVRNINVYLNERFPARTVNAISKLRQRPHYKQLVQEAILANSSGASPASPIADVEQQPAIQNPSPGTSGLLADLKTEVLRLGGQVGRIEGYESTYLQDLARRAAEGSENLEDEVAAYLGRIFPRVGDATVTQHQRGPPLRMVLRGGRRAAKQARRREYHRVQSLWRKHPARVAAEVLEEPGDDQVQPPLQEFVNFWEPLLSAPSHDPGERVVPPVSTRDSLRSIMCSPVLLDEAHKCRVKNSTSAGPDGVSARRWNKAPKTIKLLILNLLLLAGRPPKALTRARTVFIPKKGGSGPGGYRPISVSSVVFRHFQKVLASRLQVAGVIGDVQRAFRPADGTAENLTVLQTVISLARIKRRQLHLAALDVAKAFDTVSHLALTDCLRGVGAPSRLIEYVACLYHEGVTVLEAGGEVSRDIVIGRGVRQGDPLSPLLFNLVVDTALGKLPTEVGFDLAPGVRVGALAFADDVILLAETREGLQIALNAFAKQLARCGLVVNPDKCGSVSLVPSGRQHKVKVVDGGFVIGQSPIPSRSVLEVWRYLGVDFMGVATITASRVDLGRALARVTKAPLKPQQRLRLLRTYLLPKLTYGLVFGRLTAGRLQELDREVRSAVRSWLKFPPGVPSSYIHAPVKSGGLGIVSLSASIPSLRRQRLLALRGSSWGVARAAADLDFVRQQLAWCDRATPSAPKPSSSAEFAAALHESVDGKELRQCSESLISSQWVDWASEGIGARDYRHFHAVRVASLPTAVRCSRGSRGTTLPLCRACRGGSEHLYHVVQQCPRTHGGRILRHDAVAKQIAGALSSSGWDVERERLYHMPSDQGKKPDIVAVKPDQSCIILDVQVVNGSLDMEQTWRAKIRKYDTNDLRQAVSELKGVAPNNIRVMAATLSWRGVWCGKSATELRELGISVGVLRGITTRVLLGSYLNWWSFYRGTSLHLSLPPPPSSSSLIPRAGVG

SEQ ID NO: 24759 - protein, 1093 aa, Apolygus lucorum
MTLWRLGRGPLLTGSLTLHSKRPPPVMNEENDEPHNPRRPIGTRGSRGGAQRRPRQGRRPSSPSSSSSSSLPSSSSTASLNHQCAHCERAFTTRSGLGLHVRRKHPVAANAAIDIERVQHRYASEELRRMAADEVVAVLDGVRNINVYLSERFPMRTVIAIKNIRLKPHYKQLVQEAILANSSGASPTSPIADVEQRPAIQYPSPGTSGLLADLKTEVLRLGGQVGRIEGYESTYLQDLARRAAEGLDNLENEVAAYLGRIFPRVGDATVTQHRGGPPPGVVLRGGRRAAKQARRREYHRVQSLWRKHPARVAAEVLEEPGENQVQPPLQEFVDFWEPLLSAPSHDPGERVVPPVSTRDSIMCAPVLSDEAHKCRVKNSTSAGPDGISARRWNKAPKTIKLLVLNLLLLAGRPLKALTRARTVFIPKKGGSGPGGYRPISVSSVVFRHFQKVLASRLQVAGIIGDVQRAFRPADGTAENLTVLQTVISLARMKRRQLHLAALDVAKAFDTVSHLALTDCLRGVGAPSRLIEYVACLYQEGVTVLEAGGEVSGDVRIGRGVRQGDPLSPLLFNLVVDTALGKLPTEVGFDLAPGVRVGALAFADDVILLAETREGLQIALNAFARQLARCGLVVNPDKCGSVSLVPSGRQHKVKVVDGGFVIGQSPIPSRSVLEVWRYLGVDFMGVATISASRVDLGRALARVTKAPLKPQQKLRLLRTYLLPKLTYGLVFGRLTAGRLQELDRQVRSAVRSWLRFPPGVPSAYVHAPVKSGGLGIVSLSACIPSLRRQRLLALQGSSWEVARAAADLDFVRQHLAWCDRATPSAPKPSSSAEFAAALHESVDGKELRQCSESPVSSQWVDWASEGIGARDYRHFHAVRMATLPTAVRCSRGSRGTTLPLCRACRSGNEHLYHVVQQCPRTHGGRILRHDAVAKQIVGALSSSGWDVERERLYHMPSDQGKKPDIVAVKPDQSCIILDVQVVNGSLDMEQTWRAKIRKYDRNDLRQAVSELKGVAPNNIRVMAATLSWRGVWCGKSATELRELGISVGVLRGITTRVLLGSYLNWWSFYRGTSLHPSLPPPPSSSSLIPRAGVG

SEQ ID NO: 24760 - protein, 1070 aa, Apolygus lucorum
MDETLEQPHNPRQPIGSRGIRGGAQRRPRQGRRPSSPSSSSSSSLPSSSSTASLDHQCAHCERAFTSRSGLGVHVRRKHPVAANAAIELERVQPRYASEDLRRMAADEVVAVRNGVRNINVYLSERFPTRTVIAIKNLRLKPHYKQLVQEAILANSRGASPASPIAGVDQRSAIQYPSPGTSGLLADLKTEVLRLGGQVGRIEGYESTYLQDLARWAAEGLDNLEDMVAAYLGRIFPRVGDATVTQHQGRPSPRVVLRGGRRAAKQARRQEYHRVQSLWRKHPARVAAEVLEEPGEDQVQPPLQEFVDFWEPLLSAPSHNPGERVVPPVSTRDSLRSILCSPVLLDEAHKCRVKNSTSAGPDGVSARRWNKAPNTIKLLILNLLMLAGRPPKALTRTRTVFIPKKGGSGPGGYRPISVSSVVFRHFQKVLASRLQVAGVIGDVQRAFRPADGTAENLTVLQTVISLARIKRQQLHLAALDVAKAFDTVSHLALTDCLHGVGAPSRLIEYVACLYHEGMTVLETGGEVSGDVRIGRGVRQGDPLSPLLFNLVVDTALGKLPAEVGFDLAPGVRVGALAFADDVILLAETREGLQIALNAFAKQLARCGLVVNPDKCGSVSLVPSGRQHKVKVVDGGFVVGQSPIPSRSVLEVWRYLGVDFMGVATITTSRVDLGRALARVTKAPLKPQQKLRLLRTYLLPKLTYGLVFGRLTAGRLQELDRQVRSAVRSWLKFPPGVPSAYFHAPVKSGGLGIVSLSACIPSLRRQRLLALQGSSWEVARAAADLDFVRQQLAWCDRATPSAPKPSSSAEFAAALHESVDGKELRQCSESLVSSQWVDWASEGIGARDYRHFHAVRMATLPTAVRCSRGSRGTTLPLCRACRSGNEHLYHVVQQCPRTHGGRILRHDAVAKQIAGALSSSGWDVERERLYHMPSDQGKKPDIVAVKPDQSCIILDVQVVNGSLDMEQTWRAKIRKYDRDDLRQAVSELKGVVPNNIRVMAATLSWRGVWCGKSATELRELGISVGVLRGITTRVLLGSYLNWWSFYRGTSLHPSLPPPPSSSSLIPRAGVG

SEQ ID NO: 24761 - protein, 1070 aa, Apolygus lucorum
MDETLEQPHNPRQPIGSRGIRGGAQRRPRQGRRPSSPSSSSSSSLPSSSSTASLDHQCAHCERAFTSRSGLGVHVRRKHPVAANAAIEIERVQPRYASEDLRRMAADEVVAVRNGVRNINVYLSERFPTRTVIAIKNLRLKPHYKQLVQEAILANSGGASPASPIAGVDQQSAIQYPSPGTSGLLADLKTEVLRLGGQVGRIEGYESTYLQDLARRAAEGLDNLEDMVAAYLGRIFPRVGDATVTQHQGRPSPRVVLRGGRRAAKQARWQEYHRVQSLWRKHPARVAAEVLEEPGEDQVQPPLQEFVDFWEPLLSAPSHNPGERVVPPVSTRDSLRSILCSPVLLDEAHKCRVKNSTSAGPDGVSARHWNKAPNTIKLLILNLLMLAGRPPKALTRTRTVFIPKKGGSGPGGYRPISVSSVVFRHFQKVLASRLQVAGVIGDVQRAFRLADGTAENLTVLQTVISLARIKRRQLHLAALDVAKAFDTVSHFALTDCLRGVGAPSRLIEYVACLYHEGVTVLEAGGEVSGDVRIGRGVRQGDPLSPLLFNLVVDTALGKLPTEVGFDLAPGVRVGALAFADDVILLAETHEGLQIALNAFAKQLARCGLVVNPDKCGLVSLVPSGRQHKVKVVDGGFVVGQSPIPSRSVLEVWRYLGVDFMGVATITTSRVDLGRALARVTKAPLKPQQKLRLLRTYLLPKLTYGLVFGRLTAGRLQELDRQVRSAVRSWLKFPPGVPSAYFHAPVKSGGLGIVSLSACIPSLRRQRLLALQGSSWEVARAAADLDFVRQQLAWCDRATPSAPKPSSSAEFAAALHESVDGKELRQCSESLVSSQWVDWASEGIGARDYRHFHAVRMATLPTAVRCSRGSRGTTLPLCRACRSGNEHLYHVVQQCPRTHGGRILRHDAVAKQIAGALSSSGWDVERERLYHMPSDQGKKPDIVAVKPDQSCIILDVQVVNGSLDMEQTWRAKIRKYDRDDLRQAVSELKGVVPNNIRVMAATLSWRGVWCGKSATELRELGISVGVLRGITTRVLLGSYLNWWSFYRGTSLHPSLPPPPSSSSLIPRAGVG

SEQ ID NO: 24762 - protein, 1070 aa, Apolygus lucorum
MEQNINEPHNPRQPIGSRGIRGGAQRRPRQGRRPSSPSSSSSSSLPSSSSTASLNHQCAHCERAFTTRSGLGLHIRRKHPVAANAAIDIERIQPRYASEELRRMAADEAVAVRNGVRNINVYLNERFPTRTVIAIKNIRLKPHYKQLVQEAILANSSGASPASPIAAVEQQPAIQYPSPWTSGLLADLKTEVLRLGGQVGRIEGYESTYLQDLVRRAVEGLDNLEDEVAAYLGRIFPRVGDATVTRHQGGTPPRMVLRGGRRAAKQARRREYHRVQSLWRKHPARVAAEVLEEPGENQVQPPFQEFVDFWEPLLSAPSHDPGECVVPPVSTRDSLRSIMCSPVLSDEAHKCRVRNSTSAGPDGVSARRWNKAPKTIKLLILNLLLLAGRPPKALTRTRTVLIPKKGGSGPGGYRPISVSSVVFRQFQKVLASRLQVAGVIGDVQRAFRPADGTAENLTVLQTVISLARIKRRQLHLAALDVAKAFDTVSHLALTDCLRGVGAPSRLIEYVACLYQEGVTVLEAGGEVSGDIRIGRGVRQGDPLSPLLFNLVVDTALGKLPTEVGFDLAPGVRVGALAFADDVILLAETREGLQIALNAFAKQLAGCGLVVNPDKCGSVSLVPSGRQHKVKVVDGGFVVGQSPIPSRSVLEVWRYLGVDFMGVATITASRVDLGRALARVTKAPLKPQQKLRLLRTYLLPKLTYGLVFGRLTAGRLQELDREVRSAVRSWLKFPPGVPSAYVHAPVKSGGLGIVSLSACIPSLRRRRLLALQGSSWEVARAAADLDFVRQQLAWCDRATPSAPKPSSSAEFAAALHESVDGKELRQCSESLVSSQWVDWASEGIGARDYRHFHAIRVASLPTAVRCSRGGRGTTLPLCRACRSGNEHLYHVVQQCPRTHGGRILRHDAVAKQIAGALSSSGWDVERERLYRMPSDQGKKPDIVAVKPDQSCIILDVQVVNGSLDMEQTWRAKIRKYDTNDLRQAVSELKGVAPNNIRVMAATLSWRGVWCGKSATELRELGISVGVLRGITTRVLLGSYLNWWSFYRGTSLHPSLPPPPSSSSLIPRAGVG

SEQ ID NO: 24763 - protein, 1075 aa, Apolygus lucorum
MRFPVMNTEPTEPHNPRQPIGSRGIRGGAQRRPRQGRRPSSPSSSSSSSLPSSSSTASLNHQCAHCERAFTTRSGLGLHIRRKHPVAANAAIDIERIQPRYASEELRRMAADEAVAVRNGVRNINVYLNERFPTRTVIAIKNIRLKPHYKQLVQEAILANSSGASPASPIADVEQQPAIQYPSPGTSGLLADLKTEVLRLGGQVGRIEGYESTYLQDLVRRAVEGLDNLEDEVAAYLGRIFPRVGDATVTRHQGGPPPRMVLRGGRRAAKQARRREYHRVQSLWRKHPARVAAEVLEEPGENQVQPPLQEFVDFWEPLLSAPSHDPGECVVPPVSTRDSLRSIMCSPVLSDEAHKCRVRNSTSAGPDGVSARRWNKAPKTIKLLILNLLLLAGRPPKALTRTRTVFIPKKGGSGPGGYRPISVSSVVFRHFQKVLASRLQVAGVIGDVQRAFRPADGTAENLTVLQTVISLARIKRRQLHLAALDVAKAFDTVSHLALTDCLRGVGAPSRLIEYVACLYQEGVTVLEAGGEVSGDIRIGRGVRQGDPLSPLLFNLVVDTALGKLPTEVGFDLAPGVRVGALAFADDVILLAETREGLQIALNAFAKQLAGCGLVVNPDKCGSVSLVPSGRQHKVKVVDGGFVVGQSSIPSRSVLEVWRYLGVDFMGVATITASRVDLGRALARVTKAPLKPQQKLRLLRTYLLPKLTYGLVFGRLTAGRLQELDREVRSAVRSWLKFPPGVPSAYVHAPVKSGGLGIVSLSACIPSLRRQRLLALQGSSWEVARAAADLDFVRQQLAWCDRATPSAPKPSSSAEFAAALHESVDGKELRQCSESLLSSQWVDWASEGIGARDYRHFHAIRVASLPTAVRCSRGSRGTTLPLCRACRSGNEHLYHVVQQCPRTHGGRILRHDAVAKQIAGALSSSGWDVERERLYHMPSDQGKKPDIVAVKPDQSCIILDVQVVNGSLDMEQTWRAKIRKYDTNDLRQAVSELKGVAPNNIRVMAATLSWRGVWCGKSATELRELGISVGVLRGITTRVLLGSYLNWWSFYRGTSLHPSLPPPPSSSSLIPRAGVG

SEQ ID NO: 24764 - protein, 909 aa, Apolygus lucorum
MAADEALAVRNGVRNINVYLNERFPSRTVIAIKNIRLKPHYKQLVQEAILANSSGASPASPVADMEQQPAIQYPSPGSSGLLADLKTEVLRLGGQVGRIEGYDSAYLQDLARRAVEGPYNLEDDVAAYLGRTFPRVGDATVMQHQGGRPPTVVLHGGRRAAKQARRRRYQRVQRLWRKHPARVATEVLEEPGEDQVEPPLQEFVDFWEPLLSAPSHNPGERVVPLVSTRDSLRSIMCAPVLLDEAHRCRVKNSTSAGPDGVSARRWNKAPNTIKLLILNLLLLAGRPPKALTRSRTVFIPKKGGSGPGGYRPISISSVVFRHFQKVLASRLQVAGVIGDVQRAFRPVDGTAENLTVLQTVISLARMKRRQLHLAALDVAKAFDTVSHLALTDCLRGVGAPSRLVEYVACLYHEGVTVLEAGGEMSRDVLIGHGVRQGDPLSPLLFNLVVDTALGKLPTEVGFDLAPGVRVGALAFADDVILLAETREGLQIALNAFAKQLARCGLVVNPDKCGSVSLVPSGRQHKVKVVDGGFVVGQSPIPSRSVLEVWRYLGVDFMGVATITASRVDLGGALERVTKAPLKPQQKLRLLRTYLLPKLTYGLVFGRHTAGRLQELDRKVRSAVRSWLRFPPGVPSAYIHAPVKSGGLGIVSLSASIPSLRRQRLLALQGSSWEVARAAADLDFVRQQLAWCDRATPSAPKPSSSAEFAAALHESVDGKELRQCSESPISSQWVDWASEGIGARDYRHFHAIRVASLPTAVRCSRGSRGTTLPLCRACRSGNEHLYHVVQQCPRTHGGRILRHDVVAKQIAGALSSSGWDVERERLYHMPSDQGKKPDIVAVKPDQSCIILDVQVVNGSLDMEQTWRAKIRKYDRNDLRQAVSELKGVAPNNIRVMAAWGVVWEKCHGVA

SEQ ID NO: 24765 - protein, 1087 aa, Apolygus lucorum
MRKREFPCNGHNLHFFHASPSHNPGPLGWTEVVPLGFPGGPLLNFQGWLNDPLATREGTPVNGFPDPSILAPPVMIDEADEPHNPRQPIGSRGIRGGAQRRPRQGRRPSSPSSSSSSSLPSSSSTASLDHQCAHCERAFTSRSGLGVHVRRKHPVAANAAIEIERVQPRYASEDLRRMAADEVVAVRNGVRNINVYLSERFPTRTVIAIKNLRLKPHYKQLVQEAILANSGGASPASPIAGVDQQSAIQYPSPGTSGLLADLKTEVLRLGGQVGRIEGYESTYLQDLARRAAEGLDNLEDMVAAYLGRIFPRVGDATVTRHQGRPPPRVVLRGGRRAAKQARRQEYHRVQSLWRKHPARVAAEVLEEPGEDQVQPPLQEFMDFWEPLLSAPSHNPGERVVPPVSTRDSLRSILCSPVLLDEAHKCRVKNSTSAGHDGVSARRWNKAPNTIKLLILNLLMLAGRPPKALTRTRTIFIPKKGGSGPGGYRPISVSSVVFRHFQKVLASRLQVAGVIGDVQRAFRPADGTAENLTVLQTVISLARIKRRQLHLAALDVAKAFDTVSHFALTDCLRGVGAPSRLIEYVACLYHEGVTVLEAGGEVSGDVRIGRGVCQGDPLSPLHFNLVVDTALGKLPTEVGFDLAPGVRVGALAFADDVILLAETREGLQIALNAFAKQLARCGLVVNPDKCGSVSLVPSGRQHKVKVVDGGFVVGQSPIPSRSVLEVWWYLGVDFMGVATITTSRVDLGRALARVTKAKLKPQQKLRLLRTYLLPKLTYGLVFGRLTAGRLQELDRQVRSAVRSWLKFPPGVPSAYFHAPVKSGGLGIVSLSACIPSLRRQRLLALQGSSWEVARAAADLDFVRQQLAWCDRATPSAPKPSSSAEFAAALHESVDGKELRQCSESLVSSQWVDWASEGIGARDYRHFHAVRMATLPTAVRCSRGSRGMTDTLCRACRSGNEHLYHVVQQCPRTHGGRILRHDAVAKQIAGALSSSGWDVERERLYHMPSDQGKKPDIVAVKPDQSCIILDVQVVNGSLDMEQTWRAKIRKYDRDDLRQAVSELKGVVPNNIRVMAATLSWRGVWCGKSA

SEQ ID NO: 24766 - protein, 906 aa, Apolygus lucorum
MVPNEDHHLRTDSSHCACANVNFLVTEVLRLGGQVGRIEGYESTYLQDLARRAAEGLDNLEDKVAAYLGRIFPRVGDATVTQHQGGPPPRVVLRGGRRAAKQARRQEYHRVQSLWRKHPARVAAEVLEEPGEDQVQPPLQEFVDFWEPLLSAPSHNPGERVVPPVSTRDSLRSILCSPVLLDEAHKCRVKNSTSAGPDGVSARRWNKVPNTIKLLILNLLILAGRPPKALTRTRTVFIPKKGGSGPGGYRPISVSSVVFRHFQKVLASRLQVAGVIGDVQRAFRPADGTAENLTVLQTVISLARIKRRQLHLAALDVAKAFDTVSHLALTDCLRGVGAPSRLIEYVACLYREGVTVLEAGGEVSRDIVIGRGVRQGDPLSPLLFNLVVDTALGKLPTEVGFDLAPGVRVGALAFADDVILLAETREGLQIALNAFAKQLSGCGLVVNPDKCGSVSLVPSGRQHKVKVVDGGFVIGQAPIPSRSVLEVWRYLGVDFMGVATITASRVDLGRALARVTKAPLKPQQRLRLLRTYLLPKLTYGLVFGRLTAGRLQELDREVRSAVRSWLRFPPGVPSAYIHAPVKSGGLGIVSLSACIPSLRRQRLLALQGSSWEVARVAAGLDFVRQQLAWCDRATPSAPKPSSSAEFAAALHESVDGKELRQCSESLISSQWVGWASEGIGARDYRNFHAVRVATLPTAVRCSRGSRGMTDTLCRACRSGNEHLYHVVQQCPRTHGGRILRHDAVAKQIAGALSSSGWDVERERLYHMPSDQGKKPDIVAVKPDRSCIILDVQVVNGSMDMEQTWRAKIRKYDRDDLRQAVSELKGVEPNNIRVMAATLSWRGVWCGKSATELRELGISVGVLRGVTRRVLLGSYLNWWSFYRGTSLHPSLPPPPSSSSLIPRAGVG

SEQ ID NO: 24767 - protein, 1028 aa, Apolygus lucorum
MDDNLTEPHNPRRPIGTRGSRGGAQRRPRQGRRPSSPSSSSSSSLPSSSSTASLDHQCAHCERAFTSRSGLGVHVRRKHPVAANEEIDIERVQPRYAPEDLRRMAADEVVAVRNGVRNINVYLSERFPTRTVIAIKNLRLKPHYKQLVQEAILANSGGAPPASPVAGMDQQSAIQYPSPGTSGLLADLKTEVLRLGGQVGRIEGYESTYLQDLARRAAEGLDNLEDEVAAYLGRIFPRVGDATVTQHQGGPPPRVVLRGGRRAAKQARRREYHRVQSLWRKHPARVAAEVLEEPGEDQVQPPLQEFVDFWEPLLSAPSHNPGERVVPPVSTRDSLRGILCSPVLLDEAHKCRVKNSTSAGPDGVSARRWNKAPNTIKLLLLNLLMLAGRPPKALTRTRTVFIPKKGGSGPGGYRPISVSSVVFRHFQKVLASRLQVAGVIGDVQRAFRPADGTAENLTVLQTVISLARIKRRQLHLAALDVAKAFDTVSHLALTDCLRGVGAPSRIIEYVACLYHEGVTVLEAGGEVSGDVRIGRGVRQGDPLSPLLSNLVVDTALGKLSTEVGFDLAPGVRVGALAFADDVILLAETREGLQIALNAFAKQLSRCGLVVNPHKCGSVSLVPSGRQHKVKVVDGGFVIGQAPIPSRSVLEVWRYLGVDFMGVATITASRVDLGRALARITKAPLKPQQRLRLLRTYLLPKLTYGLVFGRLTAGRLQELDREVRSAVRSWLRFPPGVPSAYIHAPVKSGGLGIVALSACIPSLRRQRLLALQGSSWEVARVAAGLDFVRQQLAWCDRATPSAPKPSSSAEFAAALHESVDGKELRQCSESLISSQWVDWASEGIGARDYRNFHAVRVATLPTAVRCSRGSRGMTDTLCPACRSGNEHLYHVVQQCPRTHGGRILRHDAVAKQIAGALSSSGWDVERERLYHMPSDQGKKPDIAAVKPDRSCIILDVQVVNGSMDMEQTWRAKIRKYDRDDLRQAVSELKGVAPNNIRVMAATLSWRGVWCGKSATELRELGIAYCSAHI

SEQ ID NO: 24768 - protein, 1095 aa, Apolygus lucorum
MTLWRLGRGPLSTGSLTLHLKRPPIMEQTVREPHNPRQPIGSRGIREGAQRPPRQGRRPSSPSSSSSSSQPSSSSTASLNHQCAHCERAFTTRSGLGLHVRRKHPVAANAAIDIERIQHRYASEELRRMAADEAVAVRNGVRNINVYLNERFPTRTVIAIKNIRLKPHYKQLVQEAILANSSGASPASPIADVEQQPAIQYPSPGTSGLLADLKTEVLRLGGQVGRIEGSESTYLHDLVRRAAEGLDNLEDEVAAYLGRIFPRVGDVTVTQHQGGPPPRVVLRGGRRAAKQARRQEYHRVQSLWRKHPTRVAAEVLEEPGENQVQPPFQEFVDFWEPLLSAPSHDPGECVVPPVSTRDSLRSIMCSPVLSDEAHKCRVKNSTSAGPDGVSARRWNKAPKTIKLLILNLLLLAGRPPKALTRTWTVFIPKKGGSGPGGYRPISVSSVVFRHFQKVLASRLQVAGVIGDVQRAFRSADGTAENLTVLQTVISLARIKRRQLHLAALDVAKAFGTVSHLALTDCLRGVRAPSRLIEYVACLYQEGVTVLEAGGEVSGDIRIGRGVRQGDPLSPLLFNLVVDTALGKLPTEVGFDLAPGVRVGALAFADDVILLAETREGLQIALNAFAKQLARCGLVVNPDKCGSVSLVPSGRQHKVKVVDGGFVVGQSPIPSRSVLEVWRYLGVDFMGVATITTSRVDLGRALARVTKAPLKPQQKLRLLRTYLLPKLTYGLVFGRLMAGRLQQLDREVRSAVRSWLKFPPGVPSAYFHAPVKSGGLGIVSLSACIPSLRRRRLLALQGSSWEVARAAADLDFVRQQLAWCDRATPSAPKPSSSAEFAAALHESVDGKELRQCSESLVSSQWVDWASEGIGARDYRHFHAIRVASLPTAVRCSRGSRGTTLPLCRAYRSGNEHLYHVVQQCPRTHGGRILRHDAVAKQIAGALSSSGWDVERERLYHMPSDQGKKPDIVAVKPDQSCIILDVQVVNGSLDMEQTWRAKIRKYDTNDLRQAVSELKGVAPNNIRVMAATLSWRGVWCGKSATELRELGISVGVLRGITTRVLLGSYLNWCSFYRGTSLHPSLPPPPSSSSLIPRAGVG

SEQ ID NO: 24769 - protein, 1070 aa, Apolygus lucorum
MEENPALPHNPRQPIGSRGIRGGAQRRPRQGRRPSSPSSSSSSSLPSSSSTASLNHQCAHCERAFSTRSGLGLHVRRKHPVAANAAIDIERIQHRYASEELRRMAADEVVAVCNGVRNINVYLSERFPMRTVIAIKNIRLKPHYKQLVQEAILANSSGASPASPIADVEQQSAIQYPSPGTSGLLADLKTEVMRLGGQVGRIEGYESAYLQDLVRRAAEGLDNLEDEVAAYLGRIFPRVEDTTVTQHQGGPPPRVMLRGGRRAAKQARRREYHRVQSLWKKHPARVAAEVLEEPGENQVQPPLQEFVDFWEPLLSAPSHDPGERVVPPVSTRDSLRGIMCLPVLSDEAHKCRVRNSTSAGPDGISARRWNKAPKTIKLLILNLLLLAGRPPKALTRARTVFIPKKGGSGPGGYRPISVSSVVFRHFQKVLASRLQVAGVIGDVQRAFRPADGTAENLTVLQTVISLARIKRRQLHLAALDVAKAFDTVSHLALTDCLRGVGAPSRLIEYVACLYQEGVTVLEAGGEVSGDVRIGRGVRQGDPLSPLLFNLVVDTALGKLPTEVGFDLAPGVRVGALAFADDVILLAETREGLQIALNAFAKQLARCRLVVNPDKCGSVSLVPSGRQHKVKVVDGGFVVGQSPIPARSVLEVWRYLGVDFMGVATITASRVDLGRALARVTKAPLKPQQKLRLLRTYLLPKLTYGLVFGRLTAGRLQELDREVRSAVRSWLRFPPGVPSAYVHAPVKSGGLGIVSLSACIPSLRRQRLLALQGSSWEVARAAADLDFVRQQLAWCDRATPPAPKPSSSAEFAAALHESVDGKELRQCSESLVSSQWVDWASEGIGARDYRHFHAVRVAALPTAVRCSRGSRGTTLPLCRACRSGNEHLYHVVQQCPRTHGGRILRHDAVAKQIAGALSSSGWDVERERLYHMPSDRGKKPDIVAVKPDQSCIILDVQVVNGSLDMEQTWRAKIRKYDRDDLRQAVSELKGVAPNNIRVMAATLSWRGVWCGKSATELRELGISVGVLRGITTRVLLGSYLNWWSFYRGTSLHPSLPPPPSSSSLIPRAGVG

SEQ ID NO: 24770 - protein, 967 aa, Apolygus lucorum
MAADEAVAVRNGVRNINVYLNERFPTRTVIAIKNIRLKPHYKQLVQEAILANSSGASPASPIADVEQQPAIQYPSPGTSGLLADLKTEVLRLGGQVGRIEGYESTYLQDLVRRAAEGLDNLEDEVAAYLGRIFPRVGDATVTQHQGGPPPRVVLRGGRRAAKQTRRREYHRVQSLWRKHPARVAAEVLEEPGENQVQPPLQEFVDFWEPLLSAPSHDPGERVVPPVSTRDSLRSIMCSPVLSDEAHKCRVKNSTSAGPDGVSARRWNKAPKTIKLLILNLLLLAGRPPKALTRTRTVFIPKKGGSGPGGYRPISVSSVVFRHFQKVLASRLQVAGVIGDVQRAFRSADGTAENLTVLQTVISLARIKRRQLHLAALDVAKAFDTVSHLALTDCLRGVGAPSRLIEYVACLYQEGVMVLEAGGEVSGDIRIGRGVRQGDPLSPLLFNLVVDTALGKLPTEVGFDLAPGVRVGALAFADDVILLAETREGLQIALNAFAKQLARCGLVVNPDKCGSVSLVPSGRQHKVKVVDGDFVIGQSPIPSRSVLEVWQYLGVDFMGVATITTSRVDLGRALARVTKAPLKPQQKLRLLRTYLLPKLTYGLVFGRLTAGRLQQLDREVRSAVRSWLKFPPGVPSAYFHAPVKSRGLGIVSLSACIPSLRRRRLLALQGSSWEVARAAADLDFVRQQLAWCDRATPSAPKPSSSAEFAAALHESVDGKELRQCSESLVSSQWVDWASEGIGARDYRHFHAIRVASLPTAVRCSRGSRGTTLPLCRACRSGNEHLYHVVQQCPRTHGGRILRHDAVAKQIAGALSSSGWDVERERLYHMPSDHGKKPDIVAVKPDQSCIILDVQVVNGSLDMEQTWRAKIRKYDTNDLRQAVSELKGVAPNNIRVMAATLSWRGVWCGKSATELRELGISVGVLRGITTRVLLGSYLNWWSFYRGTSLHPSLPPPPSSSSLIPRAGVG

SEQ ID NO: 24771 - protein, 1095 aa, Apolygus lucorum
MTLWRLGRGPLLTGSLTLHHKRPPVMEQNINEPHNPRQPIGSRGIRGGAQRRPRQGRRPSSPSSSSSSSLPSSSSTASLNHQCAHCERAFTTRSGLGLHIRRKHPVAANAAIDIERIQPRYASEELRRMAADEAVAVRNGVRNINVYLNERFPTRTVIAIKNIRLKPHYKQLVQEAILANSSGASPASPIADVEQQPAIQYPSPGTSGLLADLKTEVLRLGGQVGRIEGYESTYLQDLVRRAVEGLDNLEDEVAAYLGRIFPRVGDATVTRHQGGPPPRMVLRGGRRAAKQARRREYHRVQSLWRKHPARVAAEVLEEPGENQVQPPLQEFVDFWEPLLSAPSHDPGECVVPPVSTRDSLRSIMCSPVLTDEAHKCRVRNSTSAGPDGVSARRWNKAPKTIKLLILNLLLLAGRPPKALTRTRTVFIPKKGGSGSGGYRPISVSSVVFRHFQKVLASRLQVAGVIGDVQRAFRPADGTAENLTVLQTVISLARIKRRQLHLAALDVAKAFDTVSHLALTDCLRGVGAPSRLIEYVACLYQEGVTVLEAGGEVSGDIRVGRGVRQGDPLSPLLFNLVVDTALGKLPTEVGFDLAPGVRVGALAFADDVILLAETREGLQIALNAFAKQLAGCGLVVNPDKCGSVSLVPSGRQHKVKVVDGGFVVGQSPIPSRSVLEVWWYLGVDFMGVATITASRVDLGRALARVTKAPLKPQQKLRLLRTYLLPKLTYGLVFGRLTAGRLQELDREVRSAVRSWLKFPPGVPSAYVHAPVKSGGLGIVSLSACIPSLRRRRLLALQGSSWEVARAAADLDFVRQQLAWCDRATPSAPKPSSSAEFAAALHESVDGKELRQCSESLVSSQWVDWASEGIGARDYRHFHAIRVASLPTAVRCSRGGRGTTLPLCRACRSGNEHLYHVVQQCPRTHGGRILRHDAVAKQIAGALSSSGWDVERERLYHMPSDQGKKPDIVAVKPDQSCIILDVQVVNGSLDMEQTWRAKIRKYDTNDLRQAVSELKGVAPNNIRVMAATLSWRGVWCGKSATELRELGISVGVLRGITTRVLLGSYLNWWSFYRGTSLHPSLPPPPSSSSLIPRAGVG

SEQ ID NO: 24772 - protein, 977 aa, Apolygus lucorum
MDETLEQPHNPRQPIGSRGIRGGAQRRPRQGRRPSSPSSSSSSSLPSSSSTASLDHQCAHCERAFTSRSGLGVHVRRKHPVAANAAIEIERVQPRYASEDLRRMAADEVVAVRNGVRNINVYLSERFPTRTVIAIKNLRLKPHYKQLVQEAILANSGGASPASPIAGVDQQSAIQYPSPGTSGLLADLKTEVLRLGGQVGRIEGYESTYLQDLARRAAEGLDNLEDMVAAYLGRIFPRVGDATVTRHQGRPSPRVVLRGGRRAAKQARRQEYHRVQSLWRKHPARVAAEVLEEPGEDQVQPPLQEFVDFWEPLLSAPSHNPGERVVPPVSTRDSLRSILCSPVLLDEAHKCRVKNSTSAGPDGVSARRWNKAPNTIKLLILNLLMLARRPPKALTRTRTVFIPKKGGSGPGGYRPISVSSVVFRHFQKVLASRLQVAGVIGDVQRAFRPADGTAENLTVLQTVISLARIKRRQLHLAALDVAKAFDTVSHFALTDCLRGVGAPSRLIEYVACLYHEGVTVLEAGGEVSGDVRIGRGVRQGDPLSPLLFNLVVDTALGKLPTEVGFDLAPGVRVGALAFADDVILLAETREGLQIALNAFAKQLARCGLVVNPDKCGSVSLVPSGRQHKVKVVDGGFVVGQSPIPSRSVLEVWRYLGVDFMGVATITTSRVDLGRALARVTKAPLKPQQKLRLLRTYLLPKLTYGLVFGRLTAGRLQELDRQVRSAVRSWLKFPPGVPSAYFHAPVKSGELGIVSLSACIPSLRRQRLLALQGSSWEVARAAADLDFVRQQLAWCDRATPSAPKPSSSAEFAAALHESVDGKELRQCSESLVSSQWVDWASEGIGARDYRHFHAVRMATLPTAVRCSRGSRGTTLPLCRACRSGNEHLYHVVQQCPRTHGGRILRHDAVAKQIAGALSSSGWDVERERLYHMPSDQGKKPDIVAVKPDQSCIILDVQVVLSAPCPMAAWTWSRLGGLR

SEQ ID NO: 24773 - protein, 1095 aa, Apolygus lucorum
MTLWRIGREPLSTGSLTLHLKRPPVLDQTDNMPHNPRLPIGTRGSRGGAQRRPRQGRRPSSPSSSSSSSQPSSSSTASLNHQCAHCERAFTTRSGLGLHVRRKHPVAANAAIDIERVQHRYASEELRRMAADEVVAVRDGVRNINVYLSERFPMRTVIAIKNIRLKPHYKQLVQEAILANSSGASPASPIADVEQQPAIQYPSPGTSGLLADLKTEVLRLGGQVGRIEGYESTYLQDLARRAAEGLDNLENEVAAYLGKIFPRVGDATVTQHQGGPPPRVVLRGGRRAAKQARRREYHRVQSLWRKHPARVAAEVLEEPGENQVQPPLQEFVDFWEPLLSAPSHDPGERVVPPVSTRDSLRSIMCSPVLFDEAHKCRIKNSTSAGPDGISARRWNKAPKTIKLLVLNLLLLAGRPPKALTRARTVFIPKKGGSGPGGYRPISVSSVVFRHFQKVLASRLQVAGIIGDVQRAFRPADGTAENLTVLQTVISLARMKRRQLHLAALDVAKAFDTVSHLALTDCLRGVGAPSRLIEYVACLYQEGVTVLEAGGEVSGDVRIGRGVRQGDPLSPLLFNLVVDTALGKLPTEVGFDLAPGVRVGALAFADDVILLAETREGLQIALNAFAKQLARCGLVVNPDKCGSVSLVPSGRQHKVKVVDGGFVIGQSPIPSRSVLEVWRYLGVDFMGVATISASRVDLGRALARVTKAPLKPQQKLRLLRTYLLPRLTYGLVFGRLTAGRLQELDRQVRSAVRSWLRFPPGVPSAYVQAPVKSGGLGIVSLSACIPSLRRQRLLALQGSSWEVARAAADLDFVRQQLAWCDRATPSAPKPSSSAEFAAALHESVDGKELRQCSESPVSSQWVDWASEGIGARDYRHFHAVRVATLPTAVRCSRGSRGTTLPLCRACRSGNEHLYHVVQQCPRTHGGRILRHDAVAKQIAGALSSSGWDVERERLYHMPSDQGKKPDIVAVKPDQSCIILDVQVVNGSLDMEQTWRAKIRKYDRNDLRQAVSELKGVAPNNIRVMAATLSWRGVWCGKSATELRELGISVGVLRGITTRVLLGSYLNWWSFYRGTSLHPSLPPPPSSSSLIPRAGVG

SEQ ID NO: 24774 - protein, 1083 aa, Apolygus lucorum
MGSLTLHFKRPPVMENNQEMPHNPRLPIGTRGSRGGAQRRPRQGRRPSSPSSSSSSSLPSSSSTASLNHQCAHCERAFTTRSGLGLHVRRKHPVAANAAIDIERVQHRYASEELRRMAADEVVAVRSGVRNINVYLSERFPMRTVIAIKNIRLKPHYKQLVQEAILANSGGASPASPIADVEQRPAIQYPSPGTSGLLADLKTEVLRLRGQVGRIEGYESTYLQDLARRAAEGLDNLENEVAAYLGRIFPRVGDATVTQHQGRPPPRVVLRGGRRAAKQARRREYHRVQSLWRKHPARVAAEVLEEPGENQVQPPLQEFVDFWEPLLSAPSHDPGERVVPPVSTRDSLRRVMCSPVLFDEAHKCRVKNSTSAGPDGISARRWNKAPKTIKLLVLNLLLLAGRPPKALTRARTVFIPKKGGSGPGGYRPISVSSVVFRHFQKVLASRLQVAGIIGDVQRAFRPADGTAENLTVLQTVISLARMKRRQLHLAALDVAKAFDTVSHLALTDCLRGVGAPSRLIEYVACLYQEGVTVLEAGGEVSGDVRIGRGVRQGDPLSPLLFNLVVDTALGKLPTEVGFDLAPGVRVGALAFADDVILLAETREGLQIALNAFAKQLARCGLVVNPDKCGSVSLVPSGRQHKVKVVDGGFVIGQSPIPSRSVLEVWRYLGVDFMGVATISASRVDLGRALARVTKAPLKPQQKLRLLRTYLLPKLTYGLVFGRLTAGRLQELDRQVRSAVRSWLRFPPGVPSAYVHAPVKSSGLGIVSLSACIPSLRRQRLLALQGSSWEVARAAADLDFVRQQLAWCDRATPSAPKPSSSAEFAAALHESVDGKELRQCSESPVSSQWVDWASEGIGARDYRHFHAVRIATLPTAVRCSRGSRGTTLPLCRACRSGNEHLYHVVQQCPRTHGGRILRHDAVAKQIAGALSSSGWDVERERLYHMPSDQGKKPDIVAVKPDQSCIILDVQVVNGSLDMEQTWRAKIRKYDRNDLRQAVSELKGVAPNNIRVMAATLSWRGVWCGKSATELRELGISVGVLRGITTRVLLGSYLNWWSFYRGTSLHPSLPPPPSSSSLIPRAGVG

SEQ ID NO: 24775 - protein, 1070 aa, Apolygus lucorum
MEYQPDQPHNPRQPIGSRGIRGGAQRRPRQGRRPSSPSSSSSSSLPSSSSTASLDHQCAHCERAFTSRSGLGVHVRRKHPVAANDEINVERVQPRYASEDLRRMAADEVVAVRNGVRNINVYLSERFPTRTVIAIKNLRLKPHYKQLVQEAILANSGGASPASPIADVDQQSAIQYPSPGTSGLLADLKTEVLRLGGQVGRIEGYESTYLQDLARQAAEGLDNLEDEVAAYLGRIFPRVGDATVTRHQGRPPPRVVLRGGRRAAKQARRREYHRVQSLWRKHPARAAAEVLEEPGEDQVQPPLQEFVDFWEPLLSAPSHNPGERVVPPVSTRDSLRSILCSPVLLDEAHKCRVKNSTSAGPDGVSARRWNKAPKTIKLLILNLLMLAGRPPKALTRTRTVFIPKKGGSGPGGYRPISVSSVVFRHFQKVLASRLQVAGVIGDVQRAFRPEDGTAENLTVLQTVISLARIKRRQLHLAALDVAKAFDTVSHLALTDCLRGVGAPSRLIEYVACLYHEGVTVLEAGGEVSRDIRIGRGVRQGDPLSPLLFNLVVDTALGKLPTEVGFDLAPGVRVGALAFADDVILLAETREGLQIALNAFAKQLARCGLVVNPDKCGSVSLVPSGRQHKVKVVDGGFVVGQSPIPSRSVLEVWRYLGVDFMGVATITTSRVDLGRALARVTKAPLKPQQKLRLLRTYLLPKLTYGLVFGRLTAGRLQELDREIRSAVRSWLRFPPGVPSAYFHAPVKSGGLGIVSLSAFIPSLRRQRLLALQGSSWEVARAAADLDFVRQQLAWCDRATPSAPKPSSSAEFAAALHESVDGKELRQCSESLVSSQWVDWASEGIGARDYRHFHAVRMATLPTAVRCSRGSRGTTLPLCRACRSGNEHLYHVVQQCPRTHGGRILRHDAVAKQIAGALSSSGWDVERERLYHMPSDQGKKPDIVAAKPDQSCIILDVQVVNGSLDMEQTWRAKISKYDRGDLRQAVSELKGVAPNNIRVMAATLSWRGVWCGKSATELRELGISVGVLRGITTRVLLGSYLNWWSFYRGTSLHPSLPPPPSSSSLIPRAGVG

SEQ ID NO: 24776 - protein, 1076 aa, Apolygus lucorum
MKRPPVMETTEEEPHNPRQPIGSRGIRGGAQRRPRQGRRPSSPSSSSSSSLPSSSSTASLNHQCAHCERAFTTRSGLGLHIRRKHPVAANDAIDIERIQHRYASEELRRMAADEAVAVRNGVRNINVYLNERFPTRTVIAIKNIRLKPHYKQLVQEAVLANSSGASPASPIADVEQQPAIQYPSPGTSGLLADLKTEVLRLGGQVGRIEGYESTYLQDLVRRAAEGLDNLEDEVAAYLGRIFPRVGDATVTQHQGGPPPRVVLRGGRRAAKQARRREYHRVQSLWRKHPAHVAAEVLEEPGENQVQPPLQEFVDFWEPLLSAPSHDPGERVVPPVSTRDSLRSILCSPVLLDEAHKCRVKNSTSAGPDGVSARRWNKAPKTIKLLILNLLLLAGRPPKALTRTRTVFIPKKGGSGPGGYRPISVSSVVFRHFQKVLASRLQVAGVIGDVQRAFRPADGTAENLTVLQTVISLARIKRRQLHLAALDVAKAFDTVSHLALTDCLRGVGAPSRFIEYVACLYQEGVTVLEAGGEVSGDIRIGRGVRQGDPLSPLLFNLVVDTALGKLPTEVGFDLAPGVRVGALAFADDVILLAETREGLQIALNAFAKQLARCGLVVNPDKCGSVSLVPSGRQHKVKVVDGGFVVGQSPIPSRSVLEVWRYLGVDFMGVATITTSRVDLGRALARVTKAPLKPQQKLRLLRTYLLPKLTYGLVFGRLTAGRLQQLDREVRSAVRSWLKFPPGVPSAYFHAPVKSGGLGIVSLSACIPSLRRRRLLALQGSSWEVARAAADLDFVRQQLAWCDRATPSAPKPSSSAEFAAALHESVDGKELRQCSESLVSSQWVDWASEGIGARDYRHFHAIRVASLPTAVRCSRGSRGTTLPLCRACRSGNEHLYHVVQQCPRTHGGRILRHDAVAKQIAGALSSSGWDVERERLYHMPSDQGKKPDIVAVKPDQSCIILDVQVVNGSLDMEQTWRAKIRKYERNDLRQAVSELKGVAPNNIRVMAATLSWRGVWCGKSATELRELGISVGVLRGITTRVLLGSYLNWWSFYRGTSLHPSLPPPPSSSSLIPRAGVG

SEQ ID NO: 24777 - protein, 1070 aa, Apolygus lucorum
MEQTNDTPHNPRLPIGTRGSRGGAQRRPRQGRRPSSPSSSSSSSLPSSSSTASLDHQCAHCERAFTSRSGLGVHVRRKHPVAANEAIDVERVQPRYASEDLRRMAADEVVAVRNGVRNINVYLSERFPTRTVIAIKNLRLKPHYKQLVQEAILANSGGASPASPVAGVDQQSAIQYPSPGTSGLLADLKTEVLRLGGQVGRIEGYESTYLQDLARRAAEGLDNLEDEVAAYLGRIFPGVEDATVTQHQGGPPPRVVLRGGRRAAKQARRREYHRVQSLWRKHPARVAAEVLEEPGEDQVQPPLQEFVDFWEPLLSAPSHNPGERVVPPVSTRDSLRGILCSPVLLDEAHKCRVKNSTSAGPDGVSARRWNKAPNTIKLLILNLLILAGRPPKALTRTRTVFIPKKGGSGPGGYRPISVSSVVFRHFQKVLASRLQVAGVIGDVQRAFRPADGTAENLTVLQTVISLARIKRRQLHLAALDVAKAFDTVSHHALTDCLRGVGAPSRLIEYVACLYHEGVTVLEAGGEVSGDVRIGRGVRQGDPLSPLLFNLVVDTALGKLPTEVGFDLAPGVRVGALAFADDVILLAETREGLQIALNAFAKQLSRCGLVVNPDKCGSVSLVPSGRQHKVKVVDGGFVIGQAPIPSRSVLEVWRYLGVDFMGVATITASRVDLGRALARITKAPLKPQQRLRLLRTYLLPKLTYGLVFGRLTAGRLQELDREVRSAVRSWLRFPPGVPSAYIHAPVKSGGLGIVSLSACIPSLRRQRLLALQGSSWEVARVAAGLDFVRQQLAWCDRATPSAPKPSSSAEFAAALHESVDGKELRQCSESLISSQWVDWASEGIGARDYRNFHAVRAATLPTAVRCSRGSRGMTDTLCRACRSGNEHLYHVVQQCPRTHGGRILRHDAVAKQIAGALSSSGWDVERERLYHMPSDQGKKPDIVAVKPDRSCIILDVQVVNGSMDMEQTWRAKIRKYDRDDLRQAVSELKGVEPNNIRVMAATLSWRGVWCGKSATELRELGISVGVLRGVTRRVLLGSYLNWWSFYRGTSLHPSLPPPPSSSSLIPRAGVG

SEQ ID NO: 24778 - protein, 1070 aa, Apolygus lucorum
MEDTTEMPHNPRQPIGSRGIRGGAQRRPRQGRRPSSPSSSSSSSLPSSSSTASLNHQCAHCERAFTTRSGLGLHIRRKHPVAANAAIDIERIQHRYASEELRRMAADEAVAVRNGVRNINVYLNERFPTRTVIAIKNIRLKPHYKQLVQEAILANSSGASPASPTADVEQQPAIQYPSPGTSGLLADLKTEVLRLGGQVGLIEGYESTYLQDLVRRAAEGLDNLEDEVAAYLGRIFPQVGDATMTRHQGGPPPRVVLRGGRRAAKQARRGEYHRVQSLWRKHQARVAAEVLEEPGENQVQPPLQEFVDFWEPLLSAPSHDPGERVVPPVSTRDSLRSILCSPVLLDEAHKCRVKNSTSAGPDGVSARRWNKAPKTIKLLILNLLLLAGRPPKALTRTRTVFIPKKGGSGPGGYRPISVSSVVFRHFQKVLASRLQVAGVIGDVQRAFRPADGTAENLTVLQSVISVARIKRRQLHLAALDVAKAFDTVSHLALTDCLRGVGAPSRLIEYVACLYQEGVTVLEAGDEVSGDIRIGRGVRQGDPLSPLLFNLVVDTALGKLPTEVGFDLAPGVRVGALAFADDVVLLAETREGLQIALNAFAKQLARCGLVVNPDKCGSVSLVPSGRQHKVKVVDGGFVVGQSPIPSRSVLEVWRYLGVDFMGVATITASRVDLGRALARVTKAPLKPQQKLRLLRTYLLPKLTYGLVFGRLTAGRLQQLDREVRSAVRSWLKFPPGVPSAYIHAPVKSGGLGIVSLSACIPSLRRRRLLALQGSSWEVARAAADLDFVRQQLAWCDRATPSAPKPSSSAEFAAALHESVDGKELRQCSESLVSSQWVDWASEGIGARDYRHFHAIRVASLPTAVRCSRGSRGTTLPLCRACRSGNEHLYHVVQQCPRTHGGRILRHDAVAKQIAGALSSSGWDVERERLYHMPSDQGKKPDIVAVKPDQSCIILDVQVVNGSLDMEQTWRAKIRKYDTNDLRQAVSELKGVAPNNIRVMAATLSWRSVWCGKSATELRELGISVGVLRGITTRVLLGSYLNWWSFYRGTSLHPSLPPPPSSSSLIPRAGVG

SEQ ID NO: 24779 - protein, 967 aa, Apolygus lucorum
MAADEVVAVRNGVRNINVYLSERFPTRTVIAIKNLRLKPHYKQLVQDAILANSSGASPASPVAGVDQQSAIQYPSPGTSGLLADLKTEVLRLGGQVGRIEGYESTYLQDLARRAVEGLDNLEDKVAAYLGKIFPRVGDATVTQHQGGPPPRVVLRGGRRAAKQARRREYHRVQSLWRKHPARVAAEVLEEPEEVQVQPPLQEFVDFWEPLLSAPSHNPGERVVPPVSTRDSLCSILCSPVLLDEAHKCRVKNSTSAGPDGVSARRWNKAPNTIKLLILNLLILAGRPPKALTRTRTVFIPKKGGSGPGGYRPISVSSVVFRHFQKVLASRLQVAGVIGDVQRAFRPADGTAENLTVLQTVISLARIKCRQLHLAALDVAKAFDTVSHLALTDCLRGVGAPSRLIEYVACLYHEGVTVLEAGGEVSGDIRIGRGVRQGDPLSPLLFNLVVDTALGKLPTEVGFDLAPGVRVGALAFADDVILLAETREGLQIALNAFAKQLSRCGLVVNPDKCGSVSLVPSGRQHKVKVVDGGFVIGQAPIPSRSVLEVWRYLGVDFMGVATITASRVVLGRALARITKAPLKPQQRLRLLRTYLLPKLTYGLVFGRLTAGRLQELDREVRSAVRSWLRFPPGVPSAYIHAPVKSGGLGIVSLSACIPYLRRQRLLALQGSSWEVARVAAGLDFVWQQLAWCDRATPSAPKPSSSAEFAAALHESVDGKELRQCSESLVSSQWVDWASEGIGACDYRNFHAVRVATLPTAVRCSRGSRGMKDTLCSACRSRNEHLYHVVQQCPRTHGGRILRHDAVAKQIAGALSSSGWDVERERLYHMPSDQGKKPVIVAVKPDRSSIILDVQVVDGSLDMEQTWRAKMRKYDRDDLRQAVSELKGVEPNNIRVMAATLSWRGVWCGKSATELRELGISVGVLRGVTRRVLLGSYLNWWSFYRGTSLHPSLPPPPSSSSLIPRAGVG

SEQ ID NO: 24780 - protein, 941 aa, Apolygus lucorum
MNVIAIKNIRLKPHYKQLVQEAILANSSGASPASPIADVEQQPAIQYPSPGTSGLLADLKTEVLRLGGQVGRIEGYESTYLQDLVRRAAEGLDNLEDEVAAYLGRIFPQVGDATVTRHQGGPPPRVVLRGGRRAAKQARRREYHRVQSLWRKHPARVAAEVLEEPGENQVQPPLQEFVDFWEPLLSAPSHDPGERVVPSVSTRDSLRSILCLPVLLDEAHKCRVKNSTSAGPDGVSAKRWNKAPKTIKLLILNLLLLAGRPPKALTRTRTVFIPKKGGSGPGGYRPISVSSVVFRHFQKVLASRLQVAGVIGDVQRAFRPANGTAENLTVLQTVISLARIKRRQLHLAALDVAKAFDTVSHLALIDCLRGVGAPSRLIEYVACLYQEGVTVLEAGGEVSGDIRIGGGVRQGDPLSPLLFNLVVDTALGKLPTEVGFDLAPGVRVGALAFADDVILLAETREGLQIAINAFAKQLARCGLVVNPDKCGSVSLVPSGRQHKVKVVDGGFVVGQSPIPSRSVLEVWRYLGVDFMGVATITASRVDLGRALARVTKAPLKPQQKLRLLRTYLLPKLTYGLVFGRLTAGRLQQLDREVRSAVRSWLKFPPGVPSAYIHAPVKSGGLGIVSLSACIPSLRRRRLLALQGSSWEVARAAADLDFVRQQLAWCDRATPSAPKPSSSAEFAAALHESVDGKELRQCSESLVSSQWVDWASEGIGARDYRHYHAIRVASLPTAVRCSRGSRGTTLPLCRACRSGNEHLYHVVQQCPRTHGGRILRHDAVAKQIAGALSSSGWDVERERLYHMPSDQGKKPDIVAVKPDQSCIILDVQVVNGSLDMEQTWRAKIRKYDTNDLRQAVSELKGVAPNNIRVMAATLSWRGVWCGKSATELRELGISVGVLRGITTRVLLGSYLNWWSFYRGTSLHPSLPPPPSSSSHIPRAGVG

SEQ ID NO: 24781 - protein, 1092 aa, Apolygus lucorum
MTLWRQGRGLLSTGSLTLKKKRSPVMEGNSALPHNPRQPIGSRGIRGGAQRRPRQGRRPSSPSSSSSSSLPSSSSTASLNHQCAHCERAFSTRSGLGLHVRRKHPVAANAAIDIERIQHRYASEELRRMAADEVVAVRNGVRNINVYLSERFPMRTVIAIKNIRLKPHYKQLVQEAILANSSGASPASPIADVEQQSAIQYPSPGTSGLLADLKTEVMRLGGQVGRIEGYESAYLQDLVRRAAEGLDNLEDEVAAYLGRIFPRVEDTTVTQHQGGPPPRVMLRGGRRAAKQARRREYHRVQSLWKKHPARVAAEVLEEPGENQVQPPLQEFVDFWEPLLSAPSHDPGERVVPPVSTRDSLRGIMCLPVLSDEAHKCRVRNSTSAGPDGISARRWNKAPKTIKLLILNLLLLAGRPPKALTRARTVFIPKKGGSGPGGYRPISVSSVVFRHFQKVLASRLQVAGVIGDVQRAFRPADGTAENLTVLQTVVSLARIKRRQLHLAALDVAKAFDTVSHLALTDCLRGVGAPSRLIEYVACLYQEGVTVLEAGGEVSGDVRIGRGVRQGDPLSPLLFNLVVDTALGKLPTEVGFDLAPGVRVGALAFADDVILLAETREGLQIALNAFAKQLARCGLVVNPDKCGSVSLVPSGRQHKVKVVDGGFVVGQSPIPARSVLEVWRYLGVDFMGVATITASRVDLGRALARVTKAPLKPQQKLRLLRTYLLPKLTYGLVFGRLTAGRLQELDREVRSAVRSWLRFPPGVPSAYVHAPVKSGGLGIVSLSACIPSLRRQRLLALQGSSWEVARAAADLDFVRQQLAWCDRATPSAPKPSSSAEFAAALHESVDGKELRQCSESLVSSQWVDWASEGIGARDYRHFHAVRVAALPTAVRCSRGSRGTTLPLCRACRSGNEHLYHVVQQCPRTHGGRILRHDAVAKQIAGALSSSGWDVERERLYHMPSDQGKKPDIVAVKPDQSCIILDVQVVNGSLDMEQTWRAKIRKYDRDDLRQAVSELKGVAPNNIRVMAATLSWRGVWCGKSATELRELGISVGVLRGIVIFRIWVSNFGVRVMRNYQSNDLGFMNLKGFMILILKT

SEQ ID NO: 24782 - protein, 1070 aa, Apolygus lucorum
MNQNVTEPHNPRRPIGTRGSGGGAQRRPRQGRRPSSPSSSSSSSLPSSSSTASLNHQCAHCERAFTTRSGLGLHVRRKHPVAANAAIEIERVQPRYASEDLRRMATDEAVAVRSGVRNINVYLRERFPARTVNAISKLRQRPHYKQLVQEAILANSSGASPASPIADVEQQPAIQNPSPGTSGLLADLKTEVLRLGGQVGRIEGYESTYLQDLARRAAEGSENLEDEVAAYLGRIFPRVEDATVMQHQRGPPLRMVLRGGRRAAKQARRREYHRVQSLWRKHPARVAAEVLEEPGDDQVQPPLQEFVNFWEPLLSAPSHDPGERVVPPVSTRDSLRSIMCSPVLLDEAHKCRVKNSTSAGPDGVSARRWNKAPKTIKLLILNLLLLAGRPPKALTRARTVFIPKKGGSGPGGYRPISVSSVVFRHFQKVLASRLQVAGVIGDVQRAFRPADGTAENLTVLQTVISLARIKRRQLHLAALDVAKAFDTVSHLALTDCIRGVGAPSRLIEYVACLYHEGVTVLEAGGEVSRDIVIGRGVRQGDPLSPLLFNLVVDTALGKLPTEVGFDLAPGVRVGALAFADDVILLAETREGLQIALNAFAKQLARCGLVVNPDKCGSVSLVPSGRQHKVKVVDGGFVIGQSPIPSRSVLEVWRYLGVDFMGVATITASRVDLGRALARVTKAPLKPQQRLRLLRTYLLPKLTYGLVFGRLTAGRLQELDREVRSAVRSWLKFPPGVPSSYIHAPVKSGGLGIVSLSASIPSLRRQRLLALRGSSWGVARAAADLDFVRQQLAWCDRATPSAPKPSSSAEFAAALHESVDGKELRQCSESLISSQWVDWASEGIGARDYRHFHAVRVASLPTAVRCSRGSRGTTLPLCRACRGGSEHLYHVVQQCPRTHGGRILHHDAVAKQIAGALSSSGWDVERERLYHMPSDQGKKPDIVAVKPDQSCIILHVQVVNGSLDMEQTWWAKIRKYDTNDLRQAVSELKGVAPNNIRVMAATLSWRGVWCGKRALELRELGISVGVLHGITTRVLLGSYLNWWSFYRGTSLHPSLPPPPSSSSLIPRAGVG

SEQ ID NO: 24783 - protein, 1028 aa, Apolygus lucorum
MRKREFPSTASLSHQCAHCERAFTSRSGLGLHVRRKHPVAANAAIDIERVQHRYASEELRRMAADEVVAVRNGVRNINVYLNERFPSRTVIAIKNIRLKPHYKQLVQEAILANSSGASPASPVADVEQQPAIQYPSPGSSGLLADLKTEVLRLGGQVGRIEGYDSAYLQDLARRAVEGPDNLEDDVAAYLGRTFPRVGDATVMQHRGGRPPTVGLHGGRRAAKQARRRRYQRVQRLWRKHPARVATEVLEEPGEDQVEPPLQEFVDFWEPLLSAPSHNPGERVVPPVSTRDSLRSIMCAPVLLDEAHRCRVKNSTSAGPDGVSARRWNKAPNTIKLLILNLLLLAGRPPKALTRSRTVFIPKKGGSGPGGYRPISILSVVFRHFQKVLASRLQVAGVIGDVQRAFRPADGTAENLTVLQTVISLARMKRRQLHLAALDVAKAFDTVSHLALTDCLRGVGAPSRLIEYVACLYHEGVTVLEAWGEMSRDVLIGRGVRQGDPLSPLLFNLVVDTALGKLPTEVGFDLAPGVRVGALAFADDVILLAETREGLQIALNAFAKQLARCGLVVNPNKCGSVSLVPSGRQHKVKVVDGGFVVGQSPIPSRSVLEVWRYLGVDFMGVATITASRVDLGRALERVTKAPLKPQQKLRLLRTYLLPKLTYGLVFGRLTAGRLQELDRKVRSAVRSWLRFPPGVPSAYIHAPVKSGGLGIVSLSASIPSLRRQRLLALQGSSWEVARAAADLDFVRQQLAWCDRATPSAPKPSSSAEFAAALHESVDGKELRQCSESPISSQWVDWASEGIGARDYRHFHAIRVASLPTAVRCSRGSRGTTLPLCRACRSGNEHLYHVVQQCPRTHGGRILRHDAVAKQIAGALSSSGWDVERERLYHMPSDQGKKPDIVAVKPDQSCIILDVQVVNGSLDMEQTWRAKIRKYDRNDLRQAVSELKGVAPNNIRVMAATLSWRGVWCGKSATELRELGISVGVLRGITTRVLLGSYLNWWSFYRGTSLHPSLPPPPSSSSLIPRAGVG

SEQ ID NO: 24784 - protein, 904 aa, Apolygus lucorum
MRKREFPCKHPSPGTSGLLADLKTEVLRLGGQVGRIEGYESTYLQDLVRRAAEGLDNLENEVAAYLGRIFPRVGDATVTHHQGGPPPRVVLRGGRRAAKQARRREYHRVQSLWRKHPARVAAEVLEEPGENQVQPPLQEFVDFWEPLLSAPSHDPGERVVPPVSTRDSLRSIMCSPVLSDEAHKCRVKNSTSAGPDGISARRWNKAPRTIKLLLLNLLLLAGRPPKALTRTRTVFIPKKGGSGPGGYRPISVSSVVFRHFQKVLASRLQVAGIIGDVQRAFRPADGTAKNLTVLQTVISLARMKRRQLHLAALDVAKAFDTVSHFALTDCLRGVGAPSRLIEYVACLYHEGVTVLEAGGEVSGDVRIGRGVRQGDPLSPLLFNLVVDTALGKLPTEVGFDLAPGVRVGALAFADDVILLAETREGLQIALNAFAKQLARCGLVVNPDKCGSVSLVPSGRQHKVKVVDGGFVIGQSPIPSRSVLEVWRYLGVDFMGVATISASRVDLGRALDRVTKAPLKPQQKLRLLRTYLLPKLTYGLVFGRLTAGRLQELDRQVRSAVRSWLRFPPGVPSAYVHAPVKSGGLGVVSLSACIPSLRRQRLLALQGSSWEVARAAADLDFVRQQLAWCDRATPSAPKPSSSAEFAAALHESVDGKELRQCSESPVSSQWVDWASVGIGARDYRHFHAVRMATLPTAVRCSRGSRGTTLPLCRACRSGNEHLYHVVQQCPRTHGGRILRHDAVAKQIAGALSSSGWDVERERLYHMPSDQGKKPDIVAVKPDQSCIILDVQVVNGSLDMEQTWRAKIRKYDRNDLRQAVSELKGVAPNNIRVMAATLSWRGVWCGKSATELRELGISVGVLRGITTRVLLGSYLNWWSFYRGTSLHPSLPPPPSSSSLIPRAGVG

SEQ ID NO: 24785 - protein, 1070 aa, Apolygus lucorum
MDQTDNMPHNPRLPIGTRGSRGGAQRRPRQGRRPSSPSSSSSSSQPSSSSTASLNHQCAHCERAFTTRSGLGLHVRRKHPVAANAAIDIERVQHRYASEELRRMAADEVVAVRDGVRNINVYLSERFPMRTVIAIKNIRLKPHYKQLVQEAILANSSGASPASPVADVEQQPAIQYPSPGTSGLLADLKNEVLRLGGQVGRIKGYESTYLQDLARRAAEGLDNLENEVAAYLGRIFPRVGDATVTQHQGGPPPRVVLRGGRRAAKQARRREYHRVQSLWRKHPARVAVEVLEEPGENQVQPPLQEFVDFWEPLLSAPSHDPGEPVVPPVSTRDSLRGIMCSPVLSDEAHKCLVKNSTSAGPDGISARRWNKAPKTIKLLVLNLLLLAGRPPKALTRARTVFIPKKGGSGPGGYRPISVSSVVFRHFQKVLASRLQVAGIIGDVQRAFRPADGTAENLTVLQTVISLARMKRRQLHLAALDVAKAFDTVSHLALTDCLRGVGAPSRLIEYVACLYQEGVTVLEAGGEVSGDVRIGRGVRQGDPLSPLLFNLVVDTALGKLPIEVGFDLAPGVRVGALAFADDVILLAETREGLQIALNAFAKQLARCGLVVNPDKCGSVSLVPSGRQHKVKVVDGCFVIGQSPIPSRSVLEVWRYLGVDFMGVATISASRVDLGRALARVTKAPLKPQQKLRLLRTYLLPKLTYGLVFGRLTAGRLQELDRQVRSAVRSWLRFPPGVPSAYVHALVKSGGLGIVSLSACIPSLRRQHLLALQGSSWEVARAAADLDFVRQQLAWCDRATPSAPKPSSSAEFAAALHESVDGKELRQCSESPVSSQWVDWASEGIGARDYRHFHAVRMATLPTAVRCSRGSRGTTLPLCRACRSGNEHLYHVVQQCPRTHGGRILRHDAVAKQIAGALSSSGWDVERERLYHMPSDQGKKPDIVAVKPDQSCIILDVQVVNGSLDMEQTWRAKIRKYDRNDLRQAVSELKGVAPNNIRVMAATLSWRGVWCGKSATELRELGISVGVLRGITTRVLLGSYLNWWSFYRGTSLHPSLPPPPSSSSLIPRAGVG

SEQ ID NO: 24786 - protein, 1079 aa, Apolygus lucorum
MEQTNDTPHNPRLPIGTRGSRGGAQRRPRQGRRPSSPSSSSSSSLPSSSSTASLDHQCAHCERAFTSRSGLGVHVRRKHPVAANEAIDVERVQPRYASEDLRRMAADEVVAVRNGVRNINVYLSERFPTRTVIAIKNLRLKPHYKQLVQEAILANSGGASPASPVAGVDQQSAIQYPSPGTSGLLADLKTEVLRLGGQVGRIEGYESTYLQDLARRAAEGLDNLEDEVAAYLGRIFPRVEDATVTQHQGGPPPRVVLRGGRRAAKQARRREYHRVQSLWRKHPARVAAEVLEEPGEDQVQPPLQEFVDFWEPLLSAPSHNPGERVVPPVSTRDSLRSILCSPVLLDEAHKCRVKNSTSAGPDGVSARRWNKAPNTIKLLILNLLILAGRPPKALTRTRTVFIPKKGGSGPGGYRPISVSSVVFRHFQKVLASRLQVAGVIGDVQRAFRPADGTAENLTVLQTVISLARIKRRQLHLAALDVAKAFDTVSHHALTDCLRGVGAPSRLIEYVACLYHEGVTVLEAGGEVSGDVRIGRGVRQGDPLSPLLFNLVVDTALGKLPTEVGFDLAPGVRVGALAFADDVILLAETREGLQIALNAFAKQLSRCGLVVNPDKCGSVSLVPSGRQHKVKVVDGGFVIGQAPIPSRSVLEVWRYLGVDFMGVATITASRVDLGRALARITKAPLKPQQRLRLLRTYLLPKLTYGLVFGRLTAGRLQELDREVRSAVRSWLRFPPGVPSAYIHAPVKSGGLGIVSLSACIPSLRRQRLLALQGSSWEVARVAAGLDFVRQQLAWCDRATPSAPKPSSSAEFAAALHESVDGKELRQCSESLISSQWVDWASEGIGARDYRNFHAVRAATLPTAVRCSRGSRGMTDTLCRACRSGNEHLYHVVQQCPRTHGGRILRHDAVAKQIAGALSSSGWDVERERLYHMPSDQGKKPDIVAVKPDRSCIILDVQVVNGSMDMEQTWRAKIRKYDRDDLRQAVSELKGVEPNNIRVMAATLSWRGVWCGKVPRSCASWASRWAYSVVSPDASCSAHILTGGLFIEALPFIPLSHPHLPHLPSSLGPASGESWAFSPYF

SEQ ID NO: 24787 - protein, 1070 aa, Apolygus lucorum
MDYNHQLPHNPRQPIGSRGIRGGAQRRPRQGRRPSSPSSSSSSSLPSSSSTASLDHQCAHCERAFTSRSGLGVHVRRKHPVAANAAIEIERVQPRYASEDLRRMAADEVVAVRNGVRNINVYLSERFPSRTVIAIKNLRLKPHYKQLVQEAILANSGGASPASPVAGMDQQSAIQYPSPGTSGLLADLKTEVLRLGGQVGRIEGYESTYLQDLARRAAEGLDNLEDEVAAYLGRIFPRVGDATVAQHQGGPPPRVVLRGGCRAAKQARRREYHRVQSLWRKHPARVAAEVLEEPGEDQVQPPLQEFVDFWEPLLSAPSHNPGERVVPPVSTRDSLRSILCSPVLLDEAHKCRVKNSTSAGPDGVSARRWNKAPNTIKLLILNLLMLAGRPPKALTRTRTVFIPKKGGSGPGGYRPISVSSVVFRHFQKVLASRLQVAGVIGDVQRAFRPADGTAENLTVLQTVISLARIKRRQLHLAALDVAKAFDTVSHLALTDCLRGVGAPSRLIEYVACLYHEGVTVLEAGGEVSGDVRIGRGVRQGDPLSPLLFNLVVDTALGKLPTEVGFDLAPGVRVGALAFADDVILLAETREGLQIALNAFAKQLSRCGLVVNPDKCGSVSLVPSGRQHKVKVVDGGFVIGQAPIPSRSVLEVWRYLGVNFMGVATITASRVDLGRALARITKAPLKPQQRLRLLRTYLLPKLTYGLVFGRLTAGRLQELDREVRSAVRSWLRFPPGVPSAYIHAPVKSGGLGIVALSACIPSLRRQRLLALQGSSWEVARVAAGLDFVRQQLAWCDRATPSAPKPSSSAEFAAALHESVDGKELRQCSESLISSQWVDWASEGIGARDYRNFHAVRVATLPTAVRCSRGSRGMTDTLCRACRSGNEHLYHVVQQCPRTHGGRILRHDAVAKQIAGALSSSGWDVERERLYHMPSDQGKKPDIVAVKPDRSCIILDVQVVNGSMDMEQTWRAKIRKYDRDDLRQAVSELKGVAPNNIRVMAATLSWRGVWCGKSATELRELGISVGVLRGVTRRVLLGSYLNWWSFYRGTSLHPSLPPPPSSSSLIPRAGVG

SEQ ID NO: 24788 - protein, 1125 aa, Apolygus lucorum
MIPYENYHLCTDGSYCACTGGPLLNFQGWLNDPLATREGTPVNGFPDPSILAPPVMIDEADQPHNPRQPIGSRGIRGGAQRRPRQGRRPSSPSSSSSSSLPSSSSTASLDHQCAHCERAFTSRSGLGVHVRRKHPVAANAAIEIERVQPRYASEDLRRMAADEVVAVPNGVRNINVYLSERFPTRTVIAIKNLRLKPHYKQLVQEAILANSGGASPASPIAGVDQQSAIQYPSPGTSGLLADLKTEVLRLGGQVGRIEGYESTYLQDLARQAAEGLDNLEDMVAAYLGRIFPRVGDATVTRHQGRPPPRVVLRGGRRAAKQARRREYHRVQSLWRKHPARVAAEVLEEPGEDQVQPPLQEFVDFWEPLLSAPSHNPGERVVPPVSTRDSLRSILCSPVLLDEAHKCRVKNSTSAGPDGVSARRWNKAPNTVKLLILNLLMLAGRPPKALTRTRTVFIPKKGGSGPGGYRPISVSSVVFRHFQKVLASRLQVAGVIGDVQRAFRPADGTAENLTVLQTVISLARIKRRQLHLAALDVAKAFDTVSHFALTDCLRGVGAPSRLIEYVACLYHEGVTVLEAGGEVSGDVRIGRGVRQGDPLSPLLFNLVVDTALGKLPTEVGFDLAPGVRVGALAFADDVILLAETREGLQIALNAFAKQLARCGLVVNPDKCGSVSLVPSGRQHKVKVVDGGFVVGQSPIPSRSVLEVWRCLGVDFMGVATITTSRVDLGRALARVTKAPLKPQQKLRLLRTYLLPKLTYGLVFGRLTAGRLQELDRQVRSAVRSWLKFPPGVPSAYFHAPVKSGGLGIVSLSACIPSLRRQRLLALQGSSWEVARAAADLDFVRQQLAWCDRATPSAPKPSSSAEFAAALHESVDGKELRQCSESLVSSQWVDWASEGIGARDYRHFHAVRMATLPTAVRCSRGSRGTTLPLCRACRSGNEHLYHVVQQCPRTHGGRILRHDAVAKQIAGALSSSGWDVERERLYHMPSDQGKKPDIVAVKPDQSCIILDVQVVNGSLDMEQTWRAKIRKYDRDDLRQAVSELKGVVPNNIRVMAATLSWRGVWCGKSATELRELGISVGVLRGITTRVLLGSYLNWWSFYRGTSLHPSLPPPPSSSSLIPRAGVG

SEQ ID NO: 24789 - protein, 1070 aa, Apolygus lucorum
MNDNSSQPHNPRQPIGSRGIRGGAQRRPRQGRRPSSPSSSSSSSLPSSSSTTSLDHQCAHCERAFTTRSGLGVHIRRKHPVAANDEIDVERVQPRYASEDLRRMAADEVVAVRNGVRNINVYLSERFPTRTVIAIKNLRLKPHYKQLVQEAILANSGGASPASPIAGVDQQSAIQYPSPGTSGLLADLKTEVLRLGGQVGRIEGYESTYLQDLARRAAEGLDNLEDKVAAYLGRIFPRVGDATVTQHQGGPPPRVVLRGGRRAAKQARRREYHRVQSLWRKHPARVAAEVLEEPGEDQVQPPLKEFVDFWEPLLSAPSHNPGERVVPPVSTRDSLRSILCSPVLLDEAHKCRVKNSTSAGPDGVSARRWNKAPNTIKLLVLNLLILAGRPPKALTRTRTVFIPKKGGSGPGGYRPISVSSVVFRHFQKVLASRLQVAGVIGDVQRAFRPADGTAENLTVLQTVISLARIKRRQLHLAALDVAKAFDTVSHLALTDCLRGVGAPSRLIEYVACLYREGVTVLEAGGEVSRDIVIGRGVRQGDPLSPLLFNLVVDTALGKLPTEVGFDLAPGVRVGALAFADDVILLAETREGLQIALNAFAKQLSRCGLVVNPDKCGSVSLVPSGRQHKVKVVDGGFVIGQAPIPSRSVLEVWRYLGVDFMGVATITASRVDLGRALARVTKAPLKPQQRLRLLRTYLLPKLTYGLVFGRLTAGRLQELDREVRSAVRSWLRFPPGVPSAYIHAPVKSGGLGIVSLSACIPSLRRWRLLALQGSSWEVARVAAGLDFVRQQLAWCDRATPSAPKPSSSAEFAAALHESVDGKELRQCSESLISSQWVDWASEGIGARDYRNFHAVRVATLPTAVRCSRGSRGMTDTLCRACRSGNEHLYHVVQQCPRTHGGRILRHDAVAKQIAGALSSSGWDVERERLYHMPSDQGKKPDIVAVKPDRSCIILDVQVVNGSMDMEQTWRAKIRKYDRDDLRQAVSELKGVEPNNIRVMAATLSWRGVWCGKSATELRELGISVGVLRGVTRRVLLGSYLNWWSFYRGTSLHPSLPPPPSSSSLIPRAGVG

SEQ ID NO: 24790 - protein, 1094 aa, Apolygus lucorum
MTLWRIGREPLSTGSLTLSLRFPVMDKNQTEPHKPRRPIGMRGSRGGAQRRPRQGRRPSSPSSSSSSSLPSSSSTASLDHQCAHCERAFTSRSGLGVHVRRKHPVAANEEINVERVQPRYASEDLRRMAADEVVAVRNGVRNINVYLSERFPTCTVIAIKNLRLKPHYKQLVQEAILANSGGASPASPVAGVDQQSAIQYPSPGTSGLLADLKTEVLRLGGQVGRIEGYESTYLRDLARRAAEGLDNLEDEVAAYLGRIFPRVGDATVTQHQGGPPPRMVLRGGRRAAKQARRQEYHRVQSLWRKHPARVAAEVLEEPGEDQVQPPLQEFVDFWEPLLSAPSHNPGERVVPPVSTRDSLRSILCSPVLHDEAHKCRVKNSTSAGPDGVSARRWNKAPNTIKLLILNLLMLAGRLPKALTRTRTVFIPKKGGSGPGGYRPISVSSVVFRHFQKVLASRLQVAGVIGDVQRAFRPADGTAENLTVLQTVISLARIKRRQLHLAALDVAKAFDTVSHLALTDCLRGVGAPSRLIEYVACLYHEGVKVLEAGGEVSGDVRIGRGVRQGDPLSPLLFNLVVDTALGKLPTEVGFDLAPGVRVGALAFADDVILLAETREGLQIALNAFAKQLSRCGLVVNPNKCGSVSLVPSGRQHKVKVVDGGFVIGQAPIPSRSVLEVWRYLGVDFMEVATITASRVDLGRALARITKAPLKPQQRLRLLRTYLLPKLTYGLVFGRLTAGRLQELDREVRSAVRSWLRFPPGVPSAYIHAPVKSGGLGIVSLSACIPSLRRQRLLALQGSSWEVARVAAGLDFVRQQLAWCDRATPSALKPSSSAEFAAALHELVDGKELRQCSESLISSQWVDWASEGIGARDYRNFHAVRVATLPTAVRCSRGSRGMTDTLCRACRSGNEHLYHVVQQCPRTHGGRILRHDAVAKQIAGALSSSGWDVERERLYHMPSDQGKKPDIVAIKPDRFCIILDVQVVNGSMDMEQTWRAKIRKYDRDDLRQAVSELKGVEPNNIRVMAATLSWRGVWCGKSATELRELGISVGVLRGVTRRVLLGSYLNWWSFYRGTSLHPSLPPPPSSSSLIPRAGVG

SEQ ID NO: 24791 - protein, 1070 aa, Apolygus lucorum
MIDEADEPHNPRQPIGSRGIRGGAQRRPRQGRRPSSPSSSSSSSLPSSSSTASLDHQCAHCERAFTSRSGLGVHVRRKHPVAANAAIEIERVQPRYASEDLRRMAADEVVAVRNGVRNINVYLSERFPTRTVIAIKNLRLKPHYKQLVQEAILANSGGASPASPIAGVDQQSAIQYPSPGTSGLLADLKTEVLRLGGQVGRIEGYESTYLQDLARRAAEGLDNLEDMVAAYLGRIFPRVGDATVTRHQGRPPPRVVLRGGRRAAKQARRREYHRVQSLWRKHPARVAAEVLEEPGEDQVQPPLQEFVDFWEPLLSAPSHNPGERVVPPVSTRDSLRSILCSPVLLDEAHKCRVKNSTSAGPDGVSARRWNKAPNTIKLLILNLLMLAGRPPKALTRTRTVFIPKKGGSGPGGYRPISVSSVVFRHFQKVLASRLQVAGVIGDVQRAFRPADGTAENLTVLQTVISLARIKRRQLHLATLDVAKAFDTVSHFALTDCLRGVGAPSRLIEYVACLYHEGVTVLEAGGEVSGDVRIGRGVRQGDPLSPLLFNLVVDTALGKLPTEVGFDLAPGVRVGALAFADDVILLAETREGLQIALNAFAKQLARCGLVVNPDKCGSVSLVPSGRQHKVKVVDGGFVVGQSPIPSRSVLEVWRYLGVDFMGVATITTSRVDLGRALARVTKAPLKPQQKLRLLRTYLLPKLTYGLVFGRLMAGRLQELDRQVRSAVRSWLKFPPGVPSAYFHAPVKSGGLGIVSLSACIPSLRRQRLLALQGSSWEVARAAADLDFVRQQLAWCDRATPSAPKPSSSAEFAAALHESVDGKELRQCSESLVSSQWVDWASEGIGARDYRHFHAVRMATLPTAVRCSRGSRGTTLPLCRACRSGNEHLYHVVQQCPRTHGGRILRHDAVAKQIAGALSSSGWDVERERLYHMPSDQGKKPDIVAVKPDQSCIILDVQVVNGSLDMEQTWRAKIRKYDRDDLRQAVSELKGVVPNNIRVMAATLSWRGVWCGKSATELRELGISVGVLRGITTRVLLGSYLNWWSFYRGTSLHPSLPPPPSSSSLIPRAGVG

SEQ ID NO: 24792 - protein, 964 aa, Apolygus lucorum
MAADEAVAVRNGVRNINVYLNERFPTRTVIAIKNIRLKPHYKQLVQEAILANSSGASPASPIADVEQQPAIQYPSPGTSGLLADLKTEVLRLGGQVGRIEGYESTYLQDLVRRAAEGLDNLEDEVAAYLGRIFPRVGDATVTRHQGGPPPRVVLRGGRRAAKQARRREYHRVQSLWRKHPARVAAEVLEEPGENQVQPPLQEFVDFWEPLLSAPSHDPGERVVPPVSTRDSLRSILCSPVLLDEAHKCRVKNSTSAGPDGVSARRWNKAPKTIKLLILNLLLLAGRPPKALTRTRTVFIPKKGGSGPGGYRPISVSSVVFRHFQKVLASRLQVAGVIGDVQRAFRPADGTAENLTVLQSVISLARIKRRQLSALDVAKAFDTVSHLALTDCLRGVGAPSRLIEYVACLYQEGVTVLEAGGEVSGDIRIGRGVRQGDPLSPLLFNLVVDTALGKLPTEVGFDLAPGVRVGALAFADDVILLAETREGLQIALNAFAKQLARCGLVVNPDKCGSVSLVPSGRQHKVKVVDGGFVVGQSPIPSRSVLEVWWYLGVDFMGVATITASRVDLGRALARVTKAPLKPQQKLRLLRTYLLPKLTYGLVFGRLTAGRLQQLDREVRSAVRSWLKFPPGVPSAYIHAPVKSGGLGIVSLSACIPSLRRRRLLALQGSSWEVARAAADLDFVRQQLAWCDRATPSAPKPSSSAEFAAALHESVDGKELRQCSESLVSSQWVDWASEGIGARDYRHFHAIRVASLPTAVRCSRGSRGTTLPLCRACRSGNEHLYHVVQQCPRTHGGRILRHDAVAKQIAGALSSSWDVERERLYHMPSDQGKKPDIVAVKPDQSCIILDVQVVNGSLDMEQTWRAKIRKYDTNDLRQAVSELKGVAPNNIRVMAATLSWRGVWCGKSATELRELGISVGVLRGITTRVLLGSYLNWWSFYRGTSLHPSLPPPPSSSSLIPRAGVG

SEQ ID NO: 24793 - protein, 1122 aa, Apolygus lucorum
MVPYENHHLRTDSSHCACANVNSLVTAITITAIREGTSVNGSPDPSLRFPVMDKHLTEPHNPRRPIGTRGSRGGAQRRPRQGRRPSSPSSSSSSSLPSSSSTASLDHQCAHCERAFTSRSGLGVHVRRKHPVAANEEINVERVQPRYASEDLRRMAADEVVAVRNGVRNINVYLSERFPTRTVIAIKNLRLRPHYKQLVQDAILANSSGASPASPVAGVDQQSAIQYPSPGTSGLLADLKTEVLRLGGQVGRIEGYESTYLQDLARRAVEGLDNLEDKVAAYLGRIFPRVGDATVTQHQGGPPPRVVLRGGRRAAKQARRREYHRVQSLWRKHPARVAAKVLEEPGEVQVQPPLQEFVDFWEPLLSAPSHNPGERVVPPVSTRDSLRSILCSPVLLDEAHKCRVKNSTSAGPDGISARRWNKAPNTIKLLILNLLILAGRPPKALTRTRTVFIPKKGGSGPGGYRPISVSSVVFRHFQKVLASRLQVAGVIGDVQRAFWPADGTAENLTVLQTVISLARIKRRQLHLAALNVAKAFDTVSHLALTDCLRGVGAPSRLIEYVACLYHEGVTVLEAGGEVSGDIRIGRGVRQGDPLSPLLFNLVVDTALGKLPTEVGFDLAPGVRVGALAFADDVILLAETREGLQIALNAFAKQLSRCGLVVNPDKCGSVSLVPSGRQHNKVKVVDGGFVIGQAPIPSRSVLEVWRYLGVDFMGVATITASRVDLGRALARITKAPLKPQQRLRLLRTYLLPKLTYGLVFGRLTTGRLQELDREVRSAVRSWLRFPPGVPSAYIHAPVKSGGLGIVSLSACIPSLRRQRLLALQGSSWEVARVAAGLDFVRQQLAWCDRATPSAPKPSLSAEFAAALHESVDGKELRQCSESLISSQWVDWASEGIGARDYRNFHAIRVATLPTAVRCSRGSRGMTDTLCRACRSGNEHLYHVVQQCPRTHGGRILRHDAVAKQIAGALSSSGWDVERERLYHMPSDQGKKPDIVAVKPDRSCIILDVQVVNGSMDMEQTWRAKIRKYDRDDLRQAVSELKGVAPNNIRVMAATLSWRGVWCGKSATELRELGISVGVLRGVTRRVLLGSYLNWWSFYRGTSLHPSLPPPPSSSSLIPRAGVG

SEQ ID NO: 24794 - protein, 572 aa, Apolygus lucorum
MVLQTVISLARIKRRQLHLAALNVAKAYDTVSHLALTDCLRGAPSQLIEYVACLYREGVTVLEAGGEVLRDIVIGPGVRQGDPLSPLLFNLVMDTALGKLPTEVGFDLAPGVRVGALAFADDVILLAETRKGLQIALNAFAKQLSRCGLVVNPDKCGSVSLVLSGRQHKVKVVDGGFVIGQAPIPSRSLLEVWRYLGVDFMGVATITASRVDLGRALACVTKAPLKPQQKLRLLRMYLLLKLTFGLVFGRLMAGRLQELDREVRSAVCSWLRFPPGVPSAYIHRPVKSGGLGIVSLSACTPSLRRQRLLALQGLSWKVARVAAGLDFVRQQLAWCDRATPSAPKPSSSAEFAAALHESVDGKELRQCSESLISSQWVDWASEGIGARDYRNFHAVCMVTLPTVVRCSRGSRGMTDTPCRPCRSGNEHLYHVVRQCPQTHGGRILRHDAVAKQIEGALSSSGWDVERERLYHMPSDQGKKPDIVAVKPDRSCIILDVQVVNGSMDMEQNWRAKIRKYDRDDLRQAVSELKGVEPNNIRVMAATLSCGKSVVVSWASQWAYSVVSPDAYCSDHI

SEQ ID NO: 24795 - protein, 514 aa, Apolygus lucorum
MALGKLPTEVGFDLAPGVRVGALAFADDVILLAETREGLQIALNAFAKQLSRCGLVVNPDKCGSVSLVPSGRQHKVKVVDGGFVIGQAPIPSRSVLEVWRYLGVDFMGVATITASRVDLGRALARVTKAPLKPQQRLRLLRTYLLPKLTYGLVFGRLTAGRLQELDREVRSAVRSWLRFPPGVPSAYIHAPVKSGGLGIVSLSACIPSLRRQRLLALQGSSWEVARVAAGLDFVRQQLAWCDRATPSAPKPSSSAEFAAALHESVDGKELRQCSESLFSSQWVDWASEGIGARDYRNFHVATLPTAVRCSRGSRGMTDTLCRACRSGNEHLYHVVQQCPRTHGGRILRHDAVAKQIAGALSSSGWDVERERLYHMPSDQGKKPDIVAVKPDRSCIILDVQVVNGSMDMEQTWRAKIRKYDRDDLRQAVSELKGVEPNNIRVMAATLSWRGVWCGKSATELRELGISVGVLRGVTRRVLLGSYLNWWSFYRGTSLHPSLPPPPSSSSLIPRAGVG

SEQ ID NO: 24796 - protein, 1015 aa, Apolygus lucorum
MRKREFPLRQGRRPSSPSSSSSSSLPSSSSTASLDHQCAHCERAFTSRSGLGVHVRRKHPVAANEEINVERVQPRYASEDLRRMAADEVVAVRNGVRNINVYLSERFPTRTVIAIKNLRLKPHYKQLVQEAILANSGGASPASPVAGVDQQSAIQYPSPRTSGLLADLKTEVLRLGGQVGRIEGYESTYLRDLARRAAEGLDNLEDEVAAYLGRIFPRVGDATVTQHQGGPPPRMVLRGGRRAAKQARRQEYHRVQSLLRKHPARVAAEVLEEPGEDQVQPPLQEFVDFWEPLLSAPSHNPGERVVPPVSTRDSLRSILCSPVLLDEAHKCRVKNSTSAGPDGVSARRWNKAPNTIKLLILNLLMLAGRPPKALTRTRTVFIPKKGGSGPGGYRPISVSSVVFRHFQKVLASRLQVAGVIGDVQRAFRPADGTAENLTVLQTVISLARIKRRQLHLAALDVAKAFDTVSHLALTDCLRGVGAPSRLIEYVACLYHEGVTVLEAGGEVSGDVRIGRGVRQGDPLSPLLFNLVVDTALGKLPTEVGFDLAPGVRVGALAFADDVILLAETREGLQIALNAFAKQLSRCGLVVNPDKCGSVSLVPSGRQHKVKVVDGGFVIGQAPIPSRSVLEVWRYLGVDFMGVATITASRVDLGRAIARITKAPLKPQQRLRLLRTYLLPKLTYGLVFGRLTAGRLQELDRVRSIVRSWLRFPPGVPSAYIHAPVKSGGLGIVSLSACIPSLRRQRLLALQGSSWEVARVAAGLDFVRQQLAWCDRATPSAPKPSSSAEFAAALHESVDGKELRQCSESLISSQWVDWASEGIGARDYRNFHAVRVATLPTAVRCSRGSRGMTDTLCRACRSGNEHLYHVVQQCPRTHGGRILRHDAVAKQIAGALSSSGWDVERERLYHMPSDQGKKPDIVAVKPDRSCIILDVQVVNGSMDMEQTWRAKIRKYDRDDLRQAVSELKGVEPNNIRVMAATLSWRGVWCGKSATELRELGISVGVLRGVTRRVLLG

SEQ ID NO: 24797 - protein, 1090 aa, Apolygus lucorum
MTLWRIGREPLSTGSLALLNKRPPVMENNPEEPHNPRLPIGPRGSRGGAQRRPRQGRRPSSPSSSSSSSLPSSSSTASLNHQCAHCERAFTTRSGLGLHVRRKHPVAANAAIDIERIQHRYASEELRRMVADEAVAVRNGVRNINVYLSERFPMRTVIAIKNIRLKPHYKQLVQEVILANSSGASPASPVADVEQQPAIQHPSPGTSGLLADLKTEVLRLGGQVGRIEGYESTYLQDLARRAAEGLDNLENEVAAYLGRIFPRVGDATVTHHQGGPPPRVVLRGGRRAAKQARRREYHRVQSLWRKHPARVAAEVLEEPGENQVQPPLQEFVDFWEPLLSAPSHDPGERVVPPVSTRDSLRSIMCLPVLSDEAHKCRVKNSTSAGPDGISARRWNKAPRTIKLLLLNLLLLAGRPPKALTRTRTVFIPKKGGSGPGGYRPISVSSVVFRHFQKVLASRLQVAGIIGDVQRAFRPADGTAENLTVLQTVISLARMKRRQLHLAALDVAKAFDTVSHFALTDCLRGVGAPSRLIEYVACLYHEGVTVLEAGGEVSGDVRIGRGVRQGDPLSPLLFNLVVDTALGKLPTEVGFDLAPGVRVGALAFADDVILLAETREGLQIALNAFAKQLARCGLVVNPDKCGSVSLVPSGRQHKVKVVDGGFVIGQSPIPSRSVLEVWRYLGVDFMGVATISASRVDLGRALDRVTKAPLKPQQKLRLLRTYLLPKLTYGLVFGRLTAGRLQELDRQVRSAVRSWLRFPPGVPSAYVHAPVKSGGLGVVSLSACIPSLRLLALQGSSWEVARAAADLDFVRQQLAWCDRATPSAPKPSSSAEFAAALHESVDGKELRQCSESPVSSQWVDWASEGIGARDYRHFHAVRMATLPTAVRCSRGSRGTTLPLCRACRSGNEHLYHVVQQCLRTHGGRILRHDAVAKQIAGALSSSGWDVERERLYHMPSDQGKKPDIVAVKPDQSCIILDVQVVNGSLDMEQTWRAKIRKYDRNDLRQAVSELKGVAPNNIRVMAATLSWRGVWCGKSATELRELGISVGVLRGITTRVLLGSYLNWWSFYRGTSLHPSLPPPPSSSSLILPHP

SEQ ID NO: 24798 - protein, 1049 aa, Apolygus lucorum
MDNNSTQPHNPRQPIGSRGIRGGAQRRPRQGRRPSSPSSSSSSSLPSSSSTASLDHQCAHCERAFTSRSGLGVHIRRKHPVAANEEIDVERVQPRYASEDLRRMVADEVVAVRNGVRNINVYLSERFPTRTVIAIKNLRLKPHYKQLVQEAILANSSGASPASPVAGVDQQSAIQYPSPGTSGLLADLKTEVLRLGGQVGRIEGYESTYLQDLARRAAEGLDNLEDEVAAYLGRIFPGVGDATVTQHQGGPPPRMVLRGGRRAAKQARRREYHRVQSLWRKHPARVAAEVLEEPGEDQVQPPLQEFVDFWEPLLSAPSHNPGERVVPPVSTRDSLRSILCSPVLLDEAHKCRVKNSTSAGPDGVSARRWNKAPNTIKLLILNLLMLAGRPPKVLTRTRTVFIPKKGGSGPGGYRPISVSSVVFRHFQKVLASRLQVAGVIGDVQRAFRPADGTAENLTVLQTVISLARIKRRQLHLAALDVAKAFDTVSHLALTDCLRGVGAPSRLIEYVACLYHEGVTVLEAGGEVSGDVRIGRGVRQGDPLSPLLFNLVVDTALGKLPTEVGFDLAPGVRVGALAFADDVILLAETREGLQIALNAFAKQLSRWGLVVNPDKCGSVSLVPSGRQHKVKVVDGGFVMGQAPIPSRSVLEVWRYLGVDFMGVATITASRVDLGRALARITKAPLKPQQMLRLLRTYLLPKLTYGLVFGRLTAGRLQELDREVRSAVRSWLRFPPGVPSAYIHAPVKSGGLGIVSLSACIPSLHRQRLLALQGSSWEVARVAAGLDFVRQQLAWCDRATPSAPKPSSSAEFAAALHESVDGKELRQCSESLISSQWVDWASEGIGARDYRNCHAVRVATLPTAVRCSRGSRGMTDTLCRACWSGNEHLYHVVQQCPRTHGWDVERERLYHMPSDQGKKPDIVAVKPDRSCIILDVQVVNGSMDMEQTWRAKIRKYDRDDLRQAVSELKGVEPNNIRVMAATLSWRGVWCGKSATELREVGISVGVLRGVTRRVLLSSYLNWWSFYRGTSLHPSLPPPSSSSSLIPRAGVG

SEQ ID NO: 24799 - protein, 972 aa, Apolygus lucorum
MTLWRLGRGPLLTGSLTLHHKRPPVMEQNINEPHNPHQPIGSRGIRGGAQRRPRQGRRPSSPSSSSSSSLPSSSSTASLNHQCAHCERAFTTRSGLGLHISRKHPVAANAAIDIERIQPRYASEELRRMAADEAVAVRNGVRNINVYLNERFPTRTVIAIKNIRLKPHYKQLVQEAILANSSGASPASPIADVEQQPAIQYPSPGTSGLLADLKTEVLRLRGQVGRIEGYESTYLQDLVRRAVEGLDNLEDEVAAYLGRIFPRVGDATMTRHQGGPPPRMVLRGGRRAAKQARRREYHRVQSLWRKHPARVAAEVLEEPGENQVQPPLQEFVDFWEPLLSAPSHDPGECVVPPVSTRDSLRSIMCSPVLSDEAHKCRVRNSTGVSARRWNKAPKTIKLLILNLLLLAGRPPRALTCTRTVFIPKKGGSGPGGYRPISVSSVVFRHFQKVLASRLQVAGVIGDVQRAFRPADGTAENLTVLQTVISLARIKRRQLHLAALDVAKAFDTVSHLALTDCLRGVGAPSRLIEYVACLYQEGVTVLEAGGEVSGDIRIGRGVRQGDPLSPLLFNLVVDTALGKLPTEVGFDLAPGVRVGALAFADDVILLAETREGLQIALNAFAKQLAKCGLVVNPDKCGSVSLVPSGRQHKVKVVDGGFVVGQSPIPSRSVLEVWRYLGVDFMGVATITASRVDLGRALARVTKAPLKPQQKLRLLRTYLLPKLTYGLVFGRLTAGRLQELDREVRSAVRSWLKFPPGVPSAYVHAPVKSGGLGIVSLSACIPSLRRRRLLALQGSSWEVARAAADLDFVRQQLAWCDRATPSAPKPSSSAEFAAALHESVDGKELRQCSESLVSSQWVDWASEGIGARDYRHFHAIRVASLPTAVRCSRGSRGTTLPLCRACRSGNEHLYHVVQQCPRTHGGRILRHDAVAKQIAGALSSSGWDVERERLYRMPSDQGKKPDIVAVKPDQSCIT

SEQ ID NO: 24800 - protein, 1070 aa, Apolygus lucorum
MEQTVREPHNPRQPIGSRGIRGGAQRHPRQGRRPSSPSSSSSSSQPSSSSTASLNHQCAHCERAFTTRSGLGLHVSRKHPVAANAAIDIERIQHRYASEELCRMAADEAVAVRNGVRNINVYLNERFPTRTVIAIKNIRLKPHYKQLVQEAILANSSGASPASPIADVEQQPAIQYPSPGTSGLLANLKTEVLRLGGQVGRIEGYESTYLQNLVRRAAEGLDNLEDEVAAYLGRIFLRVRDVTVTQHQGGPPPRVVLRGGRRAAKQARRREYHRVQSLWRKHPARVAAEVLEEPGENQVQPPLQEFVDFWEPLLSAPSHDPGECVVPPVSTRDSLRSIMCSPVLSDEAHKCRVKNSTSAGPDGVSARRWNKAPKTIKLLILNLLLLAGRPPKALTRTRTVFIPKKGGSGPGGYRPISVSSVVFRHFQKVLASRLQVAGVIGDVQRAFRSADGTAENLTVLQTVISLARIKRRQLHLAALDVAKAFDTVSHLALTDCLRGVGAPSRLIEYVACLYQEGVTVLEAGGEVSGDIRMGRGVRQGDPLSPLLFNLVVDTALGKLPTEVGFDLAPGVRVGALAFADDVILLAETREGLQIALNAFAKQLAGCGLVVNPDKCGSVSLVPSGRQHKVKVVDGGFVVGQSPIPSRSVLEVWRYLGVDFMGVATITTSRVDLGRALARVTKAPLKPQQKLRLLRTYLLPKLTYGLVFGRLTAGRLQQLDREVRSAVRSWLKFPPGVPSAYFHAPVKSGGLGIVSLSACIPSLRRRRLLALQGSSWEVARAAADLDFVRQQLAWCDRATPSAPKPSSSAEFAAALHESVDGKELRQCSESLVSSQWVDWASEGIGARDYRHFHAIRVASLPTAVRCSRGSRGTTLPLCCACRSGNEHLYHVVQQCPRTHGGRILRHDAVAKQIAGALSSSGWDVERERLYHMPSDQGKKPDIVAVKPDQSCIILDVQVVNGSLDMEQTWRAKIRKYDTNDLRQAVSELKGVAPNNIRVMAATLSWRGVWCGKSATELRELGISVGVLRGITTRVLLGSYLNWWSFYRGTSLHPSLPPPPSSSSLIPRAGVG

SEQ ID NO: 24801 - protein, 1070 aa, Apolygus lucorum
MEQNISEPHNPRQPIGSRGIRGGAQRRPRQGRRPSSPSSSSSSSLPSSSSTASLNHQCAHCERAFTTRSGLGLHIRRKHPVAANAAIDIERIQPRYASEELRRMAADEAVAVRNGVRNINVYLNERFPTRTVIAIKNIRLKPHYKQLVQEAILANSSGASPASPIADVEQQPAIQYPSPGTSGLLADLKTEVLRLGGQVGRIEGYESTYLQDLVRRAVEGLDNLEDEVAAYLGRIFPRVGDATVTQHQGGPPPRMVLRGGRRAAKQARRREYHRVQSLWRKHPTRVAAEVLEEPGENQVQPPLQEFVDFWEPLLSAPSHDPGECVVPPVSTRDSLRSIMCSPVLSDEAHKCRVRNSTSAGPDGVSARRWNKAPKTIKLLILNLLLLAGRPPKALTRTRTVFIPKKGGSGPGGYRPISVSSVVFRHFQKVLASRLQVAGVIGDVQRAFRPADGTAENLTVLQTVISLARIKRRQLHLAALDVAKAFDTVSHLALTDCLRGVGAPSRLIEYVACLYQEGVTVLEAGGEVSGDIRIGRGVRQGDPLSPLLFNLVVDTALGKLPTEVGFDLAPGVRVGALAFADDVILLAETREGLQIALNAFAKQLAGCGLVVNPDKCGSVSLVPSGRQHKVKVVDGGFVVGQSPIPSRSVLEVWRYLGVDFMGVATITASRVDLGRALARVTKAPLKPQQKLRLLRTYLLPKLTYGLVFGRLTAGRLQELDREVRSAVRSWLKFPPGVPSAYVHAPVKSGGLGIVSLSACIPSLRRRRLLALQGSSWEVARAAADLDFVRQQLAWCDRATPSAPKPSSSAEFAAALHESVDGKELRQCSESLVSSQWVDWASEGIGARDYRHFHAIRVASLPTAVRCSRGSRGTTLPLCRACRSGNEHLYHVVQQCPRTHGGRILRHDAVAKQIAGALSSSGWDVERERLYRMPSDQGKKPDIVAVKPDQSCIILDVQVVNGSLDMEQTWRAKIRKYDTNDLRQAVSELKGVAPNNIRVMAATLSWRGVWCGKSATELRELGISVGVLRGITTRVLLGSYLNWWSFYRGTSLHPSLPPPPSSSSLIPRAGVG

SEQ ID NO: 24802 - protein, 903 aa, Apolygus lucorum
MIPYENHHLRTDSSHCACANVKTEVLRLGGQVGRIEGYESTYLQDLARRAAEGLDNLEDEVAAYLGRIFPRVEDATVAQHQGGPPPRVVLRGGRRAAKQARRREYHRVQSLWRKHPARVAAEVLEEPGEDQVQPPLQEFVDFWEPLLSAPSHNPGERVVPPVSTRDSLRSILCSPVLLDEAHKCRVKNSTSAGLDGVSARRWNKAPNTIKLLILNLLMLAGRPPKALTRTRTVFIPKKGGSGPGGYRPISVSSVVFRHFQKVLASRLQVAGVIGDIQRAFRPADGTAENLTVLQTVISLARIKRRQLHLAALDVAKAFDTVSHLALTDCLRGVGAPSRLIEYVACLYHEGVTVLVAGGEVSGDVRIGRGVCQGDPLSPLLFNLVVDTALGKLPTEVGFDLAPGVRVGALAFADDVILLAETREGLQIALNAFAKQLSRCGLVVNPDKCGSVSLVPSDRQHKVKVVDGGFVIGQAPIPSRSVLEVWRYLGVDFMGVATITASRVDLGRALASITKAPLKPQQRLRLLRTYLLPKLTYGLVFGRLTAGRLQELDREVRSAVRSWLRFPPGVPSAYIHAPVKSGGLGIVALSACIPSLRRQRLLALQGSSWEVARVAAGLDFVRQQLAWCDRATPSAPKPSSSAEFAAALHESVDGKELRQCSESLISSQWVDWASEGIGARDYRNFHAVRVATLPTAVWCSRGSRGMTDTLCRACRSGNEHLYHVVQQCPRTHGGRILRHDAVAKQIAGALSSSGWDVERERLYHMPSDQGKKPDIVAVKPDRSCIILDVQVVNGSMDMEQTWRAKIRKYDRDDLRQAVSELKGVAPNNIRVMAATLSWRGVWCGKSATELRELGISVGVLRGVTRRVLLGSYLNWWSFYRGTSLHPSLPSPPSSSSLIPRAGVG

SEQ ID NO: 24803 - protein, 967 aa, Apolygus lucorum
MAADEVVAVRNGVRNINVYLSERFPTRTVIAIKNLRLKPHYKQLVQEAILANSGGASPASPIAGVDQQSAIQYPSPGTSGLLADLKTEVLRLGGQVGRIEGYESTYLQDLARRAAEGLDNLEDEVAAYLRRIFPRVGDATVSRHQGGPPPRMVLRGGRRAAKQARRREYHRVQSLWRKHPARVAAEVLEEPGEDQVQPPLQEFVDFWEPLLSAPSHNPGERVVPPVSTRDSLRSILSLPVLLDEAHKCRVKNSTSAGPDGVSARRWNKAPNTIKLLILNLLMLAGRPPKALTHTRTVFIPKKGGSGPGGYRPISVSSVVFRHFQKVLASRLQVAGVIGDVQRAFRPADGTAENLTVLQTVISLARIKRRQLHLAAMDVAKAFDTVSHLALTDCLRGVGAPSRLIEYVACLYHEGVTVLVAGGEVSRDIRIGRGVRQGDPLSPLLFNLVVDTALGKLPTEVGFDLAPGVRVGALAFADDVILLAETREGLQIALNAFAKQLARCGLMVNPDKCGSVSLVPSGRQHKVKVVDGGFVIGQSPIPSRSVLEVWRYLGVDFMGVATITTSRVDLGRALARVTKAPLKPQQKLRLLRTYLLPKLTYGLVFGRLTAGRLQELDREIRSAVRSWLRFPPGVPSAYFHAPVKSGGLGIVSLSACIPSLRRQRLLALQGSSWEVARAAADLDFVRQQLAWCDRATPSAPKPSSSAEFAAALHESVDGKELRQCSESLVSSQWVDWASEGIGARDYRHYHAVRMATLPTAVRCSGGSRGTTLPLCRACRSGNEHLYHVVQQCPRTHGGRILRHDAVAKQIAGDLSSSGWDVERERLYHMPSDQGKKPDIVAVKPDQSCIILDVQVVNGSLDMEQTWRAKIRKYDRDDLRQAVSELKGVAPNNIRVMAATLSWRGVWCGKSATELRELGISVGVLRGITTRVLLGSYLNWWSFYRGTSLHPSLPPPPSSSSLIPRAGVG

SEQ ID NO: 24804 - protein, 1070 aa, Apolygus lucorum
MEQTNDTPHNPRLPIGTRGSRGGAQRRPRQGRRPSSPSSSSSSSLPSSSSTASLDHQCAHCERAFTSRSGLGVHVRRKHPVAANEAIDVERVQPRYASEDLRRMAADEVVAVRNGVRNINVYLSERFPTRTVIAIKNLRLKPHYKQLVQEAILANSGGASPASPIAGVDQQSAIQYPSPGTSGLLADLKTEVLRLRGQVGRVEGYESTYLQDLARRAAEGLDNLEDEVAAYLGRIFPRVEDATVTQHQGGPPPRVVLRGGRRAAKQARRREYHRVQSLWRKHPARVAAEVLEEPGEDQVQPPLQEFVDFWEPLLSAPSHNPGERVVPPVSTRDSLRSILCSPVLLDEAHRCRVKNSTSAGPDGVSARRWNKAPNTIKLLILNLLILAGRPPKALTRTRTVFIPEKGGSGPGGYRPISVSSVVFRHFQKVLASRLQVAGVIGDVQRAFRPADGTAENLTVLQTVISLARIKRRQLHLAALDVAKAFDTVSHHALTDCLRGVGAPSRLIEYVACLYHEGVTVLEAGGEVSGDVRIGRGVRQGDPLSPLLFNLVVDTALGKLPTEVGFDLAPGVRVGALAFADDVILLAETREGLQIALNAFAKQLSRCGLVVNPDKCGSVSLVPSGRQHKVKVVDGGFVIGQAPIPSRSVLEVWRYLGVDFMGVATITASRVDLGRALARITKAPLKPQQRLRLLRTYLLPKLTYGLVFGRLTAGRLQELDREVRSAVRSWLRFPPGVPSAYIHAPVKSGGLGIVSLSACIPSLRRQRLPALQGSSWEVARVAAGLDFVRQQLAWCDRATPSAPKPSSSAEFAAALHESVDGKELRQCSESLISSQWVDWASEGIGARDYRNFHAVRAATLPTAVRCSRGSRGMTDTLCRACRSGNEHLYHVVQQCPRTHGGRILRHDAVAKQIAGALSSSSWDVERERLYHMPSDQGKKPDIVAVKPDRSCIILDVQVVNGSMDMEQTWRAKIRKYDRDDLRQAVSELKGVEPNNIRVMAATLSWRGVWCGKSATELRELGISVGVLRGVTRRVLLGSYLNWWSFYRGTSLHPSLPTPPSSSSLIPRAGVG

SEQ ID NO: 24805 - protein, 1070 aa, Apolygus lucorum
MDHNHQLPHNPRQPIGLRGIRGGAQRRPRQGRRPSSPSSSSSSSLPSSSSTASLDHQCAHCERAFTSRSGLGVHVRRKHPVAANAAIEIERVQPRYASEDLRRMAADEVVAVRNGVCNINVYLSERFPTRTVIAIKNLRLKPHYKQLVQEAILANSGGASPASPVAGMDQQSAIQYPSPGTSGLLADLKTEVLRLGGQVGRIEGYESTYLQDLARRAAEGLDNLEDEVAAYLGRIFPRVGDATVAQHQGGPPPRVVLRGGRRAAKQARRREYHRVQNLWRKHPARVAAEVLEEPGEDQVQPPLQEFVDFWEPLLSAPSHNPGERVVPPVSTRDSLRSILCSPVLLDEAHKCRVKNSTSAGPDGISARRWNKAPNTIKLLILNLLMLAGRPPKALTRTRTVFIPKKGGSGPGGYRPISVSSVVFRHFQKVLASRLQVAGVIGDVQRAFRPADGTAENLTVLQTVISLARIKRRQLHLAALDVAKAFDTVSHLALTDCLRGVGAPSRLIEYVACLYHEGVTVLEAGGEVSGDVRIGRGVCQGDPLSPLLFNLVVDTALGKLPTEVGFDLAPGVRVGALAFADDVILLAETREGLQIALNAFAKQLSRCGLVVNPDKCGSVSLVPSGRQHKVKVVDGGFVIGQAPIPSRSVLEVWRYLGVDFMGVATITASRVDLGRALARITKAPLKPQQRLRLLRTYLLPKLTYGLVFGRLTAGRLQELDRGVRSAVRSWLRFPPGVPSAYIHAPVKSGGLGIVALSACIPSLRRQRLLALQGSSWEVARVAAGLDFVRQQLAWCDRATPSAPKPSSSAEFAAALHESVDGKELRQCSESLISSQWVDWASEGIGARDYRNFHAVRVATLPTAVRCSRGSRGMTDTLCRACRSGNEHLYHVVQQCPRTHGGRILRHDAVAKQIAGALSSSGWDVERERLYHMPSDQGKKPDIVAVKPNRSCIILDVQVVNGSMDMEQTWRAKIRKYDRDDLRQAVSELKGVAPNNIRVMAATLSWRGVWCGKSATELRELGISVGVLRGVTRRVLLGSYLNWWSFYRGTSLHPSLPSPPSSSSLIPRAGVG

SEQ ID NO: 24806 - protein, 1069 aa, Apolygus lucorum
MDNTTRPHNPRQPIGSQGIRGGAQRRPRQGRRPSSPSSSSSSSLPSSSSTASLDHQCAHCERAFTSRSGLGVHVRRKHPVAANAAIEIERVQPRYASEDLRRMAADEVVAVRNGVRNINVYLSERFPMRTVIAIKNLRLKPHYKQLVQEAILANSGGASPASPVAGMDQQSAIQYPSPGTSGLLADLKTEVLRLGGQVGRIEGYESTYLQDLARRAAEGLDNLEDEVAAYLERIFPRVGDATVAQHQGGPPPRVVLRGGRRAAKQARRREYHRVQSLWRKHPARVAAEVLEEPGEDQVQPPLQEFVDFWEPLLSAPSHNPGERVVPPVSTRDSLRSILCSPVQLDEAHKCRVKNSTSAGPDGISARRWNKAPNTIKLLILNLLMLAGRPPKALTRTRTVFIPKKGGSGPGGYRPISVSSVVFRHFQKVLASRLQVAGVIGDVQRAFRPADGTAENLTVLQTVISLARIKRRQLHLAALDVAKAFDTVSHLALTDCLRGVGAPSRLIEYVACLYHEGVTVLEAGGEVSGDVRIGRGVRQGDPLSPLLFNLVVDTALGKLPTEVGFDLAPGVRVGALAFADDVILLAETREGLQIALNAFAEQLSRCGLVVNPDKCGSVSLVPSGRQHKVKVVDGGFVIGQAPIPSRSVLEVWRYLGVDFMGVATITASRVDLGRALARITKAPLKPQQRLRLLRTYLLPKLTYGLVFGRLTAGRLQELDREVRSAVRSWLKFPPGVPSAYIHAPVKSGGLGIVALSACIPSLRRQRLLALQGSSWEVARVAAGLDFVRQQLAWCDRATPSAPKPSSSAEFAAALHESVDGKELRQCSESLISSQWVDWASEGIGARDYRNFHAVRVATLPTAVRCSRGSRGMTDTLCRACRSGNEHLYHVVQQCPRTHGGRILRHDAVAKQIAGALSSSGWDVERERLYRMPSDQGKKPDIVAVKPDRSCIILDVQVVSGSMDMEQTWRAKIRKYDRDDLRQAVSELKGVAPNNIRVMAATLSWRGVWCGKSATELRELGISVGVLRGVTRRVLLGSYLNWWSFYRGTSLHPSLPPPPSSSSLIPRAGVG

SEQ ID NO: 24807 - protein, 816 aa, Apolygus lucorum
MVLRGGRRAAKQARRQEYHRVQSLWRKHPARVAAEVLEEPGEDQVQPPLQEFVDFWEPLLSAPSHNPGERVVPPVSTRDSLRSILCSPVLLDEAHKCRVKNSTSAGPDGVSARRWNKAPNTIKLLILNLLMLAGRPPKALTRTRTVFIPKKGGSGPGGYRPISVSSVVFRHFQKVLASRLQVAGVIGDVQRAFRPADGTAENLTVLQTVISLARIKRRQLHLAALDVAKAFDMVSHLALTDCLRGVGAPSRLIEHVACLYHEGVTVLEAGGEVSGDVRIGRGVRQGDPLSTLLFNLVVDTALGKLPTEVGFDLAPGVRVGALAFADDVILLAETREGLQIALNAFAKQLSRCELVVNPDKCGSVSLVPSGRQHKVKVVDGGFVIGQALIPSRSVLEVWRYFGVDFMGVATITASRVDLGRALARITKAPLKPQQRLRLLRTYLLPKLTYGLVFGRLTAGRLQELDREVRSAVRSLLRFPSGVPSAYIHAPVESGGLGIVSLSACIPSLRRQRLLALQGSSWEVARVAAGLDFVRQQLAWCDRATPSAPKPSSSAEFAAALHESVDGKELRQCSESLISSQWVDWALEGIGARDYRNFHAVRVATLPTAVRCSRGSRGMTDTLCRACRSGNEHLYHVVQQCPRTHGGRILRHDAVAKQIAGALSSSGWDVERERLYHMPSDQGKKPDIVAVKPDRSCTILDVQVVNGSMDMEQTWRAKIRKYDRDDLRQAVSELKGVEPNNIRVMAATLSWRGVWCGKSATELRELGISVGVLRGVTRRVLLGSYLNWWSFYRGTSLHPSLPPPPSSSSLIPRAGVG

SEQ ID NO: 24808 - protein, 420 aa, Apolygus lucorum
MGVATITASRVDLGRALARITKAPLKPQQRLRLLRTYLLPKLTYGLVFGRLTAGRLQELDREVRSAVRSWLRFPPGVPSAYIHAPVKSGGLGIVSLSACIPSLRRQRLLALQGSSWEVARVAAGLDFVRQQLAWCDRATPSAPKPSSSAEFAAALHESVDGKELRQCSESLISSQWVDWASEGIGARDYRNFHAVRVATLPTAVRCSRGSRGMTDTLCRACRSGNEHLYHVVQQCPRTHGGRILRHDAVAKQIAGALSSSGWDVERERLYHMPSDQGKKPDIVAVKPDRSCIILDVQVVNGSMDMEQTWRAKIRKYDRDDLRQAVSELKGVAPNNIRVMAATLSWRGVWCGKSATELRELGISVGVLRGVTRRVLLGHYICFIYLFCFMACPLRHQRHFVLRGVIKKKKKKKKKKKKKKM

SEQ ID NO: 24809 - protein, 1141 aa, Apolygus lucorum
MEQTNDTPHNPRLPIGTRGSRGGAQRRPRQGRRPSSPSSSSSSSLPSSSSTASLDHQCAHCERAFTSRSGLGVHVRRKHPVAANEAIDVERVQPRYASEDLRRMAADEVVAVRNGVRNINVYLSERFPTRTVFAIKNLRLKPHYKQLVQEAILANSGGASPTSPVAGVDQQSAIQYPSPGTSGLLADLKTEVLRLRGQVGRIEGYESTYLQDLARRAAEGLDNLEDEVAAYLGRIFPRVEDATVTQHQGGPPPRVVLRGGRRAAKQARRREYHRVQSLWRKHPARVAAEVLEEPGEDQVQPPLQEFVDFWEPLLSAPSHNPGERVVPPVSTRDSLRSILCSPVLLDEAHKCRVKNSTSAGPDGVSARRWNKAPNTIKLLILNLLILAGRPPKALTRTRTVFIPKKGVSGPGGYRPISVSSVVFRHFQKVLASRLQVAGVIGDVQRAFRPADGTAENLTVLQTVISLARIKRRQLHLAALDVAKAFDTVSHHALTDCLRGVGAPSRLIEYVACLYHEGVTVLEAGGEVSGDVRIGRGVRQGDPLSPLLFNLVVDTALGKLPTEVGFDLAPGVRVGALAFADDVILLAETREGLQIALNAFAKQLSRCGLVVNPDKCGSVSLVPSGRQHKVKVVDGGFVIGQAPIPSRSVLEVWRYLGVDFMGVATITASRVDLGRALAHITKAPLKPQQRLRLLRTYLLPKLTYGLVFGRLTAGRLQELDREVRSAVRSWLRFPPGVPSAYIHAPVKSGGLGIVSLSACIPSLRRQRLLALQGSSWEVARVAAGLDFVRRQLAWCDRATPSAPKPSSSAEFAAALHESVDGKELRQCSESLISSQWVDWASEGIGARDYRNFHAVRAATLPTAVRCSRGSRGMTDTLCRACRSGNEHLYHVVQQCPRTHGGRILRHDAVAKQIAGALSSSGWDVERERLYHMPSDQGKKPDIVAVKPDRSCIILDVQVVNGSMDMEQTWRAKIRKYDRDDLRQAVSELKGVEPNNIRVMAATLSWRGVWCGKSATELRELGISVGVLRGVTRRVLLGSYLNWWSFYRGTSLHPSLPPPPSSSSLIPRVGVGRVLGVLPNIFDLFIYLILWRAPSVTETYGLEGRLFKKKKKKKKKKKKKMTMAKPCSLQTSDLQGVTPMFLP

SEQ ID NO: 24810 - protein, 1033 aa, Lipothrix lubbocki
MDLNTIVDPNYSTNLDMLADVAIRASSTTVTLEDLELLQSRLNGLELNVAGPDDAPGQQIDLQDPSTNMATTVKNSKGKPLRECPYCHGLYVGLNVHISKRHPEIARQNIVQGYQTTSLPTTIEDIPATNEESQLKKLNAKMVEFNGVFEEMLLNMPTLEDFSHKVDEFSAVLRDAIDVLPGPKHPATKYYKARRNPDNFENPQETYQQQSNPVRKSKRERERKRAKYNHDLIQWQYTNCRKKVHRTVMDSTASSPPCTIPQDQILDHFKNRWSNTNNKRLDDYGPKLNDTAQTEMDEAYTSEITEDEIADSLKGMNRDSAAGLDRVTARAVRCIKCKGVIAKIASIMQKWNLVPLSFRKARTVLIYKKGDKNDIGNFRPISICSLLRRIIERVIERKLRLFVNINENQRGFSNVPGCHINASILNGILQKAKTEKLSCTILFFDVQKAFEESSHDHICLSLDHTPMPSSLRNLTQNLLRGNQTQFQTEKGLSKPVTVNKGVFQGLPKSPLEFNLSIDHIHRELSETEVTEEYGFEIHPNVPKFTNAGFADDLAIVSKDKDGAKELGKIALSNFDKVGYASNPSKCKAIVIKDGMLVEEQVAIYDSFTIDSIKKDEVIKYLGVNFNDEIIFDMAGTIKRFGKDLENLVSTPMLRPDQKLSIINQYIWPTLIYPLQCAPLDKIPRRFLKDLNQLLSKAIKEIVGLPDDIPTSMLYTTKNRRGLQLFNAQWEVFLQHYNICLALLKSGDRYIPFVRDCQEEMKKCAEKLGFEQAQLQSWAAEKPKTKITKLMREELRNRSYEDWCSKPHRGSGVSLFKESEKGNKQIMNKVGLTSSEWVTAMKMSANVFPVRDLPGRSQDGTRCRFNGCNRRETLPHILGCCEKGELLRNSRHHEIRTIIANHLKKDLQWTVIEEVHCIEEGGSTRRVDILCFDKISKRGYILDPTVRWEIGEHQPGEVDHEKRQIYEPCIAYFKDRYQLDHIEVIGLMIGARGIIPTFFEEFRKRFNLNNDIIKEIVIATVRGSCKIAYNHVYN

SEQ ID NO: 24811 - protein, 1166 aa, Anastatus disparis
MNSNNLASAGERVTRSARPRNTGAQTNTPDSGDVILLVPFVNRVCAICTESGKNFLYFSLNDELGHLAEYHPDRKAVFQCRDCNKIYKTKHGVLVHLGKCRPPDPASQNTPPRPYQCRICGKGFDSKSGLGQHERHAHAAERNAKRAGERDYLSRIKDGPTFAASDIRLMLELEKQLSSDPRAAAKMVQLLPGNKTAKQVRDKRNETNYKALRERFLKDWADEQSQCNASPPIPEEPDCQVAQEDVALAEPESAEAGSASESSTDSDSEFVDARSGHLRALSEEETRWRVHIARAAADDTSQPGNELAKQVCDLIKWRCNEVALHPDEEVQLDVVDELYSKFLSIINVEAREPRPKRAKTGERGKRNRRRYAYGKTQEMFKNNPKELASCLIKNINWLDKRDALPDADEVQALYDGLWGKAPNIEVPDMGDPEQPLSLDALLPPVTMEEVHNRLKRTKAKSASGLDGIRKGDLMSKDVKILLMLLFNFFMVARKEPSAWKVNRTTLIPKEGKDPARAENLRPLTIGSLVSRVFWGLVDQKVRRVVKLTPRQKGFVVGENGCFNNVRILNEIIKSGKASGGVAVAVVDTAKAFDSLPHDFIELALQHKGVPAVCRELILSSYEAVSTQIKIGNKEFKVPLLRGVKQGDPLSPLIYNICMEPLLRLLQNRAGFGVGEFNISVLAFADDLVLVAREKRQLEVLVDTLHEYMNCLRMKLSTSKCSAFEIVTKGKTWYVSDPDLTLPTGDKIPYVGPATEFRYLGIKLTPWKGVDINDVRGEIQEVLSRLNKAALKPSQKLSLLSTNILPHYIYQLSLAAPSVSLLRGIDADIRGKLKDLLHLPQSAANGIIYARKQDGGLGFPKLELVVITSCIKSGLKMMRNTEDHCMTELCHSSGLWSKLGIYCRMLDLQLEGLTSLDVDKCKLLSKREEFKRWASLKCGNGIGAFRGDKIANRWLFNPRLLREHQFVTALKLRADVTACRCTLAKAKLTSNVTCRGCNDAAESLGHVLGACSSTKRQRIARHDEIKNIIVDKLVENAQSYTVCKENTFVTEDGTRLKPDIVACRSDQAWIVDVTVRHEANDNIDRGQLEKLQKYTPLISKVKSLTHATKVGVLPIVVGTRGAIPRETIKNLRSLGLRDPGLLLTLSLVSLRHSTLTYYQFMDRRAAQ

SEQ ID NO: 24812 - protein, 788 aa, Anastatus disparis
MFKNNPKELASCLIKNINWLDKRDALPDADEVQALYDGLWGKAPNIEVPDMGDPEQPLSLDALLPPVTMEEVHNRLKRTKAKSASGLDGIRKGDLMSKDVKILLMLLFNFFMVARKEPSAWKVNRTTLIPKEGKDPARAENLRPLTIGSLVSRVFWGLVDQKVRRVVKLTPRQKGFVVGENGCFNNVRILNEIIKSGKASGGVAVAVVDTAKAFDSLPHDFIELALQHKGVPAVCRELILSSYEAVSTQIKIGNKEFKVPLLRGVKQGDPLSPLIYNICMEPLLRLLQNRAGFGVGEFNISVLAFADDLVLVAREKRQLEVLVDTLHKYMNCLRMKLSTSKCSAFEIVTKGKTWYVSDPDLTLPTGDKIPYVGPATEFRYLGIKLTPWKGVDINDVRGEIQEVLSRLNKAALKPSQKLSLLSTNILPHYIYQLSLAAPSVSLLRGIDADIRGKLKDLLHLPQSAPNGIIYARKQDGGLGFPKLELVVITSCIKSGLKMMRNTEDRCMTELCHSSGLWSKLGIYCRMLDLQLEGLTSLDVDKCKLLSKREEFERWASLKCGNGIGTFRGDKIANRWLFQPRLLREHQFVTALKLRADVTACRCTLAKAKLTSNVTCRGCNDAAESLGHVLGACSSTKRQRIARHDEIKNIIVDKLVENAQSYTVCKENTFVTEDGTRLKPDIVACRSDQAWIVDVTVRHEANDNIDRGQLEKLQKYTPLISKVKSLTHATKVGVLPIVVGTRGAIPRETIKNLRSLGLRDPGLLLTLSLVSLRHSTLTYYQFMDRRAAQ

SEQ ID NO: 24813 - protein, 730 aa, Morbakka virulenta
MITKQCQKMPNWKSPGPDGVQGYWLKNFTLLHERLAEQMNDLIINGNEIPKWMTTGKTVLCQKDCTKGIEVDNYRPITCLPLMWKLLTGIVSNSLYDFLEMNNKLPTEQKGCRRKSRGTKDHLLINKMIIRDCKRRHTNLGIAWIDYKKAYDMIPHSWILETLKLVKAADNIIEFLEKSLKNWNVNLTYASEFLGNVNIKRGIFQGDSLSPLLFVICMIPLSHTLRKIKAKYTLKSGEDVNHLLFMDDLKLFGKNEREINSLISTVQIFSNDIKMEFGIKKCGVLIMHRGSVDRSRSNGISLPTGETIKIIDQSGYKYLGVLEFDGIIQRDVIKCVKQEYFRRLRLVCKSKLHGRNKIRAVNTWAVSLLRYGAGILDWRVNELDEMDRKTRKILTINKEFHPKSDKDRLYVSRSKGGRGLIGCKGSVRAEENNLGWYVEQQTEPLLNAVKRNGIIQTDSSLNPKDYKKREKDQNLNSWKEKKTYGQFVRELEGKDVENSWKWLKSCDLKGSTEALICSAQEQAIRTNSIKHFIDKTRESPFCRMCGERNETVYHIISECTVLARKEYLKRHNNVCKYIHWKLCKKFDLEAATKWYEHEPQGVMENDSCKIMWDFVIQCDRTVIARKPDIVVIDKSKKQTKIIDVAIPGDARVLEKEEEKVDKYRPLRDEIARLWKMKKIEIIPVIVGALGTVSKNFESHVKQIGITMNVEHAPKTALLGTARILQLVLGH

SEQ ID NO: 24814 - protein, 1131 aa, Morbakka virulenta
MSEMSDQIVKNNGVNGAGASCEGPSPGRCPLAQQRGPGRHPTTARMGWNKELNIAVMECYFLSKPMDEQRRPIKGYRKRMHNIWKERQEPNVTEQRLCDQARMIRLNGWLSDLEMEEIKRRVLRDETEAEEGRLMEDLIESEEVIENPGELVEVDHVITVKNLDDMSEEDKETLDKLNKVLSDHLDEELNGFKRVDRKKLKDRVQKMNRILSKVGTNNLTETNNLIKACSILIGREFGLKPFKARSARKEPWWKRRIQDSINEIRRHISILDTARKNELKRTRKLKELERKYLIKKKGLGTVIEELKQRLQVKSLKIKRYEQRIEQFRINKLFQSDQKKVYSELNGKKFSNEKPDAGESKAFWSGVWDKEVTHNGNAEWLKELREEGRNEVKQNDLQITVEMITKQCQKMPNWKSPGPDGVQGYWLKNFTLLHERLAEQMNDLIINGNEIPKWMTTGKTVLCQKDCTKGIEVDNYRPITCLPLMWKLLTGIVSNSLYDFLEMNNKLPTEQKGCRRKSRGTKDHLLINKMIIRDCKRRHTNLGIAWIDYKKAYDMIPHSWILETLKLVKAADNIIEFLEKSLKNWNVNLTYASEFLGNVNIKRGIFQGDSLSPLLFVICMIPLSHTLRKVKAKYTLKSGEDVNHLLFMDDLKLFGKNEREINSLISTVQIFSNDIKMEFGIKKCGVLIMHRGSVDRSRSNGISLPTGETIKIIDQSGYKYLGVLEFDGIIQRDVIKCVKQEYFRRLRLVCKSKLHGRNKIRAVNTWAVSLLRYGAGILDWRVNELDEMDRKTRKILTINKEFHPKSDKDRLYVSRSKGGRGLIGCKGSVRAEENNLGWYVEQQTEPLLNAVKRNGIIQTDSSLNPKDYKKREKDQNLNSWKEKKTYGQFVRELEGKDVENSWKWLKSCDLKGSTEALICSAQEQAIRTNSIKHFIDKTRESPFCRMCGERNETVYHIISECTVLARKEYLKRHNNVCKYIHWKVCKKFDLEAATNWYEHEPQGVMENDSCKIMWDFVIQCDRTVIARKPDIVVIDKSKKQTKIIDVAIPGDARVLEKEQEKVDKYRPLRDKIARLWKMKKIEIIPVIVGALGTVSKNFESHVKQIGITMNVEHAPKTALLGTAQILRFVLGY

SEQ ID NO: 24815 - protein, 1131 aa, Morbakka virulenta
MSEMSDQIVKNNGVNGAGASCEGPSPGRCPLAQQRGPGRHPTTARMGWNKELNIAVMECYFLSKPMDEQGRPIKGYRKRINNIWKERQEPNVTEQRLCDQARMIRLNGWLSDLETEEIKRRVLRDETEAKEGRLMEDLIESEEVIENPGELVEVDHVITVKNLDDMSEEDKETLDKLNKVLSDHLDEELNGFKRVDRKKLKDRVQKMNRILSKIGTNNLTETNNLIKACSILIGREFGLKPFKARSARKEPWWKRRIQDSINEIRRHISILDTARKNELKRTRKLKELERKYLIKKKGLGTVIEELKQRLQVKSLKIKRYEQRIEQFRINKLFQSDQKKVYSELNGKKFSNEKPDAGESKAFWSGVWDKEVTHNGNAEWLKELREEGRNEVKQNDLQITVEMITKQCQKMPNWKSPGPDGVQGYWLKNFTLLHERLAEQMNDLIINGNEIPKWMTTGKTVLCQKDCTKGIEVDNYRPITCLPLMWKLLTGIVSNSLYDFLEMNNKLPTEQKGCRRKSRGTKDHLLINKMIIRDCKRRHTNLGIAWIDYKKAYDMIPHSWILETLKLVKAADNIIEFLEKSLKNWNVNLTYASEFLGNVNIKRGIFQGDSLSPLLFVICMIPLSHTLRKIKAKYTLKSGEDVNHLLFMDDLKLFGKNEREINSLISTVQIFSNDIKMEFGIKKCGVLIMHRGSVDRSRSNGISLPTGETIKIIDQSGYKYLGVLEFDGIIQRDVIKCVKQEYFRRLRLVCKSKLHGRNKIRAVNTWAVSLLRYGAGILDWRVNELDEMDRKTRKILTINKEFHPKSDKDRLYVSRSKGGRGLIGCKGSVRAEENNLGWYVEQQTEPLLNAVKRNGIIQTDSSLNPKDYKKREKDQNLNSWKEKKTYGQFVRELEGKDVENSWKWLKSCDLKGSTEALICSAQEQAIRTNSIKHFIDKTRESPFCRMCGERNETVYHIISECTVLARKEYLKRHNNVCKYIHWKLCKKFDLEAATKWYEHEPQGVMENDSCKIMWDFVIQCDRTVIARKPDIVVIDKSKKQTKIIDVAIPGDARVLEKEQEKVDKYRPLRDEIARLWKMKKIEIIPVIVGALGTVSKNFESHVKQIGITMNVEHAQKTALLGTARILRLVLGH

SEQ ID NO: 24816 - protein, 932 aa, Morbakka virulenta
MWRQTEEKEKDRSKPSKPKLERKIEKEIEAFRREISLLEELHKDKEIRSGNARKVLRKYKIKKKEKIKIIKEELKQKLQVKAQRLRRFTKRNKFFRQNKVFETDAKKFYREIGKNKIEVVDIPSEEKVNDFWKTIWGNEKRHNENAEWLKDFENRASDIEEQEWENISVEEISRALKNSHKWKSPGVDQVPNFWLDTLYSMHSKLAQCLNKLISEPEPIPEWFCLGTTYLLPKTNDTANPKNYRPITCLTTSYKLLTSILSERTYSHLDDHDIFPIEQKGCRKGSYGCKDQLLINKMILENSKAKHRNLHTTWIDYKKAFDSVPHSWIFKCLEIFKISPMLINFLRNSMSLWKTNLLLSHSNGILSSNGMQIKRGIFQGDSLSPLLFCMSLIPLSELLNNTGYGYKFNDRKINHLFYLDDLKLYASNDGELKGLVKTVKAFSDDIGMEFGLDKCAKASFERGKLVKTDNLVLDEDTIIKELDQEGTYKYLGVNEGDGIQHAKMKEKIRKECIRRVRMIMKTELNSKNRITAINTLAIPVVTYSFNIINWNLSDLKKLDTKIRKQFTCHRMHHPKSDVDRLYIPRKDGGRGMIQLELSYKISTIGLCKYLDTTNDWMLQLVNLHENSKTLHSVVKESERFSHELNIDTEIDNLITPTECARKAKKLAKKTGLKQLESKWQEKPLHGQFTTRANNADVDKIATYQWLLSSGLKGETEGFILAAQDQSLFTRNYQANVLHNGADATCRFCDDKVETIDHLVSGCSILTPVEYKNRHDRVGQYLHWKICQHFDIDTNTCKWYEHHPEPVTEGENCTILWDFPIHTDRTIQANRPDIVIKDKKNNTCLLIDMSVLSDRNVSAKVFEKLSKYKDLEIAIQKMWHLKTTTIPVVVGALGMIKKGTKQLSEKIPATPSLYEIQKIVLNSMAHLLRRALSM

SEQ ID NO: 24817 - protein, 1213 aa, Morbakka virulenta
MKTRNKKKSCRIARRADQQGARASVSDQAEDFEKFATRSNPLTYNDQDGYQEGNSPTPGPTGSPPKKIQKEKRKKWTREEYKEVMYCFYYAFEKPQTNNTENTFIIWCSRNSESDKLEGLDANKLANVRRYIMRSKKLTDIEIAQIKETAKNDARENGLEAEGGDEVQDDAVVQETVENIVPDIGNGENVQVEDVEDLDWELDAEDLIEMRTNILEEWSIVQHTNVKDRESLMKIRHTHKYKNLIALGNAALKRLCNEIDPNLTELNELIYATGKVLQRKCGIKPKGNRSKTYKTTKPKWQVKIDKEIENLRKEISLLEELQKDKDVRSGKARKVLRKYKIGNRDQIPAIKEELKQKLQVKAQRVRRYVKRNKFYRQNKIFETDTKKFYREIGKTNINVDEIPSEIQVQEFWNSIWGTEKGYNENSEWLNNFETSTNDIPEQGWEDIQVEEVRKALKKSHKWKSPGIDQIPNFWLDTLYSMHNKLALNFNKIMTDPTLTPKWFCIGATYLLAKTNETANAKNYRPITCLSTSYKLLTSILTERTYSHMEDHNIFPTEQKGCRKGSYGCKDQLLINKMILENAKAKHKHLSTAWIDYKKAFDSVPHSWILRCLETFKVSPVLINFLRTSMTLWETNLSLSHSNGILTTNGMRIKCGIFQGDSFSPLLFCMALIPLSQLLNNTGYGYKIGNKKINHLFYMDDLKLYACNDGELEGLLKTVKAFSDDIGMEFGLDKCAKATFKRGKLESTDNVVLDDESVIKELEQEGTYKYLGVNEGDGIQHSKMKEKIRKECLRRVRLIMKTELNSQNKITAINSLAIPVVTYSFNIINWNLSEIRNLDTKIRKQFTCHRMHHPKSDIDRLYVPRTRGGRGMIQLELSYKTNTIGLSEYLDKTEDWMLQLVSAHENSKKLHSVLKEAAKFSRQLDLNLNNEYDNHLQPTEIARKIKNAAKNNGLKQLESRWQGKPLHGQFAARSKNADVDETATHQWLRSSGLKGETEGFILAAQDQSLFTRNYQANVLHNGADGRCRFCEEKLETIDHLVSGCSVLTPNEYKNRHDRVGQYLHWKILNHFAIETKSNWYEHHPEPVTEGKNITILWDFPVHTDRTIQANRPDIIVKDKNSNTCLLIDMSVPSDKNVAAKVFEKLSKYKDLEIEIEKMWHLKTKTIPVVIGALGLIKKGTTDYLKTIPGEPSLNEAQKIVLNSTAHILRRTLSV

SEQ ID NO: 24818 - protein, 1213 aa, Morbakka virulenta
MKTRNKKKSCRIARRADQQGARASVSDQVEDFEKFATRSNPLTYNDQDGYQEGNSPTPGPTGSPPKKIQKEKRKKWTREEYKEVMYCFYYAFEKPQTNNTENTFIIWCSRNSESDKLEGLDANKLANVRRYIMRSKKLTDIEIAQIKETAKNDARENGLEAEGGDEVQDDAVVQETVENIVPDIGNGENVQVEDVEDLDWELDAEDLIEMRTNILEEWSIVQHTNVKDRESLMKIRHTHKYKNLIALGNAALKRLCNEIDPNLTELNELIYATGKVLQRKCGIKPKGNRSKTYKTTKPKWQVKIDKEIENLRKEISLLEELQKDKDVRSGKARKVLRKYKIGNRDQIPAIKEELKQKLQVKAQRVRRYVKRNKFYRQNKIFETDTKKFYREIGKTNINVDEIPSEIQVQEFWNSIWGTEKGYNENSEWLNNFETSTNDIPEQGWEDIQVEEVRKALKKSHKWKSPGIDQIPNFWLDTLYSMHNKLALNFNKIMTDPTLTPKWFCIGATYLLAKTNETANAKNYRPITCLSTSYKLLTSILTERTYSHMEDHNIFPTEQKGCRKGSYGCKDQLLINKMILENAKAKHKHLSTAWIDYKKAFDSVPHSWILRCLETFKVSPVLINFLRTSMTLWETNLSLSHSNGILTTNGMRIKCGIFQGDSFSPLLFCMALIPLSQLLNNTGYGYKIGNKKINHLFYMDDLKLYACNDGELEGLLKTVKAFSDDIGMEFGLDKCAKATFKRGKLESTDNVVLDDESVIKELEQEGTYKYLGVNEGDGIQHSKMKEKIRKECLRRVRLIMKTELNSQNKITAINSLAIPVVTYSFNIINWNLSEIRNLDTKIRKQFTCHRMHHPKSDIDRLYVPRTRGGRGMIQLELSYKTNTIGLSEYLDKTEDWMLQLVSAHENSKKLHSVLKEAAKFSRQLDLNLNNEYDNHLQPTEIARKIKNAAKNNGLKQLESRWQGKPLHGQFAARSKNADVDETATHQWLRSSGLKGETEGFILAAQDQSLFTRNYQANVLHNGADGRCRFCEEKLETIDHLVSGCSVLTPNEYKNRHDRVGQYLHWKILNHFAIETKSNWYEHHPEPVTEGKNITILWDFPVHTDRTIQANRPDIIVKDKNSNTCLLIDMSVPSDKNVAAKVFEKLSKYKDLEIEIEKMWHLKTKTIPVVIGALGLIKKGTTDYLKTIPGEPSLNEAQKIVLNSTAHILRRTLSI

SEQ ID NO: 24819 - protein, 733 aa, Morbakka virulenta
MHNKLALNFNKIMTDPTLTPKWFCIGATYLLAKTNETANAKNYRPITCLSTSYKLLTSILTERTYSHMEDHNIFPTEQKGCRKGSYGCKDQLLINKMILENAKAKHKHLSTAWIDYKKAFDSVPHSWILRCLETFKVSPVLINFLRTSMTLWETNLSLSHSNGILTTNGMRIKCGIFQGDSFSPLLFCMALIPLSQLLNNTGYGYKIGNKKINHLFYMDDLKLYACNDGELEGLLKTVKAFSDDIGMEFGLDKCAKATFKRGKLESTDNVVLDDESVIKELEQEGTYKYLGVNEGDGIQHSKMKEKIRKECLRRVRLIMKTELNSQNKITAINSLAIPVVTYSFNIINWNLSEIRNLDTKIRKQFTCHRMHHPKSDIDRLYVPRTRGGRGMIQLELSYKTNTIGLSEYLDKTEDWMLQLVSAHENSKKLHSVLKEAAKFSRQLDLNLNNEYDNHLQPTEIARKIKNAAKNNGLKQLESRWQGKPLHGQFAARSKNADVDETATHQWLRSSGLKGETEGFILAAQDQSLFTRNYQANVLHNGADGRCRFCEEKLETIDHLVSGCSVLTPNEYKNRHDRVGQYLHWKILNHFAIETKSNWYEHHPEPVTEGKNITILWDFPVHTDRTIQANRPDIIVKDKNSNTCLLIDMSVPSDKNVAAKVFEKLSKYKDLEIEIEKMWHLKTKTIPVVIGALGLIKKGTTDYLKTIPGEPSLNEAQKIVLNSTAHILRRTLSI

SEQ ID NO: 24820 - protein, 1213 aa, Morbakka virulenta
MKTRNKKKSCRIARRADQQGARASVSDQAEDFEKFATRSNPLTYNDQDGYQEGNSPTPGPTGSPPKKIQKEKRKKWTREEYKEVMYCFYYAFEKPQTNNTENTFIIWCSRNSESDKLEGLDANKLANVRRYIMRSKKLTDIEIAQIKETAKNDARENGLEAEGGDEVQDDAVVQETVENIVPDIGNGENVQVEDVEDLDWELDAEDLIEMRTNILEEWSIVQHTNVKDRESLMKIRHTHKYKNLIALGNAALKRLCNEIDPNLTELNELIYATGKVLQRKCGIKPKGNRSKTYKTTKPKWQVKIDKEIENLRKEISLLEELQKDKDVRSGKARKVLRKYKIGNRDQIPAIKEELKQKLQVKAQRVRRYVKRNKFYRQNKIFETDTKKFYREIGKTNINVDEIPSEIQVQEFWNSIWGTEKGYNENSEWLNNFETSTNDIPEQGWEDIQVEEVRKALKKSHKWKSPGIDQIPNFWLDTLYSMHNKLALNFNKIMTDPTLTPKWFCIGATYLLAKTNETANAKNYRPITCLSTSYKLLTSILTERTYSHMEDHNIFPTEQKGCRKGSYGCKDQLLINKMILENAKAKHKHLSTAWIDYKKAFDSVPHSWILRCLETFKVSPVLINFLRTSMTLWETNLSLSHSNGILTTNGMRIKCGIFQGDSFSPLLFCMALIPLSQLLNNTGYGYKIGNKKINHLFYMDDLKLYACNDGELEGLLKTVKAFSDDIGMEFGLDKCAKATFKRGKLESTDNVVLDDESVIKELEQEGTYKYLGVNEGDGIQHSKMKEKIRKECLRRVRLIMKTELNSQNKITAINSLAIPVVTYSFNIINWNLSEIRNLDTKIRKQFTCHRMHHPKSDIDRLYVPRTRGGRGMIQLELSYKTNTIGLSEYLDKTEDWMLQLVSAHENSKKLHSVLKEAAKFSRQLDLNLNNEYDNHLQPTEIARKIKNAAKNNGLKQLESRWQGKPLHGQFAARSKNADVDETATHQWLRSSGLKGETEGFILAAQDQSLFTRNYQANVLHNGADGRCRFCEEKLETIDHLVSGCSVLTPNEYKNRHDRVGQYLHWKILNHFAIETKSNWYEHHPEPVTEGKNITILWDFPVHTDRTIQANRPDIIVKDKNSNTCLLIDMSVPSDKNVAAKVFEKLSKYKDLEIEIEKMWHLKTKTIPVVIGALGLIKKGTTDYLKTIPGEPSLNEAQKIVLNSTAHILRRTLSI

SEQ ID NO: 24821 - protein, 1251 aa, Morbakka virulenta
MRTRRKTYRIVRRAGQQGTRPSGRDQPEVEKNATGSNSSQNESTQGHRNEVTLTSGPSEPPSITTSVSLQKKKRIKWSREENAEVIYCFYYALEKPETNNTDDTFRIWCERNTNNDKIENMDANRLANQRRYIMREKKLTEIEVSSIKDRVKCDTREHLDQEIELERDAENQVENVIENVNVLEEGGVEAIEPEPVILLNEQELNDMKNDILEEFSSVKHTNIEDREALLKIRHPQRFRNIFNLCNVALESIFNEIDPNLTELNELMYATGKVIQEKCGVKVKKRKSVRKTSKPKWQIRIEKEIERFRREISLLDELQKNEDLKSGKARKVLRKYDIKSRDQLPSLKEELKQKLQVKAQRLRRFDKRQKFYRQNRIFETDTKKFFREIMKDVISVEEVPSEEQVREFWNKIWGNEKGYNESAEWLGDLADSTKDILEQHWEDISTNEIKTALSKSHKWKSPGIDKIPNFWLDTLSSAHSRMAANFNKLLLEPESIPKWFCLGTTYLLPKSGETGNPKNYRPITCLSTSYKLLTSILTERTYIHMDEQNIFPTEQKGCKRGSYGCKDQLLINKMILENTHSKKRNLSTAWIDYKKAFDSVPHSWILKTLDMYKVSPTLINFLRTSMTLWETNLILTHANGTLFSNCMRIKCGIFQGDSLSPLLFCMALFPLSKLLNDTGYGYKIMERKINHLFYMDDLKLYAKDDGELEGLLKTVKAFSDDIGMEFGLDKCAKATFKRGKLDKTQNIDLDEGTVIKELEQEGTYKYLGINEGDGIQHSKMKEKIRKECIRRVRSIMKTELNSKNKITAINSLAVPVVSYSFNIINWNLSDLQKLDTKIRKQLTCNRMHHPKSDVDRLYLPRNKGGRGMIQLELSYKTSTIGLAKYLDLTDDWMLQLVNRHENSKRLHSILKESGKFSEQFGIDLNAETPPSPTLAAKQTKQKAKKSGLDKLESRWQEKPLHGQFAARSNNADVDKVATHQWLRSSGLKGETEGFILAAQDQSLFTRNYQANILHNGATPECRFCENGTETIDHLISGCSVLTSNEYKNRHDRVGQYLHWKICQHFSIDTPSNWYEHHPTPVTEGKDVTILWDFPIQTDRTIQANRPDIVIKNKKDNTCLLIDMSVPSDRNVSAKIFEKLSKYKDLEIEIGKMWHLRTKTIPVIVGALGLIKKGTDTFLKQIPGEPSLQEVQKIVLNGTAIFLGKPSPFNCCELMFVVLSENDFYYVLTGLNDTLLVHLKRFCYPTSLTRGHW

SEQ ID NO: 24822 - protein, 719 aa, Morbakka virulenta
MIEPHLTPKWFCQGITYLLAKTNETAKPKNYRPITCLSTSYKLLTSILTERTYVHMEEQNIFPKEQKGCRRGSYGCKDQLLINKMILENAHTKHKNLSTAWIDYKKAFDSVPHSWILKSLEMFKISPVLINFLRISMSLWETNLTLHHANGTLISNGMQIQCGIFQGDSLSPLLFCIALIPLSQLLNNTGYGYKIMDKMINHLFYMDDLKLYAHNDGELEGLLKTVKSFSDDIGMEFGLDKCAKATFKRGKLITSENIELDDETVIKQLDQEGTYKYLGVNEGDGVQHSKMKEKIRKECIRRVRSILKTELNSKNKLTAINTLAIPVVAYSFNVIDWNLTELKNIDTKIRKQLTSNRMYHPKSDVDRLYVPRIKGGRGMIQLELSYKTSTVGLLQYLDLSNDWMLRLVRVHENSKRLHSVVKESAKFSHELGIENENIEHVSPTIAAKRRKQKAKKIGQDKLQSRWHEKPLHGQFAARSKQADVDEIATHQWLRSSGLKGETEGFILAAQDQSLFTRNYQASILHNGADPKCRFCEDKVETIDHLVSGCSILTPNEYKNRHDRVGQYLHWRICKHFCIETEANWYEHHPEAVTEGKNVTIMWDFPIHTDRTIQANRPDIVIKDKTNNTCLFIDMSVPSDKNVSAKVFEKLSKYKDLEIEVEKMWHLKTKTLPVVIGALGLIKKGTDKFLQQIPGNPKLEEVQKIVLNSTAHVLRRALSI

SEQ ID NO: 24823 - protein, 1094 aa, Morbakka virulenta
MDANRLANQRRYIIREKKLTEVEISNIKERVKDDTRENLVEDLGNELQQMDGDVFTIDENIDMHGNLNVLEEEQQKSVGPVPAVEVDEEELANMKIDILEEFSVVQHTKIEERESLFKIRHPHKFKNIFNLGNKALEIICNEINPNLTELNELMYATGKVLQTKCGIKIKKGKSTKKASKPKWQLKIEMEIKTFRREISLVEELQKNENFKSGKARKVLRKYDIKDREQLPSLKEELKQKLQVKAQRLRRFDKRQKFYRQNKIFETDAKKFYREIGKKAITAEDVPSENEVREFWNKIWGNEKGFNENAEWLQNLEESTRDIPEQIWVEITTGEVKKALQKSHKWKSPGIDKVPNFWLDSLSSVHDRIAVIFNKIITEPETIPKWFCLGTTYLLPKSNETRNPKNYRPITCLSTSYKLLTSILTDRTYIHMDEQNIFPIEQKGCKRGSYGCKDQLLINKMILENAHTKHKNLSTAWIDYKKAFDSVPHSWILKTLEMYKVSPAFINFLRVSMTLWETNLTLTHANGTLFSNCMQIKCGIFQGDSLSPLLFCMALIPLSKLLNDTELGYKIMGRKINHLFYMDDLKLYAKDDGDLEGLLKTVKGFSDDIGMEFGLDKCAKASFKRGKLERTENIELDEVTVIQDLEQEGSYKYLGVSEGDGIQHSKMKEKIRKECIRRVRSIMKTELNSKNRISAINSLAVPVVTYSFGIINWNLSDLKRLDTKIRKQLTCNLMHHPKSDVDRLYLPRNTGGRGMIQFELSYKTSIIGLSQYLDLTNDWMLQHVYRHENSKRLHSILKESEKFFRELGVDLEVDNTLNPTVAAKKTKQKAKKTGLDRLESRWQEKPLHGQFAARSNNADVDKEATHQWLRSAGLKGETEGFILAAQDQSLFTRNYQANVLHNGANQECRFCEDKTETIDHLVSGCSVLTPNEYKNRHDRVGQYLHWKICQHFSIKTQASWYEHHPAPVTESKDITILWDFPIQTDRTIQANRPDIVIKNRKENTCLLIDMSVPSDRNVSAKTFEKLAKYKDLEIEVEKMWHLKTKTIPVIVGALGLIKKGTDSLLKQIPGEPSLQEVQKIVLNGTAHLLRRALSI

SEQ ID NO: 24824 - protein, 1206 aa, Morbakka virulenta
MKTRSKNKSCLIARRADQQVARASVSDQAEDFEKSATRSTSYTSQNPPGYQNRTPPIPGSVVQQISIDNKKKTRLKWSREEYAEVMYCFYYVLEKPETNNTDNTYITWCVRNSNSEKMEMLDPNKLANVRRCIVGRKKLTDIEISIIKGRVKNDTRYLQMENDELERNLDEQELVMSKNTDARVENNVDEVVQNEVVVDEEEMLRMKIDIIEELSIVKHTEMSERDALLKIRHPYKLKSILNIGNKALEQLCHDINPDLSELNKLIYATGRVLQAKCGIKLRKKTTNKKHSKPKWQVKIEKEIEGFRREISILEELQKDNGKKSDKARKVIRKYKVLSVEQIPTIKEELKQKLQVKAQRLRRLNKRQKFFRQNKIFETDAKKFYREVGKESISVEAIPSDEQVKEFWNNIWGKEKQFNENAEWVRDLEKSTRDIPKQEWENITIEEIQSALKKSHKWKSPGIDQIPNFWLNTLSSAHAKLASNFNSIMIEPHLTPKWFCQGITYLLAKTNETAKPKNYRPITCLSTSYKLLTSILTERTYVHMEEQNIFPKEQKGCRRGSYGCKDQLLINKMILENAHTKHKNLSTAWIDYKKAFDSVPHSWILKSLEMFKISPVLINFLRISMSLWETNLTLHHANGTLISNGMQIQCGIFQGDSLSPLLFCIALIPLSQLLNNTGYGYKIMDKIINHLFYMDDLKLYAHNDGELEGLLKTVKSFSDDIGMEFGLDKCAKATFKRGKLITSENIELDDETVIKQLDQEGTYKYLGVNEGDGVQHSKMKEKIRKECIRRVRSILKTELNSKNKLTAINTLAIPVVAYSFNVIDWNLTELKNIDTKIRKQLTSNRMYHPKSDVDRLYVPRIKGGRGMIQLELSYKTSTVGLLQYLDLSNDWMLRLVRVHENSKRLHSVVKESAKFSHELGIENENIEHVSPTIAAKRRKQKAKKIGQDKLQSRWHEKPLHGQFAARSKQADVDEIATHQWLRSSGLKGETEGFILAAQDQSLFTRNYQACILHNGADPKCRFCEDKVETIDHLVSGCSILTPNEYKNRHDRVGQYLHWRICKHFCIETEANWYEHHPEAVTEGKNVTIMWDFPIHTDRTIQANRPDIVIKDKTNNTCLFIDMSVPSDKNVSAKVFEKLSKYKDLEIEVEKMWHLKTKTLPVVIGALGLIKKGTDKFLQQIPGNPKLEEVQKIVLNSTAHVLRRALSI

SEQ ID NO: 24825 - protein, 1236 aa, Morbakka virulenta
MSGGVKSVPLSTWTKNTSFRLARNIQLFYQMKTRSKNKSCRIARRADQQGARASVSDQAEDFEKSATRSTSPTSQNPPGHQNGTPPIPGPVVQQASIDNKKKPRLKWTREEYAEVMYCFYYALEKPETNITDNTYTTWCVRNSNSEKMEMLDPNKLANVRRYIVGSKKLTDIEISIIKDRVKNDTRELQVENDEVEGNLDEQELVMSNNADARVENNVDEVAENEVVVDEEEIFSMKMDIIEELSIVKHTDMSEREALLKIRHPHKLKSILSIGNKALEQLCHDINPDLSELNKLIYATGRVLQAKCGIKLRKKTTNKKHSKPKWQVKIEKEIEGFRREISILEELQKDNGKKSGKARKVIRKYKVLSVEQIPTIKEELKQKLQVKAQRLRRLNKRQKFFRQNKIFETDAKKFYREVGKESISVEAIPSDEQVKEFWNNIWGKEKQFNENAEWVRDLEKSTRDIPKQEWENITIEEIQSALKKSHKWKSPGIDQIPNFWLNTLSSAHAKLASNFNSIMIEPHLTPKWFCQGITYLLAKTNETAKPKNYRPITCLSTSYKLLTSILTERTYVHMEEQNIFPKEQKGCRRGSYGCKDQLLINKMILENAHTKHKNLSTAWIDYKKAFDSVPHSWILKSLEMFKISPVLINFLRISMSLWETNLTLHHANGTLISNGMQIQCGIFQGDSLSPLLFCIALIPLSQLLNNTGYGYKIMDKIINHLFYMDDLKLYAHNDGELEGLLKTVKSFSDDIGMEFGLDKCAKATFKRGKLITSENIELDDETVIKQLDQEGTYKYLGVNEGDGVQHSKMKEKIRKECIRRVRSILKTELNSKNKLTAINTLAIPVVAYSFNVIDWNLTELKNIDNKIRKQLTSNRMYHPKSDVDRLYVPRIKGGRGMIQLELSYKTSTVGLLQYLDLSNDWMLRLVRVHENSKRLHSVVKESAKFSHELGIENENIEHVSPTIAAKRRKQKAKKIGQDKLQSRWHEKPLHGQFAARSKQADVDEIATHQWLRSSGLKGETEGFILAAQDQSLFTRNYQACILHNGADPKCRFCEDKVETIDHLVSGCSILTPNEYKNRHDRVGQYLHWRICKHFCIETEANWYEHHPEAVTEGKNVTIMWDFPIHTDRTIQANRPDIVIKDKTNNTCLFIDMSVPSDKNVSAKVFEKLSKYKDLEIEVEKMWHLKTKTLPVVIGALGLIKKGTDKFLEQILGNPKLEEVQKIVLNSTAHVLRRALSI

SEQ ID NO: 24826 - protein, 1121 aa, Morbakka virulenta
MYCFYYALEKPETNITDNTYTTWCVRNSNSEKMEMLDPNKLANVRRYIVGSKKLTDIEISIIKDRVKNDTRELQVENDEVEGNLDEQELVMSNNADARVENNVDEVAENEVVVDEEEIFSMKMDIIEELSIVKHTDMSEREALLKIRHPHKLKSILSIGNKALEQLCHDINPDLSELNKLIYATGRVLQAKCGIKLRKKTTNKKHSKPKWQVKIEKEIEGFRREISILEELQKDNGKKSGKARKVIRKYKVLSVEQIPTIKEELKQKLQVKAQRLRRLNKRQKFFRQNKIFETDAKKFYREVGKESISVEAIPSDEQVKEFWNNIWGKEKQFNENAEWVRDLEKSTRDIPKQEWENITIEEIQSALKKSHKWKSPGIDQIPNFWLNTLSSAHAKLASNFNSIMIEPHLTPKWFCQGITYLLAKTNETAKPKNYRPITCLSTSYKLLTSILTERTYVHMEEQNIFPKEQKGCRRGSYGCKDQLLINKMILENAHTKHKNLSTAWIDYKKAFDSVPHSWILKSLEMFKISPVLINFLRISMSLWETNLTLHHANGTLISNGMQIQCGIFQGDSLSPLLFCIALIPLSQLLNNTGYGYKIMDKMINHLFYMDDLKLYAHNDGELEGLLKTVKSFSDDIGMEFGLDKCAKATFKRGKLITSENIELDDETVIKQFDQEGTYKYLGVNEGDGVQHSKMKEKIRKECIRRVRSILKTELNSKNKLTAINTLAIPVVAYSFNVIDWNLTELKNIDTKIRKQLTSNRMYHPKSDVDRLYVPRIKGGRGMIQLELSYKTSTVGLLQYLDLSNDWMLRLVRVHENSKRLHSVVKESAKFSHELGIENENIEHVSPTIAAKRRKQKAKKIGQDKLQSRWHEKPLHGQFAARSKQADVDEIATHQWLRSSGLKGETEGFILAAQDQSLFTRNYQACILHNGADPKCRFCEDKVETIDHLVSGCSILTPNEYKNRHDRVGQYLHWRICKHFCIETEANWYEHHPEAVTEGKNVTIMWDFPIHTDRTIQANRPDIVIKDKTNNTCLFIDMSVPSDKNVSAKVFEKLSKYKDLEIEVEKMWHLKTKTLPVVIGALGLIKKGTDKFLQQIPGNPKLEEVQKIVLNSTAHVLRRALSI

SEQ ID NO: 24827 - protein, 1094 aa, Morbakka virulenta
MDANRLANQRRYIIREKKLTEVEISNIKERVKDDTRENLVEDLGNELQQMDGDVFTIDENIDMHGNLNVLEEEQQKSVGPVPAVEVDEEELANMKIDILEEFSVVQHTKIEERESLFKIRHPHKFKNIFNLGNKALEIICNEINPNLTELNELMYATGKVLQTKCGIKIKKGKSTKKASKPKWQLKIEMEIKTFRREISLVEELQKNENFKSGKARKVLRKYDIKDREQLPSLKEELKQKLQVKAQRLRRFDKRQKFYRQNKIFETDAKKFYREIGKKAITAEDVPSENEVREFWNKIWGNEKGFNENAEWLQNLEESTRDIPEQIWVEITTGEVKKALQKSHKWKSPGIDKVPNFWLDSLSSVHDRIAVIFNKIITEPETIPKWFCLGTTYLLPKSNETRNPKNYRPITCLSTSYKLLTSILTDRTYIHMDEQNIFPIEQKGCKRGSYGCKDQLLINKMILENAHTKHKNLSTAWIDYKKAFDSVPHSWILKTLEMYKVSPAFINFLRVSMTLWETNLTLTHANGTLFSNCMQIKCGIFQGDSLSPLLFCMALIPLSKLLNDTELGYKIMGRKINHLFYMDDLKLYAKDDGDLEGLLKTVKGFSDDIGMEFGLDKCAKASFKRGKLERTENIELDEVTVIQDLEQEGSYKYLGVSEGDGIQHSKMKEKIRKECIRRVRSIMKTELNSKNRISAINSLAVPVVTYSFGIINWNLSDLKRLDTKIRKQLTCNLMHHPKSDVDRLYLPRNTGGRGMIQFELSYKTSIIGLSQYLDLTNDWMLQHVYRHENSKRLHSILKESEKFFRELGVDLEVDNTLNPTVAAKKTKQKAKKTGLDRLESRWQEKPLHGQFAARSNNADVDKEATHQWLRSAGLKGETEGFILAAQDQSLFTRNYQANVLHNGANQECRFCEDKTETIDHLVSGCSVLTPNEYKNRHDRVGQYLHWKICQHFSIKTQASWYEHHPAPVTESKDITILWDFPIQTDRTIQANRPDIVIKNRKENTCLLIDMSVPSDRNVSAKTFEKLAKYKDLEIEVEKMWHLKTKTIPVIVGALGLIKKGTDSFLKQIPGEPSLQEVQKIVLNGTAHLLRRALSI

SEQ ID NO: 24828 - protein, 1094 aa, Morbakka virulenta
MDANRLANQRRYIIREKKLTEVEISNIKERVKDDTRENLVEDLGNELQQMDGDVFTIDENIDMHGNLNVLEEEQQKSVGPVPAVEVDEEELANMKIDILEEFSVVQHTKIEERESLFKIRHPHKFKNIFNLGNKALEIICNEINPNLTELNELMYATGKVLQTKCGIKIKKGKSTKKASKPKWQLKIEMEIKTFRREISLVEELQKNENFKSGKARKVLRKYDIKDREQLPSLKEELKQKLQVKAQRLRRFDKRQKFYRQNKIFETDAKKFYREIGKKAITAEDVPSENEVREFWNKIWGNEKGFNENAEWLQNLEESTRDIPEQIWVEITTGEVKKALQKSHKWKSPGIDKVPNFWLDSLSSVHDRIAVIFNKIITEPETIPKWFCLGTTYLLPKSNETRNPKNYRPITCLSTSYKLLTSILTDRTYIHMDEQNIFPIEQKGCKRGSYGCKDQLLINKMILENAHTKHKNLSTAWIDYKKAFDSVPHSWILKTLEMYKVSPAFINFLRVSMTLWETNLTLTHANGTLFSNYMQIKCGIFQGDSLSPLLFCMALIPLSKLLNDTELGYKIMGRKINHLFYMDDLKLYAKDDGDLEGLLKTVKGFSDDIGMEFGLDKCAKASFKRGKLERTENIELDEVTVIQDLEQEGSYKYLGVSEGDGIQHSKMKEKIRKECIRRVRSIMKTELNSKNRISAINSLAVPVVTYSFGIINWNLSDLKRLDTKIRKQLTCNLMHHPKSDVDRLYLPRNTGGRGMIQFELSYKTSIIGLSQYLDLTNDWMLQHVYRHENSKRLHSILKESEKFFRELGVDLEVDNTLNPTVAAKKTKQKAKKTGLDRLESRWQEKPLHGQFAARSNNADVDKEATHQWLRSAGLKGETEGFILAAQDQSLFTRNYQANVLHNGANQECRFCEDKTETIDHLVSGCSVLTPNEYKNRHDRVGQYLHWKICQHFSIKTQASWYEHHPAPVTESKDITILWDFPIQTDRTIQANRPDIVIKNRKENTCLLIDMSVPSDRNVSAKTFEKLAKYKDLEIEVEKKWHLKTKTIPVIVGALGLIKKGTDNFLKQIPGEPSLQEVQKIVLNGTAHLLRRALSI

SEQ ID NO: 24829 - protein, 1121 aa, Morbakka virulenta
MYCFYYALEKPETNITDNTYTTWCVRNSNSEKMEMLDPNKLANVRRYIVGSKKLTDIEISIIKDRVKNDTRELQVENDEVEGNLDEQELVMSNNADARVENNVDEVAENEVVVDEEEIFSMKMDIIEELSIVKHTDMSEREALLKIRHPHKLKSILSIGNKALEQLCHDINPDLSELNKLIYATGRVLQAKCGIKLRKKTTNKKHSKPKWQVKIEKEIEGFRREISILEELQKDNGKKSGKARKVIRKYKVLSVEQIPTIKEELKQKLQVKAQRLRRLNKRQKFFRQNKIFETDAKKFYREVGKESISVEAIPSDEQVKEFWNNIWGKEKQFNENAEWVRDLEKSTRDIPKQEWENITIEEIQSALKKSHKWKSPGIDQIPNFWLNTLSSAHAKLASNFNSIMIEPHLTPKWFCQGITYLLAKTNETAKPKNYRPITCLSTSYKLLTSILTERTYVHMEEQNIFPKEQKGCRRGSYGCKDQLLINKMILENAHTKHKNLSTAWIDYKKAFDSVPHSWILKSLEMFKISPVLINFLRISMSLWETNLTLHHANGTLISNGMQIQCGIFQGDSLSPLLFCIALIPLSQLLNNTGYGYKIMDKIINHLFYMDDLKLYAHNDGELEGLLKTVKSFSDDIGMEFGLDKCAKATFKRGKLITSENIELDDETVIKQLDQEGTYKYLGVNEGDGVQHSKMKEKIRKECIRRVRSILKTELNSKNKLIAINTLAIPVVAYSFNVIDWNLTELKNIDTKIRKQLTSNRMYHPKSDVDRLYVPRIKGGRGMIQLELSYKTSTVGLLQYLDLSNDWMLRLVRVHENSKRLHSVVKESAKFSHELGIENENIEHVSPTIAAKRRKQKAKKIGQDKLQSRWHEKPLHGQFAARSKQADVDEIATHQWLRSSGLKGETEGFILAAQDQSLFTRNYQACILHNGADPKCRFCEDKVETIDHLVSGCSILTPNEYKNRHDRVGQYLHWRICKHFCIETEANWYEHHPEAVTEGKNVTIMWDFPIHTDRTIQANRPDIVIKDKTNNTCLFIDMSVPSDKNVSAKVFEKLSKYKDLEIEVEKMWHLITKTLPVVIGALGLIKKGTDKFLEQIPGNPKLEEVQKIVLNSTAHVLRRAPSI

SEQ ID NO: 24830 - protein, 1236 aa, Morbakka virulenta
MSGGVKSVPLSTWTRNTRLLLARNIQLFYQMKTRSKNKSCRIARRADQQGARASVSDQAEDFEKSATRSTSPTSQNPPGHQNGTPPIPGPVVQQASIDNKKKPRLKWTREEYAEVMYCFYYALEKPETNITDNTYTTWCVRNSNSEKMEMLDPNKLANVRRYIVGSKKLTDIEISIIKDRVKNDTRELQVENDEVEGNLDEQELVMSNNADARVENNVDEVAENEVVVDEEEIFSMKMDIIEELSIVKHTDMSEREALLKIRHPHKLKSILSIGNKALEQLCHDINPDLSELNKLIYATGRVLQAKCGIKLRKKTTNKKHSKPKWQVKIEKEIEGFRREISILEELQKDNGKKSGKARKVIRKYKVLSVEQIPTIKEELKQKLQVKAQRLRRLNKRQKFFRQNKIFETDAKKFYREVGKESISVEAIPSDEQVKEFWNNIWGKEKQFNENAEWVRDLEKSTRDIPKQEWENITIEEIQSALKKSHKWKSPGIDQIPNFWLNTLSSAHAKLASNFNSIMIEPHLTPKWFCQGITYLLAKTNETAKPKNYRPITCLSTSYKLLTSILTERTYVHMEEQNIFPKEQKGCRRGSYGCKDQLLINKMILENAHTKHKNLSTAWIDYKKAFDSVPHSWILKSLEMFKISPVLINFLRISMPLWETNLTLHHTNGTLISNGMQIQCGIFQGDSLSPLLFCIALIPLSQLLNNTGYGYKIMDKIINHLFYMDDLKLYAHNDGELEGLLKTVKSFSDDIGMEFGLDKCAKATFKRGKLITSENIELDDETVIKQLDQEGTYKYLGVNEGDGVQHSKMKEKIRKECIRRVRSILKTELNSKNKLTAINTLAIPVVAYSFNVIDWNLTELKNIDTKIRKQLTSNRMYHPKSDVDRLYVPRIKGGRGMIQLELSYKTSTVGLLQYLDLSNDWMLRLVRVHENSKRLHSVVKESAKFSHELGIENENIEHVSPTIAAKRRKQKAKKIGQDKLQSRWHEKPLHGQFAARSKQADVDEIATHQWLRSSGLKGETEGFILAAQDQSLFTRNYQACILHNGADPKCRFCEDKVETIDHLVSGCSILTPNEYKNRHDRVGQYLHWRICKHFCIETEANWYEHHPEAVTEGKNVTIMWDFPIHTDRTIQANRPDIVIKDKTNNTCLFIDMSVPSDKNVSAKVFEKLSKYKDLEIEVEKMWHLKTKTLPVVIGALGLIKKGTDKFLQQIPGNPKLEEVQKIVLNSTAHVLRRALSI

SEQ ID NO: 24831 - protein, 1230 aa, Morbakka virulenta
MSGGVKSVPLSTWTRNTRLLLARNIQLFYQMKTRSKNKSCRIARRADQQGARASVSDQAEDFEKSATRSTSPTSQNPPGHQNGTPPIPGPVVQQASIDNKKKPRLKWTREEYAEVMYCFYYALEKPETNITDNTYTTWCVRNSNSEKMEMLDPNKLANVRRYIVGSKKLTDIEISIIKDRVKNDTRELQVENDEVEGNLDEQELVMSNNADARVENNVDEVAENEVVVDEEEIFSMKMDIIEELSIVKHTDMSEREALLKIRHPHKLKSILSIGNKALEQLCHDINPDLSELNKLIYATGRVLQAKCGIKLRKKTTNKKHSKPKWQVKIEKEIEGFRREISILEELQKDNGKKSGKARKVIRKYKVLSVEQIPTIKEELKQKLQVKAQRLRRLNKRQKFFRQNKIFETDAKKFYREVGKESISVEAIPSDEQVKEFWNNIWGKEKQFNENAEWVRDLEKSTRDIPKQEWENITIEEIQSALKKSHKWKSPGIDQIPNFWLNTLSSAHAKLASNFNSIMIEPHLTPKWFCQGITYLLAKTNETAKPKNYRPITCLSTSYKLLTSILTERTYVHMEEQNIFPKEQKGCRRGSYGCKDQLLINKMILENAHTKHKNLSTAWIDYKKAFDSVPHSWILKSLEMFKISPVLINFLRISMSLWETNLTLHHANGTLISNGMQIQCGIFQGDSLSPLLFCIALIPLSQLLNNTGYGYKIMDKIINHLFYMDDLKLYAHNDGELEGLLKTVKSFSDDIGMEFGLDKCAKATFKRGKLITSENIELDDETVIKQLDQEGTYKYLGVNEGDGVQHSKMKEKIRKECIRRVRSILKTELNSKNKLTAINTLAIPVVAYSFNVIDWNLTELKNIDTKIRKQLTSNRMYHPKSDVDRLYVPRIKGGRGMIQLELSYKTSTVGLLQYLDLSNDWMLRLVRVHENSKRLHSVVKESAKFSHELGIENENIEHVSPTIAAKRRKQKAKKIGQDKLQSRWHEKPLHGQFAARSKQADVDEIATHQWLRSSGLKGETEGFILAAQDQSLFTRNYQACILHNGADPKCRFCEDKVETIDHLVSGCSILTPNEYKNRHDRVGQYLHWRICKHFCIETEANWYEHHPEAVTEGKNVTIMWDFPIHTDRTIQANRPDIVIKDKTNNTCLFIDMSVPSDKNVSAKVFEKFSKYKDLEIEVEKIWHLKTKTLPVVIGALGLIKKGTDKFFATNTWKPKTRRSPKSCIEQHSACS

SEQ ID NO: 24832 - protein, 1236 aa, Morbakka virulenta
MSGGVKSVPLSTWTRNTRLLLARNIQLFYQMKTRSKNKSCRIARRADQQGARASVSDQAEDFEKSATRSTSPTSQNPPGHQNGTPPIPGPVVQQASIDNKKKPRLKWTREEYAEVMYCFYYALEKPETNITDNTYTTWCVRNSNSEKMEMLDPNKLANVRRYIVGSKKLTDIEISIIKDRVKNDTRELQVENDEVEGNLDEQELVMSNNADARVENNVDEVAENEVVVDEEEIFSMKMDIIEELSIVKHTDMSEREALLKIRHPHKLKSILSIGNKALEQLCHDINPDLSELNKLIYATGRVLQAKCGIKLRKKTTNKKHSKPKWQVKIEKEIEGFRREISILEELQKDNGKKSGKARKVIRKYKVLSVEQIPTIKEELKQKLQVKAQRLRRLNKRQKFFRQNKIFETDAKKFYREVGKESISVEAIPSDEQVKEFWNNIWGKEKQFNENAEWVRDLEKSTRDIPKQEWENITIEEIQSALKKSHKWKSPGIDQIPNFWLNTLSSAHAKLASNFNSIMIEPHLTPKWFCQGITYLLAKTNETAKPKNYRPITCLSTSYKLLTSILTERTYVHMEEQNIFPKEQKGCRRGSYGCKDQLLINKMILENAHTKHKNLSTAWIDYKKAFDSVPHSWILKSLEMFKISPVLINFLRISMSLWETNLTLHHANGTLISNGMQIQCGIFQGDSLSPLLFCIALIPLSQLLNNTGYGYKIMDKIINHLFYMDDLKLYAHNDGELEGLLKTVKSFSDDIGMEFGLDKCAKATFKRGKLITSENIELDDETVIKQLDQEGTYKYLGVNEGDGVQHSKMKEKIRKECIRRVRSILKTELNSKNKLTAINTLAIPVVAYSFNVIDWNLTELKNIDTKIRKQLTSNRMYHPKSDVDRLYVPRIKGGRGMIQLELSYKTSTVGLLQYLDLSNDWMLRLVRVHENSKRLHSVVKESAKFSHELGIENENIEHVSPTIAAKRRKQKAKKIGQDKLQSRWHEKPLHGQFAARSKQADVDEIATHQWLRSSGLKGETEGFILAAQDQSLFTRNYQACILHNGADPKCRFCEDKVETIDHLVSGCSILTPNEYKNRHDRVGQYLHWRICKHFCIETEANWYEHHPEAVTEGKNVTIMWDFPIHTDRTIQANRPDIVIKDKTNNTCLFIDMSVPSDKNVSAKVFEKLSKYKDLEIEVEKMWHLKTKTLPVVIGALGLIKKGTDKFLQQIPGNPKLEEVQKIVLNSTAHVLRRALSI

SEQ ID NO: 24833 - protein, 1236 aa, Morbakka virulenta
MSGGVKSVPLSTWTRNTRLLLARNIQLFYQMKTRSKNKSCRIARRADQQGARASVSDQAEDFEKSATRSTSPTSQNPPGHQNGTPPIPGPVVQQASIDNKKKPRLKWTREEYAEVMYCFYYALEKPETNITDNTYTTWCVRNSNSEKMEMLDANKLANVRRYIVGSKKLTDIEISIIKDRVKNDTRELQVENDEVEGNLDEQELVMSNNADARVENNVDEVAENEVVVDEEEIFSMKMDIIEELSIVKHTDMSEREALLKIRHPHKLKSILSIGNKALEQLCHDINPDLSELNKLIYATGRVLQAKCGIKLRKKTTNKKHSKPKWQVKIEKEIEGFRREISILEELQKDNGKKSGKARKVIRKYKVLSVEQIPTIKEELKQKLQVKAQRLRRLNKRQKFFRQNKIFETDAKKFYREVGKESISVEAIPSDEQVKEFWNNIWGKEKQFNENAEWVRDLEKSTRDIPKQEWENITIEEIQSALKKSHKWKSPGIDQIPNFWLNTLSSAHAKLASNFNSIMIEPHLTPKWFCQGITYLLAKTNETAKPKNYRPITCLSTSYKLLTSILTERTYVHMEEQNIFPKEQKGCRRGSYGCKDQLLINKMILENAHTKHKNLSTAWIDYKKAFDSVPHSWILKSLEMFKISPVLINFLRISMSLWETNLTLHHANGTLISNGMQIQCGIFQGDSLSPLLFCIALIPLSQLLNNTGYGYKIMDKIINHLFYMDDLKLYAHNDGELEGLLKTVKSFSDDIGMEFGLDKCAKATFKRGKLITSENIELDDETVIKQFDQEGTYKYLGVNEGDGVQHSKMKEKIRKECIRRVRSILKTELNSKNKLTAINTLAIPVVAYSFNVIDWNLTELKNIDTKIRKQLTSNRMYHPKSDVDRLYVPRIKGGRGMIQLELSYKTSTVGLLQYLDLSNDWMLRLVRVHENSKRLHSVVKESAKFSHELGIENENIEHVSPTIAAKRRKQKAKKIGQDKLQSRWHEKPLHGQFAARSKQADVDEIATHQWLRSSGLKGETEGFILAAQDQSLFTRNYQACILHNGADPKCRFCEDKVETIDHLVSGCSILTPNEYKNRHDRVGQYLHWRICKHFCIETEANWYEHHPEAVTEGKNVTIMWDFPIHTDRTIQANRPDIVIKDKTNNTCLFIDMSVPSDKNVSAKVFEKLSKYKDLEIEVEKMWHLKTKTLPVVIGALGLIKKGTDKFLQQIPGNPKLEEVQKIVLNSTAHVLRRALSI

SEQ ID NO: 24834 - protein, 1121 aa, Morbakka virulenta
MYCFYYALEKPETNITDNTYTTWCVRNSNSEKMEMLDPNKLANVRRYIVGSKKLTDIEISIIKDRVKNDTRELQVENDEVEGNLDEQELVMSNNADARVENNVDEVAENEVVVDEEEIFSMKMDIIEELSIVKHTDMSEREALLKIRHPHKLKSILSIGNKALEQLCHDINPDLSELNKLIYATGRVLQAKCGIKLRKKTTNKKHSKPKWQVKIEKEIEGFRREISILEELQKDNGKKSGKARKVIRKYKVLSVEQIPTIKEELKQKLQVKAQRLRRLNKRQKFFRQNKIFETDAKKFYREVGKESISVEAIPSDEQVKEFWNNIWGKEKQFNENAEWVRDLEKSTRDIPKQEWENITIEEIQSALKKSHKWKSPGIDQIPNFWLNTLSSAHAKLASNFNSIMIEPHLTPKWFCQGITYLLAKTNETAKPKNYRPITCLSTSYKLLTSILTERTYVHMEEQNIFPKEQKGCRRGSYGCKDQLLINKMILENAHTKHKNLSTAWIDYKKAFDSVPHSWILKSLEMFKISPVLINFLRISMPLWETNLTLHHTNGTLISNGMQIQCGIFQGDSLSPLLFCIALIPLSQLLNNTGYGYKIMDKIINHLFYMDDLKLYAHNDGELEGLLKTVKSFSDDIGMEFGLDKCAKATFKRGKLITSENIELDDETVIKQLDQEGTYKYLGVNEGDGVQHSKMKEKIRKECIRRVRSILKTELNSKNKLTAINTLAIPVVAYSFNVIDWNLTELKNIDTKIRKQLTSNRMYHPKSDVDRLYVPRIKGGRGMIQLELSYKTSTVGLLQYLDLSNDWMLRLVRVHENSKRLHSVVKESAKFSHELGIENENIEHVSPTIAAKRRKQKAKKIGQDKLQSRWHEKPLHGQFAARSKQADVDEIATHQWLRSSGLKGETEGFILAAQDQSLFTRNYQACILHNGADPKCRFCEDKVETIDHLVSGCSILTPNEYKNRHDRVGQYLHWRICKHFCIETEANWYEHHPEAVTEGKNVTIMWDFPIHTDRTIQANRPDIVIKDKTNNTCLFIDMSVPSDKNVSAKVFEKLSKYKDLEIEVEKMWHLKTKTLPVVIGALGLIKKGTDKFLQQIPGNPKLEEVQKIVLNSTAHVLRRALSI

SEQ ID NO: 24835 - protein, 1205 aa, Morbakka virulenta
MKTRSKNKSCRIARRADQQGARASVSGQAEDFEKSATRSTSSTSQNPPGHQNGTPPIPGPVVQQASIDNKKKPRLKWTREEYAEVMYCFYYALEKPETNITDNTYTTWCVRNSNSEKMEMLDPNKLANVRRYIVGSKKLTDIEISIIKDRVKNDTRELQVENDEVEGNLDEQELVMSNNADARVENNVDEVAENEVVVDEEEIFSMKMDIIEELSIVKHTDMSEREALLKIRHPHKLKSILSIGNKALEQLCHDINPDLSELNKLIYATGRVLQAKCGIKLRKKTTNKKHSKPKWQVKIEKEIEGFRREISILEELQKDNGKKSGKARKVIRKYKVLSVEQIPTIKEELKQKLQVKAQRLRRLNKRQKFFRQNKIFETDAKKFYREVGKESISVEAIPSDEQVKEFWNNIWGKEKQFNENAEWVRDLEKSTRDIPKQEWENITIEEIQSALKKSHKWKSPGIDQIPNFWLNTLSSAHAKLASNFNSIMIEPHLTPKWFCQGITYLLAKTNETAKPKNYRPITCLSTSYKLLTSILTERTYVHMEEQNIFPKEQKGCRRGSYGCKDQLLINKMILENAHTKHKNLSTAWIDYKKAFDSVPHSWILKSLEMFKISPVLINFLRISMSLWETNLTLHHANGTLISNGMQIQCGIFQGDSLSPLLFCIALIPLSQLLNNTGYGYKIMDKMINHLFYMDDLKLYAHNDGELEGLLKTVKSFSDDIGMEFGLDKCAKATFKRGKLITSENIELDDETVIKQLDQEGTYKYLGVNEGDGVQHSKMKEKIRKECIRRVRSILKTELNSKNKLTAINTLAIPVVAYSFNVIDWNLTELKNIDTKIRKQLTSNRMYHPKSDVDRLYVPRIKGGRGMIQLELSYKTSTVGLLQYLDLSNDWMLRLVRVHENSKRLHSVVKESAKFSHELGIENENIEHVSPTIAAKRRKQKAKKIGQDKLQSRWHEKPLHGQFAARSKQADVDEIATHQWLRSSGLKGETEGFILAAQDQSLFTRNYQACILHNGADPKCRFCEDKVETIDHLVSGCSILTPNEYKNRHDRVGQYLHWRICKHFCIETEANWYEHHPEAVTEGKNVTIMWDFPIHTDRTIQANRPDIVIKDKTNNTCLFIDMSVPSDKNVSAKVFEKLSKYKDLEIEVEKMWHLKTKTLPVVIGALGLIKKGTDKFLEQIPGNPKLEVQKIVLNSTAHVLRRALSI

SEQ ID NO: 24836 - protein, 1094 aa, Morbakka virulenta
MDANRLANQRRYIIREKKLTEVEISNIKERVKDDTRENLVEDLGNELQQMDGDVFTIDENIDMHGNLNVLEEEQQKSVGPVPAVEVDEEELANMKIDILEEFSVVQHTKIEERESLFKIRHPHKFKNIFNLGNKALEIICNEINPNLTELNELMYATGKVLQTKCGIKIKKGKSTKKASKPKWQLKIEMEIKTFRREISLVEELQKNENFKSGKARKVLRKYDIKDREQLPSLKEELKQKLQVKAQRIRRFDKRQKFYRQNKIFETDAKKFYREIGKKAITAEDVPSENEVREFWNKIWGNEKGFNENAEWLQNLEESTRDIPEQIWVEITTGEVKKALQKSHKWKSPGIDKVPNFWLDSLSSVHDRIAVIFNKIITEPETIPKWFCLGTTYLLPKSNETRNPKNYRPITCLSTSYKLLTSILTDRTYIHMDEQNIFPIEQKGCKRGSYGCKDQLLINKMILENAHTKHKNLSTAWIDYKKAFDSVPHSWILKTLEMYKVSPAFINFLRVSMTLWETNLTLTHANGTLFSNYMQIKCGIFQGDSLSPLLFCMALIPLSKLLNDTELGYKIMGRKINHLFYMDDLKLYAKDDGDLEGLLKTVKGFSDDIGMEFGLDKCAKASFKRGKLERTENIELDEVTVIQDLEQEGSYKYLGVSEGDGIQHSKMKEKIRKECIRRVRSIMKTELNSKNRISAINSLAVPVVTYSFGIINWNLSDLKRLDTKIRKQLTCNLMHHPKSDVDRLYLPRNTGGRGMIQFELSYKTSIIGLSQYLDLTNDWMLQHVYRHENSKRLHSILKESEKFFRELGVDLEVDNTLNPTVAAKKTKQKAKKTGLDRLESRWQEKPLHGQFAARSNNADVDKEATHQWLRSAGLKGETEGFILAAQDQSLFTRNYQANVLHNGANQECRFCEDKTETIDHLVSGCSVLTPNEYKNRHDRVGQYLHWKICQHFSIKTQASWYEHHPAPVTESKDITILWDFPIQTDRTIQANRPDIVIKNRKENTCLLIDMSVPSDRNVSAKTFEKLAKYKDLEIEVEKMWHLKTKTIPVIVGALGLIKKGTDSFLKQIPGEPSLQEVQKIVLNGTAHLLRRALSI

SEQ ID NO: 24837 - protein, 778 aa, Alatina alata
MEAVDIPEQQWVDITTDEITKALRKAHKWKSPGLDQVSNFWLDTLQSVHSKLASSLNKLIKEPNLTPTWFCQGTTFLLAKTVETGDSKNYRPITCLSTSYKLLTSVLSERTYTHLEEHNIFPIEQKGCKKGSYGCKDQLLINKMLLENAKSKHRHLSTAWIDYKKAFDSVPHSWILRCLELFKISPTLINFFRSSMGMWETNLFLSHSTGILSSPGMKIKCGIFQGDSLSPLLFCMALMPLSKLLNQTGYGYKIFERRINHLFYMDDLKLYASDDNELEGLLKTVKAFSDDIGMEFGLNKCAKATFKKGKLEKTKNIVLDDDSVIKELDQEGTYKYLGVNEGDGLQHAKMKEKIRKECLRRVRSILKTELNSKNRITAMNTLALPVVTYSFNIINWNLSELKRLDSKIRKLFTCNRMLHPKSDVDRLYLPRNKGGRGMIQLELYYKTTTIGLYNYLDNTEDWMLQLVNRHENSKRLHSVTKESDKYSRELDLEIEVNDSLSPTEIARNTRKKAKHEGLKQLESRWQEKPLHGQFAARANNADVDTQATHQWLRSSGLKAETEGFILAAQDQSLFTRNYQANILHNGADPKCRFCEERIETIDHLVSGCSILTPGEYKNRHDRVGQYIHWKICNHFSIKTQSDWYKHHPEPVTEGKDVTILWDFSIQTDRTIQANRPDIVIKDRKNNQCFLIDMSVPSDRNIAAKTFEKLSKYKGLEIEVEKMWHLKTCTIPVVVGALGLIKKGAKDFVSKIPGNPSLQEIQKIVLNSTAHVLRRVLTV

SEQ ID NO: 24838 - protein, 1107 aa, Morbakka virulenta
MDANRLANQRRYIIREKKLTEVEISNIKERVKDDTRENLVEDLGNELQQMDGDVFTIDENIDMHGNLNVLEEEQQKSVGPVPAVEVDEEELANMKIDILEEFSVVQHTKIEERESLFKIRHPHKFKNIFNLGNKALEIICNEINPNLTELNELMYATGKVLQTKCGIKIKKGKSTKKASKPKWQLKIEMEIKTFRREISLVEELQKNENFKSGKARKVLRKYDIKDREQLPSLKEELKQKLQVKAQRLRRFDKRQKFYRQNKIFETDAKKFYREIGKKAITAEDVPSENEVREFWNKIWGNEKGFNENAEWLQNLEESTRDIPEQIWVEITTGEVKKALQKSHKWKSPGIDKVPNFWLDSLSSVHDRIAVIFNKIITEPETIPKWFCLGTTYLLPKSNETRNPKNYRPITCLSTSYKLLTSILTDRTYIHMDEQNIFPIEQKGCKRGSYGCKDQLLINKMILENAHTKHKNLSTAWIDYKKAFDSVPHSWILKTLEMYKVSPAFINFLRVSMTLWETNLTLTHANGTLFSNCMQIKCGIFQGDSLSPLLFCMALIPLSKLLNDTELGYKIMGRKINHLFYMDDLKLYAKDDGDLEGLLKTVKGFSDDIGMEFGLDKCAKASFKRGKLERTENIELDEVTVIQDLEQEGSYKYLGVSEGDGIQHSKMKEKIRKECIRRVRSIMKTELNSKNRISAINSLAVPVVTYSFGIINWNLSDLKRLDTKIRKQLTCNLMHHPKSDVDRLYLPRNTGGRGMIQFELSYKTSIIGLSQYLDLTNDWMLQHVYRHENSKRLHSILKESEKFFRELGVDLEVDNTLNPTVAAKKTKQKAKKTGLDRLESRWQEKPLHGQFAARSNNADVDKEATHQWLRSAGLKGETEGFILAAQDQSLFTRNYQANVLHNGANQECRFCEDKTETIDHLVSGCSVLTPNEYKNRHDRVGQYLHWKICQHFSIKTQASWYEHHPAPVTESKDITILWDFPIQTDRTIQANRPDIVIKNRKENTCLLIDISVPSDRNVSAKTYVKLAKYMNLEIEVEKMWHLKTKTIPVIVGALGLIKKGTDNFLKQTPGEPYLQEIQKIVLKGTAHLLRRALLFNFITKTSFTLGHW

SEQ ID NO: 24839 - protein, 1086 aa, Morbakka virulenta
MDANRLANQRRYIIREKKLTEVEISNIKERVKDDTRENLVEDLGNELQQMDGDVFTIDENIDMHGNLNVLEEEQQKSVGPVPAVEVDEEELANMKIDILEEFSVVQHTKIEERESLFKIRHPHKFKNIFNLGNKALEIICNEINPNLTELNELMYATGKVLQTKCGIKIKKGKSTKKASKPKWQLKIEMEIKTFRREISLVEELQKNENFKSGKARKVLRKYDIKDREQLPSLKEELKQKLQVKAQRLRRFDKRQKFYRQNKIFETDAKKFYREIGKKAITAEDVPSENEVREFWNKIWGNEKGFNENAEWLQNLEESTRDIPEQIWVEITTGEVKKALQKSHKWKSPGIDKVPNFWLDSLSSVHDRIAVIFNKIITEPETIPKWFCLGTTYLLPKSNETRNPKNYRPITCLSTSYKLLTSILTDRTYIHMDEQNIFPIEQKGCKRGSYGCKDQLLINKMILENAHTKHKNLSTAWIDYKKAFDSVPHSWILKTLEMYKVSPAFINFLRVSMTLWETNLTLTHANGTLFSNCMQIKCGIFQGDSLSPLLFCMALIPLSKLLNDTELGYKIMGRKINHLFYMDDLKLYAKDDGDLEGLLKTVKGFSDDIGMEFGLDKCAKASFKRGKLERTENIELDEVTVIQDLEQEGSYKYLGVSEGDGIQHSKMKEKIRKECIRRVRSIMKTELNSKNRISAINSLAVPVVTYSFGIINWNLSDLKRLDTKIRKQLTCNLMHHPKSDVDRLYLPRNTGGRGMIQFELSYKTSIIGLSQYLDLTNDWMLQHVYRHENSKRLHSILKESEKFFRELGVDLEVDNTLNPTVAAKKTKQKAKKTGLDRLESRWQEKPLHGQFAARSNNADVDKEATHQWLRSAGLKGETEGFILAAQDQSLFTRNYQANVLHNGANQECRFCEDKTETIDHLVSGCSVLTPNEYKNRHDRVGQYLHWKICQHFSIKTQASWYEHHPAPVTESKDITILWDFPIQTDRTIQANRPDIVIKNRKENTCLLIDMSVPSDRNVSAKTFEKLAKYKDLEIEVEKMWHLKTKPIPVIEGALGLIKKGTDNFLKQIPTFFARSTKNCFERSCSFA

SEQ ID NO: 24840 - protein, 1094 aa, Morbakka virulenta
MDANRPPNQRRYIIHKKKLTEVEISNIKERVKDDIRENLVEDLGNELQEMDGDVFTIDENIDVHCNLNVLEEEQQKSVGPVPAVEVDEEELANMKIEILEEFSVVQHTKIEERESLFKIRHPHKFKNIFNLGNKALEIICNEINPNLTELNELVYATGKVLQTKCGIKIKKGKSTKKASKPKWQLKIEMEIKTFRREISLVEELQKNENFKSGKARKVLRKYDIKDREQLPSLKEELKQKLQVKAQRIRRFDKRQKFYRQNKIFETDAKKFYREIGKKAITAEDVPSENEVREFWNKIWGNEKGFNENAEWLQNLEESTRDIPEQIWVEITTGEVKKALQKSHKWKSPGIDKVPNFWLDSLSSVHDRIAVIFNKIITEPETIPKWFCLGTTYLLPKSNETRNPKNYRPITCLSTSYKLLTSILTDRTYIHMDEQNIFPIEQKGCKRGSYGCKDQLLINKMILENAHTKHKNLSTAWIDYKKAFDSVPHSWILKTLEMYKVSPAFINFLRVSMTLWETNLTLTHANGTLFSNYMQIKCGIFQGDSLSPLLFCMALIPLSKLLNDTELGYKIMGRKINHLFYMDDLKLYAKDDGDLEGLLKTVKGFSDDIGMEFGLDKCAKASFKRGKLERTENIELDEVTVIQDLEQEGSYKYLGVSEGDGIQHSKMKEKIRKECIRRVRSIMKTELNSKNRISAINSLAVPVVTYSFGIINWNLSDLKRLDTKIRKQLTCNLMHHPKSDVDRLYLPRNTGGRGMIQFELSYKTSIIGLSQYLDLTNDWMLQHVYRHENSKRLHSILKESEKFFRELGVDLEVDNTLNPTVAAKKTKQKAKKTGLDRLESRWQEKPLHGQFAARSNNADVDKEATHQWLRSAGLKGETEGFILAAQDQSLFTRNYQANVLHNGANQECRFCEDKTETIDHLVSGCSVLTPNEYKNRHDRVGQYLHWKICQHFSIKTQASWYEHHPAPVTESKDITILWDFPIQTDRTIQANRPDIVIKNRKENTCLLIDMSVPSDRNVSAKTFEKLAKYKDLEIEVEKMWHLKTKTIPVIVGALGLIKKGTDSFLKQIPGEPSLQEVQKIVLNGTAHLLRRALSI

SEQ ID NO: 24841 - protein, 1218 aa, Morbakka virulenta
MNQSLLLAVRLKYILNIKIKTRSKSYRLVRRAGQQGTRPSGRDQPEVEKNATRSTSSQNESTQGHQNEVTLNPGPSEPPTSNINTTPQKKKRKKWTREEYVEVIYCFYYALKKPETNNSDDTFKIWCERNSNSDKVEGMDANRLANQRRYIIREKKLTEVEISNIKERVKDDTRENLVEDLGNELQQMDGDVFTIDENIDMHGNLNVLEEEQQKSVGPVPAVEVDEEELANMKIDILEEFSVVQHTKIEERESLFKIRHPHKFKNIFNLGNKALEIICNEINPNLTELNELMYATGKVLQTKCGIKIKKGKSTKKASKPKWQLKIEMEIKTFRREISLVEELQKNENFKSGKARKVLRKYDIKDREQLPSLKEELKQKLQVKAQRLRRFDKRQKFYRQNKIFETDAKKFYREIGKKAITAEDVPSENEVREFWNKIWGNEKGFNENAEWLQNLEESTRDIPEQIWVEITTGEVKKALQKSHKWKSPGIDKVPNFWLDSLSSVHDRIAVIFNKIITEPETIPKWFCLGTTYLLPKSNETRNPKNYRPITCLSTSYKLLTSILTDRTYIHMDEQNIFPIEQKGCKRGSYGCKDQLLINKMILENAHTKHKNLSTAWIDYKKAFDSVPHSWILKTLEMYKVSPAFINFLRVSMTLWETNLTLTHANGTLFSNCMQIKCGIFQGDSLSPLLFCMALIPLSKLLNDTELGYKIMGRKINHLFYMDDLKLYAKDDGDLEGLLKTVKGFSDDIGMEFGLDKCAKASFKRGKLERTENIELDEVTVIQDLEQEGSYKYLGVSEGDGIQHSKMKEKIRKECIRRVRSIMKTELNSKNRISAINSLAVPVVTYSFGIINWNLSDLKRLDTKIRKQLTCNLMHHPKSDVDRLYLPRNTGGRGMIQFELSYKTSIIGLSQYLDLTNDWMLQHVYRHENSKRLHSILKESEKFFRELGVDLEVDNTLNPTVAAKKTKQKAKKTGLDRLESRWQEKPLHGQFAARSNNADVDKEATHQWLRSAGLKGETEGFILAAQDQSLFTRNYQANVLHNGANQECRFCEDKTETIDHLVSGCSVLTPNEYKNRHDRVGQYLHWKICQHFSIKTQASWYEHHPAPVTESKDITILWDFPIQTDRTIQANRPDIVIKNRKENTCLLIEMSVPSDRNVSAKTFEKLAKYKDLEIEVGKMWHLKTKTIPVIVGALGLIKKGTDNFLEQIPGEPFCKKYRKLF

SEQ ID NO: 24842 - protein, 1018 aa, Morbakka virulenta
MDANRLANQRRYIIREKKLTEVEISNIKERVKDDTRENLVEDLGNELQQMDGDVFTIDENIDMHGNLNVLEEEQQKSVGPVPAVEVDEEELANMKIDILEEFSVVQHTKIEERESLFKIRHPHKFKNIFNLGNKALEIICNEINPNLTELNELMYATGKVLQTKCGIKIKKGKSTKKASKPKWQLKIEMEIKTFRREISLVEELQKNENFKSGKARKVLRKYDIKDREQLPSLKEELKQKLQVKAQRLRRFDKRQKFYRQNKIFETDAKKFYREIGKKAITAEDVPSENEVREFWNKIWGNEKGFNENAEWLQNLEESTRDIPEQIWVEITTGEVKKALQKSHKWKSPGIDKVPNFWLDSLSSVHDRIAVIFNKIITEPETIPKWFCLGTTYLLPKSNETRNPKNYRPITCLSTSYKLLTSILTDRTYIHMDEQNIFPIEQKGCKRGSYGCKDQLLINKMILENAHTKHKNLSTAWIDYKKAFDSVPHSWILKTLEMYKVSPAFINFLRVSMTLWETNLTLTHANGTLFSNCMQIKCGIFQGDSLSPLLFCMALIPLSKLLNDTELGYKIMGRKINHLFYMDDLKLYAKDDGDLEGLLKTVKGFSDDIGMEFGLDKCAKASFKRGKLERTENIELDEVTVIQDLEQEGSYKYLGVSEGDGIQHSKMKEKIRKECIRRVRSIMKTELNSKNRISAINSLAVPVVTYSFGIINWNLSDLKRLDTKIRKQLTCNLMHHPKSDVDRLYLPRNTGGRGMIQFELSYKTSIIGLSQYLDLTNDWMLQHVYRHENSKRLHSILKESEKFFRELGVDLEVDNTLNPTVAAKKTKQKAKKTGLDRLESRWQEKPLHGQFAARSNNADVDKEATHQWLRSAGLKGETEGFILAAQDQSLFTRNYQANVLHNGANQECRFCEDKTETIDHLVSGCSVLTPNEYKNRHDRVGQYLHWKICQHFSIETQASWYEHHPAPVIESKDVTILWHFPIQTDRTIEANRPDIVIKNRKENTCLLIDMSIPSDRNVC

SEQ ID NO: 24843 - protein, 1103 aa, Morbakka virulenta
MDANRLANQRRYIIREKKLTEVEISNIKERVKDDTRENLVEDLGNELQQMDGDVFTIDENIDMHGNLNVLEEEQQKSVGPVPAVEVDEEELANMKIDILEEFSVVQHTKIEERESLFKIRHPHKFKNIFNLGNKALEIICNEINPNLTELNELMYATGKVLQTKCGIKIKKGKSTKKASKPKWQLKIEMEIKTFRREISLVEELQKNENFKSGKARKVLRKYDIKDREQLPSLKEELKQKLQVKAQRLRRFDKRQKFYRQNKIFETDAKKFYREIGKKAITAEDVPSENEVREFWNKIWGNEKGFNENAEWLQNLEESTRDIPEQIWVEITTGEVKKALQKSHKWKSPGIDKVPNFWLDSLSSVHDRIAVIFNKIITEPETIPKWFCLGTTYLLPKSNETRNPKNYRPITCLSTSYKLLTSILTDRTYIHMDEQNIFPIEQKGCKRGSYGCKDQLLINKMILENAHTKHKNLSTAWIDYKKAFDSVPHSWILKTLEMYKVSPAFINFLRVSMTLWETNLTLTHANGTLFSNCMQIKCGIFQGDSLSPLLFCMALIPLSKLLNDTELGYKIMGRKINHLFYMDDLKLYAKDDGDLEGLLKTVKGFSDDIGMEFGLDKCAKASFKRGKLERTENIELDEVTVIQDLEQEGSYKYLGVSEGDGIQHSKMKEKIRKECIRRVRSIMKTELNSKNRISAINSLAVPVVTYSFGIINWNLSDLKRLDTKIRKQLTCNLMHHPKSDVDRLYLPRNTGGRGMIQFELSYKTSIIGLSQYLDLTNDWMLQHVYRHENSKRLHSILKESEKFFRELGVDLEVDNTLNPTVAAKKTKQKAKKTGLDRLESRWQEKPLHGQFAARSNNADVDKEATHQWLRSAGLKGETEGFILAAQDQSLFTRNYQANVLHNGANQECRFCEDKTETIDHLVSGCSVLTPNEYKNRHDRVGQYLHWKICQHFSIKTQASWYEHHPAPVTESKDITILWDFPIQTDRTIQANRPDIVIKNRKENTCLLIDMSVPSDRNVSAKTFEKLAKYKDLEIEVEKMWHLKTKTIPVIVGALGLIKKGTDNFLKQIPGEPSLQEVQKIVLNGTAHLLRRALYLILLPKLPSL

SEQ ID NO: 24844 - protein, 1070 aa, Morbakka virulenta
MDANRLANQRRYIMREKKLTEIEVSSIKDRVKCDTREHLDQEIELERDAENQVENVIENVNVLEEGGVEAIEPEPVILLNEQELNDMKNDILEEFSSVKHTNIEEREALLKIRHPQRFRNIFNLCNVALESIFNEIDPNLTELNELMYATGKVIQEKCGVKVKKRKSVRKTSKPKWQIRIEKEIERFRREISLLDELQKNEDLKSGKARKVLRKYDIKSRDQLPSLKEELKQKLQVKAQRLRRFDKRQKFYRQNRIFETDTKKFFREIMKDVISVEEVPSEEQVREFWNKIWGNEKGYNESAEWLGDLADSTKDILEQHWEDISTNEIKTALSKSHKWKSPGIDKIPNFWLDTLSSAHSRMAANFNKLLLEPESIPKWFCLGTTYLLPKSGETGNPKNYRPITCLSTSYKLLTSILTERTYIHMDEQNIFPTEQKGCKRGSYGCKDQLLINKMILENTHSKKRNLSTAWIDYKKAFDSVPHSWILKTLDMYKVSPTLINFLRTSMTLWETNLILTHANGTLFSNCMRIKCGIFQGDSLSPLLFCMALFPLSKLLNDTGYGYKIMERKINHLFYMDDLKLYAKDDGELEGLLKTVKAFSDDIGMEFGLDKCAKATFKRGKLDKTQNIDLDEGTVIKELEQEGTYKYLGINEGDGIQHSKMKEKIRKECIRRVRSIMKTELNSKNKITAINSLAVPVVSYSFNIINWNLSDLQKLDTKIRKQLTCNRMHHPKSDVDRLYLPRNKGGRGMIQLELSYKTSTIGLAKYLDLTDDWMLQLVNRHENSKRLHSILKESGKFSEQFGIDLNAETPPSPTLAAKQTKQKAKKSGLDKLESRWQEKPLHGQFAARSNNADVDKVATHQWLRSSGLKGETEGFILAAQDQSLFTRNYQANILHNGATPECRFCENGTETIDYLISGCSVLTSNEYKNRHDRAGQYVDWKICQHVSIDTPSNWYEHHNTPVTEGKDVTILWDFPIQTDRTIKANRPDIVIKHKKDNTCLLIGMSVPSDRNVSAKIFEKLSQYKDLEIEIPVIVGALGLIKKGTDTFLKQIPGEPLITGSATNCFEWHCPSS

SEQ ID NO: 24845 - protein, 719 aa, Morbakka virulenta
MIEPHLTPKWFCQGITYLLAKTNETAKPKNYRPITCLSTSYKLLTSILTERTYVHMEEQNIFPKEQKGCRRGSYGCKDQLLINKMILENAHTKHKNLSTAWIDYKKAFDSVPHSWILKSLEMFKISPVLINFLRISMSLWETNLTLHHANGTLISNGMQIQCGIFQGDSLSPLLFCIALIPLSQLLNNTGYGYKIMDKIINHLFYMDDLKLYAHNDGELEGLLKTVKSFSDDIGMEFGLDKCAKATFKRGKLITSENIELDDETVIKQLDQEGTYKYLGVNEGDGVQHSKMKEKIRKECIRRVRSILKTELNSKNKLTAINTLAIPVVAYSFNVIDWNLTELKNIDTKIRKQLTSNRMYHPKSDVDRLYVPRIKGGRGMIQLELSYKTSTVGLLQYLDLSNDWMLRLVRVHENSKRLHSVVKESAKFSHELGIENENIEHVSPTIAAKRRKQKAKKIGQDKLQSRWHEKPLHGQFAARSKQADVDEIATHQWLRSSGLKGETEGFILAAQDQSLFTRNYQACILHNGADPKCRFCEDKVETIDHLVSGCSILTPNEYKNRHDRVGQYLHWRICKHFCIETEANWYEHHPEAVTEGKNVTIMWDFPIHTDRTIQANRPDIVIKDKTNNTCLFIDMSVPSDKNVSAKVFEKLSKYKDLEIEVEKMWHLKTKTLPVVIGALGLIKKGTDKFLQQIPGNPKLEEVQKIVLNSTAHVLRRALSI

SEQ ID NO: 24846 - protein, 1236 aa, Morbakka virulenta
MSGGVKSVPLSTWTRNTRLLLARNIQLFYQMKTRSKNKSCRIARRADQQGARASVSDQAEDFEKSATRSTSPTSQNPPGHQNGTPPIPGPVVQQASIDNKKKPRLKWTREEYAEVMYCFYYALEKPETNITDNTYTTWCVRNSNSEKMEMLDPNKLANVRRYIVGSKKLTDIEISIIKDRVKNDTRELQVENDEVEGNLDEQELVMSNNADARVENNVDEVAENEVVVDEEEIFSMKMDIIEELSIVKHTDMSEREALLKIRHPHKLKSILSIGNKALEQLCHDINPDLSELNKLIYATGRVLQAKCGIKLRKKTTNKKHSKPKWQVKIEKEIEGFRREISILEELQKDNGKKSGKARKVIRKYKVLSVEQIPTIKEELKQKLQVKAQRLRRLNKRQKFFRQNKIFETDAKKFYREVGKESISVEAIPSDEQVKEFWNNIWGKEKQFNENAEWVRDLEKSTRDIPKQEWENITIEEIQSALKKSHKWKSPGIDQIPNFWLNTLSSAHAKLASNFNSIMIEPHLTPKWFCQGITYLLAKTNETAKPKNYRPITCLSTSYKLLTSILTERTYVHMEEQNIFPKEQKGCRRGSYGCKDQLLINKMILENAHTKHKNLSTAWIDYKKAFDSVPHSWILKSLEMFKISPVLINFLRISMSLWETNLTLHHTNGTLISNGMQIQCGIFQGDSLSPLLFCIALIPLSQLLNNTGYGYKIMDKIINHLFYMDDLKLYAHNDGELEGLLKTVKSFSDDIGMEFGLDKCAKATFKRGKLITSENIELDDETVIKQLDQEGTYKYLGVNEGDGVQHSKMKEKIRKECIRRVRSILKTELNSKNKLTAINTLAIPVVAYSFNVIDWNLTELKNIDTKIRKQLTSNRMYHPKSDVDRLYVPRIKGGRGMIQLELSYKTSTVGLLQYLDLSNDWMLRLVRVHENSKRLHSVVKESAKFSHELGIENENIEHVSPTIAAKRRKQKAKKIGQDKLQSRWHEKPLHGQFAARSKQADVDEIATHQWLRSSGLKGETEGFILAAQDQSLFTRNYQACILHNGADPKCRFCEDKVETIDHLVSGCSILTPNEYKNRHDRVGQYLHWRICKHFCIETEANWYEHHPEAVTEGKNVTIMWDFPIHTDRTIQANRPDIVIKDKTNNTCLFIDMSVPSDKNVSAKVFEKLSKYKDLEIEVEKMWHLKTKTLPVVIGALGLIKKGTDKFLQQIPGNPKLEEVQKIVLNSTAHVLRRALSI

SEQ ID NO: 24847 - protein, 1207 aa, Morbakka virulenta
MRTRRKTYRIVRRAGQQGTRPSGRDQPEVEKNATGSNSSQNESTQGHRNEVTLTSGPSEPPSITTSVSLQKKKRIKWSREENAEVIYCFYYALEKPETNNTDDTFRIWCERNTNNDKIENMDANRLANQRRYIMREKKLTEIEVSSIKDRVKCDTREHLDQEIELERDAENQVENVIENVNVLEEGGVEAIEPEPVILLNEQELNDMKNDILEEFSSVKHTNIEEREALLKIRHPQRFRNIFNLCNVALESIFNEIDPNLTELNELMYATGKVIQEKCGVKVKKRKSVRKTSKPKWQIRIEKEIERFRREISLLDELQKNEDLKSGKARKVLRKYDIKSRDQLPSLKEELKQKLQVKAQRLRRFDKRQKFYRQNRIFETDTKKFFREIMKDVISVEEVPSEEQVREFWNKIWGNEKGYNESAEWLGDLADSTKDILEQHWEDISTNEIKTALSKSHKWKSPGIDKIPNFWLDTLSSAHSRMAANFNKLLLEPESIPKWFCLGTTYLLPKSGETGNPKNYRPITCLSTSYKLLTSILTERTYIHMDEQNIFPTEQKGCKRGSYGCKDQLLINKMILENTHSKKRNLSTAWIDYKKAFDSVPHSWILKTLDMYKVSPTLINFLRTSMTLWETNLILTHANGTLFSNCMRIKCGIFQGDSLSPLLFCMALFPLSKLLNDTGYGYKIMERKINHLFYMDDLKLYAKDDGELEGLLKTVKAFSDDIGMEFGLDKCAKATFKRGKLDKTQNIDLDEGTVIKELEQEGTYKYLGINEGDGIQHSKMKEKIRKECIRRVRSIMKTELNSKNKITAINSLAVPVVSYSFNIINWNLSDLQKLDTKIRKQLTCNRMHHPKSDVDRLYLPRNKGGRGMIQLELSYKTSTIGLAKYLDLTDDWMLQLVNRHENSKRLHSILKESGKFSEQFGIDLNAETPPSPTLAAKQTKQKAKKSGLDKLESRWQEKPLHGQFAARSNNADVDKVATHQWLRSSGLKGETEGFILAAQDQSLFTRNYQANILHNGATPECRFCENGTETIDHLISGCSVLTSNEYKNRHDRVGQYLHWKICQHFSIDTPSNWYEHHPTPVTEGKDVTILWDFPIQTDRTIQANRPDIVIKNKKDNTCLLIDMSVPSDRNVSAKIFEKLSKYKDLEIEIGKMWHLRTKTIPVIVGALGLIKKGTDTFLKQIPGEPSLQEVQKIVLNGTAHLLRKALSI

SEQ ID NO: 24848 - protein, 1207 aa, Morbakka virulenta
MRTRRKTYRIVRRAGQQGTRPSGRDQPEVEKNATGSNSSQNESTQGHRNEVTLTSGPSEPPSITTSVSLQKKKRIKWSREENAEVIYCFYYALEKPETNNTDDTFRIWCERNTNNDKIENMDANRLANQRRYIMREKKLTEIEVSSIKDRVKCDTREHLDQEIELERDAENQVENVIENVNVLEEGGVEAIEPEPVILLNEQELNDMKNDILEEFSSVKHTNIEEREALLKIRHPQRFRNIFNLCNVALESIFNEIDPNLTELNELMYATGKVIQEKCGVKVKKRKSVRKTSKPKWQIRIEKEIERFRREISLLDELQKNEDLKSGKARKVLRKYDIKSRDQLPSLKEELKQKLQVKAQRLRRFDKRQKFYRQNRIFETDTKKFFREIMKDVISVEEVPSEEQVREFWNKIWGNEKGYNESAEWLGDLADSTKDILEQHWEDISTNEIKTALSKSHKWKSPGIDKIPNFWLDTLSSAHSRMAANFNKLLLEPESIPKWFCLGTTYLLPKSGETGNPKNYRPITCLSTSYKLLTSILTERTYIHMDEQNIFPTEQKGCKRGSYGCKDQLLINKMILENTHSKKRNLSTAWIDYKKAFDSVPHSWILKTLDMYKVSPTLINFLRTSMTLWETNLILTHANGTLFSNCMRIKCGIFQGDSLSPLLFCMALFPLSKLLNDTGYGYKIMERKINHLFYMDDLKLYAKDDGELEGLLKTVKAFSDDIGMEFGLDKCAKATFKRGKLDKTQNIDLDEGTVIKELEQEGTYKYLGINEGDGIQHSKMKEKIRKECIRRVRSIMKTELNSKNKITAINSLAVPVVSYSFNIINWNLSDLQKLDTKIRKQLTCNRMHHPKSDVDRLYLPRNKGGRGMIQLELSYKTSTIGLAKYLDLTDDWMLQLVNRHENSKRLHSILKESGKFSEQFGIDLNAETPPSPTLAAKQTKQKAKKSGLDKLESRWQEKPLHGQFAARSNNADVDKVATHQWLRSSGLKGETEGFILAAQDQSLFTRNYQANILHNGATPECRFCENGTETIDHLISGCSVLTSNEYKNRHDRVGQYLHWKICQHFSIDTPSNWYEHHPTPVTEGKDVTILWDFPIQTDRTIQANRPDIVIKNKKDNTCLLIDMSVPSDRNVSAKIFEKLSKYKDLEIEIGKMWHLRTKTIPVIVGALGLSKKGTDPFLKQIPGEPSLQEVQKIVLNGTAHLLRKALSI

SEQ ID NO: 24849 - protein, 1236 aa, Morbakka virulenta
MSGGVKSVPLSTWTRNTRLLLARNIQLFYQMKTRSKNKSCRIARRADQQGARASVSDQAEDFEKSATRSTSPTSQNPPGHQNGTPPIPGPVVQQASIDNKKKPRLKWTREEYAEVMYCFYYALEKPETNITDNTYTTWCVRNSNSEKMEMLDPNKLANVRRYIVGSKKLTDIEISIIKDRVKNDTRELQVENDEVEGNLDEQELVMSNNADARVENNVDEVAENEVVVDEEEIFSMKMDIIEELSIVKHTDMSEREALLKIRHPHKLKSILSIGNKALEQLCHDINPDLSELNKLIYATGRVLQAKCGIKLRKKTTNKKHSKPKWQVKIEKEIEGFRREISILEELQKDNGKKSGKARKVIRKYKVLSVEQIPTIKEELKQKLQVKAQRLRRLNKRQKFFRQNKIFETDAKKFYREVGKESISVEAIPSDEQVKEFWNNIWGKEKQFNENAEWVRDLEKSTRDIPKQEWENITIEEIQSALKKSHKWKSPGIDQIPNFWLNTLSSAHAKLASNFNSIMIEPHLTPKWFCQGITYLLAKTNETAKPKNYRPITCLSTSYKLLTSILTERTYVHMEEQNIFPKEQKGCRRGSYGCKDQLLINKMILENAHTKHKNLSTAWIDYKKAFDSVPHSWILKSLEMFKISPVLINFLRISMPLWETNLTLHHTNGTLISNGMQIQCGIFQGDSLSPLLFCIALIPLSQLLNNTGYGYKIMDKIINHLFYMDDLKLYAHNDGELEGLLKTVKSFSDDIGMEFGLDKCAKATFKRGKLITSENIELDDETVIKQLDQEGTYKYLGVNEGDGVQHSKMKEKIRKECIRRVRSILKTELNSKNKLIAINTLAIPVVAYSFNVIDWNLTELKNIDTKIRKQLTSNRMYHPKSDVDRLYVPRIKGGRGMIQLELSYKTSTVGLLQYLDLSNDWMLRLVRVHENSKRLHSVVKESAKFSHELGIENENIEHVSPTIAAKRRKQKAKKIGQDKLQSRWHEKPLHGQFAARSKQADVDEIATHQWLRSSGLKGETEGFILAAQDQSLFTRNYQACILHNGADPKCRFCEDKVETIDHLVSGCSILTPNEYKNRHDRVGQYLHWRICKHFCIETEANWYEHHPEAVTEGKNVTIMWDFPIHTDRTIQANRPDIVIKDKTNNTCLFIDMSVPSDKNVSAKVFEKLSKYKDLEIEVEKMWHLKTKTLPVVIGALGLIKKGTDKFLQQIPGNPKLEEVQKIVLNSTAHVLRRALSI

SEQ ID NO: 24850 - protein, 1001 aa, Morbakka virulenta
MKIDILEEFSVVQHTKIEERESLFKIRHPHKFKNIFNFGNKALEIICNEINPNLTELNELMYATGKVLQTKCGIKIKKGKSTKKASKPKWQLKIEMEIKTFRREISLVEELQKNENFKSGKARKVLRKYDIKDREQLPSLKEELKQKLQVKAQRLRRFDKRQKFYRQNKIFETDAKKFYREIGKKAITAEDVPSENEVREFWNKIWGNEKGFNENAEWLQNLEESTRDIPEQIWVEITTGEVKKALQKSHKWKSPGIDKVPNFWLDSLSSVHDRIAVIFNKIITEPETIPKWFCLGTTYLLPKSNETRNPKNYRPITCLSTSYKLLTSILTDRTYIHMDEQNIFPIEQKGCKRGSYGCKDQLLINKMILENAHTKHKNLSTAWIDYKKAFDSVPHSWILKTLEMYKVSPAFINFLRVSMTLWETNLTLTHANGTLFSNCMQIKCGIFQGDSLSPLLFCMALIPLSKLLNDTELGYKIMGRKINHLFYMDDLKLYAKDDGDLEGLLKTVKAFSDDIGMEFGLDKCAKASFKRGKLERTENIELDEVTVIQDLEQEGSYKYLGVSEGDGIQHSKMKEKIRKECIRRVRSIMKTELNSKNRISAINSLAVPVVTYSFGIINWNLSDLKRLDTKIRKQLTCNLMHHPKSDVDRLYLPRNTGGRGMIQFELSYKTSIIGLSQYLDLTNDWMLQHVYRHENSKRLHSILKESEKFFRELGVDLEVDNTLNPTVAAKKTKQKAKKTGLDRLESRWQEKPLHGQFAARSNNADVDKEATHQWLRSAGLKGETEGFILAAQDQSLFTRNYQANVLHNGANQECRFCEDKTETIDHLVSGCSVLTPNEYKNRHDRVGQYLHWKICQHFSIKTQASWYEHHPAPVTESKDITILWDFPIQTDRTIQANRPDIVIKNRKENTCLLIDMSVPSDRNVSAKTFEKLAKYKDLEIEVEKMWHLKTKTIPVIVGALGLIKKGTDNFLKKIPGEPSLQEVQKIVLNGTAHLLRRALSI

SEQ ID NO: 24851 - protein, 1087 aa, Morbakka virulenta
MDANRLANQRRYIMREKKLTEIEVSSIKDRVKCDTREHLDQEIELERDAENQVENVIENVNVLEEEGVEAIEPEPVILLNEQELNDMKNDILEEFSSVKHTNIEEREALLKIRHPQRFRNIFNLCNVALESIFNEIDPNLTELNELMYATGKVIQEKCGVKVKKRKSVRKTSKPKWQIRIEKEIERFRREISLLDELQKNEDLKSGKARKVLRKYDIKSRDQLPSLKEELKQKLQVKAQRLRRFDKRQKFYRQNRIFETDTKKFFREIMKDVISVEEVPSEEQVREFWNKIWGNEKGYNESAEWLGDLADSTKDILEQHWEDISTNEIKTALSKSHKWKSPGIDKIPNFWLDTLSSAHSRMAANFNKLLLEPESIPKWFCLGTTYLLPKSGETGNPKNYRPITCLSTSYKLLTSILTERTYIHMDEQNIFPTEQKGCKRGSYGCKDQLLINKMILENTHSKKRNLSTAWIDYKKAFDSVPHSWILKTLDMYKVSPTLINFLRTSMTLWETNLILTHANGTLFSNCMRIKCGIFQGDSLSPLLFCMALFPLSKLLNDTGYGYKIMERKINHLFYMDDLKLYAKDDGELEGLLKTVKAFSDDIGMEFGLDKCAKATFKRGKLDKTQNIDLDEGTVIKELEQEGTYKYLGINEGDGIQHSKMKEKIRKECIRRVRSIMKTELNSKNKITAINSLAVPVVSYSFNIINWNLSDLQKLDTKIRKQLTCNRMHHPKSDVDRLYLPRNKGGRGMIQLELSYKTSTIGLAKYLDLTDDWMLQLVNRHENSKRLHSILKESGKFSEQFGIDLNAETPPSPTLAAKQTKQKAKKSGLDKLESRWQEKPLHGQFAARSNNADVDKVATHQWLRSSGLKGETEGFILAAQDQSLFTRNYQANILHNGATPECRFCENGTETIDHLISGCSVLTSNEYKNRHDRVGQYLHWKICQHFSIDTPSNWYEHHPTPVTEGKDVTILWDFPIQTDRTIQANRPDIVIKNKKDNTCLLIDMSVPSDRNVSAKIFEKLSKYRDLEIEIGKMWHLRTNTIPVIVGALGLIKKGTDTFLKQIPGEPSLQKVQKIVLNGTAHLLRKALSI

SEQ ID NO: 24852 - protein, 1207 aa, Morbakka virulenta
MRTRRKTYRIVRRAGQQGTRPSGRDQPEVEKNATGSNSSQNESTQGHRNEVTLTSGPSEPPSITTSVSLQKKKRIKWSREENAEVIYCFYYALEKPETNNTDDTFRIWCERNTNNDKIENMDANRLANQRRYIMREKKLTEIEVSSIKDRVKCDTREHLDQEIELERDAENQVENVIENVNVLEEGGVEAIEPEPVILLNEQELNDMKNDILEEFSSVKHTNIEDREALLKIRHPQRFRNIFNLCNVALESIFNEIDPNLTELNELMYATGKVIQEKCGVKVKKRKSVRKTSKPKWQIRIEKEIERFRREISLLDELQKNEDLKSGKARKVLRKYDIKSRDQLPSLKEELKQKLQVKAQRLRRFDKRQKFYRQNRIFETDTKKFFREIMKDVISVEEVPSEEQVREFWNKIWGNEKGYNESAEWLGDLADSTKDILEQHWEDISTNEIKTALSKSHKWKSPGIDKIPNFWLDTLSSAHSRMAANFNKLLLEPESIPKWFCLGTTYLLPKSGETGNPKNYRPITCLSTSYKLLTSILTERTYIHMDEQNIFPTEQKGCKRGSYGCKDQLLINKMILENTHSKKRNLSTAWIDYKKAFDSVPHSWILKTLDMYKVSPTLINFLRTSMTLWETNLILTHANGTLFSNCMRIKCGIFQGDSLSPLLFCMALFPLSKLLNDTGYGYKIMERKINHLFYMDDLKLYAKDDGELEGLLKTVKAFSDDIGMEFGLDKCAKATFKRGKLDKTQNIDLDEGTVIKELEQEGTYKYLGINEGDGIQHSKMKEKIRKECIRRVRSIMKTELNSKNKITAINSLAVPVVSYSFNIINWNLSDLQKLDTKIRKQLTCNRMHHPKSDVDRLYLPRNKGGRGMIQLELSYKTSTIGLAKYLDLTDDWMLQLVNRHENSKRLHSILKESGKFSEQFGIDLNAETPPSPTLAAKQTKQKAKKSGLDKLESRWQEKPLHGQFAARSNNADVDKVATHQWLRSSGLKGETEGFILAAQDQSLFTRNYQANILHNGATPECRFCENGTETIDHLISGCSVLTSNEYKNRHDRVGQYLHWKICQHFSIDTPSNWYEHHPSPVTEGKDVTILWDFPIQTDRTIQANRPDIVIKNKKDNTCLLIDMSVPSDRNVSAKIFEKLSKYKDLEIEIGKMWHLRTKTIPVIVGALGLIKKGTDTFLKQIPGEPSLQEVQKIVLNGTAHLLRKALSI

SEQ ID NO: 24853 - protein, 819 aa, Morbakka virulenta
MKDVISVEEVPSEEQVREFWNKIWGNEKGYNESAEWLGDLADSTKDILEQHWEDISTNEIKTALSKSHKWKSPGIDKIPNFWLDTLSSAHSRMAANFNKLLLEPESIPKWFCLGTTYLLPKSGETGNPKNYRPITCLSTSYKLLTSILTERTYIHMDEQNIFPTEQKGCKRGSYGCKDQLLINKMILENTHSKKRNLSTAWIDYKKAFDSVPHSWILKTLDMYKVSPTLINFLRTSMTLWETNLILTHANGTLFSNCMRIKCGIFQGDSLSPLLFCMALFPLSKLLNDTGYGYKIMERKINHLFYMDDLKLYAKDDGELEGLLKTVKAFSDDIGMEFGLDKCAKATFKRGKLDKTQNIDLDEGTVIKELEQEGTYKYLGINEGDGIQHSKMKEKIRKECIRRVRSIMKTELNSKNKITAINSLAVPVVSYSFNIINWNLSDLQKLDTKIRKQLTCNRMHHPKSDVDRLYLPRNKGGRGMIQLELSYKTSTIGLAKYLDLTDDWMLQLVNRHENSKRLHSILKESGKFSEQFGIDLNAETPPSPTLAAKQTKQKAKKSGLDKLESRWQEKPLHGQFAARSNNADVDKVATHQWLRSSGLKGETEGFILAAQDQSLFTRNYQANILHNGATPECRFCENGTETIDHLISGCSVLTSNEYKNRHDRVGQYLHWKICQHFSIDTPSNWYEHHPTPVTEGKDVTILWDFPIQTDRTIQANRPDIVIKNKKDNTCLLIDMSVPSDRNVSAKIFEKLSKYKDLEIEIGKMWHLRTKTIPVIVGALGLIKKGTDTFLKQIPVEPSLQEVQKIVLNGTAHLLRKALSI

SEQ ID NO: 24854 - protein, 1207 aa, Morbakka virulenta
MRTRRKTYRIVRRAGQQGTRPSGRDQPEVEKNATGSNSSQNESTQGHRNEVTLTSGPSEPPSITTSVSLQKKKRIKWSREENAEVIYCFYYALEKPETNNTDDTFRIWCERNTNNDKIENMDANRLANQRRYIMREKKLTEIEVSSIKDRVKCDTREHLDQEIELERDAENQVENVIENVNVLEEGGVEAIEPEPVILLNEQELNDMKNDILEEFSSVKHTNIEEREALLKIRHPQRFRNIFNLCNVALESIFNEIDPNLTELNELMYATGKVIQEKCGVKVKKRKSVRKTSKPKWQIRIEKEIERFRREISLLDELQKNEDLKSGKARKVLRKYDIKSRDQLPSLKEELKQKLQVKAQRLRRFDKRQKFYRQNRIFETDTKKFFREIMKDVISVEEVPSEEQVREFWNKIWGNEKGYNESAEWLGDLADSTKDILEQHWEDISTNEIKTALSKSHKWKSPGIDKIPNFWLDTLSSAHSRMAANFNKLLLEPESIPKWFCLGTTYLLPKSGETGNPKNYRPITCLSTSYKLLTSILTERTYIHMDEQNIFPTEQKGCKRGSYGCKDQLLINKMILENTHSKKRNLSTAWIDYKKAFDSVPHSWILKTLDMYKVSPTLINFLRTSMTLWETNLILTHANGTLFSNCMRIKCGIFQGDSLSPLLFCMALFPLSKLLNDTGYGYKIMERKINHLFYMDDLKLYAKDDGELEGLLKTVKAFSDDIGMEFGLDKCAKATFKRGKLDKTQNIDLDEGTVIKELEQEGTYKYLGINEGDGIQHSKMKEKIRKECIRRVRSIMKTELNSKNKITAINSLAVPVVSYSFNIINWNLSDLQKLDTKIRKQLTCNRMHHPKSDVDRLYLPRNKGGRGMIQLELSYKTSTIGLAKYLDLTDDWMLQLVNRHENSKRLHSILKESGKFSEQFGIDLNAETPPSPTLAAKQTKQKAKKSGLDKLESRWQEKPLHGQFAARSNNADVDKVATHQWLRSSGLKGETEGFILAAQDQSLFTRNYQANILHNGATPECRFCENGTETIDHLISGCSVLTSNEYKNRHDRVGQYLHWKICQHFSIDTPSNWYEHHPSPVTEGKDVTILWDFPIQTDRTIQANRPDIVIKNKKDNTCLLIDMSVPSDRNVSAKIFEKLSKYKDLEIEIGKMWHLRTKTIPVIVGALGLIKKGTDTFLKQIPGEPSLQEVQKIVLNGTAHLLRKALSI

SEQ ID NO: 24855 - protein, 1063 aa, Morbakka virulenta
MDANRLANQRRYIIREKKLTEVEISNIKERVKDDTRENLVEDLGNELQQMDGDVFTIDENIDMHGNLNVLEEEQQKSVGPVPAVEVDEEELANMKIDILEEFSVVQHTKIEERESLFKIRHPHKFKNIFNLGNKALEIICNEINPNLTELNELMYATGKVLQTKCGIKIKKGKSTKKASKPKWQLKIEMEIKTFRREISLVEELQKNENFKSGKARKVLRKYDIKDREQLPSLKEELKQKLQVKAQRLRRFDKRQKFYRQNKIFETDAKKFYREIGKKAITAEDVPSENEVREFWNKIWGNEKGFNENAEWLQNLEESTRDIPEQIWVEITTGEVKKALQKSHKWKSPGIDKVPNFWLDSLSSVHDRIAVIFNKIITEPETIPKWFCLGTTYLLPKSNETRNPKNYRPITCLSTSYKLLTSILTDRTYIHMDEQNIFPIEQKGCKRGSYGCKDQLLINKMILENAHTKHKNLSTAWIDYKKAFDSVPHSWILKTLEMYKVSPAFINFLRVSMTLWETNLTLTHANGTLFSNCMQIKCGIFQGDSLSPLLFCMALIPLSKLLNDTELGYKIMGRKINHLFYMDDLKLYAKDDGDLEGLLKTVKGFSDDIGMEFGLDKCAKASFKRGKLERTENIELDEVTVIQDLEQEGSYKYLGVSEGDGIQHSKMKEKIRKECIRRVRSIMKTELNSKNRISAINSLAVPVVTYSFGIINWNLSDLKRLDTKIRKQLTCNLMHHPKSDVDRLYLPRNTGGRGMIQFELSYKTSIIGLSQYLDLTNDWMLQHVYRHENSKRLHSILKESEKFFRELGVDLEVDNTLNPTVAAKKTKQKAKKTGLDRLESRWQEKPLHGQFAARSNNADVDKEATHQWLRSAGLKGETEGFILAAQDQSLFTRNYQANVLHNGANQECRFCEDKTETIDHLVSGCSVLTPNEYKNRHDRVGQYLHWKICQHFSIKTQASWYEHHPAPVTESKDITILWDFPIQTDRTIQANRPDIVIKNRKENTCLWIDMSVPSDRNVSAKTFEKLAKYKDLEIEVEKMLHLKTKTIPVIVGALGLIKKGTDNF

SEQ ID NO: 24856 - protein, 1207 aa, Morbakka virulenta
MRTRRKTYRIVRRAGQQGTRPSGRDQPEVEKNATGSNSSQNESTQGHRNEVTLTSGPSEPPSITTSVSLQKKKRIKWSREENAEVIYCFYYALEKPETNNTDDTFRIWCERNTNNDKIENMDANRLANQRRYIMREKKLTEIEVSSIKDRVKCDTREHLDQEIELERDAENQVENVIENVNVLEEGGVEAIEPEPVILLNEQELNDMKNDILEEFSSVKHTNIEDREALLKIRHPQRFRNIFNLCNVALESIFNEIDPNLTELNELMYATGKVIQEKCGVKVKKRKSVRKTSKPKWQIRIEKEIERFRREISLLDELQKNEDLKSGKARKVLRKYDIKSRDQLPSLKEELKQKLQVKAQRLRRFDKRQKFYRQNRIFETDTKKFFREIMKDVISVEEVPSEEQVREFWNKIWGNEKGYNESAEWLGDLADSTKDILEQHWEDISTNEIKTALSKSHKWKSPGIDKIPNFWLDTLSSAHSRMAANFNKLLLEPESIPKWFCLGTTYLLPKSGETGNPKNYRPITCLSTSYKLLTSILTERTYIHMDEQNIFPTEQKGCKRGSYGCKDQLLINKMILENTHSKKRNLSTAWIDYKKAFDSVPHSWILKTLDMYKVSPTLINFLRTSMTLWETNLILTHANGTLFSNCMRIKCGIFQGDSLSPLLFCMALFPLSKLLNDTGYGYKIMERKINHLFYMDDLKLYAKDDGELEGLLKTVKAFSDDIGMEFGLDKCAKATFKRGKLDKTQNIDLDEGTVIKELEQEGTYKYLGINEGDGIQHSKMKEKIRKECIRRVRSIMKTELNSKNKITAINSLAVPVVSYSFNIINWNLSDLQKLDTKIRKQLTCNRMHHPKSDVDRLYLPRNKGGRGMIQLELSYKTSTIGLAKYLDLTDDWMLQLVNRHENSKRLHSILKESGKFSEQFGIDLNAETPPSPTLAAKQTKQKAKKSGLDKLESRWQEKPLHGQFAARSNNADVDKVATHQWLRSSGLKGETEGFILAAQDQSLFTRNYQANILHNGATPECRFCENGTETIDHLISGCSVLTSNEYKNRHDRVGQYLHWKICQHFSIDTPSNWYEHHPTPVTEGKDVTILWDFPIQTDRTIQANRPDIVIKNKKDNTCLLIDMSVPSDRNVSAKIFEKLSKYKDLEIEIGKMWHLRTKTIPVIVGALGLIKKGTDTFLKQIPGEPSLQEVQKIVLNGTAHLLRKALSI

SEQ ID NO: 24857 - protein, 894 aa, Morbakka virulenta
MEELQKNENFKSGKARRVLRKYDIKDREKLPSLKEELKQTLQIKAQSLRRFDKRQKFYRQNKIFETDAKKFYREIGKKAITAEDVPSENEVREFWNKIWGNEKGFNENAEWLQNLEESTRDIPEQIWVEITTGEVKKALQKSHKWKSPGIDKVPNFWLDSLSSVHDRIAVIFNKIITEPETIPKWFCLGTTYLLPKSNETRNPKNYRPITCLSTSYKLLTSILTDRTYIHMDEQNIFPIEQKGCKRGSYGCKDQLLINKMILENAHTKHKNLSTAWIDYKKAFDSVPHSWILKTLEMYKVSPAFINFLRVSMTLWETNLTLTHANGTLFSNCMQIKCGIFQGDSLSPLLFCMALIPLSKLLNDTELGYKIMGRKINHLFYMDDLKLYAKDDGDLEGLLKTVKGFSDDIGMEFGLDKCAKASFKRGKLERTENIELDEVTVIQDLEQEGSYKYLGVSEGDGIQHSKMKEKIRKECIRRVRSIMKTELNSKNRISAINSLAVPVVTYSFGIINWNLSDLKRLDTKIRKQLTCNLMHHPKSDVDRLYLPRNTGGRGMIQFELSYKTSIIGLSQYLDLTNDWMLQHVYRHENSKRLHSILKESEKFFRELGVDLEVDNTLNPTVAAKKTKQKAKKTGLDRLESRWQEKPLHGQFAARSNNADVDKEATHQWLRSAGLKGETEGFILAAQDQSLFTRNYQANVLHNGANQECRFCEDKTETIDHLVSGCSVLTPNEYKNRHDRVGQYLHWKICQHFSIKTQASWYEHHPAPVTESKDITILWDFPIQTDRTIQANRPDIVIKNRKENTCLLIDMSVPSDRNVSAKTFEKLAKYKDLEIEVEKMWHLKTKTIPVIVGALGLIKKGTDNFLKQIPGGPSLQEVQKIVLNGNAHLLRRALSI

SEQ ID NO: 24858 - protein, 1094 aa, Morbakka virulenta
MDANRLANQRRYIIREKKLTEVEISNIKERVKDDTRENLVEDLGNELQQMDGDVFTIDENIDMHGNLNVLEEEQQKSVGPVPAVEVDEEELANMKIDILEEFSVVQHTKIEERESLFKIRHPHKFKNIFNLGNKALEIICNEINPNLTELNELMYATGKVLQTKCGIKIKKGKSTKKASKPKWQLKIEMEIKTFRREISLVEELQKNENFKSGKARKVLRKYDIKDREQLPSLKEELKQKLQVKAQRLRRFDKRQKFYRQNKIFETDAKKFYREIGKKAITAEDVPSENEVREFWNKIWGNEKGFNENAEWLQNLEESTRDIPEQIWVEITTGEVKKALQKSHKWKSPGIDKVPNFWLDSLSSVHDRIAVIFNKIITEPETIPKWFCLGTTYLLPKSNETRNPKNYRPITCLSTSYKLLTSILTDRTYIHMDEQNIFPIEQKGCKRGSYGCKDQLLINKMILENAHTKHKNLSTAWIDYKKAFDSVPHSWILKTLEMYKVSPAFINFLRVSMTLWETNLTLTHANGTLFSNCMQIKCGIFQGDSLSPLLFCMALIPLSKLLNDTELGYKIMGRKINHLFYMDDLKLYAKDDGDLEGLLKTVKGFSDDIGMEFGLDKCAKASFKRGKLERTENIELDEVTVIQDLEQEGSYKYLGVSEGDGIQHSKMKEKIRKECIRRVRSIMKTELNSKNRISAINSLAVPVVTYSFGIINWNLSDLKRLDTKIRKQLTCNLMHHPKSDVDRLYLPRNTGGRGMIQFELSYKTSIIGLSQYLDLTNDWMLQHVYRHENSKRLHSILKESEKFFRELGVDLEVDNTLNPTVAAKKTKQKAKKTGLDRLESRWQEKPLHGQFAARSNNADVDKEATHQWLRSAGLKGETEGFILAAQDQSLFTRNYQANVLHNGANQECRFCEDKTETIDHLVSGCSVLTPNEYKNRHDRVGQYLHWKICQHFSIKTQASWYEHHPAPVTESKDITILWDFPIQTDRTIQANRPDIVIKNRKENTCLLIDMSVPSDRNVSAKTFEKLAKYKDLEIEVEKMWHLKTKTVPVIVGALGLIKKGTDNFLKQIPGEPSLQEVQKIVLNGSAHLLRRALSI

SEQ ID NO: 24859 - protein, 1212 aa, Penaeus japonicus
MKTRRKSYRIVRRAGQQGTRPSGQDQPEVEKSATESNSSLNECPSGHQNGSCPNPGPSGSPPKQNQKEKRKRWTREEHKEVLYCFYYALEKPQTNNTEDTFLTWCRRNSDSDKLDFMDANKLANVRRYIMRTKKITDMEIELIKIQVKADTREPEAEEPDDNDIENAEDEGPDENENNVQEVDDEVENDRQIRNDVAEDDFDQEEISSMKTDILEELSIVMHTDIAEREPFMKIRQIHKFKKLFNLGNVALRQLCTERDPDLTELNQLIYATSKVLQEKSGIKNKRKRNKGKRRGPSKPKWQKQIDKEIENFRREISILEELQKNGKSKSRKSKQVIRKYQIENKEQIPVIKEELKQKLQVKAQRLRRFTKRNDFYRQNKIFETDAKKFYREIGKTTIEVKEIPTEDQVKDFWNNIWGNNTGHNENAKWIEELEKEAVDIPEQQWSDITTEEITKALRKAHKWKSPGLDQVPNFWLDTLQSVHSKLASSLNKLINEPHLTPTWFCQGTTYLLAKTVETGDPKNYRPITCLSTSYKLLTSVLSERTYAHLEEHDIFPIEQKGCKKGSYGCKDQLLINKMLLENAKSKHRNLSTAWIDYKKAFDSVPHSWILRCSELFKLSPTLINFLRSSMGMWETNLFLSHSTGILSSPGMKIKCGIFQGDSLSPLLFCMALMPLSRLLNQTGYGYKIFERRISHLFYMDDLKLYASNDNELEGLLKTVKAFSDDIGMEFGLSKCAKATFKKGKLEQTKNIVLDDDSVIKELDQEGTYKYLGVNEGDGIQHAKMKEKIRKECLRRIRSIVKTELNSKNRITAINTLALPVVTYSFNIINWNLSELKRLDSKIRKLFTCNRMLHPKSDVDRLYLPRSKGGRGMIQLELSYKTSTIGLYNYLDNTEDWMLQLVNRHENSKTLHSVTKESDKFSRELDLEIEINNLLSPTEIARKTKKKAKHEGLKQLESRWQEKPLHGQFAARANNADVDTQATHQWLRSSGLKAETEGFILAAQDQSLFTRNYQANVLHNGADPKCRFCDERIETIDHLVSGCSILTPGEYKNRHDRVGQYLHWKICNCFSIKTQSDWYKHHPEPVTEGKDVTILWDFPIQTDRTIQANRPDIVIKDRKNNQCFLIDMSVPSDRNVAAKTFEKLSKYKDLEIEVEKMWHLKTRTIPVVVGALGLIKKGAKDFVNKIPGNPSLQEIQKIVLNSTAHVLRRALTI

SEQ ID NO: 24860 - protein, 1236 aa, Morbakka virulenta
MSGGVKSVPLSTWTRNTRLLLARNIQLFYQMKTRSKNKSCRIARRADQQGARASVSDQAEDFEKSATRSTSPTSQNPPGHQNGTPPIPGPVVQQASIDNKKKPRLKWTREEYAEVMYCFYYALEKPETNITDNTYTTWCVRNSNSEKMEMLDPNKLANVRRYIVGSKKLTDIEISIIKDRVKNDTRELQVENDEVEGNLDEQELVMSNNADARVENNVDEVAENEVVVDEEEIFSMKMDIIEELSIVKHTDMSEREALLKIRHPHKLKSILSIGNKALEQLCHDINPDLSELNKLIYATGRVLQAKCGIKLRKKTTNKKHSKPKWQVKIEKEIEGFRREISILEELQKDNGKKSGKARKVIRKYKVLSVEQIPTIKEELKQKLQVKAQRLRRLNKRQKFFRQNKIFETDAKKFYREVGKESISVEAIPSDEQVKEFWNNIWGKEKQFNENAEWVRDLEKSTRDIPKQEWENITIEEIQSALKKSHKWKSPGIDQIPNFWLNTLSSAHAKLASNFNSIMIEPHLTPKWFCQGITYLLAKTNETAKPKNYRPITCLSTSYKLLTSILTERTYVHMEEQNIFPKEQKGCRRGSYGCKDQLLINKMILENAHTKHKNLSTAWIDYKKAFDSVPHSWILKSLEMFKISPVLINFLRISMSLWETNLTLHHANGTLISNGMQIQCGIFQGDSLSPLLFCIALIPLSQLLNNTGYGYKIMDKMINHLFYMDDLKLYAHNDGELEGLLKTVKSFSDDIGMEFGLDKCAKATFKRGKLITSENIELDDETVIKQLDQEGTYKYLGVNEGDGVQHSKMKEKIRKECIRRVRSILKTELNSKNKLTAINTLAIPVVAYSFNVIDWNLTELKNIDTKIRKQLTSNRMYHPKSDVDRLYVPRIKGGRGMIQLELSYKTSTVGLLQYLDLSNDWMLRLVRVHENSKRLHSVVKESAKFSHELGIENENIEHVSPTIAAKRRKQKAKKIGQDKLQSRWHEKPLHGQFAARSKQADVDEIATHQWLRSSGLKGETEGFILAAQDQSLFTRNYQACILHNGADPKCRFCEDKVETIDHLVSGCSILTPNEYKNRHDRVGQYLHWRICKHFCIETEANWYEHHPEAVTEGKNVTIMWDFPIHTDRTIQANRPDIVIKDKTNNTCLFIDMSVPSDKNVSAKVFEKLSKYKDLEIEVEKMWHLKTKTLPVVIGALGLIKKGTDKFLQQIPGNPKLEEVQKIVLNSTAHVLRRALSI

SEQ ID NO: 24861 - protein, 1093 aa, Morbakka virulenta
MDANRLANQRRYIIREKKLTEVEISNIKERVKDDTRENLVEDLGNELQQMDGDVFTIDENIDMHGNLNVLEEEQQKSVGPVPAVEVDEEELANMKIDILEEFSVVQHTKIEERESLFKIRHPHKFKNIFNLGNKALEIICNEINPNLTELNELMYATGKVLQTKCGIKIKKGKSTKKASKPKWQLKIEMEIKTFRREISLVEELQKNENFKSGKARKVLRKYDIKDREQLPSLKEELKQKLQVKAQRLRRFDKRQKFYRQNKIFETDAKKFYREIGKKAITAEDVPSENEVREFWNKIWGNEKGFNENAEWLQNLEESTRDIPEQIWVEITTGEVKKALQKSHKWKSPGIDKVPNFWLDSLSSVHDRIAVIFNKIITEPETIPKWFCLGTTYLLPKSNETRNPKNYRPITCLSTSYKLLTSILTDRTYIHMDEQNIFPIEQKGCKRGSYGCKDQLLINKMILENAHTKHKNLSTAWIDYKKAFDSVPHSWILKTLEMYKVSPAFINFLRVSMTLWETNLTLTHANGTLFSNCMQIKCGIFQGDSLSPLLFCMALIPLSKLLNDTELGYKIMGRKINHLFYMDDLKLYAKDDGDLEGLLKTVKGFSDDIGMEFGLDKCAKASFKRGKLERTENIELDEVTVIQDLEQEGSYKYLGVSEGDGIQHSKMKEKIRKECIRRVRSIMKTELNSKNRISAINSLAVPVVTYSFGIINWNLSDLKRLDTKIRKQLTCNLMHHPKSDVDRLYLPRNTGGRGMIQFELSYKTSIIGLSQYLDLTNDWMLQHVYRHENSKRLHSILKESEKFFRELGVDLEVDNTLNPTVAAKKTKQKAKKTGLDRLESRWQEKPLHGQFAARSNNADVDKEATHQWLRSAGLKGETEGFILAAQDQSLFTRNYQANVLHNGANQECRFCEDKTETIDHLVSGCSVLTPNEYKNRHDRVGQYLHWKICQHFSIKTQASWYEHHPAPVTESKDITILWDFPIQTDRTIQANRPDIVIKNRKENTCLLIDMSVPSDRNVSAKTFEKLAKYKDLEIEVEKMWHLKTKTIPVIVGALGLIKKGTDNFFKQIPGEPLQEVQKIVLNGTAHLLRRTLSI

SEQ ID NO: 24862 - protein, 1236 aa, Morbakka virulenta
MSGGVKSVPLSTWTRNTRLLLARNIQLFYQMKTRSKNKSCRIARRADQQGARASVSDQAEDFEKSATRSTSPTSQNPPGHQNGTPPIPGPVVQQASIDNKKKPRLKWTREEYAEVMYCFYYALEKPETNITDNTYTTWCVRNSNSEKMEMLDPNKLANVRRYIVGSKKLTDIEISIIKDRVKNDTRELQVENDEVEGNLDEQELVMSNNADARVENNVDEVAENEVVVDEEEIFSMKMDIIEELSIVKHTDMSEREALLKIRHPHKLKSILSIGNKALEQLCHDINPDLSELNKLIYATGRVLQAKCGIKLRKKTTNKKHSKPKWQVKIEKEIEGFRREISILEELQKDNGKKSGKARKVIRKYKVLSVEQIPTIKEELKQKLQVKAQRLRRLNKRQKFFRQNKIFETDAKKFYREVGKESISVEAIPSDEQVKEFWNNIWGKEKQFNENAEWVRDLEKSTRDIPKQEWENITIEEIQSALKKSHKWKSPGIDQIPNFWLNTLSSAHAKLASNFNSIMIEPHLTPKWFCQGITYLLAKTNETAKPKNYRPITCLSTSYKLLTSILTERTYVHMEEQNIFPKEQKGCRRGSYGCKDQLLINKMILENAHTKHKNLSTAWIDYKKAFDSVPHSWILKSLEMFKISPVLINFLRISMSLWETNLTLHHANGTLISNGMQIQCGIFQGDSLSPLLFCIALIPLSQLLNNTGYGYKIMDKMINHLFYMDDLKLYAHNDGELEGLLKTVKSFSDDIGMEFGLDKCAKATFKRGKLITSENIELDDETVIKQFDQEGTYKYLGVNEGDGVQHSKMKEKIRKECIRRVRSILKTELNSKNKLTAINTLAIPVVAYSFNVIDWNLTELKNIDTKIRKQLTSNRMYHPKSDVDRLYVPRIKGGRGMIQLELSYKTSTVGLLQYLDLSNDWMLRLVRVHENSKRLHSVVKESAKFSHELGIENENIEHVSPTIAAKRRKQKAKKIGQDKLQSRWHEKPLHGQFAARSKQADVDEIATHQWLRSSGLKGETEGFILAAQDQSLFTRNYQACILHNGADPKCRFCEDKVETIDHLVSGCSILTPNEYKNRHDRVGQYLHWRICKHFCIETEANWYEHHPEAVTEGKNVTIMWDFPIHTDRTIQANRPDIVIKDKTNNTCLFIDMSVPSDKNVSAKVFEKLSKYKDLEIEVEKMWHLKTKTLPVVIGALGLIKKGTDKFLQQIPGNPKLEEVQKIVLNSTAHVLRRALSI

SEQ ID NO: 24863 - protein, 1236 aa, Morbakka virulenta
MSGGVKSVPLSTWTRNTRLLLARNIQLFYQMKTRSKNKSCRIARRADQQGARASVSDQAEDFEKSATRSTSPTSQNPPGHQNGTPPIPGPVVQQASIDNKKKPRLKWTREEYAEVMYCFYYALEKPETNITDNTYTTWCVRNSNSEKMEMLDPNKLANVRRYIVGSKKLTDIEISIIKDRVKNDTRELQVENDEVEGNLDEQELVMSNNADARVENNVDEVAENEVVVDEEEIFSMKMDIIEELSIVKHTDMSEREALLKIRHPHKFKSILSIGNKALEQLCHDINPDLSELNKLIYATGRVLQAKCGIKLRKKTTNKKHSKPKWQVKIEKEIEGFRREISILEELQKDNGKKSGKARKVIRKYKVLSVEQIPTIKEELKQKLQVKAQRLRRLNKRQKFFRQNKIFETDAKKFYREVGKESISVEAIPSDEQVKEFWNNIWGKEKQFNENAEWVRDLEKSTRDIPKQEWENITIEEIQSALKKSHKWKSPGIDQIPNFWLNTLSSAHAKLASNFNSIMIEPHLTPKWFCQGITYLLAKTNETAKPKNYRPITCLSTSYKLLTSILTERTYVHMEEQNIFPKEQKGCRRGSYGCKDQLLINKMILENAHTKHKNLSTAWIDYKKAFDSVPHSWILKSLEMFKISPVLINFLRISMSLWETNLTLHHTNGTLISNGMQIQCGIFQGDSLSPLLFCIALIPLSQLLNNTGYGYKIMDKIINHLFYMDDLKLYAHNDGELEGLLKTVKSFSDDIGMEFGLDKCAKATFKRGKLITSENIELDDETVIKQLDQEGTYKYLGVNEGDGVQHSKMKEKIRKECIRRVRSILKTELNSKNKLIAINTLAIPVVAYSFNVIDWNLTELKNIDTKIRKQLTSNRMYHPKSDVDRLYVPRIKGGRGMIQLELSYKTSTVGLLQYLDLSNDWMLRLVRVHENSKRLHSVVKESAKFSHELGIENENIEHVSPTIAAKRRKQKAKKIGQDKLQSRWHEKPLHGQFAARSKQADVDEIATHQWLRSSGLKGETEGFILAAQDQSLFTRNYQACILHNGADPKCRFCEDKVETIDHLVSGCSILTPNEYKNRHDRVGQYLHWRICKHFCIETEANWYEHHPEAVTEGKNVTIMWDFPIHTDRTIQANRPDIVIKDKTNNTCLFIDMSVPSDKNVSAKVFEKLSKYKDLEIEVEKMWHLKTKTLPVVIGALGLIKKGTDKFLQQIPGNPKLEEVQKIVLNSTAHVLRRALSI

SEQ ID NO: 24864 - protein, 1206 aa, Morbakka virulenta
MKTRSKNKSCRIARRADQQGARASVSDQAEDFEKSATRSTSPTSQNPPGHQNGTPPIPGPVVQQASIDNKKKPRLKWTREEYAEVMYCFYYALEKPETNITDNTYTTWCVRNSNSEKMEMLDPNKLANVRRYIVGSKKLTDIEISIIKDRVKNDTRELQVENDEVEGNLDEQELVMSNNADARVENNVDEVAENEVVVDEEEIFSMKMDIIEELSIVKHTDMSEREALLKIRHPHKLKSILSIGNKALEQLCHDINPDLSELNKLIYATGRVLQAKCGIKLRKKTTNKKHSKPKWQVKIEKEIEGFRREISILEELQKDNGKKSGKARKVIRKYKVLSVEQIPTIKEELKQKLQVKAQRLRRLNKRQKFFRQNKIFETDAKKFYREVGKESISVEAIPSDEQVKEFWNNIWGKEKQFNENAEWVRDLEKSTRDIPKQEWENITIEEIQSALKKSHKWKSPGIDQIPNFWLNTLSSAHAKLASNFNSIMIEPHLTPKWFCQGITYLLAKTNETAKPKNYRPITCLSTSYKLLTSILTERTYVHMEEQNIFPKEQKGCRRGSYGCKDQLLINKMILENAHTKHKNLSTAWIDYKKAFDSVPHSWILKSLEMFKISPVLINFLRISMSLWETNLTLHHANGTLISNGMQIQCGIFQGDSLSPLLFCIALIPLSQLLNNTGYGYKIMDKIINHLFYMDDLKLYAHNDGELEGLLKTVKSFSDDIGMEFGLDKCAKATFKRGKLITSENIELDDETVIKQLDQEGTYKYLGVNEGDGVQHSKMKEKIRKECIRRVRSILKTELNSKNKLIAINTLAIPVVAYSFNVIDWNLTELKNIDTKIRKQLTSNRMYHPKSDVDRLYVPRIKGGRGMIQLELSYKTSTVGLLQYLDLSNDWMLRLVRVHENSKRLHSVVKESAKFSHELGIENENIEHVSPTIAAKRRKQKAKKIGQDKLQSRWHEKPLHGQFAARSKQADVDEIATHQWLRSSGLKGETEGFILAAQDQSLFTRNYQACILHNGADPKCRFCEDKVETIDHLVSGCSILTPNEYKNRHDRVGQYLHWRICKHFCIETEANWYEHHPEAVTEGKNVTIMWDFPIHTDRTIQANRPDIVIKDKTNNTCLFIDMSVPSDKNVSAKVFEKLSKYKDLEIEVEKMWHLKTKTLPVVIGALGLIKKGTDKFLQQIPGNPKLEEVQKIVLNSTAHVLRRALSI

SEQ ID NO: 24865 - protein, 1094 aa, Morbakka virulenta
MDANRLANQRRYIIREKKLTEVEISNIKERVKDDTRENLVEDLGNELQQMDGDVFTIDENIDMHGNLNVLEEEQQKSVGPVPAVEVDEEELANMKIDILEEFSVVQHTKIEERESLFKIRHPHKFKNIFNLGNKALEIICNEINPNLTELNELMYATGKVLQTKCGIKIKKGKSTKKASKPKWQLKIEMEIKTFRREISLVEELQKNENFKSGKARKVLRKYDIKDREQLPSLKEELKQKLQVKAQRLRRFDKRQKFYRQNKIFETDAKKFYREIGKKAITAEDVPSENEVREFWNKIWGNEKGFNENAEWLQNLEESTRDIPEQIWVEITTGEVKKALQKSHKWKSPGIDKVPNFWLDSLSSVHDRIAVIFNKIITEPETIPKWFCLGTTYLLPKSNETRNPKNYRPITCLSTSYKLLTSILTDRTYIHMDEQNIFPIEQKGCKRGSYGCKDQLLINKMILENAHTKHKNLSTAWIDYKKAFDSVPHSWILKTLEMYKVSPAFINFLRVSMTLWETNLTLTHANGTLFSNCMQIKCGIFQGDSLSPLLFCMALIPLSKLLNDTELGYKIMGRKINHLFYMDDLKLYAKDDGDLEGLLKTVKGFSDDIGMEFGLDKCAKASFKRGKLERTENIELDEVTVIQDLEQEGSYKYLGVSEGDGIQHSKMKEKIRKECIRRVRSIMKTELNSKNRISAINSLAVPVVTYSFGIINWNLSDLKRLDTKIRKQLTCNLMHHPKSDVDRLYLPRNTGGRGMIQFELSYKTSIIGLSQYLDLTNDWMLQHVYRHENSKRLHSILKESEKFFRELGVDLEVDNTLNPTVAAKKTKQKAKKTGLDRLESRWQEKPLHGQFAARSNNADVDKEATHQWLRSAGLKGETEGFILAAQDQSLFTRNYQANVLHNGANQECRFCEDKTETIDHLVSGCSVLTPNEYKNRHDRVGQYLHWKICQHFSIKTQASWYEHHPAPVTESKDITILWDFPIQTDRTIQANRPDIVIKNRKENTCLLIDMSVPSDRNVSAKTFEKLAKYKDLEIEVEKMWHLKTKTIPVIVGALGLIKKGTDNFLKQIPGEPSLQEVQKIVLKGTGHLLRRALSI

SEQ ID NO: 24866 - protein, 941 aa, Morbakka virulenta
MYATGKVIQEKCGVKVKKRKSVRKTSRPKWQIRIEKEIERFRREISLLDELQKNEDLKSGKARKVLRKYDIKSRDQLPSLKEELKQKLQVKAQRLRRFDKRQKFYRQNRIFETDTKKFFREIMKDVISVEEVPSEEQVREFWNKIWGNEKGYNESAEWLGDLADSTKDILEQHWEDISTNEIKTALSKSHKWKSPGIDKIPNFWLDTLSSAHSRMAANFNKLLLEPESIPKWFCLGTTYLLPKSGETGNPKNYRPITCLSTSYKLLTSILTERTYIHMDEQNIFPTEQKGCKRGSYGCKDQLLINKMILENTHSKKRNLSTAWIDYKKAFDSVPHSWILKTLDMYKVSPTLINFLRTSMTLWETNLILTHANGTLFSNCMRIKCGIFQGDSLSPLLFCMALFPLSKLLNDTGYGYKIMERKINHLFYMDDLKLYAKDDGELEGLLKTVKAFSDDIGMEFGLDKCAKATFKRGKLDKTQNIDLDEGTVIKELEQEGTYKYLGINEGDGIQHSKMKEKIRKECIRRVRSIMKTELNSKNKITAINSLAVPVVSYSFNIINWNLSDLQKLDTKIRKQLTCNRMHHPKSDVDRLYLPRNKGGRGMIQLELSYKTSTIGLAKYLDLTDDWMLQLVNRHENSKRLHSILKESGKFSEQFGIDLNAETPPSPTLAAKQTKQKAKKSGLDKLESRWQEKPLHGQFAARSNNADVDKVATHQWLRSSGLKGETEGFILAAQDQSLFTRNYQANILHNGATPECRFCENGTETIDHLISGCSVLTSNEYKNRHDRVGQYLHWKICQHFSIDTPSNWYEHHPSPVTEGKDVTILWDFPIQTDRTIQANRPDIVIKNKKDNTCLLIDMSVPSDRNVSAKIFEKLSKYKDLEIEIGKMWHLRTKTIPVIVGALGLIKKGTDTFLKQIPGEPSLQEVQKIVLNGTAHLLRKALSI

SEQ ID NO: 24867 - protein, 1272 aa, Morbakka virulenta
MYAPSLPLSIWRFAGVSTPESSVGSYCSPLNNNNNNNNNNNKSVPLSTWTRNIKLRLARNIQLFYQMKARSKNKSCRIARRADQQGARASVSDQAEDFKKSATRSTSPTSQNPPGRQNGTPPIPGPVVQQASIDNKKKPRLKWTREEYAEVMYCFYYALEKPETNITDNTYTTWCVRNSNSEKMEMLDPNKLANVRRYIVGSKKLTDIEISIIKDRVKNDTRELQVENDEVEGNLDEQELVMSNNADARVENNVDEVAENEVVVDEEEIFSMKMDIIEELSIVKHTDMSEREALLKIRHPHKLKSILSIGNKALEQLCHDINPDLSELNKLIYATGRVLQAKCGIKLRKKTTNKKHSKPKWQVKIEKEIEGFRREISILEELQKDNGKKSGKARKVIRKYKVLSVEQIPTIKEELKQKLQVKAQRLRRLNKRQKFFRQNKIFETDAKKFYREVGKESISVEAIPSDEQVKEFWNNIWGKEKQFNENAEWVRDLEKSTRDIPKQEWENITIEEIQSALKKSHKWKSPGIDQIPNFWLNTLSSAHAKLASNFNSIMIEPHLTPKWFCQGITYLLAKTNETAKPKNYRPITCLSTSYKLLTSILTERTYVHMEEQNIFPKEQKGCRRGSYGCKDQLLINKMILENAHTKHKNLSTAWIDYKKAFDSVPHSWILKSLEMFKISPVLINFLRISMSLWETNLTLHHANGTLISNGMQIQCGIFQGDSLSPLLFCIALIPLSQLLNNTGYGYKIMDKIINHLFYMDDLKLYAHNDGELEGLLKTVKSFSDDIGMEFGLDKCAKATFKRGKLITSENIELDDETVIKQLDQEGTYKYLGVNEGDGVQHSKMKEKIRKECIRRVRSILKTELNSKNKLIAINTLAIPVVAYSFNVIDWNLTELKNIDTKIRKQLTSNRMYHPKSDVDRLYVPRIKGGRGMIQLELSYKTSTVGLLQYLDLSNDWMLRLVRVHENSKRLHSVVKESAKFSHELGIENENIEHVSPTIAAKRRKQKAKKIGQDKLQSRWHEKPLHGQFAARSKQADVDEIATHQWLRSSGLKGETEGFILAAQDQSLFTRNYQACILHNGADPKCRFCEDKVETIDHLVSGCSILTPNEYKNRHDRVGQYLHWRICKHFCIETEANWYEHHPEAVTEGKNVTIMWDFPIHTDRTIQANRPDIVIKDKTNNTCLFIDMSVPSDKNVSAKVFEKLSKYKDLEIEVEKMWHLKTKTLPVVIGALGLIKKGTDKFLQQIPGNPKLEEVQKIVLNSTAHVLRRALSI

SEQ ID NO: 24868 - protein, 1032 aa, Morbakka virulenta
MDANRLANQRRYIIREKKLTEVEISNIKERVKDDTRENLVEDLGNELQQMDGDVFTIDENIDMHGNLNVLEEEQQKSVGPVPAVEVDEEELANMKIDILEEFSVVQHTKIEERESLFKIRHPHKFKNIFNLGNKALEIICNEINPNLTELNELMYATGKVLQTKCGIKIKKGKSTKKASKPKWQLKIEMEIKTFRREISLVEELQKNENFKSGKARKVLRKYDIKDREQLPSLKEELKQKLQVKAQRLRRFDKRQKFYRQNKIFETDAKKFYREIGKKAITAEDVPSENEVREFWNKIWGNEKGFNENAEWLQNLEESTRDIPEQIWVEITTGEVKKALQKSHKWKSPGIDKVPNFWLDSLSSVHDRIAVIFNKIITEPETIPKWFCLGTTYLLPKSNETRNPKNYRPITCLSTSYKLLTSILTDRTYIHMDEQNIFPIEQKGCKRGSYGCKDQLLINKMILENAHTKHKNLSTAWIDYKKAFDSVPHSWILKTLEMYKVSPAFINFLRVSMTLWETNLTLTHANGTLFSNCMQIKCGIFQGDSLSPLLFCMALIPLSKLLNDTELGYKIMGRKINHLFYMDDLKLYAKDDGDLEGLLKTVKGFSDDIGMEFGLDKCAKASFKRGKLERTENIELDEVTVIQDLEQEGSYKYLGVSEGDGIQHSKMKEKIRKECIRRVRSIMKTELNSKNRISAINSLAVPVVTYSFGIINWNLSDLKRLDTKIRKQLTCNLMHHPKSDVDRLYLPRNTGGRGMIQFELSYKTSIIGLSQYLDLTNDWMLQHVYRHENSKRLHSILKESEKFFRELGVDLEVDNTLNPTVAAKKTKQKAKKTGLDRLESRWQEKPLHGQFAARSNNADVDKEATYQWLRSAGLKGETEGFILAAQDQSLFTRNCQANVLHNGANQECRFCEDKTETIDHLVSGCSILTPSEYKNRHDRVGQYLHWKICQHFSIKTQASWYEHHPAPVTESKDFTIQTDRTIQANRPDIVIKNRKENTCLLMDMSVPSDRNVSAKTFEKLAKYKDLEIEVEKM

SEQ ID NO: 24869 - protein, 1236 aa, Morbakka virulenta
MSGGVKSVPLSTWTRNTRLLLARNIQLFYQMKTRSKNKSCRIARRADQQGARASVSDQAEDFEKSATRSTSPTSQNPPGHQNGTPPIPGPVVQQASIDNKKKPRLKWTREEYAEVMYCFYYALEKPETNITDNTYTTWCVRNSNSEKMEMLDPNKLANVRRYIVGSKKLTDIEISIIKDRVKNDTRELQVENDEVEGNLDEQELVMSNNADARVENNVDEVAENEVVVDEEEIFSMKMDIIEELSIVKHTDMSEREALLKIRHPHKFKSILSIGNKALEQLCHDINPDLSELNKLIYATGRVLQAKCGIKLRKKTTNKKHSKPKWQVKIEKEIEGFRREISILEELQKDNGKKSGKARKVIRKYKVLSVEQIPTIKEELKQKLQVKAQRLRRLNKRQKFFRQNKIFETDAKKFYREVGKESISVEAIPSDEQVKEFWNNIWGKEKQFNENAEWVRDLEKSTRDIPKQEWENITIEEIQSALKKSHKWKSPGIDQIPNFWLNTLSSAHAKLASNFNSIMIEPHLTPKWFCQGITYLLAKTNETAKPKNYRPITCLSTSYKLLTSILTERTYVHMEEQNIFPKEQKGCRRGSYGCKDQLLINKMILENAHTKHKNLSTAWIDYKKAFDSVPHSWILKSLEMFKISPVLINFLRISMSLWETNLTLHHANGTLISNGMQIQCGIFQGDSLSPLLFCIALIPLSQLLNNTGYGYKIMDKIINHLFYMDDLKLYAHNDGELEGLLKTVKSFSDDIGMEFGLDKCAKATFKRGKLITSENIELDDETVIKQLDQEGTYKYLGVNEGDGVQHSKMKEKIRKECIRRVRSILKTELNSKNKLTAINTLAIPVVAYSFNVIDWNLTELKNIDTKIRKQLTSNRMYHPKSDVDRLYVPRIKGGRGMIQLELSYKTSTVGLLQYLDLSNDWMLRLVRVHENSKRLHSVVKESAKFSHELGIENENIEHVSPTIAAKRRKQKAKKIGQDKLQSRWHEKPLHGQFAARSKQADVDEIATHQWLRSSGLKGETEGFILAAQDQSLFTRNYQACILHNGADPKCRFCEDKVETIDHLVSGCSILTPNEYKNRHDRVGQYLHWRICKHFCIETEANWYEHHPEAVTEGKNVTIMWDFPIHTDRTIQANRPDIVIKDKTNNTCLFIDMSVPSDKNVSAKVFEKLSKYKDLEIEVEKMWHLKTKTLPVVIGALGLIKKGTDKFLQQIPGNPKLEEVQKIVLNRTAHVLRRALSI

SEQ ID NO: 24870 - protein, 1207 aa, Morbakka virulenta
MRTRRKIYRIVRRAGQQGTRPSGRDQPEVEKNATGSNSSQNESTQGHRNEVTLTSGPSEPPSITTSVSLQKKKRIKWSREENAEVIYCFYYALEKPETNNTDDTFRIWCERNTNNDKIENMDANRLANQRRYIMREKKLTEIEVSSIKDRVKCDTREHLDQEIELERDAENQVENVIENVNVLEEGGVEAIEPEPVILLNEQELNDMKNDILEEFSSVKHTNIEEREALLKIRHPQRFRNIFNLCNVALESIFNEIDPNLTELNELMYATGKVIQEKCGVKVKKRKSVRKTSKPKWQIRIEKEIERFRREISLLDELQKNEDLKSGKARKVLRKYDIKSRDQLPSLKEELKQKLQVKAQRLRRFDKRQKFYRQNRIFETDTKKFFREIMKDVISVEEVPSEEQVREFWNKIWGNEKGYNESAEWLGDLADSTKDILEQHWEDISTNEIKTALSKSHKWKSPGIDKIPNFWLDTLSSAHSRMAANFNKLLLEPESIPKWFCLGTTYLLPKSGETGNPKNYRPITCLSTSYKLLTSILTERTYIHMDEQNIFPTEQKGCKRGSYGCKDQLLINKMILENTHSKKRNLSTAWIDYKKAFDSVPHSWILKTLDMYKVSPTLINFLRTSMTLWETNLILTHANGTLFSNCMRIKCGIFQGDSLSPLLFCMALFPLSKLLNDTGYGYKIMERKINHLFYMDDLKLYAKDDGELEGLLKTVKAFSDDIGMEFGLDKCAKATFKRGKLDKTQNIDLDEGTVIKELEQEGTYKYLGINEGDGIQHSKMKEKIRKECIRRVRSIMKTELNSKNKITAINSLAVPVVSYSFNIINWNLSDLQKLDTKIRKQLTCNRMHHPKSDVDRLYLPRNKGGRGMIQLELSYKTSTIGLAKYLDLTDDWMLQLVNRHENSKRLHSILKESGKFSEQFGIDLNAETPPSPTLAAKQTKQKAKKSGLDKLESRWQEKPLHGQFAARSNNADVDKVATHQWLRSSGLKGETEGFILAAQDQSLFTRNYQANILHNGATPECRFCENGTETIDHLISGCSVLTSNEYKNRHDRVGQYLHWKICQHFSIDTPSNWYEHHPTPVTEGKDVTILWDFPIQTDRTIQANRPDIVIKNKKDNTCLLIDMSVPSDRNVSAKIFEKLSKYKDLEIEIGKMWHLRTKTIPVIVGALGLIKKGTDTFLKQIPGEPSLQEVQKIVLNGTAHLLRKALSI

SEQ ID NO: 24871 - protein, 1086 aa, Morbakka virulenta
MDANRLANQRRYIMHEKKLTEIKVSSIKDRVKCDTREHLNQEIKLKWETENQVENLIDNENVLEEGIEAIEPEPVILLNEQELNDMKNDILEEFSSVKHTNIEEREALLKIRHPQRFRNIFNLCNVALESIFNEIDPNLTELNELMYATGKVIQEKCGVKVKKRKSVRKTSKPKWQIRIEKEIERFRREISLLDELQKNEDLKSGKARKVLRKYDIKSRDQLPSLKEELKQKLQVKAQRLRRFDKRQKFYRQNRIFETDTKKFFREIMKDVISVEEVPSEEQVREFWNKIWGNEKGYNESAEWLGDLADSTKDILEQHWEDISTNEIKTALSKSHKWKSPGIDKIPNFWLDTLSSAHSRMAANFNKLLLEPESIPKWFCLGTTYLLPKSGETGNPKNYRPITCLSTSYKLLTSILTERTYIHMDEQNIFPTEQKGCKRGSYGCKDQLLINKMILENTHSKKRNLSTAWIDYKKAFDSVPHSWILKTLDMYKVSPTLINFLRTSMTLWETNLILTHANGTLFSNCMRIKCGIFQGDSLSPLLFCMALFPLSKLLNDTGYGYKIMERKINHLFYMDDLKLYAKDDGELEGLLKTVKAFSDDIGMEFGLDKCAKATFKRGKLDKTQNIDLDEGTVIKELEQEGTYKYLGINEGDGIQHSKMKEKIRKECIRRVRSIMKTELNSKNKITAINSLAVPVVSYSFNIINWNLSDLQKLDTKIRKQLTCNRMHHPKSDVDRLYLPRNKGGRGMIQLELSYKTSTIGLAKYLDLTDDWMLQLVNRHENSKRLHSILKESGKFSEQFGIDLNAETPPSPTLAAKQTKQKAKKSGLDKLESRWQEKPLHGQFAARSNNADVDKVATHQWLRSSGLKGETEGFILAAQDQSLFTRNYQANILHNGATPECRFCENGTETIDHLISGCSVLTSNEYKNRHDRVGQYLHWKICQHFSIDTPSNWYEHHPTPVTEGKDVTILWDFPIQTDRTIQANRPDIVIKNKKDNTCLLIDMSVPSDRNVSAKIFEKLSKYKDLEIEIGKMWHLRTKTIPVIVGALGLIKKGTDTFLKQIPGEPSLQEVQKIVLNGTAHLLRKALSI

SEQ ID NO: 24872 - protein, 941 aa, Morbakka virulenta
MYATGKVPQTKCGIKIKKGKRTKKASIPKWQLKIEKEIKTFRREISLVEELQKNENFKSGKARKILRKYDIKDREQLPSLKEELKQKLQVKAQRLRRFDKRQKFYRQNKIFETDAKKFYREIGKKAITVEDVQSENEVREFWNKIWGNEKGFNENAEWLQNLEESTRDIPEQIWVEITTGEVKKALQKSHKWKSPGIDKVPNFWLDSLSSVHDRIAVIFNKIITEPETIPKWFCLGTTYLLPKSNETRNPKNYRPITCLSTSYKLLTSILTDRTYIHMDEQNIFPIEQKGCKRGSYGCKDQLLINKMILENAHTKHKNLSTAWIDYKKAFDSVPHSWILKTLEMYKVSPAFINFLRVSMTLWETNLTLTHANGTLFSNCMQIKCGIFQGDSLSPLLFCMALIPLSKLLNDTELGYKIMGRKINHLFYMDDLKLYAKDDGDLEGLLKTVKGFSDDIGMEFGLDKCAKASFKRGKLERTENIELDEVTVIQDLEQEGSYKYLGVSEGDGIQHSKMKEKIRKECIRRVRSIMKTELNSKNRISAINSLAVPVVTYSFGIINWNLSDLKRLDTKIRKQLTCNLMHHPKSDVDRLYLPRNTGGRGMIQFELSYKTSIIGLSQYLDLTNDWMLQHVYRHENSKRLHSILKESEKFFRELGVDLEVDNTLNPTVAAKKTKQKAKKTGLDRLESRWQEKPLHGQFAARSNNADVDKEATHQWLRSAGLKGETEGFILAAQDQSLFTRNYQANVLHNGANQECRFCEDKTETIDHLVSGCSVLTPNEYKNRHDRVGQYLHWKICQHFSIKTQASWYEHHPAPVTESKDITILWDFPIQTDRTIQANRPDIVIKNRKENTCLLIDMSVPSDRNVSAKTFEKLAKYKDLEIEVEKMWHLKTKTIPVIVGALGLIKKGTDSFLKQIPGEPSLQEVQKIVLNGTAHLLRRALSI

SEQ ID NO: 24873 - protein, 1232 aa, Morbakka virulenta
MSGGVKSVPLSTWTRNTRLLLARNIQLFYQMKTRSKNKSCRIARRADQQGARASVSDQAEDFEKSATRSTSPTSQNPPGHQNGTPPIPGPVVQQASIDNKKKPRLKWTREEYAEVMYCFYYALEKPETNITDNTYTTWCVRNSNSEKMEMLDPNKLANVRRYIVGSKKLTDIEISIIKDRVKNDTRELQVENDEVEGNLDEQELVMSNNADARVENNVDEVAENEVVVDEEEIFSMKMDIIEELSIVKHTDMSEREALLKIRHPHKLKSILSIGNKALEQLCHDINPDLSELNKLIYATGRVLQAKCGIKLRKKTTNKKHSKPKWQVKIEKEIEGFRREISILEELQKDNGKKSGKARKVIRKYKVLSVEQIPTIKEELKQKLQVKAQRLRRLNKRQKFFRQNKIFETDAKKFYREVGKESISVEAIPSDEQVKEFWNNIWGKEKQFNENAEWVRDLEKSTRDIPKQEWENITIEEIQSALKKSHKWKSPGIDQIPNFWLNTLSSAHAKLASNFNSIMIEPHLTPKWFCQGITYLLAKTNETAKPKNYRPITCLSTSYKLLTSILTERTYVHMEEQNIFPKEQKGCRRGSYGCKDQLLINKMILENAHTKHKNLSTAWIDYKKAFDSVPHSWILKSLEMFKISPVLINFLRISMSLWETNLTLHHTNGTLISNGMQIQCGIFQGDSLSPLLFCIALIPLSQLLNNTGYGYKIMDKIINHLFYMDDLKLYAHNDGELEGLLKTVKSFSDDIGMEFGLDKCAKATFKRGKLITSENIELDDETVIKQLDQEGTYKYLGVNEGDGVQHSKMKEKIRKECIRRVRSILKTELNSKNKLTAINTLAIPVVAYSFNVIDWNLTELKNIDTKIRKQLTSNRMYHPKSDVDRLYVPRIKGGRGMIQLELSYKTSTVGLLQYLDLSNDWMLRLVRVHENSKRLHSVVKESAKFSHELGIENENIEHVSPTIAAKRRKQKAKKIGQDKLQSRWHEKPLHGQFAARSKQADVDEIATHQWLRSSGLKGETEGFILAAQDQSLFTRNYQACILHNGADPKCRFCEDKVETIDHLVSGCSILTPNEYKNRHDRVGQYLHWRICKHFCIETEANWYEHHPEAVTEGKNVTIMWDFPIHTDRTIQANRPDIVIKDKTDNTCLFIDMSVPSDKNVSAKVSEKLSKYKDLEIEVEKMWHLKTKTLPVDIRELGLIKKGTDKFPGNPKLEEVQKIVLNITAHVLRRALSI

SEQ ID NO: 24874 - protein, 1094 aa, Morbakka virulenta
MDANRLANQRRYIIREKKLTEVEISNIKERVKDDTRENLVEDLGNELQQMDGAVFTIDENIDMHGNLNVLEEEQRKSVGPVPAVEVDEEELANMKIDILEEFSVVQHTKIEERESLFKIRHPHKFKNIFNLGNKALEIICNEINPNLTELNELMYATGKVLQTKCGIKIKKGKSTKKASKPKWQLKIEMEIKTFRREISLVEELQKNENFKSGKARKVLRKYDIKDREQLPSLKEELKQKLQVKAQRLRRFDKRQKFYRQNKIFETDAKKFYREIGKKAITAEDVPSENEVREFWNKIWGNEKGFNENAEWLQNLEESTRDIPEQIWVEITTGEVKKALQKSHKWKSPGIDKVPNFWLDSLSSVHDRIAVIFNKIITEPETIPKWFCLGTTYLLPKSNETRNPKNYRPITCLSTSYKLLTSILTDRTYIHMDEQNIFPIEQKGCKRGSYGCKDQLLINKMILENAHTKHKNLSTAWIDYKKAFDSVPHSWILKTLEMYKVSPAFINFLRVSMTLWETNLTLTHANGTLFSNCMQIKCGIFQGDSLSPLLFCMALIPLSKLLNDTELGYKIMGRKINHLFYMDDLKLYAKDDGDLEGLLKTVKGFSDDIGMEFGLDKCAKASFKRGKLERTENIELDEVTVIQDLEQEGSYKYLGVSEGDGIQHSKMKEKIRKECIRRVRSIMKTELNSKNRISAINSLAVPVVTYSFGIINWNLSDLKRLDTKIRKQLTCNLMHHPKSDVDRLYLPRNTGGRGMIQFELSYKTSIIGLSQYLDLTNDWMLQHVYRHENSKRLHSILKESEKFFRELGVDLEVDNTLNPTVAAKKTKQKAKKTGLDRLESRWQEKPLHGQFAARSNNADVDKEATHQWLRSAGLKGETEGFILAAQDQSLFTRNYQANVLHNGANQECRFCEDKTETIDHLVSGCSVLTPNEYKNRHDRVGQYLHWKICQHFSIKTQASWYEHHPAPVTESKDITILWDFPIQTDRTIQANRPDIVIKNRKENTCLLIDMSVPSDRNVSAKTFEKLAKYKDLEIEVEKMWHLKTKTIPVIVGALGLIKKGTDSFLKQIPGEPSLQEVQKIVLNGTAHLLRRALSI

SEQ ID NO: 24875 - protein, 1048 aa, Morbakka virulenta
MLTALYLTLKFTSCVKILNNNNNNNNNNITIMMRKNEVVVDEEEIFSMTMDIIEELSIVKHTDMSEREALLKIRHPHKLKSILSIGNKALEQLCHDINPDLSELNKLIYATGRVLQAKCGIKLRKKTTNKKHSKPKWQVKIEKEIEGFRREISILEELQKDNGKKSGKARKVIRKYKVLSVEQIPTIKEELKQKLQVKAQRLRRLNKRQKFFRQNKIFETDAKKFYREVGKESISVEAIPSDEQVKEFWNNIWGKEKQFNENAEWVRDLEKSTRDIPKQEWENITIEEIQSALKKSHKWKSPGIDQIPNFWLNTLSSAHAKLASNFNSIMIEPHLTPKWFCQGITYLLAKTNETAKPKNYRPITCLSTSYKLLTSILTERTYVHMEEQNIFPKEQKGCRRGSYGCKDQLLINKMILENAHTKHKNLSTAWIDYKKAFDSVPHSWILKSLEMFKISPVLINFLRISMPLWETNLTLHHTNGTLISNGMQIQCGIFQGDSLSPLLFCIALIPLSQLLNNTGYGYKIMDKIINHLFYMDDLKLYAHNDGELEGLLKTVKSFSDDIGMEFGLDKCAKATFKRGKLITSENIELDDETVIKQLDQEGTYKYLGVNEGDGVQHSKMKEKIRKECIRRVRSILKTELNSKNKLTAINTLAIPVVAYSFNVIDWNLTELKNIDTKIRKQLTSNRMYHPKSDVDRLYVPRIKGGRGMIQLELSYKTSTVGLLQYLDLSNDWMLRLVRVHENSKRLHSVVKESAKFSHELGIENENIEHVSPTIAAKRRKQKAKKIGQDKLQSRWHEKPLHGQFAARSKQADVDEIATHQWLRSSGLKGETEGFILAAQDQSLFTRNYQACILHNGADPKCRFCEDKVETIDHLVSGCSILTPNEYKNRHDRVGQYLHWRICKHFCIETEANWYEHHPEAVTEGKNVTIMWDFPIHTDRTIQANRPDIVIKDKTNNTCLFIDMSVPSDKNVSAKVFEKLSKYKDLEIEVEKMWHLKTKTLPVVIGALGLIKKGTDKFLQQIPGNPKLEEVQKIVLNSTAHVLRRALSI

SEQ ID NO: 24876 - protein, 1207 aa, Morbakka virulenta
MRTRRKTYRIVRRAGQQGTRPSGRDQPEVEKNATGSNSSQNESTQGHRNEVTLTSGPSEPPSITTSVSLQKKKRIKWSREENAEVIYCFYYALEKPETNNTDDTFRIWCERNTNNDKIENMDANRLANQRRYIMREKKLTEIEVSSIKDRVKCDTREHLDQEIELERDAENQVENVIENVNVLEEGGVEAIEPEPVILLNEQELNDMKNDILEEFSSVKHTNIEDREALLKIRHPQRFRNIFNLCNVALESIFNEIDPNLTELNELMYATGKVIQEKCGVKVKKRKSVRKTSKPKWQIRIEKEIERFRREISLLDELQKNEDLKSGKARKVLRKYDIKSRDQLPSLKEELKQKLQVKAQRLRRFDKRQKFYRQNRIFETDTKKFFREIMKDVISVEEVPSEEQVREFWNKIWGNEKGYNESAEWLGDLADSTKDILEQHWEDISTNEIKTALSKSHKWKSPGIDKIPNFWLDTLSSAHSRMAANFNKLLLEPESIPKWFCLGTTYLLPKSGETGNPKNYRPITCLSTSYKLLTSILTERTYIHMDEQNIFPTEQKGCKRGSYGCKDQLLINKMILENTHSKKRNLSTAWIDYKKAFDSVPHSWILKTLDMYKVSPTLINFLRTSMTLWETNLILTHANGTLFSNCMRIKCGIFQGDSLSPLLFCMALFPLSKLLNDTGYGYKIMERKINHLFYMDDLKLYAKDDGELEGLLKTVKAFSDDIGMEFGLDKCAKATFKRGKLDKTQNIDLDEGTVIKELEQEGTYKYLGINEGDGIQHSKMKEKIRKECIRRVRSIMKTELNSKNKITAINSLAVPVVSYSFNIINWNLSDLQKLDTKIRKQLTCNRMHHPKSDVDRLYLPRNKGGRGMIQLELSYKTSTIGLAKYLDLTDDWMLQLVNRHENSKRLHSILKESGKFSEQFGIDLNAETPPSPTLAAKQTKQKAKKSGLDKLESRWQEKPLHGQFAARSNNADVDKVATHQWLRSSGLKGETEGFILAAQDQSLFTRNYQANILHNGATPECRFCENGTETIDHLISGCSVLTSNEYKNRHDRVGQYLHWKICQHFSIDTPSNWYEHHPTPVTEGKDVTILWDFPIQTDRTIQANRPDIVIKNKKDNTCLLIDMSVPSDRNVSAKIFEKLSKYKDLEIEIGKMWHLRTKTIPVIVGALGLIKKGTETFLKQIPGEPSLQEVQKIVLNGTAHLLRKALSI

SEQ ID NO: 24877 - protein, 1236 aa, Morbakka virulenta
MSGGVKSVPLSTWTRNTRLLLARNIQLFYQMKTRSKNKSCRIARRADQQGARASVSDQAEDFEKSATRSTSPTSQNPPGHQNGTPPIPGPVVQQASIDNKKKPRLKWTREEYAEVMYCFYYALEKPETNITDNTYTTWCVRNSNSEKMEMLDPNKLANVRRYIVGSKKLTDIEISIIKDRVKNDTRELQVENDEVEGNLDEQELVMSNNADARVENNVDEVAENEVVVDEEEIFSMKMDIIEELSIVKHTDMSEREALLKIRHPHKLKSILSIGNKALEQLCHDINPDLSELNKLIYATGRVLQAKCGIKLRKKTTNKKHSKPKWQVKIEKEIEGFRREISILEELQKDNGKKSGKARKVIRKYKVLSVEQIPTIKEELKQKLQVKAQRLRRLNKRQKFFRQNKIFETDAKKFYREVGKESISVEAIPSDEQVKEFWNNIWGKEKQFNENAEWVRDLEKSTRDIPKQEWENITIEEIQSALKKSHKWKSPGIDQIPNFWLNTLSSAHAKLASNFNSIMIEPHLTPKWFCQGITYLLAKTNETAKPKNYRPITCLSTSYKLLTSILTERTYVHMEEQNIFPKEQKGCRRGSYGCKDQLLINKMILENAHTKHKNLSTAWIDYKKAFDSVPHSWILKSLEMFKISPVLINFLRISMSLWETNLTLHHANGTLISNGMQIQCGIFQGDSLSPLLFCIALIPLSQLLNNTGYGYKIMDKIINHLFYMDDLKLYAHNDGELEGLLKTVKSFSDDIGMEFGLDKCAKATFKRGKLITSENIELDDETVIKQFDQEGTYKYLGVNEGDGVQHSKMKEKIRKECIRRVRSILKTELNSKNKLTAINTLAIPVVAYSFNVIDWNLTELKNIDTKIRKQLTSNRMYHPKSDVDRLYVPRIKGGRGMIQLELSYKTSTVGLLQYLDLSNDWMLRLVRVHENSKRLHSVVKESAKFSHKLGIENENIEHVSPTIAAKRRKQKAKKIGQDKLQSRWHEKPLHGQFAARSKQADVDEIATHQWLRSSGLKGETEGFILAAQDQSLFTRNYQACILHNGADPKCRFCEDKVETIDHLVSGCSILTPNEYKNRHDRVGQYLHWRICKHFCIETEANWYEHHPEAVTEGKNVTIMWDFPIHTDRTIQANRPDIVIKDKTNNTCLFIDMSVPSDKNVSAKVFEKLSKYKDLEIEVEKMWHLKTKTLPVVIGALGLIKKGTDKFLQQIPGNPKLEEVQKIVLNSTAHVLRRALSI

SEQ ID NO: 24878 - protein, 1207 aa, Morbakka virulenta
MRTRRKTYRIVRRAGQQGTRPSGRDQPEVEKNATGSNSSQNESTQGHRNEVTLTSGPSEPPSITTSVSLQKKKRIKWSREENAEVIYCFYYALEKPETNNTDDTFRIWCERNTNNDKIENMDANRLANQRRYIMREKKLTEIEVSSIKDRVKCDTREHLDQEIELERDAENQVENVIENVNVLEEEGVEAIEPEPVILLNEQELNDMKNDILEEFSSVKHTNIEEREALLKIRHPQRFRNIFNLCNVALESIFNEIDPNLTELNELMYATGKVIQEKCGVKVKKRKSVRKTSKPKWQIRIEKEIERFRREISLLDELQKNEDLKSGKARKVLRKYDIKSRDQLPSLKEELKQKLQVKAQRLRRFDKRQKFYRQNRIFETDTKKFFREIMKDVISVEEVPSEEQVREFWNKIWGNEKGYNESAEWLGDLADSTKDILEQHWEDISTNEIKTALSKSHKWKSPGIDKIPNFWLDTLSSAHSRMAANFNKLLLEPESIPKWFCLGTTYLLPKSGETGNPKNYRPITCLSTSYKLLTSILTERTYIHMDEQNIFPTEQKGCKRGSYGCKDQLLINKMILENTHSKKRNLSTAWIDYKKAFDSVPHSWILKTLDMYKVSPTLINFLRTSMTLWETNLILTHANGTLFSNCMRIKCGIFQGDSLSPLLFCMALFPLSKLLNDTGYGYKIMERKINHLFYMDDLKLYAKDDGELEGLLKTVKAFSDDIGMEFGLDKCAKATFKRGKLDKTQNIDLDEGTVIKELEQEGTYKYLGINEGDGIQHSKMKEKIRKECIRRVRSIMKTELNSKNKITAINSLAVPVVSYSFNIINWNLSDLQKLDTKIRKQLTCNRMHHPKSDVDRLYLPRNKGGRGMIQLELSYKTSTIGLAKYLDLTDDWMLQLVNRHENSKRLHSILKESGKFSEQFGIDLNAETPPSPTLAAKQTKQKAKKSGLDKLESRWQEKPLHGQFAARSNNADVDKVATHQWLRSSGLKGETEGFILAAQDQSLFTRNYQANILHNGATPECRFCENGTETIDHLISGCSVLTSNEYKNRHDRVGQYLHWKICQHFSIDTPSNWYEHHPSPVTEGKDVTILWDFPIQTDRTIQANRPDIVIKNKKDNTCLLIDMSVPSDRNVSAKIFEKLSKYKDLEIEIGKMWHLRTKTIPVIVGALGLIKKGTDTFLKQIPGEPSLQEVQKIVLNGTAHLLRKALSI

SEQ ID NO: 24879 - protein, 1094 aa, Morbakka virulenta
MDANRLANQRRYIIREKKLTEVEISNIKERVKDDTRENLVEDLGNELQQMDGDVFTIDENIDMHGNLNVLEEEQQKSVGPVPAVEVDEEELANMKIDILEEFSVVQHTKIEERESLFKIRHPHKFKNIFNLGNKALEIICNEINPNLTELNELMYATGKVLQTKCGIKIKKGKSTKKASKPKWQLKIEMEIKTFRREISLVEELQKNENFKSGKARKVLRKYDIKDREQLPSLKEELKQKLQVKAQRLRRFDKRQKFYRQNKIFETDAKKFYREIGKKAITAEDVPSENEVREFWNKIWGNEKGFNENAEWLQNLEESTRDIPEQIWVEITTGEVKKALQKSHKWKSPGIDKVPNFWLDSLSSVHDRIAVIFNKIITEPETIPKWFCLGTTYLLPKSNETRNPKNYRPITCLSTSYKLLTSILTDRTYIHMDEQNIFPIEQKGCKRGSYGCKDQLLINKMILENAHTKHKNLSTAWIDYKKAFDSVPHSWILKTLEMYKVSPAFINFLRVSMTLWETNLTLTHANGTLFSNCMQIKCGIFQGDSLSPLLFCMALIPLSKLLNDTELGYKIMGRKINHLFYMDDLKLYAKDDGDLEGLLKTVKGFSDDIGMEFGLDKCAKASFKRGKLERTENIELDEVTVIQDLEQEGSYKYLGVSEGDGIQHSKMKEKIRKECIRRVRSIMKTELNSKNRISAINSLAVPVVTYSFGIINWNLSDLKRLDTKIRKQLTCNLMHHPKSDVDRLYLPRNTGGRGMIQFELSYKTSIIGLSQYLDLTNDWMLQHVYRHENSKRLHSILKESEKFFRELGVDLEVDNTLNPTVAAKKTKQKAKKTGLDRLESRWQEKPLHGQFAARSNNADVDKEATHQWLRSAGLKGETEGFILAAQDQSLFTRNYQANVLHNGANQECRFCEDKTETIDHLVSGCSVLTPNEYKNRHDRVGQYLHWKICQHFSIKTQASWYEHHPAPVTESKDITILWDFPIQTDRTIQANRPDIVIKNRKENTCLLIDMSVPSDRNVSAKTFEKLAKYKDLEIEVEKRWHLKTKTIPVIVGALGLIKKGTDSFLKQIPGEPSLQEVQKIVLKGTAHLLRRALSI

SEQ ID NO: 24880 - protein, 1207 aa, Morbakka virulenta
MRTRRKTYRIVRRAGQQGTRPSGRDQPEVEKNATGSNSSQNESTQGHRNEVTLTSGPSEPPSITTSVSLQKKKRIKWSREENAEVIYCFYYALEKPETNNTDDTFRIWCERNTNNDKIENMDANRLANQRRYIMREKKLTEIEVSSIKDRVKCDTREHLDQEIELERDAENQVENVIENVNVLEEEGVEAIEPEPVILLNEQELNDMKNDILEEFSSVKHTNIEDREALLKIRHPQRFRNIFNLCNVALESIFNEIDPNLTELNELMYATGKVIQEKCGVKVKKRKSVRKTSKPKWQIRIEKEIERFRREISLLDELQKNEDLKSGKARKVLRKYDIKSRDQLPSLKEELKQKLQVKAQRLRRFDKRQKFYRQNRIFETDTKKFFREIMKDVISVEEVPSEEQVREFWNKIWGNEKGYNESAEWLGDLADSTKDILEQHWEDISTNEIKTALSKSHKWKSPGIDKIPNFWLDTLSSAHSRMAANFNKLLLEPESIPKWFCLGTTYLLPKSGETGNPKNYRPITCLSTSYKLLTSILTERTYIHMDEQNIFPTEQKGCKRGSYGCKDQLLINKMILENTHSKKRNLSTAWIDYKKAFDSVPHSWILKTLDMYKVSPTLINFLRTSMTLWETNLILTHANGTLFSNCMRIKCGIFQGDSLSPLLFCMALFPLSKLLNDTGYGYKIMERKINHLFYMDDLKLYAKDDGELEGLLKTVKAFSDDIGMEFGLDKCAKATFKRGKLDKTQNIDLDEGTVIKELEQEGTYKYLGINEGDGIQHSKMKEKIRKECIRRVRSIMKTELNSKNKITAINSLAVPVVSYSFNIINWNLSDLQKLDTKIRKQLTCNRMHHPKSDVDRLYLPRNKGGRGMIQLELSYKTSTIGLAKYLDLTDDWMLQLVNRHENSKRLHSILKESGKFSEQFGIDLNAETPPSPTLAAKQTKQKAKKSGLDKLESRWQEKPLHGQFAARSNNADVDKVATHQWLRSSGLKGETEGFILAAQDQSLFTRNYQANILHNGATPECRFCENGTETIDHLISGCSVLTSNEYKNRHDRVGQYLHWKICQHFSIDTPSNWYEHHPTPVTEGKDVTILWDFPIQTDRTIQANRPDIVIKNKKDNTCLLIDMSVPSDRNVSAKIFEKLSKYKDLEIEIGKMWHLRTKTIPVIVGALGLIKKGTDTFLKQIPGEPSLQEVQKIVLNGTAHLLRKVLSI

SEQ ID NO: 24881 - protein, 1094 aa, Morbakka virulenta
MDANRLANQRRYIIREKKLTEVEISNIKERVKDDTRENLVEDLGNELQQMDGDVFTIDENIDMHGNLNVLEEEQQKSVGPVPAVEVDEEELANMKIDILEEFSVVQHTKIEERESLFKIRHPHKFKNIFNLGNKALEIICNEINPNLTELNELMYATGKVLQTKCGIKIKKGKSTKKASKPKWQLKIEMEIKTFRREISLVEELQKNENFKSGKARKVLRKYDIKDREQLPSLKEELKQKLQVKAQRLRRFDKRQKFYRQNKIFETDAKKFYREIGKKAITAEDVPSENEVREFWNKIWGNEKGFNENAEWLQNLEESTRDIPEQIWVEITTGEVKKALQKSHKWKSPGIDKVPNFWLDSLSSVHDRIAVIFNKIITEPETIPKWFCLGTTYLLPKSNETRNPKNYRPITCLSTSYKLLTSILTDRTYIHMDEQNIFPIEQKGCKRGSYGCKDQLLINKMILENAHTKHKNLSTAWIDYKKAFDSVPHSWILKTLEMYKVSPAFINFLRVSMTLWETNLTLTHANGTLFSNCMQIKCGIFQGDSLSPLLFCMALIPLSKLLNDTELGYKIMGRKINHLFYMDDLKLYAKDDGDLEGLLKTVKGFSDDIGMEFGLDKCAKASFKRGKLERTENIELDEVTVIQDLEQEGSYKYLGVSEGDGIQHSKMKEKIRKECIRRVRSIMKTELNSKNRISAINSLAVPVVTYSFGIINWNLSDLKRLDTKIRKQLTCNLMHHPKSDVDRLYLPRNTGGRGMIQFELSYKTSIIGLSQYLDLTNDWMLQHVYRHENSKRLHSILKESEKFFRELGVDLEVDNTLNPTVAAKKTKQKAKKTGLDRLESRWQEKPLHGQFAARSNNADVDKEATHQWLRSAGLKGETEGFILAAQDQSLFTRNYQANVLHNGANQECRFCEDKTETIDHLVSGCSVLTPNEYKNRHDRVGQYLHWKICQHFSIKTQASWYEHHPAPVTESKDITILWDFPIQTDRTIQANRPDIVIKNRKENTCLLIDMSVPSDRNVSAKTFEKLAKYKDLEIEVEKMWHLKTKTIPVIVGALGLIKKGTDNFLKQIPGEPSLQEVQKIVLNGTAHLLRRALST

SEQ ID NO: 24882 - protein, 1094 aa, Morbakka virulenta
MDANRLANQRRYIIREKKLTEVEISNIKERVKDDTRENLVEDLGNELQQMDGDVFTIDENIDMHGNLNVLEEEQQKSVGPVPAVEVDEEELANMKIDILEEFSVVQHTKIEERESLFKIRHPHKFKNIFNLGNKALEIICNEINPNLTELNELMYATGKVLQTKCGIKIKKGKSTKKASKPKWQLKIEMEIKTFRREISLVEELQKNENFKSGKARKVLRKYDIKDREQLPSLKEELKQKLQVKAQRLRRFDKRQKFYRQNKIFETDAKKFYREIGKKAITAEDVPSENEVREFWNKIWGNEKGFNENAEWLQNLEESTRDIPEQIWVEITTGEVKKALQKSHKWKSPGIDKVPNFWLDSLSSVHDRIAVIFNKIITEPETIPKWFCLGTTYLLPKSNETRNPKNYRPITCLSTSYKLLTSILTDRTYIHMDEQNIFPIEQKGCKRGSYGCKDQLLINKMILENAHTKHKNLSTAWIDYKKAFDSVPHSWILKTLEMYKVSPAFINFLRVSMTLWETNLTLTHANGTLFSNCMQIKCGIFQGDSLSPLLFCMALIPLSKLLNDTELGYKIMGRKINHLFYMDDLKLYAKDDGDLEGLLKTVKGFSDDIGMEFGLDKCAKASFKRGKLERTENIELDEVTVIQDLEQEGSYKYLGVSEGDGIQHSKMKEKIRKECIRRVRSIMKTELNSKNRISAINSLAVPVVTYSFGIINWNLSDLKRLDTKIRKQLTCNLMHHPKSDVDRLYLPRNTGGRGMIQFELSYKTSIIGLSQYLDLTNDWMLQHVYRHENSKRLHSILKESEKFFRELGVDLEVDNTLNPTVAAKKNKQKAKKTGLDRLESRWQEKPLHGQFAARSNNADVDKEATHQWLRSAGLKGETEGFILAAQDQSLFTRNYQANVLHNGANQECRFCEDKTETIDHLVSGCSVLTPNEYKNRHDRVGQYLHWKICQHFSIKTQASWYEHHPAPVTESKDITILWDFPIQTDRTIQANRPDIVIKNRKENTCLLIDMSVPSDRNVSAKTFEKLAKYKDLEIEVEKMWHLKTKTIPVIVGALGLIKKGTDSFLKQIPGEPSLQEVQKIVLNGTAHLLRRALSI

SEQ ID NO: 24883 - protein, 1207 aa, Morbakka virulenta
MRTRRKTYRIVRRAGQQGTRPSEQDQPEVEKNATGSNSVPNESTKGHQNEVTLTSGPSEPPSITTSVFLQKKKRIKWTREENAEVIYCFHYALEKPETNNTDDNFRIWCERNTNNDKIENMDANRLANQRRYIMREKKLTEIEVSSIKDRVKCDTREHLDQEIELERDAENQVENVIENVNVLEEEGVEAIEPEPVILLNEQELNDMKNDILEEFSSVKHTNIEEREALLKIRHPQRFRNIFNLCNVALESIFNEIDPNLTELNELMYATGKVIQEKCGVKVKKRKSVRKTSKPKWQIRIEKEIERFRREISLLDELQKNEDLKSGKARKVLRKYDIKSRDQLPSLKEELKQKLQVKAQRLRRFDKRQKFYRQNRIFETDTKKFFREIMKDVISVEEVPSEEQVREFWNKIWGNEKGYNESAEWLGDLADSTKDILEQHWEDISTNEIKTALSKSHKWKSPGIDKIPNFWLDTLSSAHSRMAANFNKLLLEPESIPKWFCLGTTYLLPKSGETGNPKNYRPITCLSTSYKLLTSILTERTYIHMDEQNIFPTEQKGCKRGSYGCKDQLLINKMILENTHSKKRNLSTAWIDYKKAFDSVPHSWILKTLDMYKVSPTLINFLRTSMTLWETNLILTHANGTLFSNCMRIKCGIFQGDSLSPLLFCMALFPLSKLLNDTGYGYKIMERKINHLFYMDDLKLYAKDDGELEGLLKTVKAFSDDIGMEFGLDKCAKATFKRGKLDKTQNIDLDEGTVIKELEQEGTYKYLGINEGDGIQHSKMKEKIRKECIRRVRSIMKTELNSKNKITAINSLAVPVVSYSFNIINWNLSDLQKLDTKIRKQLTCNRMHHPKSDVDRLYLPRNKGGRGMIQLELSYKTSTIGLAKYLDLTDDWMLQLVNRHENSKRLHSILKESGKFSEQFGIDLNAETPPSPTLAAKQTKQKAKKSGLDKLESRWQEKPLHGQFAARSNNADVDKVATHQWLRSSGLKGETEGFILAAQDQSLFTRNYQANILHNGATPECRFCENGTETIDHLISGCSVLTSNEYKNRHDRVGQYLHWKICQHFSIDTPSNWYEHHPTPVTEGKDVTILWDFPIQTDRTIQANRPYIVIKNKKDNTSLLIDMSVPSDRNVSAKIFEKLSKYKDLEIEIGKMWHLRTKTIPVIVGALGLIKKGTDTFLKQIPSEPTLQEVQKIVLNGTGDLLRKALSI

SEQ ID NO: 24884 - protein, 1183 aa, Morbakka virulenta
MRTRRKTYHIVRRAGQQGTRPSGRDQPEVEKNATGSNSSQNESTQGHRNEVTLTSGPSEPPSITTSVSLQKKKRIKWSREENAEVIYCFYYALEKPETNNTDDTFRIWCERNTNNDKIENMDANRLANQRRYIMREKKLTEIEVSSIKDRVKCDTREHLDQEIELERDAENQVENVIENVNVLEEGGVEAIEPEPVILLNEQELNDMKNDILEEFSSVKHTNIEDREALLKIRHPQRFRNIFNLCNVALESIFNEIDPNLTELNELMYATGKVIQEKCGVKVKKRKSVRKTSKPKWQIRIEKEIERFRREISLLDELQKNEDLKSGKARKVLRKYDIKSRDQLPSLKEELKQKLQVKAQRLRRFDKRQKFYRQNRIFETDTKKFFREIMKDVISVEEVPSEEQVREFWNKIWGNEKGYNESAEWLGDLADSTKDILEQHWEDISTNEIKTALSKSHKWKSPGIDKIPNFWLDTLSSAHSRMAANFNKLLLEPESIPKWFCLGTTYLLPKSGETGNPKNYRPITCLSTSYKLLTSILTERTYIHMDEQNIFPTEQKGCKRGSYGCKDQLLINKMILENTHSKKRNLSTAWIDYKKAFDSVPHSWILKTLDMYKVSPTLINFLRTSMTLWETNLILTHANGTLFSNCMRIKCGIFQGDSLSPLLFCMALFPLSKLLNDTGYGYKIMERKINHLFYMDDLKLYAKDDGELEGLLKTVKAFSDDIGMEFGLDKCAKATFKRGKLDKTQNIDLDEGTVIKELEQEGTYKYLGINEGDGIQHSKMKEKIRKECIRRVRSIMKTELNSKNKITAINSLAVPVVSYSFNIINWNLSDLQKLDTKIRKQLTCNRMHHPKSDVDRLYLPRNKGGRGMIQLELSYKTSTIGLAKYLDLTDDWMLQLVNRHENSKRLHSILKESGKFSEQFGIDLNAETPPSPTLAAKQTKQKAKKSGLDKLESRWQEKPLHGQFAARSNNADVDKVATHQWLRSSGLKGETEGFILAAQDQSLFTRNYQANILHNGATPECRFCENGTETIDHLISGCSVLTSNEYKNRHDRVGQYLHWKICQHFSIDTPSNWYEHHPTPVTEGKDVTILWDFPNQTDRTIQANRPDIVIKKKKDTTCLLIDMSVPSDRNVSAKIFEKLSKYKDLEIEIGKMWHLRTKTIPVIVGALGLIKKGTAHLLRKALSI

SEQ ID NO: 24885 - protein, 1207 aa, Morbakka virulenta
MRTRRKTYRIVRRAGQQGTRPSGRDQPEVEKNATGSNSSQNESTQGHRNEVTLTSGPSEPPSITTSVSLQKKKRIKWTREENAEVIYCFYYALEKPETNNTDDTFRIWCERNTNNDKIENMDANRLANQRRYIMREKKLTEIEVSSIKDRVKCDTREHLDQEIELERDAENQVENVIENVNVLEEEGVEAIEPEPVILLNEQELNDMKNDILEEFSSVKHTNIEEREALLKIRHPQRFRNIFNLCNVALESIFNEIDPNLTELNELMYATGKVIQEKCGVKVKKRKSVRKTSKPKWQIRIEKEIERFRREISLLDELQKNEDLKSGKARKVLRKYDIKSRDQLPSLKEELKQKLQVKAQRLRRFDKRQKFYRQNRIFETDTKKFFREIMKDVISVEEVPSEEQVREFWNKIWGNEKGYNESAEWLGDLADSTKDILEQHWEDISTNEIKTALSKSHKWKSPGIDKIPNFWLDTLSSAHSRMAANFNKLLLEPESIPKWFCLGTTYLLPKSGETGNPKNYRPITCLSTSYKLLTSILTERTYIHMDEQNIFPTEQKGCKRGSYGCKDQLLINKMILENTHSKKRNLSTAWIDYKKAFDSVPHSWILKTLDMYKVSPTLINFLRTSMTLWETNLILTHANGTLFSNCMRIKCGIFQGDSLSPLLFCMALFPLSKLLNDTGYGYKIMERKINHLFYMDDLKLYAKDDGELEGLLKTVKAFSDDIGMEFGLDKCAKATFKRGKLDKTQNIDLDEGTVIKELEQEGTYKYLGINEGDGIQHSKMKEKIRKECIRRVRSIMKTELNSKNKITAINSLAVPVVSYSFNIINWNLSDLQKLDTKIRKQLTCNRMHHPKSDVDRLYLPRNKGGRGMIQLELSYKTSTIGLAKYLDLTDDWMLQLVNRHENSKRLHSILKESGKFSEQFGIDLNAETPPSPTLAAKQTKQKAKKSGLDKLESRWQEKPLHGQFAARSNNADVDKVATHQWLRSSGLKGETEGFILAAQDQSLFTRNYQANILHNGATPECRFCENGTETIDHLISGCSVLTSNEYKNRHDRVGQYLHWKICQHFSIDTPSNWYEHHPTPVTEGKDVTILWDFPIQTDRTIQANRPDIVIKNKKDNTCLLIDMSVPSDRNVSAKIFEKLSKYKDLEIEIGKMWHLRTKTIPVIVGALGLIKKGTDTFLKQIPGEPSLQEVQKIVLNGTAHLLRKALSI

SEQ ID NO: 24886 - protein, 1094 aa, Morbakka virulenta
MDANRLANQRRYIIREKKLTEVEISNIKERVKDDTRENLVEDLGNELQQMDGDVFTIDENIDMHGNLNVLEEEQQKSVGPVPAVEVDEEELANMKIDILEEFSVVQHTKIEERESLFKIRHPHKFKNIFNLGNKALEIICNEINPNLTELNELMYATGKVLQTKCGIKIKKGKSTKKASKPKWQLKIEMEIKTFRREISLVEELQKNENFKSGKARKVLRKYDIKDREQLPSLKEELKQKLQVKAQRLRRFDKRQKFYRQNKIFETDAKKFYREIGKKAITAEDVPSENEVREFWNKIWGNEKGFNENAEWLQNLEESTRDIPEQIWVEITTGEVKKALQKSHKWKSPGIDKVPNFWLDSLSSVHDRIAVIFNKIITEPETIPKWFCLGTTYLLPKSNETRNPKNYRPITCLSTSYKLLTSILTDRTYIHMDEQNIFPIEQKGCKRGSYGCKDQLLINKMILENAHTKHKNLSTAWIDYKKAFDSVPHSWILKTLEMYKVSPAFINFLRVSMTLWETNLTLTHANGTLFSNYMQIKCGIFQGDSLSPLLFCMALIPLSKLLNDTELGYKIMGRKINHLFYMDDLKLYAKDDGDLEGLLKTVKGFSDDIGMEFGLDKCAKASFKRGKLERTENIELDEVTVIQDLEQEGSYKYLGVSEGDGIQHSKMKEKIRKECIRRVRSIMKTELNSKNRISAINSLAVPVVTYSFGIINWNLSDLKRLDTKIRKQLTCNLMHHPKSDVDRLYLPRNTGGRGMIQFELSYKTSIIGLSQYLDLTNDWMLQHVYRHENSKRLHSILKESEKFFRELGVDLEVDNTLNPTVAAKKTKQKAKKTGLDRLESRWQEKPLHGQFAARSNNADVDKEATHQWLRSAGLKGETEGFILAAQDQSLFTRNYQANVLHNGANQECRFCEDKTETIDHLVSGCSVLTPNEYKNRHDRVGQYLHWKICQHFSIKTQASWYEHHPAPVTESKDITILWDFPIQTDRTIQANRPDIVIKNRKENTCLLIDMSVPSDRNVSAKTFEKLAKYKDLEIEVEKMWHLKTKTIPVIVGALGLIKKGTDSFLKQIPGEPYLQEVQKIVLNGTAHLLRRALSI

SEQ ID NO: 24887 - protein, 1220 aa, Morbakka virulenta
MKTRRKTYRIVRRAGQQGMRPSGRDQPEVENNATKSNSSPNESTQGHQNEVTLTSGLSEPPSITTSVFLQKKKRIKWTREENTEVIYYFYYVLEKPETNNTDDTFRIWSEKNTYNDKIENMDANRLANQRRYIMREKKLTEIEVSSIKDRVKCDTREHLDQEIELERDAENQVENVIENVNVLEEGGVEAIEPEPVILLNEQELNDMKNDILEEFSSVKHTNIEDREALLKIRHPQRFRNIFNLCNVALESIFNEIDPNLTELNELMYATGKVIQEKCGVKVKKRKSVRKTSKPKWQIRIEKEIERFRREISLLDELQKNEDLKSGKARKVLRKYDIKSRDQLPSLKEELKQKLQVKAQRLRRFDKRQKFYRQNRIFETDTKKFFREIMKDVISVEEVPSEEQVREFWNKIWGNEKGYNESAEWLGDLADSTKDILEQHWEDISTNEIKTALSKSHKWKSPGIDKIPNFWLDTLSSAHSRMAANFNKLLLEPESIPKWFCLGTTYLLPKSGETGNPKNYRPITCLSTSYKLLTSILTERTYIHMDEQNIFPTEQKGCKRGSYGCKDQLLINKMILENTHSKKRNLSTAWIDYKKAFDSVPHSWILKTLDMYKVSPTLINFLRTSMTLWETNLILTHANGTLFSNCMRIKCGIFQGDSLSPLLFCMALFPLSKLLNDTGYGYKIMERKINHLFYMDDLKLYAKDDGELEGLLKTVKAFSDDIGMEFGLDKCAKATFKRGKLDKTQNIDLDEGTVIKELEQEGTYKYLGINEGDGIQHSKMKEKIRKECIRRVRSIMKTELNSKNKITAINSLAVPVVSYSFNIINWNLSDLQKLDTKIRKQLTCNRMHHPKSDVDRLYLPRNKGGRGMIQLELSYKTSTIGLAKYLDLTDDWMLQLVNRHENSKRLHSILKESGKFSEQFGIDLNAETPPSPTLAAKQTKQKAKKSGLDKLESRWQEKPLHGQFAARSNNADVDKVATHQWLRSSGLKGETEGFILAAQDQSLFTRNYQANILHNGATPECRFCENGTETIDHLISGCSVLTSNEYKNRHDRVGQYLHWKICQHFSIDTPSNWYEHHPTPVTEGKDVTILWDFPIQTDRTIQANRPDIVIKNKKDNTCLLIDMSVPSDRNVSAKIFEKLSKYKDLAIERGKMWHLGTKTIPVIVGALGLIKKGTDTFLKQIPGEPSLQEVQKIVLNGAAHLLRKALSILLLRIDVRGFVRK

SEQ ID NO: 24888 - protein, 1094 aa, Morbakka virulenta
MDANRLANQRRYIIREKKLTEVEISNIKERVKDDTRENLVEDLGNELQQMDGDVFTIDENIDMHGNLNVLEEEQQKSVGPVPAVEVDEEELANMKIDILEEFSVVQHTKIEERESLFKIRHPHKFKNIFNLGNKALEIICNEINPNLTELNELMYATGKVLQTKCGIKIKKGKSTKKASKPKWQLKIEMEIKTFRREISLVEELQKNENFKSGKARKVLRKYDIKDREQLPSLKEELKQKLQVKAQRLRRFDKRQKFYRQNKIFETDAKKFYREIGKKAITAEDVPSENEVREFWNKIWGNEKGFNENAEWLQNLEESTRDIPEQIWVEITTGEVKKALQKSHKWKSPGIDKVPNFWLDSLSSVHDRIAVIFNKIITEPETIPKWFCLGTTYLLPKSNETRNPKNYRPITCLSTSYKLLTSILTDRTYIHMDEQNIFPIEQKGCKRGSYGCKDQLLINKMILENAHTKHKNLSTAWIDYKKAFDSVPHSWILKTLEMYKVSPAFINFLRVSMTLWETNLTLTHANGTLFSNYMQIKCGIFQGDSLSPLLFCMALIPLSKLLNDTELGYKIMGRKINHLFYMDDLKLYAKDDGDLEGLLKTVKGFSDDIGMEFGLDKCAKASFKRGKLERTENIELDEVTVIQDLEQEGSYKYLGVSEGDGIQHSKMKEKIRKECIRRVRSIMKTELNSKNRISAINSLAVPVVTYSFGIINWNLSDLKRLDTKIRKQLTCNLMHHPKSDVDRLYLPRNTGGRGMIQFELSYKTSIIGLSQYLDLTNDWMLQHVYRHENSKRLHSILKESEKFFRELGVDLEVDNTLNPTVAAKKTKQKAKKTGLDRLESRWQEKPLHGQFAARSNNADVDKEATHQWLRSAGLKGETEGFILAAQDQSLFTRNYQANVLHNGANQECRFCEDKTETIDHLVSGCSVLTPNEYKNRHDRVGQYLHWKICQHFSIKTQASWYEHHPAPVTESKDITILWDFPIQTDRTIQANRPDIVIKNRKENTCLLIDMSVPSDRNVSAKTFEKLAKYKDLEIEVEKMWHLKTKTIPVIVGALGLIKKGTDSFLKQIPGEPSLQEVQKIVLNGTAHLLRRALSI

SEQ ID NO: 24889 - protein, 1163 aa, Morbakka virulenta
MRPSGKDQPEVEKNATRSTSSQNESTQGHQNEVTLNPGPSEPPTSNINTTPQKKKRKKWTREEYVEVIYCFYYALKKPETNNSDDTFKIWCERNSNSDKVEGMDANRLANQRRYIIREKKLTEVEISNIKERVKDDTRENLVEDLGNELQQMDGDVFTIDENIDMHGNLNVLEEEQQKSVGPVPAVEVDEEELANMKIDILEEFSVVQHTKIEERESLFKIRHPHKFKNIFNLGNKALEIICNEINPNLTELNELMYATGKVLQTKCGIKIKKGKSTKKASKPKWQLKIEMEIKTFRREISLVEELQKNENFKSGKARKVLRKYDIKDREQLPSLKEELKQKLQVKAQRLRRFDKRQKFYRQNKIFETDAKKFYREIGKKAITAEDVPSENEVREFWNKIWGNEKGFNENAEWLQNLEESTRDIPEQIWVEITTGEVKKALQKSHKWKSPGIDKVPNFWLDSLSSVHDRIAVIFNKIITEPETIPKWFCLGTTYLLPKSNETRNPKNYRPITCLSTSYKLLTSILTDRTYIHMDEQNIFPIEQKGCKRGSYGCKDQLLINKMILENAHTKHKNLSTAWIDYKKAFDSVPHSWILKTLEMYKVSPAFINFLRVSMTLWETNLTLTHANGTLFSNCMQIKCGIFQGDSLSPLLFCMALIPLSKLLNDTELGYKIMGRKINHLFYMDDLKLYAKDDGDLEGLLKTVKAFSDDIGMEFGLDKCAKASFKRGKLERTENIELDEVTVIQDLEQEGSYKYLGVSEGDGIQHSKMKEKIRKECIRRVRSIMKTELNSKNRISAINSLAVPVVTYSFGIINWNLSDLKRLDTKIRKQLTCNLMHHPKSDVDRLYLPRNTGGRGMIQFELSYKTSIIGLSQYLDLTNDWMLQHVYRHENSKRLHSILKESEKFFRELGVDLEVDNTLNPTVAAKKTKQKAKKTGLDRLESRWQEKPLHGQFAARSNNADVDKEATHQWLRSAGLKGETEGFILAAQDQSLFTRNYQANVLHNGANQECRFCEDKTETIDHLVSGCSVLTPNEYKNRHDRVGQYLHWKICQHFSIKTQASWYEHHPAPVTESKDITILWDFPIQTDRTIQANRPDIVIKNRKENTCLLIDMSVPSDRNVSAKTFEKLAKYKDLEIEVVKVVASKNKDNTCYCGCTRPHQERNR

SEQ ID NO: 24890 - protein, 1077 aa, Morbakka virulenta
MEFRRKRMRLPIEVSSIKDRVKCDTREHLDQEIELERDAENQVGNVIENVNVLEEEGVEAIEPEPVILLNEQELNDMKNDILEEFSSVKHTNIEEREALLKIRHPQRFRNIFNLCNVALESIFNEIDPNLTELNELMYATGKVIQEKCGVKVKKRKSVRKTSKPKWQIRIEKEIERFRREISLLDELQKNEDLKSGKARKVLRKYDIKSRDQLPSLKEELKQKLQVKAQRLRRFDKRQKFYRQNRIFETDTKKFFREIMKDVISVEEVPSEEQVREFWNKIWGNEKGYNESAEWLGDLADSTKDILEQHWEDISTNEIKTALSKSHKWKSPGIDKIPNFWLDTLSSAHSRMAANFNKLLLEPESIPKWFCLGTTYLLPKSGETGNPKNYRPITCLSTSYKLLTSILTERTYIHMDEQNIFPTEQKGCKRGSYGCKDQLLINKMILENTHSKKRNLSTAWIDYKKAFDSVPHSWILKTLDMYKVSPTLINFLRTSMTLWETNLILTHANGTLFSNCMRIKCGIFQGDSLSPLLFCMALFPLSKLLNDTGYGYKIMERKINHLFYMDDLKLYAKDDGELEGLLKTVKAFSDDIGMEFGLDKCAKATFKRGKLDKTQNIDLDEGTVIKELEQEGTYKYLGINEGDGIQHSKMKEKIRKECIRRVRSIMKTELNSKNKITAINSLAVPVVSYSFNIINWNLSDLQKLDTKIRKQLTCNRMHHPKSDVDRLYLPRNKGGRGMIQLELSYKTSTIGLAKYLDLTDDWMLQLVNRHENSKRLHSILKESGKFSEQFGIDLNAETPPSPTLAAKQTKQKAKKSGLDKLESRWQEKPLHGQFAARSNNADVDKVATHQWLRSSGLKGETEGFILAAQDQSLFTRNYQANILHNGATPECRFCENGTETIDHLISGCSVLTSNEYKNRHDRVGQYLHWKICQHFSTDTPSNWYEHHPTPVTEGKDVTILWDFPIQTDRTIQANRPDIVIKNKKDNTCLLIDMSVPSDRNVSAKIFEKLSKYKDLEIEIGKMWHLRTKTIPVIVGALGLIKKGTDTFLKQIPGEPSLQEVQKIVLNGTAHLLRKALSI

SEQ ID NO: 24891 - protein, 1207 aa, Morbakka virulenta
MRTRRKTYRIVRRAGQQGTRPSGRDQPEVEKNATGSNSSQNESTQGHRNEVTLTSGPSEPPSITTSVSLQKKKRIKWSREENAEVIYCFYYALEKPETNNTDDTFRIWCERNTNNDKIENMDANRLANQRRYIMREKKLTEIEVSSIKDRVKCDTREHLDQEIELERDAENQVENVIENVNVLEEGGVEAIEPEPVILLNEQELNDMKNDILEEFSSVKHTNIEDREALLKIRHPQRFRNIFNLCNVALESIFNEIDPNLTELNELMYATGKVIQEKCGVKVKKRKSVRKTSKPKWQIRIEKEIERFRREISLLDELQKNEDLKSGKARKVLRKYDIKSRDQLPSLKEELKQKLQVKAQRLRRFDKRQKFYRQNRIFETDTKKFFREIMKDVISVEEVPSEEQVREFWNKIWGNEKGYNESAEWLGDLADSTKDILEQHWEDISTNEIKTALSKSHKWKSPGIDKIPNFWLDTLSSAHSRMAANFNKLLLEPESIPKWFCLGTTYLLPKSGETGNPKNYRPITCLSTSYKLLTSILTERTYIHMDEQNIFPTEQKGCKRGSYGCKDQLLINKMILENTHSKKRNLSTAWIDYKKAFDSVPHSWILKTLDMYKVSPTLINFLRTSMTLWETNLILTHANGTLFSNCMRIKCGIFQGDSLSPLLFCMALFPLSKLLNDTGYGYKIMERKINHLFYMDDLKLYAKDDGELEGLLKTVKAFSDDIGMEFGLDKCAKATFKRGKLDKTQNIDLDEGTVIKELEQEGTYKYLGINEGDGIQHSKMKEKIRKECIRRVRSIMKTELNSKNKITAINSLAVPVVSYSFNIINWNLSDLQKLDTKIRKQLTCNRMHHPKSDVDRLYLPRNKGGRGMIQLELSYKTSTIGLAKYLDLTDDWMLQLVNRHENSKRLHSILKESGKFSEQFGIDLNAETPPSPTLAAKQTKQKAKKSGLDKLESRWQEKPLHGQFAARSNNADVDKVATHQWLRSSGLKGETEGFILAAQDQSLFTRNYQANILHNGATPECRFCENGTETIDHLISGCSVLTSNEYKNRHDRVGQYLHWKICQHFSIDTPSNWYEHHPSPVTEGKDVTILWDFPIQTDRTIQANRPDIVIKNKKDNTCLLIDMSVPSDRNVSAKIFEKLSKYKDLEIEIGKMWHLRTKTIPVIVGALGLIKKGTDTFLKQIPGEPSLQEVQKIVLNCTAHLLRKALSI

SEQ ID NO: 24892 - protein, 1207 aa, Morbakka virulenta
MRTRRKTYRIVRRAGQQGTRPSGRDQPEVEKNATGSNSSQNESTQGHRNEVTLTSGPSEPPSITTSVSLQKKKRIKWSREENAEVIYCFYYALEKPETNNTDDTFRIWCERNTNNDKIENMDANRLANQRRYIMREKKLTEIEVSSIKDRVKCDTREHLDQEIELERDAENQVENVIENVNVLEEGGVEAIEPEPVILLNEQELNDMKNDILEEFSSVKHTNIEDREALLKIRHPQRFRNIFNLCNVALESIFNEIDPNLTELNELMYATGKVIQEKCGVKVKKRKSVRKTSKPKWQIRIEKEIERFRREISLLDELQKNEDLKSGKARKVLRKYDIKSRDQLPSLKEELKQKLQVKAQRLRRFDKRQKFYRQNRIFETDTKKFFREIMKDVISVEEVPSEEQVREFWNKIWGNEKGYNESAEWLGDLADSTKDILEQHWEDISTNEIKTALSKSHKWKSPGIDKIPNFWLDTLSSAHSRMAANFNKLLLEPESIPKWFCLGTTYLLPKSGETGNPKNYRPITCLSTSYKLLTSILTERTYIHMDEQNIFPTEQKGCKRGSYGCKDQLLINKMILENTHSKKRNLSTAWIDYKKAFDSVPHSWILKTLDMYKVSPTLINFLRTSMTLWETNLILTHANGTLFSNCMRIKCGIFQGDSLSPLLFCMALFPLSKLLNDTGYGYKIMERKINHLFYMDDLKLYAKDDGELEGLLKTVKAFSDDIGMEFGLDKCAKATFKRGKLDKTQNIDLDEGTVIKELEQEGTYKYLGINEGDGIQHSKMKEKIRKECIRRVRSIMKTELNSKNKITAINSLAVPVVSYSFNIINWNLSDLQKLDTKIRKQLTCNRMHHPKSDVDRLYLPRNKGGRGMIQLELSYKTSTIGLAKYLDLTDDWMLQLVNRHENSKRLHSILKESGKFSEQFGIDLNAETPPSPTLAAKQTKQKAKKSGLDKLESRWQEKPLHGQFAARSNNADVDKVATHQWLRSSGLKGETEGFILAAQDQSLFTRNYQANILHNGATPECRFCENGTETIDHLISGCSVLTSNEYKNRHDRVGQYLHWKICQHFSIDTPSNWYEHHPSPVTEGKDVTILWDFPIQTDRTIQANRPDIIIKNKKDNTCLLIDMSVPSDRNVSAKIFEKLSKYKDLEIEIGKMWHLRTKTIPVIVGALGLIKKGTDTFLKQIPGEPSLQEVQKIVLNGTAHLLRKALSI

SEQ ID NO: 24893 - protein, 1207 aa, Morbakka virulenta
MRTRRKTYRIVRRAGQQGTRPSGRDQPEVEKNATGSNSSQNESTQGHRNEVTLTSGPSEPPSITTSVSLQKKKRIKWSREENAEVIYCFYYALEKPETNNTDDTFRIWCERNTNNDKIENMDANRLANQRRYIMREKKLTEIEVSSIKDRVKCDTREHLDQEIELERDAENQVENVIENVNVLEEEGVEAIEPEPVILLNEQELNDMKNDILEEFSSVKHTNIEEREALLKIRHPQRFRNIFNLCNVALESIFNEIDPNLTELNELMYATGKVIQEKCGVKVKKRKSVRKTSKPKWQIRIEKEIERFRREISLLDELQKNEDLKSGKARKVLRKYDIKSRDQLPSLKEELKQKLQVKAQRLRRFDKRQKFYRQNRIFETDTKKFFREIMKDVISVEEVPSEEQVREFWNKIWGNEKGYNESAEWLGDLADSTKDILEQHWEDISTNEIKTALSKSHKWKSPGIDKIPNFWLDTLSSAHSRMAANFNKLLLEPESIPKWFCLGTTYLLPKSGETGNPKNYRPITCLSTSYKLLTSILTERTYIHMDEQNIFPTEQKGCKRGSYGCKDQLLINKMILENTHSKKRNLSTAWIDYKKAFDSVPHSWILKTLDMYKVSPTLINFLRTSMTLWETNLILTHANGTLFSNCMRIKCGIFQGDSLSPLLFCMALFPLSKLLNDTGYGYKIMERKINHLFYMDDLKLYAKDDGELEGLLKTVKAFSDDIGMEFGLDKCAKATFKRGKLDKTQNIDLDEGTVIKELEQEGTYKYLGINEGDGIQHSKMKEKIRKECIRRVRSIMKTELNSKNKITAINSLAVPVVSYSFNIINWNLSDLQKLDTKIRKQLTCNRMHHPKSDVDRLYLPRNKGGRGMIQLELSYKTSTIGLAKYLDLTDDWMLQLVNRHENSKRLHSILKESGKFSEQFGIDLNAETPPSPTLAAKQTKQKAKKSGLDKLESRWQEKPLHGQFAARSNNADVDKVATHQWLRSSGLKGETEGFILAAQDQSLFTRNYQANILHNGATPECRFCENGTETIDHLISGCSVLTSNEYKNRHDRVGQYLHWKICQHFSIDTPSNWYEHHPTPVTEGKDVTILWDFPIQTDRTIQANRPDIVIKNKKDNTCLLIDMSVPSDRNVSAKIFEKLSKYKDLEIEIGKMWHLRTKTIPVIVGALGLIKKGTDTFLKQIPGEPSLQEVQKIVLNGTAHLLRKALSI

SEQ ID NO: 24894 - protein, 1207 aa, Morbakka virulenta
MRTRRKTYRIVRRAGQQGTRPSGRDRPEVEKNATGSNSSQNESTQGHRNEVTLTSGPSEPPSITTSVSLQKKKRIKWSREENAEVIYCFYYALEKPETNNTDDTFRIWCERNTNNDKIENMDANRLANQRRYIMREKKLTEIEVSSIKDRVKCDTREHLDQEIELERDAENQVENVIENVNVLEEGGVEAIEPEPVILLNEQELNDMKNDILEEFSSVKHTNIEEREALLKIRHPQRFRNIFNLCNVALESIFNEIDPNLTELNELMYATGKVIQEKCGVKVKKRKSVRKTSKPKWQIRIEKEIERFRREISLLDELQKNEDLKSGKARKVLRKYDIKSRDQLPSLKEELKQKLQVKAQRLRRFDKRQKFYRQNRIFETDTKKFFREIMKDVISVEEVPSEEQVREFWNKIWGNEKGYNESAEWLGDLADSTKDILEQHWEDISTNEIKTALSKSHKWKSPGIDKIPNFWLDTLSSAHSRMAANFNKLLLEPESIPKWFCLGTTYLLPKSGETGNPKNYRPITCLSTSYKLLTSILTERTYIHMDEQKIFPTEQKGCKRGSYGCKDQLLINKMILENTHSKKRNLSTAWIDYKKAFDSVPHSWILKTLDMYKVSPTLINFLRTSMTLWETNLILTHANGTLFSNCMRIKCGIFQGDSLSPLLFCMALFPLSKLLNDTGYGYKIMERKINHLFYMDDLKLYAKDDGELEGLLKTVKAFSDDIGMEFGLDKCAKATFKRGKLDKTQNIDLDEGTVIKELEQEGTYKYLGINEGDGIQHSKMKEKIRKECIRRVRSIMKTELNSKNKITAINSLAVPVVSYSFNIINWNLSDLQKLDTKIRKQLTCNRMHHPKSDVDRLYLPRNKGGRGMIQLELSYKTSTIGLAKYLDLTDDWMLQLVNRHENSKRLHSILKESGKFSEQFGIDLNAETPPSPTLAAKQTKQKAKKSGLDKLESRWQEKPLHGQFAARSNNADVDKVATHQWLRSSGLKGETEGFILAAQDQSLFTRNYQANILHNGATPECRFCENGTETIDHLISGCSVLTSNEYKNRHDRVGQYLHWKICQHFSIDTPSNWYEHHPSPVTEGKDVTILWDFPIQTDRTIQANRPDIVIKNKKDNTCLLIDMSVPSDRNVSAKIFEKLSKYKDLEIEIGKMWHLRTKTIPVIVGALGLIKKGTDTFLKQIPGEPSLQEVQKIVLNGTAHLLRKALSI

SEQ ID NO: 24895 - protein, 1236 aa, Morbakka virulenta
MSGGVKSVPLSTWTRNTRLLLARNIQLFYQMKTRSKNKSCRIARRADQQGARASVSDQAEDFEKSATRSTSPTSQNPPGHQNGTPPIPGPVVQQASIDNKKKPRLKWTREEYAEVMYCFYYALEKPETNITDNTYTTWCVRNSNSEKMEMLDPNKLANVRRYIVGSKKLTDIEISIIKDRVKNDTRELQVENDEVEGNLDEQELVMSNNADARVENNVDEVAENEVVVDEEEIFSMKMDIIEELSIVKHTDMSEREALLKIRHPHKLKSILSIGNKALEQLCHDINPDLSELNKLIYATGRVLQAKCGIKLRKKTTNKKHSKPKWQVKIEKEIEGFRREISILEELQKDNGKKSGKARKVIRKYKVLSVEQIPTIKEELKQKLQVKAQRLRRLNKRQKFFRQNKIFETDAKKFYREVGKESISVEAIPSDEQVKEFWNNIWGKEKQFNENAEWVRDLEKSTRDIPKQEWENITIEEIQSALKKSHKWKSPGIDQIPNFWLNTLSSAHAKLASNFNSIMIEPHLTPKWFCQGITYLLAKTNETAKPKNYRPITCLSTSYKLLTSILTERTYVHMEEQNIFPKEQKGCRRGSYGCKDQLLINKMILENAHTKHKNLSTAWIDYKKAFDSVPHSWILKSLEMFKISPVLINFLRISMSLWETNLTLHHANGTLISNGMQIQCGIFQGDSLSPLLFCIALIPLSQLLNNTGYGYKIMDKIINHLFYMDDLKLYAHNDGELEGLLKTVKSFSDDIGMEFGLDKCAKATFKRGKLITSENIELDDETVIKQFDQEGTYKYLGVNEGDGVQHSKMKEKIRKECIRRVRSILKTELNSKNKLTAINTLAIPVVAYSFNVIDWNLTELKNIDTKIRKQLTSNRMYHPKSDVDRLYVPRIKGGRGMIQLELSYKTSTVGLLQYLDLSNDWMLRLVRVHENSKRLHSVVKESAKFSHELGIENENIEHVSPTIAAKRRKQKAKKIGQDKLQSRWHEKPLHGQFAARSKQADVDEIATHQWLRSSGLKGETEGFILAAQDQSLFTRNYQACILHNGADPKCRFCEDKVETIDHLVSGCSILTPNEYKNRHDRVGQYLHWRICKHFCIETEANWYEHHPEAVTEGKNVTIMWDFPIHTDRTIQANRPDIVIKDKTNNTCLFIDMSVPSDKNVSAKVFEKLSKYKDLEIEVEKMWHLKTKTLPVVIGALGLIKKGTDKFLQQIPGNPKLEEVQKIVLNSTAHVLRRALSI

SEQ ID NO: 24896 - protein, 1256 aa, Alatina alata
MTWRMSDIKVSWPERGLQLWLAIFLMTIILSLGSKVKMQSSLMKMKTRRKTYRIVLRAGQQGTRPSGQDQPEVEKSATESNSFLNDCPSGHQNGSCPNPGPSVSPPKKNQKEKRKKWTREEHKEVMYCFYYALEKPQTNNTEDTFLTWCRRNSESDKLDGMDANNLANVRRYIMRSKKITDMEIELIKAQVKADTREPDEEETDDNGIENAENEGPDVNENNVQEVEDMIENDRQIRNDVNEGDLDQEEISSMKTDILEELSIVMHTDIAEREPLLKIRQIHKFKKLFKLGNVALRQLCTERDPELTELNQLIYATSKVLQEKSGIKNKQKRNKGKRRGPSKPKWQKQIDKEIEIFRREISILEELQKNGKSKSRKSRQVIRKYQIDNKEQIPVIKEELKQKLQVKAQRLRRFTKRNDFYRQNKIFETDAKKFYREIGKTTIEVKAIPTEHQIKDFWNNIWGNNTGHNESAKWIEDLEMEAVDIPEQQWVDITTDEITKAVRKTHKWKSPGLDQVPNFWLDTLQSVHSELASSLNKLIKEPNLTPTWFCQGTTYLLAKTVETGDSKNYRPITCLSTSYKLLTSALSERTYTHLEEHNIFPIEQKGCKKGSYGCKDQLLINKMLLENAKSKHRHLSTAWIDYKKAFDSVPHSWILRCLELFKISPTFINFFRSSMGMWETNLFLSHSTGILSSPGMKIECGIFQGDSLSPLLFCMALMPLSKLLNQTGYGYKIFERRINHLFYMDDLKLYASNDNELEGLLKTVKAFSDDIGMEFGLSKCAKATFKKGKLEQTKNIVLDDDSVIKELDQEGTYKYLGVNEGDGLQHAKMKEKIRKECLRRVRSILKTELNSKNRITAMNTLALPVVTYSFNIINWNLSELKRLDSKIRKVFTCNRMLHPKSDVDRLYLPRNKGGRGMIQLELSYKTSTIGLYNYLDNTEDWMLQLVNRHENSKRLHSITKESDKYSRELDLEIEVDDLLSPTEIARKTKKKAKHEGLKQLESRWKEKPLHGQFAARANNADVDTQATHQWLRSSGLKAETEGFILAAQDQSLFTRNYQANILHNGADPKCRFCEERIETIDHLVSGCSILTPGEYKNRHDRAGQYIHWKICNHFSIKTQSDWYKHHPEPVTEGKDVTILWDFSIQTDRTIQANRPDIVIKDRKNNQCFLIDMRVPSDRNVAAKTFEKLSKYKDLEIEVEKMWHLKTCTIPVVVDALGLIKEGAKDFVSKIPGNPSLQEIQKIVLNSTAHVLRRVLTV

SEQ ID NO: 24897 - protein, 1227 aa, Hestina assimilis
MNKFIWRTYLIVTNLENDTKTYLEPLYQKFNEKFPHMEASKQRIGCQRRAIINNKLLSQDILDEIRTEVTTYLQSIPSSNTSTMTTVNNKPNSNTRMRWSEDINIAVMKIYYKVTKIETDMTIYRKKLYEQFIEQFPYLAHLTEQRLADQRRAIISNKLLSQAKIEEIKREIELVTCPRSPTPDSISIAHTNATHNDANTLLYIDNDELDTQTHSINKTSFLSPETKRQIQEKFNDTRQSFQHIEPTLRPRIPKLRPSRKLMQTVDFINSSILPEIIKPNDDFNEIQLIIYSAAYTTAIQTGAKINCEAVSKTQIGRIPAWQKRLQKRIDELRVFIGKLTQYIRGNHSYRLTKDVEIIKQKYTVHSQHEENNPDLLHILDTMKQKLNTLANRLRRYKQTTLRKTQNRLFKNNEKGFYRNLTQNAAASQQSNPPTPTADSIQQFWSNIWATAVEHEQKEWMLEYQKELSALPTMEFDKINLDVLKSVIAKTHNWKATGSDKLHNFWYKKFTNIHNILLKHINKFLQDPQSLPKYITEGITYMIPKQLSFTSDPSKYRPITCLQTIYKIITSCLCELISKHSHTNNIIAEEQKGCRKSSQGCKEQLTIDAVLSKQAFKNKRNIYTMYIDYKKAYDSVPHSWLIQVLKIYKIHPTIINFLQNTMQTWNTKLKLFSHDSAIESAAINIKRGIFQGDALSPLWFCLALNPLSNRLNHSNKGFKVKYENTHYTLNHLMYMDDIKIYASNISDIQKLADITHSFSEDIKMQFGIDKCKIQSVVRGKIKENSYKLPDEQEIEPVDQIEGYKYLGYQQSQQIHHSKIKNTLTYKFKSRLHKILYTQLNSCNTIKAINTFAIPILTYSFGVISWSQYDLQRLQRIINVCMTRYRNHHPRACTQRMTLPRTEGGRGIIDIRNLHNKQIATLREYFHTRANSSQLHEAIVKADNRLTPLNLKASSIQHKVITVEDKINAWRQKVLHGRHRADLTNTNVDKVASNAFLNRGELFPETEGFILAIQDQVIDTKNYCKHIIKDQRVKSDLCRRCHCSPETIQHITGACRSLAQTDYKHRHDQVSSIIHQHLAYKYNFISERVAYYKYSPQSVLDSKEIKLYWDRTILTDKTISCNRPDITVHDKKNKKVYLIDIAIPNTHNLQTTHTEKISKYTDLAIEIKKQWRVESVKTVPIVISSTGVIPKSLHNSLKLLDMHPLTFTLLQKATILNTCRIVRKFLSLE

SEQ ID NO: 24898 - protein, 1287 aa, Emmelina monodactyla
MKKSFIKNKTYNLRSRQQNITTKTESMQQTLIGISPEITGSGNNTSIPPYTSPQTSPSNSLFQSPNSSHHSFSSSSSPSSSSSTQTAVVTQEAYALSPVSTTVSQRARMKWSPDLNKFIWRTYLILTKLETNTKNYLEPLHQMFIEKFPHIQASRQRIGCQRRAIVNNKLLSQCVLDEIRLDVASYLQSTNTDISLTTTLNSQSYSRMRWSDETNAAVMKIYYEVTKLETDMTIYRKKLHENFIQDFPHLKHLTEQRIADQRRVIINNKLLSEDKISEIKREVRAKLDHIDIVDSSTETLNISSLRHTTPIPENTNIMSENFEEIPIESEPSMQIMSTLKEELKNQIILTFDETMKMFRNTEPTSRPSIPKLRTSKKLAQIVSFINCEIIPGQVLLNDDLYTTQLILYSAAYTTATLNGAKIIHNQLINKQKQRIPAWQKRLKKRINELRIHIGRLTQYLRGNRSYKLINHIEQIKNKYTIHSQHENLNSDLTHFLDTLKQKLNALASRLRRYKLTTLRKSQNKLFRNNEKKFYRNLVQTSSEQENNTIAPTSSDLQHFWSNIWSNSVDHEQKAWLFEYQDSLDIPNMMFREVSLELLQTVISKTQNWKATGSDKLHNFWYKKFSNIHSTLLKHVNNFIKNPQTLPSYVTEGITYMLPKLSTPSSDPSKFRPITCLQTIYKILTSCLTELINNHTQSNNILAEEQKGCCRFSKGCKEQLTIDSILSKQAHKSKRNIYTMYVDYKKAFDSVPHSWLLEVLKIYKIHPTIITFLHNTMQTWKTRLKLHLNDKEIGTDFIEIKRGIFQGDALSPLWFCLAINPLSYRLNLSEAGFNVKYDTNKFKLNHLLYMDDIKLFASSSNDIHTLADTTHAFSEDIKMEFGIDKCKIQSVLRGKLQDHSYTLPDQQVIEPVDQEDGYKYLGYQQTQMIHHSKIKKTLIQKFKGRLHKILNSQLDSRNTVKAINTFAVPILTYSFGVIPWSQAQLKQIQRNINVLMTKYRKHHPRSCTQRLTLPRTEGGRGIIDVSNLHNKQVHSLRDFFHHRSNTSKLHEAIVKADIKLTPLNLNDRTMALKQNTIKNKKDNWSQKSLHGRHRADLTHSNVDKTASNAWLKRGELFPETEGFITAIQDQVIETKNYRKHIIRDHRLQSDLCRRCHSSPETIQHITGACKALAQTDYKHRHDQVAAIIHQHLAHKHNFIMEKIGYYKYTPQTVLDSADFKIYWDRTIITDKTIAANRPDITYYDKKNKHVYLIDVAIPNTHNLQTTYTAKISKYTDLAIELKKQWRVD

SEQ ID NO: 24899 - protein, 1332 aa, Emmelina monodactyla
MFKKNYNLRSRRLQFATSTENLDTLHGNTPEISGQGNNISVPSSSSANYLGSSNPSPTISLFSSTYSSPNSFTSPSSSSTTTESIVVPQEAIAFDSVATYTGKRARKKWSNEMNKFIWRTYLIVTQLESNTKTYLDPLHQLFVEKFPHMEATKQRVGCQRRAIVYNKLLPQNTLDDIRLEVASYLQTADAEMTLQNTQTQASSRMRWSQEINVAILKIYYEITNMETDMTAYRKKIRDRLIQDFPHLTHLSEQRIADQRRTIIHNRLLPQEKIEEIKAEIRNKLQTTTTIPTDISHHDTDDTLQIIHSQPLDFWNINESTNSIETQNIVDNEHSRLTVEEERHVTELFETTLETFKLTDPTQRPSIPKLRYSKLLNRTINFINNNLIQKSLQNDDNFNTLQLVLYCAAYTTATHLGAKINTYTNNLLPSDRIPAWQKRLQKRIEELRVHIGRLTQYIRGNHSNRLTKHVELIKRRYLTHSRHETNNSDLVHFLDTLKQKLNALANRLRRYKQTSLRKSQNKSFYNNEKTFYRKLSQNNQDTQTDESELPTVDNLHTFWANLWENNVKHDSKPWMQEYEQKHCNIPEMAFQEISLDLLQSVIAKTHSWKATGSDRLHNFWFKKLTNIHPLLLKHVNNFIQNPSTVPQYVMEGITYMLPKGNLPTTDPSKFRPITCLQTVYKIITSCISELISRHSNTHNLLSEEQKGCRKACYGCKEQLIIDTVASKQAFKNKRNIFTMYVDYKKAFDSVPHSWLIKILNLYKINPVIVNFLNIVMQSWRTKLKLHNQKNIIETEFINIKRGIFQGDALSPLWFCLALNPLSHLLNTSSKGYKITHDQEHYTLSHLMYMDDIKLFGSTLDEINTLAEITESFSDSIKMEFGVDKCKIQSVHRGKIQQNTYIMNDQQQIDPVDPSEGYKYLGYQQSQLIHHKEIKAKLIYNFESRLHKILNSQLNSRNTVKAINSFAIPILTYSFGVIQWSNSDLKKLQRTINVFMTKYRKHHPRACTQRLTLPRVEGGRGLIHLMNLHHTQITKLRKYFYLRSSTTSLHKATVSADNNLTPLNLKDTSLQKELVTTQNRIDLWRQKSLHGRHRADLTNPIVDKVASNAWLRKGQLFPETEGFLIAIQDQVIDTKNYCKHIICRRCHSSSETIQHITSACRSLAQTDYRHRHDQVGSIIHQHLAFKCQLIDQKTAYYKYIPQIILDSENFKLYWDRTIITDKTISCNRPDITLHDKKNKIVYLIDIAIPNTHNLQNTHTEKLSKYTDLAIEIKKQWRVDVVKTVPIVISSTGVIPKTLHNCLKILDMHPNSYMFLQKATVLNTCRIVRKFFTLE

SEQ ID NO: 24900 - protein, 919 aa, Emmelina monodactyla
MPSSRAIYDRIPAWQKRLQKRIAELRVHIGRLTQYIKGNHSYRLTQHVETIKRKCLIHSKHENDNSDLSQFLDTLKQKLNALASRLRRYKLTTLRKMQNKLFYTNEKAFYRQLTQEKQNCQINRNLPSTDSLTQFWGGIWENAVEHDRTPWLHEYEGSLSNVPVMEFEEISLDLLQSVIAKTHNWKATGSDNLHNYWYKKYTSIHSSLLKHINNFIKDPSTLPPYVTEGITYMLPKEMSTTSDPSKYRPITCLQTIYKIITSCLAELIYRHSNTYNFLAEEQKGCRKATYGCKEQLTVDAVVSKQAFKNKRNIYTMYVDYKKAFDSVPHSWLILILNIYKVNPTIVNFLKLAMQSWKTKLKLHYDNDTIETDYINIKRGIFQGDALSPLWFCLALNPLSYLLNKSQIGFKLSHDKEHYTLSHLMYMDDIKLFGSTLSELNYLTETTESFSNSIKMEFGIDKCRMQSVHRGKIEQNTYTLSDNQQIDPVDPTEGYKYLGYQQSQQIHNSVIKTTLINKFQTRLHKILNSQLNARNTVKAINTFAIPILTYSFGVIHWSKSDLKKLQRTINVFMTKYRKHHPRACTQRMTLPRHEGGRGLIHLMNLYNKQVEKLRSYFLHRSNTTELHKAIVKSDNNLTPLNLNKNNILNNQITFQNRIDLWSQKVLHGRHRADLTNPNVDKVASNAWLKNGELFPETEGFLIAIQDQVIDTRNYCKHVIKDFRIQSDLCRRCHNSSETIQHITSACRSLAQTDYKHRHDQVGSIIHQHLAYKFKFINQKTAYYKYKPQIVLDSPDYKLYWDRTIITDKTISCNRPDITLHDKKNKKVFLIDIAIPNTHNLQSTHTEKLSKYTDLATEIKKQWRVDSVLTIPIVISSTGVIPKTLHNSLKILEMHPKYYMTLQKATILNTCRIVRKFFTLE

SEQ ID NO: 24901 - protein, 1341 aa, Emmelina monodactyla
MNKNKKIYNLRSRRLQSATPTESVQYILEEDFPEITGNGNNISVPSSPTDSLRSLFQSPCSSHHSYSLLASPLSSTTTVSVDVPQEALAFDSVATTTPKRARKKWSEDMNRFIYRTYLIVTNLETNTKTYLDPLHQLFVEKFPHMQATKQRVGCQRRAIVNNKLLSQKILDDIRAEVTTYLQTLSTDIVMTPLQALTQANTRMRWSEEINIAILKIYFEVTVMETDMTAYRKKVYDRFIQNFPNLTHLSEQRIADQRRAIVHNKLLSQNKIDEIKQEIQLKLLQNPSFSNESNLNQTDTLPSTIITEPINGSALNDYSTETHELNLTQSLIDNTHSLPSEREKQIAATFEYALRFFKLSDPTKRPAIPKLRNSKQLAKIVNFIDRNLIPKKIRQEDDFDSTQLILYCAAYTATTEIGVKIKTMPNSRAIYDRIPAWQKRLQKRIAELRVHIGRLTQYIKGNHSYKLTQHVETIKRKYLIHSKHENDNSDLSQFLDTLKQKLNALASRLRRYKQTTLRKMQNKLFYTNEKAFYRQLTQEKQNCQINRNLPSTDSLTQFWGGIWENAVEHDRTPWLNEYEGSLSNVSVMEFEEISLDLLQSVIAKTHNWKATGSDNLHNYWYKKYTSIHSSLLKHINNFIKDPSTLPPYVTEGITYMLPKEMSTTSDPSKYRPITCLQTIYKIITSCLAELIYRHSNTYNFLAEEQKGCRKATYGCKEQLTVDAVVSKQAFKNKRNIYTMYVDYKKAFDSVPHSWLILILNIYKVNPTIVNFLKLAMQSWKTKLKLHYDNDTIETDYINIKRGIFQGDALSPLWFCLALNPLSYLLNKSQKGFKLSHDKEHYTLSHLMYMDDIKLFGSTLSELNYLTETTESFSNSIKMEFGIDKCRMQSVHRGKIEQNTYTLSDNQQIDPVDPTEGYKYLGYQQSQQIHNSVIKNTLINKFQTRLHKILNSQLNARNTVKAINTFAIPILTYSFGVIYWSKSDLKKLQRTINVFMTKYRKHHPRACTQRMTLPRHEGGRGLIHLMNLHNKQVEKLRSYFLHRSNTTELHKAIVKSDNNLTPLNLNKNNILNNQITFQNRIDLWSQKVLHGRHRADLTNPNVDKVASNAWLKNGELFPETEGFLIAIQDQVIDTKNYCKHVIKDFRIQSDLCRRCHNSSETIQHITSACRSLAQTDYKHRHDQVGSIIHQHLAYKFKFINQKTAYYKYKPQIVLDSPDYKLYWDRTIITDKTISCNRPDITLHDKKNKKVFLIDIAIPNTHNLQSTHTEKLSKYTDLATEIKKQWRVDSVVTIPIVISSTGVIPKTLHNSLKILEMHPKYYMTLQKATILNTCRIVRKFFTLE

SEQ ID NO: 24902 - protein, 1342 aa, Emmelina monodactyla
MFKKNYNLRSRRLQFATSTENLDTLHGNTPEITGQGNNISVPSSSSSANYLGSSNPSPTISLFSSTYSSPNSFTSPSSSSTTTESIVVPQEAIAFDSVATNTGKRARKKWSNEMNKFIWRTYLIVTQLESNTKTYLDPLHQLFVEKFPHMEATKQRVGCQRRAIVYNKLLPQNTLDDIRLEVASYLQTADAEMTLQNTQTQASSRMRWSQEINIAILKIYYEITNMETDMTAYRKKIRDRLIQDFPHLTHLSEQRIADQRRTIIHNRLLPQEKIEEIKAEIRNKLQTTTTIPTDTSHQDTDDTLQIIDSQPLDFLNINESINSIETQNIVDNEHSRLTVEEERHVTELFETTLETFKLTDPTQRPSIPKLRYSKLLNRTINFINNNLIQKSLQNDDNFNTLQLVLYCAAYTTATHLGAKINTYTNNLLPSDRIPAWQKRLQKRIEELRVHIGRLTQYIRGNHSNRLTKHVEVIKRRYLTHSRHETNNSDLVHFLDTLKQKLNALANRLRRYKQTSLRKSQNKSFYNNEKTFYRKLSQNNQDTQTDESELPTVDNLHTFWANLWENNVKHDSKPWMQEYEQKHCNIPEMAFQEISLDLLQSVIAKTHSWKATGSDKLHNFWFKKLTNIHPLLLKHVNNFIQNPSTVPQYVMEGITYMLPKGNLPTTDPSKFRPITCLQTVYKIITSCISELISRHSNTHNLLSEEQKGCRKACYGCKEQLIIDTVASKQAFKNKRNIFTMYVDYKKAFDSVPHSWLIKILNLYKINPVIVNFLNIVMQSWRTKLKLHNQKNIIETEFINIKRGIFQGDALSPLWFCLALNPLSHLLNTSSKGYKITHDQEHYTLSHLMYMDDIKLFGSTLDEINTLAEITESFSDSIKMEFGVDKCKIQSVHRGKTQQNTYIMKDQQQIDPVDPSEGYKYLGYQQSQLIHHKEIKAKLIYKFESRLHKILNSQLNSRNTVKAINSFAIPILTYSFGVIQWSNSDLKKLQRTINVFMTKYRKHHPRACTQRLTLPRVEGGRGLIHLMNLHHTQITKLRKYFYLRSSTTSLHKATVTADNNLTPLNLKDTSLQKELVTTQNRIDLWRQKSLHGRHRADLTNPIVDKVASNAWLRKGQLFPETEGFLIAIQDQVIDTKNYCKHIIKDHRVQSDLCRRCHSSSETIQHITSACRSLAQTDYRHRHDQVGSIIHQHLAFKCQLIDQKTAYYKYIPQIILDSENFKLYWDRTIITDKTISCNRPDITLHDKKNKIVYLIDIAIPNTHNLQNTHTEKLSKYTDLAIEIKKQWRVDVVKTVPIVISSTGVIPKTLHNSLKILDMHPNSYMFLQKATVLNTCRIVRKFFTLE

SEQ ID NO: 24903 - protein, 1341 aa, Emmelina monodactyla
MFKKNYNLRSRRLQFATSTENLDTLHGNTPEISGQGNNISVPSSSSANYLGSSNPSPTISLFSSTYSSPNSFTSPSSSSTTTESIVVPQEAIAFDSVATYTGKRARKKWSNEMNKFIWRTYLIVTQLESNTKTYLDPLHQLFVEKFPHMEATKQRVGCQRRAIVYNKLLPQNTLDDIRLEVASYLQTADAEMTLQNTQTQASSRMRWSQEINVAILKIYYEITNMETDMTAYRKKIRDRLIQDFPHLTHLSEQRIADQRRTIIHNRLLPQEKIEEIKAEIRNKLQTTTTIPTDISHHDTDDTLQIIDSQPLDFLNINESTNSIETQNIVDNEHSRLTVEEERHVTKLFETTLETFKLTDPTQRPSIPKLRYSKLLNRTINFINNNLIQKSLQNDDNFNTLQLVIYCAAYTTATHLGAKINTYTNNLLPSDRIPAWQKRLQKRIEELRVHIGRLTQYIRGNHSNRLTKHVELIKRRYLTHSRHETNNSDLVHFLDTLKQKLNALANRLRRYKQTSLRKSQNKSFYNNEKTFYRKLSQNNQDTQTDESELPTVDNLHTFWANLWENNVKHDSKPWMQEYKQKHCNIPEMAFQEISLDLLQSVIAKTHSWKATGSDRLHNFWFKKLTNIHPLLLKHVNNFIQNPSTVPQYVMEGITYMLPKGNLPTTDPSKFRPITCLQTVYKIITSCISELISRHSNTHNLLSEEQKGCRKACYGCKEQLIIDTVASKQAFKNKRNIFTMYVDYKKAFDSVPHSWLIKILNLYKINPVIVNFLNIVMQSWRTKLKLHNQKNIIETEFINIKRGIFQGDALSPLWFCLALNPLSHLLNTSSKGYKITHDQEHYTLSHLMYMDDIKLFGSTLDEINTLAEITESFSDSIKMEFGVDKCKIQSVHRGKIQQNTYIMNDQQQIDPVDPSEGYKYLGYQQSQLIHHKEIKAKLIYKFESRLHKILNSQLNSRNTVKAMNSFAIPILTYSFGVIQWSNSDLKKLQRTINVFMTKYRKHHPRACTQRLTLLRVEGGRGLIHLMNLHHTQITKLRKYFYLRSSTTSLHKATVSADNNLTPLNLKDTSLQKELVTTQNRIDLWRQKSLHGRHRADLTNPIVDKVTSNAWLRKGQLFPETEGFLIAIQDQVIDTKNYCKHIIKDHRVQSDLCRRCHSSSETIQHITSACRSLAQTDYRHRHDQVGSIIHQHLAFKCQLIDQKTAYYKYIPQIILDSENFKLYWDRTIITDKTISCNRPDITLHDKKNKIVYLIDIAIPNTHNLQNTHTEKLSKYTDLAIEIKKQWRVDVVKTVPIVISSTGVIPKTLHNSLKILDMHPNSYMFLQKATVLNTCRIVRKFFTLE

SEQ ID NO: 24904 - protein, 1229 aa, Emmelina monodactyla
MNKFIWRTYLIVTQLESNTNTYLDPLHQLFVEKFPHMEATKQRVGCQRRAIVYNKLLPQNTLDDIRLEVASYLQTADAEMTLQNTQTQASSRMRWSQEINVAILKIYYEITNMEADMTAYRKKIRDRLIQDFPHLTHLSEQRIADQRRTIIHNRLLPQEKIEEIKAEIRNKLQTTTTIPTDTSHQDTDDTLQIIDSQPLDFLNINESINSIETQNIVDNEHSRLTVEEERHVTELFETTLETFKLTDPTQRPSIPKLRYSKLLNRTINFMNNNLIQKSLQNDDNFNTLQLVLYCAAYTTATHLGAKINTYTNNLLPSDRIPAWQKRLQKRIEELRVHIGRLTQYIRGNHSNRLTKHVELIKRRYLTHSRHETNNSDLVHFLDTLKQKLNALANRLRRYKQTSLRKSQNKSFYNNEKTFYRKLSQNNQDTQTDESELPTVDNLHTFWANLWENNVKHDSKPWMQEYEQKHCNIPEMAFQEISLDLLQSVIAKTHSWKATGSDKLHNFWFKKLTNIHPLLLKHVNNFIQNPSTVPQYVMEGITYMLPKGNLPTTDPSKFRPITCLQTVYKIITSCISELISRHSNTHNLFSEEQKGCRKACYGCKEQLIIDTVASKQAFKNKRNIFTMYVDYKKAFDSVPHSWLIKILNLYKINPVIVNFLNIVMQSWRTKLKLHNQKNIIETEFINIKRGIFQGDALSPLWFCLALNPLSHLLNTSSKGYKITHDQEHYTLSHLMYMDDIKLFGSTLDEINTLAEITESFSDSIKMEFGVDKCKIQSVHRGKTQQNTYIMKDQQQIDPVDPSEGYKYLGYQQSQLIHHKEIKAKLIYKFESRLHKILNSQLNSRNTVKAINSFAIPILTYSFGVIQWSNSDLKKLQRTINVFMTKYRKHHPRACTQRLTLPRVEGGRGLIHLMNLHHTQITKLRKYFYLRSSTTSLHKATVTADNNLTPLNLKDTSLQKELVTTQNRIDLWRQKSLHGRHRADLTNPIVDKVASNAWLRKGQLFPETEGFLIAIQDQVIDTKNYCKHIIKNHRVQSDLCRRCHSSSETIQHITSACRSLAQTDYRHRHDQVGSIIHQHLAFKCQLIDQKTAYYKYIPQIILDSENFKLYWDRTIITDKTISCNRPDITLHDKKNKIVYLIDIAIPNTHNLQNTHTEKLSKYTDLAIEIKKQWRVDVVKTVPIVISSTGVIPKTLHNSLKILDMHPNSYMFLQKATVLNTCRIVRKFFTLE

SEQ ID NO: 24905 - protein, 1340 aa, Emmelina monodactyla
MNKNKKIYNLRSRRLQSATPTESVQYILEEDFPEITGNGNNISVPSSSADSLPSLFQSPCSSHHSYSLLASPLSSTTTVSVDVPQEALAFDSVATTTPKRARKKWSEDMNKFIYRTYLIVTNLETNTKTYLDPLHQLFDEKFPHMQATKQRVGCQRRAIVNNKLLSQKILDDIRAEVTTYLQTLSTDIVMTPLQALTQANTRMRWSEEINIAILKIYFEVTVMETDMTAYRKKVYDRFIQNFPNLTHLSEQRIADQRRAIVHNKLLSQNKIDEIKQEIQFKLLQNPSFSNENQTDTLPSSSTTIIEPINGSAINDYSTETHELNLTQNLIDNTHSLPSEREKQITATFEYALRFFKLSDPTKRPAIPKLRNSKQLAKIVNFIDRNLIPKKIRQEDDFDSTQLILYCAAYTAATEIGVKIKTMPSSRAIYDRIPAWQKRLQKRIAELRVHIGRLTQYIKGNHSYRLTQHVETIKRKYLIHSKHENDNSDLSQFLDTLKQKLNALASRLRRYKLTTLRKMQNKLFYTNEKAFYRQLTQEKQNCQINRNLPSTDSLTQFWGGIWENAVEHDRTPWLHEYEGSLSNVPVMEFEEISLDLLQSVIAKTHNWKATGSDNLHNYWYKKYTSIHSSLLKHINNFIKDPSTLPPYVTEGITYMLPKEMSTTSDPSKYRPITCLQTIYKIITSCLAELIYRHSNTYNFLAEEQKGCRKATYGCKEQLTVDAVVSKQAFKNKRNIYTMYVDYKKAFDSVPHSWLILILNIYKVNPTIVNFLKLAMQSWKTKLKLHYDNDTIETDYINIKRGIFQGDALSPLWFCLALNPLSYLLNKSQKGFKLSHDKEHYTLSHLMYMDDIKLFGSTLSELNYLTETTESFSNSIKMEFGIDKCRMQSVHRGKIEQNTYTLSDNQQIDPVDPTEGYKYLGYQQSQQIHNSVIKTTLINKFQTRLHKILNSQLNARNTVKAINTFAIPILTYSFGVIHWSKSDLKKLQRTINVFMTKYRKHHPRACTQRMTLPRHEGGRGLIHLMNLYNKQVEKLRSYFLHRSNTTELHKAIVKSDNNLTPLNLNKNNILNNQITFQNRIDLWSQKVLHGRHRADLTNPNVDKVASNAWLKNGELFPETEGFLIAIQDQVIDTKNYCKHVIKDFRIQSDLCRRCHNSSETIQHITSACRSLAQTDYKHRHDQVGSIIHQHLAYKFKFINQKTAYYKYKPQIVLDSPDYKLYWDRTIITDKTISCNRPDITLHDKKNKKVFLIDIAIPNTHNLQSTHTEKLSKYTDLATEIKKQWRVDSVLTIPIVISSTGVIPKTLHNSLKILEMHPKYYMTLQKATILNTCRIVRKFFTLE

SEQ ID NO: 24906 - protein, 1341 aa, Emmelina monodactyla
MFKKNYNLRSRRLQFATSTENLDTLHGNTPEISGQGNNISVPSSSSANYLGSSNPSPTISLFSSTYSSPNSFTSPSSSSTTTESIVVPQEAIAFDSVATYTGKRVRKKWSNEMNKFIWRTYLIVTQLESNTKTYLDPLHQLFVEKFPHMEATKQRVGCQRRAIVYNKLLPQNTLDDIRLEVASYLQTADAEMTLQNTQTQASSRMRWSQEINVAILKIYYEITNMETDMTAYRKKIRERLIQDFPHLTHLSEQRIADQRRTIIHNRLLPQEKIEEIKAEIRNKLQTTTTIPTDISHHDTDDTLQIIDSQPLDFLNINESTNSIETQNIVDNEHSRLTVEEERHVTELFETTLETFKLTDPTQRPSIPKLRYSKLLNRTINFINNNLIQKSLQNDDNFNTLQLVLYCAAYTTATHLGAKINTYTNNLLPSDRIPAWQKRLQKRIEELRVHIGRLTQYIRGNHSNRLTKHVELIKRRYLTHSRHETNNSDLVHFLDTLKQKLNALANRLRRYKQTSLRKSQNKSFYNNEKSFYRKLSQNNQDTQTDESELPTVDNLHTFWANLWENNVKHDSKPWMQEYEQKHCNIPEMAFQEISLDLLQSVIAKTHSWKATGSDRLHNFWFKKLTNIHPLLLKHVNNFIQNPSTVPQYVMEGITYMLPKGNLPTTDPSKFRPITCLQTVYKIITSCISELISRHSNTHNLLSEEQKGCRKACYGCKEQLIIDTVASKQAFKNKRNIFTMYVDYKKAFDSVPHSWLIKILNFYKINPVIINFLNIVMQSWRTKLKLHNQKNIIETEFINIKRGIFQGDALSPLWFCLALNPLSHLLNTSSKGYKITHDQEHYTLSHLMYMDDIKLFGSTLDEINTLAEITESFSDSIKMEFGVDKCKIQSVHRGKIQQNTYIMNDQQQIDPVDPSEGYKYLGYQQSQLIHHKEIKAKLIYKFESRLHKILNSQLNSRNTVKAINSFAIPILTYSFGVIQWSNSDLKNLQRTINVFMTKYRKHHPRACTQRLTLPRVEGGRGLIHLMNLHHTQITKLRKYFYLRSSTTSLHKATVSADNNLTPLNLKDTSLQKELVTTQNRIDLWRQKSLHGRHRADLTNPIVDKVASNAWLRKGQLFPETEGFLIAIQDQVIDTKNYCKHIIKDHRVQSDLCRRCHSSSETIQHITSACRSLAQTDYRHRHDQVGSIIHQHLAFKCQLIDQKTAYYKYIPQIILDSENFKLYWDRTIITDKTISCNRPDITLHDKKNKIVYLIDIAIPNTHNLQNTHTEKLSKYTDLAIEIKKQWRVDVVKTVPIVISSTGVIPKTLHNSLKILDMHPNSYMFLQKATVLNTCRIVRKFFTLE
